United States Patent Application Publication US 2024/0398993 A1 - sequence listing, part 21

SEQ ID NO: 91286 - protein, 316 aa, Homo sapiens
MSVKEGAQRKWAALKEKLGPQDSDPTEANLESADPELCIRLLQMPSVVNYSGLRKRLEGSDGGWMVQFLEQSGLDLLLEALARLSGRGVARISDALLQLTCVSCVRAVMNSRQGIEYILSNQGYVRQLSQALDTSNVMVKKQVFELLAALCIYSPEGHVLTLDALDHYKTVCSQQYRFSIVMNELSGSDNVPYVVTLLSVINAVILGPEDLRARTQLRNEFIGLQLLDVLARLRDLEDADLLIQLEAFEEAKAEDEEELLRVSGGVDMSSHQEVFASLFHKPRNAPWRKWLSGSCLSRGDPDRAPWSRPIKASRPT

SEQ ID NO: 91287 - protein, 761 aa, Homo sapiens
MAGWIQAQQLQGDALRQMQVLYGQHFPIEVRHYLAQWIESQPWDAIDLDNPQDRAQATQLLEGLVQELQKKAEHQVGEDGFLLKIKLGHYATQLQKTYDRCPLELVRCIRHILYNEQRLVREANNCSSPAGILVDAMSQKHLQINQTFEELRLVTQDTENELKKLQQTQEYFIIQYQESLRIQAQFAQLAQLSPQERLSRETALQQKQVSLEAWLQREAQTLQQYRVELAEKHQKTLQLLRKQQTIILDDELIQWKRRQQLAGNGGPPEGSLDVLQSWCEKLAEIIWQNRQQIRRAEHLCQQLPIPGPVEEMLAEVNATITDIISALVTSTFIIEKQPPQVLKTQTKFAATVRLLVGGKLNVHMNPPQVKATIISEQQAKSLLKNENTRNECSGEILNNCCVMEYHQATGTLSAHFRNMSLKRIKRADRRGAESVTEEKFTVLFESQFSVGSNELVFQVKTLSLPVVVIVHGSQDHNATATVLWDNAFAEPGRVPFAVPDKVLWPQLCEALNMKFKAEVQSNRGLTKENLVFLAQKLFNNSSSHLEDYSGLSVSWSQFNRENLPGWNYTFWQWFDGVMEVLKKHHKPHWNDGAILGFVNKQQAHDLLINKPDGTFLLRFSDSEIGGITIAWKFDSPERNLWNLKPFTTRDFSIRSLADRLGDLSYLIYVFPDRPKDEVFSKYYTPVLALTMYSIRMENSTWMRPWMWPGTWRNSYADQWTVLTPASRPLPVFSPLPEAPSHECLNPTLLFGNNMQCEAVVL

SEQ ID NO: 91288 - protein, 1266 aa, Homo sapiens [sequence omitted]

SEQ ID NO: 91289 - protein, 47 aa, Homo sapiens
MALTLFDTDEYRPPVWKSYCGKQTKVLWKRVSWHDLQRSSRPALDCG

SEQ ID NO: 91290 - protein, 156 aa, Homo sapiens
  MOD_RES (1)..(1): Any amino acid
XFARIFGYPVGIVGNNGVLFSESAKKGTHFVQLCCQRNIPLLFLQNITGFMVGREYEAEGIAKDGAKMVAAVACAQVPKITLIIGGSYGAGNYGMCGRAYSPRFLYIWPNARISVMGGEQAANVLATITKDQRAREGKQIVVKDTLSGRAPSSIEN

SEQ ID NO: 91291 - protein, 557 aa, Homo sapiens
MEPEPVEDCVQSTLAALYPPFEATAPTLLGQVFQVVERTYREDALRYTLDFLVPAKHLLAKVQQEACAQYSGFLFFHEGWPLCLHEQVVVQLAALPWQLLRPGDFYLQVVPSAAQAPRLALKCLAPGGGRVQEVPVPNEACAYLFTPEWLQGINKDRPTGRLSTCLLSAPSGIQRLPWAELICPRFVHKEGLMVGHQPSTLPPELPSGPPGLPSPPLPEEALGTRSPGDGHNAPVEGPEGEYVELLEVTLPVRGSPTDAEGSPGLSRVRTVPTRKGAGGKGRHRRHRAWMHQKGLGPRGQDGARPPGEGSSTGASPESPPGAEAVPEAAVLEVSEPPAEAVGEASGSCPLRPGELRGGGGGGQGAEGPPGTPRRTGKGNRRKKRAAGRGALSRGGDSAPLSPGDKEDASHQEALGNLPSPSEHKLPECHLVKEEYEGSGKPESEPKELKTAGEKEPQLSEACGPTEEGAGERELEGPGLLCMAGHTGPEGPLSDTPTPPLETVQEGKGDNIPEEALAVSVSDHPDVAWDLMASGFLILTGQWASVGEGKQDWEREAI

SEQ ID NO: 91292 - protein, 219 aa, Homo sapiens
MPSDKTIGGGDDSFNTFFSETGAGKHVPRAVFVDLEPTVIDEVRTGTYRQLFHPEQLITGKEDAANNYARGHYTIGKEIIDLVLDRIRKLADQCTGLQGFLVFHSFGGGTGSGFTSLLMERLSVDYGKKSKLEFSIYPAPQVSTAVVEPYNSILTTHTTLEHSDCAFMVDNEAIYDICRRNLDIERPTYTNLNRLIGQIVSSITASLRFDGALNVDLTE

SEQ ID NO: 91293 - protein, 273 aa, Homo sapiens
MATEHPEPPKAELQLPPPPPPGHYGAWAAQELQAKLAEIGAPIQGNREELVERLQSYTRQTGIVLNRPVLRGEDGDKAAPPPMSAQLPGIPMPPPPLGLPPLQPPPPPPPPPPGLGLGFPMAHPPNLGPPPPLRVGEPVALSEEERLKLAQQQAALLMQQEERAKQGDHSLKEHELLEQQKRAAVLLEQERQQEIAKMGTPVPRPPQDMGQIGVRTPLGPRVAAPVGPVGPTPTVLPMGAPVPRPRGPPPPPGDENREMDDPSVGPKIPQALE

SEQ ID NO: 91294 - protein, 66 aa, Homo sapiens
MTLVTAGGAWTGPGCWHEVKDEESSSEQSISIAVSHVNTSKAGLPAQTALPCDICGPILKDILHLD

SEQ ID NO: 91295 - protein, 1638 aa, Homo sapiens
  MOD_RES (1)..(1): Any amino acid
XIDQLKSSLNKLETEGTLRICAVMGCIMTEALENKSVHFPLRSKYNRLTKVARFLQENPSCLLCNILHHYLHQANYSIIDDATMSDGLPALVTLKKGLVALARQWMKFIVVTPAFKGVSLHRPAQPLKPQIAMDHEHEDGLGLDNGGGLQSDTSADGAEFEFDAATVSEHTMLLEGTANRPPPGSSGPVTGAEIMRKLSKTHTHSDSALKIKGIHPYHSLSYTSGDTATDSPVHVGRAGMPVKDSPRKESLLSYLTGSFPSLHNLLEGTPQRSSAAVKSSSLTRTGNTVATDMLSEHPLLSEPSSVSFYNWMSNAVGNRGSVLQESPVTKSGHNSLPTGVAPNLPTIPSASDFNTVLSSDQNTLDGTHSQHSTSQDDVAGVEEANQGFPAVQLADAQVVFKPLLSHTGIQSQDTMPFCYRMYFGEHLSFSGTLDCLRADIVDSDTAKERKGKRARRQGHVNLPPLEFKPALMLGTFSISAVVMEKSVCTPQNSTSALSFHDLSKRYYNTFHCNFTISCQSISQHVDMALVRLIHQFSTMIDDIKATQTDIKLSRYTAGSASPTPTFKTRKHRDFRSSDFSRSSRGSLNGGNRVNNAKNKRTNNENNKKESRNKNSLGRSERRTSKVSRKGSKDVVDHMTIHMDDSDSITVSEQSEPSAECWQNMYKLLNFYSLISDPTGILEKSSETFGPAGVRSPTEPTCKVVFENEQDNSSLTKTQRKRSLVTSEPQHVTLIVFGIGMVNRTHLEADIGGLTMESELKRIHGSFTLKEKMKDVLHQKMTETCATAHIGGVNIVLLEGITPNIQLEDFPTSPTSTAKQEFLTVVKCSIAKSQALYSAQRGLKTNNAAVFKVGAISINIPQHPATLHSMMVRSSHQLSKQISDLIRQPSTAPQPVKEDIATPLPSEKTPTSVNQTPVETNEFPQLPEGLEKKPIVLKFSAMLDGIAIGAALLPSLKAEYKMGRMRSHGMTGAQTRFTFELPNHRLRFTSKVSATDMSTIPPSASLNLPPVTMSGKYIMEEHDSYSDQVWSIDELPSKQGYYLQGNYLRCVAEVGSFEHNLTTDLLNHLVFVQKVFMKEVNEVIQKVSGGEQPIPLWNEHDGTADGDKPKILLYSLNLQFKGIQVTATTPSMRAVRFETGLIELELSNRLQTKASPGSSSYLKLFGKCQVDLNLALGQIVKHQVYEEAGSDFHQVAYFKTRIGLRNALREEISGSSDREAVLITLNRPIVYAQPVAFDRAVLFWLNYKAAYDNWNEQRMALHKDIHMATKEVVDMLPGIQQTSAQAFGTLFLQLTVNDLGICLPITNTAQSNHTGDLDTGSALVLTIESTLITACSSESLVSKGHFKNFCIRFADGFETSWDDWKPEIHGDLVMNACVVPDGTYEVCSRTTGQAAAESSSAGTWTLNVLWKMCGIDVHMDPNIGKRLNALGNTLTTLTGEEDIDDIADLNSVNIADLSDEDEVDTMSPTIHTEATDYRRQAASASQPGELRGRKIMKRIVDIRELNEQAKVIDDLKKLGASEGTINQEIQRYQQLESVAVNDIRRDVRKKLRRSSMRAASLKDKWGLSYKPSYSRSKSISASGRPPLKRMERASSRVGETEELPEIRVDAASPGPRVTFNIQDTIAEIRRKKISFKVVF

SEQ ID NO: 91296 - protein, 154 aa, Homo sapiens
MFPEPPTPGPPSPDTPPDSSRISHGPVPPWALATIVLVSGLLIFSCCFCLYRKSCRRRTGKKSQAQAQVHLQEVKGLGQSYIDKVQPEVEELEPAPSGPGQQVADKHELGRLQYSLDYDFQSGQLLVGILQAMGLAALDLGGSSDPYVRVYLLP

SEQ ID NO: 91297 - protein, 197 aa, Homo sapiens
  MOD_RES (1)..(1): Any amino acid
XAQLEIDKLKENLVKLKENDAADLQKAKEQNQRLDEEILALRNRVRSLDSEKKVLGEMVERLKGEVCESQENKQLGNHSPGKTVGGEQREQILKMSQEKNEMFESEWSKEREREKQLASGLDTAEKALKVESEVLKLSQEFAQLNHFTLGGKTAPSNLITSENTCKDPESNEPILETEIQSRKEETEELCIHHLEKN

SEQ ID NO: 91298 - protein, 78 aa, Homo sapiens
PSSSEDTETVSNSSEGRASPHDVLETIFVRKVGAFVNKPINQVTLTSLDIPFAMFAPKNLELEDTDPMVSPPLTTSSQ

SEQ ID NO: 91299 - protein, 35 aa, Homo sapiens
  MOD_RES (1)..(1): Any amino acid
XTSRNLHSHYHEAPMTRKHYQVTGYGIVKWNRGLK

SEQ ID NO: 91300 - protein, 1109 aa, Homo sapiens
MNGNTALAIAKRLGYISVVDTLKVVTEEVTTTTTTITEKHKLNVPETMTEVLDVSDEEGDDTMTGDGGEYLRPEDLKELGDDSLPSSQFLDGMNYLRYSLEGGRSDSLRSFSSDRSHTLSHASYLRDSAVMDDSVVIPSHQVSTLAKEAERNSYRLSWGTENLDNVALSSSPIHSGFLVSFMVDARGGAMRGCRHNGLRIIIPPRKCTAPTRVTCRLVKRHRLATMPPMVEGEGLASRLIEVGPSGAQFLGPVIVEIPHFAALRGKERELVVLRSENGDSWKEHFCDYTEDELNEILNGMDEVLDSPEDLEKKRICRIITRDFPQYFAVVSRIKQDSNLIGPEGGVLSSTVVPQVQAVFPEGALTKRIRVGLQAQPMHSELVKKILGNKATFSPIVTLEPRRRKFHKPITMTIPVPKASSDVMLNGFGGDAPTLRLLCSITGGTTPAQWEDITGTTPLTFVNECVSFTTNVSARFWLIDCRQIQESVTFASQVYREIICVPYMAKFVVFAKSHDPIEARLRCFCMTDDKVDKTLEQQENFAEVARSRDVEVLEGKPIYVDCFGNLVPLTKSGQHHIFSFFAFKENRLPLFVKVRDTTQEPCGRLSFMKEPKSTRGLVHQAICNLNITLPIYTKESESDQEQEEEIDMTSEKNPQDEQERIEERLAYIADHLGFSWTELARELDFTEEQIHQIRIENPNSLQDQSHALLKYWLERDGKHATDTNLVECLTKINRMDIVHLMETNTEPLQERISHSYAEIEQTITLDHSEGFSVLQEELCTAQHKQKEEQAVSKESETCDHPPIVSEEDISVGYSTFQDGVPKTEGDSSATALFPQTHKEQVQQDFSGKMQDLPEESSLEYQQEYFVTTPGTETSETQKAMIVPSSPSKTPEEVSTPAEEEKLYLQTPTSSERGGSPIIQEPEEPSEHREESSPRKTSLVIVESADNQPETCERLDEDAAFEKGDDMPEIPPETVTEEEYIDEHGHTVVKKVTRKIIRRYVSSEGTEKEEIMVQGMPQEPVNIEEGDGYSKVIKRVVLKSDTEQSEVTLCEPSILSSTSQFQAEPVEGRRVSKVVKTTVVLGERMEKHLGDSSLATDLPSAKDDFEEDNNE

SEQ ID NO: 91301 - protein, 98 aa, Homo sapiens
MEAPEYLDLDEIDFSDDISYSVTSLKTIPELCRRCDTQNEDRSVSSSSWNCGISTLITNTQKPTGIADVYSKFRPVKRVSPLKHQPETLENNESDDQK

SEQ ID NO: 91302 - protein, 526 aa, Homo sapiens
MKRTKCADIDVETPDSILVNTNLRALINKHTFSVLPGDCQQRLLLLLPEVDRQVGPDGLMKLNGSALNNEFFTSAAQGWKERLSEGEFTPEMQVRIRQEIEKEKKVEPWKEQFFESYYGQSSGLSLEDSKKLTASPSDPKVKKTPAEQPKSMPVSEASLIRIVPVVSQSECKEEALQMSSPGRKEECESQGEVQPNFSTSSEPLLSSALNTHELSSILPIKCPKDEDLLEQKPVTSAEQESEKNHLTTASNYNKSESQESLVTSPSKPKSPGVEKPIVKPTAGAGPQETNMKEPLATLVDQSPESLKRKSSLTQEEAPVSWEKRPRVTENRQHQQPFQVSPQPFLNRGDRIQVRKVPPLKIPVSRISPMPFHPSQVSPRARFPVSITSPNRTGARTLADIKAKAQLVKAQRAAAAAAAAAAAAASVGGTIPGPGPGGGQGPGEGGEGQTARGGSPGSDRVSETGKGPTLELAGTGSRGGTRELLPCGPETQPQSETKTTPSQAQPHSVSGAQLQQTPPVPPTPAVS

SEQ ID NO: 91303 - protein, 63 aa, Homo sapiens
  MOD_RES (1)..(1): Any amino acid
XYSAHEINKGHPNLAATPPGHASSPGLSQTPYPSGQNAGPTTLVYPQTPQTMNSQPQTRSPFF

SEQ ID NO: 91304 - protein, 90 aa, Homo sapiens
ETTWRTGLRRNFYGNCFVICGVLYAVDSYNQRNANISYAFDTHTNTQIVPRLLFENEYSYTTQIDYNPKDRLLYAWDNGHQVTYHVIFAY

SEQ ID NO: 91305 - protein, 351 aa, Homo sapiens
MDQFGDILEGEVDHSFFDSDFEEGKKCETNSVFDKQNDDPKERIDKDTKNVNSNTGMQTTENYLTEKGNERNVKFPPEHPVENDVTQTVSSFSLPASSRSKKLCDVTTGLKIHVSIPNRIPKIVKEGEDDYYTDGEESSDDGKKYHVKSKSAKPSTNVKKSIRKKYCKVSSSSSSSLSSSSSGSGTDCLDAGSDSHLSDSSPSSKSSKKHVSGITLLSPKHKYKSGIKSTETQPSSTTPKCGHYPEESEDTVTDVSPLSTPDISPLQSFELGIANDQKVKIKKQENVSQEIYEDVEDLKNNSKYLKAAKKGKEKHEPDVSSKSSSVLDSSLDHRHKQKVLHDTMDLNHLLK

SEQ ID NO: 91306 - protein, 141 aa, Homo sapiens
MHRRGVGAGAIAKKKLAEAKYKERGTVLAEDQLAQMSKQLDMFKTNLEEFASKHKQEIRKNPEFRVQFQDMCATIGVDPLASGKGFWSEMLGVGDFYYELGVQIIEVCLALKHRNGGLITLEELHQQVLKGRGKFAQDVSQ

SEQ ID NO: 91307 - protein, 580 aa, Homo sapiens
MYATDSRGHSPAFLQPQNGNSRHPSGYVPGKVVPLRPPPPPKSQASAKFTSIRREDRATFAFSPEEQQAQRESQKQKRHKNTFICFAITSFSFFIALAIILGISSKYAPDENCPDQNPRLRNWDPGQDSAKQVVIKEGDMLRLTSDATVHSIVIQDGGLLVFGDNKDGSRNITLRTHYILIQDGGALHIGAEKCRYKSKATITLYGKSDEGESMPTFGKKFIGVEAGGTLELHGARKASWTLLARTLNSSGLPFGSYTFEKDFSRGLNVRVIDQDTAKILESERFDTHEYRNESRRLQEFLRFQDPGRIVAIAVGDSAAKSLLQGTIQMIQERLGSELIQGLGYRQAWALVGVIDGGSTSCNESVRNYENHSSGGKALAQREFYTVDGQKFSVTAYSEWIEGVSLSGFRVEVVDGVKLNLLDDVSSWKPGDQIVVASTDYSMYQAEEFTLLPCSECSHFQVKVKETPQFLHMGEIIDGVDMRAEVGILTRNIVIQGEVEDSCYAENQCQFFDYDTFGGHIMIMKNFTSVHLSYVELKHMGQQQMGRYPVHFHLCGDVDYKGGYRHATFVDGLSIHHSFSR

SEQ ID NO: 91308 - protein, 105 aa, Homo sapiens
MWGLAGGRLFGIFSAPVLVAVVCCAQSVNDPGNMSFVKETVDKLLKGYDIRLRPDFGGPPVCVGMNIDIASIDMVSEVNMNHHDSSMHDGPQEIPPGRAELHSGN

SEQ ID NO: 91309 - protein, 77 aa, Homo sapiens
MAAAAVARLWWRGILGASALTRATVRPRNDVAHKQLSAFGEYVAEILPKYVQQVQVSCFNELEVCIHPDGVIPVLTF

SEQ ID NO: 91310 - protein, 321 aa, Homo sapiens; identical to SEQ ID NO: 49154

SEQ ID NO: 91311 - protein, 318 aa, Homo sapiens
ERLKLERNKEYNQFLRGKEESSEKFRQVEKSTEPKSQRNKKPIGQVKPDLTSQIQTSCENSEGPRKDVLTPSEAYEELLNQRRLEEDRYRQLDDEIELRNRRIIKKANEEVGISNLKHQRFASKAGIPDRRFHRFNEDRVFDRRYHRPDQDPEVSEEMDERFRYESDFDRRLSRVYTNDRMHRNKRGNMPPMEHDGDVIEQSNIRISSAENKSAPDNETSKSANQDTCSPFAGMLFGGEDRELIQRRKEKYRLELLEQMAEQQRNKRREKDLELRVAASGAQDPEKSWNELLTSLQLSKEENTITEMAIREVARCPST

SEQ ID NO: 91312 - protein, 663 aa, Homo sapiens
MPSEGRCWETLKALRSSDKGRLCYYRDWLLRREDVLEECMSLPKLSSYSGWVVEHVLPHMQENQPLSETSPSSTSASALDQPSFVPKSPDASSAFSPASPATPNGTKGKDESQHTESMVLQSSRGIKVEGCVRMYELVHRMKGTEGLRLWQEEQERKVQALSEMASEQLKRFDEWKELKQHKEFQDLREVMEKSSREALGHQEKLKAEHRHRAKILNLKLREAEQQRVKQAEQERLRKEEGQIRLRALYALQEEMLQLSQQLDASEQHKALLKVDLAAFQTRGNQLCSLISGIIRASSESSYPTAESQAEAERALREMRDLLMNLGQEITRACEDKRRQDEEEAQVKLQEAQMQQGPEAHKEPPAPSQGPGGKQNEDLQVKVQDITMQWYQQLQDASMQCVLTFEGLTNSKDSQAKKIKMDLQKAATIPVSQISTIAGSKLKEIFDKIHSLLSGKPVQSGGRSVSVTLNPQGLDFVQYKLAEKFVKQGEEEVASHHEAAFPIAVVASGIWELHPRVGDLILAHLHKKCPYSVPFYPTFKEGMALEDYQRMLGYQVKDSKVEQQDNFLKRMSGMIRLYAAIIQLRWPYGNRQEVCGNALMKQYQVQFWKMLILIKEDYFPRIEAITSSGQMGSFIRLKQFLEKCLQHKDIPVPKGFLTSSFWRS

SEQ ID NO: 91313 - protein, 288 aa, Homo sapiens
MGLVHGPNHPLVLLAKWYEKFFGRLSHLNLCVTNAMREDLADNWHIRAVTVYDKPASFFKETPLDLQHRLFMKLGSMHSPFRARSEPEDPVTERSAFTERDAGSGLVTRLRERPALLVSSTSWTEFEQLTLDGHNLPSLVCVITGKGPLREYYSRLIHQKHFQHIQVCTPWLEAEDYPLLLGSADLGVCLHTSSSGLDLPMKVVDMFGCCLPVCAVNFKCLHELVKHEENGLVFEDSEELAAQLQMLFSNFPDPAGKLNQFRKNLRESQQLRWDESWVQTVLPLVMDT

SEQ ID NO: 91314 - protein, 61 aa, Homo sapiens
MLSPERLALPDYEYLVLTVYAREHTFSFENSASSKPPPTIGYHFYGPSGDASELWAKMAIC

SEQ ID NO: 91315 - protein, 259 aa, Homo sapiens
MWPNGSSLGPCFRPTNITLEERRLIASPWFAASFCVVGLASNLLALSVLAGARQGGSHTRSSFLTFLCGLVLTDFLGLLVTGTIVVSQHAALFEWHAVDPGCRLCRFMGVVMIFFGLSPLLLGAAMASERYLGLHRPDSAAKPACHEPRRAAVPHHGEGAAHLLARGHLEPDPGPLGVYPVPPRRAPASPASPQHPAQVAVPPAPAHAALRAAVGSGQSAPPAPFRGALGPSDSPSACSEDSGAGGAGWTVGISSRVLG

SEQ ID NO: 91316 - protein, 389 aa, Homo sapiens
MEKRETFVQAVSKELVGEFLQFVQLDKEASDPFSLNELLDELSRKQKEELWQRLKNLLTDVLLESPVDGWQVVEAQGEDNMETEHGSKMRKSIEIIYAITSVILASVSVINESENYEALLECVIILNGILYALPESERKLQSSIQDLCVTWWEKGLPAKEDTGKTAFVMLLRRSLETKTGADVCRLWRIHQALYCFDYDLEESGEIKDMLLECFININYIKKEEGRRFLSCLFNWNINFIKMIHGTIKNQLQGLQKSLMVYIAEIYFRAWKKASGKILEAIENDCIQDFMFHGIHLPRRSPVHSKVREVLSYFHHQKKVRQGVEEMLYRLYKPILWRGLKARNSEVRSNAALLFVEAFPIRDPNLHAIEMDSEIQKQFEELYGSLVFVK

SEQ ID NO: 91317 - protein, 151 aa, Homo sapiens
MRAVNILVYFFGFFWWFFNVQGFIKDVHEDSLTVVFENNWQPERQVPFNEVRLPPPPDIKKEISEGDEVEVYSRANDQEPCGWWLAKVRMMKGEFYVIEYAACDATYNEIVTFERLRPVNQNKTVKKNTFFKCTVDVPEDLREACANENAH

SEQ ID NO: 91318 - protein, 768 aa, Homo sapiens
MAILVGTDQDFYSLLGVSKTASSREIRQAFKKLALKLHPDKNPNNPNAHGDFLKINRAYEVLKDEDLRKKYDKYGEKGLEDNQGGQYESWNYYRYDFGIYDDDPEIITLERREFDAAVNSGELWFVNFYSPGCSHCHDLAPTWRDFAKEVDGLLRIGAVNCGDDRMLCRMKGVNSYPSLFIFRSGMAPVKYHGDRSKESLVSFAMQHVRSTVTELWTGNFVNSIQTAFAAGIGWLITFCSKGGDCLTSQTRLRLSGMLDGLVNVGWMDCATQDNLCKSLDITTSTTAYFPPGATLNNKEKNSILFLNSLDAKEIYLEVIHNLPDFELLSANTLEDRLAHHRWLLFFHFGKNENSNDPELKKLKTLLKNDHIQVGRFDCSSAPDICSNLYVFQPSLAVFKGQGTKEYEIHHGKKILYDILAFAKESVNSHVTTLGPQNFPANDKEPWLVDFFAPWCPPCRALLPELRRASNLLYGQLKFGTLDCTVHEGLCNMYNIQAYPTTVVFNQSNIHEYEGHHSAEQILEFIEDLMNPSVVSLTPTTFNELVTQRKHNEVWMVDFYSPWCHPCQVLMPEWKRMARTLTGLINVGSIDCQQYHSFCAQENVQRYPEIRFFPPKSNKAYHYHSYNGWNRDAYSLRIWGLGFLPQVSTDLTPQTFSEKVLQGKNHWVIDFYAPWCGPCQNFAPEFELLARMIKGKVKAGKVDCQAYAQTCQKAGIRAYPTVKFYFYERAKRNFQEEQINTRDAKAIAALISEKLETLRNQGKRNKDEL

SEQ ID NO: 91319 - protein, 155 aa, Homo sapiens
  MOD_RES (1)..(1): Any amino acid
XNVPVWSLRLLPALAGALSVPMAYQIVLELHFSHCAAMGAALLMLIENALITQSRLMLLESVLIFFNLLAVLSYLKFFNCQKHSPFSLSWWFWLTLTGVACSCAVGIKYMGVFTYVLVLGVAAVHAWHLLGDQTLSNSSALGPTTKSCPVPSRPA

SEQ ID NO: 91320 - protein, 67 aa, Homo sapiens
MSCNPSFGGIGKGHLMREVDALDGLCSRICDQSGVHYKVLNRRKGPAVWGLRAQIDRKLYKQNMQKS

SEQ ID NO: 91321 - protein, 185 aa, Homo sapiens
VAIIAGNFELAEYIKNHKETDIVPLVPTRRRVFGAPPLSHRPAIGWAQSCNLDEPTGLFPPAPRFHRTCSGEQSHWTGSVPFREAPAYSNRRRRPPNTLAAPRVLLRSNSDNNLNASAPDWAVCSTATSHRSLSPQLLQQMPSKPEGAAKTIGSYVPGPRSRSPSLNRLGGAGEDGKRPQPLWHV

SEQ ID NO: 91322 - protein, 324 aa, Homo sapiens
MDLEKNYPTPRTSRTGHGGVNQLGGVFVNGRPLPDVVRQRIVELAHQGVRPCDISRQLRVSHGCVSKILGRYYETGSIKPGVIGGSKPKVATPKVVEKIAEYKRQNPTMFAWEIRDRLLAERVCDNDTVPSVSSINRIIRTKVQQPPNQPVPASSHSIVSTGSVTQVSSVSTDSAGSSYSISGILGITSPSADTNKRKRDEGIQESPVPNGHSLPGRDFLRKQMRGDLFTQQQLEVLDRVFERQHYSDIFTTTEPIKPEQGVSFPGVPTATLSIPRTTTPGGSPTRGCLAPPTIIALPPEEPPHLQPPLPMTVTDPWSQAGTKH

SEQ ID NO: 91323 - protein, 423 aa, Homo sapiens
MMYRPDVVRARKRVCWEPWVIGLVIFISLIVLAVCIGLTVHYVRYNQKKTYNYYSTLSFTTDKLYAEFGREASNNFTEMSQRLESMVKNAFYKSPLREEFVKSQVIKFSQQKHGVLAHMLLICRFHSTEDPETVDKIVQLVLHEKLQDAVGPPKVDPQSVKIKKINKTETDSYLNHCCGTRRSKTLGQSLRIVGGTEVEEGEWPWQASLQWDGSHRCGATLINATWLVSAAHCFTTYKNPARWTASFGVTIKPSKMKRGLRRIIVHEKYKHPSHDYDISLAELSSPVPYTNAVHRVCLPDASYEFQPGDVMFVTGFGALKNDGYSQNHLRQAQVTLIDATTCNEPQAYNDAITPRMLCAGSLEGKTDACQGDSGGPLVSSDARDIWYLAGIVSWGDECAKPNKPGVYTRVTALRDWITSKTGI

SEQ ID NO: 91324 - protein, 140 aa, Homo sapiens
MDSLALGRWRQRRAEDLQVPGDVKRVCRRLEASGHERGCHQVNACALASWGPEDRELPSRGCLPAPRPESGQGRLSTGISQNGGRSSAQPCPRCIAGESVKIQQEDRHWQAGKGGLTRTQPCWQHDLRPPASRMERKTTS

SEQ ID NO: 91325 - protein, 412 aa, Homo sapiens
MGSSEPLPIADGDRRRKKKRRGRATDSLPGKFEDMYKLTSELLGEGAYAKVQGAVSLQNGKEYAVKIIEKQAGHSRSRVFREVETLYQCQGNKNILELIEFFEDDTRFYLVFEKLQGGSILAHIQKQKHFNEREASRVVRDVAAALDFLHTKGIAHRDLKPENILCESPEKVSPVKICDFDLGSGMKLNNSCTPITTPELTTPCGSAEYMAPEVVEVFTDQATFYDKRCDLWSLGVVLYIMLSGYPPFVGHCGADCGWDRGEVCRVCQNKLFESIQEGKYEFPDKDWAHISSEAKDLISKLLVRDAKQRLSAAQVLQHPWVQGQAPEKGLPTPQVLQRNSSTMDLTLFAAEAIALNRQLSQHEENELAEEPEALADGLCSMKLSPPCKSRLARRRALAQAGRGEDRSPPTAL

SEQ ID NO: 91326 - protein, 148 aa, Homo sapiens
MELITILEKTVSPDRLELEAAQKFLERAAVENLPTFLVELSRVLANPGNSQVARVAAGLQIKNSLTSKDPDIKAQYQQRWLAIDANARREVKNYVLQTLGTETYRPSSASQCVAGIACAEIPVNQWPELIPQLVANVTNPNSTEHMKE

SEQ ID NO: 91327 - protein, 49 aa, Homo sapiens
MHTTESKNEHLEDENFQTSTTPQSLIDPNNTAQEETKTVLSDTEEIKPQ

SEQ ID NO: 91328 - protein, 533 aa, Homo sapiens
MSQTSLKQKKNEPGMRSSKESLEAEKRKESDKTGVRLSNQGSQESSLRKTDSRGYLVRSQWSRISRSPSTKAPSIDEPRSRNTSAKVELPSSSTSSRTPSTSPSLHDSSPPPLSGQPSLQPPASPQLPRSLDSRPPTPPEPDPGSRRSTKMQENPEAWAQGIVREIRQTRDSQPLEYSRTSPTEWKSSSQRRGIYPASTQLDRNSLSEQQQQQREDEDDYEAAYWASMRSFYEKNPSCSRPWPPKPKNAITIALSSCALFNMVDGRKIYEQEGLEKYMEYQLTNENVILTPGPAFRFVKALQYVNARLRDLYPDEQDLFDIVLMTNNHAQVGVRLINSVNHYGLLIDRFCLTGGKDPIGYLKAYLTNLYIAADSEKVQEAIQEGIASATMFDGAKDMAYCDTQLRVAFDGDAVLFSDESEHFTKEHGLDKFFQYDTLCESKPLAQEEPRLDVLINNAGIFQCPYMKTEDGFEMQFGVNHLGHFLLTNLLLGLLKSSAPSRIVVVSSKLYKYGDINFDDLNSEQSYNKSFCYSR

SEQ ID NO: 91329 - protein, 160 aa, Homo sapiens
STAQSTSARNSDSKLTWSPGSVTNTSLAHELWKVPLPPKNITAPSRPPPGLTGQKPPLSTWDNSPLRIGGGWGNSDARYTPGSSWGESSSGRITNWLVLKNLTPQIDGSTLRTLCMQHGPLITFHLNLPHGNALVRYSSKEEVVKAQKSLHISDLFLLTL

SEQ ID NO: 91330 - protein, 36 aa, Homo sapiens
MAAAAAEQQQFYLLLGNLLSPDNVVRKQAEVCVWWF

SEQ ID NO: 91331 - protein, 65 aa, Homo sapiens
GEPGELGEPGLPGEVGMRGPQGPPGLPGPPGRVGAPVSEGTCLGRGSTPSPGIKNQVLASSSTCI

SEQ ID NO: 91332 - protein, 175 aa, Homo sapiens
MEAVELARKLQEEATCSICLDYFTDPVMTTCGHNFCRACIQLSWEKARGKKGRRKRKGSFPCPECREMSPQRNLLPNRLLTKVAEMAQQHPGLQKQDLCQEHHEPLKLFCQKDQSPICVVCRESREHRLHRVLPAEEAVQGYKLKLEEDMEYLREQITRTGNLQAREEQSLAEWQ

SEQ ID NO: 91333 - protein, 68 aa, Homo sapiens
MFRRKLTALDYHNPAGFNCKDETEFRNFIVWLEDQKIRHYKIEDRGNLRNIHSSDWPKFFEKLKNTRI

SEQ ID NO: 91334 - protein, 200 aa, Homo sapiens
SLMSTTQSRPPWMNSGPSESRPYHGMHGGGPGGPGGGPHSFPHPLPSLTGGHGGHPMQHNPNGPPPPWMQPPPPPMNQGPHPPGHHGPPPMVPALSFHQDQYLGSTPVGSGVYRLHQGKGMMPPPPMGMMPPPPPPPSGQPPPPPSGPLPPWQQQQQQPPPPPPPSSSMASSTPLPWQQRSLPAAAMARAMRVRTFRAHW

SEQ ID NO: 91335 - protein, 149 aa, Homo sapiens
GGIYFYHGRKGVTHNIALLREVIINSRFVKGDISTKFLSDVYPDGFKGHMLTKSEKNQLLAIASSLFVAFQLRAQHFQENSRMPVIKPDIANWELSVKLHDKVHTVVASNNGSVFSVEVDGSKLNVTSTWNLASPLLSVSVDGTQRTVQ

SEQ ID NO: 91336 - protein, 198 aa, Homo sapiens
MAQVEKRGGLLRKSSASKKPLKEKVVLMYDEIFMTEDPSKCSPRFWEELFLMKVNLEYLEGKLESLDGEELMKIKDNINCLFQHCIQALGEEHPIRVVNALQTLCALIRGVHQKNKSTSGFDIINMLMGFDKAELCMKVRHKLQMCLWMAASDSCSWTLSADKCTQRFGLRKIQMIEFGLAFRCFYFTDLLYLNKGKF

SEQ ID NO: 91337 - protein, 117 aa, Homo sapiens
MAEAHQAVAFQFTVTPDGIDLRLSHEALRQIYLSGLHSWKKKFIRFKNGIITGVYPASPSSWLIVVVGVMTTMYAKIDPSLGIIAKINRTLETANCMSSQTKNVVSGVLFGTGLWVA

SEQ ID NO: 91338 - protein, 62 aa, Homo sapiens
MSAEVIHQVEEALDTDEKEMLLFLCRDVAIDVVPPNVRDLLDILRERGKLSVGDLAELLYRV

SEQ ID NO: 91339 - protein, 235 aa, Homo sapiens
MACRPRSPPRHQSRCDGDASPPSPARWSLGRKRRADGRRWRPEDAEEAEHRGAERRPERYKRKLLINDFGRERKSSSGSSDSKESMSTVPADFETDESVLMRRQKQINYGKNTIAYDRYIKEVPRHLRQPGIHPKTPNKFKKYSRRSWDQQIKLWKVALHFWDPPAEEGCDLQEIHPVDLESAESSSEPQTSSQDDFDVYSGTPTKVRHMDSQVEDEFDLEACLTEPLRDFSAMS

SEQ ID NO: 91340 - protein, 134 aa, Homo sapiens
MATAGGGSGADPGSRGLLRLLSFCVLLAGLCRGNSVERKIYIPLNKTAPCVRLLNATHQIGCQSSISGDTGVIHVVEKEEDLQWVLTDGPNPPYMVLLESKHFTRQNVRLSDTFLCSFMEFLSYSRDLMEKLKG

SEQ ID NO: 91341 - protein, 170 aa, Homo sapiens
MLSELQDGKSKIVQKAAPEVQEDVKAFKTGNYVFSYDQFFRDKIMEKKQDHTYRVFKTVNRWADAYPFAQHFSEASVASKDVSVWCSNDYLGMSRHPQVLQATQETLQRHGAGAGGTRNISGTSKFHVELEQELAELHQKDSALLFSSCFVANDSTLFTLAKILPGCEIY

SEQ ID NO: 91342 - protein, 42 aa, Homo sapiens
MARGQQKIQSQQKNAKKQAGQKKKQGHDQKAAAKAALIYTCT

SEQ ID NO: 91343 - protein, 355 aa, Homo sapiens
MQLTTCLRETLFTGASQKTSLWWLGIASFGVPEKLGCANLPLNSRQKELCKRKPYLLPSIREGARLGIQECGSQFRHERWNCMITAAATTAPMGASPLFGYELSSGTKETAFIYAVMAAGLVHSVTRSCSAGNMTECSCDTTLQNGGSASEGWHWGGCSDDVQYGMWFSRKFLDFPIGNTTGKENKVLLAMNLHNNEAGRQAVAKLMSVDCRCHGVSGSCAVKTCWKTMSSFEKIGHLLKDKYENSIQISDKTKRKMRRREKDQRKIPIHKDDLLYVNKSPNYCVEDKKLGIPGTQGRECNRTSEGADGCNLLCCGRGYNTHVVRHVERCECKFIWCCYVRCRRCESMTDVHTCK

SEQ ID NO: 91344 - protein, 81 aa, Homo sapiens
MTPQSLLQTTLFLLSLLFLVQGRCPRQGPQGRLSLLQPAEPDTQEQPPLQTHTRPAHLHRELRRGPHSPCPFPCSPPCFPI

SEQ ID NO: 91345 - protein, 288 aa, Homo sapiens
  MOD_RES (1)..(1): Any amino acid
XRSGKSRSRSPYSSRHSRSRSRHRLSRSRSRHSSISPSTLTLKSSLAAELNKNKKARAAEAARAAEAAKAAEATKAAEAAAKAAKASNTSTPTKGNTETSASASQTNHVKDVKKIKIEHAPSPSSGGTLKNDKAKTKPPLQVTKVENNLIVDKATKKAVIVGKESKSAATKEESVSLKEKTKPLTPSIGAKEKEQHVALVTSTLPPLPLPPMLPEDKEADSLRGNISVKAVKKEVEKKLRCLLADLPLPPELPGGDDLSKSPEEKKTATQLHSKRRPKYVLAFYLLLN

SEQ ID NO: 91346 - protein, 141 aa, Homo sapiens
  MOD_RES (1)..(1): Any amino acid
XMEPEGADPREAADLDAVPMSLSYEELVRRNVELFIATSQKFVQETELSQRIRDWEDTVQPLLQEQLNEWCPFAELVAGQPAFEVCRSMLASLQLANDYTVEITQQPGLEMAVDTMSLRLLTHQRAHKRFQTYAAPSMAQP

SEQ ID NO: 91347 - protein, 636 aa, Homo sapiens
SSAPITSGQAPTTFLPASTSQAQLSSQKMESFSAVPPTKEKVSTQDQPMANLCTPSSTANSCSSSASNTPGAPETHPSSSPTPTSSNTQEEAQPSSVSDLSPMSMPFASNSEPAPLTLTSPRMVAADNQDTSNLPQLAVPAPRVSHRMQPRGSFYSMVPNATIHQDPQSIFVTNPVTLTPPQGPPAAVQLSSAVNIMNGSQMHINPANKSLPPTFGPATLFNHFSSLFDSSQVPANQGWGDGPLSSRVATDASFTVQSAFLGNSVLGHLENMHPDNSKAPGFRPPSQRVSTSPVGLPSIDPSGSSPSSSSAPLASFSGIPGTRVFLQGPAPVGTPSFNRQHFSPHPWTSASNSCDSPIPSVSSGSSSPLSATSAPPTLGQPKGVSASQDRKIPPPIGTERLARIRQGGSVAQAPAGTSFVAPVGHSGIWSFGVNAVSEGLSGWSQSVMGNHPMHQQLSDPSTFSQHQPMERDDSGMVAPSNIFHQPMGLPISMYGGTIIPSHPQLADVPGGPLFNGLHNPDPAWNPMIKVIQNSTECTDAQQASLLPSVPALKGEIPSPQLTRPKKRIGRPMVASPNQRHQDHLRPKVPAGVQELTHCPDTPLLPPSDSRGHNSSNSPSLQAGGAEGAGDRGRDTR

SEQ ID NO: 91348 - protein, 59 aa, Homo sapiens
MAVFGMGCFWGAERKFWVLKGVYSTQVGFAGGYTSNPTYKEVCSDVQNNSMFISLFKSF

SEQ ID NO: 91349 - protein, 421 aa, Homo sapiens
MSYGEIEGKFLGPREEVTSEPRCKKLKSTTESYVFHNHSNADFHRIQEKTGNDWVPVTIIDVRGHSYLQENKIKTTDLHRPLHDEMPGNRPDVIESIDSQVLQEARPPLVSADDEIYSTSKAFIGPIYKPPEKKKRNEGRNEAHVLNGINDRGGQKEKQKFNSEKSEIDNELFQFYKEIEELEKEKDGFENSCKESEPSQEQFVPFYEGHNNGLLKPDEEKKDLSNKAMPSHCDYQQNLGNEPDKYPCNGQVIPTFCDTSFTSFRPEWQSVYPFIVPYGPPLPSLNYHLNIQRFSGPPNPPSNIFQAQDDSQIQNGYYVNNCHVNWNCMTFDQNNEYTDCSENRSSVHPSGNGCSMQDRYVSNGFCEVRERCWKDHCMDKHNGTDRFVNQQFQEEKLNKLQKLLILLRGLPGSGKTTLSRP

SEQ ID NO: 91350 - protein, 72 aa, Homo sapiens
MGLSTVPDLLLPLVLLELLVGIYPSGVIGLVPHLGDREKRDSVCPQGKYIHPQNNSICCTKCHKEPVPALLE

SEQ ID NO: 91351 - protein, 253 aa, Homo sapiens
MGSTDSKLNFRKAVIQLTTKTQGEEDDEHARPLAESLLLAIADLLFCPDFTVQSHRRSTVDSAEDVHSLDSCEYIWEAGVGFAHSPQPNYIHDMNRMELLKLLLTCFSEAMYLPPAPESGSTNPWVQFFCSTENRHALPLFTSLLNTVCAYDPVGYGIPYNHLLFSDYREPLVEEAAQVLIVTLDHDSASSASPTVDGTTTGTAMDDADPPGPENLFVNYLSRIHREEDFQFILKGIARLLSNPLLQTYLPNS

SEQ ID NO: 91352 - protein, 836 aa, Homo sapiens
MAAETQTLNFGPEWLRALSSGGSITSPPLSPALPKYKLADYRYGREEMLALFLKDNKIPSDLLDKEFLPILQEEPLPPLALVPFTEEEQRNFSMSVNSAAVLRLTGRGGGGTVVGAPRGRSSSRGRGRGRGECGFYQRSFDEVEGVFGRGGGREMHRSQSWEERGDRRFEKPGRKDVGRPNFEEGGPTSVGRKHEFIRSESENWRIFREEQNGEDEDGGWRLAGSRRDGERWRPHSPGWREHMERRRRFEFDFRDRDDERGYRRVRSGSGSIDDDRDSLPEWCLEDAEEEMGTFDSSGAFLSLKKVQKEPIPEEQEMDFRPVDEGEECSDSEGSHNEEAKEPDKTNKKEGEKTDRVGVEASEETPQTSSSSARPGTPSDHQSQEASQFERKDEPKTEQTEKAEEETRMENSLPAKVPSRGDEMVADVQQPLSQIPSDTASPLLILPPPVPNPSPTLRPVETPVVGAPGMGSVSTEPDDEEGLKHLEQQAEKMVAYLQDSALDDERLASKLQEHRAKGVSIPLMHEAMQKWYYKDPQGEIQGPFNNQEMAEWFQAGYFTMSLLVKRACDESFQPLGDIMKMWGRVPFSPGPAPPPHMGELDQERLTRQQELTALYQMQHLQYQQFLIQQQYAQVLAQQQKAALSSQQQQQLALLLQQFQTLKMRISDQNIIPSVTRSVSVPDTGSIWELQPTASQPTVWEGGSVWDLPLDTTTPGPALEQLQQLEKAKAAKLEQERREAEMRAKREEEERKRQEELRRQQEEILRRQQEEERKRREEEELARRKQEEALRRQREQEIALRRQREEEERQQQEEALRRLEERRREEEERRKQEELLRK

SEQ ID NO: 91353 - protein, 270 aa, Homo sapiens
MSSSPLSKKRRVSGPDPKPGSNCSPAQSVLSEVPSVPTNGMAKNGSEADIDEGLYSRQLYVLGHEAMKRLQTSSVLVSGLRGLGVEIAKNIILGGVKAVTLHDQGTAQWADLSSQFYLREEDIGKNRAEVSQPRLAELNSYVPVTAYTGPLVEDFLSGFQVVVLTNTPLEDQLRVGEFCHNRGIKLVVADTRGLFGQLFCDFGEEMILTDSNGEQPLSAMVSMVTKDNPGVVTCLDEARHGFESGDFVSFSEVQGMVELNGNQPMEIKVL

SEQ ID NO: 91354 - protein, 243 aa, Homo sapiens
MEGGGEAAHLASWQDRACGAAEGIPGRSQRGGLAWPEQEGGGRSSCGLEGRGLSQGPGTSTLSIPAPSSLLELVFFSPAACRKCRQRPLPRSGRDGLRVPAVPSSPPSLPAPSPPQVSLRCQGLRRVVLNQISHFHQDFPILCQTCLGENPYIRMTKEKYGKECKICARPFTVFRWCPGVRMRFKKTEVCQTCSKLKNVCQTCLLDLEYGLPIQVRDAGLSFKDDMPKSDVNKEYYTQNMERE

SEQ ID NO: 91355 - protein, 80 aa, Homo sapiens
MRESGAHCPLCRGNVTRRERACPERALDLENIMRKFSGSCRCCAKQIKFYRMRHHYKSCKKYQDEYGVSSIIPNFQISQD

SEQ ID NO: 91356 - protein, 1058 aa, Homo sapiens
MNMEGLVMFQDLSIDFSQEEWECLDAAQKDLYRDVMMENYSSLVSLDSEFRCKTKDSCLPKEIYEVTSSQWVRMEKCHSLVGSSVRDDWECKGQFQHQDINQERYLEKAIMTYETTPTFCLQTSLTLHHRIHPGEKLYKSTECMAFKYGSELTQQQETHTGEKLYKCKECGKAFHHFSYLVKHQRIHTGEKPCACKEYGKAFISGSHLIQHQKMYTDERPHECQESVKAFRPSAHLIQHWRIHTGDKPYECKECGKSFTSGSTLNQHQQIHTGEKPYHCKQCGKSFTVGSTLIRHQQIHTGEKPYDCKECGKSFASGSALIRHQRIHTGEKPYDCKECGKSFTFHSALIRHQRIHTGEKPYDCKECGKSFTFRSGLIGHQAIHTGEKPYDCKECGKSFTAGSTLIQHQRIHTGEKPYDCKECGKSFASGSALLQHQRIHTGEKPYCCKECGKSFTFRSTRNRHQRIHTGEKPYNCKECGKSFASGSALLQHQRIHTGEKPYHCKECGKSFTFRSGLIGHQAVHTGEKPYDCKECGKSFTSRSALIQHQRIHTGEKPYHCKECGKSFTVGSTLLQHQQIHTGEKPYDCKECGKAFRLRLRLTQHQQIHTGEKPYQCQECGKAFVSVSGLTQHHRIHTGEKPYECPDCGKAFRQRTYLNQHRRIHTGEKPYECKECGKSFTFCSGLIQHQQNHTDEKPYDGKECGKSFTSHSTLIQHQQIHTGEKPYDCKECGKSFTSHSTLIQHQQIHTGEKLYDCKECGKSFTSHSTLIQHQPLHTGEKPYHCKECGKSFTLRSALIQHRPVHTGEKRYSCKECGKSFTSRSTLIEHQRIHTGEKPYHCKECGKSFAFRSAIIQHRRIHTGEKPYDCKECGKAFRRRSKLTQHQRIHTGEKPYRCHECGKAFVRFSGLTKHHSIHTGEKPYECKTCGKSFRQRTHLTLHQRIHTGDRPYECKECGKSFTCGSELIRHQRTHTGEKPYDCKECGKAFRCPSQLSQHKRIHTGEKTYQCPECGKAFFYASGLSRHQSVHTGEKPYECKTCGKAFKQLTQLTRHQRIHDLT

SEQ ID NO: 91357 - protein, 230 aa, Homo sapiens
MDSELMHSIVGSYHKPPERVFVPSFTQNEPSQNCHPANLEVTSPKILHSPNSQALILALKTLQEKIHRLELERTQAEDNLNILSREAAQYKKALENETNERNLAHQELIKQKKDISIQLSSAQSRCTLLEKQLEYTKRMVLNVEREKNMILEQQAQLQREKEQDQMKLYAKLEKLDVLEKECFRLTTTQKTAEDKIKHLEEKLKEEEHQRKLFQDKASELQTGLEISKII

SEQ ID NO: 91358 - protein, 745 aa, Homo sapiens
MERAGATSRGGQAPGFLLRLHTEGRAEAARVQEQDLRQWGLTVVFSLLLTGTPIQNSLQELYSLLSFVEPDLFSKEEVGDFIQRYQDIEKESESASELHKLLQPFLLRRVKAEVATELPKKTEVVIYHGMSALQKKYYKAILMKDLDAFENETAKKVKLQNILSQLRKCVDHPYLFDGVEPEPFEVGDHLTEASGKLHLLDKLLAFLYSGGHRVLLFSQMTQMLDILQDYMDYRGYSYERVDGSVRGEERHLAIKNFGQQPIFVFLLSTRAGGVGMNLTAADTVIFVDSDFNPQNDLQAAARAHRIGQNKSVKVIRLIGRDTVEEIVYRKAASKLQLTNMIIEGGHFTLGAQKPAADADLQLSEILKFGLDKLLASEGSTMDEIDLESILGETKDGQWVSDALPAAEGGSRDQEEGKNHMYLFEGKDYSKEPSKEDRKSFEQLVNLQKTLLEKASQEGRSLRNKGSVLIPGLVEGSTKRKRVLSPEELEDRQKKRQEAAAKRRRLIEEKKRQKEEAEHKKKMAWWESNNYQSFCLPSEESEPEDLENGEESSAELDYQDPDATSLKYVSGDVTHPQAGAEDALIVHCVDDSGHWGRGGLFTALEKRSAEPRKIYELAGKMKDLSLGGVLLFPVDDKESRNKGQDLLALIVAQHRDRSNVLSGIKMAALEEGLKKIFLAAKKKKASVHLPRIGHATKGFNWYGTERLIRKHLAARGIPTYIYYFPRSKSAVLHSQSSSSSSRQLVP

SEQ ID NO: 91359 - protein, 49 aa, Homo sapiens
MRGCAADDIMDPTSLAETQEDHNGGQKQLSPQKVTLYLRPGQAAAFNVT

SEQ ID NO: 91360 - protein, 168 aa, Homo sapiens
MAGSGLELPFWSQRQASAAETMSADGAEADGSTQVTVEEPVQQPSVVDRVASMPLISSTCDMVSAAYASTKESYPHIKTVCDAAEKGVRTLTAAAVSGAQPILSKLEPQIASASEYAHRGLDKLEENLPILQQPTEKVLADTKELVSSKVSGAQEMVSSAKDTVATQL

SEQ ID NO: 91361 - protein, 20 aa, Homo sapiens
  MOD_RES (1)..(1): Any amino acid
XLCGLFGAVAASLLFFTVFR

SEQ ID NO: 91362 - protein, 45 aa, Homo sapiens
MQAMDPAAADLYEEDGKDLDFYDFEPLPTLPEDEHRLPRRHLGWV

SEQ ID NO: 91363 - protein, 173 aa, Homo sapiens
MSTVKEAAHRLSKSEMSLYAVLDLKKGASPEDFKKSYRKLALRYHPDKNPGNAQAAEIFKEINAAHAILSDSKKRKIYDQHGSLGIYLYDHFGEEGVRYYFILNSCWFKTLVILCTLLTCCCFCCCCCFCCGALKPPPEQDSGRKYQQNVQSQPPRSGAKCDFRSEENSEDDF

SEQ ID NO: 91364 - protein, 51 aa, Homo sapiens
MGEEPSPFRGRSRSAPPNLWAAQRYGRELRRMSDEFVDSFKKGLPRPKSAG

SEQ ID NO: 91365 - protein, 181 aa, Homo sapiens
MKPILLQGHERSITQIKYNREGDLLFTVAKDPSGEVLVNVKEHSRQINDIQLSRDMTMFVTASKDNTAKLFDSTTLEHQKTFRTERPVNSAALSPNYDHVVLGGGQEAMDVTTTSTRIGKFEARFFHLAFEEEFGRVKGHFGPINSVAFHPDGKSYSSGGEDGYVRIHYFDPQYFEFEFEA

SEQ ID NO: 91366 - protein, 145 aa, Homo sapiens
  MOD_RES (1)..(1): Any amino acid
XCINQLVRNGNEAQKEKYLPKLISGEYIGALAMSEPNAGSDVVSMKLKAEKKGNHYILNGNKFWITNGPDADVLIVYAKTDLAAVPASRGITAFIVEKGMPGFSTSKKLDKLGMRGSNTCELIFEDCKIPGSCKRSWTTPFPTCT

SEQ ID NO: 91367 - protein, 260 aa, Homo sapiens
MSRLRALLGLGLLVAGSRVPRIKSQTIACRSGPTWWGPQRLNSGGRWDSEVMASTVVKYLSQEEAQAVDQELFNEYQFSVDQLMELAGLSCATAIAKAYPPTSMSRSPPTVLVICGPGNNGGDGLVCARHLKLFGYEPTIYYPKRPNKPLFTALVTQCQKMDIPFLGEMPAELQGRCSGTVPQHPECPEGTHCAHCQHRHSLRMGRGEGKCWRDPARLAHIPHSPQKICNPVYRSLPLPGGSFCATCSGEEVPAEPATLP

SEQ ID NO: 91368 - protein, 220 aa, Homo sapiens
MAGNKGRGRAAYTFNIEAVGFSKGEKLPDVVLKPPPLFPDTDYKPVPLKTGEGEEYMLALKQELRETMKRMPYFIETPEERQDIERYSKRYMKVYKEEWIPDWRRLPREMMPRNKCKKAGPKPKKAKDAGKGTPLTNTEDVLKKMEELEKRGDGEKSDEENEEKEGSKEKSKEGDDDDDDDAAEQEEYDEEEQEEENDYINSYFEDGDDFGADSDDNMDE

SEQ ID NO: 91369 - protein, 252 aa, Homo sapiens
MAKDNSTVRCFQGLLIFGNVIIGCCGIALTAECIFFVSDQHSLYPLLEATDNDDIYGAAWIGIFVGICLFCLSVLGIVGIMKSSRKILLAYFILMFIVYAFEVASCITAATQQDFQMLERYQNNSPPNNDDQWKNNGVTKTWDRLMLQDNCCGVNGPSDWQKYTSAFRTENNDADYPWPRQCCVMNNLKEPLNLEACKLGVPGFYHNQGCYELISGPMNRHAWGVAWFGFAILCWTFWVLLGTMFYWSRIEY

SEQ ID NO: 91370 - protein, 981 aa, Homo sapiens
MATAAETSASEPEAESKAGPKADGEEDEVKAARTRRKVLSRAVAAATYKTMGPAWDQQEEGVSESDGDEYAMASSAESSPGEYEWEYDEEEEKNQLEIERLEEQLSINVYDYNCHVDLIRLLRLEGELTKVRMARQKMSEIFPLTEELWLEWLHDEISMAQDGLDREHVYDLFEKAVKDYICPNIWLEYGQYSVGGIGQKGGLEKVRSVFERALSSVGLHMTKGLALWEAYREFESAIVEAARPVAGFLSPFDREQTFDSQLEKVHSLFRRQLAIPLYDMEATFAEYEEWSEDPIPESVIQNYNKALQQLEKYKPYEEALLQAEAPRLAEYQAYIDFEMKIGDPARIQLIFERALVENCLVPDLWIRYSQYLDRQLKVKDLVLSVHNRAIRNCPWTVALWSRYLLAMERHGVDHQVISVTFEKALNAGFIQATDYVEIWQAYLDYLRRRVDFKQDSSKELEELRAAFTRALEYLKQEVEERFNESGDPSCVIMQNWARIEARLCNNMQKARELWDSIMTRGNAKYANMWLEYYNLERAHGDTQHCRKALHRAVQCTSDYPEHVCEVLLTMERTEGSLEDWDIAVQKTETRLARVNEQRMKAAEKEAALVQQEEEKAEQRKRARAEKKALKKKKKIRGPEKRGADEDDEKEWGDDEEEQPSKRRRVENSIPAAGETQNVEVAAGPAGKCAAVDVEPPSKQKEKAASLKRDMPKVLHDSSKDSITVFVSNLPYSMQEPDTKLRPLFEACGEVVQIRPIFSNRGDFRGYCYVEFKEEKSALQALEMDRKSVEGRPMFVSPCVDKSKNPDFKVFRYSTSLEKHKLFISGLPFSCTKEELEEICKAHGTVKDLRLVTNRAGKPKGLAYVEYENESQASQAVMKMDGMTIKENIIKVAISNPPQRKVPEKPETRKAPGGPMLLPQTYGARGKGRTQLSLLPRALQRPSAAAPQAENGPAAAPAVAAPAATEAPKMSNADFAKLFLRK

SEQ ID NO: 91371 - protein, 277 aa, Homo sapiens
FFQNIQLPVLADGLPDTSFFAPDCIHPNQKFHSQLARALWTNMLEPLGSKTETLDLRAEMPITCPTQNEPFLRTPRNSNYTYPIKPAIENWGSDFLCTEWKASNSVPTSVHQLRPADIKVVAALGDSLTTAVGARPNNSSDLPTSWRGLSWSIGGDGNLETHTTLPNILKKFNPYLLGFSTSTWEGTAGLNVAAEGARARDMPAQAWDLVERMKNSPDINLEKDWKLVTLFIGVNDLCHYCENPVGPRPTPWGPEKEGGPLGHGICSAHPTGPGHPL

SEQ ID NO: 91372 - protein, 152 aa, Homo sapiens
MPPSWSPLMCGRAAEAAASSRTPGREMGQAVTRRLGAGARAAPRRAMDGRTPRPQDAPARRKPKAKAPLPPAETKYTDVSSAADSVESTAFIMEQKENMIDKDVELSVVLPGDIIKSTTVHGRYAGVNEISGPPLLIPPLKVSVIYVLMFVL

SEQ ID NO: 91373 - protein, 13 aa, Homo sapiens
MASADKNGGSVSS

SEQ ID NO: 91374 - protein, 50 aa, Homo sapiens
MGTRAFSHDSIFIPDGGAESEQTVQAMSQDNILGKVKTLQQQLGKNIKFG

SEQ ID NO: 91375 - protein, 245 aa, Homo sapiens
  MOD_RES (1)..(1): Any amino acid
XCFKSLKCPLLTAQFFEQSEEGGNDPFRYFASEIIGFLSAIGHPFPKMIFNHGRKKRTWNYLEFEEEENKQLADSMASLAYLVFVQGIHIDQLPMVLSPLYLLQFNMGHIEVFLQRTEESVISKGLELLENSLLRIEDNSLLYQYLEIKSFLTVPQGLVKVMTLCPIETLEVQVWMYYMHKMDSDEVWRTRNNKWFTGPQLISLLDLVLFLPEGAETDLLQNSDRIMASLNLLRYLVIKDNENDN

SEQ ID NO: 91376 - protein, 160 aa, Homo sapiens
MADSAELKQMVMSLRVSELQVLLGYAGRNKHGRKHELLTKALHLLKAGCSPAVQMKIKELYRRRFPQKIMTPADLSIPNVHSSPMPATLSPSTIPQLTYDGHPASSPLLPVSLLGPKHELELPHLTSALHPVHPDIKLQKLPFYDLLDELIKPTSLAEII

SEQ ID NO: 91377 - protein, 203 aa, Homo sapiens
MENCSAASTFLTDSLELELGTEWCKPPYFSCAVDNRGGGKHFSGESYLCSGALKRLILNLDPLPTNFEEDTLEIFGIQWVTETALVNSSRELFHLFRQQLYNLETLLQSSCDFGKVSTLHCKADNIRQQCVLFLHYVKVFIFRYLKVQNAESHVPVHPYEALEAQLPSVLIDELHGLLLYIGHLSELPSVNIGAFVNQNQIKL

SEQ ID NO: 91378 - protein, 177 aa, Homo sapiens
MTTSHQPQDRYKAVWLIFFMLGLGTLLPWNFFMTATQYFTNRLDMSQNVSLVTAELSKDAQASAAPAAPLPERNSLSAIFNNVMTLCAMLPLLLFTYLNSFLHQRIPQSVRILGSLVAILLVFLITAILVKVQLDALPFFVITMIKIVLINSFGAILQGSLFGLAGLLPASYTAPIM

SEQ ID NO: 91379 - protein, 242 aa, Homo sapiens
  MOD_RES (1)..(1): Any amino acid
XPVGSWYNVTILVKMDFKELQQVDPRLLNHMRLLHSLVTSALQPMASTVHHLHSAPGNASTTVSRLLLGLPRPLPVADVSTLLGDIAKRVYEVISVQVQDVNECFYEELNACSGRELCANLEGSYWCVCHQEAPATSPRKLNLEWEDCPPVSDYVVLNVTSDSFQVSWRLNSTQNHTFHVRVYRGMELLRSARTQSQALAVAGLEAGVLYRVKTSYQGCGADVSTTLTIKTKYVLEKLDFQS

SEQ ID NO: 91380 - protein, 92 aa, Homo sapiens
  MOD_RES (1)..(1): Any amino acid
XEWLPRDSECHLCMSVTTQAGNSSEQAIPQAMLQACVGSWLDREKCKQFVEQHTPQLLTLVPRGWDAHTTCQALGVCGTMSSPLQCIHSPDL

SEQ ID NO: 91381 - protein, 72 aa, Homo sapiens
DIRSLNIQWLRDQIGIVEQEPVLFSTTIAENIRYGREDATMEDIVQAAKEANAYNFIMDLPQGYFFQWKSEQ

SEQ ID NO: 91382 - protein, 546 aa, Homo sapiens
MMKTFFSTGQGNTEAFHTGTLQRQASHHIGDFCFQKIEKDIHGFQFQWKEDETNDHAAPMTEIKELTGSTGQHDQRHAGNKHIKDQLGLSFHSHLPELHIFQPEGKIGNQVEKSINNASSVSTSQRICCRPKTHISNKYGNNSLHSSLLTQKRNVHMREKSFQCIESGKSFNCSSLLKKHQITHLEEKQCKCDVYGKVFNQKRYLACHRRSHIDEKPYKCNECGKIFGHNTSLFLHKALHTADKPYECEECDKVFSRKSHLETHKIIYTGGKPYKCKVCDKAFTCNSYLAKHTIIHTGEKPYKCNECGKVFNRLSTLARHRRLHTGEKPYECEECEKVFSRKSHLERHKRIHTGEKPYKCKVCDKAFAYNSYLAKHSIIHTGEKPYKCNECGKVFNQQSTLARHHRLHTAEKPYKCEECDKVFRCKSHLERHRRIHTGEKPYKCKVCDKAFRSDSCLTEHQRVHTGEKPYMCNECGKVFSTKANLACHHKLHTAEKPYKCEECEKVFSRKSHMERHRRIHTGEKPYKCKVCDKAFRRDSHLAQHQR

SEQ ID NO: 91383 - protein, 99 aa, Homo sapiens
MAFRDVAVDFTQDEWRLLSPAQRTLYREVMLENYSNLVSLGISFSKPELITQLEQGKETWREEKKCSPATCPDHQEYGNNCDLQKEADPEPELYLDPFC

SEQ ID NO: 91384 - protein, 116 aa, Homo sapiens
  MOD_RES (1)..(1): Any amino acid
XYVQMCKDKRTGPEAPRNGTVHLYLTKPLYTSAPSLQHLCRLTINKCTGAIWGLPLPTRLKDYLEEYKFQVQAPVGEKELLIGILKKWEGTKLTQASLQFDMPADQSLLGILYFAF

SEQ ID NO: 91385 - protein, 169 aa, Homo sapiens
MVRYSLDPENPTKSCKSRGSNLRVHFKNTRETAQAIKGMHIRKATKYLKDVTLQKQCVPFRRYNGGVGRCAQAKQWGWTQGRWPKKSAEFLLHMLKNAESNAELKGLDVDSLVIEHIQVNKAPKMRRRTYRAHGRINPYMSSPCHIEMILTEKEQIVPKPEEEVAQKKK

SEQ ID NO: 91386 - protein, 242 aa, Homo sapiens
MWKLLRGLSREAETFKEQGNAYYAKKDYNEAYNYYTKAIDMCPKNASYYGNRAATLMMLGRFREALGDAQQSVRLDDSFVRGHLREGKCHLSLGNAMAACRSFQRALELDHKNAQAQQEFKNANAVMEYEKIAETDFEKRDFRKVVFCMDRALEFAPACHRFKILKAECLAMLGRYPEAQSVASDILRMDSTNADALYVRGLCLYYEDCIEKAVQFFVQALRMAPDHEKACIACRNAKALKA

SEQ ID NO: 91387 - protein, 117 aa, Homo sapiens
  MOD_RES (1)..(1): Any amino acid
XTDFVNDVKDYLRNMKEYEVDNDGVFEKLDEYIYRHFFGHTFSPPYGPSRPDKKQRMVNIENSRHRKQEQKHLQPQPYKREDGVLLCRPGWSAVARSRLTASSASRVHAILLPQPPE

SEQ ID NO: 91388 - protein, 77 aa, Homo sapiens
MGSKDHAVFFREMTQLILNEMPKAGYSSILNDFVESNFFVIDGDSLLVTCLGVKSFKWGQNLHFFYLVECYLVDLLS

SEQ ID NO: 91389 - protein, 247 aa, Homo sapiens
MPATLLRAVARSHHILSKAHQCRRIGHLMLKPLKEFENTTCSTLTIRQSLDLFLPDKTASGLNKSQILEMNQKKSDTSMLSPLNAARCQDEKAHLPTMKSFGTHRRVTHKPNLLGSKWFIKILKRHFSSVSTETFVPKQDFPQVKRPLKASRTRQPSRTNLPVLSVNEDLMHCTAFATADEYHLGNLSQDLASHGYVEVTSLPRDAANILVMGVENSAKEGDPGTIFFFSCFFYFFKSGKELLCFGM

SEQ ID NO: 91390 - protein, 511 aa, Homo sapiens
MKRTTSFRMAEDDPYLGRPEQMFHLDPSLTHTIFNPEVFQPQMALPTDGPYLQILEQPKQRGFRFRYVCEGPSHGGLPGASSEKNKKSYPQVKICNYVGPAKVIVQLVTNGKNIHLHAHSLVGKHCEDGICTVTAGPKDMVVGFANLGILHVTKKKVFETLEARMTEACIRGYNPGLLVHPDLAYLQAEGGGDRQLGDREKELIRQAALQQTKEMDLSVVRLMFTAFLPDSTGSFTRRLEPVVSDAIYDSKAPNASNLKIVRMDRTAGCVTGGEEIYLLCDKVQKDDIQIRFYEEEENGGVWEGFGDFSPTDVHRQFAIVFKTPKYKDINITKPASVFVQLRRKSDLETSEPKPFLYYPEIKDKEEVQRKRQKLMPNFSDSFGGGSGAGAGGGGMFGSGGGGGGTGSTGPGYSFPHYGFPTYGGITFHPGTTKSNAGMKHGTMDTESKKDPEGCDKSDDKNTVNLFGKVIETTEQDQEPSEATVGNGEVTLTYATGTKEESAGVQGHPRSY

SEQ ID NO: 91391 - protein, 706 aa, Homo sapiens
MAGLTAAAPRPGVLLLLLSILHPSRPGGVPGAIPGGVPGGVFYPGAGLGALGGGALGPGGKPLKPVPGGLAGAGLGAGLGAFPAVTFPGALVPGGVADAAAAYKAAKAGAGLGGVPGVGGLGVSAGAVVPQPGAGVKPGKVPGVGLPGVYPGGVLPGARFPGVGVLPGVPTGAGVKPKAPGVGGAFAGIPGVGPFGGPQPGVPLGYPIKAPKLPGGYGLPYTTGKLPYGYGPGGVAGAAGKAGYPTGTGVGPQAAAAAAAKAAAKFGAGAAGVLPGVGGAGVPGVPGAIPGIGGIAGVGTPAAAAAAAAAAKAAKYGAAAGLVPGGPGFGPGVVGVPGAGVPGVGVPGAGIPVVPGAGIPGAAVPGVVSPEAAAKAAAKAAKYGARPGVGVGGIPTYGVGAGGFPGFGVGVGGIPGVAGVPGVGGVPGVGGVPGVGISPEAQAAAAAKAAKYGVGTPAAAAAKAAAKAAQFGLVPGVGVAPGVGVAPGVGVAPGVGLAPGVGVAPGVGVAPGVGVAPGIGPGGVAAAAKSAAKVAAKAQLRAAAGLGAGIPGLGVGVGVPGLGVGAGVPGLGVGAGVPGFGAVPGALAAAKAAKYGAAVPGVLGGLGALGGVGIPGGVVGAGPAAAAAAAKAAAKAAQFGLVGAAGLGGLGVGGLGVPGVGGLGGIPPAAAAKAAKYGVAARPGFGLSPIFPGGACLGKACGRKRK

SEQ ID NO: 91392 - protein, 938 aa, Homo sapiens
MPALEHMNQILHILFVFLPFLWALGTLPPPDALLLWAMEQVLEFGLGGSSMSTHLRLLVMFIMSAGTAIASYFIPSTVGVVLFMTGFGFLLSLNLSDMGHKIGTKSKDLPSGPEKHFSWKECLFYIIILVLALLETSLLHHFAGFSQISKSNSQAIVGYGLMILLIILWILREIQSVYIIGIFRNPFYPKDVQTVTVFFEKQTRLMKIGIVRRILLTLVSPFAMIAFLSLDSSLQGLHSVSVCIGFTRAFRMVWQNTENALLETVIVSTVHLISSTDIWWNRSLDTGLRLLLVGIIRDRLIQFISKLQFAVTVLLTSWTEKKQRRKTTATLCILNIVFSPFVLVIIVFSTLLSSPLLPLFTLPVFLVGFPRPIQSWPGAAGTTACVCADTVYYYQMVPRLTAVLQTAMAAGSLGLLLPGSHYLGRFQDRLMWIMILECGYTYCSINIKGLELQETSCHTAEARRVDEVFEDAFEQEYTRVCSLNEHFGNVLTPCTVLPVKLYSDARNVLSGIIDSHENLKEFKGDLIKVLVWILVQYCSKRPGMKENVHNTENKGKAPLMLPALNTLPPPKSPEDIDSLNSETFNDWSDDNIFDDEPTIKKVIEEKHQLKDLPGTNLFIPGSVESQRVGDHSTGTVPENDLYKAVLLGYPAVDKGKQEDMPYIPLMEFSCSHSHLVCLPAEWRTSCMPSSKMKEMSSLFPEDWYQFVLRQLECYHSEEKASNVLEEIAKDKVLKDFYVHTVMTCYFSLFGIDNMAPSPGHILRVYGGVLPWSVALDWLTEKPELFQLALKAFRYTLKLMIDKASLGPIEDFRELIKYLEEYERDWYIGLVSDEKWKEAILQEKPYLFSLGYDSNMGIYTGRVLSLQELLIQVGKLNPEAVRGQWANLSWELLYATNDDEERYSIQAHPLLLRNLTVQAAEPPLGYPIYSSKPLHIHLY

SEQ ID NO: 91393 - protein, 119 aa, Homo sapiens
MTKKTRDLRRQLRKAVMDHVSDSFLETNVPLLVLIEAAKNGNEKEVKEYAQVFREHANKLIEVANLACSISNNEEGVKLVRMSASQLEALCPQVINAALALAAKPQSKLAQENMDLFKE

SEQ ID NO: 91394 - protein, 305 aa, Homo sapiens
MEEEKYLPELMAEKDSLDPSFVHASRLLAEEIEKFQGSDGKKEDEEKKYLDVISNKNIKLSERVLIPVKQYPKFNFVGKLLGPRGNSLKRLQEETGAKMSILGKGSMRDKAKEEELRKSGEAKYAHLSDELHVLIEVFAPPGEAYSRMSHALEEIKKFLVPDYNDEIRQEQLRELSYLNGSEDSGRGRGIRGRGIRIAPTAPSRGRGGAIPPPPPPGRGVLTPRGSTVTRGALPVPPVARGVPTPRARGAPTVPGYRAPPPPAHEAYEEYGYDDGYGGEYDDQTYETYDNSYATQTQRTYRVCGQ

SEQ ID NO: 91395 - protein, 254 aa, Homo sapiens
PRALLAALWALEAAGTAALRIGAFNIQSFGDSKVSDPACGSIIAKILAGYDLALVQEVRDPDLSAVSALMEQINSVSEHEYSFVSSQPLGRDQYKEMYLFVYRKDAVSVVDTYLYPDPEDVFSREPFVVKFSAPGTGERAPPLPSRRALTPPPLPAAAQNLVLIPLHAAPHQAVAEIDALYDVYLDVIDKWGTDDWAAIRLRSSEVFKWLIPDSADTTVGNSDCAYDRIVACGARLRRSLKPQSATVHDFQEEF

SEQ ID NO: 91396 - protein, 115 aa, Homo sapiens
MDAQCSAKVNARKRRKEAPGPNGATEEDGVPSKVQRCAVGLRQPAPFSDEIEVDFSKPYVRVTMEEASRGTPCERPVRVYADGIFDLFHSGHARALMQAKNLFPNTYLIVGVCSD

SEQ ID NO: 91397 - protein, 180 aa, Homo sapiens
MDQSGMEIPVTLIIKAPNQKYSDQTISCFLNWTVGKLKTHLSNVYPSKPSSDHSGSTTPSSGQETLSLAVGSSSEGLRQRTLPQAQTDQAQSHQFPYVMQGNVDNQFPGQAAPPGFPVYPAFSPLQMLWWQQMYAHQYYMQYQAAVSAQATSNVNPTQPTTSQPLNLAHVPGEEPPPAPN

SEQ ID NO: 91398 - protein, 127 aa, Homo sapiens
MTTEVGSVSEVKKDSSQLGTDATKEKPKEVAENQQNQSSDPEEEKGSQPPPAAESQSSLRRQKREKETSESRGISRFIPPWLKKQKSYTLVVAKDGGDKKEPTQAVVEEQVLDKEEPLPEEQRQAKG

SEQ ID NO: 91399 - protein, 224 aa, Homo sapiens
MIRDLSKMYPQTRHPAPHQPAQPFKFTISESCDRIKEEFQFLQAQYHSLKLECEKLASEKTEMQRHYVMYYEMSYGLNIEMHKQAEIVKRLNAICAQVIPFLSQEHQQQVVQAVERAKQVTMAELNAIIGEKKNKSDTPGSLKQQQLQAQHLSHGHGLPVPLTPHPSGLQPPAIPPIGSSAGLLALSSALGGQSHLPIKDEKKHHDNDHQRGEQRLHQELFSIP

SEQ ID NO: 91400 - protein, 238 aa, Homo sapiens
MLPLSLLKTAQNHPMLVELKNGETYNGHLVSCDNWMNINLREVICTSRDGDKFWRMPECYIRGSTIKYLRIPDEIIDMVKEEVVAKGRGRGGLQQQKQQKGRGMGGAGRGGSPLSSGRTWGGKTATRGIPPSWGCPCSAASEPPNPPGPPSWSLAMSRGPGRGAPRPGTQPSSHCASWRSSGHIKSPPQASVSPLRGYGGAHLSRPLATPLGTWRGSIQSQGRPPPPEMMNWHKIPFV

SEQ ID NO: 91401 - protein, 82 aa, Homo sapiens
MANPKLLGMGLSEAEAIGADSARFEELLLQASKELQQAQTTRPESTQIQPQPGFCIKTNSSEGKVFINICHSPSIPPPADVT

SEQ ID NO: 91402 - protein, 639 aa, Homo sapiens
MILFPPHGVGVRISRFLQGNTHDRNKLAQTLPPTQLPPSGTKCLESLLGSVPPPCPGLHSLRELPDPVLSEEVVEGIAAGIEAALWDLTQGTNGRYKTKYRSLLFNLRDPRNLDLFLKVVHGDVTPYDLVRMSSMQLAPQELARWRDQEEKRGLNIIEQQQKEPCRLPASKMTHKGEVEIQRDMDQTLTLEDLGPQMFMDCSPQALPIASEDTTGQHDHHFLDPNCHICKDWEPSNELLGSFEAAKSCGDNIFQKALSQTPMPAPEMPKTRELSPTEPQDRVPPSGLHVPAAPTKALPCLPPWEGVLDMFSIKRFRARAQLVSGHSCRLVQALPTVIRSAGCIPSNIVWDLLASICPAKAKDVCVVRLCPHGARDTQNCRLLYSYLNDRQRHGLASVEHMGMVLLPLPAFQPLPTRLRPLGGPGLEVTHSSLLLAVLLPKEGLPDTAGSSPWLGKVQKMVSFNSKVEKRYYQPDDRRPNVPLKGTPPPGGAWQQSQGRGSIAPRGISAWQRPPRGRGRLWPEPENWQHPGRGQWPPEPGLRQSQHPYSVAPAGHGFGRGQHFHRDSCPHQALLRHLESLATMSHQLQALLCPQTKSSIPRPLQRLSSALAAPEPPGPARDSSLGPTDEAGSECPFPRKA

SEQ ID NO: 91403 - protein, 164 aa, Homo sapiens
MANISMCQALGFILGPVFQTCFTFLGEKGVTWDVIKLQINMYTTPVLLSAFLGILNIILILAILREHRVDDSGRQCKSINFEEASTDEAQVPQGNIDQVAVVAINVLFFVTLFIFALFETIITPLTMDMYAWTQEQAVLYNGIILAALGVEAVVIFLGVKLLSK

SEQ ID NO: 91404 - protein, 38 aa, Homo sapiens
  MOD_RES (1)..(1): Any amino acid
XARATTKKIEDLTELEGWEELEDNEKEQITQHIAEIVH

SEQ ID NO: 91405 - protein, 137 aa, Homo sapiens
MTMETQMSQNVCPRNLWLLQPLTVLLLLASADSQAAAPPKAVLKLEPPWINVLQEDSVTLTCQGARSPESDSIQWFHNGNLIPTHTQPSYRFKANNNDSGEYTCQTGQTSLSDPVHLTVLSGQWRKAPGWTWEGQDG

SEQ ID NO: 91406 - protein, 179 aa, Homo sapiens
MQRGKPCRALPTLKCQTFCQRHGLMFEVVDLRWGIRNIEATDHLTTELCLEEVDRCWKTSIGPAFVALIGDQYGPCLIPSRIDEKEWEVLRDHLTARPSDLELVARYFQRDENAFPPTYVLQAPGTGEACEPEEATLTSVLRSGAQEARRLGLITQEQWQHYHRSGEAAGTPLWRPTRN

SEQ ID NO: 91407 - protein, 94 aa, Homo sapiens
MATLKDQLIYNLLKEEQTPQNKITVVGVGAVGMACAISILMKDLADELALVDVIEDKLKGEMMDLQHGSLFLRTPKIVSGKALPNCSYIKLQLD

SEQ ID NO: 91408 - protein, 83 aa, Homo sapiens
MKQERKMHFQEGRRAQQQLENGFKQLENSKRKFERDCREAEKAAQTAERLDQDINATKADVEKAKQQAHLRSHMAEESKNEYA

SEQ ID NO: 91409 - protein, 92 aa, Homo sapiens
MEATRRRQHLGATGGPGAQLGASFLQARRKWRAGFLHFSDHYAHANKTRRPKERNSSSHVDGGQGEERLRHGVRPAVKTHESGGEAHPQGSG

SEQ ID NO: 91410 - protein, 20 aa, Homo sapiens
  MOD_RES (1)..(1): Any amino acid
XTTGWFKIFAEGTKLIVTSP

SEQ ID NO: 91411 - protein, 89 aa, Homo sapiens
CPFDPTRIYDTALALWIPSLLMSAGEAALSGYCCVAALTLRGVGPCRKDGLQGQLEEMTELESPKCKRQENEQLLDQNQEIRASQRSWV

SEQ ID NO: 91412 - protein, 68 aa, Homo sapiens
MKAVKSERERGSRSPPKKKNKASGRRSKSPRSKRNRSPHHSTVKVKQSVFMLLIKTYPRPGDLQKKEV

SEQ ID NO: 91413 - protein, 132 aa, Homo sapiens
MKGKKGIVAASGSETEDEDSMDIPLDLSSSAGSGKRRRRGNLPKESVQILRDWLYEHRYNAYPSEQEKALLSQQTHLSTLQVKKESVRFMDAFLVSKSFYGIPVCQVIKLLATQRQKEYLFIVNLIVLKANN

SEQ ID NO: 91414 - protein, 88 aa, Homo sapiens
MAAAAAEQQQFYLLLGNLLSPDNVVRKQAEETYENIPGQSKITFLLQAIRNTTAAEEARQMAAVLLRRLLSSAFDEVYPALPSDVQTA

SEQ ID NO: 91415 - protein, 519 aa, Homo sapiens
MTTGLILFFQSGRPLGAGVRLGLGLRMNRTKGDEEEYWNSSKFKAFTFDDEDDELSQLKESKRAVNSLRDFVDDDDDDDLERVSWSGEPVGSISWSIRETAGNSGSTHEGREQLKSRNSFSSYAQLPKPTSTYSLSSFFRGRTRPGSFQSLSDALSDTPAKSYAPELGRPKGEYRDYSNDWSPSDTVRRLRKGKVCSLERFRSLQDKLQLLEEAVSMHDGNVITAVLIFLKRTLSKEILFRELEVRQVALRHLIHFLKEIGDQKLLLDLFRFLDRTEELALSHYREHLNIQDPDKRKEFLKTCVGLPFSAEDSAHIQDHYTLLERQIIIEANDRHLESAGQTEIFRKHPRKASILNMPLVTTLFYSCFYHYTEAEGTFSSPVNLKKTFKIPDKQYVLTALAARAKLRAWNDVDALFTTKNWLGYTKKRAPIGFHRVVEILHKNNAPVQILQEYVNLVEDVDTKLNLATKFKCHDVVIDTYRDLKDRQQLLAYRSKVDKGSAEEEKIDALLSSSQIRWKN

SEQ ID NO: 91416 - protein, 320 aa, Homo sapiens
MDVRALPWLPWLLWLLCRGGGDADSRAPFTPTWPRSREREAAAFRESLNRHRYLNSLFPSENSTAFYGINQFSYLFPEEFKAIYLRSKPSKFPRYSAEVHMSIPNVSLPLRFDWRDKQVVTQVRNQQMCGGCWAFSVVGAVESAYAIKGKPLEDLSVQQVIDCSYNNYGCNGGSTLNALNWLNKMQVKLVKDSEYPFKAQNGLCHYFSGSHSGFSIKGYSAYDFSDQEDEMAKALLTFGPLVVIVDAVSWQDYLGGIIQHHCSSGEANHAVLITGFDKTGSTPYWIVRNSWGSSWGVDGYAHVKMGSNVCIADSVSSIFV

SEQ ID NO: 91417 - protein, 117 aa, Homo sapiens
  MOD_RES (1)..(1): Any amino acid
XFVYCWPRHNGNPHDLLDIRQMRDKNRKPVVMKIKPEHVPRAKHKETPLYILCTAGMRILPESQQKAILEDLLTDIPVHFDFLFSDSHAEVISGKQEGVYAWIGINFVLGRFEHIED

SEQ ID NO: 91418 - protein, 178 aa, Homo sapiens
MDAMKRGLCCVLLLCGAVFVSPSQEIHARFRRGARSYQVICRDEKTQMIYQQHQSWLRPVLRSNRVEYCWCNSGRAQCHSVPVKSCSEPRCFNGGTCQQALYFSDFVCQCPEGFAGKCCEIDTRATCYEDQGISYRGTWSTAESGAECTNWNSSALAQKPYSGRRPDAIRLGLGNHNY

SEQ ID NO: 91419 - protein, 228 aa, Homo sapiens
  MOD_RES (1)..(1): Any amino acid
XELKSDLSRPTSSQKKMAAELQFQFVDVLLKDNVSLTKALSTVTQEKLELSRAVSKLEKLLKHHLQKGCSPSRSERSAWKPDETAPQSSLRRPDPGRLPPAASEEAHTSNVKMEKLYLHYLRAESFRKALIYQKKYLLLLIGGFQDSEQETLSMIAHLGVFPSKAERKITSRPFTRFRTAVRVVIAILRLRFLVKKWQEVDRKGALAQGKAPRPDSTSKKSCHPMIKQ

SEQ ID NO: 91420 - protein, 576 aa, Homo sapiens
MAMSQESLTFKDVFVDFTLEEWQQLDSAQKNLYRDVMLENYSHLVSVGHLVGKPDVIFRLGPGDESWMADGGTPVRTCAEVWEVDEQIDHYKESQDKFLWQAAFIGKETLKDESGQECKICRKIIYLNTDFVSVKQRLPKYYSWERCSKHHLNFLGQNRSYVRKKDDGCKAYWKVCLHYNLHKAQPAERFFDPNQRGKALHQKQALRKSQRSQTGEKLYKCTECGKVFIQKANLVVHQRTHTGEKPYECCECAKAFSQKSTLIAHQRTHTGEKPYECSECGKTFIQKSTLIKHQRTHTGEKPFVCDKCPKAFKSSYHLIRHEKTHIRQAFYKGIKCTTSSLIYQRIHTSEKPQCSEHGKASDEKPSPTKHWRTHTKENIYECSKCGKSFRGKSHLSVHQRIHTGEKPYECSICGKTFSGKSHLSVHHRTHTGEKPYECRRCGKAFGEKSTLIVHQRMHTGEKPYKCNECGKAFSEKSPLIKHQRIHTGERPYECTDCKKAFSRKSTLIKHQRIHTGEKPYKCSECGKAFSVKSTLIVHHRTHTGEKPYECRDCGKAFSGKSTLIKHQRSHTGDKNL

SEQ ID NO: 91421 - protein, 298 aa, Homo sapiens
  MOD_RES (1)..(1): Any amino acid
XRETREAWNNVTVWGSRYVVGQTPVYVPYEIRVQAENDFGKGPEPESVIGYSGEDLPSAPRRFRVRQPNLETINLEWDHPEHPNGIMIGYTLKYVAFNGTKVGKQIVENFSPNQTKFTVQRTDPVSRYRFTLSARTQVGSGEAVTEESPAPPNEAYTNNQADIATQGWFIGLMCAIALLVLILLIVCFIKRSRGGKYPVREKKDVPLGPEDPKEEDGSFDYSDEDNKPLQGSQTSLDGTIKQQESDDSLVDYGEGGEGQFNEDGSFIGQYTVKKDKEETEGNESSEATSPVNAIYSLA

SEQ ID NO: 91422 - protein, 60 aa, Homo sapiens
MSKTFIIGELHPDDRPKLNKPPETLITTIDSSSSWWTNWVIPAISAVAVALMYRLYMAED

SEQ ID NO: 91423 - protein, 208 aa, Homo sapiens
MELKVWVDGVQRIVCGVTEVTTCQEVVIALAQAIGRTGRYTLIEKWRDTERHLAPHENPIISLNKWGQYASDVQLILRRTGPSLSERPTSDSVARIPERTLYRQSLPPLAKLRPQIDKSIKRREPKRKSLTFTGGAKGLMDIFGKGKETEFKQKVLNNCKTTADELKKLIRLQTEKLQSIEKQLESNEIEIRFWEQKYNSNLEEEIVR

SEQ ID NO: 91424 - protein, 195 aa, Homo sapiens
  MOD_RES (1)..(1): Any amino acid
XRPGPQPTAETTRQFLMSDKPLHLEASLDKEIYYHGEPISVNVHVTNNTNKTVKKIKISVRQYADICLFNTAQYKCPVAMEEADDTVAPSSTFCKVYTLTPFLANNREKRGLALDGKLKHEDTNLASSTLLREGANREILGIIVSYKVKVKLVVSRGGDVAVELPFTLMHPKPKEEPPHREVMTTLYLRTLLARD

SEQ ID NO: 91425 - protein, 78 aa, Homo sapiens
MADEIAKAQVARPGGDTIFGKIIRKEIPAKIIFEDDRCLAFHDISPQAPTHFLVIPKKHISQISVAEDDDESSVEYLM

SEQ ID NO: 91426 - protein, 881 aa, Homo sapiens
MVSSAQMGFNLQALLEQLSQDELSKFKYLITTFSLAHELQKIPHKEVDKADGKQLVEILTTHCDSYWVEMASLQVFEKMHRMDLSERAKDEVREAALKSFNKRKPLSLGITRKERPPLDVDEMLERFKTEAQDKDNRCRYILKTKFREMWKSWPGDSKEVQVMAERYKMLIPFSNPRVLPGPFSYTVVLYGPAGLGKTTLAQKLMLDWAEDNLIHKFKYAFYLSCRELSRLGPCSFAELVFRDWPELQDDIPHILAQARKILFVIDGFDELGAAPGALIEDICGDWEKKKPVPVLLGSLLNRVMLPKAALLVTTRPRALRDLRILAEEPIYIRVEGFLEEDRRAYFLRHFGDEDQAMRAFELMRSNAALFQLGSAPAVCWIVCTTLKLQMEKGEDPVPTCLTRTGLFLRFLCSRFPQGAQLRGALRTLSLLAAQGLWAQTSVLHREDLERLGVQESDLRLFLDGDILRQDRVSKGCYSFIHLSFQQFLTALFYTLEKEEEEDRDGHAWDIGDVQKLLSGVERLRNPDLIQAGYYSFGLANEKRAKELEATFGCRMSPDIKQELLRCDISCKGGHSTVTDLQELLGCLYESQEEELVKEVMAQFKEISLHLNAVDVVPSSFCVKHCRNLQKMSLQVIKENLPENVTASESDAEVERSQDDQHMLPFWTDLCSIFGSNKDLMGLAINDSFLSASLVRILCEQIASDTCHLQRVVFKNISPADAHRNLCLALRGHKTVTYLTLQGNDQDDMFPALCEVLRHPECNLRYLGLVSCSATTQQWADLSLALEVNQSLTCVNLSDNELLDEGAKLLYTTLRHPKCFLQRLSLENCHLTEANCKDLAAVLVVSRELTHLCLAKNPIGNTGVKFLCEGLRYPECKLQTLV

SEQ ID NO: 91427 - protein, 76 aa, Homo sapiens
MAAEREPPPLGDGKPTDFEDLEDGEDLFTSTVSTLESSPSSPEPASLPAEDISANSNGPKPTEVVLDDDREDLFAD

SEQ ID NO: 91428 - protein, 59 aa, Homo sapiens
MKNATIVMSVRREQGSSSGEGSLSFEDVAVGFTREEWQFLDQSQKVLYKEVMLENYINL

SEQ ID NO: 91429 - protein, 139 aa, Homo sapiens
MSNVSGILETAGVPLVSANWPQPSPPPAVPAGPQMDHMGNSSQGAPWLFLTSALARGVSGIFVWTALVLTCHQIYLHLRSYTVPQEQRYIIRLLLIVPIYAFDSWLSLLLLGDHQYYVYFDSVRDCYEAFVIYSFLSLC

SEQ ID NO: 91430 - protein, 218 aa, Homo sapiens
  MOD_RES (1)..(1): Any amino acid
XSCTLSEILRLHILASGADVTSANAKYRYQKRGGFDATDDACMELRLSNPSLVKKLSSTSVYDLTPGEKMKILHALCGKLLTLVSTRDFIEDYVDILRQAKQEFRELKAEQHRKEREEAAARIRKRKEEKLKEQEQKMKEKQEKLKEDEQRNSTADISIGEEEREDFDTSIESKDTEQKELDQDMVTEDEDDPGSHKRGRRGNTEISLGHSCVFVFNQ

SEQ ID NO: 91431 - protein, 96 aa, Homo sapiens
MDDDIAALVVDNGSGMCKAGFAGDDAPRAVFPSIVGRPRHQGVMVGMGQKDSYVGDEAQSKRGILTLKYPIEHGIVTNWDDMEKIWHHTFYNELRV

SEQ ID NO: 91432 - protein, 58 aa, Homo sapiens
  MOD_RES (1)..(1): Any amino acid
XGESLLMALKDVALSSGSALFYQVWNWPLHYRGGSGLHSGEMHSACEASSRNESKSWF

SEQ ID NO: 91433 - protein, 821 aa, Homo sapiens
MLSDKDPMLGSASNQFCLPVLDSNDPNFQMPCSTVVGLDDIMDEGVVKESGNDTIDEEELILPNRNLRDKVEENSVRSPRKSPRLMAQEQVRSLRQSTIAKRSNAAPLSNTKKASGKTVSTAKAGVKQPERSQVKEEVCMSLKPEYHKENRRCSRNSGQIEVVPEVSVSSSHSSVSSCLEMKDEDGLDSKHKCNNPGEIDVPSHELNCSLLSETCVTIGEKKNEALMECKAKPVGSPLFKFSDKEEHEQNDSISGKTGETVVEEMIATRKVEQDSKETVKLSHEDDHILEDAGSSDISSDAACTNPNKTENSLVGLPSCVDEVTECNLELKDTMGIADKTENTLERNKIEPLGYCEDAESNRQLESTEFNKSNLEVVDTSTFGPESNILENAICDVPDQNSKQLNAIESTKIESHETANLQDDRNSQSSSVSYLESKSVKSKHTKPVIHSKQNMTTDAPKKIVAAKYEVIHSKTKVNVKSVKRNTDVPESQQNFHRPVKVRKKQIDKEPKIQSCNSGVKSVKNQAHSVLKKTLQDQTLVQIFKPLTHSLSDKSHAHPGCLKEPHHPAQTGHVSHSSQKQCHKPQQQAPAMKTNSHVKEELEHPGVEHFKEEDKLKLKKPEKNLQPRQRRSSKSFSLDEPPLFIPDNIATIRREGSDHSSSFESKYMWTPSKQCGFCKKPHGNRFMVGCGRCDDWFHGDCVGLSLSQAQQMGEEDKEYVCVKCCAEEDKKTEILDPDTLENQATVEFHSGDKTMECEKLGLSKHTTNDRTKYIDDTVKHKVKILKRESGEGRNSSDCRDNEIKKWQLAPLRKMGQPVLPRRS

SEQ ID NO: 91434 - protein, 66 aa, Homo sapiens
MNKSLGPVSFKDVAVDFTQEEWQQLDPEQKITYRDVMLENYSNLVSGITLSNRMLSASWSKEKSHG

SEQ ID NO: 91435 - protein, 185 aa, Homo sapiens
MAAMAVGGAGGSRVSSGRDLNCVPEIADTLGAVAKQGADWNTLIVGKLSPWIRPDSKVEKIRRNSEAAMLQELNFGAYLGLPAFLLPLNQEDNTNLARVLTNHIHTGHHSSMFWMRVPLVAPEDLRDDIIENAPTTHTEEYSGEEKTWMWWHNFRTLCDYSKRIAVALEIGADLPSNHVIDRWLG

SEQ ID NO: 91436 - protein, 39 aa, Homo sapiens
MGRKSSKAKEKKQKRLEERAAMDAVCAKVDAANRVECLH

SEQ ID NO: 91437 - protein, 109 aa, Homo sapiens
  MOD_RES (1)..(1): Any amino acid
XGTPPLTFQWSRVGSSLPGRATARNELLHFERAAPEDSGRYRCRVTNKVGSAEAFAQLLVQESRTWTRAAKGRIYARPMDLGGRPRPVPSWLSKVGGWLQASAKSREQR

SEQ ID NO: 91438 - protein, 892 aa, Homo sapiens
GKHKLLSTGPTEPWSIREKLCLASSVMRSGDQNWVSVSRAIKPFAEPGRPPDWFSQKHCASQYSELLETTETPKRKRGEKGEVVETVEDVIVRKLTAERVEELKKVIKETQERYRRLKRDAELIQAGHMDSRLDELCNDIATKKKLEEEEAEVKRKATDAAYQARQAVKTPPRRLPTVMVRSPIDSASPGGDYPLGDLTPTTMEEATSGVTPGTLPSTPVTSFPGIPDTLPPGSAPLEAPMTPVTDDSPQKKMLGQKATPPPSPLLSELLKKGSLLPTSPRLVNESEMAVASGHLNSTGVLLEVGGVLPMIHGGEIQQTPNTVAASPAASESVSQATIVMMPALPAPSSAPAVSTTESVAPVSQPDNCVPMEAVGDPHTVTVSMDSSEISMIINSIKEECFRSGVAEAPVGSKAPSIDGKEELDLAEKMDIAVSYTGEELDFETVGDIIAIIEDKVDDHPEVLDVAAVEAALSFCEENDDPQSLPGPWEHPIQQERDKPVPLPAPEMTVKQERLDFEETENKGIHELVDIREPSAEIKVEPAEPEPVISGAEIVAGVVPATSMEPPELRSQDLDEELGSTAAGEIVEADVAIGKGDETPLTNVKTEASPESMLSPSHGSNPIEDPLEAETQHKFEMSDSLKEESGTIFGSQIKDAPGEDEEEDGVSEAASLEEPKEEDQGEGYLSEMDNEPPVSESDDGFSIHNATLQSHTLADSIPSSPASSQFSVCSEDQEAIQAQKIWKKAIMLVWRAAANHRYANVFLQPVTDDIAPGYHSIVQRPMDLSTIKKNIENGLIRSTAEFQRDIMLMFQNAVMYNSSDHDVYHMAVEMQRDVLEQIQQFLATQLIMQTSESGISAKSLRGRDSTRKQDASEKDGGTRGRRCAIEADMKMKK

SEQ ID NO: 91439 - protein, 1089 aa, Homo sapiens
MKNLLTEKCISSHNFHQKVIKQRMEKKVDSRFYYEQRLLRKVFEEWKEEWWVFQHEWKLCVRADCHYRVWWSTWRQRLGQVRVSRALHASALKHRALSLQVQAWSQWREQLLYVQKEKQKVVSAVKHHQHWQKRRFLKAWLEYLQVRRVKRQQNEMAERFHHVTVLQIYFCDWQQAWERRESLYAHHAQVEKLARKMALRRAFTHWKHYMLLCAEEAAQFEMAEEHHRHSQLYFCFRALKDNVTHAHLQQIRRNLAHQQHGVTLLHRFWNLWRSQIEQKKERELLPLLHAAWDHYRIALLCKCIELWLQYTQKRRYKQLLQARADGHFQQRALPAAFHTWNRLWRWRHQENVLSARATRFHRETLEKQVFSLWRQKMFQHRENRLAERMAILHAERQLLYRSWFMWHQQAAARHQEQEWQTVACAHHRHGRLKKAFCLWRESAQGLRTERTGRVRAAEFHMAQLLRWAWSQWRECLALRGAERQKLMRADLHHQHSVLHRALQAWVTYQGRVRSILREVAARESQHNRQLLRGALRRWKENTMARVDEAKKTFQASTHYRRTICSKVLVQWREAVSVQMYYRQQEDCAIWEAQKVLDRGCLRTWFQRWWDCSRRSAQQRLQLERAVQHHHRQLLLEGLARWKTHHLQCVRKRLLHRQSTQLLAQRLSRTCFRQWRQQLAARRQEQRATVRALWFWAFSLQAKVWATWLAFVLERRRKKARLQWALQAYQGQLLQEGATRLLRFAASMKASRQQLQAQQQVQAAHSLHRAVRRCATLWKQKVLGRGGKPQPLAAIAPSRKVTFEGPLLNRIAAGAGDGTLETKRPQASRPLGALGRLAAEEPHALELNTAHSARKQPRRPHFLLEPAQSQRPQKPQEHGLGMAQPAAPSLTRPFLAEAPTALVPHSPLPGALSSAPGPKQPPTASTGPELLLLPLSSFMPCGAAAPARVSAQRATPRDKPPVPSSLASVPDPHLLLPGDFSATRAGPGLSTAGSLDLEAELEEIQQQLLHYQTTKQNLWSCRRQASSLRRWLELNREEPGPEDQEVEQQVQKELEQVEMQIQLLAEELQAQRQPIGACVARIQALRQALC

SEQ ID NO: 91440 - protein, 82 aa, Homo sapiens
  MOD_RES (1)..(1): Any amino acid
XEDLQKLMKDYYSSRRLVIELEELNLPDSCFLKANDLTHSLSSYLKEICPKWVKLRKNHSEKKSVLMLIICSSAVRALELIR

SEQ ID NO: 91441 - protein, 1043 aa, Homo sapiens
GTLKPVDEKEEAVAAEVGWMTSVKDWAGVMISAQTLTGRVLVVLVFALSIGALVIYFIDSSNPIESCQNFYKDFTLQIDMAFNVFFLLYFGLRFIAANDKLWFWLEVNSVVDFFTVPPVFVSVYLNRSWLGLRFLRALRLIQFSEILQFLNILKTSNSIKLVNLLSIFISTWLTAAGFIHLVENSGDPWENFQNNQALTYWECVYLLMVTMSTVGYGDVYAKTTLGRLFMVFFILGGLAMFASYVPEIIELIGNRKKYGGSYSAVSGRKHIVVCGHITLESVSNFLKDFLHKDRDDVNVEIVFLHNISPNLELEALFKRHFTQVEFYQGSVLNPHDLARVKIESADACLILANKYCADPDAEDASNIMRVISIKNYHPKIRIITQMLQYHNKAHLLNIPSWNWKEGDDAICLAELKLGFIAQSCLAQGLSTMLANLFSMRSFIKIEEDTWQKYYLEGVSNEMYTEYLSSAFVGLSFPTVCELCFVKLKLLMIAIEYKSANRESRSRKRILINPGNHLKIQEGTLGFFIASDAKEVKRAFFYCKACHDDITDPKRIKKCGCKRLEDEQPSTLSPKKKQRNGGMRNSPNTSPKLMRHDPLLIPGNDQIDNMDSNVKKYDSTGMFHWCAPKEIEKVILTRSEAAMTVLSGHVVVCIFGDVSSALIGLRNLVMPLRASNFHYHELKHIVFVGSIEYLKREWETLHNFPKVSILPGTPLSRADLRAVNINLCDMCVILSANQNNIDDTSLQDKECILASLNIKSMQFDDSIGVLQANSQGFTPPGMDRSSPDNSPVHGMLRQPSITTGVNIPIITELVNDTNVQFLDQDDDDDPDTELYLTQPFACGTAFAVSVLDSLMSATYFNDNILTLIRTLVTGGATPELEALIAEENALRGGYSTPQTLANRDRCRVAQLALLDGPFADLGDGGCYGDLFCKALKTYNMLCFGIYRLRDAHLSTPSQCTKRYVITNPPYEFELVPTDLIFCLMQFDHNAGQSRASLSHSSHSSQSSSKKSSSVHSIPSTANRQNRPKSRESRDKQNRKEMVYR

SEQ ID NO: 91442 - protein, 132 aa, Homo sapiens
MAFLDNPTIILAHIRQSHVTSDDTGMCEMVLIDHDVDLEKIHPPSMPGDSGSEIQGSNAQRLERLRKERQNQIKCKNIQWKERNSKQSAQELKSLFEKKSLKEKPPISGKQSILSVRLEQCPLQLNNPFNEY

SEQ ID NO: 91443 - protein, 100 aa, Homo sapiens
MESMFSSPAEAALQRETGVPGLLTPLPDLDGVYELERVAGFVRDLGCERVALQFPDQLLGDAVAVAARLEETTGSKMFILGDTAYGSDDSNSPPEENPFL

SEQ ID NO: 91444 - protein, 331 aa, Homo sapiens
  MOD_RES (1)..(1): Any amino acid
XPRVILWLMVELAIIGSDMQEVIGSAIAINLLSVGRIPLWGGVLITIADTFVFLFLDKYGLRKLEAFFGFLITIMALTFGYEYVTVKPSQSQVLKGMFVPSCSGCRTPQIEQAVGIVGAVIMPHNMYLHSALVKSRQVNRNNKQEVREANKYFFIESCIALFVSFIINVFVVSVFAEAFFGKTNEQVVEVCTNTSSPHAGLFPKDNSTLAVDIYKGGVVLGCYFGPAALYIWAVGILAAGQSSTMTGTYSGQFVMEGFLNLKWSRFARVVLTRSIAIIPTLLVAVFQDVEHLTGMNDFLNVLQSLQLPFALIPILTFTSLRPVMSDFANGL

SEQ ID NO: 91445 - protein, 86 aa, Homo sapiens
MIARQQCVRGGPRGFSCGSAIVGGGKRGAFSSVSMSGGAGRCSSGGFGSRSLYNLRGNKSISMSVAGSRQGGHHQPELAHPPPRGD

SEQ ID NO: 91446 - protein, 88 aa, Homo sapiens
MVLVVHGFPSSVAALRFEWAWQHPHASRRLAHVGPRLRGETAFAFHLRVLAHMLRAPPWARLPLTLRWVRPDLRQDLCLPPPPHVPLA

SEQ ID NO: 91447 - protein, 400 aa, Homo sapiens
MEDGVYEPPDLTPEERMELENIRRRKQELLVEIQRLREELSEAMSEVEGLEANEGSKTLQRNRKMAMGRKKFNMDPKKGIQFLVENELLQNTPEEIARFLYKGEGLNKTAIGDYLGEREELNLAVLHAFVDLHEFTDLNLVQALRQFLWSFRLPGEAQKIDRMMEAFAQRYCLCNPGVFQSTDTCYVLSFAVIMLNTSLHNPNVRDKPGLERFVAMNRGINEGGDLPEELLRNLYDSIRNEPFKIPEDDGNDLTHTFFNPDREGWLLKLAGGRVKTWKRRWFILTDNCLYYFEYTTDKEPRGIIPLENLSIREVDDPRKPNCFELYIPNNKGQLIKACKTEADGRVVEGNHMVYRISAPTQEEKDEWIKSIQAAVSVDPFYEMLAARKKRISVKKKQEQP

SEQ ID NO: 91448 - protein, 897 aa, Homo sapiens
MLLFFTLGLLIHFVFFASIFDIYFTSPLVHGMTPQFTPLPPPARRLVLFVADGLRADALYELDENGNSRAPFIRNIIMHEGSWGISHTRVPTESRPGHVALIAGFYEDVSAVAKGWKENPVEFDSLFNESKYTWSWGSPDILPMFAKGASGDHVYTYSYDAKREDFGAQDATKLDTWVFDNVKDFFHHARNNQSLFSKINEEKIVFFLHLLGIDTNGHAHRPSSRDYKHNIKKVDDGVKEIVSMFNHFYGNDGKTTFIFTSDHGMTDWGSHGAGHPSETLTPLVTWGAGIKYPQRVSAQQFDDAFLKEWRLENWKRLDVNQADIAPLMTSLIGVPFPLNSVGILPVDYLNNTDLFKAESMFTNAVQILEQFKVKMTQKKEVTLPFLFTPFKLLSDSKQFNILRKARSYIKHRKFDEVVSLCKELIHLALKGLSYYHTYDRFFLGVNVVIGFVGWISYASLLIIKSHSNLIKGVSKEVKKPSHLLPCSFVAIGILVAFFLLIQACPWTYYVYGLLPLPIWYAVLREFQVIQDLVVSVLTYPLSHFVGYLLAFTLGIEVLVLSFFYRYMLTAGLTAFAAWPFLTRLWTRAKMTSLSWTFFSLLLAVFPLMPVVGRKPDISLVMGAGLLVLLLSLCVVTSLMKRKDSFIKEELLVHLLQVLSTVLSMYVVYSTQSSLLRKQGLPLMNQIISWATLASSLVVPLLSSPVLFQRLFSILLSLMSTYLLLSTGYEALFPLVLSCLMFVWINIEQETLQQSGVCCKQKLTSIQFSYNTDITQFRQLYLDDIRRAFFLVFFLVTAFFGTGNIASINSFDLASVYCFLTVFSPFMMGALMMWKILIPFVLVMCAFEAVQLTTQLSSKSLFLIVLVISDIMALHFFFLVKDYGSWLDIGTRKLPSEK

SEQ ID NO: 91449 - protein, 42 aa, Homo sapiens
REGEEFDNTCCAEKRKKLWDLLEKPNSSVAAKGMQDTEEQMK

SEQ ID NO: 91450 - protein, 38 aa, Homo sapiens
MGKFMKPGKVVLVLAGRYSGRKAVIVKTGSLSRLSAVA

SEQ ID NO: 91451 - protein, 107 aa, Homo sapiens
MPMMWKQCSCSWTMVLILTSEMGWGTRHCTWRPAPTTFLSSPHCYEEIIHMLREYLERLGQHEQRERLDDLCTRLQMTSTKEQVDEVTDLLASFTSLSLQMQSMEKR

SEQ ID NO: 91452 - protein, 164 aa, Homo sapiens
RFLRQVGRDWVQRRREALKRGEEVPADILTQILKAEEGAQDDEGLLDNFVTFFIAGHETSANHLAFTVMELSRQPEIVARLQAEVDEVIGSKRYLDFEDLGRLQYLSQVLKESLRLYPPAWGTFRLLEEETLIDGVRVPGNTPLLEQCASQLLGHLPRSERAGL

SEQ ID NO: 91453 - protein, 149 aa, Homo sapiens
MEGEPPPVEERRRLQEELNEFVESGCRTLEEVTASLGWDLDSLDPGEEEAAEDEVVICPYDSNHHMPKSSLAKHMASCRLRKMGYTKEEEDEMYNPEFFYENVKIPSITLNKDSQFQIIKQARTAVGKDSDCYNQIIGEFILHCLLKFL

SEQ ID NO: 91454 - protein, 46 aa, Homo sapiens
MELSQMSELMGLSVLLGLLALMATAAVARGWLRAGEERSGRPACGQ

SEQ ID NO: 91455 - protein, 1364 aa, Homo sapiens
MLSFVDTRTLLLLAVTLCLATCQFFETVRKGPAGDRGPRGERGPPGPPGRDGEDGPTGPPGPPGPPGPPGLGGNFAAQYDGKGVGLGPGPMGLMGPRGPPGAAGAPGPQGFQGPAGEPGEPGQTGPAGARGPAGPPGKAGEDGHPGKPGRPGERGVVGPQGARGFPGTPGLPGFKGIRGHNGLDGLKGQPGAPGVKGEPGAPGENGTPGQTGARGLPGERGRVGAPGPAGARGSDGSVGPVGPAGPIGSAGPPGFPGAPGPKGEIGAVGNAGPAGPAGPRGEVGLPGLSGPVGPPGNPGANGLTGAKGAAGLPGVAGAPGLPGPRGIPGPVGAAGATGARGLVGEPGPAGSKGESGNKGEPGSAGPQGPPGPSGEEGKRGPNGEAGSAGPPGPPGLRGSPGSRGLPGADGRAGVMGPPGSRGASGPAGVRGPNGDAGRPGEPGLMGPRGLPGSPGNIGPAGKEGPVGLPGIDGRPGPIGPAGARGEPGNIGFPGPKGPTGDPGKNGDKGHAGLAGARGAPGPDGNNGAQGPPGPQGVQGGKGEQGPPGPPGFQGLPGPSGPAGEVGKPGERGLHGEFGLPGPAGPRGERGPPGESGAAGPTGPIGSRGPSGPPGPDGNKGEPGVVGAVGTAGPSGPSGLPGERGAAGIPGGKGEKGEPGLRGEIGNPGRDGARGAPGAVGAPGPAGATGDRGEAGAAGPAGPAGPRGSPGERGEVGPAGPNGFAGPAGAAGQPGAKGERGAKGPKGENGVVGPTGPVGAAGPAGPNGPPGPAGSRGDGGPPGMTGFPGAAGRTGPPGPSGISGPPGPPGPAGKEGLRGPRGDQGPVGRTGEVGAVGPPGFAGEKGPSGEAGTAGPPGTPGPQGLLGAPGILGLPGSRGERGLPGVAGAVGEPGPLGIAGPPGARGPPGAVGSPGVNGAPGEAGRDGNPGNDGPPGRDGQPGHKGERGYPGNIGPVGAAGAPGPHGPVGPAGKHGNRGETGPSGPVGPAGAVGPRGPSGPQGIRGDKGEPGEKGPRGLPGLKGHNGLQGLPGIAGHHGDQGAPGSVGPAGPRGPAGPSGPAGKDGRTGHPGTVGPAGIRGPQGHQGPAGPPGPPGPPGPPGVSGGGYDFGYDGDFYRADQPRSAPSLRPKDYEVDATLKSLNNQIETLLTPEGSRKNPARTCRDLRLSHPEWSSGYYWIDPNQGCTMDAIKVYCDFSTGETCIRAQPENIPAKNWYRSSKDKKHVWLGETINAGSQFEYNVEGVTSKEMATQLAFMRLLANYASQNITYHCKNSIAYMDEETGNLKKAVILQGSNDVELVAEGNSRFTYTVLVDGCSKKTNEWGKTIIEYKTNKPSRLPFLDIAPLDIGGADQEFFVDIGPVCFK

SEQ ID NO: 91456 - protein, 141 aa, Homo sapiens
MLEPQENGVIDLPDYEHVEDETFPPFPPPASPERQDGEGTEPDEESGNGAPVRVPPKRTVKRNIPKLDAQRLISERGLPALRHVFDKAKFKGKGHEAEDLKMLIRHMEHWAHRLFPKLQFEDFIDRVEYLGSKKEVQVSVE

SEQ ID NO: 91457 - protein, 83 aa, Homo sapiens
MVLLAAAVCTKAGKAIVSRQFVEMTRTRIEGLLAAFPKLMNTGKQHTFVETESIRMSSVLFPYQFIPSSLCQVVFLSGPVLPV

SEQ ID NO: 91458 - protein, 124 aa, Homo sapiens
  MOD_RES (1)..(1): Any amino acid
XKSENGEAYQRKKAAATGLPEGPAVPVPSRGNLAQPGGSSWRRIALLILAITIHNVPAAACTSGDLLARRWTCLDPQCTPMAWSPTGEWTQGRGLCRPCQWSGDSTTLDGEFQRAGYPECGHIP

SEQ ID NO: 91459 - protein, 148 aa, Homo sapiens
MILLQHAVLPPPKQPSPSPPMSVATRSTGTLQLPPQKPFGQEASLPLAGEEELSKGGEQDCALEELCKPLYCKLCNVTLNSAQQAQAHYQGKNHGKKLRNYYAANSCPPPARMSNVVEPAATPVVPVPPQMGSFKPGGRVILATENDY

SEQ ID NO: 91460 - protein, 138 aa, Homo sapiens
DRQGQPVEVERTAFIDFVEKDREPGAEKTNNGIHYRLRLVYNNGLRTEQDLYVRLIDSMSKQAIIYEGQDKNPEMCRVLLTHEIMCRFFLKFFLKCNQNCLKNAGNPRDMRRFQVVVSTTVSVDGHVLAVSDNMFVHN

SEQ ID NO: 91461 - protein, 312 aa, Homo sapiens
TTEHIQTHFESKMEIPPRRRPPPPLSSAGRKKEQEGKGDSEEQQEKSIIATIDDVLSARPGALPEDANPGPQTESSKFPFGIQQAKSHRNIKLLEDEPRSRDETPLCTIAHWQDSLAKRCICVSNIVRSLSFVPGNDAEMSKHPGLVLILGKLILLHHEHPERKRAPQTYEKEEDEDKGVACSKDEWWWDCLEVLRDNTLVTLANISGQLDLSAYTESICLPILDGLLHWMVCPSAEAQDPFPTVGPNSVLSPQRLVLETLCKLSIQDNNVDLILATPPFSRQEKFYATLVRNMVPLGWEQKQCFLRLRIHT

SEQ ID NO: 91462 - protein, 58 aa, Homo sapiens
MAPEENAGTELLLQGFERRFLAVRTLRSFPWQAVIVLVTGTQLHSPILKSQRPQARGA

SEQ ID NO: 91463 - protein, 63 aa, Homo sapiens
VFSSTLQNWQTTRFMEVEVAIRLLYMLAEALPVSHGAHFSAGNIRSQFLSAYICDIGVLRNCC

SEQ ID NO: 91464 - protein, 192 aa, Homo sapiens
MKEADADEWQESEENVEHIPFSHNHYPEKEMVKRSQEFYELLNKRRSVRFISNEQVPMEVIDNVIRTAGTAPSGAHTEPWTFVVVKDPDVKHKIRKIIEEEEEINYMKRMGHRWVTDLKKLRTNWIKEYLDTAPILILIFKQVHGFAANGKKKVHYYNEISVSIACGILLAALQVFGKIILKELALISFLNL

SEQ ID NO: 91465 - protein, 52 aa, Homo sapiens
MCEEETTALVCDNGSGLCKAGFAGDDAPRAVFPSIVGRPRHQVRAHLDTTRL

SEQ ID NO: 91466 - protein, 142 aa, Homo sapiens
MEAATTLHPGPRPALPLGGPGPLGEFLPPPECPVFEPSWEEFADPFAFIHKIRPIAEQTGICKVRPPPAQTRVKLNFLDQIAKYWELQGSTLKIPHVERKILDLFQLNKLVAEEGGFAVVCKDRKWTKIATKMGFAPGKAVG

SEQ ID NO: 91467 - protein, 146 aa, Homo sapiens
MRNMLSKLQIACDNAVFGCSAVVRLDNLMSHLSDCEHNPKRPVTCEQGCGLEMPKDELPNHNCIKHLRSVVQQQQTRIAELEKTSAEHKHQLAEQKRDIQLLKAYMRAIRSVNPNLQNLEETIEYNEILEWVNSLQPARVTRWGGM

SEQ ID NO: 91468 - protein, 209 aa, Homo sapiens
MAVFVVLLALVAGVLGNEFSILKSPGSVVFRNGNWPIPGERIPDVAALSMGFSVKEDLSWPGLAVGNLFHRPRATVMVMVKGVNKLALPPGSVISYPLENAVPFSLDSVANSIHSLFSEETPVVLQLAPSEERVYMVGKANSVFEDLSVTLRQLRNRLFQENSVLSSLPLNSLSRNNEVDLLFLSELQVLHDISSLGETTYLPRTQAWA

SEQ ID NO: 91469 - protein, 151 aa, Homo sapiens
MDLVLKRCLLHLAVIGALLAVGATKVPRNQDWLGVSRQLRTKAWNRQLYPEWTEAQRLDCWRGGQVSLKVSNDGPTLIGANASFSIALNFPGSQKVLPDGQVIWVNNTIINGSQVWGGQPVYPQETDDACIFPDGGPCPSGSWSQKRSFVY

SEQ ID NO: 91470 - protein, 30 aa, Homo sapiens
LPSGALSKSAPGSFWHIQADHAYQESPRGG

SEQ ID NO: 91471 - protein, 159 aa, Homo sapiens
MELPAVNLKCASSSVPRNHPHVILLGHWLLTTCFWRHFSAKPRLETIELTCALCKLRSAAHRATAGLHCILRLLCLGQLHHPGLGRVGCGSAGLHRRHKHVSGWLAGHHLPGHRAHQHLLPAGQPHGHGPLWRGHGHPQLAAQAALLLLRLPHVPGARG

SEQ ID NO: 91472 - protein, 46 aa, Homo sapiens
MRPWTGSWRWIMLILFAWGTLLFYIGGHLVRDNDHPDHSSRELSKI

SEQ ID NO: 91473 - protein, 114 aa, Homo sapiens
MGELMAFLLPLIIVLMVKHSDSRSHTYQRMIGCELLEDGSTTGFLQYAYDGQDFLIFNKDTLSWLAVDNVAHTIKQAWEANQHELLYQKNWLEEECIAWLKRFLEYGKDTLQRT

SEQ ID NO: 91474 - protein, 716 aa, Homo sapiens
MDVCVRLALWLLWGLLLHQGQSLSHSHSEKATGTSSGANSEESTAAEFCRIDKPLCHSEDEKLSFEAVRNIHKLMDDDANGDVDVEESDEFLREDLNYHDPTVKHSTFHGEDKLISVEDLWKAWKSSEVYNWTVDEVVQWLITYVELPQYEETFRKLQLSGHAMPRLAVTNTTMTGTVLKMTDRSHRQKLQLKALDTVLFGPPLLTRHNHLKDFMLVVSIVIGVGGCWFAYIQNRYSKEHMKKMMKDLEGLHRAEQSLHDLQERLHKAQEEHRTVEVEKVHLEKKLRDEINLAKQEAQRLKELREGTENERSRQKYAEEELEQVREALRKAEKELESHSSWYAPEALQKWLQLTHEVEVQYYNIKKQNAEKQLLVAKEGAEKIKKKRNTLFGTFHVAHSSSLDDVDHKILTAKQALSEVTAALRERLHRWQQIEILCGFQIVNNPGIHSLVAALNIDPSWMGSTRPNPAHFIMTDDVDDMDEEIVSPLSMQYAAWLMGRRFSDRSLCSTSAGSDDQSLWKYPAPSLQSSVRQRLTEPQHGLGSQRDLTHSDSESSLHMSDRQRVAPKPPQMSRAADEALNAMTSNGSHRLIEGVHPGSLVEKLPDSPALAKKALLALNHGLDKAHSLMELSPSAPPGGSPHLDSSRSHSPSSPDPDTPSPVGDSRALQASRNTRIPHLAGKKAVAEEDNGSIGEETDSSPGRKKFPLKIFKKPLKK

SEQ ID NO: 91475 - protein, 128 aa, Homo sapiens
MSSVAVLTQESFAEHRSGLVPQQIKVATLNSEEESDPPTYKDAFPPLPEKAACLESAQEPAGAWGNKIRPIKASVITQVFHVPLEERKYKDMNQFGEGLSNCCHSQRTPSLCYWQKWRETARLGAKNC

SEQ ID NO: 91476 - protein, 992 aa, Homo sapiens
MSAAPAYSEDKGGSAGPGEPEYGHDPASGGIFSSDYKRHDDLKEMLDTNKDSLKLEAMKRIVAMIARGKNASDLFPAVVKNVACKNIEVKKLVYVYLVRYAEEQQDLALLSISTFQRGLKDPNQLIRASALRVLSSIRVPIIVPIMMLAIKEAASDMSPYVRKTAAHAIPKLYSLDSDQKDQLIEVIEKLLADKTTLVAGSVVMAFEEVCPERIDLIHKNYRKLCNLLIDVEEWGQVVIISMLTRYARTQFLSPTQNESLLEENAEKAFYGSEEDEAKGAGSEETAAAAAPSRKPYVMDPDHRLLLRNTKPLLQSRSAAVVMAVAQLYFHLAPKAEVGVIAKALVRLLRSHSEVQYVVLQNVATMSIKRRGMFEPYLKSFYIRSTDPTQIKILKLEVLTNLANETNIPTVLREFQTYIRSMDKDFVAATIQAIGRCATNIGRVRDTCLNGLVQLLSNRDELVVAESVVVIKKLLQMQPAQHGEIIKHLAKLTDNIQVPMARASILWLIGEYCEHVPRIAPDVLRKMAKSFTAEEDIVKLQVINLAAKLYLTNSKQTKLLTQYVLSLAKYDQNYDIRDRARFTRQLIVPSEQGGALSRHAKKLFLAPKPAPVLESSFKDRDHFQLGSLSHLLNAKATGYQELPDWPEEAPDPSVRNVEVPEWTKCSNREKRKEKEKPFYSDSEGESGPTESADSDPESESESDSKSSSESGSGESSSESDNEDQDEDEEKGRGSESEQSEEDGKRKTKKKVPERKGEASSSDEGSDSSSSSSESEMTSESEEEQLEPASWSRKTPPSSKSAPATKEISLLDLEDFTPPSVQPVSPPAIVSTSLAADLEGLTLTDSTLVPSLLSPVSGVGRQELLHRVAGEGLAVDYTFSRQPFSGDPHMVSVHIHFSNSSDTPIKGLHVGTPKLPAGISIQEFPEIESLAPGESATAVMGINFCDSTQAANFQLCTQTRQFYVSIQPPVGELMAPVFMSENEFKKEQGLQGGH

SEQ ID NO: 91477 - protein, 114 aa, Homo sapiens
MSTKQITCRYFMHGVCREGSQCLFSHDLANSKPSTICKYYQKGYCAYGTRCRYDHTRPSAAAGGAVGTMAHSVPSPAFHSPHPPSEVTASIVKTNSHEPGKREKRTLVLRDRSE

SEQ ID NO: 91478 - protein, 177 aa, Homo sapiens
  MOD_RES (1)..(1): Any amino acid
XSSDAGRKRGPGTPAPTGLSAPLSFIPRHFRPKGAGSTTVKIVLKEKHKKACVHGGKTYSHGEVWHPAFRAFGPLPCILCTCEDGRQDCQRVTCPTEYPCRHPEKVAGKCCKICPEDKADPGHSEISSTRCPKAPGRVLVHTSVSPSPDNLRRFALEHEASDLVEIYLWKLVTGTSS

SEQ ID NO: 91479 - protein, 146 aa, Homo sapiens
VLRQVDTKTGKLKIGTYTGPLQHGIVYSGGSSDTICDLLGAKGKDILYIGDHIFGDILKSKKRQGWRTFLVIPELAQELHVWTDKSSLFEELQSLDIFLAELYKHLDSSSNERPDISSIQRRIKMPHESTVEHTHVDINEMESPLA

SEQ ID NO: 91480 - protein, 93 aa, Homo sapiens
MTAPCPPPPPDPQFVLRGTQSPVHALHFCEGAQAQGRPLLFSGQGRDLKLCLWDLAEGRSAVVDSVCLESVGFCRSSILAGGQPRWTLAVPGR

SEQ ID NO: 91481 - protein, 217 aa, Homo sapiens
  MOD_RES (1)..(1): Any amino acid
XLARELNFSVDEINQIRVENPNSLISQSFMLLKKWVTRDGKNATTDALTSVLTKINRIDIVTLLEGPIFDYGNISGTRSFADENNVFHDPVDVSPNVLSSIGYPSLQVELETPTGLHYTPPTPFQQDDYFSDISSIESPLRTPSRLSDGLVPSQGNIEHSADGPPVVTAEDASLEDSKLEDSVPLTEMPEAVDVDESQLENVCLSWQNETSSGNLES

SEQ ID NO: 91482 - protein, 62 aa, Homo sapiens
MMEGSRQTRVSRPYKISESSKVYRWADHSSTVLQRLNEQRLRGLFCDVVLVADEQRVPAHRN

SEQ ID NO: 91483 - protein, 157 aa, Homo sapiens
  MOD_RES (1)..(1): Any amino acid
XFVSSLIYNWEGEYFWTALQDLNSTGSFFWLSGDEVMYTHWNRDQPGYSRGGCVALATGSAMGLWEVKNCTSFRARYICRQSLGTPVTPELPGPDPTPSLTGSCPQGWASDTKLRYCYKVFSSERLQDKKSWVQAQGACQELGAQLLSLASYEEEHF

SEQ ID NO: 91484 - protein, 105 aa, Homo sapiens
SEEASAPDAPDALPDSPTPATGGEVSAIKLASALNGSSSSPEVEAPSSEDEDTAEATSGIFTDTSSDGLQARRPDVVPAFRSLQKQWPQREESLPRLCLLLRPRG

SEQ ID NO: 91485 - protein, 3862 aa, Homo sapiens
MTTMLQKSDSNASFLRAARAGNLDKVVEYLKGGIDINTCNQNGLNALHLAAKEGHVGLVQELLGRGSSVDSATKKGNTALHIASLAGQAEVVKVLVKEGANINAQSQNGFTPLYMAAQENHIDVVKYLLENGANQSTATEDGFTPLAVALQQGHNQAVAILLENDTKGKVRLPALHIAARKDDTKSAALLLQNDHNADVQSKSGFTPLHIAAHYGNVNVATLLLNRGAAVDFTARNGITPLHVASKRGNTNMVKLLLDRGGQIDAKTRDGLTPLHCAARSGHDQVVELLLERGAPLLARTKNGLSPLHMAAQGDHVECVKHLLQHKAPVDDVTLDYLTALHVAAHCGHYRVTKLLLDKRANPNARALNGFTPLHIACKKNRIKVMELLVKYGASIQAITESGLTPIHVAAFMGHLNIVLLLLQNGASPDVTNIRGETALHMAARAGQVEVVRCLLRNGALVDARAREEQTPLHIASRLGKTEIVQLLLQHMAHPDAATTNGYTPLHISAREGQVDVASVLLEAGAAHSLATKKGFTPLHVAAKYGSLDVAKLLLQRRAAADSAGKNGYTPLHIAAKKNQMQIASTLLNYGAETNIVTKQGVTPLHLASQEGHTDMVTLLLDKGANIHMSTKSGLTSLHLAAQEDKVNVADILTKHGADQDAHTKLGYTPLIVACHYGNVKMVNFLLKQGANVNAKTKNGYTPLHQAAQQGHTHIINVLLQHGAKPNATTANGNTALAIAKRLGYISVVDTLKVVTEEVTTTTTTITEKHKLNVPETMTEVLDVSDEEGDDTMTGDGGEYLRPEDLKELGDDSLPSSQFLDGMNYLRYSLEGGRSDSLRSFSSDRSHTLSHASYLRDSAVMDDSVVIPSHQVSTLAKEAERNSYRLSWGTENLDNVALSSSPIHSGFLVSFMVDARGGAMRGCRHNGLRIIIPPRKCTAPTRVTCRLVKRHRLATMPPMVEGEGLASRLIEVGPSGAQFLGPVIVEIPHFAALRGKERELVVLRSENGDSWKEHFCDYTEDELNEILNGMDEVLDSPEDLEKKRICRIITRDFPQYFAVVSRIKQDSNLIGPEGGVLSSTVVPQVQAVFPEGALTKRIRVGLQAQPMHSELVKKILGNKATFSPIVTLEPRRRKFHKPITMTIPVPKASSDVMLNGFGGDAPTLRLLCSITGGTTPAQWEDITGTTPLTFVNECVSFTTNVSARFWLIDCRQIQESVTFASQVYREIICVPYMAKFVVFAKSHDPIEARLRCFCMTDDKVDKTLEQQENFAEVARSRDVEVLEGKPIYVDCFGNLVPLTKSGQHHIFSFFAFKENRLPLFVKVRDTTQEPCGRLSFMKEPKSTRGLVHQAICNLNITLPIYTKESESDQEQEEEIDMTSEKNDETESTETSVLKSHLVNEVPVLASPDLLSEVSEMKQDLIKMTAILTTDVSDKAGSIKVKELVKAAEEEPGEPFEIVERVKEDLEKVNEILRSGTCTRDESSVQSSRSERGLVEEEWVIVSDEEIEEARQKAPLEITEYPCVEVRIDKEIKGKVEKDSTGLVNYLTDDLNTCVPLPKEQLQTVQDKAGKKCEALAVGRSSEKEGKDIPPDETQSTQKQHKPSLGIKKPVRRKLKEKQKQKEEGLQASAEKAELKKGSSEESLGEDPGLAPEPLPTVKATSPLIEETPIGSIKDKVKALQKRVEDEQKGRSKLPIRVKGKEDVPKKTTHRPHPAASPSLKSERHAPGSPSPKTERHSTLSSSAKTERHPPVSPSSKTEKHSPVSPSAKTERHSPASSSSKTEKHSPVSPSTKTERHSPVSSTKTERHPPVSPSGKTDKRPPVSPSGRTEKHPPVSPGRTEKRLPVSPSGRTDKHQPVSTAGKTEKHLPVSPSGKTEKQPPVSPTSKTERIEETMSVRELMKAFQSGQDPSKHKTGLFEHKSAKQKQPQEKGKVRVEKEKGPILTQREAQKTENQTIKRGQRLPVTGTAESKRGVRVSSIGVKKEDAAGGKEKVLSHKIPEPVQSVPEEESHRESEVPKEKMADEQGDMDLQISPDRKTSTDFSEVIKQELEDNDKYQQFRLSEETEKAQLHLDQVLTSPFNTTFPLDYMKDEFLPALSLQSGALDGSSESLKNEGVAGSPCGSLMEGTPQISSEESYKHEGLAETPETSPESLSFSPKKSEEQTGETKESTKTETTTEIRSEKEHPTTKDITGGSEERGATVTEDSETSTESFQKEATLGSPKDTSPKRQDDCTGSCSVALAKETPTGLTEEAACDEGQRTFGSSAHKTQTDSEVQESTATSDETKALPLPEASVKTDTGTESKPQGVIRSPQGLELALPSRDSEVLSAVADDSLAVSHKDSLEASPVLEDNSSHKTPDSLEPSPLKESPCRDSLESSPVEPKMKAGIFPSHFPLPAAVAKTELLTEVASVRSRLLRDPDGSAEDDSLEQTSLMESSGKSPLSPDTPSSEEVSYEVTPKTTDVSTPKPAVIHECAEEDDSENGEKKRFTPEEEMFKMVTKIKMFDELEQEAKQKRDYKKEPKQEESSSSSDPDADCSVDVDEPKHTGSGEDESGVPVLVTSESRKVSSSSESEPELAQLKKGADSGLLPEPVIRVQPPSPLPSSMDSNSSPEEVQFQPVVSKQYTFKMNEDTQEEPGKSEEEKDSESHLAEDRHAVSTEAEDRSYDKLNRDTDQPKICDGHGCEAMSPSSSAAPVSSGLQSPTGDDVDEQPVIYKESLALQGTHEKDTEGEELDVSRAESPQADCPSESFSSSSSLPHCLVSEGKELDEDISATSSIQKTEVTKTDETFENLPKDCPSQDSSITTQTDRFSMDVPVSDLAENDEIYDPQITSPYENVPSQSFFSSEESKTQTDANHTTSFHSSEVYSVTITSPVEDVVVASSSSGTVLSKESNFEGQDIKMESQQESTLWEMQSDSVSSSFEPTMSATTTVVGEQISKVIITKTDVDSDSWSEIREDDEAFEARVKEEEQKIFGLMVDRQSQGTTPDTTPARTPTEEGTPTSEQNPFLFQEGKLFEMTRSGAIDMTKRSYADESFHFFQIGQESREETLSEDVKEGATGADPLPLETSAESLALSESKETVDDEADLLPDDVSEEVEEIPASDAQLNSQMGISASTETPTKEAVSVGTKDLPTVQTGDIPPLSGVKQISCPDSSEPAVQVQLDFSTLTRSVYSDRGDDSPDSSPEEQKSVIEIPTAPMENVPFTESKSKIPVRTMPTSTPAPPSAEYESSVSEDFLSSVDEENKADEAKPKSKLPVKVPLQRVEQQLSDLDTSVQKTVAPQGQDMASIAPDNRSKSESDASSLDSKTKCPVKTRSYTETETESRERAEELELESEEGATRPKILTSRLPVKSRSTTSSCRGGTSPTKESKEHFFDLYRNSIEFFEEISDEASKLVDRLTQSEREQEIVSDDESSSALEVSVIENLPPVETEHSVPEDIFDTRPIWDESIETLIERIPDENGHDHAEDPQDEQERIEERLAYIADHLGFSWTELARELDFTEEQIHQIRIENPNSLQDQSHALLKYWLERDGKHATDTNLVECLTKINRMDIVHLMETNTEPLQERISHSYAEIEQTITLDHSEGFSVLQEELCTAQHKQKEEQAVSKESETCDHPPIVSEEDISVGYSTFQDGVPKTEGDSSATALFPQTHKEQVQQDFSGKMQDLPEESSLEYQQEYFVTTPGTETSETQKAMIVPSSPSKTPEEVSTPAEEEKLYLQTPTSSERGGSPIIQEPEEPSEHREESSPRKTSLVIVESADNQPETCERLDEDAAFEKGDDMPEIPPETVTEEEYIDEHGHTVVKKVTRKIIRRYVSSEGTEKEEIMVQGMPQEPVNIEEGDGYSKVIKRVVLKSDTEQSEDNNE

SEQ ID NO: 91486 - protein, 672 aa, Homo sapiens
MVKLAKAGKNQGDPKKMAPPPKEVEEDSEDEEMSEDEEDDSSGEEVVIPQKKGKKAAATSAKKVVVSPTKKVAVATPAKKAAVTPGKKAAATPAKKTVTPAKAVTTPGKKGATPGKALVATPGKKGAAIPAKGAKNGKNAKKEDSDEEEDDDSEEDEEDDEDEDEDEDEIEPAAMKAAAAAPASEDEDDEDDEDDEDDDDDEEDDSEEEAMETTPAKGKKAAKVVPVKAKNVAEDEDEEEDDEDEDDDDDEDDEDDDDEDDEEEEEEEEEEPVKEAPGKRKKEMAKQKAAPEAKKQKVEGTEPTTAFNLFVGNLNFNKSAPELKTGISDVFAKNDLAVVDVRIGMTRKFGYVDFESAEDLEKALELTGLKVFGNEIKLEKPKGKDSKKERDARTLLAKNLPYKVTQDELKEVFEDAAEIRLVSKDGKSKGIAYIEFKTEADAEKTFEEKQGTEIDGRSISLYYTGEKGQNQDYRGGKNSTWSGESKTLVLSNLSYSATEETLQEVFEKATFIKVPQNQNGKSKGYAFIEFASFEDAKEALNSCNKREIEGRAIRLELQGPRGSPNARSQPSKTLFVKGLSEDTTEETLKESFDGSVRARIVTDRETGSSKGFGFVDFNSEEDAKAAKEASEEAEEEEVTTSHKERRRSLNSFCPSAFPFPFERKDSGVFTVT

SEQ ID NO: 91487 - protein, 180 aa, Homo sapiens
MQLTVKALQGRECSLQVPEDELVSTLKQLVSEKLNVPVRQQRLLFKGKALADGKRLSDYSIGPNSKLNLVVKPLEKVLLEEGEAQRLADSPPPQVWQLISKVLARHFSAADASRVLEQLQRDYERSLSRLTLDDIERWAHHHHSWHVPGSGQVLGTPHSLTWVCFHTLRRGEPAQQRHRR

SEQ ID NO: 91488 - protein, 89 aa, Homo sapiens
PWVDEDLKDSSDLHQAEEDADEWQESEENVEHIPFSHNHYPEKEMVKRSQEFYELLNKRRNSPEWGSHRALDLRGCEGPRREAQDSKDH

SEQ ID NO: 91489 - protein, 134 aa, Homo sapiens
RILPLRFVELQVCDHYQRILQLRTVTEKIYYLKLHPDHPETVFHFWIRLVQILQKGLSITTKDPRILVTHCLVPKNCSSPSGDSKLVQKKLQASQPSESLIQLMTKGESEALSQIFADLHQQNQLSFRSSRKVE

SEQ ID NO: 91490 - protein, 91 aa, Homo sapiens
MKMASFLAFLLLNFRVCLLLLQLLMPHSAQFSVLGPSGPILAMVGEDADLPCHLFPTMSAETMELKWVSSSLRQVVNVYADGKEVEDRQSA

SEQ ID NO: 91491 - protein, 218 aa, Homo sapiens
MFANLKYVSLGILVFQTTSLVLTMRYSRTLKEEGPRYLSSTAVVVAELLKIMACILLVYKDSKCSLRALNRVLHDEILNKPMETLKLAIPSGIYTLQNNLLYVALSNLDAATYQVTYQLKILTTALFSVSMLSKKLGVYQWLSLVILMTGVAFVQWPSDSQLDSKELSAGSQFVGLMAVLTACFSSGFAGVYFEKILKETKQSVWIRNIQLASRNRFS

SEQ ID NO: 91492 - protein, 100 aa, Homo sapiens
IGAGVSLPGILAAKCGAEVILSDSSELPHCLEVCRQSCQMNNLPHLQVVGLTWGHISWDLLALPPQDIILASDVFFEPEGLSVASPRGELTALGCCLRQS

SEQ ID NO: 91493 - protein, 111 aa, Homo sapiens
MAEVPELASEMMAYYSGNEDDLFFEADGPKQMKCSFQDLDLCPLDGGIQLRISDHHYSKGFRQAASVVVAMDKLRKMLVPCPQTFQENDLSTFFPFIFEEEPIFFDTWDNE

SEQ ID NO: 91494 - protein, 405 aa, Homo sapiens
  MOD_RES (1)..(1): Any amino acid
XFTEKIARLNMVPKVSSTSRPSSSPLSCLAEESVNRLHAQMQAFVSESQRAAELEEKRRYRFLAEKHLLLSNTFLQFFGRARGMLQNRVLLWKEQSEASRSPSRAHSPGLLGPALGPPYPSGRLTPTCLDMPPRPLGEFSSPRSRHGSGSYGTEPDARPASQLEPDRRSLPRTPSASSLYSGSAQSSRSNSFGERPGGGGGARRVRALVSHSEGANHTLLRFSAGDVVEVLVPEAQNGWLYGKLEGSSASGWFPEAYVKALEEGPVNPMTPVTPMTSMTSMSPMTPMNPGNELPSRSYPLRGSHSLDDLLDRPGNSIAPSEYWDGQSRSRTPSRVPSRAPSPAPPPLPSSRRSSMGSTAVATDVKKLMSSEQYPPQELFPRGTNPFATVKLRPTITNDRSAPLIR

SEQ ID NO: 91495 - protein, 185 aa, Homo sapiens
MGSDAWVGLWRPHRPRGPIAAHYGGPGPKYKLPPNTGRYFPERAGNATYPSAPRHTIAPRNWGVQAEQQSPGPAAYTVPSLLGPRVIGKVSAPTCSIYGRRAAGSFFEDLSKTPGPCAYQVVSPGVYKSRAPQFTILARTSLPQDNTRKPGPAAYNVDQHRKPRGWSFGIRHSDYLAPLVTDADN

SEQ ID NO: 91496 - protein, 38 aa, Homo sapiens
  MOD_RES (1)..(1): Any amino acid
XEITASFRRFGPLIVDWPHKAESKSYFPPKVLCMIPFP

SEQ ID NO: 91497 - protein, 105 aa, Homo sapiens
MSAAGARGLRATYHRLLDKVELMLPEKLRPLYNHPAGPRTVFFWAPIMKWGLVCAGLADMARPAEKLSTAQSAVLMATGFIWSRYSLVIIPKNWSLFAVNFFVGA

SEQ ID NO: 91498 - protein, 49 aa, Homo sapiens
SGVLMDLSKRDHETYGAIALLLVGKIYSHSGEAVWAPWYPCDSISQKGI

SEQ ID NO: 91499 - protein, 189 aa, Homo sapiens
MAKDNSTVRCFQGLLIFGNVIIGCCGIALTAECIFFVSDQHSLYPLLEATDNDDIYGAAWIGIFVGICLFCLSVLGIVGIMKSSRKILLAYFILMFIVYAFEVASCITAATQQDFFTPNLFLKQMLERYQNNSPPNNDDQWKNNGVTKTWDRLMLQDNCCGVNGPSDWQKYTSAFRTENNDADYPWPRQ

SEQ ID NO: 91500 - protein, 35 aa, Homo sapiens
MDPQNQHGSGSSLVVIQQPSLDSRQRLDYEREIQP

SEQ ID NO: 91501 - protein, 503 aa, Homo sapiens
MAGPQPLALQLEQLLNPRPSEADPEADPEEATAARVIDRFDEGEDGEGDFLVVGSIRKLASASLLDTDKRYCGKTTSRKAWNEDHWEQTLPGSSDEEISDEEGSGDEDSEGLGLEEYDEDDLGAAEEQECGDHRESKKSRSHSAKTPGFSVQSISDFEKFTKGMDDLGSSEEEEDEESGMEEGDDAEDSQGESEEDRAGDRNSEDDGVVMTFSSVKVSEEVEKGRAVKNQIALWDQLLEGRIKLQKALLTTNQLPQPDVFPLFKDKGGPEFSSALKNSHKALKALLRSLVGLQEELLFQYPDTRYLVDGTKPNAGSEEISSEDDELVEEKKQQRRRVPAKRKLEMEDYPSFMAKRFADFTVYRNRTLQKWHDKTKLASGKLGKGFGAFERSILTQIDHILMDKERLLRRTQTKRSVYRVLGKPEPAAQPVPESLPGEPEILPQAPANAHLKDLDEEIFDDDDFYHQLLRELIERKTSSLDPNDQVAMGSGLQSRSYEAKSTKK

SEQ ID NO: 91502 - protein, 259 aa, Homo sapiens
VLSIRGAQEEEPTDPQLMRLDNMLLAEGVAGPEKGGGSAAAAAAAAASGGAGSDNSVEHSDYRAKLSQIRQIYHTELEKYEQACNEFTTHVMNLLREQSRTRPISPKEIERMVSIIHRKFSSIQMQLKQSTCEAVMILRSRFLDARRKRRNFNKQATEILNEYFYSHLSNPYPSEEAKEELAKKCGITVSQVSNWFGNKRIRYKKNIGKFQEEANIYAAKTAVTATNVSAHGSQANSPSTPNSAGGYPSPCYQPDRRIQ

SEQ ID NO: 91503 - protein, 466 aa, Homo sapiens
  MOD_RES (1)..(1): Any amino acid
XQSQLLVPEQKDSSSWYQKLDTKDKPSVFSGLLGFEDNFSSMNLDKKINSQNQPTGIHREPPPPPFSVNKMLPREKEASNKEQPKVTNTMRKLFVPNTQSGQREGLIKHILAKREKEYVNIQTFRFFVGTWNVNGQSPDSGLEPWLNCDPNPPDIYCIGFQELDLSTEAFFYFESVKEQEWSMAVERGLHSKAKYKKVQLVRLVGMMLLIFARKDQCRYIRDIATETVGTGIMGKMGNKGGVAVRFVFHNTTFCIVNSHLAAHVEDFERRNQDYKDICARMSFVVPNQTLPQLNIMKHEVVIWLGDLNYRLCMPDANEVKSLINKKDLQRLLKFDQLNIQRTQKKAFVDFNEGEIKFIPTYKYDSKTDRWDSSGKCRVPAWCDRILWRGTNVNQLNYRSHMELKTSDHKPVSALFHIGVKVVDERRYRKVFEDSVRIMDRMENDFLPSLELSRREDPRNDQSSLEK

SEQ ID NO: 91504 - protein, 130 aa, Homo sapiens
MNAPLGGIWLWLPLLLTWLTPEVNSSWWYMRATGGSSRVMCDNVPGLVSSQRQLCHRHPDVMRAISQGVAEWTAECQHQFRQHRWNCNTLDRDHSLFGRVLLRIGNLPLFMPSPQLELYLPSPGPVAKEK

SEQ ID NO: 91505 - protein, 209 aa, Homo sapiens
MAGGVLPLRGLRALCRVLLFLSQFCILSGGEQSQALAQSIKDPGPTRTFTVVPRAAESTEIPPYVMKCPSNGLCSRLPADCIDCTTNFSCTYGKPVTFDCAVKPSVTCVDQDFKSQKNFIINMTCRFCWQLPETDYECTNSTSCMTVSCPRQRYPANCTVRDHVHCLGNRTFPKMLYCNWTGGYKWSTALALSLQAQVGLHVQLTVGLH

SEQ ID NO: 91506 - protein, 2146 aa, Homo sapiens
MAPQEAKPQGSREAGPATRGRGGRPVARGLGRAAWGAARCTGVRGPGAGASHDAPPRPPTLLLGLLLLAALLEHGQADPGTDNLQMNVTRTPESFPPGKLLPISPTWPFTEVRSSSAADRIKTVLGQSSDNTSLPQSARTPASKTHHRTRAHADFSSSLYQGSGHSASLEPSKDSTESLVQPGPKGGQEAADVSGLPLTSMLPSLSTVPSGTSFSAVPPSQPVWAGTSSISKHPPRSDIPPLLPLPPSSSLAPDSPHSIISEPAEQSPKVLLVPQTAPADPSLGQNIANPLIPFSDEMDHTASQNAQDLIGIPHLGVSGSSTKWHSELSPTEGPHSAGSSTPGFLSPMAELSHPSPPPPALGSLLQLPDGSPSWSMLEVASGPASTQQIKAGVPGRVHNGVSLPTFKNTETATHEAEPPLFQTAESGAIEMTSRKLASATANDSANPLHLSAAPENSRGPALSAEHTSSLVPSLHITTLGQEQAILSGAVPASPSTGTADFPSILTFLQPTENHASPSPVPEMPTLPAEGSDGSPPATRDLLLSSKVPNLLSTSWTFPRWKKDSVTAILGKNEEANVTIPLQAFPRKEVLSLHTVNGFVSDFSTGSVSSPIITAPRTNPLPSGPPLPSILSIQATQTVFPSLGFSSTKPEAYAAAVDHSGLPASASKQVRASPSSMDVYDSLTIGDMKKPATTDVFWSSLSAETGSLSTESIISGLQQQTNYDLNGHTISTTSWETHLAPTAPPNGLTSAADAIKSQDFKDTAGHSVTAEGFSIQDLVLGTSIEQPVQQSDMTMVGSHIDLWPTSNNNHSRDFQTAEVAYYSPTTRHSVSHPQLQLPNQPAHPLLLTSPGPTSTGSLQEMLSDGTDTGSEISSDINSSPERNASTPFQNILGYHSAAESSISTSVFPRTSSRVLRASQHPKKWTADTVSSKVQPTAAAAVTLFLRKSSPPALSAALVAKGTSSSPLAVASGPAKSSSMTTLAKNVTNKAASGPKRTPGAVHTAFPFTPTYMYARTGHTTSTHTAMQGNMDTASGLLSTTYLPRKPQAMHTGLPNPTNLEMPRASTPRPLTVTAALTSITASVKATRLPPLRAENTDAVLPAASAAVVTTGKMASNLECQMSSKLLVKTVLFLTQRRVQISESLKFSIAKGLTQALRKAFHQNDVSAHVDILEYSHNVTVGYYATKGKLVYLPAVVIEMLGVYGVSNVTADLKQHTPHLQSVAVLASPWNPQPAGYFQLKTVLQFVSQADNIQSCKFAQTMEQRLQKAFQDAERKVLNTKSNLTIQIVSTSNASQAVTLVYVVGNQSTFLNGTVASSLLSQLSAELVGFYLTYPPLTIAEPLEYPNLDISETTRDYWVITVLQGVDNSLVGLHNQSFARVMEQRLAQLFMMSQQQGRRFKRATTLGSYTVQMVKMQRVPGPKDPAELTYYTLYNGKPLLGTAAAKILSTIDSQRMALTLHHVVLLQADPVVKNPPNNLWIIAAVLAPIAVVTVIIIIITAVLCRKNKNDFKPDTMINLPQRAKPVQGFDYAKQHLGQQGADEEVIPVTQETVVLPLPIRDAPQERDVAQDGSTIKTAKSTETRKSRSPSENGSVISNESGKPSSGRRSPQNVMAQQKVTKEEARKRNVPASDEEEGAVLFDNSSKVAAEPFDTSSGSVQLIAIKPTALPMVPPTSDRSQESSAVLNGEVNKALKQKSDIEHYRNKLRLKAKRKGYYDFPAVETSKGLTERKKMYEKAPKEMEHVLDPDSELCAPFTESKNRQQMKNSVYRSRQSLNSPSPGETEMDLLVTRERPRRGIRNSGYDTEPEIIEETNIDRVPEPRGYSRSRQVKGHSETSTLSSQPSIDEVRQQMHMLLEEAFSLASAGHAGQSRHQEAYGSAQHLPYSEVVTSAPGTMTRPRAGVQWVPTYRPEMYQYSLPRPAYRFSQLPEMVMGSPPPPVPPRTGPVAVASLRRSTSDIGSKTRMAESTGPEPAQLHDSASFTQMSRGPVSVTQLDQSALNYSGNTVPAVFAIPAANRPGFTGYFIPTPPSSYRNQAWMSYAGENELPSQWADSVPLPGYIEAYPRSRYPQSSPSRLPRQYSQPANLHPSLEQAPAPSTAASQQSLAENDPSDAPLTNISTAALVKAIREEVAKLAKKQTDMFEFQV

SEQ ID NO: 91507 - protein, 327 aa, Homo sapiens
MYLVMELCEDGELKEILDRKGHFSENETRWIIQSLASAIAYLHNNDIVHRDLKLENIMVKSSLIDDNNEINLNIKVTDFGLAVKKQSRSEAMLQATCGTPIYMAPEVISAHDYSQQCDIWSIGVVMYMLLRGEPPFLASSEEKLFELIRKGELHFENAVWNSISDCAKSVLKQLMKVDPAHRITAKELLDNQWLTGNKLSSVRPTNVLEMMKEWKNNPESVEENTTEEKNKPSTEEKLKSYQPWGNVPDANYTSDEEEEKQSTAYEKQFPATSKDNFDMCSSSFTSSKLLPAEIKGEMEKTPVTPSQGTATKYPAKSGALSRTKKKL

SEQ ID NO: 91508 - protein, 50 aa, Homo sapiens
  MOD_RES (1)..(1): Any amino acid
XASAKTCDGVQCAFEELVEKIIQTPGLWESENQNKGVKLSHREEGQGGGA

SEQ ID NO: 91509 - protein, 182 aa, Homo sapiens
FLLTLLLQLLPPGLLPGCAIFQDLIRYGKTKCGEPSRPAACRAFDVPKRYFSHFYIISVLWNGFLLWCLTQSLFLGAPFPSWLHGLLRILGAAQFQGVVIHCNHRIPFGDWFEYVSSPNYLAELMIYVSMAVTFGFHNLTWWLVVTNVFFNQALSAFLSHQFYKSKFVSYPKHRKAFLPFLF

SEQ ID NO: 91510 - protein, 746 aa, Homo sapiens
MDTSGHFHDSGVGDLDEDPKCPCPSSGDEQQQQQQQQQQQQPPPPAPPAAPQQPLGPSLQPQPPQLQQQQQQQQQQQQQQPPHPLSQLAQLQSQPVHPGLLHSSPTAFRAPPSSNSTAILHPSSRQGSQLNLNDHLLGHSPSSTATSGPGGGSRHRQASPLVHRRDSNPFTEIAMSSCKYSGGVMKPLSRLSASRRNLIEAETEGQPLQLFSPSNPPEIVISSREDNHAHQTLLHHPNATHNHQHAGTTASSTTFPKANKRKNQNIGYKLGHRRALFEKRKRLSDYALIFGMFGIVVMVIETELSWGLYSKDSMFSLALKCLISLSTIILLGLIIAYHTREVQLFVIDNGADDWRIAMTYERILYISLEMLVCAIHPIPGEYKFFWTARLAFSYTPSRAEADVDIILSIPMFLRLYLIARVMLLHSKLFTDASSRSIGALNKINFNTRFVMKTLMTICPGTVLLVFSISLWIIAAWTVRVCESPESPAQPSGSSLPAWYHDQQDVTSNFLGAMWLISITFLSIGYGDMVPHTYCGKGVCLLTGIMGAGCTALVVAVVARKLELTKAEKHVHNFMMDTQLTKRIKNAAANVLRETWLIYKHTKLLKKIDHAKVRKHQRKFLQAIHQLRSVKMEQRKLSDQANTLVDLSKMQNVMYDLITELNDRSEDLEKQIGSLESKLEHLTASFNSLPLLIADTLRQQQQQLLSAIIEARGVSVAVGTTHTPISDSPIGVSSTSFPTPYTSSSSC

SEQ ID NO: 91511 - protein, 338 aa, Homo sapiens
MAEQVALSRTQVCGILREELFQGDAFHQSDTHIFIIMGASGDLAKKKIYPTIWWLFRDGLLPENTFIVGYARSRLTVADIRKQSEPFFKATPEEKLKLEDFFARNSYVAGQYDDAASYQRLNSHMNALHLGSQANRLFYLALPPTVYEAVTKNIHESCMSQIRGWNRIIVEKPFGRDLQSSDRLSNHISSLFREDQIYRIDHYLGKEMVQNLMVLRFANRIFGPIWNRDNIACVILTFKEPFGTEGRGGYFDEFGIIRDVMQNHLLQMLCLVAMEKPASTNSDDVRDEKVKVLKCISEVQANNVVLGQYVGNPDGEGEATKGYLDDPTVPRGSTTATF

SEQ ID NO: 91512 - protein, 204 aa, Homo sapiens
MNSNVENLPPHIIRLVYKEVTTLTADPPDGIKVFPNEEDLTDLQVTIEGPEGTPYAGGLFRMKLLLGKDFPASPPKGYFLTKIFHPNVGANGEICVNVLKRDWTAELGIRHVLLLSWKDKQCQTQDTQVLLRSAQEHLTMQRVTIKCLLIHPNPESALNEEAGRLLLENYEEYAARARLLTEIHGGAGGPSGRAEAGRALASGT

SEQ ID NO: 91513 - protein, 250 aa, Homo sapiens [sequence omitted]

SEQ ID NO: 91514 - protein, 222 aa, Homo sapiens
MHRDARAQKASRGFPPRVPKSFPFNTSVVYKKTLFVEFTDHLFNIAKPRPPWMGLLGPTIQAEVYDTVVITLKNMASHPVSLHAVGVSYWKASEGAEYDDQTSQREKEDDKVFPGGSHTYVWQVLKENGPMASDPLCLTYSYLSHVDLVKDLNSGLIGALLVCREGSLAKEKTQTLHKFILLFAVFDEGKSWHSETKNSLMQDRDAASARAWPKMHTVNGYV

SEQ ID NO: 91515 - protein, 201 aa, Homo sapiens
MVVSEVDIAKADPAAASHPLLLNGDATVAQKNPGSVAENNLCSQYEEKVRPCIDLIDSLRALGVEQDLALPAIAVIGDQSSGKSSVLEALSGVALPRGSGIVTRCPLVLKLKKLVNEDKWRGKVSYQDYEIEISDASEVEKEINKAQNAIAGEGMGISHELITLEISSRDVPDLTLIDLPGITRVAVGNQPADIGYKIKTL

SEQ ID NO: 91516 - protein, 67 aa, Homo sapiens
MSNPSAPPPYEDRNPLYPGPPPPGGYGQPSVLPGGYPAYPGYPQPGYGHPAGYPQPMPPTHPMPMNY

SEQ ID NO: 91517 - protein, 539 aa, Homo sapiens
MNLERLRKRVRQYLDQQQYQSALFWADKVASLSREEPQDIYWLAQCLYLTAQYHRAAHALRSRKLDKLYEACRYLAARCHYAAKEHQQALDVLDMEEPINKRLFEKYLKDESGFKDPSSDWEMSQSSIKSSICLLRGKIYDALDNRTLATYSYKEALKLDVYCFEAFDLLTSHHMLTAQEEKELLESLPLSKLCNEEQELLRFLFENKLKKYNKPSETVIPESVDGLQENLDVVVSLAERHYYNCDFKMCYKLTSVVMEKDPFHASCLPVHIGTLVELNKANELFYLSHKLVDLYPSNPVSWFAVGCYYLMVGHKNEHARRYLSKATTLEKTYGPAWIAYGHSFAVESEHDQAMAAYFTAAQLMKGCHLPMLYIGLEYGLTNNSKLAERFFSQALSIAPEDPFVMHEVGVVAFQNGEWKTAEKWFLDALEKIKAIGNEVTVDKWEPLLNNLGHVCRKLKKYAEALDYHRQALVLIPQNASTYSAIGYIHSLMGNFENAVDYFHTALGLRRDDTFSVTMLGHCIEMYIGDSEAYIAPNWK

SEQ ID NO: 91518 - protein, 81 aa, Homo sapiens
MGKQNSKLRPEVMQDLLESTDFTEHEIQEWYKGFLRDCPSGHLSMEEFKKIYGNFFPYGDASKFAEHVFRTFDANGDGTID

SEQ ID NO: 91519 - protein, 182 aa, Homo sapiens
MLRSVWNFLKRHKKKCIFLGTVLGVLSMLPTLREALMQQLNSESLTALLKNRPSNKLEIWEDLKIISFTRSTVAVYSTCMLVVLLRVQLNIIGGYIYLDNAAVGKNGTTILAPPDVQQQYLSSIQHLLGDGLTELITVIKQAVQKVLGSVSLKHSLSLLDLEQKLKEIRNLVEQHKSSSWIN

SEQ ID NO: 91520 - protein, 47 aa, Homo sapiens
MSNQQMHRKTASLNSPVSCKEKPDRVEEPPDYSAIPLSQCGSLSQVR

SEQ ID NO: 91521 - protein, 33 aa, Homo sapiens
MRWRTILLQYCFLLITCLLTALEAVPIDIDKTK

SEQ ID NO: 91522 - protein, 166 aa, Homo sapiens
MGIQGLLQFIKEASEPIHVRKYKGQVVAVDTYCWLHKGAIACAEKLAKGEPTDRRRQANLLKGKQLLREGKVSEARECFTRSINITHAMAHKAARSQGVDCLVAPYEADAQLAYLNKAGIVQAIITEDSDLLAFGCKKVILKMDQFGNGLEIDQARLGMCRQLGDV

SEQ ID NO: 91523 - protein, 60 aa, Homo sapiens
MKESTLEAIGYICQDIDPEQLQDKSNEILTAIIQGMRKEEPSNNVKLAATNALLNSLEFT

SEQ ID NO: 91524 - protein, 95 aa, Homo sapiens
LQQAQTTRPESTQIQPQPGFCIKTNSSEGKVFINICHSPSIPPPADVTEEELLQMLEEDQAGFRIPMSLGEPHAELDAKQRFLAGARDHHRQGGP

SEQ ID NO: 91525 - protein, 178 aa, Homo sapiens
MAMGDDKSFDDEESVDGNRPSSAASAFKVPAPKTSGNPANSARKPGSAGGPKVGAGASKEGGAGAVDEDDFIKAFTDVPSIQIYSSRELEETLNKIREILSDDKHDWDQRANALKKIRSLLVAGAAQYDCFFQHLRLLDGALKLSAKDLRSQVVREACITVAHLSTVLGNKFDHGAEA

SEQ ID NO: 91526 - protein, 490 aa, Homo sapiens
MPFRNSKRSRLFSDEDDRQINTRSPKRNQRVAMVPQKFTATMSTPDKKASQKIGFRLRNLLKLPKAHKWCIYEWFYSNIDKPLFEGDNDFCVCLKESFPNLKTRKLTRVEWGKIRRLMGKPRRCSSAFFEEERSALKQKRQKIRLLQQRKVADVSQFKDLPDEIPLPLVIGTKVTARLRGVHDGLFTGQIDAVDTLNATYRVTFDRTGLGTHTIPDYEVLSNEPHETMPIAAFGQKQRPSRFFMTPPRLHYTPPLQSPIIDNDPLLGQSPWRSKISGSDTETLGGFPVEFLIQVTRLSKILMIKKEHIKKLREMNTEAEKLKSYSMPISIEFQRRYATIVLELEQLNKDLNKVLHKVQQYCYELAPDQGLQPADQPTDMRRRCEEEAQEIVRHANSSTGQPCVENENLTDLISRLTAILLQIKCLAEGGDLNSFEFKSLTDSLNDIKSTIDASNISCFQNNVEIHVAHIQSGLSQMGNLHAFAANNTNRD

SEQ ID NO: 91527 - protein, 100 aa, Homo sapiens
  MOD_RES (1)..(1): Any amino acid
XFIQKSDDKVTLEERLDKACEPGVDYVYKTRLVKVQLSNDFDEYIMAIEQTIKSGSDEVQVGQQRTFISPIKCREALKLEEKKHYLMWGLSSDFWGEKPK

SEQ ID NO: 91528 - protein, 82 aa, Homo sapiens
MPSQNYDLPQKKQEKMTKFQEAVTFKDVAVVFSREELRLLDLTQRKLYRDVMVENFKNLVAVGHLPFQPDMVSQLEAEEKLW

SEQ ID NO: 91529 - protein, 137 aa, Homo sapiens
MTSALTQGLERIPDQLGYLVLSEGAVLASSGDLENDEQAASAISELVSTACGFRLHRGMNVPFKRLSGEPLPLPLVVVLGAGGYFQGLLGFSSSSLLPSPGVSGLATFLPLGLPGIRIVNEKARERRSSRGHSSSNL

SEQ ID NO: 91530 - protein, 77 aa, Homo sapiens
MPHRKERPSGSSLHTHGSTGTAEGGNMSRLSLTRSPVSPLAAQGIPLPAQLTKSNAPVHIDVGGHMYTSSLATLTKY

SEQ ID NO: 91531 - protein, 123 aa, Homo sapiens
MEANQCPLVVEPSYPDLVINVGEVTLGEENRKKLQKIQRDQEKERVMRAACALLNSGGGVIRMAKKVEHPVEMGLDLEQSLRELIQSSDLQAFFETKQQGRCFYIFVKSWSSGPFPEDRSVKP

SEQ ID NO: 91532 - protein, 181 aa, Homo sapiens
MPCNNGDDHSEGGLVENHVDSTMNMLGGGGSAGRKPLKSGMKELAVFREKVTEQHRQMGKGGKHHLGLEEPKKLRPPPARTPCQQELDQVLERISTMRLPDERGPLEHLYSLHIPNCDKHGLYNLKQCKMSLNGQRGECWCVNPNTGKLIQGAPTIRGDPECHLFYNEQQEARGVHTQRMQ

SEQ ID NO: 91533 - protein, 39 aa, Homo sapiens
MRVSAPSPQPPSCRRVRSAFPLTRFCLLSSSLAHQGDPG

SEQ ID NO: 91534 - protein, 182 aa, Homo sapiens
MAAFGRQVLDWHRLIPLTWACMARQTPHLGEQRRTTASLLRKLTTASNGGVIEELSCVRSNNYVQEPECRRNLVQCLLEKQGTPVVQGSLELERVMSSLLDMGFSNAHINELLSVRRGASLQQLLDIISEFILLGLNPEPVCVVLKKSPQLLKLPIMQMRKRSSYLQKLGLGEAASSYSVTA

SEQ ID NO: 91535 - protein, 235 aa, Homo sapiens
MLRRPLAGLAAAALGRAPPDGMSGPRPVVLSGPSGAGKSTLLKRLLQEHSGIFGFSVSHTTRNPRPGEENGKDYYFVTREVMQRDIAAGDFIEHAEFSGNLYGTSKVAVQAVQAMNRICVLDVDLQGVRNIKATDLRPIYISVQPPSLHVLEQRLRQRNTETEESLVKRLAAAQADMESSPAGLESCPTAAVRTAAGKEPGLFDVVIINDSLDQAYAELKEALSEEIKKAQRTGA

SEQ ID NO: 91536 - protein, 166 aa, Homo sapiens
MNTSPGTVGSDPVILATAGYDHTVRFWQAHSGICTRTVQHQDSQVNALEVTPDRSMIAAAVQPVSLGYQHIRMYDLNSNNPNPIISYDGVNKNIASVGFHEDGRWMYTGGEDCTARIWDLRSRNLQCQRIFQVNAPINCVCLHPNQAELIVGDQSGAIHIWDLKTD

SEQ ID NO: 91537 - protein, 161 aa, Homo sapiens
MLADQPRTTKYHSVILQNKESLRIKSSWTWAVGLGSSVSSVHTMRGLERVYAVEASEMAQHTGQLVLQNGFADIITVYQQKVEDVVLPEKVDVLVSEWMGTCLLFEFMIESILYARDAWLKETGSFGPPWLRCTLCPAVLIRIIVARCSSGTTRTSSTSAL

SEQ ID NO: 91538 - protein, 180 aa, Homo sapiens
LRLHFSCFNNGCARRSGEAQSVTLHTDVGDIKIEVFCERTPKTCENFLALCASNYYNGCIFHRNIKGFMVQTGDPTGTGRGGNSIWGKKFEDEYSEYLKHNVRGVVSMANNGPNTNGSQFFITYGKQPHLDMKYTVFGKVIDGLETLDELEKLPVNEKTYRPLNDVHIKDITIHANPFAQ

SEQ ID NO: 91539 - protein, 686 aa, Homo sapiens
MLLPVFTLKLRHKISPRMVAIGRYDGTHPCLAAATQTGKVFIHNPHTRNQHVSASRVFQSPLESDVSLLSINQAVSCLTAGVLNPELGYDALLVGTQTNLLAYDVYNNSDLFYREVADGANAIVLGTLGDISSPLAIIGGNCALQGFNHEGSDLFWTVTGDNVNSLALCDFDGDGKKELLVGSEDFDIRVFKEDEIVAEMTETESKNHAMSIHAFDLNSDGVNELITGWSNGKVDARSDRTGEVIFKDNFSSAIAGVVEGDYRMDGHIQLICCSVDGEIRGYLPGTAEMRGNLMDTSAEQDLIRELSQKKQNLLLELRNYEENAKAELASPLNEADGHRGIIPANTRLHTTLSVSLGNETQTAHTELRISTSNDTIIRAVLIFAEGIFTGESHVVHPSIHNLSSSICIPIVPPKDVPVDLHLKAFVGYRSSTQFHVFESTRQLPRFSMYALTSLDPASEPISYVNFTIAERAQRVVVWLGQNFLLPEDTHIQNAPFQVCFTSLRNGGHLHIKIKLSGEITINTDDIDLAGDIIQSMASFFAIEDLQVEADFPVYFEELRKVLVKVDEYHSVHQKLSADMADHSNLIRSLLVGAEDARLMRDMKTMKSRYMELYDLNRDLLNGYKIRCNNHTELLGNLKAVNQAIQRAGRLRVGKPKNQVITACRDAIRSNNINTLFKIMRVGTASS

SEQ ID NO: 91540 - protein, 198 aa, Homo sapiens
MASSAEGDEGTVVALAGVLQSGFQELSLNKLATSLGASEQALRLIISIFLGYPFALFYRHYLFYKETYLIHLFHTFTGLSIAYFNFGNQLYHSLLCIVLQFLILRLMGRTITAVLTTFCFQMAYLLAGYYYTATGNYDIKWTMPHCVLTLKLIGLAVDYFDGGKDQHHSCSQAPESGPFLPSGLHTAQPPHHRRLSPH

SEQ ID NO: 91541 - protein, 64 aa, Homo sapiens
MPESEEIAQLLSGSYIHYFHCLRILDLLKGTEASTKNIFGRYSSQRMKDWQEIIALYEKDNTYL

SEQ ID NO: 91542 - protein, 136 aa, Homo sapiens
MAPFEPLASGILLLLWLIAPSRACTCVPPHPQTAFCNSDLVIRAKFVGTPEVNQTTLYQRYEIKMTKMYKGFQALGDAADIRFVYTPAMESVCGYFHRSHNRSEEFLIAGEAPSPRPVPHQPVPGARPSNHEGARL

SEQ ID NO: 91543 - protein, 336 aa, Homo sapiens
  MOD_RES (1)..(1): Any amino acid
XVPTAPTSGGPKPSTASAVPELATDPELEKKLLHHLSDLALTLPTDAVSICLAISTPDAPATQDGVESLLQKFAAQELIEVKRGLLQDDAHPTLVTYADHSKLSAMMGAVAEKKGPGEVAGTVTGQKRRAEQDSTTVAAFASSLVSGLNSSASEPAKEPAKKSRKHAASDVDLEIESLLNQQSTKEQQSKKVSQEILELLNTTTAKEQSIVEKFRSRGRAQVQEFCDYGTKEECMKASDADRPCRKLHFRRIINKHTDESLGDCSFLNTCFHMDTCKYVHYEIDACMDSEAPGSKDHTPSQELALTQSVGGDSSADRLFPPQGHGVGERMSKPLGV

SEQ ID NO: 91544 - protein, 150 aa, Homo sapiens
ACPIWNGALAITTGVLLLLAYREWTQRYLGEATFTFVILSIMGCPLHFAIALESALLGPYCFYSFSGIAGTNYLGYAVTFPYPYAKFPLACVDPPHYEEYHLTLQALDLCLSFTLLCTSLTVFIKLSARLIQNGHINMQLPAGNPNPFSP

SEQ ID NO: 91545 - protein, 64 aa, Homo sapiens
MVSTMSDGWKFEQLISIGSSYNYGNEDQAEFLCVVSRELNNSTNGIVIEPSEKAKILQERGSRM

SEQ ID NO: 91546 - protein, 313 aa, Homo sapiens
MADKQISLPAKLINGGIAGLIGVTCVFPIDLAKTRLQNQQNGQRVYTSIPRQSRDPGLRLAPAGPGSPCPLGHRSDCLIKTVRSEGYFGMYRGAAVNLTLVTPEKAIKLAANDFFRHQLSKDGQKLTLLKEMLAGCGAGTCQVIVTTPMEMLKIQLQDAGRIAAQRKILAAQGQLSAQGGAQPSVEAPAAPRPTATQLTRDLLRSRGIAGLYKGLGATLLRDVPFSVVYFPLFANLNQLGRPASEEKSPFYVSFLAGCVAGSAAAVAVNPCDVVKTRLQSLQRGVNEDTYSGILDCARKILRHEGPSAFLKGA

SEQ ID NO: 91547 - protein, 169 aa, Homo sapiens
MALDGPEQMELEEGKAGSGLRQYYLSKIEELQLIVNDKSQNLRRLQAQRNELNAKVRLLREELQLLQEQGSYVGEVVRAMDKKKVLVKVTPNCRVALRNDSYTLHKILPNKVDPLVSLMMVEKVPDSTYEMIGGLDKQIKEIKEVIELPVKHPELFEALGIAQPKGQEW

SEQ ID NO: 91548 - protein, 112 aa, Homo sapiens; identical to SEQ ID NO: 14001

SEQ ID NO: 91549 - protein, 167 aa, Homo sapiens
AADCHLSRIVQATTLLTMDKYAPDDIPNINSTCFKLNSLQLQALLQNYHCAPDEPFIPTDLIENVVTVAENTADELARSDGREVQLEEDPDLQLPFLLPEDGYSCDVVRNIPNGLQEFLDPLCQRGFCRLIPHTRSPGTWTIYFEGADYESHLLRENTELASILRVP

SEQ ID NO: 91550 - protein, 87 aa, Homo sapiens
MALKKFVMVKFLNDSIVDPVDSEWFGFYRSGQAKETIPLQETSLYTQDRLGLKEMDNAGQLVFLATEGDHLQLSEEWFYAHIIPFLG

SEQ ID NO: 91551 - protein, 562 aa, Homo sapiens
MSDEEIKKTTLASAVACLEGKSPGEKVAIIHQHLGRREMTDVIIETMKSNPDELKTTVEERKSSEASPTAQRSKDHSKECINAAPDSPSKQLPDQISFFSGNPSVEIVHGIMHLYKTNKMTSLKEDVRRSAMLCILTVPAAMTSHDLMKFVAPFNEVIEQMKIIRDSTPNQYMVLIKFRAQADADSFYMTCNGRQFNSIEDDVCQLVYVERAEVLKSEDGASLPVMDLTELPKCTVCLERMDESVNGILTTLCNHSFHSQCLQRWDDTTCPVCRYCQTPEPVEENKCFECGVQENLWICLICGHIGCGRYVSRHAYKHFEETQHTYAMQLTNHRVWDYAGDNYVHRLVASKTDGKIVQYECEGDTCQEEKIDALQLEYSYLLTSQLESQRIYWENKIVRIEKDTAEEINNMKTKFKETIEKCDNLEHKLNDLLKEKQSVERKCTQLNTKVAKLTNELKEEQEMNKCLRANQVLLQNKLKEEERVLKETCDQKDLQITEIQEQLRDVMFYLETQQKINHLPAETRQEIQEGQINIAMASASSPASSGGSGKLPSRKGRSKRGK

SEQ ID NO: 91552 - protein, 191 aa, Homo sapiens
  MOD_RES (1)..(1): Any amino acid
XHVWSPGSRSVAGTGSGSVSHAIIRTIAPTGHLHTVEFHQQRAEKAREEFQEHRVGRWVTVRTQDVCRSGFGVSHVADAVFLDIPSPWEAVGHAWDALKVEGGRFCSFSPCIEQVQRTCQALAARGFSELSTLEVLPQVYNVRTVSLPPPDLGTGTDGPAGSDTSPFRSGTPMKEAVGHTGYLTFATKTPG

SEQ ID NO: 91553 - protein, 231 aa, Homo sapiens
MAQRGLPPAHDPWEPKPDWAHTGSHSSEAGKKDVSGPLRELRPRLCHLRKGPQGYGFNLHSDKSRPGQYIRSVDPGSPAARSGLRAQDRLIEVNGQNVEGLRHAEVVASIKAREDEARLLVVDPETDEHFKRLRVTPTEEHVEGPLPSPVTNGTSPAQLNGGSACSSRSDLPGSDKDTEDGSAWKQDPFQESGLHLSPTAAEAKEKARAMRVNKRAPQMDWNRKREIFSNF

SEQ ID NO: 91554 - protein, 179 aa, Homo sapiens
PLGGMFSGQPPGPPQAPPGLPGQASLLQAAPGAPRPSSSTLVDELESSFEACFASLVSQDYVNGTDQEEIRTGVDQCIQKFLDIARQTECFFLQKRLQLSVQKPEQVIKEDVSELRNELQRKDALVQKHLTKLRHWQQVLEDINVQHKKPADIPQGSLAYLEQASANIPAPLKPTHLTG

SEQ ID NO: 91555 - protein, 71 aa, Homo sapiens
MVDVKVDTEDIEKKPESFFTQFDAVCLTCCSRDVIVKVDQICHKNSIKFFTGDVFGYHGYTFANLGEHEFV

SEQ ID NO: 91556 - protein, 100 aa, Homo sapiens
MATRVRTASIWGTNTPNLISSSSWNKEKSCVWCRPKFQIRPVQTQSGKLMILWIGIRKIKTSWEVRQKALNALHLENYVFLVQSIFQDKNLINVARMERV

SEQ ID NO: 91557 - protein, 245 aa, Homo sapiens
MEVTGPRFQCTFFSGSSSQGEKNGERVLCFHGPLLYEAKCVKVAIKDKQVKYFIHYSGWNKNWDEWVPESRVLKYVDTNLQKQRELQKANQEQYAEGKMRGAAPGKKTSGLQQKNVEVKTKKNKQKTPGNGDGGSTSETPQPPRKKRARVDPTVENEETFMNRVEVKVKIPEELKPWLVDDWDLITRQKQLFYLPAKKNVDSILEDYANYKKSRGNTDNKEYAVNEVVAGIKEYFNVMLGTQLLY

SEQ ID NO: 91558 - protein, 93 aa, Homo sapiens
  MOD_RES (1)..(1): Any amino acid
XEFGGPLGAAALLLLLPATMFHLLLAARSGPARLLGPPASLPGLEVLWSPRALLLWLAWLGLQAALYLLPARKVAEGQELKDKSRLRYPINGA

SEQ ID NO: 91559 - protein, 79 aa, Homo sapiens
MAAKQPPPLMKKHSQTDLVSRLKTRKILGVGGEDDDGEVHRSKISQVLGNEIKFTIREPLGLRVWQFVSAVLFSGIAIM

SEQ ID NO: 91560 - protein, 198 aa, Homo sapiens
MTVSVTGEPPSTVEEEGIPKETDIEIIPEIPETLEPLSLPDVLRISAVLEDTTDQLSILNYIMPVQYEGRQSICVKSREMNLEGTNLDKLPMASTITKIPSPLITEEGPNLPEIRHRGRFAVEFNKMQDLVFKKPTRQTIMTTETLKKIQIDRQFFSDVIADTIKELQDSATYNSLLQALSKERENKMHFYDIIAREE

SEQ ID NO: 91561 - protein, 182 aa, Homo sapiens
MAQRSGKITLYEGKHFTGQKLEVFGDCDNFQDRGFMNRVNSIHVESGAWVCFNHPDFRGQQFILEHGDYPDFFRWNSHSDHMGSCRPVGMHGEHFRLEIFEGCNFTGQCLEFLEDSPFLQSRGWVKNCVNTIKVYGDGAWVLYEEPNYHGRMYVVESGDFRSFSDWEAHSARVQSLHKSMEP

SEQ ID NO: 91562 - protein, 437 aa, Homo sapiens
  MOD_RES (1)..(1): Any amino acid
XLDSAKKAACEFSETDVTNTEHHQPSNNDLNTTEKRAAERHPEKYQGSSVSNLHVEPCGTNTHASSLQHENSSLLLTKDRMNVEKAEFCNKSKQPGLARSQHNRWAGSKETCNDRRTPSTEKKVDLNADPLCERKEWNKQKLPCSENPRDTEDVPWITLNSSIQKVNEWFSRSDELLGSDDSHDGESESNAKVADVLDVLNEVDEYSGSSEKIDLLASDPHEALICKSERVHSKSVESNIEDKIFGKTYRKKASLPNLSHVTENLIIGAFVTEPQIIQERPLTNKLKRKRRPTSGLHPEDFIKKADLAVQKTPEMINQGTNQTEQNGQVMNITNSGHENKTKGDSIQNEKNPNPIESLEKESAFKTKAEPISSSISNMELELNIHNSKAPKKNRLRRKSSTRHIHALELVVSRNLSPPNCTELQIDSCSSSEEIKKK

SEQ ID NO: 91563 - protein, 1010 aa, Homo sapiens
MSNSNTTQETLEIMKESEKKLVEESVNKNKFISKTPSKEEIEKECEDTSLRQETQRRTSNHGHARKRAKSNSKLKLVRSLAVCEESSTPFADGPLETQDIIQLHISCPSDKEEEKSTKDVSEKEDKDKNKEKIPRKMLSRDSSQEYTDSTGIDLHEFLVNTLKKNPRDRMMLLKLEQEILEFINDNNNQFKKFPQMTSYHRMLLHRVAAYFGMDHNVDQTGKAVIINKTSNTRIPEQRFSEHIKDEKNTEFQQRFILKRDDASMDRDDNQTGQNGYLNDIRLSKEAFSSSSHKRRQIFRGNREGLSRTSSSRQSSTDSELKSLEPRPWSSTDSDGSVRSMRPPVTKASSFSGISILTRGDSIGSSKGGSAGRISRPGMALGAPEVCNQVTSSQSVRGLLPCTAQQQQQQQQQQLPALPPTPQQQPPLNNHMISQPVPALQPSPQPVQFSPSSCPQVLLPVSPPQQYNMADDLSNPFGQMSLSRQGSTEAADPSAALFQTPLISQHPQQTSFIMASTGQPLPTSNYSTSSHAPPTQQVLPPQGYMQPPQQIQVSYYPPGQYPNSNQQYRPLSHPVAYSPQRGQQLPQPSQQPGLQPMMPNQQQAAYQGMIGVQQPQNQGLLSSQRSSMGGQMQGLVVQYTPLPSYQVPVGSDSQNVVQPPFQQPMLVPVSQSVQGGLPAAGVPVYYSMIPPAQQNGTSPSVGFLQPPGSEQYQMPQSPSPCSPPQMPQQYSGVSPSGPGVVVMQLNVPNGPQPPQNPSMVQWSHCKYYSMDQRGQKPGDLYSPDSSPQANTQMSSSPVTSPTQSPAPSPVTSLSSVCTGLSPLPVLTQFPRPGGPAQGDGRYSLLGQPLQYNLSICPPLLHGQSTYTVHQGQSGLKHGNRGKRQALKSASTDLGTADVVLGRVLEVTDLPEGITRTEADKLFTQLAMSGAKIQWLKDAQGLPGGGGGDNSGTAENGRHSDLAALYTIVAVFPSPLAAQNASLRLNNSVSRFKLRMAKKNYDLRILERASSQ

SEQ ID NO: 91564 - protein, 192 aa, Homo sapiens
MGGRRGPNRTSYCRNPLCEPGSSGGSSGSHTSSASVTSVRSRTRSSSGTGLSSPPLATQTVVPLQHCKIPELPVQASILFELQLFFCQLIALFVHYINIYKTVWWYPPSHPPSHTSLASQRGKVSLFRSILLFLTRFTVLTATGWSLCRSLIHLFRTYSFLNLLFLCYPFGMYIPFLQLNCDLRKTSLFNHM

SEQ ID NO: 91565 - protein, 140 aa, Homo sapiens
MEMSGLSFSEMEGCRNLLGLLDNDEIMALCDTVTNRLVQPQDRQDAVHAILAYSQSAEELLRRRKVHREVIFKYLATQGIVIPPATEKHNLIQHAKDYWQKQPQLKLKETPEPVTKTEDIHLFQQDHLKMNGDHSTSGMM

SEQ ID NO: 91566 - protein, 268 aa, Homo sapiens
MDVDSTISSGRSTPAMMNGQGSTTSSSKNIAYNCCWDQCQACFNSSPDLADHIRSIHVDGQRGGVFVCLWKGCKVYNTPSTSQSWLQRHMLTHSGDKPFKCVVGGCNASFASQGGLARHVPTHFSQQNSSKVSSQPKAKEESPSKAGMNKRRKLKNKRRRSLPRPHDFFDAQTLDAIRHRAICFNLSAHIESLGKGHSVVFHSTVIAKRKEDSGKIKLLLHWMPEDILPDVWVNESERHQLKTKVVHLSKLPKDTALLLDPNIYRLEN

SEQ ID NO: 91567 - protein, 53 aa, Homo sapiens
  MOD_RES (1)..(1): Any amino acid
XACEQWQRDLASCRDWEERRNAEAQASRFFQLIFTLTGPSSQLEDKGRILGRL

SEQ ID NO: 91568 - protein, 339 aa, Homo sapiens
MDSPGYNCFVDKDKMDAAIQDLGPKELSCTELQELKQLARQGYWAQSHALRGKVYQRLIRDIPCRTVTPDASVYSDIVGKIVGKHSSSCLPLPEFVDNTQVPSYCLNARGEGAVRKILLCLANQFPDISFCPALPAVVALLLHYSIDEAECFEKACRILACNDPGRRLIDQSFLAFESSCMTFGDLVNKYCQAAHKLMVAVSEDVLQVYADWQRWLFGELPLCYFARVFDVFLVEGYKVLYRVALAILKFFHKVRAGQPLESDSVKQDIRTFVRDIAKTVSPEKLLEKAFAIRLFSRKEIQLLQMANEKALKQKGITVKQKSLYTWPSMQRTSARRSSA

SEQ ID NO: 91569 - protein, 66 aa, Homo sapiens
MSHPSWLPPKSTGEPLGHVPARMETTHSFGNPSISVSTQQPPKKFAPVVAPKPKYNPYKQPGGEGD

SEQ ID NO: 91570 - protein, 194 aa, Homo sapiens
MVGASRPPPKPLRPRQLQEVGRQSSSDSGIATGSHSSYSSSLSSYAGSSLDVWRATDELGSLLSLPAAGAPEPSLCTCLPGTVEYQVPTSLRAHYDTPRSLCLAPRDHSPPSQGSPGNSAARDSGGQTSAGCPSGWLGTRRRGLVMEAPQGSEATLPGPAPGEPWEAGGPHAGPPPAFFSACPVCGGLKVNPPP

SEQ ID NO: 91571 - protein, 203 aa, Homo sapiens
MKPPSSIQTSEFDSSDEEPIEDEQTPIHISWLSLSRVNCSQFLGLCALPGCKFKDVRRNVQKDTEELKSCGIQDIFVFCTRGELSKYRVPNLLDLYQQCGIITHHHPIADGGTPDIASCCEIMEELTTCLKNYRKTLIHCYGGLGRSCLVAACLLLYLSDTISPEQAIDSLRDLRGSGAIQTIKDLPTSQFLPQSVLGMDPLT

SEQ ID NO: 91572 - protein, 185 aa, Homo sapiens
MLLLLLLPLLWGRERVEGQKSNRKDYSLTMQSSVTVQEGMCVHVRCSFSYPVDSQTDSDPVHGYWFRAGNDISWKAPVATNNPAWAVQEETRDRFHLLGDPQTKNCTLSIRDARMSDAGRYFFRMEKGNIKWNYKYDQLSVNVTAPAPRHQPHLSGDLAWGRRDHEQDHPTQCVLSPCLSVPDPP

SEQ ID NO: 91573 - protein, 121 aa, Homo sapiens
MLEILDTAGTEQFTAMRDLYMKNGQGFALVYSITAQSTFNDLQDLREQILRVKDTDDVPMILVGNKCDLEDERVVGKEQGQNLARQWNNCAFLESSAKSKINVNEIFYDLVRQINRKTPVP

SEQ ID NO: 91574 - protein, 224 aa, Homo sapiens
MRVMAPRTLILLLSGALALTETWACSHSMRYFYTAVSRPGRGEPRFIAVGYVDDTQFVQFDSDAASPRGEPRAPWVEQEGPEYWDRETQKYKRQAQTDRVNLRKLRGYYNQSEAGSHTLQRMYGCDLGPDGRLLRGYNQFAYDGKDYIALNEDLRSWTAADKAAQITQRKWEAAREAEQRRAYLEGTCVEWLRRYLENGKKTLQRAGQDQKSLFLPQRLELSNE

SEQ ID NO: 91575 - protein, 341 aa, Homo sapiens
MLAVRKARRKLRMGTICSPNPSGTKTSSEVCNADWMASLPPHLHNLPLSNLAIPGSHDSFSYWVDEKSPVGPDQTQAIKRLARISLVKKLMKKWSVTQNLTFREQLEAGIRYFDLRVSSKPGDADQEIYFIHGLFGIKVWDGLMEIDSFLTQHPQEIIFLDFNHFYAMDETHHKCLVLRIQEAFGNKLCPACSVESLTLRTLWEKNCQVLIFYHCPFYKQYPFLWPGKKIPAPWANTTSVRKLILFLETTLSERASRGSFHVSQAILTPRVKTIARGLVGGLKNTLVHRNLPAILDWVKTQKPGAMGVNIITSDFVDLVDFAATVIKLNDLLQEDTALAKC

SEQ ID NO: 91576 - protein, 81 aa, Homo sapiens
MAQEEEDVRDYNLTEEQKAIKAKYPPVNRKYEYLDHTADVQWGEEFSLSKHPQGTEVKAITYSAMQVYNEENPEVFVIIDI

SEQ ID NO: 91577 - protein, 179 aa, Homo sapiens
MSSKGSVVLAYSGGLDTSCILVWLKEQGYDVIAYLANIGQKEDFEEARKKALKLGAKKVFIEDVSREFVEEFIWPAIQSSALYEDRYLLGTSLARPCIARKQVEIAQREGAKYVSHGATGKVIAPWRMPEFYNRFKGRNDLMEYAKQHGIPIPVTPKNPWSMDENLMHISYEAGILENP

SEQ ID NO: 91578 - protein, 471 aa, Homo sapiens
MEAAPPGPPWPLLLLLLLLLALCGCPAPAAASPLLLFANRRDVRLVDAGGVKLESTIVVSGLEDAAAVDFQFSKGAVYWTDVSEEAIKQTYLNQTGAAVQNVVISGLVSPDGLACDWVGKKLYWTDSETNRIEVANLNGTSRKVLFWQDLDQPRAIALDPAHGYMYWTDWGETPRIERAGMDGSTRKIIVDSDIYWPNGLTIDLEEQKLYWADAKLSFIHRANLDGSFRQKVVEGSLTHPFALTLSGDTLYWTDWQTRSIHACNKRTGGKRKEILSALYSPMDIQVLSQERQPFFHTRCEEDNGGCSHLCLLSPSEPFYTCACPTGVQLQDNGRTCKAGAEEVLLLARRTDLRRISLDTPDFTDIVLQVDDIRHAIAIDYDPLEGYVYWTDDEVRAIRRAYLDGSGAQTLVNTEINDPDGIAVDWVARNLYWTDTGTDRIEVTRLNGTSRKILVSEDLDEPRAIALHPVMG

SEQ ID NO: 91579 - protein, 182 aa, Homo sapiens
  MOD_RES (1)..(1): Any amino acid
XVPDIVTMGKSIGNGHPVACVAATQPVARAFEATGVEYFNTFGGSPVSCAVGLAVLNVLEKEQLQDHATSVGSFLMQLLGQQKIKHPIVGDVRGVGLFIGVDLIKDEATRTPATEEAAYLVSRLKENYVLLSTDGPGRNILKFKPPMCFSLDNARQVVAKLDAILTDMEEKVRSCETLRLQP

SEQ ID NO: 91580 - protein, 294 aa, Homo sapiens
MNNQKQQKPTLSGQRFKTRKRDEKERFDPTQFQDCIIQGLTETGTDLEAVAKFLDASGAKLDYRRYAETLFDILVAGGMLAPGGTLADDMMRTDVCVFAAQEDLETMQAFAQVFNKLIRRYKYLEKGFEDEVKKLLLFLKGFSESERNKLAMLTGVLLANGTLNASILNSLYNENLVKEGVSAAFAVKLFKSWINEKDINAVAASLRKVSMDNRLMELFPANKQSVEHFTKYFTEAGLKELSEYVRNQQTIGARKELQKELQEQMSRGDPFKDIILYVKEEMKKNNIPEPVVIG

SEQ ID NO: 91581 - protein, 56 aa, Homo sapiens
VDGHSSKNDIHTLLKVLTLSPRLECNGVILAHCNLRLLGSSDSRASASRVNGITGS

SEQ ID NO: 91582 - protein, 341 aa, Homo sapiens
MGRRRRLCLQLYFLWLGCVVLWAQGTAGQPQPPPPKPPRPQPPPQQVRSATAGSEGGFLAPEYREEGAAVASRVRRRGQQDVLRGPNVCGSRFHSYCCPGWKTLPGGNQCIVPICRNSCGDGFCSRPNMCTCSSGQISSTCGSKSIQQCSVRCMNGGTCADDHCQCQKGYIGTYCGQPVCENGCQNGGRCIGPNRCACVYGFTGPQCERDYRTGPCFTQVNNQMCQGQLTGIVCTKTLCCATIGRAWGHPCEMCPAQPQPCRRGFIPNIRTGACQDVDECQAIPGICQGGNCINTVGSFECRCPAGHKQSETTQKCEVHVDKAQAGARCPCVILPSRLYLR

SEQ ID NO: 91583 - protein, 830 aa, Homo sapiens
MENELPVPHTSSSACATSSTSGASSSSGCNNSSSGGSGRPTGPQISVYSGIPDRQTVQVIQQALHRQPSTAAQYLQQMYAAQQQHLMLQTAALQQQHLSSAQLQSLAAVQQASLVSNRQGSTSGSNVSAQAPAQSSSINLAASPAAAQLLNRAQSVNSAAASGIAQQAVLLGNTSSPALTASQAQMYLRAQMVQNLTLRTQQTPAAAASGPTPTQPVLPSLALKPTPGGSQPLPTPAQSRNTAQASPAGAKPGIADSVMEPHKKGDGNSSVPGSMEGRAGLSRTVPAVAAHPLIAPAYAQLQPHQLLPQPSSKHLQPQFVIQQQPQPQQQQPPPQQSRPVLQAEPHPQLASVSPSVALQPSSEAHAMPLGPVTPALPLQCPTANLHKPGGSQQCHPPTPDTGPQNGHPEGVPHTPQRRFQHTSAVILQLQPASPVPQQCVPDDWKEVAPGEKSVPETRSGPSPHQQAIVTAMPGGLPVPTSPNIQPSPAHETGQGIVHALTDLSSPGMTSGNGNSASSIAGTAPQNGENKPPQAIVKPQILTHVIEGFVIQEGAEPFPVGRSSLLVGNLKKKYAQGFLPEKLPQQDHTTTTDSEMEEPYLQESKEEGAPLKLKCELCGRVDFAYKFKRSKRFCSMACAKRYNVGCTKRVGLFHSDRSKLQKAGAATHNRRRASKASLPPLTKDTKKQPTGTVPLSVTAALQLTHSQEDSSRCSDNSSYEEPLSPISASSSTSRRRQGQRDLELPDMHMRDLVGMGHHFLPSEPTKWNVEDVYEFIRSLPGCQEIAEEFRAQEIDGQALLLLKEDHLMSAMNIKLGPALKIYARISMLKDS

SEQ ID NO: 91584 - protein, 177 aa, Homo sapiens
DAISAANPRVIDDSRARKLSTDLKRCTYYETCATYGLNVERVFQDVAQKVVALRKKQQLAIGPCKSLPNSPSHSAVSAASIPAVHINQATNGGGSAFSDYSSSVPSTPSISQRELRIETIAASSTPTPIRKQSKRRSNIFTLMNRRPEGCLPKATQRICATVSNFSSTKRPFQLLPN

SEQ ID NO: 91585 - protein, 176 aa, Homo sapiens
MEKSSSEDSSIHRSPSLDSKDSDFAKPSTSGRPFGRGFTAGAFYGTAGSRGQSRAEAGVKTDKCNAPKGSKYVVFYLDLSFVFLLEFKKCNMARGCLCCLKYMMFLFNLIFWLCGCGLLGVGIWLSVSQGNFATFSPSFPSLSAANLVIAIGTIVMVTGFLGCLGAIKENKCLLLS

SEQ ID NO: 91586 - protein, 25 aa, Homo sapiens
  MOD_RES (1)..(1): Any amino acid
XPESSRSEASRILDMLVSTQQKKWP

SEQ ID NO: 91587 - protein, 107 aa, Homo sapiens
MGPLQFRDVAIEFSLEEWHCLDMAQRNLYRDVMLENYRNLVFLGIVVSKPDLITHLEQGKKPSTMQRHEMVANPSGPVLHILFFCCCFLSFFLSFSFSFFFFFFFFF

SEQ ID NO: 91588 - protein, 62 aa, Homo sapiens
MSMFLNTLTPKFYVALTGTSSLISGLILIFEWWYFRKYGTSFIEQVSVSHLRPLLGGVDNNS

SEQ ID NO: 91589 - protein, 229 aa, Homo sapiens
MEELEQGLLMQPWAWLQLAENSLLAKVFITKQGYALLVSDLQQVWHEQVDTSVVSQRAKELNKRLTAPPAAFLCHLDNLLRPLLKDAAHPSEATFSCDCVADALILRVRSELSGLPFYWNFHCMLASPSLVSQHLIRPLMGMSLALQCQVRELATLLHMKDLEIQDYQESGATLIRDRLKTEPFEENSFLEQFMIEKLPEACSIGDGKPFVMNLQDLYMAVTTQEVQVG

SEQ ID NO: 91590 - protein, 91 aa, Homo sapiens
MLLVALAVFFGACYILYLRTLESKLVLFGREVSPAHQYALAGGISFPFFWLAGAGSAVFWVLGATLVVIGSHAAFHQIEAVDGEELQMEPV

SEQ ID NO: 91591 - protein, 35 aa, Homo sapiens
MALNKNHSEGGGVIVNNTERLEKQTSKNRTSITRT

SEQ ID NO: 91592 - protein, 185 aa, Homo sapiens
MKLFGFGSRRGQTAQGSIDHVYTGSGYRIRDSELQKIHRAAVKGDAAEVERCLARRSGDLDALDKQHRTALHLACTSGHVQVVTLLVNRKCQIDVCDKENRTPLIQAVHCQEEACAVILLEHGANPNLKDIYGNTALHYAVYSESTSLAEKLLSHGAHIEALDKQCVPEKVSEPLPGSSHEKGNR

SEQ ID NO: 91593 - protein, 109 aa, Homo sapiens
MREIVHLQAGQCGNQIGAKFWEVISDEHGIDPTGTYHGDSDLQLERINVYYNEATGGNYVPRAVLVDLEPGTMDSVRSGPFGQIFRPDNFVFGESPSREPEAGKPPYSC

SEQ ID NO: 91594 - protein, 522 aa, Homo sapiens
MADYLISGGTSYVPDDGLTAQQLFNCGDGLTYNDFLILPGYIDFTADQVVSMIRNWVLNIKDLTSALTKKITLKTPLVSSPMDTVTEAGMAIAMALTGGIGFIHHNCTPEFQANEVRKVKKYEQGFITDPVVLSPKDRVRDVFEAKARHGFCGIPITDTGRMGSRLVGIISSRDIDFLKEEEHDCFLEEIMTKREDLVVAPAGITLKEANEILQRSKKGKLPIVNEDDELVAIIARTDLKKNRDYPLASKDAKKQLLCGAAIGTHEDDKYRLDLLAQAGVDVVVLGNSIFQINMIKYIKDKYPNLQVIGGNVVTAAQAKNLIDAGVDALRVGMGSGSICITQEVLACGRPQATAVYKVSEYARRFGVPVIADGGIQNVGHIAKALALGASTVMMGSLLAATTEAPGEYFFSDGIRLKKYRGMGSLDAMDKHLSSQNRYFSEADKIKVAQGVSGAVQDKGSIHKFVPYLIAGIQHSCQDIGAKSLTQVRAMMYSGELKFEKRTSSAQVEGGVHSLHSYEKRLF

SEQ ID NO: 91595 - protein, 157 aa, Homo sapiens
MCSGSGRRRSSLSPTMRPGTGAERGGLMMGHPGMHYAPMGMHPMGQRANMPPVPHGMMPQMMPPMGGPPMGQMPGMMSSVMPGMMMSHMSQASMQPALPQLLSKCPWKEYKSDSGKPYYYNSQTKESRWAKPKELEDLEGYQNTIVAGSLITKSNLH

SEQ ID NO: 91596 - protein, 200 aa, Homo sapiens
AEEEEEEEDSEVQGEQPKPASPAEEDKMPPYDEQTQAFIDAAQEARNKFEEAERSLKDMEESIRNLEQEISFDFGPNGEFAYLYSQCYELTTNEYVYRLCPFKLVSQKPKLGGSPTSLGTWGSWIGPDHDKFSAMKYEQGTGCWQGPNRSTTVRLLCGKETMVTSTTEPSRCEYLMELMTPAACPEPPPEAPTEDDHDEL

SEQ ID NO: 91597 - protein, 1257 aa, Homo sapiens
MKENGSPYNYRIIFRTSELMTLRGSVLEDAIPSTAKHSTARGLPLKEVLEHVVPELNVQCLRLAFNTPKVTEQLMKLDEQGLNYQQKVGIMYCKAGQSTEEEMYNNESAGPAFEEFLQLLGERVRLKGFEKYRAQLDTKTDSTGTHSLYTTYKDYEIMFHVSTMLPYTPNNKQQLLRKRHIGNDIVTIVFQEPGAQPFSPKNIRSHFQHVFVIVRVHNPCSDSVCYSVAVTRSRDVPSFGPPIPKGVTFPKSNVFRDFLLAKVINAENAAHKSEKFRAMATRTRQEYLKDLAEKNVTNTPIDPSGKFPFISLASKKKEKSKPYPGAELSSMGAIVWAVRAEDYNKAMELDCLLGISNEFIVLIEQETKSVVFNCSCRDVIGWTSTDTSLKIFYERGECVSVGSFINIEEIKEIVKRLQFVSKGCESVEMTLRRNGLGQLGFHVNYEGIVADVEPYGYAWQAGLRQGSRLVEICKVAVATLSHEQMIDLLRTSVTVKVVIIPPHDDCTPRRSCSETYRMPVMEYKMNEGVSYEFKFPFRNNNKWQRNASKGPHSPQVPSQVQSPMTSRLNAGKGDGKMPPPERAANIPRSISSDGRPLERRLSPGSDIYVTVSSMALARSQCRNSPSNLSSSSDTGSVGGTYRQKSMPEGFGVSRRSPASIDRQNTQSDIGGSGKSTPSWQRSEDSIADQMEPTCHLPAVSKVLPAFRESPSGRLMRQDPVVHLSPNKQGHSDSHYSSHSSSNTLSSNASSAHSDEKWYDGDRTESELNSYNYLQGTSADSGIDTTSYGPSHGSTASLGAATSSPRSGPGKEKVAPLWHSSSEVISMADRTLETESHGLDRKTESSLSLDIHSKSQAGSTPLTRENSTFSINDAASHTSTMSSRHSASPVVFTSARSSPKEELHPAAPSQLAPSFSSSSSSSSGPRSFYPRQGATSKYLIGWKKPEGTINSVGFMDTRKRHQSDGNEIAHTRLRASTRDLRASPKPTSKSTIEEDLKKLIDLESPTPESQKSFKFHALSSPQSPFPSTPTSRRALHRTLSDESIYNSQREHFFTSRASLLDQALPNDVLFSSTYPSLPKSLPLRRPSYTLGMKSLHGEFSASDSSLTDIQETRRQPMPDPGLMPLPDTAADLDWSNLVDAAKAYEVQRASFFAASDENHRPLSAASNSDQLEDQALAQMKPYSSKDSSPTLASKVDQLEGMLKMLREDLKKEKEDKAHLQAEVQHLREDNLRLQEESQNASDKLKKFTEWVFNTIDMS

SEQ ID NO: 91598 - protein, 100 aa, Homo sapiens
MKNATIVMSVRREQGSSSGEGSLSFEDVAVGFTREEWQFLDQSQKVLYKEVMLENYINLVSIGYRGTKPDSLFKLEQGEPPGIAEGAAHSQICPDADFLE

SEQ ID NO: 91599 - protein, 684 aa, Homo sapiens
MDSAAKDEMQPALSPGSSFPGPEWPEQERAEQLARGAALKWASGIFYRPEQLARLGQYRSREVQRTCSLESRLKSVMQSYLEGVQTVPAAVSHTQTLIDGQQFLEAYVSLRELEQLREDTWAPLGGLELPVFQGLDLLFEALGQAVEAAAGAAGKLAREDPALLVAAVRVAEVETGRTTPLGQVPRDWRQRCLRALQEGLEQAHFGSPLLPAPGALPGWLEALRVALPVELATAEALVAPCCPPQYNVVQLWAHTLHSGLRRSLQNLLAGPELEAADAFALLHWALHVYLGQEMMGSLELGPEADVSQLEPLLTLENIEQLEATFVANIQILEENIRVASLVSESLQQRVHGMALSELGTFLRSFSDALIRFSRDHFRGKSMAPHYVPYLLAALNHKSALSSSVSVLQLDGAPSGALAPVEAALDELQRRIYRLVLEALQAELQPLFADLPSRQWLSSPELLQSVCERTGRFCRDFWRVRNPTVQLLLAEAERAVVLQYLSALMQGRLVCRGADERTQAAERLRHDAAQLQQLFLSLVRASWAGRRARVSVAGWERGLARDPTPTCSGPGGERALRAGAARPEGAAKPPRPRAAGPGGGWPAATISRRERGPRLRPLGPARGLVPGAAPGRAQLPAGCAAAVAPREPPRPLQPSARARARAGLLPALGVLRPSPAARRINHGCR

SEQ ID NO: 91600 - protein, 120 aa, Homo sapiens
  MOD_RES (1)..(1): Any amino acid
XQNAFQVIAVDGVCTGIIQCLSAEDCVDWLQAIATNISNLTKHNIKKINRNFPVNQQIVYMGWCEAREQDPLQDRVYSPTFLALRGSCLYKFLAPPVTTWDWTRAEKTFSVYEIMCKILK

SEQ ID NO: 91601 - protein, 87 aa, Homo sapiens
MPSKESWSGRKTNRAAVHKSKQEGRQQDLLIAALGMKLGSPKSSVTIWQPLKLFAYSQLTSLVRRATLKENEQIPKYEKIHNFKIVV

SEQ ID NO: 91602 - protein, 88 aa, Homo sapiens
MPKAPKGKSAGREKKVIHPYSRKAAQITREAHKQEKKEKLKNEKALRLNLVGEKLQWFQNHLDPQKKRYSKKDACELIERDSRHSKCK

SEQ ID NO: 91603 - protein, 161 aa, Homo sapiens
MLLSVMEGELEARDLVIEALRARRKEVFIQERYGRFNLNDPFLALQRDYEAGAGDKEKKPVCTNPLSILEAVMAHCKKMQERMSAQLAAAESRQKKLEMEKLQLQALEQEHKKLAARLEEERGKNKQVVLMLVKECKQLSGKVIEEAQKLEDVMAKLEEEK

SEQ ID NO: 91604 - protein, 242 aa, Homo sapiens
MAAPAVSGLSRQVRCFSTSVVRPFAKLVRPPVQVYGIEGRYATALYSAASKQNKLEQVEKELLRVAQILKEPKVAASVLNPYVKRSIKVKSLNDITAKERFSPLTTNLINLLAENGRLSNTQGVVSAFSTMMSVHRGEVPCTVTSASTSHVSFSEPDIPSSKSTELPVDWSIKTRLLFTSSQPFTWADHLKAQEEAQGLVQHCRATEVTLPKSIQDPKLSSELRCTFQQSLIYWLHPALSWL

SEQ ID NO: 91605 - protein, 128 aa, Homo sapiens
  MOD_RES (1)..(1): Any amino acid
XPDQFQRLLKINPDWKTHRLLDLGAGDGEVTKIMSPHFEEIYATELSETMIWQLQKKKYRVLGINEWQNTGFQYDVISCLNLLDRCDQPLTLLKDIRSVLEPTRGRVILALVLPFHPYVENGKCGQSG

SEQ ID NO: 91606 - protein, 191 aa, Homo sapiens
  MOD_RES (1)..(1): Any amino acid
XSPLHGNHITISHTQATGSRSVPMPLSNISVPKSSVSRVPCNVEGISPELEKVFIKENNGKEEVSKPLDIPDGRRAPLPAHYRSSSTRSIDTQTPSVQERSSSCSSHSPCVSPFCPPESQDGSPCSTEDLLYDRDKDSGSSSPLPKYASSPKPNNSYMFKREPPEGCERVKVFEEMAQTPGVVSLSCFPSQ

SEQ ID NO: 91607 - protein, 94 aa, Homo sapiens
  MOD_RES (1)..(1): Any amino acid
XSDVQIHVPTFTFRVTVGDITCTGEGTSKKLAKHRAAEAAINILKANASICFAVPDPLMPDPSKQPKNQLNPIGSLQPHLDFIGIGYSSWLETS

SEQ ID NO: 91608 - protein, 89 aa, Homo sapiens
MPNPRPGKPSAPSLALGPSPGASPSWRAAPKASDLLGARGPGGTFQGRDLRGGAHASSSSLNPMPPSQLQALLQDRPHFMHQLSTVDAH

SEQ ID NO: 91609 - protein, 282 aa, Homo sapiens
MAWQVSLLELEDRLQCPICLEVFKESLMLQCGHSYCKGCLVSLSYHLDTKVRCPMCWQVVDGSSSLPNVSLAWVIEALRLPGDPEPKVCVHHRNPLSLFCEKDQELICGLCGLLGSHQHHPVTPVSTVCSRMKEELAALFSELKQEQKKVDELIAKLVKNRTRIVNESDVFSWVIRREFQELRHPVDEEKARCLEGIGGHTRGLVASLDMQLEQAQGTRERLAQAECVLEQFGNEDHHEFIWKFHSMASRLTKTEELEKKWRNGLAASHSLPQQVRPQRRTP

SEQ ID NO: 91610 - protein, 196 aa, Homo sapiens
MAKGRVAERSQLGAHHTTPVGDGAAGTRGLAAPGSRDHQKEKSWVEAGSARMSLLILVSIFLSAAFVMFLVYKNFPQLSEEERVNMKVPRDMDDAKALGKVLSKYKDTFYVQVLVAYFATYIFLQTFAIPGSIFLSILSGFLYPFPLALFLVCLCSGLGASFCYMLSYLVGRPVVYKYLTEKAVKWSQQVSHLLLL

SEQ ID NO: 91611 - protein, 146 aa, Homo sapiens
MASFSAETNSTDLLSQPWNEPPVILSMVILSLTFLLGLPGNGLVLWVAGLKMQRTVNTIWFLHLTLADLLCCLSLPFSLAHLALQGQWPYGRFLCKLIPSIIVLNMFASVFLLTAISLDRCLVVFKPIWCQNHRNVGMACSICGCI

SEQ ID NO: 91612 - protein, 95 aa, Homo sapiens
  MOD_RES (1)..(1): Any amino acid
XAEVGERGEATDHHQVSLALSTWGEISEITSIKKEDVISTLQYLNLINYYKGQYILTLSEDIVDGHERAMLKRLLRIDSKCLHFTPKDWSKRGKW

SEQ ID NO: 91613 - protein, 193 aa, Homo sapiens
MALYELFSHPVERSYRAGLCSKAALFLLLAAALTYIPPLLVAFRSHGFWLKRSSYEEQPTVRFQHQVLLVALLGPESDGFLAWSTFPAFNRLQGDRLRVPLVSTREEDRNQDGKTDMLHFKLELPLQSTEHVLEDGDPRDAEHGVSPVLLSCPGIPVIRERRPEAAAEAAAELWWPRCPIQHIRDQRDQPLCL

SEQ ID NO: 91614 - protein, 102 aa, Homo sapiens
MAESGGSSGGAGGGGAFGAGPGPERPNSTADKNGALKCTFSAPSHSTSLLQGLATLRAQGQLLDVVLTINREAFPAHKVVLAACSDYFRLECSASGLDLLIS

SEQ ID NO: 91615 - protein, 352 aa, Homo sapiens
MDRTETRFRKRGQIKGKITTSRQPHPQNEQSPQRSTSGYSLQEVVDDEVLGSSAPGVDPSPPCRSLGWKRKKEWSDESEEEPEKELAPEPEETWVVEMLCGLKMKLKQQRVSPILPEHHKDFNSQLAPGVDPSPPHRSFCWKRKREWWDESEESLEEEPRKVLAPEPEEIWVVEMLCGLKMKLKRRRVSLVLPEHHEAFNRLLEDPVIKRFLAWDKDLRVSDKYLLAMVIAYFSRAGLPSWQYQRIHFFLALYLANDMEEDDEDPKQNIFYFLYGKTRSRIPLVRNRRFQLCRCMNPRARKNRSQIALFQKLRFQFFCSMSGRAWVSREELEEIQAYDPEHWVWARDRARLS

SEQ ID NO: 91616 - protein, 367 aa, Homo sapiens
DIPFTRTDPVVADYKYDLKLQEYQSAIKVEPASPPYYSEKTQLYNKPHEEPSNSLMAIECRVCGDKASGFHYGVHACEGCKGFFRRTIRLKLIYDRCDLNCRIHKKSRNKCQYCRFQKCLAVGMSHNAIRFGRMPQAEKEKLLAEISSDIDQLNPESADLRALAKHLYDSYIKSFPLTKAKARAILTGKTTDKSPFVIYDMNSLMMGEDKIKFKHITPLQEQSKEVAIRIFQGCQFRSVEAVQEITEYAKSIPGFVNLDLNDQVTLLKYGVHEIIYTMLASLMNKDGVLISEGQGFMTREFLKSLRKPFGDFMEPKFEFAVKFNALELDDSDLAIFIAVIILSGERKIRGQSNLWFLPPRFAECEAH

SEQ ID NO: 91617 - protein, 366 aa, Homo sapiens
MSAANPETPNSTISREASTQSSSAAASQGWVLPEGKIVPNTVFVGGIDARMDETEIGSCFGRYGSVKEVKIITNRTGVSKGYGFVSFVNDVDVQKIVGSQIHFHGKKLKLGPAIRKQKLCARHVQPRPLVVNPPPPPQFQNVWRNPNTETYLQPQITPNPVTQHVQAYSAYPHSPGQVITGCQLLVYNYQEYPTYPDSAFQVTTGYQLPVYNYQPFPAYPRSPFQVTAGYQLPVYNYQPFPAYPSSPFQVTAGYQLPVYNYQAFPAYPNSPVQVTTGYQLPVYNYQAFPAYPSSPFQVTTGYQLPVYNYQAFPAYPNSAVQVTTGYQFHVYNYQMPPQCPVGEQRRNLWTEAYKWWYLVCLIQRRD

SEQ ID NO: 91618 - protein, 807 aa, Homo sapiens
MAALSGGGGGGAEPGQALFNGDMEPEAGAGAGAAASSAADPAIPEEVWNIKQMIKLTQEHIEALLDKFGGEHNPPSIYLEAYEEYTSKLDALQQREQQLLESLGNGTDFSVSSSASMDTVTSSSSSSLSVLPSSLSVFQNPTDVARSNPKSPQKPIVRVFLPNKQRTVVPARCGVTVRDSLKKALMMRGLIPECCAVYRIQDGEKKPIGWDTDISWLTGEELHVEVLENVPLTTHNFVRKTFFTLAFCDFCRKLLFQGFRCQTCGYKFHQRCSTEVPLMCVNYDQLDLLFVSKFFEHHPIPQEEASLAETALTSGSSPSAPASDSIGPQILTSPSPSKSIPIPQPFRPADEDHRNQFGQRDRSSSAPNVHINTIEPVNIDDLIRDQGFRGDGAPLNQLMRCLRKYQSRTPSPLLHSVPSEIVFDFEPGPVFRGSTTGLSATPPASLPGSLTNVKALQKSPGPQRERKSSSSSEDRNRMKTLGRRDSSDDWEIPDGQITVGQRIGSGSFGTVYKGKWHGDVAVKMLNVTAPTPQQLQAFKNEVGVLRKTRHVNILLFMGYSTKPQLAIVTQWCEGSSLYHHLHIIETKFEMIKLIDIARQTAQGMDYLHAKSIIHRDLKSNNIFLHEDLTVKIGDFGLATVKSRWSGSHQFEQLSGSILWMAPEVIRMQDKNPYSFQSDVYAFGIVLYELMTGQLPYSNINNRDQIIFMVGRGYLSPDLSKVRSNCPKAMKRLMAECLKKKRDERPLFPQILASIELLARSLPKIHRSASEPSLNRAGFQTEDFSLYACASPKTPIQAGGYGEFAAFK

SEQ ID NO: 91619 - protein, 251 aa, Homo sapiens
NSVYTSFMKSHRCYDLIPTSSKLVVFDTSLQVKKAFFALVTNGVRAAPLWDSKKQSFVGMLTITDFINILHRYYKSALVQIYELEEHKIETWREVYLQDSFKPLVCISPNARSLSSPSQSSCPSLWKSYRLAPMPILLWFALPPPSMWLWGFLYSIESQPCQWWMRRNLAAEKTYNNLDVSVTKALQHRSHYFEGVLKCYLHETLETIINRLVEAEVHRLVVVDENDVVKGIVSLSDILQALVLTGGEKKP

SEQ ID NO: 91620 - protein, 525 aa, Homo sapiens
MHSKVTIICIRFLFWFLLLCMLIGKSHTEDDIIIATKNGKVRGMNLTVFGGTVTAFLGIPYAQPPLGRLRFKKPQSLTKWSDIWNATKYANSCCQNIDQSFPGFHGSEMWNPNTDLSEDCLYLNVWIPAPKPKNATVLIWIYGGGFQTGTSSLHVYDGKFLARVERVIVVSMNYRVGALGFLALPGNPEAPGNMGLFDQQLALQWVQKNIAAFGGNPKSVTLFGESAGAASVSLHLLSPGSHSLFTRAILQSGSFNAPWAVTSLYEARNRTLNLAKLTGCSRENETEIIKCLRNKDPQEILLNEAFVVPYGTPLSVNFGPTVDGDFLTDMPDILLELGQFKKTQILVGVNKDEGTAFLVYGAPGFSKDNNSIITRKEFQEGLKIFFPGVSEFGKESILFHYTDWVDDQRPENYREALGDVVGDYNFICPALEFTKKFSEWGNNAFFYYFEHRSSKLPWPEWMGVMHGYEIEFVFGLPLERRDNYTKAEEILSRSIVKRWANFAKYGCSSSTILNYVLETEPVVLI

SEQ ID NO: 91621 - protein, 92 aa, Homo sapiens
MDKNELVQKAKLAEQAERYDDMAACMKSVTEQGAELSNEERNLLSVAYKNVVGARRSSWRVVSSIEQKTEGAEKKQQMAREYREKIETELRD

SEQ ID NO: 91622 - protein, 560 aa, Homo sapiens
  MOD_RES (1)..(1): Any amino acid
XDDQSDNQSDYSVASEEGDEDFDERSEAPRRPSRKGLRNDKDKPLPPLLARVGGNIEVLGFNARQRKAFLNAIMRYGMPPQDAFTTQWLVRDLRGKSEKEFKAYVSLFMRHLCEPGADGAETFADGVPREGLSRQHVLTRIGVMSLIRKKVQEFEHVNGRWSMPELAEVEENKKMSQPGSPSPKTPTPSTPGDTQPNTPAPVPPAEDGIKIEENSLKEEESIEGEKEVKSTAPETAIECTQAPAPASEDEKVVVEPPEGEEKVEKAEVKERTEEPMETEPKGAADVEKVEEKSAIDLTPIVVEDKEEKKEEEEKKEVMLQNGETPKDLNDEKQKKNIKQRFMFNIADGGFTELHSLWQNEERAATVTKKTYEIWHRRHDYWLLAGIINHGYARWQDIQNDPRYAILNEPFKGEMNRGNFLEIKNKFLARRFKLLEQALVIEEQLRRAAYLNMSEDPSHPSMALNTRFAEVECLAESHQHLSKESMAGNKPANAVLHKVLKQLEELLSDMKADVTRLPATIARIPPVAVRLQMSERNILSRLANRAPEPTPQQPSSSEDAD

SEQ ID NO: 91623 - protein, 525 aa, Homo sapiens
MKTYRQREKQGTKVADSSKGPDEAKIKALLERTGYTLDVTTGQRKYGGPPPDSVYSGQQPSVGTEIFVGKIPRDLFEDELVPLFEKAGPIWDLRLMMDPLTGLNRGYAFVTFCTKEAAQEAVKLYNNHEIRSGKHIGVCISVANNRLFVGSIPKSKTKEQILEEFSKVTEGLTDVILYHQPDDKKKNRGFCFLEYEDHKTAAQARRRLMSGKVKVWGNVGTVEWADPIEDPDPEVMAKVKVLFVRNLANTVTEEILEKAFSQFGKLERVKKLKDYAFIHFDERDGAVKAMEEMNGKDLEGENIEIVFAKPPDQKRKERKAQRQAAKNQMYDDYYYYGPPHMPPPTRGRGRGGRGGYGYPPDYYGYEDYYDYYGYDYHNYRGGYEDPYYGYEDFQVGARGRGGRGARGAAPSRGRGAAPPRGRAGYSQRGGPGSARGVRGARGGAQQQRGRGVRGARGGRGGNVGGKRKADGYNQPDSKRRQTNNQNWGSQPIAQQPLQGGDHSGNYGYKSENQEFYQDTFGQQWK

SEQ ID NO: 91624 - protein, 141 aa, Homo sapiens
MLSRAVCGTSRQLAPVLGYLGSRQKHSLPDLPYDYGALEPHINAQIMQLHHSKHHAAYVNNLNVTEEKYQEALAKGRFQAERREAVPGRGDPREPGPIRTGLSVEENSLRICTGSEFSRRCYSPDSSSACTEVQWWWSYQS

SEQ ID NO: 91625 - protein, 969 aa, Homo sapiens
MALSLWPLLLLLLLLLLLSFAVTLAPTGPHSLDPGLSFLKSLLSTLDQAPQGSLSRSRFFTFLANISSSFEPGRMGEGPVGEPPPLQPPALRLHDFLVTLRGSPDWEPMLGLLGDMLALLGQEQTPRDFLVHQAGVLGGLVEVLLGALVPGGPPTPTRPPCTRDGPSDCVLAADWLPSLLLLLEGTRWQALVQVQPSVDPTNATGLDGREAAPHFLQGLLGLLTPTGELGSKEALWGGLLRTVGAPLYAAFQEGLLRVTHSLQDEVFSILGQPEPDTNGQCQGGNLQQLLLWGVRHNLSWDVQALGFLSGSPPPPPALLHCLSTGVPLPRASQPSAHISPRQRRAITVEALCENHLGPAPPYSISNFSIHLLCQHTKPATPQPHPSTTAICQTAVWYAVSWAPGAQGWLQACHDQFPDEFLDAICSNLSFSALSGSNRRLVKRLCAGLLPPPTSCPEGLPPVPLTPDIFWGCFLENETLWAERLCGEASLQAVPPSNQAWVQHVCQGPTPDVTASPPCHIGPCGERCPDGGSFLVMVCANDTMYEVLVPFWPWLAGQCRISRGGNDTCFLEGLLGPLLPSLPPLGPSPLCLTPGPFLLGMLSQLPRCQSSVPALAHPTRLHYLLRLLTFLLGPGAGGAEAQGMLGRALLLSSLPDNCSFWDAFRPEGRRSVLRTIGEYLEQDEEQPTPSGFEPTVNPSSGISKMELLACFSPVLWDLLQREKSVWALQILVQAYLHMPPENLQQLVLSAEREAAQGFLTLMLQGKLQGKLQVPPSEEQALGRLTALLLQRYPRLTSQLFIDLSPLIPFLAVSDLMRFPPSLLANDSVQQGYRGSEENSLEEDKGLRPMTPRSLAAIRDYSPGMRPEQKEALAKRLLAPELFGEVPAWPQELLWAVLPLLPHLPLENFLQLSPHQIQALEDSWPAAGLGPGHARHVLRSLVNQSVQDGEEQVRRWHMNFWVCCAHLEERC

SEQ ID NO: 91626 - protein, 38 aa, Homo sapiens
VTSASPAPSTASASRWAPLPRSMPTPLKELPGPWKGKC

SEQ ID NO: 91627 - protein, 48 aa, Homo sapiens
MPEGAQGLSLSKPSPSLGCGRRGEVCDCGTVCETRTGEPRGRGGGACG

SEQ ID NO: 91628 - protein, 86 aa, Homo sapiens
MPPKGKSGSGKAGKGGAASGSDSADKKAQGPKGGGNAVKVRHILCEKHGKIMEAMEKLKSGMRFNEVAAQYSEDKARQGVCCSYYL

SEQ ID NO: 91629 - protein, 423 aa, Homo sapiens
MSDQALEALSASLGTRQAEPELDLRSIKEVDEAKAKEEKLEKCGEDDETIPSEYRLKPATDKDGKPLLPEPEEKPKPRSESELIDELSEDFDRSECKEKPSKPTEKTEESKAAAPAPVSEAVCRTSMCSIQSAPPEPATLKGTVPDDAVEALADSLGKKEADPEDGKPVMDKVKEKAKEEDREKLGEKEETIPPDYRLEEVKDKDGKPLLPKESKEQLPPMSEDFLLDALSEDFSGPQNASSLKFEDAKLAAAISEVVSQTPASTTQAGAPPRDTSQSDKDLDDALDKLSDSLGQRQPDPDENKPMEDKVKEKAKAEHRDKLGERDDTIPPEYRHLLDDNGQDKPVKPPTKKSEDSKKPADDQDPIDALSGDLDSCPSTTETSQNTAKDKCKKAASSSKAPKNGGKAKDSAKTTEETSKPKDD

SEQ ID NO: 91630 - protein, 1902 aa, Homo sapiens
MKVFKRRYFYLTQLPDGSYILNSYKDEKNSKESKGCIYLDACIDVVQCPKMRRHAFELKMLDKYSHYLAAETEQEMEEWLITLKKIIQINTDSLVQEKKETVETAQDDETSSQGKAENIMASLERSMHPELMKYGRETEQLNKLSRGDGRQNLFSFDSEVQRLDFSGIEPDIKPFEEKCNKRFLVNCHDLTFNILGQIGDNAKGPPTNVEPFFINLALFDVKNNCKISADFHVDLNPPSVREMLWGSSTQLASDGSPKGSSPESYIHGIAESQLRYIQQGIFSVTNPHPEIFLVARIEKVLQGNITHCAEPYIKNSDPVKTAQKVHRTAKQVCSRLGQYRMPFAWAARPIFKDTQGSLDLDGRFSPLYKQDSSKLSSEDILKLLSEYKKPEKTKLQIIPGQLNITVECVPVDLSNCITSSYVPLKPFEKNCQNITVEVEEFVPEMTKYCYPFTIYKNHLYVYPLQLKYDSQKTFAKARNIAVCVEFRDSDESDASALKCIYGKPAGSVFTTNAYAVVSHHNQNPEFYDEIKIELPIHLHQKHHLLFTFYHVSCEINTKGTTKKQDTVETPVGFAWVPLLKDGRIITFEQQLPVSANLPPGYLNLNDAESRRQCNVDIKWVDGAKPLLKIKSHLESTIYTQDLHVHKFFHHCQLIQSGSKEVPGELIKYLKCLHAMEIQVMIQFLPVILMQLFRVLTNMTHEDDVPINCTMVLLHIVSKCHEEGLDSYLRSFIKYSFRPEKPSAPQAQLIHETLATTMIAILKQSADFLSINKLLKYSWFFFEIIAKSMATYLLEENKIKLPRGQRFPETYHHVLHSLLLAIIPHVTIRYAEIPDESRNVNYSLASFLKRCLTLMDRGFIFNLINDYISGFSPKDPKVLAEYKFEFLQTICNHEHYIPLNLPMAFAKPKLQRVQDFFSFAVDRLTSVDSNLEYSLSDEYCKHHFLVGLLLRETSIALQDNYEIRYTAISVIKNLLIKHAFDTRYQHKNQQAKIAQLYLPFVGLLLENIQRLAGRDTLYSCAAMPNSASRDEFPCGFTSPANRGSLSTDKDTAYGSFQNGHGIKREDSRGSLIPEGATGFPDQGNTGENTRQSSTRSSVSQYNRLDQYEIRSLLMCYLYIVKMISEDTLLTYWNKVSPQELINILILLEVCLFHFRYMGKRNIARVHDAWLSKHFGIDRKSQTMPALRNRSGVMQARLQHLSSLESSFTLNHSSTTTEADIFHQALLEGNTATEVSLTVLDTISFFTQCFKTQLLNNDGHNPLMKKVFDIHLAFLKNGQSEVSLKHVFASLRAFISKFPSAFFKGRVNMCAAFCYEVLKCCTSKISSTRNEASALLYLLMRNNFEYTKRKTFLRTHLQIIIAVSQLIADVALSGGSRFQESLFIINNFANSDRPMKATAFPAEVKDLTKRIRTVLMATAQMKEHEKDPEMLIDLQYSLAKSYASTPELRKTWLDSMAKIHVKNGDFSEAAMCYVHVAALVAEFLHRKKLFPNGCSAFKKITPNIDEEGAMKEDAGMMDVHYSEEVLLELLEQCVDGLWKAERYEIISEISKLIVPIYEKRREFEKLTQVYRTLHGAYTKILEVMHTKKRLLGTFFRVAFYGQSFFEEEDGKEYIYKEPKLTGLSEISLRLVKLYGEKFGTENVKIIQDSDKVNAKELDPKYAHIQVTYVKPYFDDKELTERKTEFERNHNISRFVFEAPYTLSGKKQGCIEEQCKRRTILTTSNSFPYVKKRIPINCEQQINLKPIDVATDEIKDKTAELQKLCSSTDVDMIQLQLKLQGCVSVQVNAGPLAYARAFLNDSQASKYPPKKVSELKDMFRKFIQACSIALELNERLIKEDQVEYHEGLKSNFRDMVKELSDIIHEQILQEDTMHSPWMSNTLHVFCAISGTSSDRGYGSPRYAEV

SEQ ID NO: 91631 - protein, 80 aa, Homo sapiens
  MOD_RES (1)..(1): Any amino acid
XRNLVFLGIAVSKPDLITCLEQEKEPWNLKTHDMVAKPPGTAFSIFYMFVKFYKYMQCQYTFSEFGYFGTSFFHFSGQIC

SEQ ID NO: 91632 - protein, 236 aa, Homo sapiens
MPAPIRLRELIRTIRTARTQAEEREMIQKECAAIRSSFREEDNTYRCRNVAKLLYMHMLGYPAHFGQLECLKLIASQKFTDKRIGYLGAMLLLDERQDVHLLMTNCIKNDLNHSTQFVQGLALCTLGCMGSSEMCRDLAGEVEKLLKTSNSYLRKKAALCAVHVIRKVPELMEMFLPATKNLLNEKNHGVLHTSVVLLTEMCERSPDMLAHFRKVACAPISSYFKEPHHVRIFTRT

SEQ ID NO: 91633 - protein, 91 aa, Homo sapiens
  MOD_RES (1)..(1): Any amino acid
XTSSTGRRVSFNEAALFEQSRKTQDKGRRYTLTEGDFHHLKNARLTHLHLPPLKIVTIHECDSGEASSATTPHPATSPKATLAIFQLRPAR

SEQ ID NO: 91634 - protein, 301 aa, Homo sapiens
MPKLQGFEFWSRTLRGARHVVAPMVDQSELAWRLLSRRHGAQLCYTPMLHAQVFVRDANYRKENLYCEVCPEDRPLIVQFCANDPEVFVQAALLAQDYCDAIDLNLGCPQMIAKRGHYGAFLQDEWDLLQRMILLAHEKLSVPVTCKIRVFPEIDKTVRYAQMLEKAGCQLLTVHGRTKEQKGPLSGAASWEHIKAVRKAVAIPVFANGNIQCLQDVERCLRDTGVQGVMSAGGQGPGQQPGPHAHGLIPPPRGQPAQPRPVRGPEPCRVGAGRGVSGHRAGAPLPPVLRPGPPLQAVAPH

SEQ ID NO: 91635 - protein, 1090 aa, Homo sapiens
  MOD_RES (1)..(1): Any amino acid
XPVSASASVSASVPASTSAAAITSSSAPASAPAPTPILASVSTPASVTILASASIPILASALASTSAPTPAPAASSPAAPVITAPTIPASAPTASVPLAPASASAPAPAPTPVSAPNPAPPAPAQTQAQTHKPVQNPLQTTSQSSKQPPPSIRLPSAQTPNGTDYVASGKSIQTPQSHGTLTAELWDNKVAPPAVLNDISKKLGPISPPQPPSVSAWNKPLTSFGSAPSSEGAKNGQESGLEIGTDTIQFGAPASNGNENEVVPVLSEKSADKIPEPKEQRQKQPRAGPIKAQKLPDLSPVENKEHKPGPIGKERSLKNRKVKDAQQVEPEGQEKPSPATVRSTDPVTTKETKAVSEMSTEIGTMISVSSAEYGTNAKESVTDYTTPSSSLPNTVATNNTKMEDTLVNNVPLPNTLPLPKRETIQQSSSLTSVPPTTFSLTFKMESARKAWENSPNVREKGSPVTSTAPPIATGVSSSASGPSTANYNSFSSASMPQIPVASVTPTASLSGAGTYTTSSLSTKSTTTSDPPNICKVKPQQLQTSSLPSASHFSQLSCMPSLIAQQQQNPQVYVSQSAAAQIPAFYMDTSHLFNTQHARLAPPSLAQQQGFQPGLSQPTSVQQIPIPIYAPLQGQHQAQLSLGAGPAVSQAQELFSSSLQPYRSQPAFMQSSLSQPSVVLSGTAIHNFPTVQHQELAKAQSGLAFQQTSNTQPIPILYEHQLGQASGLGGSQLIDTHLLQARANLTQASNLYSGQVQQPGQTNFYNTAQSPSALQQVTVPLPASQLSLPNFGSTGQPLIALPQTLQPPLQHTTPQAQAQSLSRPAQVSQPFRGLIPAGTQHSMIATTGKMSEMELKAFGSGIDIKPGTPPIAGRSTTPTSSPFRATSTSPNSQSSKMNSIVYQKQFQSAPATVRMTQPFPTQFAPQILSQPNLVPPLVRAPHTNTFPAPVQRPPMALASQMPPPLTTGLMSHARLPHVARGPCGSLSGVRGNQAQAALKAEQDMKAKQRAEVLQSTQRFFSEQQQSKQIGGGKAQKVDSDSSKPPETLTDPPGVCQEKVEEKPPPAPSIATKPVRTGPIKPQAIKTEETKS

SEQ ID NO: 91636 - protein, 319 aa, Homo sapiens
MLGRSLREVSAALKQGQITPTELCQKCLSLIKKTKFLNAYITVSEEVALKQAEESEKRYKNGQSLGDLDGIPIAVKDNFSTSGIETTCASNMLKGYIPPYNATVVQKLLDQGALLMGKTNLDEFAMGSGSTDGVFGPVKNPWSYSKQYREKRKQNPHSENEDSDWLITGGSSGGSAAAVSAFTCYAALGSDTGGSTRNPAAHCGLVGFKPSYGLVSRHGLIPLVNSMDVPGILTRCVDDAAIVLGALAGPDPRDSTTVHEPINKPFMLPSLADVSKLCIGIPKVTFSFHYFTEILSSPIESTDLGGGLGGFESLLCHFY

SEQ ID NO: 91637 - protein, 102 aa, Homo sapiens
MLSPERLALPDYEYLAQRHVLTYMEDAVCQLLENREDISQYGIARFFTEYFNSVCQGTHILFREFSFVQATPHNRVSFLRAFWRCFRTVGKNGDFYIQGKPN

SEQ ID NO: 91638 - protein, 157 aa, Homo sapiens
MLAQARVPLGDEMTVCQCEALASPGPPAPHMEAEGPVDVRHVQWLMGKLRFRWRQLVSSQQEQCALLSKIHLYTRGCHSDQSLSHLSVTEAEMLRDPEGGQQLLRTLERENQRLEAVLAWRRSELVFWRWMDTVLGTCAPEVPAAASQPTFLPWVPE

SEQ ID NO: 91639 - protein, 807 aa, Homo sapiens
MGKRDRADRDKKKSRKRHYEDEEDDEEDAPGNDPQEAVPSAAGKQVDESGTKVDEYGAKDYRLQMPLKDDHTSRPLWVAPDGHIFLEAFSPVYKYAQDFLVAIAEPVCRPTHVHEYKLTAYSLYAAVSVGLQTSDITEYLRKLSKTGVPDGIMQFIKLCTVSYGKVKLVLKHNRYFVESCHPDVIQHLLQDPVIRECRLRNSEGEATELITETFTSKSAISKTAESSGGPSTSRVTDPQGKSDIPMDLFDFYEQMDKDEEEEEETQTVSFEVKQEMIEELQKRCIHLEYPLLAEYDFRNDSVNPDINIDLKPTAVLRPYQEKSLRKMFGNGRARSGVIVLPCGAGKSLVGVTAACTVRKRCLVLGNSAVSVEQWKAQFKMWSTIDDSQICRFTSDAKDKPIGCSVAISTYSMLGHTTKRSWEAERVMEWLKTQEWGLMILDEVHTIPGLKVMVKHLPSHSCLEPASVVLKPKAKMFRRVLTIVQAHCKLGLTATLVREDDKIVDLNFLIGPKLYEANWMELQNNGYIAKVQCAEVWCPMSPEFYREYVAIKTKKRILLYTMNPNKFRACQFLIKFHERRNDKIIVFADNVFALKEYAIRLNKPYIYGPTSQGERMQILQNFKHNPKINTIFISKVGDTSFDLPEANVLIQISSHGGSRRQEAQRLGRVLRAKKGMVAEEYNAFFYSLVSQDTQEMAYSTKRQRFLVDQGYSFKVITKLAGMEEEDLAFSTKEEQQQLLQKVLAATDLDAEEEVVAGEFGSRSSQASRRFGTMSSMSGADDTVYMEYHSSRSKAPSKHVHPLFKRFRK

SEQ ID NO: 91640 - protein, 77 aa, Homo sapiens
MSPPLCPLLLLAVGLRLAGTLNPSDPNTCSFWESFTTTTKESHSRPFSLLPSEPCERPWEGPHTCPQPTNSEETPGF

SEQ ID NO: 91641 - protein, 140 aa, Homo sapiens
MAMSYVKDDIFRIYIKEKKECRRDHRPPCAQEAPRNMVHPNVICDGCNGPVVGTRYKCSVCPDYDLCSVCEGKGLHRGHTKLAFPSPFGHLSEGFSHSRWLRKVKHGHFGWPGWEMGPPGNWSPRPPRAGEARPGPTAES

SEQ ID NO: 91642 - protein, 112 aa, Homo sapiens
EGVFKCPEDQLPLDYAKIYPDPELEVQVLGLPIRCIHSEEGCRWSGPLRHLQGHLNTCSFNVIPCPNRCPMKLSRRDLPAHLQHDCPKRRLKAMRVCAPRRVSTVRISVVPA

SEQ ID NO: 91643 - protein, 846 aa, Homo sapiens
MVSSAQMGFNLQALLEQLSQDELSKFKYLITTFSLAHELQKIPHKEVDKADGKQLVEILTTHCDSYWVEMASLQVFEKMHRMDLSERAKDEVREAALKSFNKRKPLSLGITRKERPPLDVDEMLERFKTEAQAFTETKGNVICLGKEVFKGKKPDKDNRCRYILKTKFREMWKSWPGDSKEVQVMAERYKMLIPFSNPRVLPGPFSYTVVLYGPAGLGKTTLAQKLMLDWAEDNLIHKFKYAFYLSCRELSRLGPCSFAELVFRDWPELQDDIPHILAQARKILFVIDGFDELGAAPGALIEDICGDWEKKKPVPVLLGSLLNRVMLPKAALLVTTRPRALRDLRILAEEPIYIRVEGFLEEDRRAYFLRHFGDEDQAMRAFELMRSNAALFQLGSAPAVCWIVCTTLKLQMEKGEDPVPTCLTRTGLFLRFLCSRFPQGAQLRGALRTLSLLAAQGLWAQTSVLHREDLERLGVQESDLRLFLDGDILRQDRVSKGCYSFIHLSFQQFLTALFYTLEKEEEEDRDGHAWDIGDVQKLLSGVERLRNPDLIQAGYYSFGLANEKRAKELEATFGCRMSPDIKQELLRCDISCKGGHSTVTDLQELLGCLYESQEEELVKEVMAQFKEISLHLNAVDVVPSSFCVKHCRNLQKMSLQVIKENLPENVTASESDAEVERSQDDQHMLPFWTDLCSIFGSNKDLMGLAINDSFLSASLVRILCEQIASDTCHLQRVVFKNISPADAHRNLCLALRGHKTVTYLTLQGNDQDDMFPALCEVLRHPECNLRYLGLVSCSATTQQWADLSLALEVNQSLTCVNLSDNELLDEGAKLLYTTLRHPKCFLQRLS

SEQ ID NO: 91644 - protein, 557 aa, Homo sapiens
  MOD_RES (1)..(1): Any amino acid
XWNLVAVIKGQDDSLLPQNYCKGIMHLKHLIKFRTSEAQELTTVKMSKFGGGIGVPAKEERLKEAAEIHLRLGQIQRYCELMVELGEWDKALSIAPGVSVKYWKKLMQRRADQLIQEDKDDVIPYCIAIGDVKKLVHFFMSRGQLKEALLVAQAACEGNMQPLHVSVPKGASYSDDIYKEDFNELLHKVSKELAEWYFQDGRAVLAACCHLAIDNIELAMAYLIRGNELELAVCVGTVLGESAAPATHYALELLARKCMMISVCFPCVGYRNLAADLLLMIPDNELHLIKLCAFYPGCTEEINDLHDKCKLPTVEECMQLAETARADDNIFETVKYYLLSQEPEKALPIGISFVKEYISSSDWTLDTIYPVLDLLSYIRTEKLLLHTCTEARNELLILCGYIGALLAIRRQYQSIVPALYEYTSQLLKRREVSVPLKIEYLSEELDAWRACTQSTNRSLEDSPYTPPSDSQRMIYATLLKRLKEESLKGIIGPDYVTGSNLPSHSDIHISCLTGLKIQGPVFFLEDGKSAISLNDALMWAKVNPFSPLGTGIRLNPF

SEQ ID NO: 91645 - protein, 149 aa, Homo sapiens
MWTLVSWVALTAGLVAGTRCPDGQFCPVACCLDPGGASYSCCRPLLDKWPTTLSRHLGGPCQVDAHCSAGHSCIFTVSGTSSCCPFPEAVACGDGHHCCPRGFHCSADGRSCFQRSGNNSVGAIQCPDSQFECPDFSTCCVMVDGSWGC

SEQ ID NO: 91646 - protein, 108 aa, Homo sapiens
DKVLKEKRKLFIRSMGEGTINGLLDELLQTRVLNKEEMEKVKRENATVMDKTRALIDSVIPKGAQACQICITYICEEDSYLAGTLGLSADLSNNGQVKPHTSCSHYLQ

SEQ ID NO: 91647 - protein, 1235 aa, Homo sapiens
MSLSFCGNNISSYNINDGVLQNSCFVDALNLVPHVFLLFITFPILFIGWGSQSSKVQIHHNTWLHFPGHNLRWILTFALLFVHVCEIAEGIVSDSRRESRHLHLFMPAVMGFVATTTSIVYYHNIETSNFPKLLLALFLYWVMAFITKTIKLVKYCQSGLDISNLRFCITGMMVILNGLLMAVEINVIRVRRYVFFMNPQKVKPPEDLQDLGVRFLQPFVNLLSKATYWWMNTLIISAHKKPIDLKAIGKLPIAMRAVTNYVCLKDAYEEQKKKVADHPNRTPSIWLAMYRAFGRPILLSSTFRYLADLLGFAGPLCISGIVQRVNETQNGTNNTTGISETLSSKEFLENAYVLAVLLFLALILQRTFLQASYYVTIETGINLRGALLAMIYNKILRLSTSNLSMGEMTLGQINNLVAIETNQLMWFLFLCPNLWAMPVQIIMGVILLYNLLGSSALVGAAVIVLLAPIQYFIATKLAEAQKSTLDYSTERLKKTNEILKGIKLLKLYAWEHIFCKSVEETRMKELSSLKTFALYTSLSIFMNAAIPIAAVLATFVTHAYASGNNLKPAEAFASLSLFHILVTPLFLLSTVVRFAVKAIISVQKLNEFLLSDEIGDDSWRTGESSLPFESCKKHTGVQPKTINRKQPGRYHLDSYEQSTRRLRPAETEDIAIKVTNGYFSWGSGLATLSNIDIRIPTGQLTMIVGQVGCGKSSLLLAILGEMQTLEGKVHWSNVNESEPSFEATRSRNRYSVAYAAQKPWLLNATVEENITFGSPFNKQRYKAVTDACSLQPDIDLLPFGDQTEIGERGINLSGGQRQRICVARALYQNTNIVFLDDPFSALDIHLSDHLMQEGILKFLQDDKRTLVLVTHKLQYLTHADWIIAMKDGSVLREGTLKDIQTKDVELYEHWKTLMNRQDQELEKDMEADQTTLERKTLRRAMYSREAKAQMEDEDEEEEEEEDEDDNMSTVMRLRTKMPWKTCWRYLTSGGFFLLILMIFSKLLKHSVIVAIDYWLATWTSEYSINNTGKADQTYYVAGFSILCGAGIFLCLVTSLTVEWMGLTAAKNLHHNLLNKIILGPIRFFDTTPLGLILNRFSADTNIIDQHIPPTLESLTRSTLLCLSAIGMISYATPVFLVALLPLGVAFYFIQKYFRVASKDLQELDDSTQLPLLCHFSETAEGLTTIRAFRHETRFKQRMLELTDTNNIAYLFLSAANRWLEVRTVRSFHDFEMETK

SEQ ID NO: 91648 - protein, 54 aa, Homo sapiens
MATNDLMTELQKDSIKLDDDSERKVVKMILKLLEDKNGEVQNLAVKCLGPLVSK

SEQ ID NO: 91649 - protein, 34 aa, Homo sapiens
MWNPHIRRANCNLSLSLLQEQLFDVKEDRNLAIK

SEQ ID NO: 91650 - protein, 978 aa, Homo sapiens
MGPPSSSGFYVSRAVALLLAGLVAALLLALAVLAALYGHCERVPPSELPGLRDLEAESSPPLRQKPTPTPKPSSARELAVTTTPSNWRPPGPWDQLRLPPWLVPLHYDLELWPQLRPDELPAGSLPFTGRVNITVRCTVATSRLLLHSLFQDCERAEVRGPLSPDDVWFALDTEYMVLELSEPLKPGSSYELQLSFSGLVKEDLREGLFLNVYTDQGERRALLASQLEPTFARYVFPCFDEPALKATFNITMIHHPSYVALSNMPKLGQSEKEDVNGSKWTVTTFSTTPHMPTYLVAFVICDYDHVNRTERGKEIRIWARKDAIANGSADFALNITGPIFSFLEDLFNISYSLPKTDIIALPSFDNHAMENWGLMIFDESGLLLEPKDQLTEKKTLISYVVSHEIGHQWFGNLVTMNWWNNIWLNEGFASYFEFEVINYFNPKLPRNEIFFSNILHNILREDHALVTRAVAMKVENFKTSEIQELFDIFTYSKGASMARMLSCFLNEHLFVSALKSYLKTFSYSNAEQDDLWRHFQMAIDDQSTVILPATIKNIMDSWTHQSGFPVITLNVSTGVMKQEPFYLENIKNRTLLTSNDTWIVPILWIKNGTTQPLVWLDQSSKVFPEMQVSDSDHDWVILNLNMTGYYRVNYDKLGWKKLNQQLEKDPKAIPVIHRLQLIDDAFSLSKNNYIEIETALELTKYLAEEDEIIVWHTVLVNLVTRDLVSEVNIYDIYSLLKRYLLKRLNLIWNIYSTIIRENVLALQDDYLALISLEKLFVTACWLGLEDCLQLSKELFAKWVDHPENEIPYPIKDVVLCYGIALGSDKEWDILLNTYTNTTNKEEKIQLAYAMSCSKDPWILNRYMEYAISTSPFTSNETNIIEVVASSEVGRYVAKDFLVNNWQAVSKRYGTQSLINLIYTIGRTVTTDLQIVELQQFFSNMLEEHQRIRVHANLQTIKNENLKNKKLSARIAAWLRRNT

SEQ ID NO: 91651 - protein, 58 aa, Homo sapiens
MAEGEITTFTALTEKFNLPPGNYKKPKLLYCSNGGHFLRILPDGTVDGTRDRSDQHIQ

SEQ ID NO: 91652 - protein, 180 aa, Homo sapiens
MKLYSLSVLYKGEAKVVLLKAAYDVSSFSFFQRSSVQEFMTFTSQLIVERSSKGTRASVKEQDYLCHVYVRNDSLAGVVIADNEYPSRVAFTLLEKVLDEFSKQVDRIDWPVGSPATIHYPALDGHLSRYQNPREADPMTKVQAELDETKIILVFLLQPLPLSGPLASCSPPVCPPESSH

SEQ ID NO: 91653 - protein, 54 aa, Homo sapiens
MSEQGDLNQAIAEEGGTEQETATPENGIVKSESLDEEEKLELQRRLEAQNQERR

SEQ ID NO: 91654 - protein, 180 aa, Homo sapiens
  MOD_RES (1)..(1): Any amino acid
XQGQLHRSVSWAGIASQREAVGCRAPLCLIGAVLVASSAHPHDSAVVMEEGSPGEVPVLVEPPGLEDVEAALGMDRRTDAYSRSSSVSSQEEKSLHAEELVGRGIPIERVVSSEGGRPSVDLSFQPSQPLSKSSSSPELQTLQDILGDPGDKADVGRLSPEVKARSQSGTLDGESAAWSA

SEQ ID NO: 91655 - protein, 489 aa, Homo sapiens
MKGRNWKTTKIFINNEWQNSESGRVFPVYNPATGEQVCEVQEADKADIDKAVQAARLAFSLGSVWRRMDASERGRLLDKLADLVERDRAVLATMESLNGGKPFLQAFYVDLQGVIKTFRYYAGWADKIHGMTIPVDGDYFTFTRHEPIGVCGQIIPWNFPLLMFAWKIAPALCCGNTVVIKPAEQTPLSALYMGALIKEAGFPPGVINILPGYGPTAGAAIASHIGIDKIAFTGSTEVGKLIQEAAGRSNLKRVTLELGGKSPNIIFADADLDYAVEQAHQGVFFNQGQCCTAGSRIFVEESIYEEFVRRSVERAKRRVVGSPFDPTTEQGPQIDKKQYNKILELIQSGVAEGAKLECGGKGLGRKGFFIEPTVFSNVTDDMRIAKEEIFGPVQEILRFKTMDEVIERANNSDFGLVAAVFTNDINKALTVSSAMQAGTVWINCYNALNAQSPFGGFKMSGNGREMGEFGLREYSEVKTVTVKIPQKNS

SEQ ID NO: 91656 - protein, 359 aa, Homo sapiens
MGPDCPPPPPPPPPNNNNNNNSKHTGHKSACVPNMTERRRDELSEEINNLREKVMKQSEENNNLQSQVQKLTEENTTLREQVEPTPEDEDDDIELRGAAAAAAPPPPIEEECPEDLPEKFDGNPDMLAPFMAQCQIFMEKSTRDFSVDRVRVCFVTSMMTGRAARWASAKLERSHYLMHNYPAFMMEMKHVFEDPQRREVAKRKIRRLRQGMGSVIDYSNAFQMIAQDLDWNEPALIDQYHEGLSDHIQEELSHLEVAKSLSALIGQCIHIERRLARAAAARKPRSPPRALVLPHIASHHQVDPTEPVGGARMRLTQEEKERRRKLNLCLYCGTGGHYADNCPAKASKSSPAGNSPAPL

SEQ ID NO: 91657 - protein, 139 aa, Homo sapiens
MWKRWLALALALVAVAWVRAEEELRSKSKICANVFCGAGRECAVTEKGEPTCLCIEQCKPHKRPVCGSNGKTYLNHCELHRDACLTGSKIQVDYDGHCKEKKSVSPSASPVVCYQSNRDELRRRIIQWLEAEIIPDGWF

SEQ ID NO: 91658 - protein, 309 aa, Homo sapiens
MAAGVDCGDGVGARQHVFLVSEYLKDASKKMKNGLMFVKLVNPCSGEGAIYLFNMCLQQLFEVKVFKEKHHSWFINQSVQSGGLLHFATPVDPLFLLLHYLIKADKEGKFQPLDQVVVDNVFPNCILLLKLPGLEKLLHHVTEEKEIDNKKYYKYSKEKTLKWLEKKVNQTVAALKTNNVNVSSRVQSTAFFSGDQASTDKEEDYIRYAHGLISDYIPKELSDDLSKYLKLPEPSASLPNPPSKKIKLSDEPVEAKEDYTKFNTKDLKTEKKNSKMTAAQKALAKVDKSGMKSIDTFFGVKNKKKIGKV

SEQ ID NO: 91659 - protein, 908 aa, Homo sapiens
MSLFKARDWWSTILGDKEEFDQGCLCLANVDNSGNGQDKIIVGSFMGYLRIFSPHPAKTGDGAQAEDLLLEVDLRDPVLQVEVGKFVSGTEMLHLAVLHSRKLCVYSVSGTLGNVEHGNQCQMKLMYEHNLQRTACNMTYGSFGGVKGRDLICIQSMDGMLMVFEQESYAFGRFLPGFLLPGPLAYSSRTDSFLTVSSCQQVESYKYQVLAFATDADKRQETEQQKLGSGKRLVVDWTLNIGEQALDICIVSFNQSASSVFVLGERNFFCLKDNGQIRFMKKLDWSPSCFLPYCSVSEGTINTLIGNHNNMLHIYQDVTLKWATQLPHIPVAVRVGCLHDLKGVIVTLSDDGHLQCSYLGTDPSLFQAPNVQSRELNYDELDVEMKELQKIIKDVNKSQGVWPMTEREDDLNVSVVVSPNFDSVSQATDVEVGTDLVPSVTVKVTLQNRVILQKAKLSVYVQPPLELTCDQFTFEFMTPDLTRTVSFSVYLKRSYTPSELEGNAVVSYSRPTDRNPDGIPRVIQCKFRLPLKLICLPGQPSKTASHKITIDTNKSPVSLLSLFPGFASQSDDDQVNVMGFHFLGGARITVLASKTSQRYRIQSEQFEDLWLITNELILRLQEYFEKQGVKDFACSFSGSIPLQEYFELIDHHFELRINGEKLEELLSERAVQFRAIQRRLLARFKDKTPAPLQHLDTLLDGTYKQVIALADAVEENQGNLFQSFTRLKSATHLVILLIALWQKLSADQVAILEAAFLPLQEDTQELGWEETVDAAISHLLKTCLSKSSKEQALNLNSQLNIPKDTSQLKKHITLLCDRLSKGGRLCLSTDAAAPQTMVMPGGCTTIPESDLEERSVEQDSTELFTNHRHLTAETPRPDPRTGQRIEAWTLRIPHSLSQHLQLMEGPKS

SEQ ID NO: 91660 - protein, 144 aa, Homo sapiens
MSWKKALRIPGGLRAATVTPLGPPDAEYWNSQKEVLERTRAELDTVCRHNYQLELRTTLQRRVEPTVTISPSRTEALNHHNLLVCSVTDFYPAQIKVRWFRNDQEETTGVVSTPLIRNGDWTFQILVMLEMTPQHGDVYTCHVE

SEQ ID NO: 91661 - protein, 148 aa, Homo sapiens
MVKLSIVLTPQFLSHDQGQLTKELQQHVKSVTCPCEYLRKVINTLADHHHRGTDFGGSPWLHVIIAFPTSYKVVITLWIVYLWVSLLKTIFWSRNGHDGSTDVQQRAWRSNRRRQEGLRSICMHTKKRVSSFRGNKIVLKDVITLRRH

SEQ ID NO: 91662 - protein, 76 aa, Homo sapiens
MSSAPEPPTFKKEPPKEKEFQSPGLRGVRTTTLFRAVNPELFIKPNVSYSLKHQHFEVSFMEVGTEMGVKMSVNKA

SEQ ID NO: 91663 - protein, 42 aa, Homo sapiens
MTSLYGRHAEKTTDMPKPSAPKVHVQRSVSRDTIAIHFSASG

SEQ ID NO: 91664 - protein, 142 aa, Homo sapiens
IQKGTSVSQKVCEWKEPEELKQLLDLELRSQGESQKQILERCRAVIRYSVKTGHPRFFNQLFSGLDPHALAGRIITESLNTSQYTYEIAPVFVLMEEEVLRKLRALVGWSSGDGIFCPVSLLHPEGSCVSGTWHRQCPSGQG

SEQ ID NO: 91665 - protein, 79 aa, Homo sapiens
MFEDPETTRQMQSTRDGRMLFDYLADKHGFRQEYLDTLYRYAKFQYECGNYSGAAEYLYFFRVLMESCYVAQADLKLLA

SEQ ID NO: 91666 - protein, 99 aa, Homo sapiens
MYHDASRWGLTLQTYVQLTMLDRHTRPQVSSVRLMERSIHSARYIFVENLYRSGKMPEVDYVVLSEWFDWILRNMDVSVDLIVYLRTNPETCYQRLKKR

SEQ ID NO: 91667 - protein, 279 aa, Homo sapiens
MSQEGDYGRWTISSSDESEEEKPKPDKPSTSSLLCARQGAANEPRYTCSEAQKAAHKRKISPVKFSNTDSVLPPKRQKSGSQEDLGWCLSSSDDELQPEMPQKQAEKVVIKKEKDISAPNDGTAQRTENHGAPACHRLKEEEDEYETSGEGQDIWDMLDKGNPFQFYLTRVSGVKPKYNSGALHIKDILSPLFGTLVSSAQFNYCFDVDWLVKQYPPEFRKKPILLVHGDKREAKAHLHAQAKPYENISLCQAKLDIAFGTHHTKMMLLLYEEGLRVVI

SEQ ID NO: 91668 - protein, 43 aa, Homo sapiens
MSGQTLTDRIAAAQYSVTGSAVARAVCKATTHEVMGPKKKHLD

SEQ ID NO: 91669 - protein, 68 aa, Homo sapiens
MEFLRAGSNVMQTFTFSASEDNMESKWEDVNAAACDLAREVAGKGDALVAGGICQTSIYKYQKDEARI

SEQ ID NO: 91670 - protein, 67 aa, Homo sapiens
MDADEGQDMSQVSGKESPPVSDTPDEGDEPMPIPEDLSTTSGGQQSSKSDRVVVTYGADDFRDFHAI

SEQ ID NO: 91671 - protein, 985 aa, Homo sapiens
TGPPTHTSTAPIAELTTSNPPPESSTPQTSRSTSSPLTESTTLLSTLPPAIEMTSTAPPSTPTAPTTTSGGHTLSPPPSTTTSPPGTPTRGTTTGSSSAPTPSTVQTTTTSAWTPTPTPLSTPSIIRTTGLRPYPSSVLICCVLNDTYYAPGEEVYNGTYGDTCYFVNCSLSCTLEFYNWSCPSTPSPTPTPSKSTPTPSKPSSTPSKPTPGTKPPECPDFDPPRQENETWWLCDCFMATCKYNNTVEIVKVECEPPPMPTCSNGLQPVRVEDPDGCCWHWECDCYCTGWGDPHYVTFDGLYYSYQGNCTYVLVEEISPSVDNFGVYIDNYHCDPNDKVSCPRTLIVRHETQEVLIKTVHMMPMQVQVQVNRQAVALPYKKYGLEVYQSGINYVVDIPELGVLVSYNGLSFSVRLPYHRFGNNTKGQCGTCTNTTSDDCILPSGEIVSNCEAAADQWLVNDPSKPHCPHSSSTTKRPAVTVPGGGKTTPHKDCTPSPLCQLIKDSLFAQCHALVPPQHYYDACVFDSCFMPGSSLECASLQAYAALCAQQNICLDWRNHTHGACLVECPSHREYQACGPAEEPTCKSSSSQQNNTVLVEGCFCPEGTMNYAPGFDVCVKTCGCVGPDNVPREFGEHFEFDCKNCVCLEGGSGIICQPKRCSQKPVTHCVEDGTYLATEVNPADTCCNITVCKCNTSLCKEKPSVCPLGFEVKSKMVPGRCCPFYWCESKGVCVHGNAEYQPGSPVYSSKCQDCVCTDKVDNNTLLNVIACTHVPCNTSCSPGFELMEAPGECCKKCEQTHCIIKRPDNQHVILKPGDFKSDPKNNCTFFSCVKIHNQLISSVSNITCPNFDASICIPGSITFMPNGCCKTCTPRNETRVPCSTVPVTTEVSYAGCTKTVLMNHCSGSCGTFVMYSAKAQALDHSCSCCKEEKTSQREVVLSCPNGGSLTHTYTHIESCQCQDTVCGLPTGTSRRARRSPRHLGSG

SEQ ID NO: 91672 - protein, 136 aa, Homo sapiens
MAGGRGAPGRGRDEPPESYPQRQDHELQALEAIYGADFQDLRPDACGPVKEPPEINLVLYPQGLTGEEVYVKVDLRVKCPPTYPDVVPEIELKNAKGLSNESVNLLKSRLEELAKKHCGEQQGWRGLTPTLKEVQV

SEQ ID NO: 91673 - protein, 38 aa, Homo sapiens
MVKVFLWKLYGVMCLQPPFSFFLVLGFSTVWSKPRYTS

SEQ ID NO: 91674 - protein, 253 aa, Homo sapiens
  MOD_RES (1)..(1): Any amino acid
XVGVEAARVIAKALEKKSELKRCHWSDMFTGRLRTEIPPALISLGEGLITAGAQLVELDLSDNAFGPDGVQGFEALLKSSACFTLQELKLNNCGMGIGGGKVIGTLEEVHMPQNGINHPGITALAQAFAVNPLLRVINLNDNTFTEKGAVAMAETLKTLRQVEVINFGDCLVRSKGAVAIADAIRGGLPKLKELNLSFCEIKRDAALAVAEAMADKAELEKLDLNGNTLGEEGCEQLQEVLEGFNMAKVLASL

SEQ ID NO: 91675 - protein, 103 aa, Homo sapiens
  MOD_RES (1)..(1): Any amino acid
XWVQVACPRLSIDWGTAFPKPLLTPYEAAVALRDISWQQPYPMDFYAGSSLGPWTVNHGQDRRPHAPGRPARGKVQEGSARPPSAVACEDCSCRDEKVAPLAP

SEQ ID NO: 91676 - protein, 184 aa, Homo sapiens
  MOD_RES (1)..(1): Any amino acid
XAAGVSLLEPPLQLYWTWLLQWIPLWMAPNSITLLGLAVNVVTTLVLISYCPTATEEAPYWTYLLCALGLFIYQSLDAIDGKQARRTNSCSPLGELFDHGCDSLSTVFMAVGASIAARLGTYPDWFFFCSFIGMFVFYCAHWQTYVSGMLRFGKVDVTEIQIALVIVFVLSAFGGATMWDYTFS

SEQ ID NO: 91677 - protein, 135 aa, Homo sapiens
MDFQHRPGGKTGSGGVASSSESNRDRRERLRQLALETIDINKDPYFMKNHLGSYECKLCLTLHNNEGSYLAHTQGKKHQTNLARRAAKEAKEAPAQPAPEKVKVEVKKFVKIGRPGYKVTKQRDSEMGQQSLLFQ

SEQ ID NO: 91678 - protein, 185 aa, Homo sapiens
MQGRRELGGEPLSDLQEEAASASLRVAPERLSDDSLEWRRTCPDLLLSDGKASISMPREGGSTCTARCPDPGEHSSTWGEFEGFRESSAKSGQFSQSLELLEGPTEPQPPRTTSAPKECSSHQPCQGGPWVTGTSAVPPSEPILSYENILKCAFQEITVQQAAEDVSTIDHFLEISSEEKPGVER

SEQ ID NO: 91679 - protein, 140 aa, Homo sapiens
MDGGDDGNLIIKKRFVSEAELDERRKRRQEEWEKVRKPEDPEECPEEVYDPRSLYERLQEQKDRKQQEYEEQFKFKNMVRGLDEDETNFLDEVSRQQELIEKQRREEELKELKEYRNNLKKVGISQENKKEVEKKLTVKP

SEQ ID NO: 91680 - protein, 110 aa, Homo sapiens
MGKKQNKKKVEEVLEEEEEEYVVEKVLDRRVVKGKVEYLLKWKGFSDEDNTWEPEENLDCPDLIAEFLQSQKTAHETDKSEGGKRKADSDSEDKGEESKPKKKKEESEKP

SEQ ID NO: 91681 - protein, 59 aa, Homo sapiens
MPNWGGGAKCGACEKTVYHAEEIQCNGRSFHKTCFHCTLAQDLFPLCHLWEESGVHKCH

SEQ ID NO: 91682 - protein, 20 aa, Homo sapiens
MAQETNHSQVPMLCSTGCGF

SEQ ID NO: 91683 - protein, 168 aa, Homo sapiens
MPCALGSDGVRVTMESALTARDRVGVQDFVLLENFTSEAAFIENLRRRFRENLIYTYIGPVLVSVNPYRDLQIYSRQHMERYRGVSFYEVPPHLFAVADTVYRALRTERRDQAVMISGESGAGKTEATKRLLQFYAETCPAPERGGAVRDRLLQSNPVLEAFGNAKTL

SEQ ID NO: 91684 - protein, 145 aa, Homo sapiens
MNVRDAKEKCPQLVLVNGEDLTRYREMSYKVTELLEEFSPVVERLGFDENFVDLTEMVEKRLQQLQSDELSAVTVSGHVYNNQSINLLDVLHIRLLVGSQIAAEMREAMYNQLGLTGCAGVASNKLLAKLVSGVFKPNQQTVLLP

SEQ ID NO: 91685 - protein, 62 aa, Homo sapiens
MIQWSQFKGYFIFKLEKVMDDFRTSAPEPRGPPNPNVEYIPFDEMKERILKIVTGFNGIPFT

SEQ ID NO: 91686 - protein, 476 aa, Homo sapiens
MQSNKTFNLEKQNHTPRKHHQHHHQQQHHQQQQQQPPPPPIPANGQQASSQSVYMLDEGLTIDLKNFRKPGEKTFTQRSRLFVGNLPPDITEEEMRKLFEKYGKAGEVFIHKDKGFGFIRLETRTLAEIAKVELDNMPLRGKQLRVRFACHSASLTVRNLPQYVSNELLEEAFSVFGQVERAVVIVDDRGRPSGKGIVEFSGKPAARKALDRCSEGSFLLTTFPRPVTVEPMDQLDDEEGLPEKLVIKNQQFHKEREQPPRFAQPGSFEYEYAMRWKALIEMEKQQQDQVDRNIKEAREKLEMEMEAARHEHQVMLMRQDLMRRQEELRRMEELHNQEVQKRKQLELRQEEERRRREEEMRRQQEEMMRRQQEGFKGTFPDAREQEIRMGQMAMGGAMGINNRGAMPPAPVPAGTPAPPGPATMMPDGTLGLTPPTTERFGQAATMEGIGAIGGTPPAFNRAAPGAEFAPNKRRRY

SEQ ID NO: 91687 - protein, 150 aa, Homo sapiens
  MOD_RES (1)..(1): Any amino acid
XHFHLQLSEIEFHEIIGSGSFGKVYKGRCRNKIVAIKRYRANTYCSKSDVDMFCREVSILCQLNHPCVIQFVGACLNDPSQFAIVTQYISGGSLFSLLHEQKRILDLQSKLIIAVDVAKGMEYLHNLTQPIIHRDLNRCCTGWLSCYHPD

SEQ ID NO: 91688 - protein, 381 aa, Homo sapiens
MAAQAAGVSRQRAATQGLGSNQNALKYLGQDFKTLRQQCLDSGVLFKDPEFPACPSALGYKDLGPGSPQTQGIIWKRPTELCPSPQFIVGGATRTDICQGGLGDCWLLAAIASLTLNEELLYRVVPRDQDFQENYAGIFHFQFWQYGEWVEVVIDDRLPTKNGQLLFLHSEQGNEFWSALLEKAYAKLNGCYEALAGGSTVEGFEDFTGGISEFYDLKKPPANLYQIIRKALCAGSLLGCSIDVSSAAEAEAITSQKLVKSHAYSVTGVEEVNFQGHPEKLIRLRNPWGEVEWSGAWSDDAPEWNHIDPRRKEELDKKVEDGEFWMSLSDFVRQFSRLEICNLSPDSLSSEEVHKWNLVLFNGHWTRGSTAGGCQNYPGSS

SEQ ID NO: 91689 - protein, 114 aa, Homo sapiens
MAKYNTGGNPTEDVSVNSRPFRVTGPNSSSGIQARKNLFNNQGNASPPAGPSNVPKFGSPKPPVAVKPSSEEKPDKEPKPPFLKPTGAGQRFGTPASLTTRDPEAKVGFLKPVG

SEQ ID NO: 91690 - protein, 73 aa, Homo sapiens
  MOD_RES (1)..(1): Any amino acid
XHQPLWSRIIEDPARSAGFHPSGSVLAVGTVTGRWLLLDTETHDLVAIHTDGNEQISVVSFSPGPFQFYHPPG

SEQ ID NO: 91691 - protein, 114 aa, Homo sapiens
MWQPALRRGRGLQAQGYGVRIQDAGVYLLYSQVLFQDVTFTMGQVVSREGQGRQETLFRCIRSMPSHPDRAYNSCYSAGVFHLHQGDILSVIIPRARAKLNLSPHGTFLGFVKL

SEQ ID NO: 91692 - protein, 452 aa, Homo sapiens
MADTRSVHETRFEAAVKVIQSLPKNGSFQPTNEMMLKFYSFYKQATEGPCKLSRPGFWDPIGRYKWDAWSSLGDMTKEEAMIAYVEEMKKIIETMPMTEKVEELLRVIGPFYEIVEDKKSGRSSDITSDLGNVLTSTPNAKTVNGKAESSDSGAESEEEEAQEEVKGAEQSDNDKKMMKKSADHKNLEVIVTNGYDKDGFVQDIQNDIHASSSLNGRSTEEVKPIDENLGQTGKSAVCIHQDINDDHVEDVTGIQHLTSDSDSEVYCDSMEQFGQEESLDSFTSNNGPFQYYLGGHSSQPMENSGFREDIQVPPGNGNIGNMQVVAVEGKGEVKHGGEDGRNNSGAPHREKRGGETDEFSNVRRGRGKIININIADCSSAHLTETILVALRDVSWCANVCHHMAFYCTVVGVFILSKKEKKTELRKMVFSSRRLLELDDLRMNWIVVFTRKS

SEQ ID NO: 91693 - protein, 269 aa, Homo sapiens
  MOD_RES (1)..(1): Any amino acid
XHAPWNVLCREAEFLKLKMPTKKMYHINETRGLLKKINSVLQKITDPIQPKVAEHRPQTMKRLSYPFSREKQHLFDLSDKDSFFDSKTRSTIVYEILKRTTCTKAKYSMGQGEGRKKDSALLSKRRKCGKYGITSLLANGVYAAAYPLHDGDYNGENVEFNDRKLLYEEWARYGVFYKYQPIDLVRKYFGEKIGLYFAWLGVYTQMLIPASIVGIIVFLYGCATMDENIPSMEMCDQRHNITMCPLCDKTCSYWKMSSACATARASHLF

SEQ ID NO: 91694 - protein, 108 aa, Homo sapiens
PKSRFCRGVPDAKIRIFDLGRKKAKVDEFPLCGHMVSDEYEQLSSEALEAARICANKYMVKSCGKDGFHIRVRLHPFHVIRINKMLSCAGADRPTLLCQCWETSRNTS

SEQ ID NO: 91695 - protein, 452 aa, Homo sapiens
  MOD_RES (1)..(1): Any amino acid
XNCGQKSLAYLTAATHGLDEEAESLKETFDPEKETIPDIDPNAKLLQPPAPIMPLDTNWPLLTVSKGFFEGTIASKGKGGALAADIDIDTVGTEGWGEDAELQLDEDGFVEATEGLGDDALGKGQEEGGGWDVEEDLELPPELDISPGAAGGAEDGFFVPPTKGTSPTQLLHDQVGVIQFGPYKQLFLQTYARGRTTYQALPCLPSMYGYPNRNWKDAGLKNGVPAVGLKLNDLIQRLQLCYQLTTVGKFEEAVEKFRSILLSVPLLVVDNKQEIAEAQQLITICREYIVGLSVETERKKLPKETLEQQKRICEMAAYFTHSNLQPVHMILVLRTALNLFFKLKNFKTAATFARRLLELGPKPEVAQQTRKILSACEKNPTDAYQLNYDMHNPFDICAASYRPIYRGKPVEKCPLSGACYSPEFKGQICRVTTVTEIGKDVIGLRISPLQFR

SEQ ID NO: 91696 - protein, 160 aa, Homo sapiens
MPNWGGGKKCGVCQKTVYFAEEIYCKSCYGKKYGPKGYGYGQGAGTLSTDKGESLGIKHEEAPGHRPTTNPNASKFAQKIGGSERCPRCSQAVYAAEKVIGAGKSWHKACFRCAKCGKGLESTTLADKDGEIYCKGCYAKNFGPKGFGFGQGAGALVHSE

SEQ ID NO: 91697 - protein, 323 aa, Homo sapiens
MEKVRLWRGSESRAAICTGIGIGFYGNSETSDGVSQLSSALLHANHTLSTIDHLVLETVERLGEAVRTELTTLEEVLEPRTELVAAARGARRQAEAAAQQLQGLAFWQGVPLSPLQVAENVSFVEEYRWLAYVLLLLLELLVCLFTLLGLAKQSKWLVIVMTVMSLLVLVLSWGSMGLEAATAVGLSDFCSNPDPYVLNLTQEETGLSSDILSYYLLCNRAVSNPFQQRLTLSQRALANIHSQLLGLEREAVPQFPSAQKPLLSLEETLNVTEGNFHQLVALLHCRSLHKVKPLPSQFLLPRGASVWTHRTTSSFSLDPCHCA

SEQ ID NO: 91698 - protein, 145 aa, Homo sapiens
MSEREERRFVEIPRESVRLMAESTGLELSDEVAALLAEDVCYRLREATQNSSQFMKHTKRRKLTVEDFNRALRWSSVEAVCGYGSQEALPMRPAREGELYFPEDREVNLVELALATNIPKGCAETAVRVHVSYLDGKGNLAPQGS

SEQ ID NO: 91699 - protein, 321 aa, Homo sapiens
MQIPKDGEQTKREKSNVTTIMEFVLLGFSDIPNLHWMLFSIFLLMYLMILMCNGIIILLIKIHPALQTPMYFFLSNFSLLEICYVTIIIPRMLMDIWTQKGNISLFACATQMCFFLMLGGTECLLLTVMAYDRYVAICKPLQYPLVMNHKVCIQLIIASWTITIPVVIGETCQIFLLPFCGTNTINHFFCDIPPILKLACGNIFVNEITVHVVAVVFITVPFLLIVVSYGKIISNILKLSSARGKAKAFSTCSSHLIVVILFFGAGTITYLQPKPHQFQRMGKLISLFYTILIPTLNPIIYTLRNKDIMVALRKLLAKLLT

SEQ ID NO: 91700 - protein, 75 aa, Homo sapiens
MEEEASSPGLGCSKPHLEKLTLGITRILESSPGVTEVTIIEKPPAERHMISSWEQMKKQRLKEFKEFGRHSGSCL

SEQ ID NO: 91701 - protein, 33 aa, Homo sapiens
MSGPVPSRARVYTDVNTHRPREYWDYESHVVEW

SEQ ID NO: 91702 - protein, 195 aa, Homo sapiens
  MOD_RES (1)..(1): Any amino acid
XLCARCAAPCSTPSPPCAARAAAAPPPWRRPRPVRRAVASVVGGWLLCLRDRYSFFHKLIPLLLSSLNDEVPEVRQLAASLWEDVGLQWQKENEEDLKDKLDFAPPTPPHYPPHERRPVLGCRELVFRNLSKILPALCHDITDWVVGTRVKSAQLLPVLLLHAEDHATQHLEVVLRTLFQACTDEEAAVVQSCTR

SEQ ID NO: 91703 - protein, 841 aa, Homo sapiens
MFTTGSPPFGTMGACYHCSPRYGQSISVPRIWKCRHRRSVTPEEGISSEGFPWDGFNEQTPKDLPNRDGGAWVLGYRAGPACPFLLHEEREKSNRSELYLDLHPDHSLTEQDDRTPGRLQAVWPPPKTKDTEEKVGLKYTEAEYQAAILHLKREHKEEIENLQAQFELRAFHIRGEHAMITARLEETIENLKHELEHRWRGGCEERKDVCISTDDDCPPKTFRNVCVQTDRETFLKPCESESKTTRSNQLVPKKLNISSLSQLSPPNDHKDIHAALQPMEGMASNQQKALPPPPASIPPPPPLPSGLGSLSPAPPMPPVSAGPPLPPPPPPPPPLPPPSSAGPPPPPPPPPLPNSPAPPNPGGPPPAPPPPGLAPPPPPGLFFGLGSSSSQCPRKPAIEPSCPMKPLYWTRIQISDRSQNATPTLWDSLEEPDIRDPSEFEYLFSKDTTQQKKKPLSETYEKKNKVKKIIKLLDGKRSQTVGILISSLHLEMKDIQQAIFNVDDSVVDLETLAALYENRAQEDELVKIRKYYETSKEEELKLLDKPEQFLHELAQIPNFAERAQCIIFRSVFSEGITSLHRKVEIITRASKDLLHVKSVKDILALILAFGNYMNGGNRTRGQADGYSLEILPKLKDVKSRDNGINLVDYVVKYYLRYYDQEAGTEKSVFPLPEPQDFFLASQVKFEDLIKDLRKLKRQLEASEKQMVVVCKESPKEYLQPFKDKLEEFFQKAKKEHKMEESHLENAQKSFETTVRYFGMKPKSGEKEITPSYVFMVWYEFCSDFKTIWKRESKNISKERLKMAQESVSKLTSEKKVETKKINPTASLKERLRQKEASVTTN

SEQ ID NO: 91704 - protein, 162 aa, Homo sapiens
MSLRLQSSSASYGGGFGGGSCQLGGGRGVSTCSTRFVSGGSAGGYGGGVSCGFGGGAGSGFGGGYGGGLGGGYGGGLGGGFGGGFAGGFVDFGACDGGLLTGNEKITMQNLNDRLASYLEKVRALEEANADLEMQIESLNEELAYMKKNHEEEMKEFSNQVV

SEQ ID NO: 91705 - protein, 285 aa, Homo sapiens
MVLLTSRMKPLTSRIISIIIILAGAIALIIGFGISGRHSITVTTVASAGNIGEDGILSCTFEPDIKLSDIVIQWLKEGVLGLVHEFKEGKDELSEQDEMFRGRTAVFADQVIVGNASLRLKNVQLTDAGTYKCYIITSKGKGNANLEYKTGAFSMPEVNVDYNASSETLRCEAPRWFPQPTVVWASQVDQGANFSEVSNTSFELNSENVTMKVVSVLYNVTINNTYSCMIENDIAKATGDIKVTESEIKRRSHLQLLNSKASLCVSSFFAISWALLPLSPYLMLK

SEQ ID NO: 91706 - protein, 112 aa, Homo sapiens
EPVRKKRGRPMTKNLDPDPEPPSPDSPTETFAAPAEVRHFTDGSFPAGFVLQLFSHTQLRGPDSKDSPKDREVAEGGLPRAESPSPGSPHFKSWGTLCANSIYLEWYIGWRQ

SEQ ID NO: 91707 - protein, 56 aa, Homo sapiens
  MOD_RES (1)..(1): Any amino acid
XCLAVLKGLYLLRSKPDRAQHAATKCTSPSTELSITSRGATLLVAKTKASPGKCCT

SEQ ID NO: 91708 - protein, 170 aa, Homo sapiens
MSTAGKMVAAGICRSDEHVVSGNLVTPLPVILGHEAAGIVESVGEGVTTVKPGDKVIPLFTPQCGKCRICKNPESNYCLKNDLGNPRGTLQDGTRRFTCSGKPIHHFVGVSTFSQYTVVDENAVAKIDAASPLEKVCLIGCGFSTGYGSAVKVAKVTPGSTCAVFGLGGV

SEQ ID NO: 91709 - protein, 106 aa, Homo sapiens
MGLLVFVRNLLLALCLFLVLGFLYYSAWKLHLLQWEEDSNSVVLSFDSAGQTLGSEYDRLGFLLNLDSKLPAELATKYANFSEGACKPGYASALMTAIFPRENKRR

SEQ ID NO: 91710 - protein, 122 aa, Homo sapiens
MQEHKLKVARLDNIFLTRMHWSNVGGLSGMILTLKETGLPKCVLSGPPQLEKYLEAIKIFSGPLKGIELAVRPHSAPEYEDETMTVYQIPIHSEQRRGKHQPWQSPERPLSRLSPERSSDSE

SEQ ID NO: 91711 - protein, 90 aa, Homo sapiens
MTSPEIASLSWGQMKVKGSNTTYKDCKVWPGGSRTWDWRETGTEVPSSTVEYLKKHGIDVRVLQTEQAVKEYNALVAQGVRVGGVFHSTC

SEQ ID NO: 91712 - protein, 325 aa, Homo sapiens
EEMPTACPGHSPRSQMALTGISPPLAQSPPEVPKQQLLSYELGQGHAQASPEIRFTPFANPTHKPLAKPKSSQETPAHSSGQPPRDAKLEAKTAKASPSGQNISYIHSSSESVTPRTEGRLQQKSGSSVQKGVNSQKGKCVRNGDRFQVLIGYNAELIAVFKTLPSKNYDPDTKTWNFSMNDYSALMKAAQSLPTVNLQPLEWAYGSSESPSTSSEGQAGLPSAPSLSFVKGRCMLISRAYFEADISYSQDLIALFKQMDSRRYVAKVRCLPQVQLDPLPTTLTLAFASQLKKTSLSLTPDVPEADLSEVDPKLVSNLMPFQRAG

SEQ ID NO: 91713 - protein, 256 aa, Homo sapiens
MIPPCENAPHIIYHESQRGTRDRDIAKRLQYPSRQDLNSKWKKSVLQPPQCKMKVNVWEIKPPDFSYKLYTSLRIPERSSKPIKEEKRRKKISFPETMLHLPSIRNHPKEVTAPKFITTFPHLDLQKAKLMFVKSGQYPRGVYVNPKPHDFRQYQPGLPNFETTYEKDPFGLKFKSQHLSTVHGYQLPKDDKQKTSTERFITHKHCECTWDSKLILTKAPWPVRSASYTRHRRQRDAYSAFMDRVEEKFTKICKSR

SEQ ID NO: 91714 - protein, 30 aa, Homo sapiens
MPKNKKRNTPHRGSSAGGGGSGAAAATAAT

SEQ ID NO: 91715 - protein, 281 aa, Homo sapiens
  MOD_RES (1)..(1): Any amino acid
XEALGQGVARLVLPKLEGHTCEKCRELLKPGEYGVFAARAGEQRCWHQPCFACQACGQALINLIYFYHDGQLYCGRHHAELLRPRCPACDQLIFSWRCTEAEGQRWHENHFCCQDCAGPLGGGRYALPGGSPCCPSCFENRYSDAGSSWAGALEGQAFLGKGEDAEQSGRELGLGCGGSPGLGPSPRSHAVPSLQERPHRTPQTQASGPAALTAHPWPERSKGRPNPPRAAVGVAAPDSLPGAGGGRPLVEAGDPGEDSRRRRRRARPRGWAGREAGPHPH

SEQ ID NO: 91716 - protein, 66 aa, Homo sapiens
MRRLLVWATSSQLGCGRHLCSAGQAAIEAFVCAYSPRGNWEVNGKTIVPYKKGAWCSLCTASVSGC

SEQ ID NO: 91717 - protein, 571 aa, Homo sapiens
MNPLFGPNLFLLQQEQQGLAGPLGDSLGGDHFAGGGDLPPAPLSPAGPAAYSPPGPGPAPPAAMALRNDLGSNINVLKTLNLRFRCFLAKVHELERRNRLLEKQLQQALEEGKQGRRGLGRRDQAVQTGFVSPIRPLGLQLGARPAAVCSPSARVLGSPARSPAGPLAPSAASLSSSSTSTSTTYSSSARFMPGTIWSFSHARRLGPGLEPTLVQGPGLSWVHPDGVGVQIDTITPEIRALYNVLAKVKRERDEYKRRWEEEYTVRIQLQDRVNELQEEAQEADACQEELALKVEQLKAELVVFKGLMSNNLSELDTKIQEKAMKVDMDICRRIDITAKLCDVAQQRNCEDMIQMFQKKLSLHLSPIKVPSMGGRKRERKAAVEEDTSLSESEGPRQPDGDEEESTALSINEEMQRMLNQLREYDFEDDCDSLTWEETEETLLLWEDFSGYAMAAAEAQGEQQEDSLEKVIKDTESLFKTREKEYQETIDQIELELATAKNDMNRHLHEYMEMCSMKRGLDVQMETCRRLITQSGDRKSPAFTAVPLSDPPPPPSEAEDSDRDVSSDSSMR

SEQ ID NO: 91718 - protein, 123 aa, Homo sapiens
MLPKSRRALTIQEIAALARSSLHGISQVVKDHVTKPTAMAQGRVAHLIEWKGWSKPSDSPAALESAFSSYSDLSEGEQEARFAAGVAEQFAIAEAKLRAWSSVDGEDSTDDSYDEDFAGGMDT

SEQ ID NO: 91719 - protein, 91 aa, Homo sapiens
MPSARGKSKSKAPITFGDLAIYFSQEEWEWLSPIQKDLYEDVMLENYRNLVSLGLSFRRPNVITLLEKGKAPWMVEPVRRRRAPGWTTMMA

SEQ ID NO: 91720 - protein, 146 aa, Homo sapiens
MRRTAFILGSGLLSFVAFWNSVTWHLQRFWGASGYFWQAQWERLLTTFEGKEWILFFIGAIQVPCLFFWSFNGLLLVVDTTGKPNFISRYRIQVGKNEPVDPVKLRQSIRTVLFNQCMISFPMVVFLYPFLKWWRDPCRRELPTFH

SEQ ID NO: 91721 - protein, 93 aa, Homo sapiens
VWGPLRLGIPGLCCRRPPLGLYARMRRLPGPEVSGRSVAAASGPGAWGTDHYCLELLRKRDYEGYLCSLLLPAESRSSVFALRAFNVELAQAG

SEQ ID NO: 91722 - protein, 30 aa, Homo sapiens
DEERDPLLHSFGHLKEVLNSITASKAFETG

SEQ ID NO: 91723 - protein, 110 aa, Homo sapiens
  MOD_RES (1)..(1): Any amino acid
XSEEEVEEPEERQQTPEVVPDDSGTFYDQAVVRMIFLKFSCQSNDMEEHLEEPVAEPEPDPEPEPEQEPVSEIQEEKPEPVLEETAPEDAQKSSSPAPADIAQTVQEDLR

SEQ ID NO: 91724 - protein, 41 aa, Homo sapiens
NVASQAPQSLPAISQPPQSSTMGYMGSQSVSMGYQPYNIIS

SEQ ID NO: 91725 - protein, 23 aa, Homo sapiens
  MOD_RES (1)..(1): Any amino acid
XASWKRLTEEFLNAPLPSIKEIK

SEQ ID NO: 91726 - protein, 199 aa, Homo sapiens
  MOD_RES (1)..(1): Any amino acid
XGRLLYAGRAQKRVERQNELKRRFEQMKQDRLRRYQGVNLYVKNLDDSIDDDKLRKEFSPYGVITSAKVMTEGGHSKGFGFVCFSSPEEATKAVTEMNGRIVGTKPLYVALAQRKEERKAILTNQYMQRLSTMRTLSNPLLGSFQQPSSYFLPAMPQLPTLQVPQWSGHQLCLGAPRPTSAVSGRPPPRCHARCLIPRE

SEQ ID NO: 91727 - protein, 93 aa, Homo sapiens
MSAHMSGLEIMDEDQLIKDVLDKFLNCHEQTYDEEFLNTFTHLSQDLLLLPGEVEQDVSTSIPSCIPFVAQPPTCEVKPKPSVKRMDKQTEES

SEQ ID NO: 91728 - protein, 290 aa, Homo sapiens
  MOD_RES (1)..(1): Any amino acid
XHMQTQSSPFARGNVFGEPPTELQIKQQELYKNFLRFQIEEKKQREEAERERLRIAEEKEERRLAEQRARIQQEYEEEQEKKREKEEEQRLKNEEHIRLAEERQKEAERKKKEEEEKYNLQLQHYCERDNLIGEETKHMRQPSPIVPALQNKIASKLQRPPSVDSIIRSFIHESSMSRAQSPPVPARKNQLRAEEEKKNVIMELSEMRKQLRSEERRLQERLLHMDSDDEIPIRKKERNPMDIFDMARHRLQAPVRRQSPKGLDAATFQNVHDFNELKDRVLKSGMDEIA

SEQ ID NO: 91729 - protein, 189 aa, Homo sapiens
MALNNFLFAQCACYFLAFLFSFVVVVPLSENGHDFRGRCLLFTEGMWLSANLTVQERERFTVQEWGPPAACRFSLLASLLSLLLAAAHAWRTLFFLCKGHEGSFFSAFLNLLVSAFVVFLVFIASTIVSVGFTMWCDTITEKGTVPHSCEELQDIDLELGVDNSAFYDQFAIAQGSLIDSHGVETPPGQ

SEQ ID NO: 91730 - protein, 144 aa, Homo sapiens
EKQEKPVNGEDKGDSGVDTQNSEGNADEEDPLGPNCYYDKTKSFFDNISCDDNRERRPTWAEERRLNAETFGIPLRPNRGRGGYRGRGGLGFRGGRGRGGGRGGTFTAPRGFRGGFRGGRGGREFADFEYRVSVTVNKFFGVDM

SEQ ID NO: 91731 - protein, 32 aa, Homo sapiens
  MOD_RES (1)..(1): Any amino acid
XATLQQLEPVTGQVCFCDSHFPRGDNEELHLP

SEQ ID NO: 91732 - protein, 141 aa, Homo sapiens
  MOD_RES (1)..(1): Any amino acid
XAVSQSSGLAAKFVIHCHIPQWGSDKCEEQLEETIKNCLSAAEDKKLKSVAFPPFPSGRPRDAVRCILSSVEPRQCCSVLEYMRLGRIPINRPLLDLLQGSLWLTPNDHSGCVPGSWCCGPAWWMALSVAPWNLGPLTNFH

SEQ ID NO: 91733 - protein, 2138 aa, Homo sapiens
PGTTEDTLITGSKTAAPVTSTGSTTATLEGQSTAASSRTSNQDISASSQNHQTKSTETTSKAQTDTLTQMMTSTLFSSPSVHNVMETAPPDEMTTSFPSSVTNTLMMTSKTITMTTSTDSTLGNTEETSTAGTESSTPVTSAVSITAGQEGQSRTTSWRTSIQDTSASSQNHWTRSTQTTRESQTSTLTHRTTSTPSFSPSVHNVTGTVSQKTSPSGETATSSLCSVTNTSMMTSEKITVTTSTGSTLGNPGETSSVPVTGSLMPVTSAALVTFDPEGQSPATFSRTSTQDTTAFSKNHQTQSVETTRVSQINTLNTLTPVTTSTVLSSPSGFNPSGTVSQETFPSGETTTSSPSSVSNTFLVTSKVFRMPTSRDSTLGNTEETSLSVSGTISAITSKVSTIWWSDTLSTALSPSSLPPKISTAFHTQQSEGAETTGRPHERSSFSPGVSQEIFTLHETTTWPSSFSSKGHTTWSQTELPSTSTGAATRLVTGNPSTGTAGTIPRVPSKVSAIGEPGEPTTYSSHSTTLPKTTGAGAQTQWTQETGTTGEALLSSPSYSVTQMIKTATSPSSSPMLDRHTSQQITTAPSTNHSTIHSTSTSPQESPAVSQRGHTQAPQTTQESQTTRSVSPMTDTKTVTTPGSSFTASGHSPSEIVPQDAPTISAATTFAPAPTGDGHTTQAPTTALQAAPSSHDATLGPSGGTSLSKTGALTLANSVVSTPGGPEGQWTSASASTSPDTAAAMTHTHQAESTEASGQTQTSEPASSGSRTTSAGTATPSSSGASGTTPSGSEGISTSGETTRFSSNPSRDSHTTQSTTELLSASASHGAIPVSTGMASSIVPGTFHPTLSEASTAGRPTGQSSPTSPSASPQETAAISRMAQTQRTRTSRGSDTISLASQATDTFSTVPPTPPSITSTGLTSPQTETHTLSPSGSGKTFTTALISNATPLPVTYASSASTGHATPLAVSSATSASTVSSDSPLKMETSGMTTPSLKTDGGRRTATSPPPTTSQTIISTIPSTAMHTRSTAAPIPILPERGVSLFPYGADAGDLEFVRRTVDFTSPLFKPATGFPLGSSLRDSLYFTDNGQIIFPESDYQIFSYPNPLPTGFTGRDPVALVAPFWDDADFSTGRGTTFYQEYETFYGEHSLLVQQAESWIRKITNNGGYKARWALKVTWVNAHAYPAQWTLGSNTYQAILSTDGSRSYALFLYQSGGMQWDVAQRSGKPVLMGFSSGDGYFENSPLMSQPVWERYRPDRFLNSNSGLQGLQFYRLHREERPNYRLECLQWLKSQPRWPSWGWNQVSCPCSWQQGRRDLRFQPVSIGRWGLGSRQLCSFTSWRGGVCCSYGPWGEFREGWHVQRPWQLAQELEPQSWCCRWNDKPYLCALYQQRRPHVGCATYRPPQPAWMFGDPHITTLDGVSYTFNGLGDFLLVGAQDGNSSFLLQGRTAQTGSAQATNFIAFAAQYRSSSLGPVTVQWLLEPHDAIRVLLDNQTVTFQPDHEDGGGQETFNATGVLLSRNGSEVSASFDGWATVSVIALSNILHSSASLPPEYQNRTEGLLGVWNNNPEDDFRMPNGSTIPPGSPEEMLFHFGMTWQINGTGLLGKRNDQLPSNFTPVFYSQLQKNSSWAEHLISNCDGDSSCIYDTLALRNASIGLHTREVSKNYEQANATLNQYPPSINGGRVIEAYKGQTTLIQYTSNAEDANFTLRDSCTDLELFENGTLLWTPKSLEPFTLEILARSAKIGLASALQPRTVVCHCNAESQCLYNQTSRVGNSSLEVAGCKCDGGTFGRYCEGSEDACEEPCFPSVHCVPGKGCEACPPNLTGDGRHCAALGSSFLCQNQSCPVNYCYNQGHCYISQTLGCQPMCTCPPAFTDSRCFLAGNNFSPTVNLELPLRVIQLLLSEEENASMAEVNASVAYRLGTLDMRAFLRNSQVERIDSAAPASGSPIQHWMVISEFQYRPRGPVIDFLNNQLLAAVVEAFLYHVPRRSEEPRNDVVFQPISGEDVRDVTALNVSTLKAYFRCDGYKGYDLVYSPQSGFTCVSPCSRGYCDHGGQCQHLPSGPRCSCVSFSIYTAWGEHCEHLSMKLDAFFGIFFGALGGLLLLGVGTFVVLRFWGCSGARFSYFLNSAEALP

SEQ ID NO: 91734 - protein, 9 aa, Homo sapiens
VLLWFGELL

SEQ ID NO: 91735 - protein, 7 aa, Homo sapiens
VDIVATI

SEQ ID NO: 91736 - protein, 509 aa, Homo sapiens
MLDQDELLASTRRDYEKIQEELTRLQIENEAAKDEVKEVLQALEELAVNYDQKSQEVEDKTRANEQLTDELAQKTTTLTTTQRELSQLQELSNHQKKRATEILNLLLKDLGEIGGIIGTNDVKTLADVNGVIEEEFTMARLYISKMKSEVKSLVNRSKQLESAQMDSNRKMNASERELAACQLLISQHEAKIKSLTDYMQNMEQKRRQLEESQDSLSEELAKLRAQEKMHEVSFQDKEKEHLTRLQDAEEMKKALEQQMESHREAHQKQLSRLRDEIEEKQKIIDEIRDLNQKLQLEQEKLSSDYNKLKIEDQEREMKLEKLLLLNDKREQAREDLKGLEETVSRELQTLHNLRKLFVQDLTTRVKKSVELDNDDGGGSAAQKQKISFLENNLEQLTKVHKQLVRDNADLRCELPKLEKRLRATAERVKALESALKEAKENAMRDRKRYQQEVDRIKEAVRAKNMARRAHSAQIAKPIRPGHYPASSPTAVHAIRGGGGSSSNSTHYQK

SEQ ID NO: 91737 - protein, 181 aa, Homo sapiens
  MOD_RES (1)..(1): Any amino acid
XKEMASGFSKGPTLGLLPDVPSLMETLSYSYCYVGIMTGPFFRYRTYLDWLEQPFPGAVPSLRPLLRRAWPAPLFGLLFLLSSHLFPLEAVREDAFYARPLPARLFYMIPVFFAFRMRFYVAWIAAECGCIAAGFGAYPVAAKARAGGGPTLQCPPPSRSGGAREASQDPAAPTSKGWLCP

SEQ ID NO: 91738 - protein, 93 aa, Homo sapiens
MDASDPTQLSASCVQLLGLLSAEQLAEASVLILFNKIDLPCYMSTEEMKSLIRLPDIIACAKQNITTAEISAREGTGLAGVLAWLQATHRAND

SEQ ID NO: 91739 - protein, 98 aa, Homo sapiens
MFQVPDSEGGRAGSRKWQLLTGSLASTSPSLLSGQGPWAPLQRAMKPPGGESSNLFGSPEEATPSSRPNRMASNIFGPTEEPQNIPKRTNPPGSCFLM

SEQ ID NO: 91740 - protein, 262 aa, Homo sapiens
  MOD_RES (1)..(1): Any amino acid
XESGREATGEGDLSSKLGTQGLEFWRGGRVRTEGAEKGGDRSILNARQGWLAALQDRSILAPLAWDLGLLLLFVGQHSLMAAERVKAWTSRYFGVLQRSLYVACTALALQLVMRYWEPIPKGPVLWEARAEPWATWVPLLCFVLHVISWLLIFSILLVFDYAELMGLKQVYYHVLGLGEPLALKSPRALRLFSHLRHPVCVELLTVLWVVPTLGTDRLLLAFLLTLYLGLAHGLDQQDLRYLRAQLQRKLHLLSRPQDGEAE

SEQ ID NO: 91741 - protein, 407 aa, Homo sapiens; identical to SEQ ID NO: 54093

SEQ ID NO: 91742 - protein, 273 aa, Homo sapiens
MAELQEVQITEEKPLLPGQTPEAAKTHSVETPYGSVTFTVYGTPKPKRPAILTYHDVGLNYKSCFQPLFQFEDMQEIIQNFVRVHVDAPGMEEGAPVFPLGYQYPSLDQLADMIPCVLQYLNFSTIIGVGVGAGAYILARYALNHPDTVEGLVLINIDPNAKGWMDWAAHKLTGLTSSIPEMILGHLFSQEELSGNSELIQKYRNIITHAPNLDNIELYWNSYNNRRDLNFERGGDITLRCPVMLVVGDQAPHEDAVVECNSKLDPTQTSFLK

SEQ ID NO: 91743 - protein, 278 aa, Homo sapiens
MADHSFSDGVPSDSVEAAKNASNTEKLTDQVMQNPRVLAALQERLDNVPHTPSSYIETHEDVVFLTPFFSLPKAVKRRINALKQLQVRCAHIEAKFYEEVHDLERKYAALYQPLFDKRREFITGDVEPTDAESEWHSENEEEEKLAGDMKSKVVVTEKAAATAEEPDPKGIPEFWFTIFRNVDMLSELVQEYDEPILKHLQDIKVKFSDPGQPMSFVLEFHFEPNDYFTNSVLTKTYKMKSEPDKADPFSFEGPEIVDCDGCTIDWKKGKNVTVKTIK

SEQ ID NO: 91744 - protein, 568 aa, Homo sapiens
MKWNGWGYNDSKFIFNKKGQIELTGKRYPLSGMGLPTFKEWIQNTLGVNVEHKTTSKASLNPSDTPPSVVNEDFLHDLKETNISYSQEADDRVFRAHGHCLHEIFLLREGMFERIPDIVLWPTCHDDVVKIVNLACKYNLCIIPIGGGTSVSYGLMCPADETRTIISLDTSQMNRILWVDENNLTAHVEAGITGQELERQLKESGYCTGHEPDSLEFSTVGGWVSTRASGMKKNIYGNIEDLVVHIKMVTPRGIIEKSCQGPRMSTGPDIHHFIMGSEGTLGVITEATIKIRPVPEYQKYGSVAFPNFEQGVACLREIAKQRCAPASIRLMDNKQFQFGHALKPQVSSIFTSFLDGLKKFYITKFKGFDPNQLSVATLLFEGDREKVLQHEKQVYDIAAKFGGLAAGEDNGQRGYLLTYVIAYIRDLALEYYVLGESFETSAPWDRVVDLCRNVKERITRECKEKGVQFAPFSTCRVTQTYDAGACIYFYFAFNYRGISDPLTVFEQTEAAAREEILANGGSLSHHHGVGKLRKQWLKESISDVGFGMLKSVKEYVDPNNIFGNRNLL

SEQ ID NO: 91745 - protein, 153 aa, Homo sapiens
MTEQMTLRGTLKGHNGWVTQIATTPQFPDMILSASRDKTIIMWKLTRDETNYGIPQRALRGHSHFVSDVVISSDGQFALSGSWDGTLRLWDLTTGTTTRRFVGHTKDVLSVAFSSDNRQIVSGSRDKTIKLWNTLGVCKYTVQSHSVAQAGVQ

SEQ ID NO: 91746 - protein, 52 aa, Homo sapiens
MSTNAQHTRVCGIQSIQSSRLQQLQAGREPGHQQPGHGILWYHDSKTPKATR

SEQ ID NO: 91747 - protein, 132 aa, Homo sapiens
MASRVDAVASKVQTAVTMKGVTKNMAQVTKALDKALSTMDLQKVSSVMDRFEQQVQNLDVHTSVMEDSMSSATTLTTPQEQVDSLIMQIAEENGLEVLDQLSQLPEGASAVGESSVRSQEDQLSRRLAALRN

SEQ ID NO: 91748 - protein, 664 aa, Homo sapiens
MGDILAHESELLGLVKEYLDFAEFEDTLKTFSKECKIKGKPLCKTVGGSFRDSKSLTIQKDLVAAFDNGDQKVFFDLWEEHISSSIRDGDSFAQKLEFYLHIHFAIYLLKYSVGRPDKEELDEKISYFKTYLETKGAALSQTTEFLPFYALPFVPNPMVHPSFKELFQDSWTPELKLKLIKFLALISKASNTPKLLTIYENGQSNKEILQQLHQQLVEAERRSVTYLKRYNKIQADYHNLIGVTAELVDSLEATVSGKMITPEYLQSVCVRLFSNQMRQSLAHSVDFTRPGTASTMLRASLAPVKLKDVPLLPSLDYEKLKKDLILGSDRLKAFLLQALRWRLTTSHPGEQRETVLQAYISNDLLDCYSHNQRSVLQLLHSTSDVVRQYMARLINAFASLAEGRLYLAQNTKVLQMLEGRLKEEDKDIITRENVLGALQKFSLRRPLQTAMIQDGLIFWLVDVLKDPDCLSDYTLEYSVALLMNLCLRSTGKNMCAKVAGLVLKVLSDLLGHENHEIQPYVNGALYSILSVPSIREEARAMGMEDILRCFIKEGNAEMIRQIEFIIKQLNSEELPDGVLESDDDEDEDDEEDHDIMEADLDKDELIQPQLGELSGEKLLTTEYLGIMTNTGKTRRKGLANVQWSGDEPLQRPVTPGGHRNGYPV

SEQ ID NO: 91749 - protein, 61 aa, Homo sapiens
MLVGQGAGPLGPAVVTAAVVLLLSGVGPAHGSEDIVVGCGGFVKSDVEINYSLIEQVLNMH

SEQ ID NO: 91750 - protein, 170 aa, Homo sapiens
MTNEEPLPKKVRLSETDFKVMARDELILRWKQYEAYVQALEGKYTDLNSNDVTGLRESEEKLKQQQQESARRENILVMRLATKEQEMQECTTQIQYLKQVQQPSVAQLRSTMVDPAINLFFLKMKGELEQTKDKLEQAQNELSAWKFTPDRGLMASDYSEEVATSEKFPF

SEQ ID NO: 91751 - protein, 227 aa, Homo sapiens
  MOD_RES (1)..(1): Any amino acid
XTSRYRSLRPNRQLGSMVEIAKQLQAVKRKIRDESLCPQHHEALSLFCYEDQEAVCLICAISHTHRAHTVVPLDDATQEYKEKLQKCLEPLEQKLQEITRCKSSEEKKPGELKRLVESRRQQILREFEELHRRLDEEQQVLLSRLEEEEQDILQRLRENAAHLGDKRRDLAHLAAEVEGKCLQSGFEMLKDVKSTLEKCEKVKTMEVTSTTPCTSLHSEINDNVRGR

SEQ ID NO: 91752 - protein, 94 aa, Homo sapiens
MSDNDDIEVESDADKRAHHNALERKRRDHIKDSFHSLRDSVPSLQGEKASRAQILDKATEYIQYMRRKNHTHQQDIDDLKRQNALLEQQGESES

SEQ ID NO: 91753 - protein, 1061 aa, Homo sapiens
MPHLPLASFRPPFWGLRHSRGLPRFHSVSTQSEPHGSPISRRNREAKQKRLREKQATLEAEIAGESKSPAESIKAWRPKELVLYEIPTKPGEKKDVSGPLPPAYSPRYVEAAWYPWWVREGFFKPEYQARLPQATGETFSMCIPPPNVTGSLHIGHALTVAIQDALVRWHRMRGDQVLWVPGSDHAGIATQAVVEKQLWKERGVRRHELSREAFLREVWQWKEAKGGEICEQLRALGASLDWDRECFTMDVGSSVAVTEAFVRLYKAGLLYRNHQLVNWSCALRSAISDIEVENRPLPGHTQLRLPGCPTPVSFGLLFSVAFPVDGEPDAEVVVGTTRPETLPGDVAVAVHPDDSRYTHLHGRQLRHPLMGQPLPLITDYAVQPHVGTVKVTPAHSPADAEMGARHGLSPLNVIAEDGTMTSLCGDWLQGLHRFVAREKIMSVLSEWGLFRGLQNHPMVLPICSRSGDVIEYLLKNQWFVRCQEMGARAAKAVESGALELSPSFHQKNWQHWFSHIGDWCVSRQLWWGHQIPAYLVVEDHAQGEEDCWVVGRSEAEAREVAAELTGRPGAELTLERDPDVLDTWFSSALFPFSALGWPQETPDLARFYPLSLLETGSDLLLFWVGRMVMLGTQLTGQLPFSKVLLHPMVRDRQGRKMSKSLGNVLDPRDIISGVEMQVLQEKLRSGNLDPAELAIVAAAQKKDFPHGIPECGTDALRFTLCSHGVQAGDLHLSVSEVQSCRHFCNKIWNALRFILNALGEKFVPQPAEELSPSSPMDAWILSRLALAAQECERGFLTRELSLVTHALHHFWLHNLCDVYLEAVKPVLWHSPRPLGPPQVLFSCADLGLRLLAPLMPFLAEELWQRLPPRPGCPPAPSISVAPYPSACSLEHWRQPELERRFSRVQEVVQVLRALRATYQLTKARPRVLLQSSEPGDQGLFEAFLEPLGTLGYCGAVGLLPPGAAAPSGWAQAPLSDTAQVYMELQGLVDPQIQLPLLAARRYKLQKQLDSLTARTPSEGEAGTQRQQKLSSLQLELSKLDKAASHLRQLMDEPPAPGSPEL

SEQ ID NO: 91754 - protein, 63 aa, Homo sapiens
MADQRMDISSTISDFMSPGPTDLLSSSLGTSGVDCNRKRKGSSTDYHSQVEFGEHNGWRSDAH

SEQ ID NO: 91755 - protein, 686 aa, Homo sapiens
MIHFHPLILPHERSFLGYASFKVGELLKSKEQLLVLSLRTSDGGKVVGTIEVSVVKMGEIEDGEADHITTDVQGQKCALVCECTAPESVSGKDNLPFLNSVLKNPVCKLYRFPTSDNKWMRIREQMSESILSFHIPKELISLHIKEDLCRNQEIKELGELSPHWDNLRKNVLTHCDQMVNMYQDILTELSKETGSSFKSSSSKGEKTLEFVPINLHLQRMQVHSPHLKDALYDVITVGAPAAHFQGFKNGGLRKLLHRFETERRNTGYQFIYYSPENTAKAKEVLSNINQLQPLIATHADLLLNSASQHSPDSLKNSLKMLSEKTELFVHAFKDQLVRSALLALYTARPGGILKKPPSPKSSTEESSPQDQPPVMRGQDSIPHHSDYDEEEWDRVWANVGKSLNCIIAMVDKLIERDGGSEGSGGNNDGEKEPSLTDAIPSHPREDWYEQLYPLILTLKDCMGEVVNRAKQSLTFVLLQELAYSLPQCLMLTLRRDIVFSQALAGLVCGFIIKLQTSLYDPGFLQQLHTVGLIVQYEGLLSTYSDEIGMLEDMAVGISDLKKVAFKIIEAKSNDVLPVITGRREHYVVEVKLPARMFESLPLQIKEGQLLHVYPVLFNVGINEQQTLAERFGDVSLQESINQENFELLQEYYKIFMEKMPPDYISHFQEQNDLKALLENLLQNIQS

SEQ ID NO: 91756 - protein, 889 aa, Homo sapiens
  MOD_RES (1)..(1): Any amino acid
XQYLEEKRSALEEQRLMYERELEQLRQQLSPDRQPQSSGPDRLAYSSQTAQQKVTQWAEERDELFRQSLAKLREQLVKANTLVREANFLAEEMSKLTDYQVTLQIPAANLSANRKRGAIVSEPAIQVRRKGKSTQVWTIEKLENKLIDMRDLYQEWKEKVPEAKRLYGKRGDPFYEAQENHNLIGVANVFLECLFCDVKLQYAVPIISQQGEVAGRLHVEVMRVTGAVPERVVEDDSSENSSESGSLEVVDSSGEIIHRVKKLTCRVKIKEATGLPLNLSNFVFCQYTFWDQCESTVAAPVVDPEVPSPQSKDAQYTVTFSHCKDYVVNVTEEFLEFISDGALAIEVWGHRCAGNGSSIWEVDSLHAKTRTLHDRWNEVTRRIEMWISILELNELGEYAAVELHQAKDVNTGGIFQLRQGHSRRVQVTVKPVQHSGTLPLMVEAILSVSIGCVTARSTKLQRGLDSYQRDDEDGDDMDSYQEEDLNCVRERWSDALIKRREYLDEQIKKVSNKTEKTEDDVEREAQLVEQWVGLTEERNAVLVPAPGSGIPGAPADWIPPPGMETHIPVLFLDLNADDLSANEQLVGPHASGVNSILPKEHGSQFFYLPIIKHSDDEVSATASWDSSVHDSVHLNRVTPQNERIYLIVKTTVQLSHPAAMELVLRKRIAANIYNKQSFTQSLKRRISLKNIFYSCGVTYEIVSNIPKATEEIEDRETLALLAARSENEGTSDGETYIEKYTRGVLQVENILSLERLRQAVTVKEALSTKARHIRRSLSTPNVHNVSSSRPDLSGFDEDDKGWPENQLDMSDYSSSYQDVACYGTLPRDSPRRNKEGCTSETPHALTVSPFKAFSPQPPKFFKPLMPVKEEHKKRIALEARPLLSQEVNA

SEQ ID NO: 91757 - protein, 154 aa, Homo sapiens
MKASGTLREYKVVGRCLPTPKCHTPPLYRMRIFAPNHVVAKSRFWYFVSQLKKMKKSSGEIVYCGQVFEKSPLRVKNFGIWLRYDSRSGTHNMYREYRDLTTAGAVTQCYRDMGARHRARAHSIQIMKVEEIAASKCRRPHKPRFTTKRPNTFF

SEQ ID NO: 91758 - protein, 165 aa, Homo sapiens
MAAVASRVTAPLYYLLTDQQKTTVIENGEIRFNGKGKKIRKPRTIYSSLQLQALNHRFQQTQYLALPERAELAASLGLTQTQVKIWFQNKRSKFKKLLKQGSNPHESDPLQGSAALSPRSPALPPVWDVSASAKGVSMPPNSYMPGYSHWYSSPHQDTMQRPQMM

SEQ ID NO: 91759 - protein, 225 aa, Homo sapiens
MSGAGVAAGTRPPSSPTPGSRRRRQRPSVGVQSLRPQSPQLRQSDPQKRNLDLEKSLQFLQQQHSEMLAKLHEEIEHLKRENKDLRYKLIMNQTSQKKGENWALQFLMGCSCHPGEPLQTVLAHLAALAPVCQPSGDRFWGTWTDAATSSRGWMMLRSQAQHVLLSGSPGPEVIAVGRWAQGAPQTSLLQVELKWEGTPGTAPALLDLCLRLLLWPGPGSPALWL

SEQ ID NO: 91760 - protein, 127 aa, Homo sapiens
MEEPQSDPSVEPPLSQETFSDLWKLLPENNVLSPLPSQAMDDLMLSPDDIEQWFTEDPGPDEAPRMPEAAPPVAPAPAAPTPAAPAPAPSWPLSSSVPSQKTYQGSYGFRLGFLHSGTAKSVTCTYS

SEQ ID NO: 91761 - protein, 438 aa, Homo sapiens
MAAAVRQDLAQLMNSSGSHKDLAGKYRQILEKAIQLSGAEQLEALKAFVEAMVNENVSLVISRQLLTDFCTHLPNLPDSTAKEIYHFTLEKIQPRVISFEEQVASIRQHLASIYEKEEDWRNAAQVLVGIPLETGQKQYNVDYKLETYLKIARLYLEDDDPVQAEAYINRASLLQNESTNEQLQIHYKVCYARVLDYRRKFIEAAQRYNELSYKTIVHESERLEALKHALHCTILASAGQQRSRMLATLFKDERCQQLAAYGILEKMYLDRIIRGNQLQEFAAMLMPHQKATTADETGSLHFAQAGLELLGSSSSSHLGFPKCWDDRGSSILDRAVIEHNLLSASKLYNNITFEELGALLEIPAAKAEKIASQMITEGRMNGFIDQIDGIVHFETREALPTWDKQIQSLCFQVNNLLEKISQTAPEWTAQAMEAQMAQ

SEQ ID NO: 91762 - protein, 121 aa, Homo sapiens
MAFPCRRSLTAKTLACLLVGVSFLALQQWFLQAPRSPREERSPQEETPEGPTDAPAADEPPSELVPGPPCVANASANATADFEQLPARIQDFLRYRHCRHFPLLWDAPAKCAGGRGVFLLL

SEQ ID NO: 91763 - protein, 94 aa, Homo sapiens
MTAVHAGNINFKWDPKSLEIRTLAVERLLEPLVTQVTTLVNTNSKGPSNKKRGRSKKAHVLAASVEQATENFLEKGDKIAKESQFLKEELVAAV

SEQ ID NO: 91764 - protein, 325 aa, Homo sapiens
MDDLKYGVYPLKEASGCPGAERNLLVYSYFEKSRSVAQAGMQWRSLSWLTVISASQVQVILVPQPPELLGLQETLTFRDVAIEFSLEEWECLNPAQQNLYMNVMLENYKNLVFLGVAVSKQDPVTCLEQEKEPWNMKRHEMVDEPPAMCSYFTKDLWPEQDIKDSFQQVILRRYGKCEHENLQLRKGSASVDEYKVHKEGYNELNQCLTTTQSKIFPCDKYVKVFHKFLNANRHKTRHTGKKPFKCKKCGKSFCMLLHLSQHKRIHIRENSYQCEECGKAFKWFSTLTRHKRIHTGEKPFKCEECGKAFKQSSTLTTHKIIHTGE

SEQ ID NO: 91765 - protein, 101 aa, Homo sapiens
PHSQALQDVEKAIMVFEHTGNIPVTVMEASIFRRPYYVSHFLPALLTPRVLPKVPDSRVAFIESLKRWSLALLPRLECNCTILAHCKLCLLGWSNCPASAS

SEQ ID NO: 91766 - protein, 124 aa, Homo sapiens
  MOD_RES (1)..(1): Any amino acid
XVLFGVVNTVACLDHLDPPQPPKCITALYVFAETHFDRGINDWLCKVRALFGAMNFWAIIMYNLVSLNSLKFTELVARRLLLTGFPQTTLSILFVTYCGVQLVKERERTLALEEEQKQDKEKPE

SEQ ID NO: 91767 - protein, 414 aa, Homo sapiens
MEEPEEPADSGQSLVPVYIYSPEYVSMCDSLAKIPKRASMVHSLIEAYALHKQMRIVKPKVASMEEMATFHTDAYLQHLQKVSQEGDDDHPDSIEYGLGYDCPATEGIFDYAAAIGGATITAAQCLIDGMCKVAINWSGGWHHAKKDEASGFCYLNDAVLGILRLRRKFERILYVDLDLHHGDGVEDAFSFTSKVMTVSLHKFSPGFFPGTGDVSDVGLGKGRYYSVNVPIQDGIQDEKYYQICESVLKEVYQAFNPKAVVLQLGADTIAGDPMCSFNMTPVGIGKCLKYILQWQLATLILGGGGYNLANTARCWTYLTGVILGKTLSSEIPDHEFFTAYGPDYVLEITPSCRPDRNEPHRIQQILNYIKEKWPVGFGAQCFYLGKCGKAKTTEGQSEQLFIPRAQSGNLKHVV

SEQ ID NO: 91768 - protein, 43 aa, Homo sapiens
MLEGAELYFNVDHGYLEGLVRGCKASLLTQQDYINLVQCETLE

SEQ ID NO: 91769 - protein, 187 aa, Homo sapiens
PRKTKRPGRRPRPRPRPKTTPSPEVPKSKPALEPATIQPEPLVPTTASKPSERPKTTHRPDAPQIQPVSEPVPFETEAPSMTIVPTTDIEPVTVRTEATVTTLAPKTSQRTRTRRPRPKHKTTPRPETLQTKLDFGPITPGTSSAPTTTTKRTRRPHPKPKTTPHPEVPQTKLAPKQTPRAPPKPKT

SEQ ID NO: 91770 - protein, 63 aa, Homo sapiens
MHSDAAAVSFTGSMVLASAWLLESLTIVEEGEWRAGTPHGESRSEREKGFSAELSSLNTGKYS

SEQ ID NO: 91771 - protein, 1235 aa, Homo sapiens
MANGGGGGGGSSGGGGGGGGSSLRMSSNIHANHLSLDASSSSSSSSSSSSSSSSSSSSSSVHEPKMDALIIPVTMEVPCDSRGQRMWWAFLASSMVTFFGGLFIILLWRTLKYLWTVCCHCGGKTKEAQKINNGSSQADGTLKPVDEKEEAVAAEVGWMTSVKDWAGVMISAQTLTGRVLVVLVFALSIGALVIYFIDSSNPIESCQNFYKDFTLQIDMAFNVFFLLYFGLRFIAANDKLWFWLEVNSVVDFFTVPPVFVSVYLNRSWLGLRFLRALRLIQFSEILQFLNILKTSNSIKLVNLLSIFISTWLTAAGFIHLVENSGDPWENFQNNQALTYWECVYLLMVTMSTVGYGDVYAKTTLGRLFMVFFILGGLAMFASYVPEIIELIGNRKKYGGSYSAVSGRKHIVVCGHITLESVSNFLKDFLHKDRDDVNVEIVFLHNISPNLELEALFKRHFTQVEFYQGSVLNPHDLARVKIESADACLILANKYCADPDAEDASNIMRVISIKNYHPKIRIITQMLQYHNKAHLLNIPSWNWKEGDDAICLAELKLGFIAQSCLAQGLSTMLANLFSMRSFIKIEEDTWQKYYLEGVSNEMYTEYLSSAFVGLSFPTVCELCFVKLKLLMIAIEYKSANRESRILINPGNHLKIQEGTLGFFIASDAKEVKRAFFYCKACHDDITDPKRIKKCGCKRPKMSIYKRMRRACCFDCGRSERDCSCMSGRVRGNVDTLERAFPLSSVSVNDCSTSFRAFEDEQPSTLSPKKKQRNGGMRNSPNTSPKLMRHDPLLIPGNDQIDNMDSNVKKYDSTGMFHWCAPKEIEKVILTRSEAAMTVLSGHVVVCIFGDVSSALIGLRNLVMPLRASNFHYHELKHIVFVGSIEYLKREWETLHNFPKVSILPGTPLSRADLRAVNINLCDMCVILSANQNNIDDTSLQDKECILASLNIKSMQFDDSIGVLQANSQGFTPPGMDRSSPDNSPVHGMLRQPSITTGVNIPIITELVNDTNVQFLDQDDDDDPDTELYLTQPFACGTAFAVSVLDSLMSATYFNDNILTLIRTLVTGGATPELEALIAEENALRGGYSTPQTLANRDRCRVAQLALLDGPFADLGDGGCYGDLFCKALKTYNMLCFGIYRLRDAHLSTPSQCTKRYVITNPPYEFELVPTDLIFCLMQFDHNAGQSRASLSHSSHSSQSSSKKSSSVHSIPSTANRQNRPKSRESRDKQKKEMVYR

SEQ ID NO: 91772 - protein, 256 aa, Homo sapiens
ALSRWASLPGPSMREAAFMYSTAVAIFLVILVAALQGSAPRESPLPYHIPLDPEGSLELSWNVSYTQEAIHFQLLVRRLKAGVLFGMSDRGELENADLVVLWTDGDTAYFADGTVHLVYGILEEPFRSLEAINGSGLQMGLQRVQLLKPNIPEPELPSDACTMEVQAPNIQIPSQETTYWCYIKELPKGFSRHHIIKYEPIVTKGNEALVHHMEVFQCAPEMDSVPHFSGPCDSKMKPDRLNYCRHVLAAWALGAK

SEQ ID NO: 91773 - protein, 208 aa, Homo sapiens
  MOD_RES (1)..(1): Any amino acid
XHASANHSLVKASVVTVRESPATPVSFQAASTSGVPDHAKLQAPGSECLGPKGGGGDCAKRKSWARFKDACGKSEDWNKVSKAESMETLPERTKASGEATLKKTDSCDSGITKSDLRLDNVGEARSPQDRSPILAEVKHSFYPIPEQTLQATVLELLCPPPGGDFMILSALTANIREKNIFSPKVFMLRSFNFYPLQLKRINVNLSAA

SEQ ID NO: 91774 - protein, 114 aa, Homo sapiens
AKIRKMKVTTKVNRHDKINGKRKTAKEHLRKLSMKEREHGEKERQVSEAEENGKLDMKEIHTYMEMFQRAQALRRRAEDYYRCKITPSARKPLCNRCTYNLVLPGSEKKYYSHA

SEQ ID NO: 91775 - protein, 41 aa, Homo sapiens
  MOD_RES (1)..(1): Any amino acid
XYQKARTFATELNVRRVNLPPLPLCGPLCAEVGAASAPIRQ

SEQ ID NO: 91776 - protein, 346 aa, Homo sapiens
  MOD_RES (1)..(1): Any amino acid
XRSPTGVCSGESHPSWRTCRGTWQGSTGCILELENIPPASTPQQWESGPQLTQHWYQAGLGCGQASVTGHKLSGALPSLDIVVWSELPPGAGLGSSAAYSVCLAAALLTVCEEIPNPLKDGDCVNRWTKEDLELINKWAFQGERMIHGNPSGVDNAVSTWGGALRYHQGKISSLKRSPALQILLTNTKVPRNTRALVAGVRNRLLKFPEIVAPLLTSIDAISLECERVLGEMGEAPAPEQYLVLEELIDMNQHHLNALGVGHASLDQLCQVTRARGLHSKLTGAGGGGCGITLLKPGLEQPEVEATKQALTSCGFDCLETSIGAPGVSIHSATSLDSRVQQALDGL

SEQ ID NO: 91777 - protein, 273 aa, Homo sapiens
  MOD_RES (1)..(1): Any amino acid
XYNHWFDGMALLHQFRMAKGTVTYRSKFLQSDTYKANSAKNRIVISEFGTLALPDPCKNVFERFMSRFELPAMTDNTNVNYVRYKGDYYLCTETNFMNKVDIETLEKTEKLLPGRYYSKPFVTFHQINAFEDQGCVIIDLCCQDNGRTLEVYQLQNLRKAGEGLDQVHNSAAKSFPRRFVLPLNVSLNAPEGDNLSPLSYTSASAVKQADGTIWCSHENLHQEDLEKEGGIEFPQIYYDRFSGKKYHFFYGCGFRHLVGDSLIKVDVVNKTLK

SEQ ID NO: 91778 - protein, 93 aa, Homo sapiens
MSGAGVAAGTRPPSSPTPGSRRRRQRPSVGVQSLRPQSPQLRQSDPQKRNLDLEKSLQFLQQQHSEMLAKLHEEIEHLKRENKGSDTPLLKTL

SEQ ID NO: 91779 - protein, 333 aa, Homo sapiens
MTMAGGRRGLVAPQNTFLENIVRRSNDTNFVLGNAQIVDWPIVYSNDGFCKLSGYHRAEVMQKSSTCSFMYGELTDKDTIEKVRQTFENYEMNSFEILMYKKNRTPVWFFVKIAPIRNEQDKVVLFLCTFSDITAFKQPIEDDSCKGWGKFARLTRALTSSRGVLQQLAPSVQKGENVHKHSRLAEVLQLGSDILPQYKQEAPKTPPHIILHYCVFKTTWDWIILILTFYTAILVPYNVSFKTRQNNVAWLVVDSIVDVIFLVDIVLNFHTTFVGPAGEVISDPKLIRMNYLKTWFVIDLLSCLPYDVINAFENVDEMLMRNFGKKTLTSIYA

SEQ ID NO: 91780 - protein, 392 aa, Homo sapiens
MIRAAPPPLFLLLLLLLLLVSWASRGEAAPDQDEIQRLPGLAKQPSFRQYSGYLKGSGSKHLHYWFVESQKDPENSPVVLWLNGGPGCSSLDGLLTEHGPFLVQPDGVTLEYNPYSWNLIANVLYLESPAGVGFSYSDDKFYATNDTEVAQSNFEALQDFFRLFPEYKNNKLFLTGESYAGIYIPTLAVLVMQDPSMNLQGLAVGNGLSSYEQNDNSLVYFAYYHGLLGNRLWSSLQTHCCSQNKCNFYDNKDLECVTNLQEVARIVGNSGLNIYNLYAPCAGGVPSHFRTLLWSRIWATSSLACHSSGCGIRHCCAQGIKCAWTPPAPTQQLLPPTSTTRTCGRPSTSRSSCHNGTCASEVPWPPVTWGGGLLGLVGIGRFLRDLLCRVSQ

SEQ ID NO: 91781 - protein, 129 aa, Homo sapiens
MASLEVSRSPRRSRRELEVRSPRQNKYSVLLPTYNERENLPLIVWLLVKSFSESGINYEIIIIDDGSPDGTRDVAEQLEKIYGSDRILLRPREKKLGLGTAYIHGMKHATGNYIIIMDADLSHHEAKGG

SEQ ID NO: 91782 - protein, 3873 aa, Homo sapiens
MAFVATQGATVVDQTTLMKKYLQFVAALTDVNTPDETKLKMMQEVSENFENVTSSPQYSTFLEHIIPRFLTFLQDGEVQFLQEKPAQQLRKLVLEIIHRIPTNEHLRPHTKNVLSVMFRFLETENEENVLICLRIIIELHKQFRPPITQEIHHFLDFVKQIYKELPKVVNRYFENPQVIPENTVPPPEMVGMITTIAVKVNPEREDSETRTHSIIPRGSLSLKVLAELPIIVVLMYQLYKLNIHNVVAEFVPLIMNTIAIQVSAQARQHKLYNKELYADFIAAQIKTLSFLAYIIRIYQELVTKYSQQMVKGMLQLLSNCPAETAHLRKELLIAAKHILTTELRNQFIPCMDKLFDESILIGSGYTARETLRPLAYSTLADLVHHVRQHLPLSDLSLAVQLFAKNIDDESLPSSIQTMSCKLLLNLVDCIRSKSEQESGNGRDVLMRMLEVFVLKFHTIARYQLSAIFKKCKPQSELGAVEAALPGVPTAPAAPGPAPSPAPVPAPPPPPPPPPPATPVTPAPVPPFEKQGEKDKEDKQTFQVTDCRSLVKTLVCGVKTITWGITSCKAPGEAQFIPNKQLQPKETQIYIKLVKYAMQALDIYQVQIAGNGQTYIRVANCQTVRMKEEKEVLEHFAGVFTMMNPLTFKEIFQTTVPYMVERISKNYALQIVANSFLANPTTSALFATILVEYLLDRLPEMGSNVELSNLYLKLFKLVFGSVSLFAAENEQMLKPHLHKIVNSSMELAQTAKEPYNYFLLLRALFRSIGGGSHDLLYQEFLPLLPNLLQGLNMLQSGLHKQHMKDLFVELCLTVPVRLSSLLPYLPMLMDPLVSALNGSQTLVSQGLRTLELCVDNLQPDFLYDHIQPVRAELMQALWRTLRNPADSISHVAYRVLGKFGGSNRKMLKESQKLHYVVTEVQGPSITVEFSDCKASLQLPMEKAIETALDCLKSANTEPYYRRQAWEVIKCFLVAMMSLEDNKHALYQLLAHPNFTEKTIPNVIISHRYKAQDTPARKTFEQALTGAFMSAVIKDLRPSALPFVASLIRHYTMVAVAQQCGPFLLPCYQVGSQPSTAMFHSEENGSKGMDPLVLIDAIAICMAYEEKELCKIGEVALAVIFDVASIILGSKERACQLPLFSYIVERLCACCYEQAWYAKLGGVVSIKFLMERLPLTWVLQNQQTFLKALLFVMMDLTGEVSNGAVAMAKTTLEQLLMRCATPLKDEERAEEIVAAQEKSFHHVTHDLVREVTSPNSTVRKQAMHSLQVLAQVTGKSVTVIMEPHKEVLQDMVPPKKHLLRHQPANAQIGLMEGNTFCTTLQPRLFTMDLNVVEHKVFYTELLNLCEAEDSALTKLPCYKSLPSLVPLRIAALNALAACNYLPQSREKIIAALFKALNSTNSELQEAGEACMRKFLEGATIEVDQIHTHMRPLLMMLGDYRSLTLNVVNRLTSVTRLFPNSFNDKFCDQMMQHLRKWMEVVVITHKGGQRSDGNESISECGRCPLSPFCQFEPAMEGVEEMKICSAIINLFHLIPAAPQTLVKPLLEVVMKTERAMLIEAGSPFREPLIKFLTRHPSQTVELFMMEATLNDPQWSRMFMSFLKHKDARPLRDVLAANPNRFITLLLPGGAQTAVRPGSPSTSTMRLDLQFQAIKIISIIVKNDDSWLASQHSLVSQLRRVWVSENFQERHRKENMAATNWKEPKLLAYCLLNYCKRNYGDIELLFQLLRAFTGRFLCNMTFLKEYMEEEIPKNYSIAQKRALFFRFVDFNDPNFGDELKAKVLQHILNPAFLYSFEKGEGEQLLGPPNPEGDNPESITSVFITKVLDPEKQADMLDSLRIYLLQYATLLVEHAPHHIHDNNKNRNSKLRRLMTFAWPCLLSKACVDPACKYSGHLLLAHIIAKFAIHKKIVLQVFHSLLKAHAMEARAIVRQAMAILTPAVPARMEDGHQMLTHWTRKIIVEEGHTVPQLVHILHLIVQHFKVYYPVRHHLVQHMVSAMQRLGFTPSVTIEQRRLAVDLSEVVIKWELQRIKDQQPDSDMDPNSSGEGVNSVSSSIKRGLSVDSAQEVKRFRTATGAISAVFGRSQSLPGADSLLAKPIDKQHTDTVVNFLIRVACQVNDNTNTAGSPGEVLSRRCVNLLKTALRPDMWPKSELKLQWFDKLLMTVEQPNQVNYGNICTGLEVLSFLLTVLQSPAILSSFKPLQRGIAACMTCGNTKVLRAVHSLLSRLMSIFPTEPSTSSVASKYEELECLYAAVGKVIYEGLTNYEKATNANPSQLFGTLMILKSACSNNPSYIDRLISVFMRSLQKMVREHLNPQAASGSTEATSGTSELVMLSLELVKTRLAVMSMEMRKNFIQAILTSLIEKSPDAKILRAVVKIVEEWVKNNSPMAANQTPTLREKSILLVKMMTYIEKRFPEDLELNAQFLDLVNYVYRDETLSGSELTAKLEPAFLSGLRCAQPLIRAKFFEVFDNSMKRRVYERLLYVTCSQNWEAMGNHFWIKQCIELLLAVCEKSTPIGTSCQGAMLPSITNVINLADSHDRAAFAMVTHVKQEPRERENSESKEEDVEIDIELAPGDQTSTPKTKELSEKDIGNQLHMLTNRHDKFLDTLREVKTGALLSAFVQLCHISTTLAEKTWVQLFPRLWKILSDRQQHALAGEISPFLCSGSHQVQRDCQPSALNCFVEAMSQCVPPIPIRPCVLKYLGKTHNLWFRSTLMLEHQAFEKGLSLQIKPKQTTEFYEQESITPPQQEILDSLAELYSLLQEEDMWAGLWQKRCKYSETATAIAYEQHGFFEQAQESYEKAMDKAKKEHERSNASPAIFPEYQLWEDHWIRCSKELNQWEALTEYGQSKGHINPYLVLECAWRVSNWTAMKEALVQVEVSCPKEMAWKVNMYRGYLAICHPEEQQLSFIERLVEMASSLAIREWRRLPHVVSHVHTPLLQAAQQIIELQEAAQINAGLQPTNLGRNNSLHDMKTVVKTWRNRLPIVSDDLSHWSSIFMWRQHHYQAIVTAYENSSQHDPSSNNAMLGVHASASAIIQYGKIARKQGLVNVALDILSRIHTIPTVPIVDCFQKIRQQVKCYLQLAGVMGKNECMQGLEVIESTNLKYFTKEMTAEFYALKGMFLAQINKSEEANKAFSAAVQMHDVLVKAWAMWGDYLENIFVKERQLHLGVSAITCYLHACRHQNESKSRKYLAKVLWLLSFDDDKNTLADAVDKYCIGVPPIQWLAWIPQLLTCLVGSEGKLLLNLISQVGRVYPQAVYFPIRTLYLTLKIEQRERYKSDSGQQQPSSVGNQSHSASDPGPIRATAPMWRCSRIMHMQRELHPTLLSSLEGIVDQMVWFRENWHEEVLRQLQQGLAKCYSVAFEKSGAVSDAKITPHTLNFVKKLVSTFGVGLENVSNVSTMFSSAASESLARRAQATAQDPVFQKLKGQFTTDFDFSVPGSMKLHNLISKLKKWIKILEAKTKQLPKFFLIEEKCRFLSNFSAQTAEVEIPGEFLMPKPTHYYIKIARFMPRVEIVQKHNTAARRLYIRGHNGKIYPYLVMNDACLTESRREERVLQLLRLLNPCLEKRKETTKRHLFFTVPRVVAVSPQMRLVEDNPSSLSLVEIYKQRCAKKGIEHDNPISRYYDRLATVQARGTQASHQVLRDILKEVQSNMVPRSMLKEWALHTFPNATDYWTFRKMFTIQLALIGFAEFVLHLNRLNPEMLQIAQDTGKLNVAYFRFDINDATGDLDANRPVPFRLTPNISEFLTTIGVSGPLTASMIAVARCFAQPNFKVDGILKTVLRDEIIAWHKKTQEDTSSPLSAAGQPENMDSQQLVSLVQKAVTAIMTRLHNLAQFEGGESKVNTLVAAANSLDNLCRMDPAWHPWL

SEQ ID NO: 91783 - protein, 114 aa, Homo sapiens
MEGKTKPSTVEVLESIDKEIQALEEFREKNQRLQKLWVGRLILYSSVLYLFTCLIVYLWYLPDEFTARLAMTLPFFAFPLIIWSIRTVIIFFFSKRTERNNEALDDLKSQRKKI

SEQ ID NO: 91784 - protein, 181 aa, Homo sapiens
MEGDDCEFRYGDGTNEAQDNDFPTVERSRLQEMLSLLGLETYQVQKLSLQDSLQISFDSMKNWAPQVPKDLPWNFLRKLQALNADARNTTMVLDVLPDARPVEKESQMEEEIIYWDPADDLAADIYSFSELPTPDTPVNPLDLLCALLLSSDSFLQQEIALKMALCQFALPLVLPDSENHY

SEQ ID NO: 91785 - protein, 145 aa, Homo sapiens
MATPSAAFEALMNGVTSWDVPEDAVPCELLLIGEASFPVMVNDMGQVLIAASSYGRGRLVVVSHEDYLVEAQLTPFLLNAVGWLCSSPGAPIGVHPSLAPLAKILEGSGVDAKVEPEVKDSLGVYCIDAYNETMTEKLVKFMKCG

SEQ ID NO: 91786 - protein, 155 aa, Homo sapiens
MLQQELLSRTSLETQKLDLMTEVSELKLKLVGMEKEQREQEEKQRKAEELLQELRHLKIKVEELENERNQYEWKLKATKAEVAQLQEQVALKDAEIERLHSQLSRTAALHSESHTERDQEIQRLKMGMETLLLANEDKDRRIEELTGLLNQYRKV

SEQ ID NO: 91787 - protein, 263 aa, Homo sapiens
MNKLFSFWKRKNETRSQGYNLREKDLKKLHRAASVGDLKKLKEYLQIKKYDVNMQDKKYRTPLHLACANGHTDVVLFLIEQQCKINVRDSENKSPLIKAVQCQNEDCATILLNFGADPDLRDIRYNTVLHYAVCGQSLSLVEKLLEYEADLEAKNKDGYTPLLVAVINNNPKMVKFLLEKGADVNASDNYQRTALILAVSGEPPCLVKLLLQQGVELCYEGIVDSQLRNMFISMVLLHTHNSLRAMERRNMLNRHLILGTTCD

SEQ ID NO: 91788 - protein, 338 aa, Homo sapiens
MAAMAVALRGLGGRFRWRTQAVAGGVRGAARGAAAGQRDYDLLVVGGGSGGLACAKEAAQLGRKVAVVDYVEPSPQGTRWGLGGTCVNVGCIPKKLMHQAALLGGLIQDAPNYGWEVAQPVPHDWRKMAEAVQNHVKSLNWGHRVQLQDRKVKYFNIKASFVDEHTVCGVAKGGKEILLSADHIIIATGGRPRYPTHIEGALEYGITSDDIFWLKESPGKTLVVGASYVALECAGFLTGIGLDTTIMMRSIPLRGFDQQMSSMVIEHMASHGTRFLRGCAPSRVRRLPDGQLQVTWEDSTTGKEDTGTFDTVLWAIAPCISACLPTTVGHAGKNQRRD

SEQ ID NO: 91789 - protein, 638 aa, Homo sapiens
MVLYTTPFPNSCLSALHCVSWALIFPCYWLVDRLAASFIPTTYEKRQRADDPCCLQLLCTALFTPIYLALLVASLPFAFLGFLFWSPLQSARRPYIYSRLEDKGLAGGAALLSEWKGTGPGKSFCFATANVCLLPDSLARVNNLFNTQARAKEIGQRIRNGAARPQIKIYIDSPTNTSISAASFSSLVSPQGGDGVARAVPGSIKRTASVEYKGDGGRHPGDEAANGPASGDPVDSSSPEDACIVRIGGEEGGRPPEADDPVPGGQARNGAGGGPRGQTPNHNQQDGDSGSLGSPSASRESLVKGRAGPDTSASGEPGANSKLLYKASVVKKAAARRRRHPDEAFDHEVSAFFPANLDFLCLQEVFDKRAATKLKEQLHGYFEYILYDVGVYGCQGCCSFKCLNSGLLFASRYPIMDVAYHCYPNKCNDDALASKGALFLKVQVGSTPQDQRIVGYIACTHLHAPQEDSAIRCGQLDLLQDWLADFRKSTSSSSAANPEELVAFDVVCGDFNFDNCSSDDKLEQQHSLFTHYRDPCRLGPGEEKPWAIGTLLDTNGLYDEDVCTPDNLQNKSSGQKGRKELLKGNGRRIDYMLHAEEGLCPDWKAEVEEFSFITQLSGLTDHLPVAMRLMVSSGEEEA

SEQ ID NO: 91790 - protein, 233 aa, Homo sapiens
  MOD_RES (1)..(1): Any amino acid
XNHLGNNDGENLSAPLQFRSKEVSKSNVVDDMVQSNPVLYTPGEEPDHCVVIKYVPYVGDSKRALDEYTSELMLGGTNTLVLHNTCEDSLLAAPIMLDLALLTELCQRVSFCTDMDPEPQTFHPVLSLLSFLFKAPLVPPGSPVVNALFRQRSCIENILRCTPASRACVGLPPQNHMLLEHKMERPGPSLKRVGPVAATYPMLNKKGPVPAATNGCTGDANGHLQEEPPMPTT

SEQ ID NO: 91791 - protein, 210 aa, Homo sapiens
VKREKYNPERAQKLKESAVRLLRSHQDLNALLLEVEGPLCKKLSLSKVIDCDSSEAYANHSSSFIGSALQDQASRLGVPVGILSAGMVASSVGQICTAPAETSHPVLLTVEQRKKLSSLLEFAQYLLAHSMFSRLSFCQELWKIQSSLLLEAVWHLHVQGIVSLQELLESHPDMHAVGSWLFRNLCCLCEQMEASCQHADVARAMLSGHG

SEQ ID NO: 91792 - protein, 102 aa, Homo sapiens
MDTRTATAELGWTANPASGWEEVSGYDENLNTIRTYQVCNVFEPNQNNWLLTTFINRRGAHRIYTEMRFTVRDCSSLPNVPGSCKETFNLYYYETDSVIATK

SEQ ID NO: 91793 - protein, 112 aa, Homo sapiens
MALWVFLFRTKKKHPAVIYMANLALADLLSVIWFPLKIAYHIHGNNWIYGEALCNVLIGFFYGNMYCSILFMTCLSVQRYWVIVNPMGHSRKKANIAIGISLAIWLLILLVT

SEQ ID NO: 91794 - protein, 61 aa, Homo sapiens
MTSQPSLPADDFDIYHVLTTTPGEDHMRKDLLRDAAGSGLPLRHPSSPSCLKSSSIIASYV

SEQ ID NO: 91795 - protein, 77 aa, Homo sapiens
MGLPRRAGDAAELRKSLKPLLEKRRRARINQSLSQLKGLILPLLGRECLATATARATAPVWRAWPACCPPAVSWSPP

SEQ ID NO: 91796 - protein, 212 aa, Homo sapiens
MSLYDDLGVETSDSKTEGWSKNFKLLQSQLQVKKAALTQAKSQRTKQSTVLAPVIDLKRGGSSDDRQIVDTPPHVAAGLKDPVPSGFSAGEVLIPLADEYDPMFPNDYEKVVKRQREERQRQRELERQKEIEEREKRRKDRHEASGFARRPDPDSDEDEDYERERRKRSMGGAAIAPPTSLVEKDKELPRDFPYEEDSRPRSQSSKAAIPPP

SEQ ID NO: 91797 - protein, 524 aa, Homo sapiens
MEIIRSNFKSNLHKVYQAIEEADFFAIDGEFSGISDGPSVSALTNGFDTPEERYQKLKKHSMDFLLFQFGLCTFKYDYTDSKYITKSFNFYVFPKPFNRSSPDVKFVCQSSSIDFLASQGFDFNKVFRNGIPYLNQEEERQLREQYDEKRSQANGAGALSYVSPNTSKCPVTIPEDQKKFIDQVVEKIEDLLQSEENKNLDLEPCTGFQRKLIYQTLSWKYPKGIHVETLETEKKERYIVISKVDEEERKRREQQKHAKEQEELNDAVGFSRVIHAIANSGKLVIGHNMLLDVMHTVHQFYCPLPADLSEFKEMTTCVFPRLLDTKLMASTQPFKDIINNTSLAELEKRLKETPFNPPKVESAEGFPSYDTASEQLHEAGYDAYITGLCFISMANYLGSFLSPPKIHVSARSKLIEPFFNKLFLMRVMDIPYLNLEGPDLQPKRDHVLHVTFPKEWKTSDLYQLFSAFGNIQISWIDDTSAFVSLSQPEQVKIVSCRFTLRMRSTCNKLILTLTCSSLYFPPIC

SEQ ID NO: 91798 - protein, 93 aa, Homo sapiens
  MOD_RES (1)..(1): Any amino acid
XLPTLLIAECVLVYMTPEQSANLLKWAANSFERAMFINYEQVNMGDRFGQIMIENLRRRQCDLAGVETCKSLESQVREQGLGYPFGPLVNQDI

SEQ ID NO: 91799 - protein, 84 aa, Homo sapiens
MASPDRSKRKILKAKKTMPLSCRKQVEMLNKSRNVEALKTAIGSNVPSGNQSFSPSVITRTTEITKCSPSENGASSLDSNKNSI

SEQ ID NO: 91800 - protein, 113 aa, Homo sapiens
MCPKNASYYGNRAATLMMLGRFREALGDAQQSVRLDDSFVRGHLREGKCHLSLGNAMAACRSFQRALELDHKNAQAQQEFKNANAVMEYEKIAETDFEKRDFRKVVFCMDRAL

SEQ ID NO: 91801 - protein, 131 aa, Homo sapiens
MAACRALKAVLVDLSGTLHIEDAAVPGAQEALKRLRGASVIIRFVTNTTKESKQDLLERLRKLEFDISEDEIFTSLTAARSLLERKQVRPMLLVDDRALPDFKGIQTSDPNAVVMGLAPEHFHYQILNQAF

SEQ ID NO: 91802 - protein, 484 aa, Homo sapiens
MAEAVFHAPKRKRRVYETYESPLPIPFGQDHGPLKEFKIFRAEMINNNVIVRNAEDIEQLYGKGYFGKGILSRSRPSFTISDPKLVAKWKDMKTNMPIITSKRGHSKYMCCRIEHCSVFLTRYQHSVEWAAELMRRQGQDESTVRRILKDYTKPLEHPPVKRNEEAQVHDKLNSGMVSNMEGTAGGERPSVVNGDSGKSGGVGDPREPLGCLQEGSGCHPTTESFEKSVREDASPLPHVCCCKQDALILQRGLHHEDGSQHIGLLHPGDRGPDHEYVLVEEAECAMSEREAAPNEELVQRNRLICRRNPYRIFEYLQLSLEEAFFLVYALGCLSIYYEKEPLTIVKLWKAFTVVQPTFRTTYMAYHYFRSKGWVPKVGLKYGTDLLLYRKGPPFYHASYSVIIELVDDHFEGSLRRPLSWKSLAALSRVSVNVSKELMLCYLIKPSTMTDKEMESPECMKRIKVQEVILSRWVSSRERSDQDDL

SEQ ID NO: 91803 - protein, 132 aa, Homo sapiens
  MOD_RES (1)..(1): Any amino acid
XLTTGYFNLTQAYMDLVLGTRAEYQILLASPEVNGFFGAKGVAGAIPAAYVHIERQFFSEVCSLGQQERVQLQEYWRRGWTFHAKGARAALPEVRCGVLCHLRAAESPGEAVGEDGDSTDQELLLRTDRCCL

SEQ ID NO: 91804 - protein, 204 aa, Homo sapiens
MELEVPDEAESAEAGAVPSEAAWAAESGAAAGLAQKKAAPTEVLSMTAQPGPGHGKKLGHRGVDASGETTYKKTTSSTLKGAIQLGIGYTVGHLSSKPERDVLMQDFYVVESIFFPSSVTSGPRWLPKLLPSRLHSSHRRQQKENNSPSLSDMTSVSAPLVSLAECSHRRQQPHPRPPLPGLPLQDLCTCRLPLLPGALWDPAR

SEQ ID NO: 91805 - protein, 180 aa, Homo sapiens
MPRQLSAAAALFASLAVILHDGSQMRAKAFPETRDYSQPTAAATVQDIKKPVQQPAKQAPHQTLAARFMDGHITFQTAATVKIPTTTPATTKNTATTSPITYTLVTTQATPNNSHTAPPVTEVTVGPSLAPYSLPPTITPPAHTTGTSSSTVSHTTGNTTQPSNQTTLPATLSIALHKST

SEQ ID NO: 91806 - protein, 58 aa, Homo sapiens
MCGNNMSTPLPAIVPAARKATAAVIFLHGLGDTGVLSVVLIEIFLFSSATGIVTLWFP

SEQ ID NO: 91807 - protein, 80 aa, Homo sapiens
MCPQLAGAGSMGSPGATTGWGLLDYKTEKWALLAKKGYQERDLEPQFSIITKLKGVSVTQIKELGNRLWDVADFVKPPQV

SEQ ID NO: 91808 - protein, 42 aa, Homo sapiens
MEPQVTLNVTFKNEIQSFLVSDPENTTWADIEAMVKVSFDLN

SEQ ID NO: 91809 - protein, 108 aa, Homo sapiens
GLVVLNLVTSARSQKTEPLSGSGDQPLFRGADRYDFAIMIPPGGTECFWQFAHQTGYFYFSYEVQRTVGMSHDRHVAATAHNPQGFLIDTSQGVRGQINFSTQETGTL

SEQ ID NO: 91810 - protein, 232 aa, Homo sapiens
  MOD_RES (1)..(1): Any amino acid
XQPSINEEIQTVFNKYMKFFQKAALNVRDNVGEEVDAEQLIQEACRSCLEQAKLLFSDGEKVIPRLTHELPGIKRGRQAEEECAHRGSPLPKKRKGRPPGHILSSDRAAAGMVWKPKSCEPIRREGPKWDPARLNESTTFVLGSRANKALGMGGTRGRIYIKHPHLFKAYLLIEEDIRDLAASDDYRGCLDLKLEELKSFVLPSWMVEKMRKYMETLRTENEHRAVEAPPQT

SEQ ID NO: 91811 - protein, 305 aa, Homo sapiens
  MOD_RES (1)..(1): Any amino acid
XEECFFAYCWAIKHCALLGAKTEDHSNSDQKALGMMGLVRRDTALLLRDFRLGASSWLNSFLELSGRKSQKMSEPIAEPMRRSVSEAALAQPQGPLGTDSLKNLTLRDLSLRGNSETSSDTPEMSLSAETLSPSTPSDVNFLLPPEDAGEEAEAKNELSPMDRGLGVRAAFPEGFHPRRSSQGATQMPLYSSPIVKNPFMSPLLAPDSMLKSLPPVHIVACALDPMLDDSVMLARRLRNLGQPVTLRVVEDLPHGFLTLAALCRETRQAAELCVERIRLVLTPPAGAGPSGETGAAGVDGGCGGR

SEQ ID NO: 91812 - protein, 168 aa, Homo sapiens
MGAASGRRGPGLLLPLPLLLLLPPQPALALDPGLQPGNFSADEAGAQLFAQSYNSSAEQVLFQSVAASWAHDTNITAENARRQEEAALLSQEFAEAWGQKAKELYEPIWQNFTDPQLRRIIGAVRTLGSANLPLAKRQQISPTSWLPREATPCSCLPGRAGTTLRASR

SEQ ID NO: 91813 - protein, 17 aa, Homo sapiens
MAEASSDPGAEEREELL

SEQ ID NO: 91814 - protein, 98 aa, Homo sapiens
MSVSFHTHTKELWTWMEDLQKEMLEDVCADSVDAVQELIKQFQQQQTATLDATLNVIKEGEDLIQQLRSAPPSLGEPSEARSAWAELSSGKCLGLDVR

SEQ ID NO: 91815 - protein, 121 aa, Homo sapiens
  MOD_RES (1)..(1): Any amino acid
XDVYKLALSFQLCRLEQLCRQYIEASVDLQNVLVVCESAARLQLSQLKVIMMKEFERLSSPLIVEIVRRKQQPPPRTPLDQPVDIGPFIPPALPGACADPGCWLLVMSAGTRGHAVGLEGA

SEQ ID NO: 91816 - protein, 76 aa, Homo sapiens
  MOD_RES (1)..(1): Any amino acid
XKDFLHIKEKYSNDWWIGRLVKEGGDIAFIPSPQRLESIRLKQEQKARRSGNPSSLSDIGNRRSPPPSLGGTCSPI

SEQ ID NO: 91817 - protein, 106 aa, Homo sapiens
MTEVVPSSALSEVSLRLLCHDDIDTVKHLCGDWFPIEYPDSWYRDITSNKKFFSLAATYRGAIVGMIVAEIKNRTKIHKEDGDILASNFSVDTQVAYILSLGVVKE

SEQ ID NO: 91818 - protein, 104 aa, Homo sapiens
METQADLVSQEPQALLDSALPSKVPAFSDKDSLGDEMLAAALLKAKSQELVTFEDVAVYFIRKEWKRLEPAQRDLYRDVMLENYGNVFSLDRETRTENDQEISE

SEQ ID NO: 91819 - protein, 353 aa, Homo sapiens
MDVAEPYKVYQLLPPGIVSGQPGTQKVPSKRQHSSVSSERKEEEDAMQNCTLSPSVLQDSLNNEEEGASGGAVHSDIGSSSSSSSPEPQEVTDTTEAPFQGDQRSLEFLLPPEPDYSLLLTFIYNGRVVGEAQVQSLDCRLVAEPSGSESSMEQVLFPKPGPLEPTQRLLSQLERGILVASNPRGLFVQRLCPIPISWNAPQAPPGPGPHLLPSNECVELFRTAYFCRDPPCSLCMALLRLCVAYPVWPYAQPGSYLAALLQPRQWKRWFRLGQVLSGPGPPTEVPGNTEFLGREPWLQPYSTESYHSEDGAGLCPILAGADSRAAGSHSVPGVEPGGPIFHLTSLFFLSPLK

SEQ ID NO: 91820 - protein, 112 aa, Homo sapiens
  MOD_RES (1)..(1): Any amino acid
XAQKARKLGANVYTLGVADYNLDQITAIADSPGHVFAVENGFKALRSTIDALTSKVCLDVTSVEPSSECVGEPYHVVIHGNGFQNLKKRDEVICRFIFNESTIIGSTLLKSA

SEQ ID NO: 91821 - protein, 273 aa, Homo sapiens
MRIAVICFCLLGITCAIPVKQADSGSSEEKQTLPSKSNESHDHMDDMDDEDDDDHVDSQDSIDSNDSDDVDDTDDSHQSDESHHSDESDELVTDFPTDLPATEVFTPVVPTVDTYDGRGDSVVYGLRSKSKKFRRPDIQYPDATDEDITSHMESEELNGAYKAIPVAQDLNAPSDWDSRGKDSYETSQLDDQSAETHSHKQSRLYKRKANDESNEHSDVIDSQELSKVSREFHSHEFHSHEDMLVVDPKSKEEDKHLKFRISHELDSASSEVN

SEQ ID NO: 91822 - protein, 291 aa, Homo sapiens
MLWFSGVGALAERYCRRSPGITCCVLLLLNCSGVPMSLASSFLTGSVAKCENEGEVLQIPFITDNPCIMCVCLNKEVTCKREKCPVLSRDCALAIKQRGACCEQCKGCTYEGNTYNSSFKWQSPAEPCVLRQCQEGVVTESGVRCVVHCKNPLEHLGMCCPTCPGCVFEGVQYQEGEEFQPEGSKCTKCSCTVRGKCLTSLLGAASFEVMFMTMDPHFCTITAQLVPAGTLLWFARGSAPTLVAVTKARRAVVKSASYECPQKTSKYANLATRFSRMERCGPLSIVPSVLV

SEQ ID NO: 91823 - protein, 117 aa, Homo sapiens
MATPVVTKTAWKLQEIVAHASNVSSLVLGKASGRLLATGGDDCRVNLWSINKPNCIMSLTGHTSPVESVRLNTPEELIVAGSQSGSIRVWDLEAAKTLGHQEERLCLPIQGAQPGRA

SEQ ID NO: 91824 - protein, 93 aa, Homo sapiens
MGVNDLWQILEPVKQHIPLRNLGGKTIAVDLSLWVCEAQTVKKMMGSVMKPHLRNLFFRISYLTQMDVKLVFVMEGEPPKLKADVISKRNQSR

SEQ ID NO: 91825 - protein, 124 aa, Homo sapiens
  MOD_RES (1)..(1): Any amino acid
XSIYDEMEEKWSKQKAKWKKDEKFERENILLQQKKKMTKKFEMESGEEDKKINESCSAVFENFIQEKEELLKQHQSDTLQLEELRKTKEVMQEELHAQALILESLNTNLYYTQLELQKEAKDNF

SEQ ID NO: 91826 - protein, 41 aa, Homo sapiens
MNVIDHVRDMAAAGLHSNVRLLSSLLLTMSNNNPVFHLKLK

SEQ ID NO: 91827 - protein, 272 aa, Homo sapiens
  MOD_RES (1)..(1): Any amino acid
XPTCETAQSPCDTKECQHGGQCQVENGSAVCVCQAGYTGAACEMDVDDCSPDPCLNGGSCVDLVGNYTCLCAEPFKGLRCETGDHPVPDACLSAPCHNGGTCVDADQGYVCECPEGFMGLDCRERVPDDCECRNGGRCLGANTTLCQCPLGFFGLLCEFEITAMPCNMNTQCPDGGYCMEHGGSYLCVCHTDHNASHSLPSPCDSDPCFNGGSCDAHDDSYTCECPRGFHGKHCEKGMAGRGVRAGVSTLESARGPPSCFSAVSLLVSRIAD

SEQ ID NO: 91828 - protein, 834 aa, Homo sapiens
MNSLKQLYTVTMDVHSRYRTEAHQDVVGRFNERFILSLASCKKCLVIDDQLNILPISSHVATMEALPPQTPDESLGPSDLELRELKESLQDTQPVGVLVDCCKTLDQAKAVLKFIEGISEKTLRSTVALTAARGRGKSAALGLAIAGAVAFGYSNIFVTSPSPDNLHTLFEFVFKGFDALQYQEHLDYEIIQSLNPEFNKAVIRVNVFREHRQTIQYIHPADAVKLGQAELVVIDEAAAIPLPLVKSLLGPYLVFMASTINGYEGTGRSLSLKLIQQLRQQSAQSQVSTTAENKTTTTARLASARTLYEVSLQESIRYAPGDAVEKWLNDLLCLDCLNITRIVSGCPLPEACELYYVNRDTLFCYHKASEVFLQRLMALYVASHYKNSPNDLQMLSDAPAHHLFCLLPPVPPTQNALPEVLAVIQVCLEGEISRQSILNSLSRGKKASGDLIPWTVSEQFQDPDFGGLSGGRVVRIAVHPDYQGMGYGSRALQLLQMYYEGRFPCLEEKVLETPQEIHTVSSEAVSLLEEVITPRKDLPPLLLKLNERPAERLDYLGVSYGLTPRLLKFWKRAGFVPVYLRQTPNDLTGEHSCIMLKTLTDEDEADQGGWLAAFWKDFRRRFLALLSYQFSTFSPSLALNIIQNRNMGKPAQPALSREELEALFLPYDLKRLEMYSRNMVDYHLIMDMIPAISRIYFLNQLGDLALSAAQSALLLGIGLQHKSVDQLEKEIELPSGQLMGLFNRIIRKVVKLFNEVQEKAIEEQMVAAKDVVMEPTMKTLSDDLDEAAKEFQEKHKKEVGKLKSMDLSEYIIRGDDEEWNEVLNKAGRTPRSSA

SEQ ID NO: 91829 - protein, 200 aa, Homo sapiens
MNEILHGADGTSIKCGIIGEIGCSWPLTESERKVLQATAHAQAQLGCPVIIHPGRSSRAPFQIIRILQEAGADISKTVMSHLDRTILDKKELLEFAQLGCYLEYDLFGTELLHYQLGPDIDMPDDNKRIRRVRLLVEEGCEDRILVAHDIHTKTRLMKYGGHGYSHILTNVVPKMLLRGITENVLDKILIENPKQWLTFK

SEQ ID NO: 91830 - protein, 87 aa, Homo sapiens
MGRKKIQITRIMDERNRQVTFTKRKFGLMKKAYELSVLCDCEIALIIFNSTNKLFQYASTDMDKVLLKYTEYNEPHESRTNSDIVET

SEQ ID NO: 91831 - protein, 73 aa, Homo sapiens
MSAFSEAALEKKLSELSNSQQSVQTLSLWLIHHRKHSRPIVTVWERELRKERVSVWRDKLQGLCEDQNGIQFS

SEQ ID NO: 91832 - protein, 131 aa, Homo sapiens
MSIMMLPMEQKIQWVPTSLQDITAVLGTEAYTEEDKSMVSHAQKSQHSCLSHSRWLRSPQVTGGSWDLRIRPSKDSSSFRQAQCLRKDPGANNHLESQGVRGTAGDADRELRGPSEKATGDPGLRAPEHGA

SEQ ID NO: 91833 - protein, 106 aa, Homo sapiens
VNKNKFIEQIQHLQSMFERICVIVEKDREKTGDTSRMFRRTKSYDSLLTTLIGAGIRILFSSCQEETADLLKELSLVEQRKNVGIHVPTVVNSNKTHFKKSPCMHK

SEQ ID NO: 91834 - protein, 1676 aa, Homo sapiens
MEETAIWEQHTVTLHRAPGFGFGIAISGGRDNPHFQSGETSIVISDVLKGGPAEGQLQENDRVAMVNGVSMDNVEHAFAVQQLRKSGKNAKITIRRKKKVQIPVSRPDPEPVSDNEEDSYDEEIHDPRSGRSGVVNRRSEKIWPRDRSASRERSLSPRSDRRSVASSQPAKPTKVTLVKSRKNEEYGLRLASHIFVKEISQDSLAARDGNIQEGDVVLKINGTVTENMSLTDAKTLIERSKGKLKMVVQRDERATLLNVPDLSDSIHSANASERDDISEIQSLASDHSGRSHDRPPRRSRSRSPDQRSEPSDHSRHSPQQPSNGSLRSRDEERISKPGAVSTPVKHADDHTPKTVEEVTVERNEKQTPSLPEPKPVYAQVGQPDVDLPVSPSDGVLPNSTHEDGILRPSMKLVKFRKGDSVGLRLAGGNDVGIFVAGVLEDSPAAKEGLEEGDQILRVNNVDFTNIIREEAVLFLLDLPKGEEVTILAQKKKDVYRRIVESDVGDSFYIRTHFEYEKESPYGLSFNKGEVFRVVDTLYNGKLGSWLAIRIGKNHKEVERGIIPNKNRAEQLASVQYTLPKTAGGDRADFWRFRGLRSSKRNLRKSREDLSAQPVQTKFPAYERVVLREAGFLRPVTIFGPIADVAREKLAREEPDIYQIAKSEPRDAGTDQRSSGIIRLHTIKQIIDQDKHALLDVTPNAVDRLNYAQWYPIVVFLNPDSKQGVKTMRMRLCPESRKSARKLYERSHKLRKNNHHLFTTTINLNSMNDGWYGALKEAIQQQQNQLVWVSEGKADGATSDDLDLHDDRLSYLSAPGSEYSMYSTDSRHTSDYEDTDTEGGAYTDQELDETLNDEVGTPPESAITRSSEPVREDSSGMHHENQTYPPYSPQAQPQPIHRIDSPGFKPASQQVYRKDPYPEEMMRQNHVLKQPAVSHPGHRPDKEPNLTYEPQLPYVEKQASRDLEQPTYRYESSSYTDQFSRNYEHRLRYEDRVPMYEEQWSYYDDKQPYPSRPPFDNQHSQDLDSRQHPEESSERGYFPRFEEPAPLSYDSRPRYEQAPRASALRHEEQPAPGYDTHGRLRPEAQPHPSAGPKPAESKQYFEQYSRSYEQVPPQGFTSRAGHFEPLHGAAAVPPLIPSSQHKPEALPSNTKPLPPPPTQTEEEEDPAMKPQSVLTRVKMFENKRSASLETKKDVNDTGSFKPPEVASKPSGAPIIGPKPTSQNQFSEHDKTLYRIPEPQKPQLKPPEDIVRSNHYDPEEDEEYYRKQLSYFDRRSFENKPPAHIAASHLSEPAKPAHSQNQSNFSSYSSKGKPPEADGVDRSFGEKRYEPIQATPPPPPLPSQYAQPSQPVTSASLHIHSKGAHGEGNSVSLDFQNSLVSKPDPPPSQNKPATFRPPNREDTAQAAFYPQKSFPDKAPVNGTEQTQKTVTPAYNRFTPKPYTSSARPFERKFESPKFNHNLLPSETAHKPDLSSKTPTSPKTLVKSHSLAQPPEFDSGVETFSIHAEKPKYQINNISTVPKAIPVSPSAVEEDEDEDGHTVVATARGIFNSNGGVLSSIETGVSIIIPQGAIPEGVEQEIYFKVCRDNSILPPLDKEKGETLLSPLVMCGPHGLKFLKPVELRLPHCASMTPDGWSFALKSSDSSSGDPKTWQNKCLPGDPNYLVGANCVSVLIDHF

SEQ ID NO: 91835 - protein, 81 aa, Homo sapiens
  MOD_RES (1)..(1): Any amino acid
XWIPLDPLAPDLARYPSYSQAQALRCTVRAGEMLYLPALWFHHVQQSQGCIAVNFWYDMEYDLKYSYFQLLDSLTKASGLD

SEQ ID NO: 91836 - protein, 60 aa, Homo sapiens
  MOD_RES (1)..(1): Any amino acid
XLRQSPECKPEIDKAVVVSPSSLVKNWYNEVGKWLGGRIQPLAIDGGSKDEIDQKLGTEP

SEQ ID NO: 91837 - protein, 90 aa, Homo sapiens
MGVTRFFGQTILGGPFHVLIITYAFMVLVTMVMRLISASGEVVPMSFALVLGWCNVMYFARGFQMLGPFTIMIQKMIFGDLMRFCWLMAV

SEQ ID NO: 91838 - protein, 1789 aa, Homo sapiens
  MOD_RES (1)..(1): Any amino acid
XDSQRKQYEEWLQETQQLLQMQQKYLEEQIGAHRKSKKALSAKQRTAKKAGREFPEEDAEQLKHVTEQQSMVQKQLEQIRKQQKEHAELIEDYRIKQQQQCAMAPPTMMPSVQPQPPLIPGATPPTMSQPTFPMVPQQLQHQQHTTVISGHTSPVRMPSLPGWQPNSAPAHLPLNPPRIQPPIAQLPIKTCTPAPGTVSNANPQSGPPPRVEFDDNNPFSESFQERERKERLREQQERQRIQLMQEVDRQRALQQRMEMEQHGMVGSEISSSRTSVSQIPFYSSDLPCDFMQPLGPLQQSPQHQQQMGQVLQQQNIQQGSINSPSTQTFMQTNERRQVGPPSFVPDSPSIPVGSPNFSSVKQGHGNLSGTSFQQSPVRPSFTPALPAAPPVANSSLPCGQDSTITHGHSYPGSTQSLIQLYSDIIPEEKGKKKRTRKKKRDDDAESTKAPSTPHSDITAPPTPGISETTSTPAVSTPSELPQQADQESVEPVGPSTPNMAAGQLCTELENKLPNSDFSQATPNQQTYANSEVDKLSMETPAKTEEIKLEKAETESCPGQEEPKLEEQNGSKVEGNAVACPVSSAQSPPHSAGAPAAKGDSGNELLKHLLKNKKSSSLLNQKPEGSICSEDDCTKDNKLVEKQNPAEGLQTLGAQMQGGFGCGNQLPKTDGGSETKKQRSKRTQRTGEKAAPRSKKRKKDEEEKQAMYSSTDTFTHLKQQLSLLPLMEPIIGVNFAHFLPYGSGQFNSGNRLLGTFGSATLEGVSDYYSQLIYKNNLSNPPTPPASLPPTPPPMACQKMANGFATTEELAGKAGVLVSHEVTKTLGPKPFQLPFRPQDDLLARALAQGPKTVDVPASLPTPPHNNQEELRIQDHCGDRDTPDSFVPSSSPESVVGVEVSRYPDLSLVKEEPPEPVPSPIIPILPSTAGKSSESRRNDIKTEPGTLYFASPFGPSPNGPRSGLISVAITLHPTAAENISSVVAAFSDLLHVRIPNSYEVSSAPDVPSMGLVSSHRINPGLEYRQHLLLRGPPPGSANPPRLVSSYRLKQPNVPFPPTSNGLSGYKDSSHGIAESAALRPQWCCHCKVVILGSGVRKSFKDLTLLNKDSRESTKRVEKDIVFCSNNCFILYSSTAQAKNSENKESIPSLPQSPMRETPSKAFHQYSNNISTLDVHCLPQLPEKASPPASPPIAFPPAFEAAQVEAKPDELKVTVKLKPRLRAVHGGFEDCRPLNKKWRGMKWKKWSIHIVIPKGTFKPPCEDEIDEFLKKLGTSLKPDPVPKDYRKCCFCHEEGDGLTDGPARLLNLDLDLWVHLNCALWSTEVYETQAGALINVELALRRGLQMKCVFCHKTGATSGCHRFRCTNIYHFTCAIKAQCMFFKDKTMLCPMHKPKGIHEQELSYFAVFRRVYVQRDEVRQIASIVQRGERDHTFRVGSLIFHTIGQLLPQQMQAFHSPKALFPVGYEASRLYWSTRYANRRCRYLCSIEEKDGRPVFVIRIVEQGHEDLVLSDISPKGVWDKILEPVACVRKKSEMLQLFPAYLKGEDLFGLTVSAVARIAESLPGVEACENYTFRYGRNPLMELPLAVNPTGCARSEPKMSAHVKRPHTLNSTSTSKSFQSTVTGELNAPYSKQFVHSKSSQYRKMKTEWKSNVYLARSRIQGLGLYAARDIEKHTMVIEYIGTIIRNEVANRKEKLYESQNRGVYMFRMDNDHVIDATLTGGPARYINHSCAPNCVAEVVTFERGHKIIISSSRRIQKGEELCYDYKFDFEDDQHKIPCHCGAVNCRKWMN

SEQ ID NO: 91839 - protein, 217 aa, Homo sapiens
MILASVLRSGPGGGLPLRPLLGPALALRARSTSATDTHHVEMARERSKTVTSFYNQSAIDAAAEKPSVRLTPTMMLYAGRSQDGSHLLKSARYLQQELPVRIAHRIKGFRCLPFIIGCNPTILHVHELYIRAFQKLTDFPPIKDQADEAQYCQLVRQLLDDHKDVVTLLAEGLRESRKHIEDEKLVRYFLDKTLTSRLGIRMLATHHLALHEDKTPV

SEQ ID NO: 91840 - protein, 228 aa, Homo sapiens
  MOD_RES (1)..(1): Any amino acid
XLLQQQQQQQQQQQQQQQQQQQQQQQQQQQQQQQQQQQQQQQQHPGKQAKEQQQQQLAAQQLVFQQQLLQMQQLQQQQHLLSLQRQGLISIPPGQAALPVQSLPQAGLSPAEIQQLWKEVTGVHSMEDNGIKHGGLDLTTNNSSSTTSSNTSKASPPITHHSIVNGQSSVLSARRDSSSHEETGASHTLYGHGVCKWPGCESICEDFGQFLKHLNNEHALDDRSTAQC

SEQ ID NO: 91841 - protein, 463 aa, Homo sapiens
MASRCWRWWGWSAWPRTRLPPAGSTPSFCHHFSTQEKTPQICVVGSGPAGFYTAQHLLKQHPQAHVDIYEKQPVPFGLVRFGVAPDHPEVKNVINTFTQTAHSGRCAFWGNVEVGRDVTVPELQEAYHAVVLSYGAEDHRALEIPGEELPGVCSARAFVGWYNGLPENQELEPDLSCDTAVILGQGNVALDVARILLTPPEHLERTDITKAALGVLRQSRVKTVWLVGRRGPLQVAFTIKVPRPRKRLTELLLRTATEKPGPAEAARQASASRAWGLRFFRSPQQVLPSPDGRRAAGVRLAVTRLEGVDEATRAVPTGDMEDLPCGLVLSSIGYKSRPVDPSVPFDSKLGVIPNVEGRVMDVPGLYCSGWVKRGPTGVIATTMTDSFLTGQMLLQDLKAGLLPSGPRPGYAAIQALLSSRGVRPVSFSDWEKLDAEEVARGQGTGKPREKLVDPQEMLRLLGH

SEQ ID NO: 91842 - protein, 93 aa, Homo sapiens
MATNPQPQPPPPAPPPPPPQPQPQPPPPPPGPGAGPGAGGAGGAGAGAGDPQLVAMIVNHLKSQGLFDQFRRDCLADVDTKSLALSPGWNAMA

SEQ ID NO: 91843 - protein, 373 aa, Homo sapiens
MMCYSILGPFFPKEAEKKGASNTIIGMIFGCFALFELLASLVFGNYLVHIGAKFMFVAGMFVSGGVTILFGVLDRVPDGPVFIAMCFLVRVMDAVSFAAAMTASSSILAKAFPNNVATVLGSLETFSGLGLILGPPVGGFLYQSFGYEVPFIVLGCVVLLMVPLNMYILPNYESDPGEHSFWKLIALPKVGLIAFVINSLSSCFGFLDPTLSLFVLEKFNLPAGYVGLVFLGMALSYAISSPLFGLLSDKRPPLRKWLLVFGNLITAGCYMLLGPVPILHIKSQLWLLVLILVVSGLSAGMSIIPTFPEILSCAHENGFEEGLSTLGLVSGLFSAMWSIGAFMGPTLGGFLYEKIGFEWAAAIQGLWALISYF

SEQ ID NO: 91844 - protein, 71 aa, Homo sapiens
MSQGNKMLLTFHTDFSNEENGTIMFYKGFLAYYQAVDLDECASRSKSGEEDPQPQCQHLCHNYVGGYFCSC

SEQ ID NO: 91845 - protein, 122 aa, Homo sapiens
MDTLQHDGDQMEWKESARWIKFEEKVEEGGERWSKPHVSTLSLHSLFELRTCLQTGTVLLDLDSGSLPQIIDDVIEKQIEDGLLRPELRERVSYVLLRRHRHQTKKPIHRSLADIGKSVSTT

SEQ ID NO: 91846 - protein, 379 aa, Homo sapiens
MERAVRVESGVLVGVVCLLLACPATATGPEVAQPEVDTTLGRVRGRQVGVKGTDRLVNVFLGIPFAQPPLGPDRFSAPHPAQPWEGVRDASTAPPMCLQDVESMNSSRFVLNGKQQIFSVSEDCLVLNVYSPAEVPAGSGRPVMVWVHGGALITGAATSYDGSALAAYGDVVVVTVQYRLGVLGFFSTGDEHAPGNQGFLDVVAALRWVQENIAPFGGDLNCVTVFGGSAGGSIISGLVLSPVAAGLFHRAITQSGVITTPGIIDSHPWPLAQKIANTLACSSSSPAEMVQCLQQKEGEELVLSKKLKNTIYPLTVDGTVFPKSPKELLKEKPFHSVPFLMGVNNHEFSWLIPRILEALSFSMSSSIDPVLLRRSNLPG

SEQ ID NO: 91847 - protein, 147 aa, Homo sapiens
MTLEEFSAGEQKTERMDKVGDALEEVLSKALSQRTITVGVYEAAKLLNVDVALQIHFTLIQAFCCENDINILRVSNPGRLAELLLLETDAGPAASEGAEQPPDLHCVLVTNPHSSQWKDPALSQLICFCRESRYMDQWVPVINLPER

SEQ ID NO: 91848 - protein, 64 aa, Homo sapiens
LAWAKEKYSIGEPTVPSTLAEEFTYNPFMRVREKTVQQHAGETDPVTTMRAVRREKDQFKMPRD

SEQ ID NO: 91849 - protein, 492 aa, Homo sapiens
MASVAWAVLKVLLLLPTQTWSPVGAGNPPDCDAPLASALPRSSFSSSSELSSSHGPGFSRLNRRDGAGGWTPLVSNKYQWLQIDLGERMEVTAVATQGGYGSSDWVTSYLLMFSDGGRNWKQYRREESIWGFPGNTNADSVVHYRLQPPFEARFLRFLPLAWNPRGRIGMRIEVYGCAYKSEVVYFDGQSALLYRLDKKPLKPIRDVISLKFKAMQSNGILLHREGQHGNHITLELIKGKLVFFLNSGNAKLPSTIAPVTLTLGSLLDDQHWHSVLIELLDTQVNFTVDKHTHHFQAKGDSSYLDLNFEISFGGIPTPGRSRAFRRKSFHGCLENLYYNGVDVTELAKKHKPQILMMGNVSFSCPQPQTVPVTFLSSRSYLALPGNSGEDKVSVTFQFRTWNRAGHLLFGELRRGSGSFVLFLKDGKLKLSLFQPGQSPRNVTAGAGLNDGQWHSVSFSAKWSHMNVVVDDDTAVQPLVAVLIDSGDTYYFG

SEQ ID NO: 91850 - protein, 115 aa, Homo sapiens
CKQWEFQPLTATRSSPLEEATLQLPLGSEAASQPSTSAAWKAHSTASEKDPGPQAGAGAGAKDKGPEPTFKPYLPPKRAGTLKDWSKQRTKERAYTALRQEIWPMHGPAHPEGPV

SEQ ID NO: 91851 - protein, 148 aa, Homo sapiens
  MOD_RES (1)..(1): Any amino acid
XYQLQEPPSGITSQAVTDPTAEYSTIHSPSTPIKDSDSDRLRRGSDGKSRGRGRRNNNPSPPPDSDLERVFIWDLDETIIVFHSLLTGSYANRYGRDPPTSVSLGLRMEEMIFNLADTHLFFNDLEESRASRESMMLVKLGRRKPSSA

SEQ ID NO: 91852 - protein, 886 aa, Homo sapiens
MRLHLLLLLALCGAGTTAAELSYSLRGNWSICNGNGSLELPGAVPGCVHSALFQQGLIQDSYYRFNDLNYRWVSLDNWTYSKEFKIPFEISKWQKVNLILEGVDTVSKILFNEVTIGETDNMFNRYSFDITNVVRDVNSIELRFQSAVLYAAQQSKAHTRYQVPPDCPPLVQKGECHVNFVRKEQCSFSWDWGPSFPTQGIWKDVRIEAYNICHLNYFTFSPIYDKSAQEWNLEIESTFDVVSSKPVGGQVIVAIPKLQTQQTYSIELQPGKRIVELFVNISKNITVETWWPHGHGNQTGYNMTVLFELDGGLNIEKSAKVYFRTVELIEEPIKGSPGLSFYFKINGFPIFLKGSNWIPADSFQDRVTSELLRLLLQSVVDANMNTLRVWGGGIYEQDEFYELCDELGIMVWQDFMFACALYPTDQGFLDSVTAEVAYQIKRLKSHPSIIIWSGNNENEEALMMNWYHISFTDRPIYIKDYVTLYVKNIRELVLAGDKSRPFITSSPTNGAETVAEAWVSQNPNSNYFGDVHFYDYISDCWNWKVFPKARFASEYGYQSWPSFSTLEKVSSTEDWSFNSKFSLHRQHHEGGNKQMLYQAGLHFKLPQSTDPLRTFKDTIYLTQVMQAQCVKTETEFYRRSRSEIVDQQGHTMGALYWQLNDIWQAPSWASLEYGGKWKMLHYFAQNFFAPLLPVGFENENTFYIYGVSDLHSDYSMTLSVRVHTWSSLEPVCSRVTERFVMKGGEAVCLYEEPVSELLRRCGNCTRESCVVSFYLSADHELLSPTNYHFLSSPKEAVGLCKAQITGASLNPRLCSQTYREEISNPTKITSISMTPASLSALVLEQQKLMLPWQLPGQAGMSRMNLVPVAALGPSLEQLGGHHLSAR

SEQ ID NO: 91853 - protein, 95 aa, Homo sapiens
MGETEKRIETHRIRCLSKLKMFLLAITCAFVSKTLSGSYMNSMLTQIERQFNIPTSLVGFINGSFEIDMNMNLQFQFQATCPQTVSCVWKMEPRF

SEQ ID NO: 91854 - protein, 165 aa, Homo sapiens
  MOD_RES (1)..(1): Any amino acid
XVSCCDWLLKIICGVVTIRTVYASHKQAKACLVSRVSCERTGTRFHTRGVNDDGHVSNFVETEQMIYMDDGVSSFVQIRGSVPLFWEQPGLQVGSHHLRLHRGLEANAPAFDRHMVLLKEQYGQQVVVNLLGSRGGEEVLNRAFKVRPGCPLHSWAGRQVAMVER

SEQ ID NO: 91855 - protein, 496 aa, Homo sapiens
MSCVLGGVIPLGLLFLVCGSQGYLLPNVTLLEELLSKYQHNESHSRVRRAIPREDKEEILMLHNKLRGQVQPQASNMEYMTWDDELEKSAAAWASQCIWEHGPTSLLVSIGQNLGAHWGRYRSPGFHVQSWYDEVKDYTYPYPSECNPWCPERCSGPMCTHYTQIVWATTNKIGCAVNTCRKMTVWGEVWENAVYFVCNYSPKGNWIGEAPYKNGRPCSECPPSYGGSCRNNLCYRETYTPKPETDEMNEVETAPIPEENHVWLQPRVMRPTKPKKTSAVNYMTQVVRCDTKMKDRCKGSTCNRYQCPAGCLNHKAKIFGTLFYESSSSICRAAIHYGILDDKGGLVDITRNGKVPFFVKSERHGVQSLSKYKPSSSFMVSKVKVQDLDCYTTVAQLCPFEKPATHCPRIHCPAHCKDEPSYWAPVFGTNIYADTSSICKTAVHAGVISNESGGDVDVMPVDKKKTYVGSLRNGVQSESLGTPRDGKAFRIFAVRQ

SEQ ID NO: 91856 - protein, 155 aa, Homo sapiens
  MOD_RES (1)..(1): Any amino acid
XLRLHQRLPHFQLSRAFLAQALLEDSCHYLLYSLIFVNSYPVTMSIFPVLLFSLLHAATYTKKVLDARGSNSLPLLRSVLDKLSANQQNILKFIACNEIFLMPATVFMLFSGQGSLLQPFIYYRFLTLRYSSRRNPYCRLWCPKTVTIVTPKRSP

SEQ ID NO: 91857 - protein, 265 aa, Homo sapiens
GYTLTSKLLFKTVIQAIHKYAFMALKFKILVKNKKIGTLKETHERKGSDKRGDNQDKETGVKKLPGVMLFKKKKTRKLKIALALSDLVIYTKAEKFKSFQHSRLYQQFNENNSIGETQARKLSKLRVHEFIFHTRKFITRIYPKATRADSSNFNPQEFWNIGCQMVALNFQTPGLPMDLQNGKFLDNGGSGYILKPHFLRESKSYFNPSNIKEGMPITLTIRLISGIQLPLTHSSSNKGDSLVIIEVFGVPNDQMKQQTRVIKKN

SEQ ID NO: 91858 - protein, 246 aa, Homo sapiens
  MOD_RES (1)..(1): Any amino acid
XEELLVHLLQVLSTVLSMYVVYSTQSSLLRKQGLPLMNQIISWATLASSLVVPLLSSPVLFQRLFSILLSLMSTYLLLSTGYEALFPLVLSCLMFVWINIEQETLQQSGVCCKQKLTSIQFSYNTDITQFRQLYLDDIRRAFFLVFFLVTAFFGTGNIASINSFDLASVYCFLTVFSPFMMGALMMWKHFFFLVKDYGSWLDIGTSISHYVIVMSMTIFLVFLNGLAQLLTTKKLRLCGKPKSHFM

SEQ ID NO: 91859 - protein, 200 aa, Homo sapiens
METPLDVLSRAASLVHADDEKREAALRGEPRIQTLPVASALSSHRTGPPPISPSKRKFSMEPGDEDLDCDNDHVSKMSRIFNPHLNKTANGDCRRDPRERSRSPIERAVAPTMSLHGSHLYTSLPSLGLEQPLALTKNSLDASRPAGLSPTLTPGERQQNRPSVITCASAGARNCNLSHCPIAHSGCAAPGPASYRRPPS

SEQ ID NO: 91860 - protein, 1967 aa, Homo sapiens
MEKFKAAMLLGSVGDALGYRNVCKENSTVGMKIQEELQRSGGLDHLVLSPGEWPVSDNTIMHIATAEALTTDYWCLDDLYREMVRCYVEIVEKLPERRPDPATIEGCAQLKPNNYLLAWHTPFNEKGSGFGAATKAMCIGLRYWKPERLETLIEVSVECGRMTHNHPTGFLGSLCTALFVSFAAQGKPLVQWGRDMLRAVPLAEEYCRKTIRHTAEYQEHWFYFEAKWQFYLEERKISKDSENKAIFPDNYDAEEREKTYRKWSSEGRGGRRGHDAPMIAYDALLAAGNSWTELCHRAMFHGGESAATGTIAGCLFGLLYGLDLVPKGLYQDLEDKEKLEDLGAALYRLSTEENRKSSKTCSDVMSVDAQTLKKKMGKLACDPAAHSILSSLLLYVTGRADRPPGTEAGGSRPSHQPQTQEATQRPTRFQLLQAKFLGTGRERYLKRTREVGRLISKDKQGPGGGLVGATINKLLEKTKEPAPKPCLSEKPRWGHPAGKSTVKNILKIFLAAEEKEAKEKEAREKPPVERPKAARGLLPKIMGKSSVLSKLREKFEQNSCLCSEASALRLHTQERKKRNLQRKRMHRPEVRVLHTATMASTCVKMPPARFLACTAEPLPALSIATVVCGPRSWLSHCTKISHSEARRPPRGEASVPPSARETGPSGNKAVGKGPLEEEPQRQPRPSKPVTPQVMAQRDGHAVPSLAFSCAPCTGGVLPGLVPASSPLGPASPWGTGSAGGDGTADPTAESTAGGVQEVRGARLTWPPGPPGECAGEGPEITMTVCSSEDEREGAGFPDPGRDPLFATQKYFPEQKVPEHIPPLNAPSVQAARRTQPATEPPRITVQIPVVHEMPAPPTRLQNMSSGENKPCICGGENVVENAHTEFPTVTENRRGHRAPVELSKLSGMQAGLSASSPQGPRAAPRLAAARGAVGADHSVPETLLTQRLQTDPAGGKENKGSFENSHGPRNPDDISGERTSELRDVKHPLPESNEISMQKKGSATNDPAASQNLLRGNTSHASSSQQVPSPTGRNPTGAPTSLAASSKGRTGPEGVTPMGMTVPGALEECRRPLLIESSQPLKAAEEITSHDVRENPLSSLNEPPKPGMKACGAMAAAGSVASRATPAPAPGSTQSPGDRTAGEPETLGQWGSRALSESHPRGEALPRDPHSHGLLAPGGSLEPKSGAAGRSLLRGVALVQHPEDIATLARHPEDAAALARHPEAARLYISNTSAASRHTAAVGGRKDVAVEGNLLGFSTESGIPASDHPRPQARSVAESPSYGPGLPPSPPENPQAKGREGVRFPRGAEPDHLLPAVPPAEVDMGWVGGTHQRGPPHLQAHLPPTAGDTQAKLRASVPEPRTQAGESQERPLTQADLGRQQSHQAQEETPQPGDAGKRVAPSGSKVVLNPAKEPQTWWAQDLAGDKGMAIGVGGACQRSDQGQQHLQGPWEERGRSTAWGEGTRAARNPAVPPGEPEGPGSPAAQGQAQKQVQEWDRGQVQGHAQEQAQWQTQIEAQGQAQEQAQGGTQGHSQGQAQKQFQNWAQGQAQGHAQEQAQWQTQIEAQGQAQEPAQGGAQGQVQGQAQKWAQGQIQGQAQKQVQGEVQKWAQEEAQGQAQWQTQIKAQKWAQEQTQKGAQERVQGQAQKGAQERAQEQAQEQTQIEAQGQAQKGAQERAREQAQKGAQERAREQAQKGAQERAREQAQKGAQERAREQAQKGAQERAREQAQKGAQERAREQAQKGAQERAQEQGREQTHIEAQGQAQKGAQEWARDRARDQGWEQTQIETQRQTQKGAQERAWEQGREQALTSGMAPRAWEQPISGIAEGVDAAGRSGGSRSPAPRDGGQSGGSGLGEPSAGYPPPGSRPLRGKSIATSPLGLGKSPTEPKPEAGGCGTPQAPAQEGSPDHPGAERALQDRMEASEPERRGRSRHLAKYKAQSFRDQRAFDLSFRPMSVRASDTSELPK

SEQ ID NO: 91861 - protein, 360 aa, Homo sapiens
MSMSPTVIILACLGFFLDQSVWAHVGGQDKPFCSAWPSAVVPQGGHVTLRCHYRRGFNIFTLYKKDGVPVPELYNRIFWNSFLISPVTPAHAGTYRCRGFHPHSPTEWSAPSNPLVIMVTGLYEKPSLTARLGPTVRAGENVTLSCSSQSSFDIYHLSREGEAHELRLPAVPSINGTFQADFPLGPATHGETYRCFGSFHGSPYEWSDPSDPLPVSVTGIARHLHAVIRYSVAIILFTILPFFLLHRWCSKKKNAAVMNQEPAGHRTVNREDSDEQDPQEVTYAQLDHCIFTQRKITGPSQRSKRPSTDTSVCIELPNAEPRALSPAHEHHSQALMGSSRETTALSQTQLASSNVPAAGI

SEQ ID NO: 91862 - protein, 247 aa, Homo sapiens
MSNVSGILETAGVPLVSANWPQPSPPPAVPAGPQMDHMGNSSQGAPWLFLTSALARGVSGIFVWTALVLTCHQIYLHLRSYTVPQEQRYIIRLLLIVPIYAFDSWLSLLLLGDHQYYVYFDSVRDCYEAFVIYSFLSLCFQYLGGEGAIMAEIRGKPIKSSCLYGTCCLRGMTYSIGFLRFCKQATLQFCLVKPVMAVTTIILQAFGKYHDGDFKTSVPAKAGGLDLPSQDTAGCPQRLPLCDPHLQ

SEQ ID NO: 91863 - protein, 19 aa, Homo sapiens
MAQNTENHDPVGSILIQGF

SEQ ID NO: 91864 - protein, 378 aa, Homo sapiens
MPRVYIGRLSYQARERDVERFFKGYGKILEVDLKNGYGFVEFDDLRDADDAVYELNGKDLCGERVIVEHARGPRRDGSYGSGRSGYGYRRSGRDKYGPPTRTEYRLIVENLSSRCSWQDLKDYMRQAGEVTYADAHKGRKNEGVIEFVSYSDMKRALEKLDGTEVNGRKIRLVEDKPGSRRRRSYSRSRSHSRSGSRSRSKSRSRSQSRSRSKKEKSRSPSKEKSRSRSHSAGKSRSKSKDQAEEKIQNNDNVGKPKSRSPSRHKSKSKSRSRSQERRVEEEKRGSVSRGRSQEKSLRQSRSRSRSKGGSRSRSRSRSKSKDKRKGRKRSREESRSRSRSRSKSERSRKRGSKRDSKAGSSKKKKKEDTDRSQSRSPS

SEQ ID NO: 91865 - protein, 106 aa, Homo sapiens
  MOD_RES (1)..(1): Any amino acid
XARPRNALLLLADDGGFESGAYNNSAIATPHLDALARRSLLFRNAFTSVSSCSPSRASLLTGLPQHQNGMYGLHQDVHHFNSFDKVRSLPLLLSQAGVRTGGAEHH

SEQ ID NO: 91866 - protein, 138 aa, Homo sapiens
MRSAFSFSVWRTSRWVTKFDSRKTSLEDFYLDEERTVRVPMMSDPKAVLRYGLDSDLSCKIAQLPLTGSMSIIFFLPLKVTQNLTLIEESLTSEFIHDIDRELKTVQAVLTVPKLKLSYEGEVTKSLQEMKLQSLFDS

SEQ ID NO: 91867 - protein, 109 aa, Homo sapiens
MKLHCCLFTLVASIIVPAAFVLEDVDFDQMVSLEANRSSYNASFPSSFELSASSHSDDDVIIAKEGTSVSIECLLTASHYEDVHWHNSKGQQLDGRSRGGKWLVSDNFL

SEQ ID NO: 91868 - protein, 102 aa, Homo sapiens
MLKSAVLFSHRKIQFHIFTEDSLKPEFDKQLRQWPDSYTKKFEHRIYPITFSVGNPQEWKKLFKPCAAQRLFLPVILKDVDSLLYVDTDVLFLRPVDDIWKL

SEQ ID NO: 91869 - protein, 148 aa, Homo sapiens
MASPDWGYDDKNGPEQWSKLYPIANGNNQSPVDIKTSETKHDTSLKPISVSYNPATAKEIINVGHSFHVNFEDNDNRSVLKGGPFSDSYRLFQFHFHWGSTNEHGSEHTVDGVKYSAELHVAHWNSAKYSSLAEAASKADGLAVIGVL

SEQ ID NO: 91870 - protein, 127 aa, Homo sapiens
  MOD_RES (1)..(1): Any amino acid
XTMFRATLRGWRTGVQRGCGLRLLVRALSEELRASRGYPPPNLPYFVRRSRMHNIPVYKDITHGNRQMTVIRKVEGDIWALQKDVEDFLSPLLGKTPVTQVNEVTGTLRIKGYFDQELKAWLLEKGF

SEQ ID NO: 91871 - protein, 115 aa, Homo sapiens
GITRVRNATDAVGIVLKELKRQSSLGMFHLLVAVDGINALWGRTTLKREDKSPIAPEELALVHNLRKMMKNDWHGGAIVSALSQTGSLFKPRKAYLPQELLGKLLQKKGKKSCCS

SEQ ID NO: 91872 - protein, 445 aa, Homo sapiens
MAALMTPGTGAPPAPGDFSGEGSQGLPDPSPEPKQLPELIRMKRDGGRLSEADIRGFVAAVVNGSAQGAQIGAMLMAIRLRGMDLEETSVLTQALAQSGQQLEWPEAWRQQLVDKHSTGGVGDKVSLVLAPALAACGCKMQVLLDQAGCCIVGQSEQLVPADGILYAARDVTATVDSLPLITASILSKKLVEGLSALVVDVKFGGAAVFPNQEQARELAKTLVGVGASLGLRVAAALTAMDKPLGRCVGHALEVEEALLCMDGAGPPDLRDLVTTLGGALLWLSGHAGTQAQGAARVAAALDDGSALGRFERMLAAQGVDPGLARALCSGSPAERRQLLPRAREQEELLAPADGTVELVRALPLALVLHELGAGRSRAGEPLRLGVGAELLVDVGQRLRRGTPWLRVHRDGPALSGPQSRALQEALVLSDRAPFAAPSPFAELVL

SEQ ID NO: 91873 - protein, 93 aa, Homo sapiens
  MOD_RES (1)..(1): Any amino acid
XAPLGAARWKLLRQVLKQKHLDDCLRHVSVRRFESFNLFSVTEGKERETEEEVGAWVQYTSIFCPEYSISLRHNSGSLNVEDVLTSFDNTGNV

SEQ ID NO: 91874 - protein, 646 aa, Homo sapiens
MANVPWAEVCEKFQAALALSRVELHKNPEKEPYKSKYSARALLEEVKALLGPAPEDEDERPEAEDGPGAGDHALGLPAEVVEPEGPVAQRAVRLAVIEFHLGVNHIDTEELSAGEEHLVKCLRLLRRYRLSHDCISLCIQAQRQGFTMLPRPQVIRLRWPPKVLGLQNNLGILWSEREEIETAQAYLESSEALYNQYMKEVGSPPLDPTERFLPEEEKLTEQERSKRFEKVYTHNLYYLAQVYQHLEMFEKAAHYCHSTLKRQLEHNAYHPIEWAINAATLSQFYINKLCFMEARHCLSAANVIFGQTGKISATEDTPEAEGEVPELYHQRKGEIARCWIKYCLTLMQNAQLSMQDNIGELDLDKQSELRALRKKELDEEESIRKKAVQFGTGELCDAISAVEEKVSYLRPLDFEEARELFLLGQHYVFEAKEFFQIDGYVTDHIEVVQDHSALFKVLAFFETDMERRCKMHKRRIAMLEPLTVDLNPQYYLLVNRQIQFEIAHAYYDMMDLKVAIADRLRDPDSHIVKKINNLNKSALKYYQLFLDSLRDPNKVFPEHIGEDVLRPAMLAKFRVARLYGKIITADPKKELENLATSLEHYKFIVDYCEKHPEAAQEIEVELELSKEMVSLLPTKMERFRTKMALT

SEQ ID NO: 91875 - protein, 172 aa, Homo sapiens
MPGMVLFGRRWAIASDDLVFPGFFELVVRVLWWIGILTLYLMHRGKLDCAGGALLSSYLIVLMILLAVVICTVSAIMCVSMRGHRSGAQRHCGGPRPASSATGQYQEQPRACPGGLPCPRELPAAEAEPQTMTWSEAISSTVTSAPSCTPQGCSTGTSSTSASMTRFTSCRF

SEQ ID NO: 91876 - protein, 62 aa, Homo sapiens
  MOD_RES (1)..(1): Any amino acid
XRKMKVLESLIGMIQKFPYDDPTYDKLHEDLDKIRGKFKQFCSLLNVQPDFKISAEGSGLSF

SEQ ID NO: 91877 - protein, 67 aa, Homo sapiens
MTSALENYINRTVAVITSDGRMIVGTLKGFDQTINLILDESHERVFSSSQGVEQVVLGLYIVRGDNV

SEQ ID NO: 91878 - protein, 165 aa, Homo sapiens
  MOD_RES (1)..(1): Any amino acid
XTIASKPPRDHVFQVNNFEALKTIQNQLREKIFAIEGTQTGSSSSFEHEMSQEGFSAAITSNGPLLSTVGSYDWAGGVFLYTSKEKSTFINMTRVDSDMNDAYLDRRLLRGLPLLRGRGQQRQHRPGPHRGPPLLRADPRGPGVRVPLAQGGQIQSVVTYDLALD

SEQ ID NO: 91879 - protein, 2436 aa, Homo sapiens [sequence omitted]

SEQ ID NO: 91880 - protein, 261 aa, Homo sapiens
EHWNYFGADENLGPVAVSIRREKPDEMKENGSPYNYRIIFRTSELMTLRGSVLEDAIPSTAKHSTARGLPLKEVLEHVVPELNVQCLRLAFNTPKVTEQLMKLDEQGWICLYLYASYYLPSQLNYQQKVGIMYCKAGQSTEEEMYNNESAGPAFEEFLQLLGERVRLKGFEKYRAQLDTKTDSTGTHSLYTTYKDYEIMFHVSTMLPYTPNNKQQLLRKRHIGNDIVTIVFQEPGAQPFSPKNIRSHFQHVFVIVRVHNPC

SEQ ID NO: 91881 - protein, 199 aa, Homo sapiens
MAPPQVLAFGLLLAAATATFAAAQEGEARIGAELWSWAGLGGSGPRPSAPETGIIGRGPRGRAFQRGDRTVRPCSGSGPPRGRKRRGPSRGAASLRSFARLECVCENYKLAVNCFVNNNRQCQCTSVGAQNTVICSKLAAKCLVMKAEMNGSKLGRRAKPEGALQNNDGLYDPDCDESGLFKAKQCNGTSMCWCVNTAG

SEQ ID NO: 91882 - protein, 210 aa, Homo sapiens
MVPWVRTMGQKLKQRLRLDVGREICRQYPLFCFLLLCLSAASLLLNRYIHILMIFWSFVAGVVTFYCSLGPDSLLPNIFFTIKYKPKQLGLQELFPQGHSCAVCGKVKCKRHRPSLLLENYQPWLDLKISSKVDASLSEVLELVLENFVYPWYRDVTDDESFVDELRITLRFFASVLIRRIHKTEFCSVAQAGVQWHDLSSLQPPPPRFK

SEQ ID NO: 91883 - protein, 114 aa, Homo sapiens
MFSINPLENLKVYISSRPPLVVFMISVSAMAIAFLTLGYFFKIKEIKSPEMAEDWNTFLLRFNDLDLCVSENETLKHLTNDTTTPESTMTSGQARASTQSPQALEDSGPVNISV

SEQ ID NO: 91884 - protein, 103 aa, Homo sapiens
  MOD_RES (1)..(1): Any amino acid
XERNLVNSLFPVNRSKHRLYSDLQTPGRYGRVIVTSFQKANMLDQHHTDLILKVMDYMGLLKCYPPGGKLEKTNMLKRELQQSMQTPCSPFLSPLPCTWSPLA

SEQ ID NO: 91885 - protein, 111 aa, Homo sapiens
IAEDSDRKYEEVARKLVILEGELERSEERAEVAESKCGDLEEELKIVTNNLKSLEAQADKYSTKEDKYEEEIKLLEEKLKEAETRAEFAERSVAKLEKTIDDLEGKRSLYK

SEQ ID NO: 91886 - protein, 65 aa, Homo sapiens
MMPSCNRSCSCSRGPSVEDGKWYGVRSYLHLFYEDCAGTALSDDPEGPPVLCPRRPWPSLCWKMR

SEQ ID NO: 91887 - protein, 26 aa, Homo sapiens
MANMNSDSRHLGTSEVDHERDPGPMN

SEQ ID NO: 91888 - protein, 67 aa, Homo sapiens
MFSTVTHKGPDRAIIPEMEWTSQALLTVDIVDSGNLVEITVFGRPRVQNRVKSMLLCLAWFHREHRA

SEQ ID NO: 91889 - protein, 49 aa, Homo sapiens
  MOD_RES (1)..(1): Any amino acid
XMYLLSWLSLFIQVAFITLAVAAGLYYLAELIEEYTVATSRIIKYMIWS

SEQ ID NO: 91890 - protein, 74 aa, Homo sapiens
ESMMVRLSVSKREKGRRKRANVMSSQLHSLTHFSDISALTGGTVHLDEDQNPIKKRKKIPQKGRKKKALECLCY

SEQ ID NO: 91891 - protein, 44 aa, Homo sapiens
MKLVRFLMKLSHETVTIELKNGTQVHGTITVYLWIHYLWMLNLR

SEQ ID NO: 91892 - protein, 153 aa, Homo sapiens
MPSSVTALGQARSSGPGMAPSACCCSPAALQRRLPILAWLPSYSLQWLKMDFVAGLSVGLTAIPQALAYAEVAGLPPQYGLYSAFMGCFVYFFLGTSRDVTLGPTAIMSLLVSFYTFHEPAYAVLLAFLSGCIQLAMGVLRLGFLLDFISYPV

SEQ ID NO: 91893 - protein, 316 aa, Homo sapiens
MQKPKTVAWENLGPEMSALGTAFSREGGRKVEFPTDPKVVVYEKPFFEGKCVELETGMCSFVMEGGETEEATGDDHLPFTSVGSMKVLRGIWVAYEKPGFTGHQYLLEEGEYRDWKAWGGYNGELQSLRPILGDFSNAHMIMYSEKNFGSKGSSIDVLGIVANLKETGYGVKTQSINVLSGVWVAYENPDFTGEQYILDKGFYTSFEDWGGKNCKISSVQPICLDSFTGPRRRNQIHLFSEPQFQGHSQSFEETTSQIDDSFSTKSCRVSGGSWVVYDGENFTGNQYVLEEGHYPCLSAMGCPPGATFKSLRFIDV

SEQ ID NO: 91894 - protein, 515 aa, Homo sapiens
MKTLETQPLAPDCCPSDQDPAPAHPSPHASPMNKNADSELMPPPPERGDPPRLSPDPVAGSAVSQELREGDPVSLSTPLETEFGSPSELSPRIEEQELSENTSLPAEEANGSLSEEEANGPELGSGKAMEDTSGEPAAEDEGDTAPDGSCILTNSADNILRIYNLPPELYHEGEQVEYAEMVPVLRMVEGDTIYDYCWYSLMSSAQPDTSYVASSSRENPIHIWDAFTGELRASFRAYNHLDELTAAHSLCFSPDGSQLFCGFNRTVRVFSTARPGRDCEVRATFAKKQGQSGIISCIAFSPAQPLYACGSYGRSLGLYAWDDGSPLALLGGHQGGITHLCFHPDGNRFFSGARKDAELLCWDLRQSGYPLWSLGREVTTNQRIYFDLDPTGQFLVSGSTSGAVSVWDTDGPGNDGKPEPVLSFLPQKDCTNGVSLHPSLPLLATASGQRVFPEPTESGDEGEELGLPLLSTRHVHLECRLQLWWCGGAPDSSIPDDHQGEKGQGGTEGGVGELI

SEQ ID NO: 91895 - protein, 134 aa, Homo sapiens
MAPRKGKEKKEEQVISLGPQVAEGENVFGVCHIFASFNDTFVHVTDLSGKETICRVTGGMKVKADRDESSPYAAMLAAQDVAQRCKELGITALHIKLRATGGNRTKTPGPGAQSALRALARSGMKIGRIEKTVG

SEQ ID NO: 91896 - protein, 187 aa, Homo sapiens
MRALVLLLSLFLLGGQAQHVSDWTYSEGALDEAHWPQHYPACGGQRQSPINLQRTKISLPSTMRMTVADGTVYIAQQMHFHWGGASSEISGSEHTVDGIRHVIEIHIVHYNSKYKSYDIAQDAPDGLAVLAAFVEVKNYPENTYYSNFISHLANIKYPGQRTTLTGLDVQDMLPRNLQHYYTYHGSL

SEQ ID NO: 91897 - protein, 289 aa, Homo sapiens
MEEHELPVDMETINLDRDAEDVDLNHYRIGKIEGFEVLKKVKTLCLRQNLIKCIENLEELQSLRELDLYDNQIKKIENLEALTELEILDISFNLLRNIEGVDKLTRLKKLFLVNNKISKIENLSNLHQLQMLELGSNRIRAIENIDTLTNLESLFLGKNKITKLQNLDALTNLTVLSMQSNRLTKIEGLQNLVNLRELYLSHNGIEVIEGLENNNKLTMLDIASNRIKKIENISHLTELQEFWMNDNLLESWSDLDELKGARSLETVYLERNPLQKDPQYRRKVMLALP

SEQ ID NO: 91898 - protein, 93 aa, Homo sapiens
MVYISNGQVLDSRSQSPWRLSLITDFFWGIAEFVVLFFKTLLQQDVKKRRSYGNSSDSRYDDGRGPPGNPPRRMGRINHLRGPSPPPMAGGGR

SEQ ID NO: 91899 - protein, 86 aa, Homo sapiens
MASQKRPSQRHGSKYLATASTMDHARHGFLPRHRDTGILDSIGRFFGGDRGAPKRGSGKDSHHPARTAHYGSLPQKSHGRTQDENP

SEQ ID NO: 91900 - protein, 50 aa, Homo sapiens
MAAGFGRCCRVLRSISRFHWRSQHTKANRQREPGLGFSFGLLCNRTWSRL

SEQ ID NO: 91901 - protein, 945 aa, Homo sapiens
MVPWVRTMGQKLKQRLRLDVGREICRQYPLFCFLLLCLSAASLLLNRYIHILMIFWSFVAGVVTFYCSLGPDSLLPNIFFTIKYKPKQLGLQELFPQGHSCAVCGKVKCKRHRPSLLLENYQPWLDLKISSKVDASLSEVLELVLENFVYPWYRDVTDDESFVDELRITLRFFASVLIRRIHKVDIPSIITKKLLKAAMKHIEVIVKARQKVKNTEFLQQAALEEYGPELHVALRSRRDELHYLRKLTELLFPYILPPKATDCRSLTLLIREILSGSVFLPSLDFLADPDTVNHLLIIFIDDSPPEKATEPASPLVPFLQKFAEPRNKKPSVLKLELKQIREQQDLLFRFMNFLKQEGAVHVLQFCLTVEEFNDRILRPELSNDEMLSLHEELQKIYKTYCLDESIDKIRFDPFIVEEIQRIAEGPYIDVVKLQTMRCLFEAYEHVLSLLENVFTPMFCHSDEYFRQLLRGAESPTRNSKLNRGSLSLDDFRNTQKRGESFGISRIGSKIKGVFKSTTMEGAMLPNYGVAEGEDDFIEEGIVVMEDDSPVEAVSTPNTPRNLAAWKISIPYVDFFEDPSSERKEKKERIPVFCIDVERNDRRAVGHEPEHWSVYRRYLEFYVLESKLTEFHGAFPDAQLPSKRIIGPKNYEFLKSKREEFQEYLQKLLQHPELSNSQLLADFLSPNGGETQFLDKILPDVNLGKIIKSVPGKLMKEKGQHLEPFIMNFINSCESPKPKPSRPELTILSPTSENNKKLFNDLFKNNANRAENTERKQNQNYFMEVMTVEGVYDYLMYVGRVVFQVPDWLHHLLMGTRILFKNTLEMYTDYYLQCKLEQLFQEHRLVSLITLLRDAIFCENTEPRSLQDKQKGAKQTFEEMMNYIPDLLVKCIGEETKYESIRLLFDGLQQPVLNKQLTYVLLDIVIQELFPELNKKKLSRFGGKCL

SEQ ID NO: 91902 - protein, 41 aa, Homo sapiens
MNKNQLRNGLRQSVVQSGMLEAGVDRIISQVVDPKLNHIFR

SEQ ID NO: 91903 - protein, 93 aa, Homo sapiens
MLAPGSSPGQRGRLALQWRQVSWITCWIALYAVEALPTCPFSCKCDSRSLEVDCSGLGLTTVPPDVPAATRTLLLLNNKLSALPSWAFANLSS

SEQ ID NO: 91904 - protein, 265 aa, Homo sapiens
MTDQAFVTLTTNDAYAKGALVLGSSLKQHRTTRRLVVLATPQVSDSMRKVLETVFDEVIMVDVLDSGDSAHLTLMKRPELGVTLTKLHCWSLTQYSKCVFMDADTLVLANIDDLFDREELSAAPDPGWPDCFNSGVFVYQPSVETYNQLLHLASEQGGDQGILNTFFSSWATTDIRKHLPFIYNLSSISIYSYLPAFKVFGASAKVVHFLGRVKPWNYTYDPKTKSVKSEAHDPNMTHPEFLILWWNIFTTNVLPLLQQFGLVKD

SEQ ID NO: 91905 - protein, 86 aa, Homo sapiens
VNITDDCQKPQLHNPSRLRTRLLTPQGPFSQAVLDIFTSRFTSAQSFNFTRGLCLHKDYVAGREFVAWKGLEDDREVLPGPRNPLP

SEQ ID NO: 91906 - protein, 424 aa, Homo sapiens
MPKNKKRNTPHRGSSAGGGGSGAAAATAATAGGQHRNVQPFSDEDASIETMSHCSGYSDPSSFAEDGPEVLDEEGTQEDLEYKLKGLIDLTLDKSAKTRQAALEGIKNALASKMLYEFILERRMTLTDSIERCLKKGKSDEQRAAAALASVLCIQLGPGIESEEILKTLGPILKKIICDGSASMQARQTCATCFGVCCFIATDDITELYSTLECLENIFTKSYLKEKDTTVICSTPNTVLHISSLLAWTLLLTICPINEVKKKLEMHFHKLPSLLSCDDVNMRIAAGESLALLFELARGIESDFFYEDMESLTQMLRALATDGNKHRAKVDKRKQRSVFRDVLRAVEERDFPTETIKFGPERMYIDCWVKKHTYDTFKEVLGSGMQYHLQSNEFLRNVFELGPPVMLDAATLKTMKISRFERGQ

SEQ ID NO: 91907 - protein, 197 aa, Homo sapiens
VTRRQPGQKGGCCSFGRGSGSNLENAPGASGKVLLKEKDGAESLETVHKEAESQAQELVNDWLDTKLKQELASEEEGDAKNTVSSVTIMPEANGHLKYDKFDDLCGYLEEEEESTTVQKFIDHLLHKNVVDSAMMEDLGRKENQDKKQQKDPRLTMEMRHKQVKENRLRREKELEYQRIEKTLKKSAFLEAQCLVQE

SEQ ID NO: 91908 - protein, 111 aa, Homo sapiens
MFDFLDCVADLKGKEVKRAALNELVECVGSTRGVLIEPVYPDIIRMISVNIFRTLPPSENPEFDPEEDEPNLEPSWPHLQLVYEFFLRFLESPDFQPSVAKRYVDQKFVLM

SEQ ID NO: 91909 - protein, 636 aa, Homo sapiens
MGDILAHESELLGLVKEYLDFAEFEDTLKTFSKECKIKGKPLCKTVGGSFRDSKSLTIQKDLVAAFDNGDQKVFFDLWEEHISSSIRDGDSFAQKLEFYLHIHFAIYLLKYSVGRPDKEELDEKISYFKTYLETKGAALSQTTEFLPFYALPFVPNPMVHPSFKELFQDSWTPELKLKLIKFLALISKASNTPKLLTIYKENGQSNKEILQQLHQQLVEAERRSVTYLKRYNKIQADYHNLIGVTAELVDSLEATVSGKMITPEYLQSVCVRLFSNQMRQSLAHSVDFTRPGTASTMLRASLAPVKLKDVPLLPSLDYEKLKKDLILGSDRLKAFLLQALRWRLTTSHPGEQRETVLQAYISNDLLDCYSHNQRSVLQLLHSTSDVVRQYMARLINAFASLAEGRLYLAQNTKVLQMLEGRLKEEDKDIITRENVLGALQKFSLRRPLQTAMIQDGLIFWLVDVLKDPDCLSDYTLEYSVALLMNLCLRSTGKNMCAKVAGLVLKVLSDLLGHENHEIQPYVNGALYSILSVPSIREEARAMGMEDILRCFIKEGNAEMIRQIEFIIKQLNSEELPDGVLESDDDEDEDDEEDHDIMEADLDKDELIQPQLGELSGEKLLTTEYLGPFFLFPSTRS

SEQ ID NO: 91910 - protein, 417 aa, Homo sapiens
MGGVGEPGPREGPAQPGAPLPTFCWEQIRAHDQPGDKWLVIERRVYDISRWAQRHPGGSRLIGHHGAEDATDAFRAFHQDLNFVRKFLQPLLIGELAPEEPSQDGPLNAQLVEDFRALHQAAEDMKLFDASPTFFAFLLGHILAMEAQSWCLQHDLGHASIFKKSWWNHVAQKFVMGQLKGFSAHWWNFRHFQHHAKPNIFHKDPDVTVAPVFLLGESSVEYGKKKRRYLPYNQQHLYFFLIGPPLLTLVNFEVENLAYMLVCMQWADLLWAASFYARFFLSYLPFYGVPGVLLFFVAVRVLESHWFVWITQMNHIPKEIGHEKHRDWVSSQLAATCNVEPSLFTNWFSGHLNFQIEHHLFPRMPRHNYSRVAPLVKSLCAKHGLSYEVKPFLTALVDIVRSLKKSGDIWLDAYLHQ

SEQ ID NO: 91911 - protein, 77 aa, Homo sapiens
MKGGEGDAGEQAPLNPEGESPAGSATYREFVHRGYLDLMGASQHSLRALSWRRLYLSRAKLKASSRTSALLSGFAMR

SEQ ID NO: 91912 - protein, 378 aa, Homo sapiens
MKENKENSSPSVTSANLDHTKPCWYWDKKDLAHTPSQLEGLDPATEARYRREGARFIFDVGTRLGLHYDTLATGIIYFHRFYMFHSFKQFPRYVTGACCLFLAGKVEETPKKCKDIIKTARSLLNDVQFGQFGDDPKEEVMVLERILLQTIKFDLQVEHPYQFLLKYAKQLKGDKNKIQKLVQMAWTFVNDSLCTTLSLQWEPEIIAVAVMYLAGRLCKFEIQEWTSKPMYRRWWEQFVQDVPVDVLEDICHQILDLYSQGKQQMPHHTPHQLQQPPSLQPTPQVPQVQQSQPSQSSEPSQPQQKDPQQPAQQQQPAQQPKKPSPQPSSPRQVKRAVVVSPKEENKAAEPPPPKIPKIETTHPPLPPAHPPPASTHPP

SEQ ID NO: 91913 - protein, 125 aa, Homo sapiens
MENQLWHNTVRCCNQYQESPHDAEDILLLLLGLIVLVNIGINVATMMWHGLQNALDKMIDWATQKRGPGFLPGGGGQPALPVSQVPTSRLGRVLSESGPALQCGAVGPPGWYPGQSATTLSLPVT

SEQ ID NO: 91914 - protein, 137 aa, Homo sapiens
MFKMAKNWSAAGNAFCQAAQLHLQLQSKHDAATCFVDAGNAFKKADPQEAINCLMRAIEIYTDMGRFTIAAKHHISIAEIYETELVDIEKAIAHYEQSADYYKGEESNSSANKCLLKVAGYAALLEQYQKAIDIYEQ

SEQ ID NO: 91915 - protein, 492 aa, Homo sapiens
MEALLEGIQNRGHGGGFLTSCEAELQELMKQIDIMVAHKKSEWEGRTHALETCLKIREQELKSLRSQLDVTHKEVGMLHQQVEEHEKIKQEMTMEYKQELKKLHEELCILKRSYEKLQKKQMREFRGNTKNHREDRSEIERLTAKIEEFRQKSLDWEKQRLIYQQQVSSLEAQRKALAEQSEIIQAQLVNRKQKLESVELSSQSEIQHLSSKLERANDTICANELEIERLTMRVNDLVGTSMTVLQEQQQKEEKLRESEKLLEALQEEKRELKAALQSQENLIHEARIQKEKLQEKVKATNTQHAVEAIRPREESLAEKKYTSQGQGDLDSVLSQLNFTHTSEDLLQAEVTCLEGSLESVSATCKQLSQELMEKYEELKRMEAHNNEYKAEIKKLKEQILQGEQSYSSALEGMKMEISHLTQELHQRDITIASTKGSSSDMEKRLRAEMQKAEDKAVEHKEILDQLESLKLENRHLSEMVMKLELGLHEVHK

SEQ ID NO: 91916 - protein, 451 aa, Homo sapiens
MDGEPPQQRVTGTLVLAVFSAVLGSLQFGYNIGVINAPQKVIEQSYNETWLGRQGPEGPSSIPPGTLTTLWALSVAIFSVGGMISSFLIGIISQWLGRKRAMLVNNVLAVLGGSLMGLANAAASYEMLILGRFLIGAYSGLTSGLVPMYVGEIAPTHLRGALGTLNQLAIVIGILIAQVLGLESLLGTASLWPLLLGLTVLPALLQLVLLPFCPESPRYLYIIQNLEGPARKSLKRLTGWADVSGVLAELKDEKRKLERERPLSLLQLLGSRTHRQPLIIAVVLQLSQQLSGINAVFYYSTSIFETAGVGQPAYATIGAGVVNTVFTLVSVLLVERAGRRTLHLLGLAGMCGCAILMTVALLLLERVPAMSYVSIVAIFGFVAFFEIGPGPIPWFIVAELFSQGPRPAAMAVAGFSNWTSNFIIGMGFQYVAVGPPAPASHTVGQRWASHS

SEQ ID NO: 91917 - protein, 280 aa, Homo sapiens
EEKSTKDVSEKEDKDKNKEKIPRKMLSRDSSQEYTDSTGIDLHEFLVNTLKKNPRDRMMLLKLEQEILEFINDNNNQFKKFPQMTSYHRMLLHRVAAYFGMDHNVDQTGKAVIINKTSNTRIPEQRFSEHIKDEKNTEFQQRFILKRDDASMDRDDNQTGQNGYLNDIRGNREGLSRTSSSRQSSTDSELKSLEPRPWSSTDSDGSVRSMRPPVTKASSFSGISILTRGDSIGSSKGGSAGRISRPGMALGAPEVCNQVTSSQSVRGLLPCTAQQQQQQQ

SEQ ID NO: 91918 - protein, 249 aa, Homo sapiens
MSVSVLSPSRLLGDVSGILQAASLLILLLLLIKAVQLYLHRQWLLKALQQFPCPPSHWLFGHIQELQQDQELQRIQKWVETFPSACPHWLWGGKVRVQLYDPDYMKVILGRSDPKSHGSYRFLAPWIGYGLLLLNGQTWFQHRRMLTPAFHYDILKPYVGLMADSVRVMLDKWEELLGQDSPLEVFQHVSLMTLDTIMKCAFSHQGSIQVDRPSDPTEEGSTTEGGGAGEDQEEEAFGFSGYPPLGQSV

SEQ ID NO: 91919 - protein, 79 aa, Homo sapiens
MKAQGETEESEKLSKMSSLLERLHAKFNQNRPWSETIKLVRQVMFCRFRNLILLVHQDFIEFSWLGVVVHICNPSTLGG

SEQ ID NO: 91920 - protein, 58 aa, Homo sapiens
MYASLGSGPVAPLPASVPPSVLGSWSTGGSRSCVRQETKSPGGARTSGHWASVWQVQG

SEQ ID NO: 91921 - protein, 141 aa, Homo sapiens
  MOD_RES (1)..(1): Any amino acid
XNYKMSAFKEIKRDPGRYLHSCPESVKKWLRQLKNAGKILLLITSSHSDYCRLLCEYILGNDFTDLFDIVITNALKPGFFSHLPSQRPFRTLENDEEQEALPSLDKPGWYSQGNAVHLYELLKKMTGKPEPKKIFTRISVS

SEQ ID NO: 91922 - protein, 170 aa, Homo sapiens
MALPPGPAALRHTLLLLPALLSSGGPGTPRLAWYLDGQLQEASTSRLLSVGGEAFSGGTSTFTVTAHRAQHELNCSLQDPRSGRSANASVILNVQFKPEIAQVGAKYQEAQGPGLLVVLFALVRANPPANVTWIDQDGPVTVNTSDFLVLDAQNYPWLTNHTVQLQLRSL

SEQ ID NO: 91923 - protein, 69 aa, Homo sapiens
  MOD_RES (1)..(1): Any amino acid
XGGRRRERPAAATARDGRGEAMEGDLQRERLSSPSTWESGTLWTTSTSWTLWMVWSWWILSISKSGESM

SEQ ID NO: 91924 - protein, 153 aa, Homo sapiens
MSWKRNYFSGGRGSVQGMFAPRSSTSIAPSKGLSNEPGQNSCFLNSALQVLWHLDIFRRSFRQLTTHKCMGDSCIFCALKGIFNQFQCSSEKVLPSDTLRSALAKTFQDEQRFQLGIMDDAAECFENLLMRIHFHIADETKEDICTAQHCISH

SEQ ID NO: 91925 - protein, 107 aa, Homo sapiens
MAQKGVLGPGQLGAVAILLYLGLLRSGTAPCGVAPQARITGGSSAVAGQWPWQVSITYEGVHVCGGSLVSEQWVLSAAHCFPSEHHKEAYEVKLGAHQLDSYSEDAK

SEQ ID NO: 91926 - protein, 158 aa, Homo sapiens
MSYVVTKTKAINGKYHRFLGRHFPRFYVLYTIFMKVPPRRHQVSFPRYYFHSTFCQLPGLLANRGTHPAIHDILALRECFSNHPLGMNQLQALHVKALSRAMLLTSYLPPPLLRHRLKTHTTVIHQLDKALAKLGIGQLTAQEVKSACYLRGLNSTHI

SEQ ID NO: 91927 - protein, 60 aa, Homo sapiens
MRRNSSLSFQMERPLEEQVQSKWSSSQGRTGTGGSDVLQIYGYKCTCVTWIYFIVAKSGF

SEQ ID NO: 91928 - protein, 100 aa, Homo sapiens
MDYDSYQHYFYDYDCGEDFYRSTAPSEDIWKKFELVPSPPTSPPWGLGPGAGDPAPGIGPPEPWPGGCTGDEAESRGHSKGWGRNYASIIRRDCMWSGFS

SEQ ID NO: 91929 - protein, 25 aa, Homo sapiens
IMLDCGLDMTSTLNFLPLPLVQRRS

SEQ ID NO: 91930 - protein, 86 aa, Homo sapiens
VNATPQQMPQTEKAVEDFLRSIGRSKKERRPVRPHTVEKPVPSSSGGDAHVPHGSQVIRKLVMYTLRHHVKIGGLHVSFTVRNCVE

SEQ ID NO: 91931 - protein, 266 aa, Homo sapiens
KLKPVDYEYREEVHWATHQLRLGRGSFGEVHRMEDKQTGFQCAVKKVRLEVFRAEELMACAGLTSPRIVPLYGAVREGPWVNIFMELLEGGSLGQLVKEQGCLPEDRALYYLGQALEGLEYLHSRRILHGDVKADNVLLSSDGSHAALCDFGHAVCLQPDGLGKSLLTGDYIPGTETHMAPEVVLGRSCDAKVDVWSSCCMMLHMLNGCHPWTQFFRGPLCLKVGDGTQHGQQGELQGPGAQAAGWRGCSAVADGARGGLVIHVGS

SEQ ID NO: 91932 - protein, 236 aa, Homo sapiens
  MOD_RES (1)..(1): Any amino acid
XMTMLTVIEQPVPPTPATPEDPAPLWGPPPAQGSPGDGGLQGLPGAIESVRVPLLPRNDQVGAWGLPGPTGPKGDAGSRGPMGMRGPPGPQGPPGSPGRAGAVGTPGERGPPGPPGPPGPPGPPAPVGPPHARISQHGDPLLSNTFTETNNHWPQGPTGPPGPPGPMGPPGPPGPTGVPGSPGHIGPPGPTGPKGISGHPGEKGERGLRGEPGPQGSAGQRGEPGPKGDPGEKSHW

SEQ ID NO: 91933 - protein, 164 aa, Homo sapiens
MENEPDHENVEQSLCAKTSEEELNKSFNLEASLSKFSYIDMDKELEFKNDLIDDKEFDIPQVDTPPTLESILNETDDEDESFILEDPTLLNIDTIDSHSYDTSSVASSDSGDRTNLKRKKKLPDSFSLHGSVMRHSLLKGISAQIVSAADKVDAGLPTAIVSIL

SEQ ID NO: 91934 - protein, 209 aa, Homo sapiens
YKLKSVAHLPWRMLTYKALNTFIDDLFAFVIKMPVMYRIGCLRDGPPGCGRASPTSHCLPPLSRCGFLHLPLPTVDLPRRPHPSQRVWHEWRRPHSCRPRGRGSHSSRGPHAHTCTHHDHRHQGGGLHVPAHQAHPGGQLCQRAPGSPSKASRGQEKGLVETGPHLLRLLATTTPASRPPRLPSLSPFPWTDQAGAVGGPPQVRAQRVM

SEQ ID NO: 91935 - protein, 264 aa, Homo sapiens
  MOD_RES (1)..(1): Any amino acid
XTPPPSPEDLAELWGHGVSEAAADVGLTRASPAARNPVLRRPPILEDYVHVTSTEGVRAYLVLRADPMAPGVQLTHLDGFIPLAPLSSLPPLTGQLTGGSLLHVPWRGGGQLDLLGVSLASLKKQVDGERRERLLQEAQKLSDTLHSLRSGEEEAAQPLGAPEEEPTDGQDASSHCLWVDEFAPRHYTELLSDDFTNRCLLKWLKLWDLVVFGHERPSRKPRPSVEPARVSKEATAPGKWKSHEQVLEEMLEAGLDPSQRPKQK

SEQ ID NO: 91936 - protein, 662 aa, Homo sapiens
MKPLEKFLKKQTSQLAGRTVAGGPGGGLGSCGGPGGGGGPGGGGGPAGGQRSLQRRQSVSRLLLPAFLREPPAEPGLEPPPEEEGGEPAGVAEEPGSGGPCWLQLEEVPGPGPLGGGGPLRSPSSYSSDELSPGEPLTSPPWAPLGAPERPEHLLNRVLERLAGGATRDSAASDILLDDIVLTHSLFLPTEKFLQELHQYFVRAGGMEGPEGLGRKQACLAMLLHFLDTYQGLLQEEEGAGHIIKDLYLLIMKDESLYQGLREDTLRLHQLVETVELKIPEENQPPSKQVKPLFRHFRRIDSCLQTRVAFRGSDEIFCRVYMPDHSYVTIRSRLSASVQDILGSVTEKLQYSEEPAGREDSLILVAVSSSGEKVLLQPTEDCVFTALGINSHLFACTRDSYEALVPLPEEIQVSPGDTEIHRVEPEDVANHLTAFHWELFRCVHELEFVDYVFHGERGRRETANLELLLQRCSEVTHWVATEVLLCEAPGKRAQLLKKFIKIAALCKQNQDLLSFYAVVMGLDNAAVSRLRLTWEKLPGKFKNLFRKFENLTDPCRNHKSYREVISKMKPPVIPFVPLILKDLTFLHEGSKTLVDGLVNIEKLHSVAEKVRTIRKYRSRPLCLDMEASPNHLQTKAYVRQFQVIDNQNLLFELSYKLEANSQ

SEQ ID NO: 91937 - protein, 965 aa, Homo sapiens
MIIPSLDGALFQWDQDRESMETVPFTVESLLESSYKFGDDVVLVGGKSLTTYGLSAYSGKVRYICSALGCRQWDSDEMEQEEDILLLQRTQKTVRAVGPRSGNEKWNFSVGHFELRYIPDMETRAGFIESTFKPNENTEESKIISDVEEQEAAIMDIVIKVSVADWKVMAFSKKGGHLEWEYQFCTPIASAWLLKDGKVIPISLFDDTSYTSNDDVLEDEEDIVEAARGATENSVYLGMYRGQLYLQSSVRISEKFPSSPKALESVTNENAIIPLPTIKWKPLIHSPSRTPVLVGSDEFDKCLSNDKFSHEEYSNGALSILQYPYDNGYYLPYYKRERNKRSTQITVRFLDNPHYNKNIRKKDPVLLLHWWKEIVATILFCIIATTFIVRRLFHPHPHRQRKESETQCQTENKYDSVSGEANDSSWNDIKNSGYISRYLTDFEPIQCLGRGGFGVVFEAKNKVDDCNYAIKRIRLPNRELAREKVMREVKALAKLEHPGIVRYFNAWLEAPPEKWQEKMDEIWLKDESTDWPLSSPSPMDAPSVKIRRMDPFATKEHIEIIAPSPQRSRSFSVGISCDQTSSSESQFSPLEFSGMDHEDISESVDAAYNLQDSCLTDCDVEDGTMDGNDEGHSFELCPSEASPYVRSRERTSSSIVFEDSGCDNASSKEEPKTNRLHIGNHCANKLTAFKPTSSKSSSEATLSISPPRPTTLSLDLTKNTTEKLQPSSPKVYLYIQMQLCRKENLKDWMNGRCTIEERERSVCLHIFLQIAEAVEFLHSKGLMHRDLKPSNIFFTMDDVVKVGDFGLVTAMDQDEEEQTVLTPMPAYARHTGQVGTKLYMSPEQIHGNSYSHKVDIFSLGLILFELLYPFSTQMERVRTLTDVRNLKFPPLFTQKYPCEYVMVQDMLSPSPMERPEAINIIENAVFEDLDFPGKTVLRQRSRSLSSSGTKHSRQSNNSHSPLPSN

SEQ ID NO: 91938 - protein, 133 aa, Homo sapiens
MGMCSRQERIQKDIDVVIQKSRAEKDCLFADFRYSDSTFTFTYVGGPRSTFLDWLPSGCEKANQQRPELSASSFTSRRSKRLPTGRISFLLPRPGAIARSQLTATSASQVQVILLPQPSTSWHYRNSELAPGM

SEQ ID NO: 91939 - protein, 45 aa, Homo sapiens
  MOD_RES (1)..(1): Any amino acid
XSFRSRRGPGVPSPQPDVTMLSRLLKEHQAKQNERKELQVWPRPT

SEQ ID NO: 91940 - protein, 45 aa, Homo sapiens
MNRGVPFRHLLLVLQLALLPAATQGKKVVLGKKGDTVELTCTASQ

SEQ ID NO: 91941 - protein, 81 aa, Homo sapiens
MASALSYVSKFKSFVILFVTPLLLLPLVILMPAKFVRCAYVIILMAIYWCTEVIPLAVTSLMPVLLFPLFQILDSRCVSST

SEQ ID NO: 91942 - protein, 89 aa, Homo sapiens
MFKGKRGAQLAKDIARRSKTFNPGAGLPTDKKKGGPSPGDVEAIKNAIANASTLAEVERLKGLLQSGQIPGRERRSGPTDDGEEEMEED

SEQ ID NO: 91943 - protein, 22 aa, Homo sapiens
MAAQKINEGLEHLAKAEKYCCF

SEQ ID NO: 91944 - protein, 372 aa, Homo sapiens
MRVMAPRTLILLLSGALALTETWACSHSMRYFYTAVSRPGRGEPRFIAVGYVDDTQFVRFDSDAASPRGEPRAPWVEQEGPEYWDRETQKYKRQAQTDRVSLRNLRGYYNQSEAGSHTLQWMYGCDLGPDGRLLRGYDQSAYDGKDYIALNEDLRSWTAADTAAQITQRKWEAARAAEQQRAYLEGTCVEWLRRYLENGKETLQRAEHPKTHVTHHLVSDHEATLRCWALGFYPAEITLTWQRDGEDQTQDTELVETRPAGDGTFQKWAAVVVPSGEEQRYTCHVQHEGLPEPLTLRWEPSSQPTIPIVGIVAGLAVLAVLAVLGAVVAVVMCRRKSSGHFLPTGGKGGSCSQAASSNSAQGSDESLIACKA

SEQ ID NO: 91945 - protein, 50 aa, Homo sapiens
MERAGATSRGGQAPGFLLRLHTEGRAEAARVQEQDLRQWGLTDLLQVFPV

SEQ ID NO: 91946 - protein, 321 aa, Homo sapiens
MRCYVNIPHPTSGTISSASFHPQQFQYTLDNNVLTLEQRKFYEENGFLVIKNLVPDADIQRFRNEFEKICRKEVKPLGLTVMRDVTISKSEYAPSEKMITKVQDFQEDKELFRYCTLPEILKYVECFTGPNIMAMHTMLINKPPDSGNCKKTSRHPLHQDLHYFPFRPSDLIVCAWTAMEHISRNNGCLVVLPGTHKGSLKPHDYPKWEGGVNKMFHGIQDYEENKARVHLVMEKGDTVFFHPLLIHGSGQNKTQGFRKAISCHFASADCHYIDVKGTSQENIEKEVVGIAHKFFGAENSVNLKDIWMFRARLVKGERTNL

SEQ ID NO: 91947 - protein, 379 aa, Homo sapiens
MLRFLGEKAAAKRQVLNADSVEQSFVGLKQLISCRNWRAAVDLCGRLLTAHGQGYGKSGLLTSHTTDSLQLWFVRLALLVKLGLFQNAEMEFEPFGNLDQPDLYYEYYPHVYPGRRGSMVPFSMRILHAELQQYLGNPQESLDRLHKVKTVCSKILANLEQGLAEDGGMSSVTQEGRQASIRLWRSRLGRVMYSMANCLLLMKDYVLAVEAYHSVIKYYPEQEPQLLSGIGRISLQIGDIKTAEKYFQDVEKVTQKLDGLQGKIMVLMNSAFLHLGQNNFAEAHRFFTEILRMDPRNAVANNNAAVCLLYLGKLKDSLRQLEAMVQQDPRHYLHESVLFNLTTMYELESSRSMQKKQALLEAVAGKEGDSFNTQCLKLA

SEQ ID NO: 91948 - protein, 216 aa, Homo sapiens
  MOD_RES (1)..(1): Any amino acid
XPLLKSAMVKFYNVRGEHIFTLDTLVQRPIISICWGHRDSRLLMASGPALYVVRVEHRVSSLQLLCQQAIASTLREDKDVSKLTLPPRLCSYLSTAFIPTIKPPIPDPNNMRDFVSYPSAGNERLHCTMKRTEDDPEVGGPCYTLYLEYLGGLVPILKGRRISKLRPEFVIMDPRTDSKPGSALRPASHPSCPGLLRSSPGPHGCPCASPLWARPA

SEQ ID NO: 91949 - protein, 96 aa, Homo sapiens
MSGDYEDDLCRRALILVSDLCARVRDADTNDRCQEFNDRIRGYPRGPDADISVSLLSVIVTFCGIVLLGVSLFVSWKLCWVPWRDKGGSAVGGGPL

SEQ ID NO: 91950 - protein, 88 aa, Homo sapiens
ARLVSREDTDLDLFSMTNGSALSVNREKKNQAHRHSAGSSSCSVKGIPISPIITNTRPSKKERISFRDNPVQLSGGWGSGKKKANISN

SEQ ID NO: 91951 - protein, 113 aa, Homo sapiens
MEAALTLPRRPFLHCSTVIPVVVLTLKFTMHLFKLKDSWCFLPWMLFISWTSHHIRDGIRHGLWICPFGKTSPLPFWLYVIITSSLPHICSFVMYLTGTRQMMSSKHGVRIDV

SEQ ID NO: 91952 - protein, 223 aa, Homo sapiens
MREYGVERDLAVYNQLLNIFPKEVFRPRNIIQRIFVHYPRQQECGIAVLEQMENHGVMPNKETEFLLIQIFGRKSYPMLKLVRLKLWFPRFMNVNPFPVPRDLPQDPVELAMFGLRHMEPDLSARVTIYQVPLPKDSTGAADPPQPHIVGIQSPDQQAALARHNPARPVFVEGPFSLWLRNKCVYYHILRADLLPPEEREVEETPEEWNLYYPMQLDLEYVRS

SEQ ID NO: 91953 - protein, 29 aa, Homo sapiens
  MOD_RES (1)..(1): Any amino acid
XRFDVMVNGKGPRRQFPGGRGRGIGAGAI

SEQ ID NO: 91954 - protein, 147 aa, Homo sapiens
MYKETVYSAFNLLMHYPPPSGAGQHPQPQPPLHKANQPPHGVPQLSLYEHFNSPHPTPAPADISQKQVHRPLQTPDLSGFYSLTSGSMGQLPHTVSWFTHPSLMLGSGVPGHPAAIPHPAIVPPSGKQELQPFDRNLKTQAESKAEK

SEQ ID NO: 91955 - protein, 106 aa, Homo sapiens
MEEKRRKYSISSDNSDTTDSHATSTSASRCSKLPSSTKSGWPRQNEKKPSEVFRTDLITAMKIPDSYQLSPDDYYILADPWRQEWEKGVQVPAGAEAIPEPVVRLE

SEQ ID NO: 91956 - protein, 375 aa, Homo sapiens
  MOD_RES (1)..(1): Any amino acid
XSRERRFRLFASIECEGQLFMTPYDFILAVTTDEPKVAKTWKSLSKQELNQMLAETPPVWKGSSKLFRNLKEKGVISYTEYLFLLCILTKPHAGFRIAFNMFDTDGNEMVDKKEFLVLQEIFRKKNEKREIKGDEEKRAMLVLKTDAEELVSRSYWDTLRRNTSQALFSDLAERADDITSLVTDTTLLVHFFGKKGKAELNFEDFYRFMDNLQTEVLEIEFLSYSNGMNTISEEDFAHILLRYTNVENTSVFLENVRYSIPEEKGITFDEFRSFFQFLNNLEDFAIALNMYNFASRSIGQDEFKRAVYVATGLKFSPHLVNTVFKIFDVDKDDQLSYKEFIGIMKDRLHRGFRGYKTVQKYPTFKSCLKKELHSR

SEQ ID NO: 91957 - protein, 100 aa, Homo sapiens
  MOD_RES (1)..(1): Any amino acid
XEIERLQMEMKEDDVSFLMKHKSRKRRLFCTMEPEPVQPGMLIDVCKYLGSLQYRVWKKMLASVESVPFSFDPNTAAGWLSVSDDLTSVTNHGYRVQEQC

SEQ ID NO: 91958 - protein, 382 aa, Homo sapiens
METCTCGEITIDILFSHWPFYVPKLVENCVCLLRNLSYQVHREIPQAERYQEAAPNVANNTGPHAASCFGAKKGKGKKPIEDPANDTVDFPKRTSPARGYELLFQPEVVRIYISLLKESKTPAILEASAGAIQNLCAGRWTYGRYIRSALRQEKALSAIADLLTNEHERVVKAASGALRNLAVDARNKELIGKHAIPNLVKNLPGGQQNSSWNFSEDTVISILNTINEVIAENLEAAKKLRETQGIEKLVLINKSGNRSEKEVRAAALVLQTIWGYKELRKPLEKEGWKKSDFQVNLNNASRSQSSHSYDDSTLPLIDRNQKSDKKPDREEIQMSNMGSNTKSLDNNYSTPNERGDHNRTLDRSGDLGDMEPLKGTTPLMKI

SEQ ID NO: 91959 - protein, 191 aa, Homo sapiens
MFPPSGHQDVSERRLDTQRPQVTMWERDVSSDRQEPGRRGRSWGLEGSQALSQQAEVIVRQLQELRRLEEEVRLLRETSLQQKMRLEAQAMELEALARAEKAGRAEAEGLRAALAGAEVVRKNLEEGSQRELEEVQRLHQEQLSSLTQAHEEALSSLTSKAEGLEKSLSSLETRRAGEAKELAEAQREAEL

SEQ ID NO: 91960 - protein, 77 aa, Homo sapiens
MDQYVSTAPPRFPIAQLGTFKQDSAGMGRIFKGNLLQKKALTTLSTFEVIQEHSRSRINDTTFLSHGLHTMDFPCSR

SEQ ID NO: 91961 - protein, 158 aa, Homo sapiens
WRLITNFLFFGPVGFNFLFNMIFLYRYCRMLEEGSFRGRTADFVFMFLFGGFLMTQSDRMSKSKELLTQAPFLPWVLMGFSLLLGNSIIVDLLGIAVGHIYFFLEDVFPNQPGGIRILKTPSILKAIFDTPDEDPNYNPLPEERPGGFAWGEGQRLGG

SEQ ID NO: 91962 - protein, 193 aa, Homo sapiens
MPLPWDYPEAPWRRLHSSPPRPCPRALQGGGRRGPNPDPRGSKGLKQTVGALNPNLHLWGICSCQFLLRSKGRDFVHSVQETHSQLLGSWDPWEEPEDAAPVAPSVPASGYPELPTPRREVQSESAQEPGARDVEAQLRRLQEERTCKVCLDRAVSIVFVPCGHLVCAECAPGLQLCPICRAPVRSRVRTFLS

SEQ ID NO: 91963 - protein, 214 aa, Homo sapiens
  MOD_RES (1)..(1): Any amino acid
XCEDAVKKLKAMGRKSVKSVLWVSADGLRVVDDKTKDLLVDQTIEKVSFCAPDRNLDKAFSYICRDGTTRRWICHCFLALKDSGERLSHAVGCAFAACLERKQRREKECGVTAAFDASRTSFAREGSFRLSGGGRPAEREAPDKKKEAAAAPTVAPGPAQPGHVSPTPATTSPGEKGEAGTPVAAGTTAAAIPRRHAPLEQLVRQGSFRGFPAL

SEQ ID NO: 91964 - protein, 51 aa, Homo sapiens
MSSRPGREDVGAAGARRPREPPEQELQRRREQKRRRHDAQQLQQLKHLESL

SEQ ID NO: 91965 - protein, 71 aa, Homo sapiens
MLGLRPPLLALVGLLSLGCGRPRAPTHQPASSLSPLSGVHEVQGQQLPGMHRVGARLHLVPEAELHRAGGS

SEQ ID NO: 91966 - protein, 434 aa, Homo sapiens
  MOD_RES (1)..(1): Any amino acid
XCKADIAFLIDGSFNIGQRRFNLQKNFVGKVALMLGIGTEGPHVGLVQASEHPKIEFYLKNFTSAKDVLFAIKEVGFRGGNSNTDITLEKYLFVMLKRSENQQTYLMNADVAERMSSTTVDSEERLLRGKALKHTAQKFFTVDAGVRKGIPKVVVVFIDGWPSDDIEEAGIVAREFGVNVFIVSVAKPIPEELGMVQDVTFVDKAVCRNNGFFSYHMPNWFGTTKYVKPLVQKLCTHEQMMCSKTCYNSVNIAFLIDGSSSVGDSNFRLMLEFVSNIAKTFEISDIGAKIAAVQFTYDQRTEFSFTDYSTKENVLAVIRNIRYMSGGTATGDAISFTVRNVFGPIRESPNKNFLVIVTDGQSYDDVQGPAAAAHDAGITIFSVGVAWAPLDDLKDMASKPKESHAFFTREFTGLEPIVSDVIRGICRDFLESQQ

SEQ ID NO: 91967 - protein, 94 aa, Homo sapiens
GSTGFISFSGVESALSSLKNFQACINSGMDTASSVALDLVESQTEVSSEYSMDKAMVEFATLDRQLNHYVKAVQSTINHLGVVAHACSSSYLGG

SEQ ID NO: 91968 - protein, 142 aa, Homo sapiens
MALVGLPGPDMFCLFHGKRYSPGESWHPYLEPQGLMYCLRCTCSENLTLPLDSGPHQSPASTTGPCTNTERSSVPMSCSPPACPTSVSSAAAQRARSTAASQPAPNQAAQHPSRCQTPAARPAKMRQVSNRMKRTVCSRSMG

SEQ ID NO: 91969 - protein, 42 aa, Homo sapiens
MEEKQPQKTKEPSKEDEPQQKEMPTHLSLGAESKAEQGKVLL

SEQ ID NO: 91970 - protein, 86 aa, Homo sapiens
  MOD_RES (1)..(1): Any amino acid
XTNLINLLAENGRLSNTQGVVSAFSTMMSVHRGEVPCTVTSASPLEEATLSELKTVLKSFLSQGQVLKLEAKSYFFCRLIRQSWVE

SEQ ID NO: 91971 - protein, 118 aa, Homo sapiens
MPQTRSQAQATISFPKRKLSRALNKAKNSSDAKLEPTNVQTVTCSPRVKALPLSPRKRLGDDNLCNTPHLPPCSPPKQGKKENGPPHSHTLKGRRLVFDNQLTIKSPSKRELAKVHQN

SEQ ID NO: 91972 - protein, 62 aa, Homo sapiens
MKENVASATVFTLLLFLNTCLLNGQLPPGKPEIFKCRSPNKETFTCWWRPGTDGGLPTNYSL

SEQ ID NO: 91973 - protein, 38 aa, Homo sapiens
MVLLRVLILLLSWAAGMGVPTMGKLHSKEKPIKSSSPN

SEQ ID NO: 91974 - protein, 93 aa, Homo sapiens
  MOD_RES (1)..(1): Any amino acid
XKTRKPSPSCSSGGSDNGCEGGEDDGFSPHTTPDAVRKQRESQGSDGLEESGTLLKVTKKKSTLPNPFHLGNLKKDLPEKELEIYNTVKKRKD

SEQ ID NO: 91975 - protein, 123 aa, Homo sapiens
ETTYLKPTFCDNCAGFLWGVIKQGYRCKDIRILLLMLRFTDKGYIKSVSSGLHQVRRMLASLGMLSVLAPEDRTDMCDKKALHEFGCETHWGREKSERLLDPGCLVHRLRDELSQTMQRSGCV

SEQ ID NO: 91976 - protein, 860 aa, Homo sapiens
SEEAEVDVRERETQRDREPKRARDLTLRDSCTDNSMQFGTRTTTAEPGFMGTWQNADTNLLFRMSQQAIRCTLVNCTCECFQPGKINLRTCDQCKHGWVAHALDKLSTQHLYHPTQVEIVQSNVVFDISSLMLYGTQAVPVRLKILLDRLFSVLKQEEVLHILHGLGWTLRDYVRGYILQDAAGKVLDRWAIMSREEEIITLQQFLRFGETKSIVELMAIQEKEGQAVAVPSSKTDSDIRTFIESNNRTRSPSLLAHLENSNPSSIHHFENIPNSLAFLLPFQYINPVSAPLLGLPPNGLLLEQPGLRLREPSLSTQNEYNESSESEVSPTPYKNDQTPNRNALTSITNVEPKTEPACVSPIQNSAPVSDLTKTEHPKSSFRIHRMRRMGSASRKGRVFCNACGKTFYDKGTLKIHYNAVHLKIKHRCTIEGCNMVFSSLRSRNRHSANPNPRLHMPMLRNNRDKDLIRATSGAATPVIASTKSNLALTSPGRPPMGFTTPPLDPVLQNPLPSQLVFSGLKTVQPVPPFYRSLLTPGEMVSPPTSLPTSPIIPTSGTIEQHPPPPSEPVVPAVMMATHEPSADLAPKKKPRKSSMPVKIEKEIIDTADEFDDEDDDPNDGGAVVNDMSHDNHCHSQEEMSPGMSVKDFSKHNRTRCISRTEIRRADSMTSEDQEPERDYENESESSEPKLGEESMEGDEHIHSEVSEKVLMNSERPDENHSEPSHQDVIKVKEEFTDPTYDMFYMSQYGLYNGGGASMAALHESFTSSLNYGSPQKFSPEGDLCSSPDPKICYVCKKSFKSSYSVKLHYRNVHLKEMHVCTVAGCNAAFPSRRSRDRNRNLRMERTIGPGHRDSLHLLPT

SEQ ID NO: 91977 - protein, 149 aa, Homo sapiens
DLQNGKFLDNGGSGYILKPHFLRESKSYFNPSNIKEGMPITLTIRLISGIQLPLTHSSSNKGDSLVIIEVFGVPNDQMKQQTRVIKKNAFSPRWNETFTFIIHVPELALIRFVVEGQGLIAGNEFLGQYTLPLLCMNKASEMCLGNRSS

SEQ ID NO: 91978 - protein, 54 aa, Homo sapiens
MEIPMGTQGCFSKSLLLSASILVLWMLQGSQAALYIQKIPEQPQKNQDLLLSVQ

SEQ ID NO: 91979 - protein, 179 aa, Homo sapiens
MALSRVCWARSAVWGSAVTPGHFVTRRLQLGRSGLAWGAPRSSKLHLSPKADVKNLMSYVVTKTKAINGKYHRFLGRHFPRFYVLYTIFMKVPPRRHQVSFPRYYFHSTFCQLPGLLANIQRGTHPAIHDILALRECFSNHPLGMNQLQALHVKALSRAMLLTSYLPPPLLRHRLKTHT

SEQ ID NO: 91980 - protein, 51 aa, Homo sapiens
MTTSALRRQVKNIVHNYSEAEIKVREATSNDPWGPPSSLMSEIADLTFNTV

SEQ ID NO: 91981 - protein, 96 aa, Homo sapiens
  MOD_RES (1)..(1): Any amino acid
XFAGKCCEIDTRATCYEDQGISYRGTWSTAESGAECTNWNSSALAQKPYSGRRPDAIRLGLGNHNYCRTPVPRHWAWANIITAGILMGMPSPGATC

SEQ ID NO: 91982 - protein, 57 aa, Homo sapiens
DNSLSVRKGFCEAPGNRTQSGNHPEDWPVYQELLGMVLSICLCRHVHSEDYSKVPKY

SEQ ID NO: 91983 - protein, 91 aa, Homo sapiens
VGPYRRCYFFSHCSTPGEPLVVLHVALTGDISSNIQAIVKEHPPSETEEKNKITAAIFYSISLTQQGLQGVELGTFLIKRVVKELQYRPLS

SEQ ID NO: 91984 - protein, 203 aa, Homo sapiens
MRNGDFLPTRLQAQQDAVNIVCHSKTRSNPENNVGLITLANDCEVLTTLTPDTGRILSKLHTVQPKGKITFCTGIRVAHLALKHRQGKNHKMRIIAFVGSPVEDNEKDLVKLAKRLKKEKVNVDIINFGEEEVNTEKLTAFVNTLNGKDGTGSHLVTVPPGPSLADALISSPILAGEGGAMLGLGASDFEFGVDPSADPELAL

SEQ ID NO: 91985 - protein, 186 aa, Homo sapiens
MAVRASFENNCEIGCFAKLTNTYCLVAIGGSENFYRCGGSPGAYGGGEACAGVKSSGSGRVPAPLPRHHRVHVPTVCSRASSPIPSPWCTRLSPAAASSGACVWGTGTVSWYPTIPPTRSCNTFATASQTQCRLGGWRSGSQPWAMSPPAMTTWPWSTQTWTGRQKKFWQMCSRWKSSDRQWPTRC

SEQ ID NO: 91986 - protein, 113 aa, Homo sapiens
MVCGGFACSKNALCALNVVYMLVSLLLIGVAAWGKGLGLVSSIHIIGGVIAVGVFLLLIAVAGLVGAVNHHQVLLFFYMIILGLVFIFQFVISCSCLAINRSKQMSSMLLGGS

SEQ ID NO: 91987 - protein, 74 aa, Homo sapiens
MKLNERSLAFYATCDAPVDNAGFLYKKGGRHAAYHRRWFVLRGNMLFYFEDAASREPVGVIILEGCTVELVEAA

SEQ ID NO: 91988 - protein, 590 aa, Homo sapiens
METTHSFGNPSISVSTQQPPKKFAPVVAPKPKYNPYKQPGGEGDFLPPPPPPLDDSSALPSISGNFPPPPPLDEEAFKVQGNPGGKTLEERRSSLDAEIDSLTSILADLECSSPYKPRPPQSSTGSTASPPVSTPVTGHKRMVIPNQPPLTATKKSTLKPQPAPQAGPIPVAPIGTLKPQPQPVPASYTTASTSSRPTFNVQVKSAQPSPHYMAAPSSGQIYGSGPQGYNTQPVPVSGQCPPPSTRGGMDYAYIPPPGLQPEPGYGYAPNQGRYYEGYYAAGPGYGGRNDSDPTYGQQGHPNTWKREPGYTPPGAGNQNPPGMYPVTGPKKTYITDPVSAPCAPPLQPKGGHSGQLGPSSVAPSFRPEDELEHLTKKMLYDMENPPADEYFGRCARCGENVVGEGTGCTAMDQVFHVDCFTCIICNNKLRGQPFYAVEKKAYCEPCYINTLEQCNVCSKPIMERILRATGKAYHPHCFTCVMCHRSLDGIPFTVDAGGLIHCIEDFHKKFAPRCSVCKEPIMPAPGQEETVRIVALDRDFHVHCYRCEDCGGLLSEGDNQGCYPLDGHILCKTCNSARIRVLTAKASTDL

SEQ ID NO: 91989 - protein, 99 aa, Homo sapiens
MTYDDIPHLSAKIKPKQQKVELEMAIDTLNPNYCRSKGEQIALNVDGACADETSTYSSKLMDKQTFCSSQTTSNTSRYAAALYRQGELHLTPLHGILQL

SEQ ID NO: 91990 - protein, 73 aa, Homo sapiens
MGSSQSVEIPGGGTEGYHVLRLPKLGRARRQRLQSGDCEGSLCAFLGEGSGPAVRRRGLRRQVLNHLGAGRVA

SEQ ID NO: 91991 - protein, 70 aa, Homo sapiens
MDPNCSCTTGGSCACAGSCKCKECKCTSCKKLLLLLPRGLCQVCPGLCLQRLIREVPLLCLMLGEPCSQT

SEQ ID NO: 91992 - protein, 714 aa, Homo sapiens
MIDLYEVAGIKGMFLANKKIDNQVKTFITYNKGRDWRLLQAPDTDLRGDPVHCLLPYCSLHLHLKVSENPYTSGIIASKDTAPSIIVASGNIGSELSDTDISMFVSSDAGNTWRQIFEEEHSVLYLDQGGVLVAMKHTSLPIRHLWLSFDEGRSWSKYSFTSIPLFVDGVLGEPGEETLIMTVFGHFSHRSEWQLVKVDYKSIFDRRCAEEDYRPWQLHSQGEACIMGAKRIYKKRKSERKCMQGKYAGAMESEPCVCTEADFDCDYGYERHSNGQCLPAFWFNPSSLSKDCSLGQSYLNSTGYRKVVSNNCTDGVREQYTAKPQKCPGKAPRGLRIVTADGKLTAEQGHNVTLMVQLEEGDVQRTLIQVDFGDGIAVSYVNLSSMEDGIKHVYQNVGIFRVTVQVDNSLGSDSAVLYLHVTCPLEHVHLSLPFVTTKNKEVNATAVLWPSQVGTLTYVWWYGNNTEPLITLEGSISFRFTSEGMNTITVQVSAGNAILQDTKTIAVYEEFRSLRLSFSPNLDDYNPDIPEWRRDIGRVIKKSLVEATGVPGQHILVAVLPGLPTTAELFVLPYQDPAGENKRSTDDLEQISELLIHTLNQNSVHFELKPGVRVLVHAAHLTAAPLVDLTPTHSGSAMLMLLSVVFVGLAVFVIYKFKRKIPGINVYAQMQNEKEQEMISPVSHSESRPNVPQTELRRPGQLIDEKVESQLIGE

SEQ ID NO: 91993 - protein, 59 aa, Homo sapiens
  MOD_RES (1)..(1): Any amino acid
XYWEVQLERMESTNLVKLLETKPEYHSLLQELGVGESQKSQWPECPGDPQHAAGAGRGS

SEQ ID NO: 91994 - protein, 45 aa, Homo sapiens
MPRGSRARGSKKKELEYRMPILSRRKTTAGQKSRSQDSRGSCLSL

SEQ ID NO: 91995 - protein, 188 aa, Homo sapiens
MAELNTHVNVKEKIYAVRSVVPNKSNNEIVLVLQQFDFNVDKAVQAFVDGSAIQVLKEWNMTGKKKNNKRKRSKSKQHQGNKDAKDKVERPEAGPLQPQPPQIQNGPMNGCEKDSSSTDSANEKPALIPREKKISILEEPSKALRGVTEGNRLLQQKLSLDGNPKPIHGTTERSDGLQWSAEQPCNPS

SEQ ID NO: 91996 - protein, 158 aa, Homo sapiens
MTQQPLRGVTSLRFNQDQSCFCCAMETGVRIYNVEPLMEKGHLDHEQVGSMGLVEMLHRSNLLALVGGGSSPKFSEISVLIWDDAREGKDSKEKLVLEFTFTKPVLSVRMRHDKIVIVLKNRIYVYSFPDNPRKLFEFDTRDNPKAAHPTPHLHTLGL

SEQ ID NO: 91997 - protein, 113 aa, Homo sapiens
DENKPQEKRPRAVTAYSPEDEKKGEKIYLYTHLKQQPIWEKWCHMTQEERDDSLRFNENITFGQLGTFTHNMLAFGLNKKLCNDFLKKQAVIGNLDEEQYKLLSDHIEQMATE

SEQ ID NO: 91998 - protein, 602 aa, Homo sapiens
MPEIRLRHVVSCSSQDSLEKEEQIHSVDIGNDGSAFVEVLVGSSAGGAGEQDYEVLLVTSSFMSPSESRSGSNPNRVRMFGPDKLVRAAAEKRWDRVKIVCSQPYSKDSPFGLSFVRFHSPPDKDEAEAPSQKVTVTKLGQFRVKEEDESANSLRPGALFFSRINKTSPVTASDPAGPSYAAATLQASSAASSASPVSRAIGSTSKPQESPKGKRKLDLNQEEKKTPSKPPAQLSPSVPKRPKLPAPTRTPATAPVPARAQGAVTGKPRGEGTEPRRPRAGPEELGKILQGVVVVLSGFQNPFRSELRDKALELGAKYRPDWTRDSTHLICAFANTPKYSQVLGLGGRIVRKEWVLDCHRMRRRLPSQRYLMAGPGSSSEEDEASHSGGSGDEAPKLPQKQPQTKTKPTQAAGPSSPQKPPTPEETKAASPVLQEDIDIEGVQSEGQDNGAEDSGDTEDELRRVAEQKEHRLPPGQEENGEDPYAGSTDENTDSEEHQEPPDLPVPELPDFFQGKHFFLYGEFPGDERRKLIRYVTAFNGELEDYMSDRVQFVITAQEWDPSFEEALMDNPSLAFVRPRWIYSCNEKQKLLPHQLYGVVPQA

SEQ ID NO: 91999 - protein, 163 aa, Homo sapiens
MKARAPPPPGKAATLHVHSDQKPPHDGALGSQQNLVRMKEALRASTMDVTVVLPSGLEKRSVLNGSHAMMDLLVELCLQNHLNPSHHALEIRSSETQQPLSFKPNTLIGTLNVHTVFLKEKVPEEKVKPGPPKVPEKSVRLVVNYLRTQKAVVRVSPEVPLQN

SEQ ID NO: 92000 - protein, 37 aa, Homo sapiens
  MOD_RES (1)..(1): Any amino acid
XTDAQGFLPARDKRKLGASVVKVNKVGQLRVLLAFRR

SEQ ID NO: 92001 - protein, 17 aa, Homo sapiens
MANRLFGEKSCDFLSSF

SEQ ID NO: 92002 - protein, 126 aa, Homo sapiens
  MOD_RES (1)..(1): Any amino acid
XHSPTWIIDPIDGTCNFVHRFPTVAVSIGFAVRQELEFGVIYHCTEERLYTGRRGRGAFCNGQRLRVSGETEMGLRHAAQAGLEVLTSKRSAHLSLAKCWDYRHEPPRPAHESLKGLGSDRNWPQT

SEQ ID NO: 92003 - protein, 85 aa, Homo sapiens
MRKSPGLSDCLWAWILLLSTLTGRSYGQPSLQDELKDNTTVFTRILDRLLDGYDNRLRPGLGERVTEVKTDIFVTSFGPVSDHDM

SEQ ID NO: 92004 - protein, 14 aa, Homo sapiens
MNGTLDHPDQPDLD

SEQ ID NO: 92005 - protein, 150 aa, Homo sapiens
MYVWPCAVVLAQYLWFHRRSLPGKAILEIGAGVSLPGILAAKCGAEVILSDSSELPHCLEVCRQSCQMNNLPHLQVVGLTWGHISWDLLALPPQDIILASDVFFEPEDFEDILATIYFLMHKNPKVQLWSTYQVRSADWSLEALLYKWDM

SEQ ID NO: 92006 - protein, 97 aa, Homo sapiens
APEENAGTELLLQGFERRFLAVRTLRSFPWQSLEAKLRDSSDSELLRDILQKSSGGSVTLSKSTAIISHGTTGLVTWDAALYLAEWAIENPAAFINR

SEQ ID NO: 92007 - protein, 88 aa, Homo sapiens
MNSMTSAVPVANSVLVVAPHNGYPVTPGIMSHVPLYPNSQPQVHLVPGNPPSLVSNVNGQPVQKALKEGKTLGAFSERERKATKKQHA

SEQ ID NO: 92008 - protein, 51 aa, Homo sapiens
MSKRPSYAPPPTPAPATVSFNFLVNVIANSGLDTKTQMSSSDSHSIITATG

SEQ ID NO: 92009 - protein, 78 aa, Homo sapiens
MWLAKACWSIQSGLPETTRKSPQPILGFSLRAVVWDLFPGSKQIVRRKLVSHDSGGAQAPGSATFGCGASPFHCELNS

SEQ ID NO: 92010 - protein, 196 aa, Homo sapiens
  MOD_RES (1)..(1): Any amino acid
XDPAAGAGHQDCEAEPGAVVRAVHQQPQEAAGQHRGGTGPPGLRAEKHAGPGGRLQEQPLKAQKRTLEKLTRYEDEINKRTTAENEFVMLKKDVDAAYMNKVELEAKVDALMDEINFMKMFFDAELSQMQTHVSDTSVVLSMDNNRNLDLDSIIAEVKAQYEEIANRSRTEAESWYQTKYEELQQTAGRHGDDLRN

SEQ ID NO: 92011 - protein, 231 aa, Homo sapiens
VKIQGQNKEMLAAACQMFLGKTEAEIAHIALETLEGHQRAIMAHMTVEEIYKDRQKFSEQVFKVASSDLVNMGISVVSYTLKDIHDDQDYLHSLGKARTAQVQKDARIGEAEAKRDAGIREAKAKQEKVSAQYLSEIEMAKAQRDYELKKAAYDIEVNTRRAQADLAYQLQVAKTKQQIEEQRVQVQVVERAQQVAVQEQEIARREKELEARVRKPAEAERYKLERLAEAE

SEQ ID NO: 92012 - protein, 103 aa, Homo sapiens
MTCPDCPSSIPTDSSNHQVLEAATESLAKYNNENTSKQYSLFKVTRASSQWVVGPSYFVEYLIKESPCTKSQASSCSLQSSDSVPVGLCKGSLTRTHWEKFVS

SEQ ID NO: 92013 - protein, 112 aa, Homo sapiens
MIPAVVLLLLLLVEQAAALGEPQLCYILDAILFLYGIVLTLLYCRLKIQVRKAAITSYEKSDGVYTMESPSITRLECSGMIWAHCNLCLLGSRDSRASPSRVAKTTGTTMPS

SEQ ID NO: 92014 - protein, 654 aa, Homo sapiens
MRRKFMLQWESHTFGKFHYKFFRDVSSDVFYILQLAYDSTSYYSANNLNVFLMGERASGKTIVINLAVLRWIKGEMWQNMISYVVHLTAHEINQMTNSSLAELIAKDWPDGQAPIADILSDPKKLLFILEDLDNIRFELNVNESALCSNSTQKVPIPVLLVSLLKRKMAPGCWFLISSRPTRGNNVKTFLKEVDCCTTLQLSNGKREIYFNSFFKDRQRASAALQLVHEDEILVGLCRVAILCWITCTVLKRQMDKGRDFQLCCQTPTDLHAHFLADALTSEAGLTANQYHLGLLKRLCLLAAGGLFLSTLNFSGEDLRCVGFTEADVSVLQAANILLPSNTHKDRYKFIHLNVQEFCTAIAFLMAVPNYLIPSGSREYKEKREQYSDFNQVFTFIFGLLNANRRKILETSFGYQLPMVDSFKWYSVGYMKHLDRDPEKLTHHMPLFYCLYENREEEFVKTIVDALMEVTVYLQSDKDMMVSLYCLDYCCHLRTLKLSVQRIFQNKEPLIRPTASQMKSLVYWREICSLFYTMESLRELHIFDNDLNGISERILSKALEHSSCKLRTLKLSYVSTASGFEDLLKALARNRSLTYLSINCTSISLNMFSLLHDILHEPTCQISHLRIHRPTRRLTPGIPTLWEAEAGRSPELDEM

SEQ ID NO: 92015 - protein, 247 aa, Homo sapiens
MHPEPSEPATGGAAELDCAQEPGVEESAGDHGSAGRGGCKEEINDPKEICVGSSDTSYHSQQKQSGDNGSGGHFAHPREDREDRGPRMTKSSLQKLCKQHKLYITPALNDTLYLHFKGFDRIENLEEYTGLRCLWLQSNGIQKIENLEAQTELRCLFLQMNLLRKIENLEPLQKLDALNLSNNYIKTIENLSCLPVLNTLQMAHNHLETVEDIQHLQECLRLCVLDLSHNKLSDPEILSILESMPDL

SEQ ID NO: 92016 - protein, 568 aa, Homo sapiens
QEDTVFFHLPPRNGNGATVFGISCYRQIEAKALKVRQADITRETVQKSVCVLSKLPLYGLLQAKLQLITHAYFEEKDFSQISILKELYEHMNSSLGGASLEGSQVYLGLSPRDLVLHFRHKVLILFKLILLEKKVLFYISPVNKLVGALMTVLSLFPGMIEHGLSDCSQYRPRKSMSEDGGLQESNPCADDFVSASTADVSHTNLGTIRKVMAGNHGEDAAMKTEEPLFQVEDSSKGQEPNDTNQYLKPPSRPSPDSSESDWETLDPSVLEDPNLKEREQLGSDQTNLFPKDSVPSESLPITVQPQANTGQVVLIPGLISGLEEDQYGMPLAIFTKGYLCLPYMALQQHHLLSDVTVRGFVAGATNILFRQQKHLSDAIVEVEEALIQIHDPELRKLLNPTTADLRFADYLVRHVTENRDDVFLDGTGWEGGDEWIRAQFAVYIHALLAATLQLVLFRIVNVAKKLETSWSQLAGMLYKQEKLLASQLEELFPVQRQLCLHGFPLSPLPPPKVSLSHQMRSLEQGVRGCYCFLRFKCPLSVCCSQAVTSHRSTAGDHMSNCLHGCCSK

SEQ ID NO: 92017 - protein, 95 aa, Homo sapiens
MWLISITFLSIGYGDMVPNTYCGKGVCLLTGIMGAGCTALVVAVVARKLELTKAEKHVHNFMMDTQLTKRGKEDHGDNNCNTRWRTQHPLIKKKK

SEQ ID NO: 92018 - protein, 643 aa, Homo sapiens
MACQQSRYHSFSSASRLQPRPSGVTIDESFLTEDKSTQNRKLLQKRRTLELPAAPLSHCQAPVLGGTGKLPTQGAPPAGPGHRFHPGTKAAAHQREKIRALEPLKAKLVTVNEDCNERILAMRAEEKYEISLLKKEKMNLLKLIDKKNEEKISLQSEVTKLRKNLAEEYLHYLSERDACKILIADLNELRYQREDMSLAQSPGIWGEDPVKLTLALKMTRQDLTRTQMELNNMKANFGDVVPRRDFEMQEKTNKDLQEQLDTLRASYEEVRKEHEILMQLHMSTLKERDQFFSELQEIQRTSTPRPDWTKCKDVVAGGPERWQMLAEGKNSDQLVDVLLEEIGSGLLREKDFFPGLGYGEAIPAFLRFDGLVENKKPSKKDVVNLLKDAWKERLAEEQKETFPDFFFNFLEHRFGPSDAMAWAYTIFENIKIFHSNEVMSQFYAVLMGKRSENVYVTQKETVAQLLKEMTNADSQNEGLLTMEQFNTVLKSTFPLKTEEQIQELMEAGGWHPSSSNADLLNYRSLFMEDEEGQSEPFVQKLWEQYMDEKDEYLQQLKQELGIELHEEVTLPKLRGGLMTIDPSLDKQTVNTYMSQAFQLPESEMPEEGDEKEEAVVEILQTALERLQVIDIRRVGPREPEPAS

SEQ ID NO: 92019 - protein, 137 aa, Homo sapiens
MASEAEKTFHRFAAFGESSSSGTEMNNKNFSKLCKDCGIMDGKTVTSTDVDIVFSKVKAKNARTITFQQFKEAVKELGQKRFKGKSPDEVLENIYGLMEGKDPATTGATVSDSLHPLDPTSLNPHCSSLPSLTLPTV

SEQ ID NO: 92020 - protein, 94 aa, Homo sapiens
MDRRYINRFRQAQPTSREERQPAGPTPADFWWLQSDSPDPSSQSAAAGANKPEGRPHTAVPTAVNVTSASHAVAPLQEIKQVTSPFTPSLGCLN

SEQ ID NO: 92021 - protein, 126 aa, Homo sapiens
MTTPNKTPPGADPKQLERTGTVREIGSQAVWSLSSCKPGFGVDQLRDDNLETYWQSDGSQPHLVNIQFRRKTTVKTLCIYADYKSDESYTPSKISVRVGNNFHNLQEIRPHVLHVNEESMNLQVSG

SEQ ID NO: 92022 - protein, 45 aa, Homo sapiens
MEVTGFGVTRCSSLPFPRHASCCRSLVKSLSLIPFLGDSSSLGLQ

SEQ ID NO: 92023 - protein, 1209 aa, Homo sapiens
MCETQKARKEREVEEKRHWDSSWEYEDYGSVRKRNLTVLDGLYRENDLDPRYWAKGQHQPYRKRDCGYWDFEQSEPSYMDCGEAHESGKGCVYHGGHDGYRSPENVDYESLSPGTKDNSPTRSPDVTSKAGGYGEANGYSDCKNLNYNPEDSKKAEQLTDCRGLDDSSANLGQPQLWYIDHENVNHNLEDCWATNFYCREHSNLYHVPGSYPDGQPVSFSDSNGVNEDKEFIKYHEGDRNVHQNDNMYPKAKTHIMDQGDFDTENKGYDALFANCAYKSRNSRGTDSLHQMENLEYNGTDIPRTKAHGGSRILLDGLQTQCTRGEQGGHHLGIPQSSSLEKNIWHLEEEKKLNGPETWRRNSCLRRTAPSTLRRSEFVQNSKKTQEMTLLSSQSSSLVAPSGSVSAENPEQRMLEKRAKVIEELLQTERDYIRDLEMCIERIMVPMQQAQVPNIDFEGLFGNMQMVIKVSKQLLAALEISDAVGPVFLGHRDELEGTYKIYCQNHDEAIALLEIYEKDEKIQKHLQDSLADLKSLYNEWGCTNYINLGSFLIKPVQRVMRYPLLLMELLNSTPESHPDKVPLTNAVLAVKEINVNINEYKRRKDLVLKYRKGDEDSLMEKISKLNIHSIIKKSNRVSSHLKHLTGFAPQIKDEVFEETEKNFRMQERLIKSFIRDLSLYLQHIRESACVKVVAAVSMWDVCMERGHRDLEQFERVHRYISDQLFTNFKERTERLVISPLNQLLSMFTGPHKLVQKRFDKLLDFYNCTERAEKLKDKKTLEELQSARNNYEALNAQLLDELPKFHQYAQGLFTNCVHGYAEAHCDFVHQALEQLKPLLSLLKVAGREGNLIAIFHEEHSRVLQQLQVFTFFPESLPATKKPFERKTIDRQSARKPLLGLPSYMLQSEELRASLLARYPPEKLFQAERNFNAAQDLDVSLLEGDLVGVIKKKDPMGSQNRWLIDNGVTKGFVYSSFLKPYNPRRSHSDASVGSHSSTESEHGSSSPRFPRQNSGSTLTFNPSSMAVSFTSGSCQKQPQDASPPPKECDQGTLSASLNPSNSESSPSRCPSDPDSTSQPRSGDSADVARDVKQPTATPRSYRNFRHPEIVGYSVPGRNGQSQDLVKGCARTAQAPEDRSTEPDGSEAEGNQVYFAVYTFKARNPNELSVSANQKLKILEFKDVTGNTEWWLAEVNGKKGYVPSNYIRKTEYT

SEQ ID NO: 92024 - protein, 137 aa, Homo sapiens
MAPSTAVSVVSDSIKVQPLLISADNKVIIIQPQVQTQPESTAESRPPTEEPSQGAQATKKKKEDRPPTQENPEKIAFMVALGLVTTEHLEEIQSKRQERKRRSTANPAYSGLLETERKRLASNYLNNPLFLTARANE

SEQ ID NO: 92025 - protein, 124 aa, Homo sapiens
MEFLQELNSDVSGSFVEESPENLLDNDPSFFCRFTVVVATQLPESTSLRLADVLWNSQIPLLICRTYGLVGYMRIIIKEHPVIESHPDNALEDLRLDKPFPELREHFQSYDLDHMEKKDHSHTP

SEQ ID NO: 92026 - protein, 189 aa, Homo sapiens
MNSCLWDISRYGPNSWRSYLENLENLFQCLGQVLPESCLLVWNTAMPVGEEVTGGFLPPKLRRQKATFLKNEVVKANFHSATEARKHNFDVLDLHFHFRHARENLHWDGVHWNGRVHRCLSQLLLAHVADAWGVELPHRHPVGEWIKKKKPGPRVEGPPQANRNHPALPLSPPLPSPTYRPLLGFPPQR

SEQ ID NO: 92027 - protein, 172 aa, Homo sapiens
MGILEKISEIEKEIARTQKNKATEYHLGLLKAKLAKYRAQLLEPSKSASSKGEGFDVMKSGDARVALIGFPSVGKSTFLSLMTSTASEAASYEFTTLTCIPGVIEYKGANIQLLDLPGIIEGAAQGKGRGRQVIAVARTADVIIMMLDATKGEVSAGEGAGVCGHPPQQAQA

SEQ ID NO: 92028 - protein, 241 aa, Homo sapiens
EIEAARRQFQSQLADLQQLPDILKITEAKLAECQDQLQGYERKNIDLTAIISDLRSRIEHQGDKLEMAREKHQASQKENKQLSLKVDELERLEALGPISVLFLGPETFSHLAVFCLVCGSVEGLEALEGTRQTSEEKLLPFQWKLEATSAQNIEFLQVIAKREEAIHQSQLRLEEKTRECGTLARQLESAIEDARRQVEQTKEHALSKERAAQNKILDLETQLSRTKTELSQLRRSRDDAD

SEQ ID NO: 92029 - protein, 120 aa, Homo sapiens
MLPGSLSHPWRLRSGLSGEIRKDTLKAILLELECHFTWNLLKEDIDLFEVEDTIGQQLEFLTTKSRLALYNLLAYVKHLKGQNKDALECLEQAEEIIQQEHSDKEEVRSLVTWGNYAWVY

SEQ ID NO: 92030 - protein, 129 aa, Homo sapiens
MAEEVVVVAKFDYVAQQEQELDIKKNERLWLLDDSKSWWRVRNSMNKTGFVPSNYVERKNSARKASIVKNLKDTLGIGKVKRKPSVPDSASPADDSFVDPGERLYDLNMPAYVKFNYMAEREDELSLIK

SEQ ID NO: 92031 - protein, 1440 aa, Homo sapiens
MYPNWGRYGGSSHYPPPPVPPPPPVALPEASPGPGYSSSTTPAAPSSSGFMSFREQHLAQLQQLQQMHQKQMQCVLQPHHLPPPPLPPPPVMPGGGYGDWQPPPPPMPPPPGPALSYQKQQQYKHQMLHHQRDGPPGLVPMELESPPESPPVPPGSYMPPSQSYMPPPQPPPSYYPPTSSQPYLPPAQPSPSQSPPSQSYLAPTPSYSSSSSSSQSYLSHSQSYLPSSQASPSRPSQGHSKSQLLAPPPPSAPPGNKTTVQQEPLESGAKNKSTEQQQAAPEPDPSTMTPQEQQQYWYRQHLLSLQQRTKVHLPGHKKGPVVAKDTPEPVKEEVTVPATSQVPESPSSEEPPLPPPNEEVPPPLPPEEPQSEDPEEDARLKQLQAAAAHWQQHQQHRVGFQYQGIMQKHTQLQQILQQYQQIIQPPPHIQTMSVDMQLRHYEMQQQQFQHLYQEWEREFQLWEEQLHSYPHKDQLQEYEKQWKTWQGHMKATQSYLQEKVNSFQNMKNQYMGNMSMPPPFVPYSQMPPPLPTMPPPVLPPSLPPPVMPPALPATVPPPGMPPPVMPPSLPTSVPPPGMPPSLSSAGPPPVLPPPSLSSAGPPPVLPPPSLSSTAPPPVMPLPPLSSATPPPGIPPPGVPQGIPPQLTAAPVPPASSSQSSQVPEKPRPALLPTPVSFGSAPPTTYHPPLQSAGPSEQVNSKAPLSKSALPYSSFSSDQGLGESSAAPSQPITAVKDMPVRSGGLLPDPPRSSYLESPRGPREQKEQLQKMKDFGSEPQMADHLPPQESRLQNTSSRPGMYPPPGSYRPPPPMGKPPGSIVRPSAPPARSSVPVTRPPVPIPPPPPPPPLPPPPPVIKPQTSAVEQERWDEDSFYGLWDTNDEQGLNSEFKSETAAIPSAPVLPPPPVHSSIPPPGPVPMGMPPMSKPPPVQQTVDYGHGRDISTNKVEQIPYGERITLRPDPLPERSTFETEHAGQRDRYDRERDREPYFDRQSNVIADHRDFKRDRETHRDRDRDRGVIDYDRDRFDRERRPRDDRAQSYRDKKDHSSSRRGGFDRPSYDRKSDRPVYEGPSMFGGERRTYPEERMPLPAPSLSHQPPPAPRVEKKPESKNVDDILKPPGRESRPERIVVIMRGLPGSGKTHVAKLIRDKEVEFGGPAPRVLSLDDYFITEVEKEEKDPDSGKKVKKKVMEYEYEAEMEETYRTSMFKTFKKTLDDGFFPFIILDAINDRVRHFDQFWSAAKTKGFEVYLAEMSADNQTCGKRNIHGRKLKEINKMADHWETAPRHMMRLDIRSLLQDAAIEEVEMEDFDANIEEQKEEKKDAEEEESELGYIPKSKWEMDTSEAKLDKLDGLRTGTKRKRDWEAIASRMEDYLQLPDDYDTRASEPGKKRVRWADLEEKKDADRKRAIGFVVGQTDWEKITDESGHLAEKALNRTKYI

SEQ ID NO: 92032 - protein, 98 aa, Homo sapiens
MKRLDVNAAGIWEPKKGDVLCSRHFKKTDFDRSAPNIKLKPGVIPSIFDSPYHLQISMFKRKCLFKAKNYFSVTIIANIYKGLTLSPRLMCSGTISSL

SEQ ID NO: 92033 - protein, 101 aa, Homo sapiens
MERPLCSHLCSCLAMLALLSPLSLAQYDSWPHYPEYFQQPAPEYHQPQAPANVAKIQLHLVLARRCQQQQSGHEWSEVLGNGAVPGALPPRRGGRGLPPGR

SEQ ID NO: 92034 - protein, 173 aa, Homo sapiens
WGPNIKEFKHRFDPVETKGEGPRRLKNLYFLYLIELRALSKVAPYFERSIVDLYTGNAEEDADTKTLLLNIFQDTKSFPMHFDEKSMFAGDKKGAKSLKEEFRLHFKNISRIMDCVGCDKCRLWGKLQTQGLGTALKILFSEKEIQKLPENSPSKGFQLTRQEIVALLNAFGR

SEQ ID NO: 92035 - protein, 351 aa, Homo sapiens
MSDGFDRAPEQTRPLRAPPSSQDKIPQQNSESAMAKPQVVVAPVLMSKLSVNAPEFYPSGYSSSYTESYEDGCEDYPTLSEYVQDFLNHLTEQPGSFETEIEQFAETLNGCVTTDDALQELVELIYQQATSIPNFSYMGARLCNYLSHHLTISPQSGNFRQLLLQRCRTEYEVKDQAAKGDEVTRKRFHAFVLFLGELYLNLEIKGTNGQVTRADILQVGLRELLNALFSNPMDDNLICAVKLLKLTGSVLEDAWKEKGKMDMEEIIQRIENVVLDANCSRDVKQMLLKLVELRSSNWGRVHATSTYREATPENDPNYFMNEPTFYTSDGVPFTAADPDTWMILMMRWTQR

SEQ ID NO: 92036 - protein, 91 aa, Homo sapiens
  MOD_RES (1)..(1): Any amino acid
XLTLLASASRDRLIHVLNVEKNYNLEQTLDDHSSSITAIKFAGNRDIQMISCGADKSIYFRSAQQQRKPPCMTWTLTSPRSTWPWPARTAM

SEQ ID NO: 92037 - protein, 111 aa, Homo sapiens
REGNAVAVRLWLDNTENDLNQGDDHGFSPLHWACREGRSAVVEMLIMRGARINVMNRGDDTPLHLAASHGHRDIVQKLLQYKADINAVNEHGNVPLHYACFWGQDQVAEDK

SEQ ID NO: 92038 - protein, 186 aa, Homo sapiens
  MOD_RES (1)..(1): Any amino acid
XSLKHKNGELSNSDPFKYNNSTGISYETLGPEELRSLLTTLIFLFQQCGVISEHTKKMCTRSLRCPQHTDEQRRTVRIYFLGPSAVLPEVESSLDNDSFDMTDSQALISRLQWDGSSDLSPSDSGSSKTSENQGWGLGTNSSESRKTKKKKSHLSLVGTASGLGSNKKKKPKPPAPPTPSIYDDIN

SEQ ID NO: 92039 - protein, 98 aa, Homo sapiens
MFHWQATIMGPNDSPYQGGVFFLTIHFPTDYPFKPPKVAFTTRIYHPNINSNGSICLDILRSQWSPALTISKVLLSICSLLCDPNPDDPLVPEIARIY

SEQ ID NO: 92040 - protein, 145 aa, Homo sapiens
MALSQGLFTFKDVAIEFSQEEWECLDPAQRALYRDVMLENYRNLLSLDEDNIPPEDDISVGFTSKGLSPKENNKEELYHLVILERKESHGINNFDLKEVWENMPKFDSLWDYDVKNYKGMPLTCNKNLTHRKDQQHNKSSIHFSL

SEQ ID NO: 92041 - protein, 73 aa, Homo sapiens
MDLANHLFQVAGYPAAVDRVKSGSLCLFIYLGQQRELSLHGDCNFILIYLPPGSQKMEEAVPCQRPPLPSQAL

SEQ ID NO: 92042 - protein, 185 aa, Homo sapiens
MKVLLLKDAKEDDCGQDPYIRLSHPEDYGGLIFTSPRAVEAAELCLEQNNKTEVWERSLKEKWNAKSVYVVGNATASLVSKIGLDTEGETCGNAEKLAEYICSRESSALPLLFPCGNLKREILPKALKDKGIAMESITVYQTVAHPGIQGNLNSYYSQQGVPASITFFSPSGLTYSLKHIQELSG

SEQ ID NO: 92043 - protein, 225 aa, Homo sapiens
MSQGILSPPAGLLSDDDVVVSPMFESTAADLGSVVRKNLLSDCSVVSTSLEDKQQVPSEDSMEKVKVYLRVRPLLPSELERQEDQGCVRIENVETLVLQAPKDSFALKSNERGIGQATHRFTFSQIFGPEVGQASFFNLTVKEMVKDVLKGQNWLIYTYGVTNSGKTHTIQGTIKDGGILPRSLALIFNSLQGQLHPTPDLKPLLSNEVIWLDSKQIRQEEMKKL

SEQ ID NO: 92044 - protein, 304 aa, Homo sapiens
MSMLANKQDKEGALGEADVIECLSLEKLVNEHKCLCQIEPCSAISGYGKKIDKSIKKGLYWLLHVIARDFDALNERIQKETTEQRALEEQEKQERAERVRKLREERKQNEQEQAELDGTSGLAELDPEPTNPFQPIASVIIENEGKLEREKKNQKMEKDSDGCHLKHKMEHEQIETQGQVNHNGQKNNEFGLVENYKEALTQQLKNEDETDRPSLESANGKKKTKKLRMKRNHRVEPLNIDDCAPESPTPPPPPPPVGWGTPKVTRLPKLEPLGETHHNDFYRKPLPPLAVPQRPNSDAHDVIS

SEQ ID NO: 92045 - protein, 176 aa, Homo sapiens
MILRPPQLCGTEGKYYSEEAEVDLRDPGRDYELYKYTCQELQRLMAEIQDLKSRGGKDVAIEIEERRIQSCVHFMTLKKLNRLAHIRLKKGRDQTHEAKQKVDAYHLQLQNLLYEVMHLQKEITKCLEFKSKHEEIDLVSLEEFYKEAPPDISKAEVTMGDPHQQTLARLDWELEQ

SEQ ID NO: 92046 - protein, 161 aa, Homo sapiens
MPAEGGKTDMERIGLFSEMEYITVGDKYVSQFNRPFNEAASKNKQMLPGGSKEMSDLQAGYFDPHFVRIFEGEGYINLNQVRRRDMVEAAKKNLGKAFLPSNGEKKPCGLGSYYGTIGGPVPFFSAQSKPREKYKAPGKNLYTNPGKKGTGYGYANITIGK

SEQ ID NO: 92047 - protein, 20 aa, Homo sapiens
MEGPEGLGRKQACLAMLLHF

SEQ ID NO: 92048 - protein, 296 aa, Homo sapiens
MERLEEVPLEVLRQRESKWLDMLNNWDKWMAKKHKKIRLRCQKGIPPSLRGRAWQYLSGGKVKLQQNPGKFDELDMSPGDPKWLDVIERDLHRQFPFHEMFVSRGGHGQQDLFRVLKAYTLYRPEEGYCQAQAPIAAVLLMHMPAEQAFWCLVQICEKYLPGYYSEKLEAIQLDGEILFSLLQKVSPVAHKHLSRQKIDPLLYMTEWFMCAFSRTLPWSSVLRVWDMFFCEGVKIIFRVGLVLLKHALGSPEKVKACQGQYETIERLRSLSPKIMQEAFLVQEGQLGGTCVTSFYT

SEQ ID NO: 92049 - protein, 737 aa, Homo sapiens
MEGLTLSDAEQKYYSDLFSYCDIESTKKVVVNGRVLELFRAAQLPNDVVLQIMELCGATRLGYFGRSQFYIALKLVAVAQSGFPLRVESINTVKDLPLPRFVASKNEQESRHAASYSSDSENQGSYSGVIPPPPGRGQVKKGSVSHDTVQPRTSADAQEPASPVVSPQQSPPTSPHTWRKHSRHPSGGNSERPLAGPGPFWSPFGEAQSGSSAGDAVWSGHSPPPPQENWVSFADTPPTSTLLTMHPASVQDQTTVRTVASATTAIEIRRQSSSYDDPWKITDEQRQYYVNQFKTIQPDLNGFIPGSAAKEFFTKSKLPILELSHIWELSDFDKDGALTLDEFCAAFHLVVARKNGYDLPEKLPESLMPKLIDLEDSADVGDQPGEVGYSGSPAEAPPSKSPSMPSLNQTWPELNQSSEDTAIVHPVPIRMTPSKIHMQEMELKRTGSDHTNPTSPLLVKPSDLLEENKINSSVKFASGNTVADGYSSSDSFTSDPEQIGSNVTRQRSHSGTSPDNTAPPPPPPRPQPSHSRSSSLDMNRTFTVTTGQQQAGVVAHPPAVPPRPQPSQAPGPAVHRPVDADGLITHTSTSPQQIPEQPNFADFSQFEVFAASNVNDEQDDEAEKHPEVLPSKGTTPLAPPPKPVRRRLKSEDELRPEVDEHTQKTGVLAAVLASQPSIPRSVGKDKKAIQASIRRNKETNTVLARLNSELQQQLKDVLEERISLEVQLEQLRPFSHL

SEQ ID NO: 92050 - protein, 166 aa, Homo sapiens
MRRKQTGTRERGRYREEEMTVVEEADDDKKRLLQIIDRDGEEEEEEEEPLDESSVKKMILTFEKRSYKNQELRIKFPDNPEKFMESELDLNDIIQEMHVVATMPDLYHLLVELNAVQSLLGLLGHDNTDVSIAVVDLLQELTDIDTLHESEEGAEVLIDALVDGQV

SEQ ID NO: 92051 - protein, 63 aa, Homo sapiens
MSLADLTKTNIDEHFFGVALENNRRSAACKRSPGTGDFSRNSNASNKSVDYSRSQCSCGSLSS

SEQ ID NO: 92052 - protein, 44 aa, Homo sapiens
  MOD_RES (1)..(1): Any amino acid
XGRTDPVSVLMELRGRRTLIKMPYEISAGTQCCEERFPKCILRN

SEQ ID NO: 92053 - protein, 79 aa, Homo sapiens
MTGGRYLPGPVGRRHAAWLRRAPERALRHGHGDPLTAAYLAGLAAQRAEQWQRAPRRRSRRRQPGRHPRRFRAQLPRRR

SEQ ID NO: 92054 - protein, 457 aa, Homo sapiens
MKFTLGLGSRAWRVSWEGAAAAAAGPGAGGSALRCRAQRVSSPRLGRRGSRLSGALPLCLSRGGGGAQALPDCAGPSPGHPGHPGARQLAGPLAMEQTYGEVNQLGGVFVNGRPLPNAIRLRIVELAQLGIRPCDISRQLRVSHGCVSKILARYNETGSILPGAIGGSKPRVTTPNVVKHIRDYKQGDPGIFAWEIRDRLLADGVCDKYNVPSVSSISRILRNKIGSLAQPGPYEASKQPPSQPTLPYNHIYQYPYPSPVSPTGAKMGSHPGVPGTAGHVSIPRSWPSAHSVSNILGIRTFMEQTGALAGSEGTAYSPKMEDWAGVNRTAFPATPAVNGLEKPALEADIKYTQSASTLSAVGGFLPACAYPASNQHGVYSAPGGGYLAPGPPWPPAQGPPLAPPGAGVAVHGGELAAAMTFKHPSREVADRKPPSSGSKAPDALSSLHGLPIPASTS

SEQ ID NO: 92055 - protein, 210 aa, Homo sapiens
MATPVVTKTAWKLQEIVAHASNVSSLVLGKASGRLLATGGDDCRVNLWSINKPNCIMSLTGHTSPVESVRLNTPEELIVAGSQSGSIRVWDLEAAKILRTLMGHKANICSLDFHPYGEFVASGSQDTNIKLWDIRRKGCVFRYRGHSQAVRCLRFSPDGKWLASAADDHTVKLWDLTAGKMMSEFPGHTGPVNVVEFHPNEYLLASGSSD

SEQ ID NO: 92056 - protein, 86 aa, Homo sapiens
MQRWTLWAAAFLTLHSAQAFPQTDISISPALPELPLPSLCPLFWMEFKGHCYRFFPLNKTWAEADLYCSEFSVGRKSAKLASIHSL

SEQ ID NO: 92057 - protein, 302 aa, Homo sapiens
MRRGRLLEIALGFTVLLASYTSHGADANLEAGNVKETRASRAKRRGGGGHDALKGPNVCGSRYNAYCCPGWKTLPGGNQCIVPICRHSCGDGFCSRPNMCTCPSGQIAPSCGSRSIQHCNIRCMNGGSCSDDHCLCQKGYIGTHCGQPVCESGCLNGGRCVAPNRCACTYGFTGPQCERDYRTGPCFTVISNQMCQGQLSGIVCTKTLCCATTSMNVKLEHTTVANMLYVPIQQEASNVAAVPGGLEMALSALIWTNVPMEPICAASMQTARIPWDLTAVCARKDTQVMASLVQTLMSALRT

SEQ ID NO: 92058 - protein, 150 aa, Homo sapiens
MAGEQKPSSNLLEQFILLAKGTSGSALTALISQVLEAPGVYVFGELLELANVQECIPYSVLLKDLEMRNLRELEDLIIEAVYTDIIQGKLDQRNQLLEVDFCIGRDIRKKDINNIVKTLHEWCDGCEAVLLGIEQQVLRANQYKENHNRT

SEQ ID NO: 92059 - protein, 80 aa, Homo sapiens
MQSTDLGNKESGKIWHRKPSPATRDGIIVNIIHNTSDYHPKVLRFLNVAFDGTGDCLIAGDHQGNIYVFDLHGNSHQGAS

SEQ ID NO: 92060 - protein, 240 aa, Homo sapiens
MGPWGEPELLVWRPEAVASEPPVPVGLEVKLGALVLLLVLTLLCSLVPICVLRRPGANHEGSASRQKALSLVSCFAGGVFLATCLLDLLPDYLAAIDEALAALHVTLQFPLQEFILAMGFFLVLVMEQITLAYKEQSGPSPLEETRALLGTVNGGPQHWHDGPGVPQASGAPATPSALRACVLVFSLALHSVFEGLAVGLQRDRARAMELCLALLLHKGILAVSLSLRLLQSHLRAQVVA

SEQ ID NO: 92061 - protein, 82 aa, Homo sapiens
MLLLKKHTEDISSVYEIRERLGSSGAPHTSWPSSASPRRPSGARRPWWRTRSQCSVGSVTPTSSLWRMSTRALPTSTWPWNW

SEQ ID NO: 92062 - protein, 281 aa, Homo sapiens
MMSDASDMLAAALEQMDGIIAGSKALEYSNGIFDCQSPTSPFMGSLRALHLVEDLRGLLEMMETDEKEGLRCQIPDSTAETLVEWLQSQMTNGHLPGNGDVYQERLARLENDKESLVLQVSVLTDQVEAQGEKIRDLEFCLEEHREKVNATEEMLQQELLSRTSLETQKLDLMAEISNLKLKLTAVEKDRLDYEDKFRDTEGLIQEINDLRLKVSEMDSERLQYEKKLKSTKDELASLKEQLEEKESEVKRLQEKLVCKMKGEGVEIVDRDENFKKKLKEK

SEQ ID NO: 92063 - protein, 242 aa, Homo sapiens
MKSAGGSGRSLLPSPRVCEEQRCEEEVFPLAMNYLDRYLSCVPTRKAQLQLLGAVCMLLASKLRETTPLTIEKLCIYTDHAVSPRQLRDWEVLVLGKLKWDLAAVIAHDFLAFILHRLSLPRDRQALVKKHAQTFLALCATDYTFAMYPPSMIATGSIGAAVQGLGACSMSGDELTELLAGITGTEVDCLRACQEQIEAALRESLREASQTSSSPAPKAPRGSSSQGPSQTSTPTDVTAIHL

SEQ ID NO: 92064 - protein, 94 aa, Homo sapiens
MDSPCQPQPLSQALPQLPGSSSEPLEPEPGRARMGVESYLPCPLLPSYHCPGVPSEASAGSGTPRATATSTTASPLRDGFGGQDGGELRPLQSE

SEQ ID NO: 92065 - protein, 2092 aa, Homo sapiens
MQADKCRTSSRSVKKELVIESPLQYKDAAQGEVEAESPGPVPAKPKLIEPLDYENVIVQKKTQILNDCLREMLLFPYDDFQTAILRRQGRYICSTVPAKAEEEAQSLFVTECIKTYNSDWHLVNYKYEDYSGEFRQLPNKVVKLDKLPVHVYEVDEEVDKDEDAASLGSQKGGITKHGWLYKGNMNSAISVTMRSFKRRFFHLIQLGDGSYNLNFYKDEKISKEPKGSIFLDSCMGVVQNNKVRRFAFELKMQDKSSYLLAADSEVEMEEWITILNKILQLNFEAAMQEKRNGDSHEDDEQSKLEGSGSGLDSYLPELAKSAREAEIKLKSESRVKLFYLDPDAQKLDFSSAEPEVKSFEEKFGKRILVKCNDLSFNLQCCVAENEEGPTTNVEPFFVTLSLFDIKYNRKISADFHVDLNHFSVRQMLATTSPALMNGSGQSPSVLKGILHEAAMQYPKQGIFSVTCPHPDIFLVARIEKVLQGSITHCAEPYMKSSDSSKVAQKVLKNAKQACQRLGQYRMPFAWAARTLFKDASGNLDKNARFSAIYRQDSNKLSNDDMLKLLADFRKPEKMAKLPVILGNLDITIDNVSSDFPNYVNSSYIPTKQFETCSKTPITFEVEEFVPCIPKHTQPYTIYTNHLYVYPKYLKYDSQKSFAKARNIAICIEFKDSDEEDSQPLKCIYGRPGGPVFTRSAFAAVLHHHQNPEFYDEIKIELPTQLHEKHHLLLTFFHVSCDNSSKGSTKKRDVVETQVGYSWLPLLKDGRVVTSEQHIPVSANLPSGYLGYQELGMGRHYGPEIKWVDGGKPLLKISTHLVSTVYTQDQHLHNFFQYCQKTESGAQALGNELVKYLKSLHAMEGHVMIAFLPTILNQLFRVLTRATQEEVAVNVTRVIIHVVAQCHEEGLESHLRSYVKYAYKAEPYVASEYKTVHEELTKSMTTILKPSADFLTSNKLLKYSWFFFDVLIKSMAQHLIENSKVKLLRNQRFPASYHHAVETVVNMLMPHITQKFRDNPEASKNANHSLAVFIKRCFTFMDRGFVFKQINNYISCFAPGDPKTLFEYKFEFLRVVCNHEHYIPLNLPMPFGKGRIQRYQDLQLDYSLTDEFCRNHFLVGLLLREVGTALQEFREVRLIAISVLKNLLIKHSFDDRYASRSHQARIATLYLPLFGLLIENVQRINVRDVSPFPVNAGMTVKDESLALPAVNPLVTPQKGSTLDNSLHKDLLGAISGIASPYTTSTPNINSVRNADSRGSLISTDSGNSLPERNSEKSNSLDKHQQSSTLGNSVVRCDKLDQSEIKSLLMCFLYILKSMSDDALFTYWNKASTSELMDFFTISEVCLHQFQYMGKRYIARNQEGLGPIVHDRKSQTLPVSRNRTGMMHARLQQLGSLDNSLTFNHSYGHSDADVLHQSLLEANIATEVCLTALDTLSLFTLAFKNQLLADHGHNPLMKKVFDVYLCFLQKHQSETALKNVFTALRSLIYKFPSTFYEGRADMCAALCYEILKCCNSKLSSIRTEASQLLYFLMRNNFDYTGKKSFVRTHLQVIISVSQLIADVVGIGGTRFQQSLSIINNCANSDRLIKHTSFSSDVKDLTKRIRTVLMATAQMKEHENDPEMLVDLQYSLAKSYASTPELRKTWLDSMARIHVKNGDLSEAAMCYVHVTALVAEYLTRKGVFRQGCTAFRVITPNIDEEASMMEDVGMQDVHFNEDVLMELLEQCADGLWKAERYELIADIYKLIIPIYEKRRDFERLAHLYDTLHRAYSKVTEVMHSGRRLLGTYFRVAFFGQGFFEDEDGKEYIYKEPKLTPLSEISQRLLKLYSDKFGSENVKMIQDSGKVNPKDLDSKYAYIQVTHVIPFFDEKELQERKTEFERSHNIRRFMFEMPFTQTGKRQGGVEEQCKRRTILTAIHCFPYVKKRIPVMYQHHTDLNPIEVAIDEMSKKVAELRQLCSSAEVDMIKLQLKLQGSVSVQVNAGPLAYARAFLDDTNTKRYPDNKVKLLKEVFRQFVEACGQALAVNERLIKEDQLEYQEEMKANYREMAKELSEIMHEQICPLEEKTSVLPNSLHIFNAISGTPTSTMVHGMTSSSSVV

SEQ ID NO: 92066 - protein, 211 aa, Homo sapiens
MAEGSGARVFMMDPLGDTLRRLREAFHAGRTRPAEFRAAQLQGLGRFLQENKQLLHDALAQDLHKSAFESEVSEVAISQGEVTLALRNLRAWMKDERVPKNLATQLDSAFIRKEPFGLVLIIAPWNYPLNLTLVPLVGALAAGNCVVLKPSEISKNVEKILAEVLPQYVDQSCFAVVLGGPQETGQLLEHRFDYIFFTGSPRVGKIVMTAA

SEQ ID NO: 92067 - protein, 1329 aa, Homo sapiens
QGYKLIAWEPEQEEEVTMVTARPNFQDSIHVGFVSGLKKFTEYFTSVLCFTTPGDGPRSTPQLVRTHEDVPGPVGHLSFSEILDTSLKVSWQEPGEKNGILTGYRISWEEYNRTNTRVTHYLPNVTLEYRVTGLTALTTYTIEVAAMTSKGQGQVSASTISSGVPPELPGPPTNLGISNIGPRSVTLQFRPGYDGKTSISRWLVEAQVGVVGEGEEWLLIHQLSNEPDARSMEVPDLNPFTCYSFRMRQVNIVGTSPPSQPSRKIQTLQAPPDMAPANVSLRTASETSLWLRWMPLPEMEYNGNPESVGYKIKYSRSDGHGKTLSHVVQDRVERDYTIEDLEEWTEYRVQVQAFNAIGSGPWSQTVVGRTRESVPSSGPTNVSALATTSSSMLVRWSEVPEADRNGLVLGYKVMYKEKDSDTQPRFWLVEGNSSRSAQLTGLGKYVLYEVQVLAFTRIGDGSPSHPPILERTLDDVPGPPMGILFPEVRTTSVRLIWQPPAAPNGIILAYQITHRLNTTTANTATVEVLAPSARQYTATGLKPESVYLFRITAQTRKGWGEAAEALVVTTEKRDRPQPPSRPMVQQEDVRARSVLLSWEPGSDGLSPVRYYTIQTRELPSGRWALHSASVSHNASSFIVDRLKPFTSYKFRVKATNDIGDSEFSEESESLTTLQAAPDEAPTILSVTPHTTTSVLIRWQPPAEDKINGILLGFRIRYRELLYEGLRGFTLRGINNPGATWAELTYLNKHRRYEIRMSVYNAVGEGPSSPPQEVFVGEAVPTAAPRNVVVHGATATQLDVTWEPPPLDSQNGDIQGYKIYFWEAQRGNLTERVKTLFLAENSVKLKNLTGYTAYMVSVAAFNAAGDGPRSTPTQGQTQQAAPSAPSSVKFSELTTTSVNVSWEAPQFPNGILEGYRLVYEPCSPVDGVSKIVTVDVKGNSPLWLKVKDLAEGVTYRFRIRAKTFTYGPEIEANVTTGPGEGAPGPPGVPIIVRYSSAIAIHWSSGDPGKGPITRYVIEARPSDEGLWDILIKDIPKEVSSYTFSMDILKPGVSYDFRVIAVNDYGFGTPSSPSQSVPAQKANPFYEEWWFLVVIALVGLIFILLLVFVLIIRGQSKKYAKKTDSGNSAKSGALGHSEMMSLDESSFPALELNNRRLSVKNSFCRKNGLYTRSPPRPSPGSLHYSDEDVTKYNDLIPAESSSLTEKPSEISDSQGSDSEYEVDSNHQKAHSFVNHYISDPTYYNSWRRQQKGISRAQAYSYTESDSGEPDHTTVTNSTSTQQGSLFRPKASRTPTPQNPPNPPSQQSTLYRPPSSLAPGSRAPIAGFSSFV

SEQ ID NO: 92068 - protein, 558 aa, Homo sapiens
MDPGKVFYCSTVMNKDYQKFWSSPSDPVHFEVDTSHEKVESMSESDTMNVSNLSQGVMLSHSPICMETTGTTCDLPQNEIKNFERENEYESTLCEDAYGTLDNLLNDNNIENYSTNALIQPVDTISISSLRQFETVCKFHWVEAFDDEMTEKPEFQSQVYNYAKDNNIKQDSFKEENPMETSVSANTDQLGNEYFRQPPPRSPPLIHCSGEMLKFTEKSLAKSIAKESALNPSQPPSFLCKTAVPSKEIQNYGEIPEMSVSYEKEVTAEGVERPEIVSTWSSAGISWRSEACRENCEMPDWEQSAESLQPVQEDMALNEVLQKLKHTNRKQEVRIQELQCSNLYLEKRVKELQMKITKQQVFIDVINKLKENVEELIEDKYKIILEKNDTKKTLQNLEEVLANTQKHLQESRNDKEMLQLQFKKIKANYVCLQERYMTEMQQKNKSVSQYLEMDKTLSKKEEEVERLQQLKKELEKATASALDLLKREKEAQEQEFLSLQEEFQKLEKENLEERQKLKSRLEKLLTQVRNLQFMSENERTKNIKLQQQINEVKNENAK

SEQ ID NO: 92069 - protein, 49 aa, Homo sapiens
  MOD_RES (1)..(1): Any amino acid
XYDIWGNTVNVASRMESTGVMGNIQWRLAEKLHERGKGTEEQAVAVSRW

SEQ ID NO: 92070 - protein, 448 aa, Homo sapiens
MSTEKVDQKEEAGEKEVCGDQIKGPDKEEEPPAAASHGQGWRPGGRAARNARPEPGARHPALPAMVNDPPVPALLWAQEVGQVLAGRARRLLLQFGVLFCTILLLLWVSVFLYGSFYYSYMPTVSHLSPVHFYYRTDCDSSTTSLCSFPVANVSLTKGGRDRVLMYGQPYRVTLELELPESPVNQDLGMFLVTISCYTRGGRIISTSSRSVMLHYRSDLLQMLDTLVFSSLLLFGFAEQKQLLEVELYADYRENSYVPTTGAIIEIHSKRIQLYGAYLRIHAHFTGLRYLLYNFPMTCAFIGVASNFTFLSVIVLFSYMQWVWGGIWPRHRFSLQVNIRKRDNSRKEVQRRISAHQPVSGSDPCIPLLAAEGQLSEEEKPDQQPLSGEEELEPEASDGSGSWEDAALLTEANLPAPAPASASAPVLETLGSSEPAGGALRQRPTCSSS

SEQ ID NO: 92071 - protein, 164 aa, Homo sapiens
MTAEPMSESKLNTLVQKLHDFLAHSSEESEETSSPPRLAMNQNTDKISGSGSNSDMMENSKEEGTSSSEKSKSSGSSRSKRKPSIVTKYVESDDEKPLDDETVNEDASNENSENDITMQSLPKGTVIVQPEPVLNEDKDDFKGPEFRSRSKMKTENLKKRGVLW

SEQ ID NO: 92072 - protein, 62 aa, Homo sapiens
MSIGVPIKVLHEAEGHIVTCETNTGEVYRGKLIEAEDNMNCQMSNITVTYRDGRVAQLEQVI

SEQ ID NO: 92073 - protein, 146 aa, Homo sapiens
  MOD_RES (1)..(1): Any amino acid
XILSVTLCILSIILLGTAIFAFARIRQKQKEGGTYSPQDAEIIDTKLKLDQLITVADLELKDERLTRPISKKSFLQHVEELCTNNNLKFQEEFSELPKFLQDLSSTDADLPWNRAKNRFPNIKPYNNNRVKLIADASVPGSDYINA

SEQ ID NO: 92074 - protein, 61 aa, Homo sapiens
MSCVPWKGDKAKSESLELPQAAPPQIYHEKQRRELCALHALNNVFQDSNAFTRDTLQEIFQ

SEQ ID NO: 92075 - protein, 473 aa, Homo sapiens
MTSSRLWFSLLLAAAFAGRATALWPWPQNFQTSDQRYVLYPNNFQFQYDVSSAAQPGCSVLDEAFQRYRDLLFGSGSWPRPYLTGKRHTLEKNVLVVSVVTPGCNQLPTLESVENYTLTINDDQCLLLSETVWGALRGLETFSQLVWKSAEGTFFINKTEIEDFPRFPHRGLLLDTSRHYLPLSSILDTLDVMAYNKLNVFHWHLVDDPSFPYESFTFPELMRKGSYNPVTHIYTAQDVKEVIEYARLRGIRVLAEFDTPGHTLSWGPGIPGLLTPCYSGSEPSGTFGPVNPSLNNTYEFMSTFFLEVSSVFPDFYLHLGGDEVDFTCWKSNPEIQDFMRKKGFGEDFKQLESFYIQTLLDIVSSYGKGYVVWQEVFDNKVKIQPDTIIQVWREDIPVNYMKELELVTKAGFRALLSAPWYLNRISYGPDWKDFYIVEPLAFEGTPEQKALVIGGEACMWGEYVDNTNLVPRL

SEQ ID NO: 92076 - protein, 35 aa, Homo sapiens
MPKKKTGARKKAENRREREKQLRASRSTIDLAKHP

SEQ ID NO: 92077 - protein, 116 aa, Homo sapiens
MVVKGCESKHIQGDEMRVWLIGGFSADCGGFCSVPELLARIERMERRMQLVKKDNEKERHKLFQGYETEEREETELSEKIKLECQPELSETSQTLPPKPFSCGRSGKGHKRKSPFG

SEQ ID NO: 92078 - protein, 42 aa, Homo sapiens
MSGCSKRCKLGFVKFAQTIFKLITGTLSKDGVKSGTGARRAG

SEQ ID NO: 92079 - protein, 116 aa, Homo sapiens
MEFGLNWVFLVAIIKGAQCEVQLVESGGGLVQPGGSLRLSCPDSGFTFSNHYMSWVRQAPGKGLEWISYISGDSGYTNYADSVKGRFTISRDNANNSPYLQMNSLRAEDTAVYYCV

SEQ ID NO: 92080 - protein, 182 aa, Homo sapiens
PAPRHVFGLEKSQLLKEAFDKAGPVPKGREDVKRLLKLHKDRFRGDLRWILFCADLPSLIQEGPQCGLVALWMAGTLLSPPSGVPLERLIRVATERGYTAQGEMFSAPATTRTSTMSRVRGRATRHTGRGRLCHLTRHLRNLLPGPSASHRTGTLNCVSLSSPLLSPSFKAHLGAVTCASPS

SEQ ID NO: 92081 - protein, 159 aa, Homo sapiens
MKVVNLKQAILQAWKERWSDYQWAINMKKFFPKGATWDILNLADALLEQAMIGPSPNPLILSYLKYAISSQMVSYSSVLTAISKFDDFSRDLCVQALLDIMDMFCDRLSCHGKAEECIGLCRALLSALHWLLRCTAASAERLREGLEAGTPAAGEKQLA

SEQ ID NO: 92082 - protein, 206 aa, Homo sapiens
MRTSMKKVGMHHLSSSGGSYYLILDDAPPGTQEYIMLRQDSIQSAELKKKESPFRAKCHEIFCCPLKQVHHKENTEPEEPQLKGIVTKLYSRQGYHLQLQADGTIDGTKDEDSTYTLFNLIPVGLRVVAIQGVQTKLYLAMNSEGYLYTSELFTPECKFKESVFENYYVTYSSMIYRQQQSGRGWYLGLNKEGEIMKGNHVKKNKP

SEQ ID NO: 92083 - protein, 168 aa, Homo sapiens
MYDNLYLHGIEDSEAGSADSYTSRPSDSDVSLEEDREAIRQEREQQAAIQLERAKSKPVAFAVKTNVSYCGALDEDVPVPSTAISFDAKDFLHIKEKYNNDWWIGRLVKEGCEIGFIPSPLRLENIRIQQEQKRGRFHGGKSSGNSSSSLGEMVSGTFRATPTSTGFQ

SEQ ID NO: 92084 - protein, 133 aa, Homo sapiens
MTDTVFSNSSNRWMYPSDRPLQSNDKEQLQAGWSVHPGGQPDRQRKQEELTDEEKEIINRVIARAEKMEEMEQERIGRLVDRLENMRKNVAGDGVNRCILCGEQLGMLGSACVVCEDCKKNVCTKCGVETNNR

SEQ ID NO: 92085 - protein, 40 aa, Homo sapiens
MLQGHSSVFQALLGTFFTWGMTAAGAALVFVFSSGQRRIL

SEQ ID NO: 92086 - protein, 65 aa, Homo sapiens
MTLASRLSTAANTGQIDDPQEQHRVISSNLALIQVQATVVGLLAAVAALLLGVVSREEVDVAKGC

SEQ ID NO: 92087 - protein, 115 aa, Homo sapiens
MSDAQDGPRVRYNPYTTRPNRRGDTWHDRDRIHVTVRRDRAPPERGGAGTSQDGTSKNWFKITIPYGRKYDKAWLLSMIQSKCSVPFTPIEFHYENTRAQFFVEDASTASALKAV

SEQ ID NO: 92088 - protein, 115 aa, Homo sapiens
MDNVQPKIKHRPFCFSVKGHVKMLRLDLTNSIITAVFLSVVAILAMQEKKRRHLLYVGGSLCLTAVIVCCIDAFVVTTKMRTNLKRFLGVEVERKLSPAKDAYPETGPDAPQRPA

SEQ ID NO: 92089 - protein, 90 aa, Homo sapiens
  MOD_RES (1)..(1): Any amino acid
XGDEQWILAEVVSYSHATNKYEALFQKEQLVLALYPQTTCFYRALIHAPPQRPQDDYSVLFEDTSYADGYSPPLNVAQRYVVACKEPKKK

SEQ ID NO: 92090 - protein, 146 aa, Homo sapiens
MREPALAASAMAYHPFHAPRPADFPMSAFLAAAQPSFFPALALPPGALAKPLPDPGLAGAAAAAAAAAAAAEAGLHVSALGPHPPAAHLRSLKSLEPEDEVEDDPKVTLEAKELWDQFHKLGTEMVITKSGRCESAAWTRRPSISC

SEQ ID NO: 92091 - protein, 665 aa, Homo sapiens
QKEDDVACSRRLSWGSSRRRNNSSSSFSPHFLGPGVGGAASKGCLIRNTRGFLSSGGSPLRPANASLEEMASLEEEACSLKVDSKDSSHNSTNSEFAAEAEGQNDTIEEPNKVQKRKRDRLRDQGSTMIYLKAIQGILGKSMPKRKGEAATRAKPSAAEHPSHGEGPARSEGPAKTAEGAARSVTVTAAQKEKDATPEVSMEEDKTVPERSSFYDRRVVIDPQEKPSEEPLGDRRTVIDKCSPPLEFLDDSDSHLEIQKHKDREVVMEHPSSGSDWSDVEEISTVRFSQEEPVSLKPSAVPEPSSFTTDYVMYPPHLYSSPWCDYASYWTSSPKPSSYPSTGSSSNDAAQVGKSSRSRMSDYSPNSTGSVQNTSRDMEASEEGWSQNSRSFRFSRSSEEREVKEKRTFQEEMPPRPCGGHASSSLPKSHLEPSLEEGFIDTHCHLDMLYSKLSFQGTFTKFRKIYSSSFPKEFQGCISDFCDPRTLTDCLWEELLKEDLVWGAFGCHPHFARYYSESQERNLLQALRHPKAVAFGEMGLDYSYKCTTPVPEQHKVFERQLQLAVSLKKPLVIHCREADEDLLEIMKKFVPPDYKIHRHCFTGSYPVIEPLLKYFPNMSVGFTAVLTYSSAWEAREALRQIPLERIIVETDAPYFLPRQAVQSPTL

SEQ ID NO: 92092 - protein, 117 aa, Homo sapiens
MEDDTSWRSEATFQFTVERFSRLSESVLSPPCFVRNLPWKIMVMPRFYPDRPHQKSVGFFLQCNAESDSTSWSCHAQAVLKIINYRDDEKSFSRRISHLFFHKENDWGFSNFMAWSE

SEQ ID NO: 92093 - protein, 422 aa, Homo sapiens
MASPDFQARKGKRVHQETLAPGETKDKMELLGLRGPLDLLGPGALLATLGKMAPGEHKAQRAPKESPDKTARWAQRDPQGPRVSLEYLERRATMGHQASLDHQGPRASQGAWGLGERTVWTVPQDRRGSLATEARMELQGPGVTSGILASALSPHAPRGWLLPPKKMDLSPRLAVQGAPGLKGEQGDTVVIDYDGRILDALKGPPGPQGPPGPPGIPGAKGELGLPGAPGIDGEKGPKGQKGDPGEPGPAGLKGEAGEMGLSGLPGADGLKGEKGESASDSLQESLAQLIVEPGPPGPPGPPGPMGLQGIQGPKGLDGAKGEKGASGERGPSGLPGPVGPPGLIGLPGTKGEKGRPGEPGLDGFPGPRGEKGDRSERGEKGERGVPGRKGVKGQKGEPGPPGLDQPCPVGPDGLPVPGCWHK

SEQ ID NO: 92094 - protein, 193 aa, Homo sapiens
MEETIKDPPTSAVLLDHCHFSQVIFNSVEKFYIPGGDVTCHYTFTQHFIPRRKDWIGIFRVGWKTTREYYTFMWVTLPIDLNNKSAKQQEVQFKAYYLPKDDEYYQFCYVDEDGVVRGASIPFQFRPENEEDILVVTTQGEVEEIEQHNKELCKENQELKDSCISLQKQNSDMQAELQKKQEELETLQSINKK

SEQ ID NO: 92095 - protein, 351 aa, Homo sapiens
MVAFAGWSLPVQYRDSHTDSHLHTRQHCSLFDVSHMLQTKILGSDRVKLMESLVVGDIAELRPNQGTLSLFTNEAGGILDDLIVTNTSEGHLYVVSNAGCWEKDLALMQDKVRELQNQGRDVGLEVLDNALLALQAQVLQAGVADDLRKLPFMTSAVMEVFGVSGCRVTRCGYTGEDGVEISVPVAGAVHLATAILKNPEVKLAGLAARDSLRLEAGLCLYGNDIDEHTTPVEGSLSWTLGKRRRAAMDFPGAKVIVPQLKGRVQRRRVGLMCEGAPMRAHSPILNMEGTKIGTVTSGCPSPSLKKNVAMGYVPCEYSRPGTMLLVEVRRKQQMAVVSKMPFVPTNYYTLK

SEQ ID NO: 92096 - protein, 47 aa, Homo sapiens
  MOD_RES (1)..(1): Any amino acid
XIIKPCNHVLSLSFPIRRDDGSWEVIEGYRAQHSQHRTPCKGVTTCT

SEQ ID NO: 92097 - protein, 128 aa, Homo sapiens
MAPRLCSISVTARRLLGGPGPRAGDVASAAAARFYSKDNEGSWFRSLFVHKVDPRKDAHSTLLSKKETSNLYKIQFHNVKPEYLDAYNSLTEAVLPKLHLDEDYPCSLVGNWNTWYGEQDQAGHSWFW

SEQ ID NO: 92098 - protein, 236 aa, Homo sapiens
  MOD_RES (1)..(1): Any amino acid
XNSNVLLWITALAIKFTLIDSQAQYPVVNTNYGKIQGLRTPLPSEILGPVEQYLGVPYASPPTGERRFQPPESPSSWTGIRNATQFSAVCPQHLDERFLLHDMLPIWFTTSLDTLMTYVQDQNEDCLYLNIYVPMEDGTNIKRNADDITSNDHGEDKDIHEQNSKKPVMVYIHGGSYMEGTGNMIDGSILASYGNVIVITINYRLGILGMQEARLCGSSKMFNYFKSPFTNLINFF

SEQ ID NO: 92099 - protein, 572 aa, Homo sapiens
MSQWYELQQLDSKFLEQVHQLYDDSFPMEIRQYLAQWLEKQDWEHAANDVSFATIRFHDLLSQLDDQYSRFSLENNFLLQHNIRKSKRNLQDNFQEDPIQMSMIIYSCLKEERKILENAQRFNQAQSGNIQSTVMLDKQKELDSKVRNVKDKVMCIEHEIKSLEDLQDEYDFKCKTLQNREHETNGVAKSDQKQEQLLLKKMYLMLDNKRKEVVHKIIELLNVTELTQNALINDELVEWKRRQQSACIGGPPNACLDQLQNWFTIVAESLQQVRQQLKKLEELEQKYTYEHDPITKNKQVLWDRTFSLFQQLIQSSFVVERQPCMPTHPQRPLVLKTGVQFTVKLRLLVKLQELNYNLKVKVLFDKDVNERNTVKGFRKFNILGTHTKVMNMEESTNGSLAAEFRHLQLKEQKNAGTRTNEGPLIVTEELHSLSFETQLCQPGLVIDLETTSLPVVVISNVSQLPSGWASILWYNMLVAEPRNLSFFLTPPCARWAQLSEVLSWQFSSVTKRGLNVDQLNMLGEKLLGPNASPDGLIPWTRFCKVHHGLHQQGARACPVEGPAAGDLPAAVQ

SEQ ID NO: 92100 - protein, 67 aa, Homo sapiens
MVCGSDGHSYTSKCKLEFHACSTGKSLATLCDGPCPCLPEPEPPKHKAERSACTDKELRNLASRLKD

SEQ ID NO: 92101 - protein, 180 aa, Homo sapiens
MGSSSLSEDYRQCLERELRRGRAGVCGDPSLRAVLWQILVEDFDLHGALQDDALALLTDGLWGRADLAPALRGLARAFELLELAAVHLYLLPWRKEFTTIKTFSGGYVHVLKGVLSDDLLLKSFQKMGYVRRDSHRLMVTALPPACQLVQVALGCFALRLECEILGEVLAQLGTSVLPAE

SEQ ID NO: 92102 - protein, 152 aa, Homo sapiens
MQCDFTEDQTAEFKEAFQLFDRTGDGKILYSQCGDVMRALGQNPTNAEVLKVLGNPKSDEMNVKVLDFEHFLPMLQTVAKNKDQGTYEDYVEGLRVFDKEGNGTVMGAEIRHVLVTLGEKMTEEEVEMLVAGHEDSNGCINYEAFVRHILSG

SEQ ID NO: 92103 - protein, 119 aa, Homo sapiens
  MOD_RES (1)..(1): Any amino acid
XRNPEDVDRERREHEREERMGQLRGSATRALPPGPPTGATANRLRSAAEPVASTPASRIQPAGNTSPRAISRVDRERKVSMRLHRGAPANVSSSDLTGRQEVSRIPASQTSVPFDHLGK

SEQ ID NO: 92104 - protein, 51 aa, Homo sapiens
  MOD_RES (1)..(1): Any amino acid
XLMVFGIFLCLDAFLYVFTLLPLRVFLALFRLLTLPCYGLRPKGGALSLPL

SEQ ID NO: 92105 - protein, 246 aa, Homo sapiens
  MOD_RES (1)..(1): Any amino acid
XTNSELSNPSETESERKDELSDWSLAGEDDRDSRHQRDSRRRPGGRGRSVSGGRGRGGPRGGKSSISSVLKDPDSNPYSLLDNTESDQTADTDASESHHSTNRRRRSRRRRTDEDAVLMDGMTESDTASVNENGLDDSEKKPQRRNRSRRRRFRGQAEDRQPVTVADYISRAESQSRQRNLPRETLAKNKKEMAKDVIEEHGPSEKAINGPTSASGDDISKLQRTPGEEKINTLKEENTQEAAVLN

SEQ ID NO: 92106 - protein, 61 aa, Homo sapiens
  MOD_RES (1)..(1): Any amino acid
XLGRLFGKGKKEKGPTPEEAIQKLKETEKILIKKQEFLEQKIQQELQTAKKYGTKNKRVSA

SEQ ID NO: 92107 - protein, 739 aa, Homo sapiens
MPALARDGGQLPLLVVFSAMIFGTITNQDLPVIKCVLINHKNNDSSVGKSSSYPMVSESPEDLGCALRPQSSGTVYEAAAVEVDVSASITLQVLVDAPGNISCLWVFKHSSLNCQPHFDLQNRGVVSMVILKMTETQAGEYLLFIQSEATNYTILFTVSIRNTLLYTLRRPYFRKMENQDALVCISESVPEPIVEWVLCDSQGESCKEESPAVVKKEEKVLHELFGTDIRCCARNELGRECTRLFTIDLNQTPQTTLPQLFLKVGEPLWIRCKAVHVNHGFGLTWELENKALEEGNYFEMSTYSTNRTMIRILFAFVSSVARNDTGYYTCSSSKHPSQSALVTIVEKGFINATNSSEDYEIDQYEEFCFSVRFKAYPQIRCTWTFSRKSFPCEQKGLDNGYSISKFCNHKHQPGEYIFHAENDDAQFTKMFTLNIRRKPQVLAEASASQASCFSDGYPLPSWTWKKCSDKSPNCTEEITEGVWNRKANRKVFGQWVSSSTLNMSEAIKGFLVKCCAYNSLGTSCETILLNSPGPFPFIQDNISFYATIGVCLLFIVVLTLLICHKYKKQFRYESQLQMVQVTGSSDNEYFYVDFREYEYDLKWEFPRENLEFGKVLGSGAFGKVMNATAYGISKTGVSIQVAVKMLKEKADSSEREALMSELKMMTQLGSHENIVNLLGACTLSGPIYLIFEYCCYGDLLNYLRSKREKFHRTWTEIFKEHNFSFYPTFQSHPNSSKKK

SEQ ID NO: 92108 - protein, 106 aa, Homo sapiens
MHLLGPWLLLLVLEYLAFSDSSKWVFEHPETLYAWEGACVWIPCTYRALDGDLESFILFHNPEYNKNTSKFDGTRLYESTKDGKVPSEQKRVQFLGDKNKNCTLSI

SEQ ID NO: 92109 - protein, 67 aa, Homo sapiens
VTEVSFAVENGDSGSRYYYSDNFFDGQRKRPLGDRAHEDYRYYEYNHDLFQRMPQNQGRHASDMTTF

SEQ ID NO: 92110 - protein, 163 aa, Homo sapiens
  MOD_RES (1)..(1): Any amino acid
XAVNDTLLYDSLYTRNNAREQLEVLFPFCVVERTSQIYLHHILRQLLVRNLGEQALLLAQSCATLPYFPHVLELMLHEVLEEEATSREPIPDPLLPTVAKFITEFPLFLQTVVHCARKTEYALWNYLFAAVGNPKDLFEECLMAQDLDTAASYLIILQMEQRQ

SEQ ID NO: 92111 - protein, 254 aa, Homo sapiens
MEPAVSEPMRDQVARTHLTEDTPKVNADIEKVNQNQAKRCTVIGGSGFLGQHMVEQLLARGYAVNVFDIQQGFDNPQVRFFLGDLCSRQDLYPALKGVNTVFHCASPPPSSNNKELFYRVNYIGTKNVIETCKEAGVQKLILTSSASVIFEGVDIKNGTEDLPYAMKPIDYYTETKILQERAVLGANDPEKNFLTTAIRPHGIFGPRDPQLVPILIEAARNGKMKFVIGNGKNLVDFTFVENVVHGHILAAEQL

SEQ ID NO: 92112 - protein, 200 aa, Homo sapiens
MTRAGDHNRQRGCCGSLADYLTSAKFLLYLGHSLSTWGDRMWHFAVSVFLVELYGNSLLLTAVYGLVVAGSVLVLGAIIGDWVDKNARLKVAQTSLVVQNVSVILCGIILMMVFLHKHELLTMYHGWVLTSCYILIITIANIANLASTATAITIQRDWIVVVAGEDRSKLANMNATIRRIDQLTNILAPMAVGQIMTFGS

SEQ ID NO: 92113 - protein, 153 aa, Homo sapiens
VSEQPNKDVVEQMEKCIQEKDEKLKTVEELLETGLIQVATKEEELNAIRTENSSLTKEVQDLKAKQNDQVSFASLVEELKKVIHEKDGKIKSVEELLEAELLKVANKEKTVQDLKQEIKALKEEIGNVQLEKAQQIESSGKSSPEELTSKPRI

SEQ ID NO: 92114 - protein, 118 aa, Homo sapiens
EGCRYNVMHVAAKENQASICQLTLDVLENPDFMRLMYPDDDEAMLQKRIRYVVDLYLNTPDKMGYDTPLHFACKFGNADVVNVLSSHHLIVKNSRNKYDKTPEDELHLDPASQQKVCV

SEQ ID NO: 92115 - protein, 220 aa, Homo sapiens
MEGPRGWLVLCVLAISLASMVTEDLCRAPDGKKGEAGRPGRRGRPGLKGEQGEPGAPGIRTGIQGLKGDQGEPGPSGNPGKVGYPGPSGPLGARGIPGIKGTKGSPGNIKDQPRPAFSAIRRNPPMGGNVVIFDTVITNQEEPYQNHSGRFVCTVPGYYYFTFQVLSQWEICLSIVSSSRGQVRRSLGFCDTTNKGLFQVVSGGMVLQLQQGDQVWVEKD

SEQ ID NO: 92116 - protein, 288 aa, Homo sapiens
MLQDLSASVFFPPCSQHRTLVAFHGLPLKIKKEPHSPCSEISSACSQEQPFKFSYGEKCLYNVSAYDQKPQVGMRPSNPPTPSSTPVSPLHHASPNSTHTPKPDRAFPAHLPPSQSIPDSSYPMDHRFRRQLSEPCNSFPPLPTMPREGRPMYQRQMSEPNIPFPPQGFKQEYHDPVYEHNTMVGSAASQSFPPPLMIKQEPRDFAYDSEVPSCHSIYMRQEGFLAHPSRTEGCMFEKGPRQFYDDTCVVPEKFDGDIKQEPGMYREGPTYQRRGSLQLWQFLVALLD

SEQ ID NO: 92117 - protein, 162 aa, Homo sapiens
MTSGANSSGSYLPSEISLQIMRQIMAGKGCEESSVMELLKEAEEMKQNLERKNKMLRKEMEMLWNKTFEAEELSDQQKAPQTKNKADLQDGKEKQQRKMEWVKYQEQNNILQNDFHGKVIELRIEALKNYQKANDLKLSLYLQQNFEPMQAFLNLPGSQAFP

SEQ ID NO: 92118 - protein, 116 aa, Homo sapiens
MGMCSRQERIQKDIDVVIQKSRAEKDCLFADFRYSDSTFTFTYVGGPRSVSYSVHVSEDYPDNTYVSSSENDEDVLVTTEPIPVIFHRIATELRKTNDINCCLSIKSKLQKENGEV

SEQ ID NO: 92119 - protein, 102 aa, Homo sapiens
MSCPTPGCDGSGHVSGSFLTHRRQAVPVFSGTEKHPYLYTWISVSPRTQHEDRGLSCSPGSPRAQQTGRSLLGAQKPRVSQSRLTLPIEPVPARATWCPVQV

SEQ ID NO: 92120 - protein, 78 aa, Homo sapiens
  MOD_RES (1)..(1): Any amino acid
XYINNMVRVGTLIMCLHDVSDFLLEAAKLANYAKYQRLCDTLFVIFSAVFMVTRLGIYPFWYRRMIAVMWRAAQRKKM

SEQ ID NO: 92121 - protein, 124 aa, Homo sapiens
  MOD_RES (1)..(1): Any amino acid
XDFLHIKEKYNNDWWIGRLVKEGCEIGFIPSPLRLENIRIQQEQKRGRFHGGKSSGNSSSSLGEMVSGTFRATPTSTDGAHSSLRCCTVNASGGVSGAVTERLRGTNIICYSSVLDRAPRRQSC

SEQ ID NO: 92122 - protein, 106 aa, Homo sapiens
MAAVVENVVKLLGEQYYKDAMEQCHNYNARLCAERSVRLPFLDSQTGVAQSNCYIWMEKRHRGPGLASGQLYSYPARRWRKKRRAHPPEDPRLSFPSIKPADPRTR

SEQ ID NO: 92123 - protein, 612 aa, Homo sapiens
HSFITPPTTPQLRRHTKLKPPRTPPPPSRKVFQLLPSFPTLTRSKSHESQLGNRIDDVSSMRFDLSHGSPQMVRRDIGLSVTHRFSTKSWLSQVCHVCQKSMIFGVKCKHCRLKCHNKCTKEAPACRISFLPLTRLRRTESVPSDINNPVDRAAEPHFGTLPKALTKKEHPPAMNHLDSSSNPSSTTSSTPSSPAPFPTSSNPSSATTPPNPSPGQRDSRFNFPAAYFIHHRQQFIFPDISAFAHAAPLPEAADGTRLDDQPKADVLEAHEAEAEEPEAGKSEAEDDEDEVDDLPSSRRPWRGPISRKASQTSVYLQEWDIPFEQVELGEPIGQGRWGRVHRGRWHGEVAIRLLEMDGHNQDHLKLFKKEVMNYRQTRHENVVLFMGACMNPPHLAIITSFCKGRTLHSFVRDPKTSLDINKTRQIAQEIIKGMGYLHAKGIVHKDLKSKNVFYDNGKVVITDFGLFGISGVVREGRRENQLKLSHDWLCYLAPEIVREMTPGKDEDQLPFSKAADVYAFGTVWYELQARDWPLKNQAAEASIWQIGSGEGMKRVLTSVSLGKEVSEILSACWAFDLQERPSFSLLMDMLEKLPKLNRRLSHPGHFWKSAEL

SEQ ID NO: 92124 - protein, 505 aa, Homo sapiens
MTEVQAMVEFSVELNKFYNVDLFQRGFYQIRASMKIPSRIPHRVEASLLHATGMTLAFPASVHDSLICSKTFQILYKNEEVVLNDVMIFKVKMLLDERKIEETLEEMNFLLSLDLHFTDGDYSADDLNALQLISSRTLKLHFSPHRGLHHHVNVMFDYFHLSVVSVTVHASLVALHQPLISFPRPVKTTWLNRNAPAQNKDSVIPTLESVVFGINYTKQLSPDGCSFIIADSFLHHAYRFHYTLCATLLLAFKGLHSYFITVTEEIPSCQKLELEEMDVEARLTELCEEVKKIENPDELAELINMNLAQLCSLLMALWGQFLEVITLHEELRILLAQEHHTLRVRRFSEAFFCFEHPREAAIAYQELHAQSHLQMCTAIKNTSFCSSLPPLPIECSELDGDLNSLPIIFEDRYLDSVTEDLDAPWMGIQNLQRSESSKMDKYETEESSVAGLSSPELKVRPAGASSIWYTEGEKQLTKSLKGKNEESNKSKVKVTKLMKTMKSEN

SEQ ID NO: 92125 - protein, 78 aa, Homo sapiens
  MOD_RES (1)..(1): Any amino acid
XIIVVILMIPIAVCIYWINKLQKEKKILSGEKEFERETREIALKELEKERVQKEEELQVKEKLQEELRWRRTFLHAGW

SEQ ID NO: 92126 - protein, 88 aa, Homo sapiens
MSEARRDSTSSLQRKKPPWLKLDIPSAVPLTAEEPSFLQPLRRQAFLRSVSMPAETAHISSPHHELRRPVLQRQTSITQTIRRPWSLE

SEQ ID NO: 92127 - protein, 121 aa, Homo sapiens
MDSRLQEIRERQKLRRQLLAQQICGIWLKPWKLGVRFVPLFLIPLALRSWANQVSFLSLLFANFFYRIIFKNLGAESADSIGAVLNSKDEQREIAETRETCRASYDTSAPNAKRKYLDEGE

SEQ ID NO: 92128 - protein, 207 aa, Homo sapiens
MASFPPRVNEKEIVFLFFLLVRLRTIGELLAPAAPFDKKCGRENWTVAFAPDGSYFAWSQGHRTVKLVPWSQCLQNFLLHGTKNVTNSSSLRLPRQNSDGGQKNKPREHIIDCGDIVWSLAFGSSVPEKQSRCVNIEWHRFRFGQDQLLLATGLNNGRIKIWDVYTGKLLLNLVDHTEVVRDLTFAPDGSLILVSASRDKTLRVWDL

SEQ ID NO: 92129 - protein, 269 aa, Homo sapiens
MIPEPKGKEIVSLLERNITVTMYITIGTRNLQKYVSRTSVVFVSISFIVLMIISLAWLVFYYIQRFRYANARDRNQRRLGDAAKKAISKLQIRTIKKGDKETESDFDNCAVCIEGYKPNDVVRILPCRHLFHKSCVDPWLLDHRTCPMCKMNILKALGIPPNADCMDDLPTDFEGSLGGPPTNQITGASDTTVNESSVTLDPAVRTVGALQVVQDTDPIPQEGDVIFTTNSEQEPAVSSDSDISLIMAMEVGLSDVELSTDQDCEEVKS

SEQ ID NO: 92130 - protein, 208 aa, Homo sapiens
MAPWPPKGLVPAMLWGLSLFLNLPGPIWLQPSPPPQSSPPPQPHPCHTCRGLVDSFNKGLERTIRDNFGGGNTAWEEENLSKYKDRQQEAPDLFQWLCSDSLKLCCPAGTFGPSCLPCFGPCARCSGPEESNCLQCKKGWALHHLKCVDIDECGTEGANCGADQFCVNTEGSYECRDCAKACLGCMGAGPGRCKKCSPGYQQVGSKCL

SEQ ID NO: 92131 - protein, 231 aa, Homo sapiens
MNKQRGTFSEVSLAQDPKRQQRKPKGNKSSISGTEQEIFQVELNLQNPSLNHQGIDKIYDCQGLLPPPEKLTAEVLGIICIVLMATVLKTIVLIPFLEQNNSSPNTRTQKTRHCGHCPEEWITYSNSCYYIGKERRTWEESLLACTSKNSSLLSIDNEEEMKFLASILPSSWIGVFRNSSHHPWVTINGLAFKHKIKDSDNAELNCAVLQVNRLKSAQCGSSMIYHCKHKL

SEQ ID NO: 92132 - protein, 73 aa, Homo sapiens
MIPNQHNAGAGSHQPAVFRMAVLDTDLDHILPSSVLPPFWAKLVVGSVAIVCFARSYDGDFVFDDSEAIVNNK

SEQ ID NO: 92133 - protein, 889 aa, Homo sapiens
MAADVVGDVYVLVEHPFEYTGKDGRRVAIRPNERYRLLRRSTEHWWHVRREPGGRPFYLPAQYVRELPALGNPAAAAPPGPHPSPAAPEPLAYDYRFVSAAATAGPDGAPEESGGRTSSLCGPAQRGAATQRSSLAPGLPACLYLRPAAPVRPAQSLNDLACAAVSPPAGLLGSSGSFKACSVAGSWVCPRPLARSDSENVYEVIQDLHVPPREESAEQVDDPPEPVYANIERQPRATSPGAAAAPLPSPVWETHTDAGTGRPYYYNPDTGVTTWESPFEAAEGAASPATSPASVDSHVSLETEWGQYWDEESRRVFFYNPLTGETAWEDEAENEPEEELEMQPGLSPGSPGDPRPPTPETDYPESLTSYPEEDYSPVGSFGEPGPTSPLTTPPGWSCHVSQDKQMLYTNHFTQEQWVRLEDPHGKPYFYNPEDSSVRWELPQVPVPAPRSIHKSSQDGDTPAQASPPEEKVPAELDEVGSWEEVSPATAAVRTKTLDKAGVLHRTKTADKGKRLRKKHWSASWTVLEGGVLTFFKDSKTSAAGGLRQPSKFSTPEYTVELRGATLSWAPKDKSSRKNVLELRSRDGSEYLIQHDSEAIISTWHKAIAQGIQELSAELPPEESESSRVDFGSSERLGSWQEKEEDARPNAAAPALGPVGLESDLSKVRHKLRKFLQRRPTLQSLREKGYIKDQVFGCALAALCERERSRVPRFVQQCIRAVEARGLDIDGLYRISGNLATIQKLRYKVDHDERLDLDDGRWEDVHVITGALKLFFRELPEPLFPFSHFRQFIAAIKLQDQARRSRCVRDLVRSLPAPNHDTLRMLFQHLCRVIEHGEQNRMSVQSVAIVFGPTLLRPEVEETSMPMTMVFQNQVVELILQQCADIFPPH

SEQ ID NO: 92134 - protein, 45 aa, Homo sapiens
MDADSDVALDILITNVVCVFRTRCHLNLRKIALEGANVIYKRDVG

SEQ ID NO: 92135 - protein, 100 aa, Homo sapiens
MPGVTVKDVNQQEFVRALAAFLKKSGKLKVPEWVDTVKLAKHKELAPYDENWFYTRAGEELSFHSAAPVPPGWRWGWLHDQDLWGTSEKRRHAQPLQPRL

SEQ ID NO: 92136 - protein, 888 aa, Homo sapiens
MHCPGEAPLAAPRPTPKDPCLRNVLAKALYDNVAESPDELSFRKGDIMTVLEQDTQGLDGWWLCSLHGRQGIVPGNRLKILVGMYDKKPAGPGPGPPATPAQPQPGLHAPAPPASQYTPMLPNTYQPQPDSVYLVPTPSKAQQGLYQVPGPSPQFQSPPAKQTSTFSKQTPHHPFPSPATDLYQVPPGPGGPAQDIYQVPPSAGMGHDIYQVPPSMDTRSWEGTKPPAKVVVPTRVGQGYVYEAAQPEQDEYDIPRHLLAPGPQDIYDVPPVRGLLPSQYGQEVYDTPPMAVKGPNGRDPLLEVYDVPPSVEKGLPPSNHHAVYDVPPSVSKDVPDGPLLREETYDVPPAFAKAKPFDPARTPLVLAAPPPDSPPAEDVYDVPPPAPDLYDVPPGLRRPGPGTLYDVPRERVLPPEVADGGVVDSGVYAVPPPAEREAPAEGKRLSASSTGSTRSSQSASSLEVAGPGREPLELEVAVEALARLQQGVSATVAHLLDLAGSAGATGSWRSPSEPQEPLVQDLQAAVAAVQSAVHELLEFARSAVGNAAHTSDRALHAKLSRQLQKMEDVHQTLVAHGQALDAGRGSSGATLEDLDRLVACSRAVPEDAKQLASFLHGNASLLFRRTKATAPGPEGGGTLHPNPTDKTSSIQSRPLPSPPKFTSQDSPDGQYENSEGGWMEDYDYVHLQGKEEFEKTQKELLEKGSITRQGKSQLELQQLKQFERLEQEVSRPIDHDLANWTPAQPLAPGRTGGLGPSDRQLLLFYLEQCEANLTTLTNAVDAFFTAVATNQPPKIFVAHSKFVILSAHKLVFIGDTLSRQAKAADVRSQVTHYSNLLCDLLRGIVATTKAAALQYPSPSAAQDMVERVKELGHSTQQFRRVLGQLAAA

SEQ ID NO: 92137 - protein, 559 aa, Homo sapiens
MKKKLVVLGLLAVVLVLVIVGLCLWLPSASKEPDNHVYTRAAMAADAKQCLEIGRDTLRDGGSAVDAAIAALLCVGLMNAHSMGIGVGLFLTIYNSTTRKAEVINAREVAPRLAFASMFNSSEQSQKGGLSVAVPGEIRGYELAHQRHGRLPWARLFQPSIQLARQGFPVGKGLAAVLENKRTVIEQQPVLWYVFCRDRKVLREGERLTLPRLADTYEMLAIEGAQAFYNGSLMAQIVKDIQAAGGIVTAEDLNNYRAELIEHPLNISLGDAVLYMPSARLSGPVLALILNILKGYNFSRESVETPEQKGLTYHRIVEAFRFAYAKRTLLGDPKFVDVTEVVRNMTSEFFAAQLRSQISDHTTHPISYYKPEFYTPDDGGTAHLSVVAEDGSAVSATSTINLYGILFNNEWTTSALPAFTNEFGAPPSPANFIQPGKQPLLSMCLTIMVGQDGQVRMVVGAAGGTQITTDTALAIIYNLWFGYDVKRAVEEPRLHNKLLPNVTTVERNIDQAVTAALETRHHHTQIASTFIAVVQAIVRTAGGWAAASDSRKGGEPAGY

SEQ ID NO: 92138 - protein, 388 aa, Homo sapiens
MTLEPNKDLRPGDTVTITCSSYQGYPEAEVFWQDGQGVPLTGNVTTSQMANEQGLFDVHSILRVVLGANGTYSCLVRNPVLQQDAHSSVTITPQRSPTGAVEVQVPEDPVVALVGTDATLRCSFSPEPGFSLAQLNLIWQLTDTKQLVHSFTEGRDQGSAYANRTALFPDLLAQGNASLRLQRVRVADEGSFTCFVSIRDFGSAAVSLQVAAPYSKPSMTLEPNKDLRPGDTVTITCSSYRGYPEAEVFWQDGQGVPLTGNVTTSQMANEQGLFDVHSVLRVVLGANGTYSCLVRNPVLQQDAHGSVTITGQPMTFPPEALWVTVGLSVCLIALLVALAFVCWRKIKQSCEEENAGAEDQDGEGEGSKTALQPLKHSDSKEDDGQEIA

SEQ ID NO: 92139 - protein, 368 aa, Homo sapiens
MLPHVVLTFRRLGCALASCRLAPARHRGSGLLHTAPVARSDRSAPVFTRALAFGDRIALVDQHGRHTYRELYSRSLRLSQEICRLCGCVGGDLREERVSFLCANDASYVVAQWASWMSGGVAVPLYRKHPAAQLEYVICDSQSSVVLASQEYLELLSPVVRKLGVPLLPLTPAIYTGAVEEPAEVPVPEQGWRNKGAMIIYTSGTTGRPKGVLSTHQNIRAVVTGLVHKWAWTKDDVILHVLPLHHVHGVVNALLCPLWVGATCVMMPEFSPQQVWEKFLSSETPRINVFMAVPTIYTKLMEYYDRHFTQPHAQDFLRAVCEEKIRFRGDPTAWSTGAHCLRKPTEGSLLLHHPRRGRREGDQGDPRV

SEQ ID NO: 92140 - protein, 945 aa, Homo sapiens
LIEPLTNLIHSTSAMSLLYECVNTVIAVLISLSSGMPNHSASIQLCVQKLRILIEDSDQNLKYLGLLAMSKILKTHPKSVQSHKDLILQCLDDKDESIRLRALDLLYGMVSKKNLMEIVKKLMTHVDKAEGTTYRDELLTKIIDICSQSNYQYITNFEWYISILVELTRLEGTRHGHLIAAQMLDVAIRVKAIRKFAVSQMSALLDSAHLLASSTQRNGICEVLYAAAWICGEFSEHLQEPHHTLEAMLRPRVTTLPGHIQAVYVQNVVKLYASILQQKEQAGEAEGAQAVTQLMVDRLPQFVQSADLEVQERASCILQLVKHIQKLQAKDVPVAEEVSALFAGELNPVAPKAQKKVPVPEGLDLDAWINEPLSDSESEDERPRAVFHEEEQRRPKHRPSEADEEELARRREARKQEQANNPFYIKSSPSPQKRYQDTPGVEHIPVVQIDLSVPLKVPGLPMSDQYVKLEEERRHRQKLEKDKRRKKRKEKEKKGKRRHSSLPTESDEDIAPAQQVDIVTEEMPENALPSDEDDKDPNDPYRALDIDLDKPLADSEKLPIQKHRNTETSKSPEKDVPMVEKKSKKPKKKEKKHKEKERDKEKKKEKEKKAEDLDFWLSTTPPPAPAPAPAPVPSTDECEDAKTEAQGEEDDAEGQDQDKKSPKPKKKKHRKEKEERTKGKKKSKKQPPGSEEAAGEPVQNGAPEEEQLPPESSYSLLAENSYVKMTCDIRGSLQEDSQVTVAIVLENRSSSILKGMELSVLDSLNARMARPQGSSVHDGVPVPFQLPPGVSNEAQYVFTIQSIVMAQKLKGTLSFIAKNDEGATHEKLDFRLHFSCSSYLITTPCYSDAFAKLLESGDLSMSSIKVDGIRMSFQNLLAKICFHHHFSVVERVDSCASMYSRSIQGHHVCLLVKKGENSVSVDGKCSDSTLLSNLLEEMKATLAKC

SEQ ID NO: 92141 - protein, 62 aa, Homo sapiens
MPVPRATARRNHPRPPQPDPGRDSGPPSLRQPRDGVSPCWLGWSQTPELVILPPQPPKVLGL

SEQ ID NO: 92142 - protein, 21 aa, Homo sapiens
MLDINALFAEAKHYHAKLVNI

SEQ ID NO: 92143 - protein, 177 aa, Homo sapiens
  MOD_RES (1)..(1): Any amino acid
XERWNHVTTTTKRPVTTRAPANTLGNDFDLADALDDRNDRDDGRRKPIAGGGGFSDKDLEDIVGGGEYKPDKGKGDGRYGSNDDPGSGMVAEPGTIAGVASALAMALIGAVSSYISYQQKKFCFSIQHAAAGQEGLNADYVKGENLEAVVCEEPQVKYSTLHTQSAEPPPPPEPARI

SEQ ID NO: 92144 - protein, 382 aa, Homo sapiens
MYPESTTGSPARLSLRQTGSPGMIYSTRYGSPKRQLQFYRNLGKSGLRVSCLGLGTWVTFGGQITDEMAEQLMTLAYDNGINLFDTAEVYAAGKAEVVLGNIIKKKGWRRSSLVITTKIFWGGKAETERGLSRKHIIEGLKASLERLQLEYVDVVFANRPDPNTPMEGDPFSSSKSRTFIIEETVRAMTHVINQGMAMYWGTSRWSSMEIMEAYSVARQFNLTPPICEQAEYHMFQREKVEVQLPELFHKIGVGAMTWSPLACGIVSGKYDSGIPPYSRASLKGYQWLKDKILSEEGRRQQAKLKELQAIAERLGCTLPQLAIAWCLRNEGVSSVLLGASNADQLMENIGAIQVLPKLSSSIIHEIDSILGNKPYSKKDYRS

SEQ ID NO: 92145 - protein, 371 aa, Homo sapiens
MALGKFRAALRDYETVVKVKPHDKDAKMKYQECNKIVKQKAFERAIAGDEHKRSVVDSLDIESMTIEDEYSGPKLEDGKVTISFMKELMQWYKDQKKLHRKCAYQTEKITVCGDTHGQFYDLLNIFELNGLPSETNPYIFNGDFVDRGSFSVEVILTLFGFKLLYPDHFHLLRGNHETDNMNQIYGFEGEVKAKYTAQMYELFSEVFEWLPLAQCINGKVLIMHGGLFSEDGVTLDDIRKIERNRQPPDSGPMCDLLWSDPQPQNGRSISKRGVSCQFGPDVTKAFLEENNLDYIIRSHEVKAEGYEVAHGGRCVTVFSAPNYCDQMGNKASYIHLQGSDLRPQFHQFTAVPHPNVKPMAYANTLLQLGMM

SEQ ID NO: 92146 - protein, 101 aa, Homo sapiens
  MOD_RES (1)..(1): Any amino acid
XNDSLQAQLINMGVIPTLVKLLGIHCQNAALTEMCLVAFGNLAELGCTGSVVPASASGEGLRKLTIMAEGEEGAGVSHGETGSERERQRGSHRLLTRSHMN

SEQ ID NO: 92147 - protein, 199 aa, Homo sapiens
  MOD_RES (1)..(1): Any amino acid
XGDIFFMEVCDDCVVLRSNIGTVYERWWYEKLINMTYCPKTKVLCLWRRNGSETQLNKFYTKKCRELYYCVKDSMERAAARQQSIKPGPELGGEFPVQDLKTGEGGLLQVTLEGINLKFMHNQERKVFIELNHIKKCNTVRGVFVLEEFVPEIKEVVSHKYKTPMAHEICYSVLCLFSYVAAVHSSEEDLRTPPRPVSS

SEQ ID NO: 92148 - protein, 239 aa, Homo sapiens
MRASRSPPSPRRCHHHHEATGAASGAAAGGPGAGCVGLCRLALTPSAQDGRNSTFQTYKKEVCLPRHSMHPGPWAICCECQTRFGGRLPVSRVEAALPYWVPLSLRPRKQSQKTVQFPIPQTAKMCPCLCHRFGGRLPMPRDQAVMPYWVPQVLRSQQQIVRRQQSLKGIQAPLLDACCWHNCWRICGDECLLSKFQQLQAPYQDQLPAPAARLLPLGLLTLLQAIPRVIMAIRQCFGV

SEQ ID NO: 92149 - protein, 33 aa, Homo sapiens
MGKGVSKAVEHINKTIAPALVSKKLNVTEQEKI

SEQ ID NO: 92150 - protein, 835 aa, Homo sapiens
MERTDSVTLFWIRGGHSNSPAGSVAHSTTSDIRPSHSVPEGVHGRVAVGQDARFPSLTSPVLRTPSSEPDEPHQARSGPNPPGMESMGMVYSVPSSCNGPTESTFSTSWKGDAFTYMTPSATSQSNQVNENGKNPSCGNSWVSLNKVPPLVPKEAATLLVARDNPAGCSGSAGYPERLIQQRHMPERPSKIGLLTSGTSRLETGPGGASRFRERSLSVPTDSGTTDVDYDEEQKANEACALPFASTSSEGSNSADNIASLSAQQEAQHRRQRSKSISLRKAKKKPSPPTRSVSLVKDEPGLLPEGGSALPKDQRPKSLCLSLEHQGHHSSHPDAQGHPAIPNHKDPESTQFSHHWYLTDWKSGDTYQSLSSSSTATGTTVIECTQVQGSSESLASPSTSRATTPSQLSIEVEAREISSPGRPPGLMSPSSGYSSQSETPTPTVSMSLTLGHLPPPSSSVRVRPVVPERKSSLPPTSPMEKFPKSRLSFDLPLTSSPNLDLSGMSISIRSKTKVSRHHSETNFGVKLAQKTNPNQPIMPMVTQSDLRSVRLRSVSKSEPEDDIESPEYAEEPRAEEVFTLPERKTKPPVAEKPPVARRPPSLVHKPPSVPEEYALTSPTLAMPPRSSIQHARPLPQDSYTVVRKPKPSSFPDGRSPGESTAPSSLVFTPFASSSDAFFSGTQQPPQGSVEDEGPKVRVLPERISLQSQEEAEKKKGKIPPPVPKKPSVLYLPLTSPTAQMEAYVAEPRLPLSPIITLEEDTKCPATGDDLQSLGQRVTSTPQADSEREASPLGSSVEPGTEEKSLISDKTAEWIAEDDDDVFVASRTTEDLFTVIH

SEQ ID NO: 92151 - protein, 255 aa, Homo sapiens
MFTRQAGHFVEGSKAGRSRGRLCLSQALRVAVRGAFVSLWFAAGAGDRERNKGDKGAQTGAGLSQEAEDVDVSRARRVTDAPQGTLCGTGNRNSGSQSARVVGVAHLGEAFRVGVEQAISSCPEEVHGRHGLSMEIMWARMDVALRSPGRGLLAGAGALCMTLAESSCPDYERGRRACLTLHRHPTPHCSTWGLPLRVAGSWLTVVTVEALGGWRMGVRRTGQVGPTMHPPPVSGASPLLLHHLLLLLLIIILTC

SEQ ID NO: 92152 - protein, 110 aa, Homo sapiens
QSSFPQPAAVYAIHHQQLPHGFTNMAHVTQAHVQTGITAAPPPHPGAPHPPQVMLLHPPQSHGGPPQGAVPQSGVPALSASTPSPYPYIGHPQAAPLPPPGELKIVLAAT

SEQ ID NO: 92153 - protein, 690 aa, Homo sapiens
MTPQSLLQTTLFLLSLLFLVQGAHGRGHREDFRFCSQRNQTHRSSLHYKPTPDLRISIENSEEALTVHAPFPAAHPASRSFPDPRGLYHFCLYWNRHAGRLHLLYGKRDFLLSDKASSLLCFQHQEESLAQGPPLLATSVTSWWSPQNISLPSAASFTFSFHSPPHTAAHNASVDMCELKRDLQLLSQFLKHPQKASRRPSAAPASQQLQSLESKLTSVRFMGDMVSFEEDRINATVWKLQPTAGLQDLHIHSRQEEEQSEIMEYSVLLPRTLFQRTKGRSGEAEKRLLLVDFSSQALFQDKNSSQVLGEKVLGIVVQNTKVANLTEPVVLTFQHQLQPKNVTLQCVFWVEDPTLSSPGHWSSAGCETVRRETQTSCFCNHLTYFAVLMVSSVEVDAVHKHYLSLLSYVGCVVSALACLVTIAAYLCSRVPLPCRRKPRDYTIKVHMNLLLAVFLLDTSFLLSEPVALTGSEAGCRASAIFLHFSLLTCLSWMGLEGYNLYRLVVEVFGTYVPGYLLKLSAMGWGFPIFLVTLVALVDVDNYGPIILAVHRTPEGVIYPSMCWIRDSLVSYITNLGLFSLVFLFNMAMLATMVVQILRLRPHTQKWSHVLTLLGLSLVLGLPWALIFFSFASGTFQLVVLYLFSIITSFQGFLIFIWYWSMRLQARGGPSPLKSNSDSARLPISSGSTSS

SEQ ID NO: 92154 - protein, 418 aa, Homo sapiens
MGLLVFVRNLLLALCLFLVLGFLYYSAWKLHLLQWEEDSKYDRLGFLLNLDSKLPAELATKYANFSEGACKPGYASALMTAIFPRFSKPAPMFLDDSFRKWARIREFVPPFGIKGQDNLIKAILSVTKEYRLTPALDSLRCRRCIIVGNGGVLANKSLGSRIDDYDIVVRLNSAPVKGFEKDVGSKTTLRITYPEGAMQRPEQYERDSLFVLAGFKWQDFKWLKYIVYKERVSASDGFWKSVATRVPKEPPEIRILNPYFIQEAAFTLIGLPFNNGLMGRGNIPTLGSVAVTMALHGCDEVAVAGFGYDMSTPNAPLHYYETVRMAAIKEPRPHVENLNPSELRLPHFCFDHQPSTDPSLKPGNLGPVLQQLLCCYIWVMGGCWREPPICADSCFFLDAQYPARERVSAEAGESSRHH

SEQ ID NO: 92155 - protein, 68 aa, Homo sapiens
  MOD_RES (1)..(1): Any amino acid
XAIPVSIHVNVILFSAILIVLTMVGTAFFMYNAFGKPFETLHGPLGLYLLSFISEAAADPVWKHSPCL

SEQ ID NO: 92156 - protein, 376 aa, Homo sapiens
TECYSSDEDLAEQLLVYSCEAWGGSNCLELAVEATDQHFIAQPGVQWYVNGVNYFTDLWNVMDTLGLFYFIAGIVFRLHSSNKSSLYSGRVIFCLDYIIFTLRLIHIFTVSRNLGPKIIMLQRMLIDVFFFLFLFAVWMVAFGVARQGILRQNEQRWRWIFRSVIYEPYLAMFGQVPSDVDGTTYDFAHCTFTGNESKPLCVELDEHNLPRFPEWITIPLVCIYMLSTNILLVNLLVAMFGYTVGTVQENNDQVWKFQRYFLVQEYCSRLNIPFPFIVFAYFYMVVKKCFKCCCKEKNMESSVCCFKNEDNETLAWEGVMKENYLVKINTKANDTSEEMRHRFRQLDTKIILRNADEQFCYRLLNERFSDPWVHGG

SEQ ID NO: 92157 - protein, 184 aa, Homo sapiens
MPLHVKWPFPAVPPLTWTLASSVVMGLVGTYSCFWTKYMNHLTVHNREVLYELIEKRGPATPLITVSNHQSCMDDPHLWGILKLRHIWNLKLMRWTPAAADICFTKELHSHFFSLGKCVPVCRDGVYQKGMDFILEKLNHGDWVHIFPEGKVNMSSEFLRFKWGIGRLIAECHLNPIILPLWHV

SEQ ID NO: 92158 - protein, 75 aa, Homo sapiens
MELGELLYNKSEYIETASGNKVSRQSVLCGSQNIVLNGKAGVQWRDLGSLQPPPPRFKRFSCLSLPSSWDYCRPL

SEQ ID NO: 92159 - protein, 73 aa, Homo sapiens
MCGICCSVNFSAEHFSQDLKEDLLYNLKQRGPNSSKQLLKSDVNYQCLFSAHVLHLRGVLTTQPVEDERGNVF

SEQ ID NO: 92160 - protein, 26 aa, Homo sapiens
SAKGQLTNIGLYGQIRHPPACMEAEE

SEQ ID NO: 92161 - protein, 388 aa, Homo sapiens
MHKENEEIYNVSENRKHCPIFPCPLLTRSGKVPEFRHEREERLEEMIRRQNLDGNLSFVMWGLKVLLLPVVSFALYPEEILDTHWELWKKTHRKQYNNKVDEISRRLIWEKNLKYISIHNLEASLGVHTYELAMNHLGDMTSEEVVQKMTGLKVPLSHSRSNDTLYIPEWEGRAPDSVDYRKKGYVTPVKNQGQCGSCWAFSSVGALEGQLKKKTGKLLNLSPQNLVDCVSENDGCGGGYMTNAFQYVQKNRGIDSEDAYPYVGQEESCMYNPTGKAAKCRGYREIPEGNEKALKRAVARVGPVSVAIDASLTSFQFYSKGVYYDESCNSDNLNHAVLAVGYGIQKGNKHWIIKNSWGENWGNKGYILMARNKNNACGIANLASFPKM

SEQ ID NO: 92162 - protein, 1839 aa, Homo sapiens
MMNEDAAQKSDSGEKFNGSSQRRKRPKKSDSNASFLRAARAGNLDKVVEYLKGGIDINTCNQNGLNALHLAAKEGHVGLVQELLGRGSSVDSATKKGNTALHIASLAGQAEVVKVLVKEGANINAQSQNGFTPLYMAAQENHIDVVKYLLENGANQSTATEDGFTPLAVALQQGHNQAVAILLENDTKGKVRLPALHIAARKDDTKSAALLLQNDHNADVQSKMMVNRTTESGFTPLHIAAHYGNVNVATLLLNRGAAVDFTARNGITPLHVASKRGNTNMVKLLLDRGGQIDAKTRDGLTPLHCAARSGHDQVVELLLERGAPLLARTKNGLSPLHMAAQGDHVECVKHLLQHKAPVDDVTLDYLTALHVAAHCGHYRVTKLLLDKRANPNARALNGFTPLHIACKKNRIKVMELLVKYGASIQAITESGLTPIHVAAFMGHLNIVLLLLQNGASPDVTNIRGETALHMAARAGQVEVVRCLLRNGALVDARAREEQTPLHIASRLGKTEIVQLLLQHMAHPDAATTNGYTPLHISAREGQVDVASVLLEAGAAHSLATKKGFTPLHVAAKYGSLDVAKLLLQRRAAADSAGKNGLTPLHVAAHYDNQKVALLLLEKGASPHATAKNGYTPLHIAAKKNQMQIASTLLNYGAETNIVTKQGVTPLHLASQEGHTDMVTLLLDKGANIHMSTKSGLTSLHLAAQEDKVNVADILTKHGADQDAHTKLGYTPLIVACHYGNVKMVNFLLKQGANVNAKTKNGYTPLHQAAQQGHTHIINVLLQHGAKPNATTANGNTALAIAKRLGYISVVDTLKVVTEEVTTTTTTITEKHKLNVPETMTEVLDVSDEEGDDTMTGDGGEYLRPEDLKELGDDSLPSSQFLDGMNYLRYSLEGGRSDSLRSFSSDRSHTLSHASYLRDSAVMDDSVVIPSHQVSTLAKEAERNSYRLSWGTENLDNVALSSSPIHSGFLVSFMVDARGGAMRGCRHNGLRIIIPPRKCTAPTRVTCRLVKRHRLATMPPMVEGEGLASRLIEVGPSGAQFLGPVIVEIPHFAALRGKERELVVLRSENGDSWKEHFCDYTEDELNEILNGMDEVLDSPEDLEKKRICRIITRDFPQYFAVVSRIKQDSNLIGPEGGVLSSTVVPQVQAVFPEGALTKRIRVGLQAQPMHSELVKKILGNKATFSPIVTLEPRRRKFHKPITMTIPVPKASSDVMLNGFGGDAPTLRLLCSITGGTTPAQWEDITGTTPLTFVNECVSFTTNVSARFWLIDCRQIQESVTFASQVYREIICVPYMAKFVVFAKSHDPIEARLRCFCMTDDKVDKTLEQQENFAEVARSRDVEVLEGKPIYVDCFGNLVPLTKSGQHHIFSFFAFKENRLPLFVKVRDTTQEPCGRLSFMKEPKSTRGLVHQAICNLNITLPIYTKESESDQEQEEEIDMTSEKNPQDEQERIEERLAYIADHLGFSWTELARELDFTEEQIHQIRIENPNSLQDQSHALLKYWLERDGKHATDTNLVECLTKINRMDIVHLMETNTEPLQERISHSYAEIEQTITLDHSEGFSVLQEELCTAQHKQKEEQAVSKESETCDHPPIVSEEDISVGYSTFQDGVPKTEGDSSATALFPQTHKEQVQQDFSGKMQDLPEESSLEYQQEYFVTTPGTETSETQKAMIVPSSPSKTPEEVSTPAEEEKLYLQTPTSSERGGSPIIQEPEEPSEHREESSPRKTSLVIVESADNQPETCERLDEDAAFEKGDDMPEIPPETVTEEEYIDEHGHTVVKKVTRKIIRRYVSSEGTEKEEIMVQGMPQEPVNIEEGDGYSKVIKRVVLKSDTEQSEDNNE

SEQ ID NO: 92163 - protein, 173 aa, Homo sapiens
MCIEGSQGCENPKPSLTDLVVLEHGLYAGDPVSKVLLKPLTGRTHQLRVHCSALGHPVVGDLTYGEVSGREDRPFRMMLHAFYLRIPTDTECVEVCTPDPFLPSLDACWSPHTLLQSLDQLVQALRATPDPDPEDRGPRPGSPSALLPGPGRPPPPPTKPPETEAQRGPCLQW

SEQ ID NO: 92164 - protein, 114 aa, Homo sapiens
MAEEKKLKLSNTVLPSESMKVVAESMGIAQIQEETCQLLTDEVSYRIKEIAQDALKFMHMGKRQKLTTSDIDYALKLKNVEPLYGFHAQEFIPFRFASGGGRELYFYEEKEVDL

SEQ ID NO: 92165 - protein, 188 aa, Homo sapiens
  MOD_RES (1)..(1): Any amino acid
XGTRQPPYGPSAPVPPMTRPPPSNYQPPPSMQNHIPQVSSPAPLPRPMENRTSPSKSPFLHSGMKMQKAGPPVPASHIAPAPVQPPMIRRDITFPPGSVEATQPVLKQRRRLTMKDIGTPEAWRVMMSLKSGLLAESTWALDTINILLYDDNSIMTFNLSQISSMPVLCFLCLWARAQDFDSNNNLFT

SEQ ID NO: 92166 - protein, 1375 aa, Homo sapiens
MADVTARSLQYEYKANSNLVLQADRSLIDRTRRDEPTGEVLSLVGKLEGTRMGDKAQRTKPQMQEERRAKRRKRDEDRHDINKMKGYTLLSEGIDEMVGIIYKPKTKETRETYEVLLSFIQAALGDQPRDILCGAADEVLAVLKNEKLRDKERRKEIDLLLGQTDDTRYHVLVNLGKKITDYGGDKEIQNMDDNIDETYGVNVQFESDEEEGDEDVYGEVREEASDDDMEGDEAVVRCTLSANLVASGELMSSKKKDLHPRDIDAFWLQRQLSRFYDDAIVSQKKADEVLEILKTASDDRECENQLVLLLGFNTFDFIKVLRQHRMMILYCTLLASAQSEAEKERIMGKMEADPELSKFLYQLHETEKEDLIREERSRRERVRQSRMDTDLETMDLDQGGEALAPRQVLDLEDLVFTQGSHFMANKRCQLPDGSFRRQRKGYEEVHVPALKPKPFGSEEQLLPVEKLPKYAQAGFEGFKTLNRIQSKLYRAALETDENLLLCAPTGAGKTNVALMCMLREIGKHINMDGTINVDDFKIIYIAPMRSLVQEMVGSFGKRLATYGITVAELTGDHQLCKEEISATQIIVCTPEKWDIITRKGGERTYTQLVRLIILDEIHLLHDDRGPVLEALVARAIRNIEMTQEDVRLIGLSATLPNYEDVATFLRVDPAKGLFYFDNSFRPVPLEQTYVGITEKKAIKRFQIMNEIVYEKIMEHAGKNQVLVFVHSRKETGKTARAIRDMCLEKDTLGLFLREGSASTEVLRTEAEQCKNLELKDLLPYGFAIHHAGMTRVDRTLVEDLFADKHIQVLVSTATLAWGVNLPAHTVIIKGTQVYSPEKGRWTELGALDILQMLGRAGRPQYDTKGEGILITSHGELQYYLSLLNQQLPIESQMVSKLPDMLNAEIVLGNVQNAKDAVNWLGYAYLYIRMLRSPTLYGISHDDLKGDPLLDQRRLDLVHTAALMLDKNNLVKYDKKTGNFQVTELGRIASHYYITNDTVQTYNQLLKPTLSEIELFRVFSLSSEFKNITVREEEKLELQKLLERVPIPVKESIEEPSAKINVLLQAFISQLKLEGFALMADMVYVTQSAGRLMRAIFEIVLNRGWAQLTDKTLNLCKMIDKRMWQSMCPLRQFRKLPEEVVKKIEKKNFPFERLYDLNHNEIGELIRMPKMGKTIHKYVHLFPKLELSVHLQPITRSTLKVELTITPDFQWDEKVHGSSEAFWILVEDVDSEVILHHEYFLLKAKYAQDEHLITFFVPVFEPLPPQYFIRVVSDRWLSCETQLPVSFRHLILPEKYPPPTELLDLQPLPVSALRNSAFESLYQDKFPFFNPIQTQVFNTVYNSDDNVFVGAPTGSGKTICAEFAILRMLLQSSEGR

SEQ ID NO: 92167 - protein, 214 aa, Homo sapiens
  MOD_RES (1)..(1): Any amino acid
XRNLIIEAVTNLRLIESLFTIQKMIMDQEKQEDQEGVGEFSSPGQEQLSGQAQPPEGSEDPRGFTESFGAANISQAARERDCESVCFIGRPWRVVDGHLNLPVCKGMMEAMLYHIMTRPGIPESSLLRHYQGVLQPVAVLELLQGLESLGCIRKRWLRKPRPVSLFSTPVVEEVEVPSSLDESPMAFYEPTLDCTLRLGRVFPHEVNWNKWIHL

SEQ ID NO: 92168 - protein, 151 aa, Homo sapiens
MEICDIINETEEGPKDALRAVKKRIVGNKNFHEVMLALTVLETCVKNCGHRFHVLVASQDFVESVLVRTILPKNNPPTIVHDKVLNLIQSWADAFRSSPDLTGVVTIYEDLRRKGLEFPMTDLDMLSPIHTPQRTVFNSETQSGQDSVGTD

SEQ ID NO: 92169 - protein, 79 aa, Homo sapiens
MREAAERRQQLQLEHDQALAVLSAKQQEIDLLQKPQKTNLQCPHFRKCPMLSQLTMTFVSTLGFKRQKTQTGNCFCAHH

SEQ ID NO: 92170 - protein, 95 aa, Homo sapiens
MDGFYDQQVPYMVTNSQRGRNCNEKPTNVRKRKFINRDLAHDSEELFQDLSQLQETWLAEAQVPDNDEQFVPDYQAESLAFHGLPLKIKKEPHSP

SEQ ID NO: 92171 - protein, 1668 aa, Homo sapiens
MGKPLSRPDCLRRNPSCLGKGEEEDGYIEDCYVPQRSIYDTMRINEQIDQGSKLNQTSKSTMEKMEGSTISSNGTLGAASNVFESRAPEGKKLDERIIFDALKLSSDVQKSAPVPPRRRPNAERKDNVNRRSWKSFMPPNFPEFAERIEASLSEVSEAGASNPSLQEKKESSSALTESSGHLDHREPQSESVTLEHVSKSIGIPEVQDFKNLSGDCQDFRFQQHSANPPHEFQPVESEAVATSGNTDVMQESRFSSATWPRATKSLAKGGFSEKQHPLGDTACTVEMPPLSPCLSEELLDPELHVLITPSLREKTESELKFEEDERWIMMEAEGEWEEEKLSDREKTFLMADEKNSLADIFEEREQANTAVVEDGSDCLAAVLRTFGHLSLGQICCPDDPQPAKDQLATVPKDIPLDCDCVLTGEDILGEVANRTAQGLEGLVSDSACTVGTIDAEQLSDTDSVQMFLELEKECLCEEGVTPLVELQNQISSEGLAASQDAENLLVISHFSGAALEKEQHLGLLHVRAKDYDTRLDCGYFNTLDSSQVPNAVELIAHVDIMRDTSTVSKEECEKVPFSPRTAEFKSRQPADLDSLEKLDPGGLLNSDHRVSHEEKLSGFIASELAKDNGSLSQGDCSQTEGNGEECIERVTFSFAFNHELTDVTSGPEVEVLYESNLLTDEIHLESGNVTVNQENNSLTSMGNVVTCELSVEKVCDEDGEAKELDYQATLLEDQAPAHFHRNFPEQVFQDLQRKSPESEILSLHLLVEELRLNPDGVETVNDTKPELNVASSEGGEMERRDSDSFLNIFPEKQVTKAGNTEPVLEEWIPVLQRPSRTAAVPTVKDALDAALPSPEEGTSIAAVPAPEGTAVVAALVPFPHEDILVASIVSLEEEDVTAAAVSAPERATVPAVTVSVPEGTAAVAAVSSPEETAPAVAAAITQEGMSAVAGFSPEWAALAITVPITEEDGTPEGPVTPATTVHAPEEPDTAAVRVSTPEEPASPAAAVPTPEEPTSPAAAVPTPEEPTSPAAAVPPPEEPTSPAAAVPTPEEPTSPAAAVPTPEEPTSPAAAVPTPEEPTSPAAAVPTPEEPTSPAAAVPTPEEPTSPAAAVPTPEEPASPAAAVPTPEEPASPAAAVPTPEEPAFPAPAVPTPEESASAAVAVPTPEESASPAAAVPTPAESASFAAVVATLEEPTSPAASVPTPAAMVATLEEFTSPAASVPTSEEPASLAAAVSNPEEPTSPAAAVPTLEEPTSSAAAVLTPEELSSPAASVPTPEEPASPAAAVSNLEEPASPAAAVPTPEVAAIPAASVPTPEVPAIPAAAVPPMEEVSPIGVPFLGVSAHTDSVPISEEGTPVLEEASSTGMWIKEDLDSLVFGIKEVTSTVLHGKVPLAATAGLNSDEMFQKEQVDPLQMKLQQVNGLGQGLIQSAGKDCDVQGLEHDMEEINARWNTLNKKVAQRIAQLQEALLHCGKFQDALEPLLSWLADTEELIANQKPPSAEYKVVKAQIQEQKLLQRLLDDRKATVDMLQAEGGRIAQSAELADREKITGQLESLESRWTELLSKAAARQKQLEDILVLAKQFHETAEPISDFLSVTEKKLANSEPVGTQTAKIQQQIIRHKALEEDIENHATDVHQAVKIGQSLSSLTSPAEQGVLSEKIDSLQA

SEQ ID NO: 92172 - protein, 245 aa, Homo sapiens
SQPHGVYPPSSVQGIQQTAPPQQTVQYSLSQTSTSSEATTAQPVSQPQAPQVLPQVSAGKQLPVSQPVPTIQGEPQIPVATQPSVVPVHSGAHFLPVGQPLPTPLLPQYPVSQIPISTPHVSTAQTGFSSLPITMAAGITQPLLTLASSATTAAIPGVSTVVPSQLPTLLQPVTQLPSQVHPQLLQPAVQSMGIPANLGQAAEVPLSSGDVLYQGFPPRLPPQYPGDSNIAPSSNVASVCIHSTV

SEQ ID NO: 92173 - protein, 334 aa, Homo sapiens
MPNVAETERSNDSGNGEHKSERKSPEENLQGAVKSFCTSASGAPLGPKGDGHYPWSCPVTHTREKIYAICSDYAFLNQATSIYKTPNPSRSPCLPDSTSLSAGNNSSRYIGIPTSTSEIIYNEENSLENLSNSLGKLPLAWEIDKSEFDGVTTNSKHKSGNAKKQVSKRKTSDKKGRYQKECPQHSPLEDIKQRKVLDLRRWYCISRPQYKTSCGISSLISCWNFLYSTMGAGNLPPITQEEALHILGFQPPFEDIRFGPFTGNTTLMRWFRQINDHFHVKGCSYVLYKPHGKNKTAGETGCAKPFSGPKDFYGHSPVIRSFRGPVKVNPWIER

SEQ ID NO: 92174 - protein, 123 aa, Homo sapiens
MDALEGESFALSFSSASDAEFDAVVGYLEDIIMEKYIEEQLLQRIPEFNMAAFTTTLQHHKDEVAGDIFDMLLTFTDFLAFKEMFLDYRAEKEGRGLDLSSGLVVTSLCKSSSLPASQNNLRH

SEQ ID NO: 92175 - protein, 196 aa, Homo sapiens
SSRSNSFGERPGGGGGARRVRALVSHSEGANHTLLRFSAGDVVEVLVPEAQNGWLYGKLEGSSASGWFPEAYVKALEEGPVNPMTPVTPMTSMTSMSPMTPMNPGNELPSRSYPLRGSHSLDDLLDRPGNSIAPSEYWDGQSRSRTPSRVPSRAPSPAPPPLPSSRRSSMGSTAVATDVKGHKSFCHCQASSHHHQ

SEQ ID NO: 92176 - protein, 67 aa, Homo sapiens
MVPTSLLTLWFCYFFLTYLCLYYLSTFLRSLLTSDREKQKVTVRIRRKRRRRGRARLSMRLSRRRVR

SEQ ID NO: 92177 - protein, 153 aa, Homo sapiens
MTISDEWDIPEKQPFKDLGNLRYWLEEAECRDQYSVIFESGDRTSIFWNDVKDPVSIEERARWTETYVRWSPKGTYLATFHQRGIALWGGEKFKQIQRFSHQGVQLIDFSPCERYLVTFSPLMDTQDDPQAIIIWDILTGHKKRGFHCESSAH

SEQ ID NO: 92178 - protein, 135 aa, Homo sapiens
  MOD_RES (1)..(1): Any amino acid
XAYQGYSPQRTYRSEVSSPIQRGDVTIDRRHRAHHPKHVYVPDRRSVPAGLTLQSVSPQSLQGKTPEELTLLLIKLRRQQAELSSIREHTLAQLMQLKLEAHSPKNEILSHHLQRNTIYLDHQLCCKLMFAVCSS

SEQ ID NO: 92179 - protein, 97 aa, Homo sapiens
MAAERKTRLSKNLLRMKFMQRGLDSETKKQLEEEEKKIISEEHWYLDLPELKEKESFIIEEQSFLLCEDLLYGRMSFRGFNPEVEVFLHQVPFLLII

SEQ ID NO: 92180 - protein, 364 aa, Homo sapiens
MQRLGATLLCLLLAAAVPTAPAPAPTATSAPVKPGPALSYPQEEATLNEMFREVEELMEDTQHKLRSAVEEMEAEEAAAKASSEVNLANLPPSYHNETNTDTKVGNNTIHVHREIHKITNNQTGQMVFSETVITSVGDEEGRRSHECIIDEDCGPSMYCQFASFQYTCQPCRGQRMLCTRDSECCGDQLCVWGHCTKMATRGSNGTICDNQRDCQPGLCCAFQRGLLFPVCTPLPVEGELCHDPASRLLDLITWELEPDGALDRCPCASGLLCQPHRLPRLEPGFVPSLPSHSLVYVCKPTFVGSRDQDGEILLPREVPDEYEVGSFMEEVRQELEDLERSLTEEMALREPAAAAAALLGGEEI

SEQ ID NO: 92181 - protein, 180 aa, Homo sapiens
MESQEPTESSQNGKQYIISEELISEGKWVKLEKTTYMDPTGKTRTWESVKRTTRKEQTADGVAVIPVLQRTLHYECIVLVKQFRPPMGGYCIEFPAGLIDDGETPEAAALRELEEETGYKGDIAECSPAVCMDPGLSNCTIHIVTVTINGDDAENARPKPKPGDGGMFCNSWWPSVYDLV

SEQ ID NO: 92182 - protein, 66 aa, Homo sapiens
  MOD_RES (1)..(1): Any amino acid
XQFQARVSRQTLLALEKEEEEEVFESSVPQRSTLAELKSKGKKTARAPIIRVGGALKGHHVKLNLV

SEQ ID NO: 92183 - protein, 37 aa, Homo sapiens
  MOD_RES (1)..(1): Any amino acid
XELIGKKKTICESSGIWSNPSPICQSKKSKRSMNDPY

SEQ ID NO: 92184 - protein, 114 aa, Homo sapiens
MIESENLNQEEIIKELCLCNGLSYEMVGQEGSDTSKLEMFFLGYPRIVGLSLFPNLTSLTIVAQDIKEISGLEPCLQLKELWIAECCIEKIEGLQECRNLEKLYLYFNKISKIE

SEQ ID NO: 92185 - protein, 121 aa, Homo sapiens
MHVIIAGNNDSKAKQVVSKIKEETLNDKVEFLYCDLASMTSIRQFVQKFKMKKIPLHVLINNAGVMMVPQRKTRDGFEEHFGLNYLGHFLLTNLLLDTLKESGSPGHSARVVTVSSATHYV

SEQ ID NO: 92186 - protein, 173 aa, Homo sapiens
MPPGIPTKCAKQPHSGTAGLEEGAEAERLLFKDRHFTCSKIIGRRFACFAQRLSHRRKQSQCDLLNESTGQLPTTCSSAASNSINWNCRVKMTQQMQNLHLCQSKKHSAPSSPNAAKRLYRNLSEKLKGSHSSFDEAYFRTRTDRLSLRKTSVNFQGNEAMFEAVEQQDMDAV

SEQ ID NO: 92187 - protein, 163 aa, Homo sapiens
MLENYSNLVAVGYQASKPDALFKLEQGEQLWTIEDGIHSGACSDIWKVDHVLERLQSESLVNRRKPCHEHDAFENIVHCSKSQFLLGQNHDIFDLRGKSLKSNLTLVNQSKGYEIKNSVEFTGNGDSFLHANHERLHTAIKFPASQKLISTKSQFISPKHQKT

SEQ ID NO: 92188 - protein, 44 aa, Homo sapiens
  MOD_RES (1)..(1): Any amino acid
XIHKDKTEKQEKPERKIQTKDWSANSSTIRTLKLTQLKPIYICT

SEQ ID NO: 92189 - protein, 251 aa, Homo sapiens
MDLKFNNSRKYISITVPSKTQTMSPHIKSVDDVVVLGMNLSKFNKLTQFFICVAGVFVFYLIYGYLQELIFSVEGFKSCGWYLTLVQFAFYSIFGLIELQLIQDKRRRIPGKTYMIIAFLTVGTMGLSNTSLGYLNYPTQVIFKCCKLIPVMLGGVFIQGKRYNVADVSAAICMSLGLIWFTLADSTTAPNFNLTGVVLISLALCADAVIGNVQEKAMKLHNASNSEMNITTSSYSGVFIFPNKLKIPLVL

SEQ ID NO: 92190 - protein, 231 aa, Homo sapiens
  MOD_RES (1)..(1): Any amino acid
XGRLAEVQDSSMPVPAQPKAGGSGSYWPARHSGARVILLVLYREHLNPNGHHFLTKEELLQRCAQKSPRVAPGSARPWPALRSLLHRNLVLRTHQPARYSLTPEGLELAQKLAESEGLSLLNVGIGPKEPPGEETAVPGAASAELASEAGVQQQPLELRPGEYRVLLCVDIGETRGLPSLPLQGRAQAGAAPRATAAARDPHANPGELVLDHIVERKRLDDLCSSIIDGRF

SEQ ID NO: 92191 - protein, 136 aa, Homo sapiens
MGETEKRIETHRIRCLSKLKMFLLAITCAFVSKTLSGSYMNSMLTQIERQFNIPTSLVGFINGSFEIGNLLLIIFVSYFGTKLHRPIMIGIGCVVMGLGCFLKSLPHFLMNQYEYESTVSVSGNLSSNSFLCMENG

SEQ ID NO: 92192 - protein, 118 aa, Homo sapiens
MSNRSSFSRLTWFRKQRKAVVSTSDKKMPNGILEEQEQQRVMLLSRSPSGPKKYFPIPVEHLEEEIRIRSADDCKQFREEFNSLPSGHIQGTFELANKEENREKNRYPNILPRLQREE

SEQ ID NO: 92193 - protein, 1472 aa, Homo sapiens
MEAATTLHPGPRPALPLGGPGPLGEFLPPPECPVFEPSWEEFADPFAFIHKIRPIAEQTGICKVRPPPDWQPPFACDVDKLHFTPRIQRLNELELVAEEGGFAVVCKDRKWTKIATKMGFAPGKAVGSHIRGHYERILNPYNLFLSGDSLRCLQKPNLTTDTKDKEYKPHDIPQRQSVQPSETCPPARRAKRMRAEAMNIKIEPEETTEARTHNLRRRMGCPTPKCENEKEMKSSIKQEPIERKDYIVENEKEKPKSRSKKATNAVDLYVCLLCGSGNDEDRLLLCDGCDDSYHTFCLIPPLHDVPKGDWRCPKCLAQECSKPQEAFGFEQAARDYTLRTFGEMADAFKSDYFNMPVHMVPTELVEKEFWRLVSTIEEDVTVEYGADIASKEFGSGFPVRDGKIKLSPEEEEYLDSGWNLNNMPVMEQSVLAHITADICGMKLPWLYVGMCFSSFCWHIEDHWSYSINYLHWGEPKTWYGVPGYAAEQLENVMKKLAPELFVSQPDLLHQLVTIMNPNTLMTHEVPVYRTNQCAGEFVITFPRAYHSGFNQGFNFAEAVNFCTVDWLPLGRQCVEHYRLLHRYCVFSHDEMICKMASKADVLDVVVASTVQKDMAIMIEDEKALRETVRKLGVIDSERMDFELLPDDERQCVKCKTTCFMSAISCSCKPGLLVCLHHVKELCSCPPYKYKLRYRYTLDDLYPMMNALKLRAESYNEWALNVNEALEAKINKKKSLVSFKALIEESEMKKFPDNDLLRHLRLVTQDAEKCASVAQQLLNGKRQTRYRSGGGKSQNQLTVNELRQFVTQLYALPCVLSQTPLLKDLLNRVEDFQQHSQKLLSEETPSAAELQDLLDVSFEFDVELPQLAEMRIRLEQARWLEEVQQACLDPSSLTLDDMRRLIDLGVGLAPYSAVEKAMARLQELLTVSEHWDDKAKSLLKARPRHSLNSLATAVKEIEEIPAYLPNGAALKDSVQRARDWLQDVEGLQAGGRVPVLDTLIELVTRGRSIPVHLNSLPRLETLVAEVQAWKECAVNTFLTENSPYSLLEVLCPRCDIGLLGLKRKQRKLKEPLPNGKKKSTKLESLSDLERALTESKETASAMATLGEARLREMEALQSLRLANEGKLLSPLQDVDIKICLCQKAPAAPMIQCELCRDAFHTSCVAVPSISQGLRIWLCPHCRRSEKPPLEKILPLLASLQRIRVRLPEGDALRYMIERTVNWQHRAQQLLSSGNLKFVQDRVGSGLLYSRWQASAGQVSDTNKVSQPPGTTSFSLPDDWDNRTSYLHSPFSTGRSCIPLHGVSPEVNELLMEAQLLQVSLPEIQELYQTLLAKPSPAQQTDRSSPVRPSSEKNDCCRGKRDGINSLERKLKRRLEREGLSSERWERVKKMRTPKKKKIKLSHPKDMNNFKLERERSYELVRSAETHSLPSDTSYSEQEDSEDEDAICPAVSCLQPEGDERWQRKKTTSVCAVL

SEQ ID NO: 92194 - protein, 56 aa, Homo sapiens
  MOD_RES (1)..(1): Any amino acid
XNPFDQDIYGREELRSPKLFYADHPFIFLVRDTQSGSLLFIGRLVRPKGDKMRDEL

SEQ ID NO: 92195 - protein, 372 aa, Homo sapiens
MKRRTDPECTAPIKKQKKRVAELALSLSSTSDDEPPSSVSHGAKASTTSLSGSDSETEGKQHSSDSFDDAFKADSLVEGTSSRYSMYNSVSQKLMAKMGFREGEGLGKYSQGRKDIVEASSQKGRRGLGLTLRGFDQELNVDWRDEPEPSACEQVSWFPECTTEIPDTQEMSDWMVVGKRKMIIEDETEFCGEELLHSVLQCKKPLVKDREAELLYFADVCAGPGGFSEYVLWRKKWHAKGFGMTLKGPNDFKLEDFYSASSELFEPYYGEGGIDGDGDITRPENISAFRNFVLDNTDRKGVHFLMADGGFSVEGQENLQEILSKQLLLCQFLMALSIVRTGGHFICKTFDLFTPFSVGLVYLLYCCFERVC

SEQ ID NO: 92196 - protein, 61 aa, Homo sapiens
MLKALFLTMLTLALVKSQDTEETITYTQCTDGYEWDPVRQQCKDIDECDIVPDACKGGMKC

SEQ ID NO: 92197 - protein, 28 aa, Homo sapiens
  MOD_RES (1)..(1): Any amino acid
XNRKEKIRTGKKSEATRDSAECQAMFYG

SEQ ID NO: 92198 - protein, 1140 aa, Homo sapiens
MMEFDGNFNTNVSRTISCDRLSTTVNSRAFNPGRDLNSVLADNLKSNPGIKWQYFSSEEGIFTVFPAHKFRCKGSYEHRSRPIYVSTVRPQSKHIVVILDHGASVTDTQLQIAKDAAQVILSAIDEHDKISVLTVADTVRTCSLDQCYKTFLSPATSETKRKMSTFVSSVKSSDSPTQHAVGFQKAFQLIRSTNNNTKFQANTDMVIIYLSAGITSKDSSEEDKKATLQVINEENSFLNNSVMILTYALMNDGVTGLKELAFLRDLAEQNSGKYGVPDRMALPVIKGSMMVLNQLSNLETTVGRFYTNLPNRMIDEAVFSLPFSDEMGDGLIMTVSKPCYFGNLLLGIVGVDVNLAYILEDVTYYQDSLASYTFLIDDKGYTLMHPSLTRPYLLSEPPLHTDIIHYENIPKFELVRQNILSLPLGSQIIAVPVNSSLSWHINKLRETGKEAYNVSYAWKMVQDTSFILCIVVIQPEIPVKQLKNLNTVPSSKLLYHRLDLLGQPSACLHFKQLATLESPTIMLSAGSFSSPYEHLSQPETKRMVEHYTAYLSDNTRLIANPGLKFSVRNEVMATSHVTDEWMTQMEMSSLNTYIVRRYIATPNGVLRIYPGSLMDKAFDPTRRQWYLHAVANPGLISLTGPYLDVGGAGYVVTISHTIHSSSTQLSSGHTVAVMGIDFTLRYFYKVLMDLLPVCNQDGGNKIRCFIMEDRGYLVAHPTLIDPKGHAPVEQQHITHKEPLVANDILNHPNFVKKNLCNSFSDRTVQRFYKFNTSLAGDLTNLVHGSHCSKYRLARIPGTNAFVGIVNETCDSLAFCACSMVDRLCLNCHRMEQNECECPCECPLEVNECTGNLTNAENRNPSCEVHQEPVTYTAIDPGLQDALHQCVNSRCSQRLESGDCFGVLDCEWCMVDSDGKTHLDKPYCAPQKECFGGIVGAKSPYVDDMGAIGDEVITLNMIKSAPVGPVAGGIMGCIMVLVLAVYAYRHQIHRRSHQHMSPLAAQEMSVRMSNLENDRDERDDDSHEDRGIISNTRFIAAVIERHAHSPERRRRYWGRSGTESDHGYSTMSPQEDSENPPCNNDPLSAGVDVGNHDEDLDLDTPPQTAALLSHKFHHYRSHHPTLHHSHHLQAAVTVHTVDAEC

SEQ ID NO: 92199 - protein, 225 aa, Homo sapiens
MLSAVARGYQGWFHPCARLSVRMSSTGIDRKGVLANRVAVVTGSTSGIGFAIARRLARDGAHVVISSRKQQNVDRAMAKLQGEGLSVAGIVCHVGKAEDREQLVAKALEHCGGVDFLVCSAGVNPLVGSTLGTSEQIWDKILSVNVKSPALLLSQLLPYMENRRGAVILVSSIAAYNPVVALGVYNVSKTALLGLTRTLALELAPKDIRVNCVVPGIIKTDFSKV

SEQ ID NO: 92200 - protein, 146 aa, Homo sapiens
MQVTLKTLQQQTFKIDIDPEETVKALKEKIESEKGKDAFPVAGQKLIYAGKILNDDTALKEYKIDEKNFVVVMVTKPKAVSTPAPATTQQSAPASTTAVTSSTTTTVAQAPTPVPALAPTSTPASITPASATASSEPAPASAAKQE

SEQ ID NO: 92201 - protein, 373 aa, Homo sapiens
MYTVGYSFSLISLFLALTLLLFLRKLHCTRNYIHMNLFASFILRTLAVLVKDVVFYNSYSKRPDNENGWMSYLSEMSTSCRSVQVLLHYFVGANYLWLLVEGLYLHTLLEPTVLPERRLWPRYLLLGWAFPVLFVVPWGFARAHLENTGCWTTNGNKKIWWIIRGPMMLCVTVNFFIFLKILKLLISKLKAHQMCFRDYKYRLAKSTLVLIPLLGVHEILFSFITDDQVEGFAKLIRLFIQLTLSSFHGFLVALQYGFANGEVKAELRKYWVRFLLARHSGCRACVLGKDFRFLGKCPKKLSEGDGAEKLRKLQPSLNSGRLLHLAMRGLGELGAQPQQDHARWPRGSSLSECSEGDVTMANTMEEILEESEI

SEQ ID NO: 92202 - protein, 191 aa, Homo sapiens
MMLTIGDVIKQLIEAHEQGKDIDLNKVKTKTAAKYGLSAQPRLVDIIAAVPPQYRKVLMPKLKAKPIRTASGIAVVAVMCKPHRCPHISFTGNICVYCPGGPDSDFEYSTQSYTGYEPTSMRAIRARYDPFLQTRHRIEQLKQLGHSVDKVEFIVMGGTFMALPEEYRDYFIRNLHDALSGHTSNNIYEAV

SEQ ID NO: 92203 - protein, 171 aa, Homo sapiens
  MOD_RES (1)..(1): Any amino acid
XKLRENKKTAELIKTANLLFNSFEPYYMWDYVARWFEECCRRTLHVRLQIGPGDSNDSSELQLTNFCLLVDFLLDIVSLETYIEIQTEHLPQLLLRMISALTSHLQTLHLSELTDSLRLCSKILSKVQPPLLSASTGGVLQFPSGQNNSVKEWEDKKVSSVSHENPTEVFE

SEQ ID NO: 92204 - protein, 149 aa, Homo sapiens
MTMDKSELVQKAKLAEQAERYDDMAAAMKAVTEQGHELSNEERNLLSVAYKNVVGARRSSWRVISSIEQKTERNEKKQQMGKEYREKIEAELQDICNDVLFFRMPHSKTTLRKYCSVYEAWTPSELLLLSCWTNILFPMLHNQKVRCST

SEQ ID NO: 92205 - protein, 47 aa, Homo sapiens
MPRTKQIHPRNLRGSCSFAQAGVQWCSCSSLQPQTSGDKLRLVPFLL

SEQ ID NO: 92206 - protein, 126 aa, Homo sapiens
MAVILGIFGTVQYRSRYLILYAAWLVLWVGWNAFIICFYLEVGQLSQDRDFIMTFNTSLHRSWWMENGPGCLVTPVLNSRLALEDHHVISVTGCLLDYPYIEALSSALQIFLALFGFVFACYVSKV

SEQ ID NO: 92207 - protein, 569 aa, Homo sapiens
MDEADFSEHTTYKQEDLPYDGDLSQIKIGNDYSFTSKKDGLEVLNQIIFIADDPQEKAMHSETCGNTAVTIPLGKITENAANKKDEKEKQCTAALHIPANEGDASKSSISDILLHHLSKEPFLRGQGIDCETLPEISNADSFEEEAIIKSIISCYNKNSWPKEQTPELTDQLNPKRDGENSNKPGSATTTEENTSDLEGPVAAGDSSHQENVNVLTKTKGPGDKQKSYQGQSPQKQQTEKANSGNTFKYGQGQVHYQLPDFSKIAPKVKIPKNKIINKPLAIAKQASFSSKSRDKPTLVQDSLETTPESNCVEKQHQEQKGKITEPSQQIQMEPIVHIHQELLTGIESEASLSKLSPTSQKGTSSSSSYIFQKISQGKQMCQKLKEQTDQLKTKVQEFSKRIKQDSPYHLQDKKLVLEKLQGHLELLEQNFLATKDKHLTLQQQVHKHESTIVGDFDPERKVEGEIFKLEMLLEDVKEKMDESKYTSAPSLPVSSPVTLDDLASTFSSLSNEIPKEHPGHPSGPRGSGGSEVTGTPQGGPQEAPNEELCELAPQTRIPTALQEGRIVQR

SEQ ID NO: 92208 - protein, 176 aa, Homo sapiens
MEKEVSDFIQDSGQIKKKFQPMNKIERSILHDVVEVAGLTSFSFGEDDDCRYVMIFKKEFAPSDEELDSYRRGEEWDPQKAEEKRKLKELAQRQEEEAAQQGPVVVSPASDYKDKYSHLIGKGAAKDAAHMLQANKTYGCVPVANKRDTRSIEEAMNEIRAKKRLRQSGEELPPTS

SEQ ID NO: 92209 - protein, 488 aa, Homo sapiens
  MOD_RES (1)..(1): Any amino acid
XASEGMKFKFHSGEKVLCFEPDPTKARVLYDAKIVDVIVGKDEKGRKIPEYLIHFNGWNRRRSTGRKKKRCRLPGVDSVLKGLPTEEKDENDENSLSSSSDCSENKDEEISEESDIEEKTEVKEEPELQTRREMEERTITIEIPEVLKKQLEDDCYYINRRKRLVKLPCQTNIITILESYVKHFAINAAFSANERPRHHHVMPHANMNVHYIPAEKNVDLCKEMVDGLRITFDYTLPLVLLYPYEQAQYKKVTSSKFFLPIKESATSTNRSQEELSPSPPLLNPSTPQSTESQPTTGEPATPKRRKAEPEALQSLRRSTRHSANCDRLSESSASPQPKRRQQDTSASMPKLFLHLEKKTPVHSRSSSPIPLTPSKEGSAVFAGFEGRRTNEINEVLSWKLVPDNYPPGDQPPPPSYIYGAQHLLRLFVKLPEILGKMSFSEKNLKALLKHFDLFLRFLAEYHDDFFPESAYVAACEAHYSTKNPRAIY

SEQ ID NO: 92210 - protein, 101 aa, Homo sapiens
MQMQVEAERRKRATVLESEGTRESAINVAEGKKQAQILASEAEKAEQINQAAGEASAVLAKAKAKAEAIRILAAALTQHVRGPWVGMGTGIDSGRGSLIYA

SEQ ID NO: 92211 - protein, 165 aa, Homo sapiens
  MOD_RES (1)..(1): Any amino acid
XDSSVENMYVNKVWVQCENENCLKWRLLSSEDSAKVDHDEPWYCFMNTDSRYNNCSISEEDFPEESQLHQCGFKIVYSQLPLGSLVLVKLQNWPSWPGILCPDRFKGKYVTYDPDGNVEEYHIEFLGDPHSRSWIKATFVGHYSITLKIMRSMTYIHMLLQTYKK

SEQ ID NO: 92212 - protein, 74 aa, Homo sapiens
  MOD_RES (1)..(1): Any amino acid
XGFIAFAYSVKSRDRKMVGDVTGAQAYASTAKCLNIWALILGILMTIGFILLLVFGSVTVYHIMLQIIQEKRGY

SEQ ID NO: 92213 - protein, 46 aa, Homo sapiens
MESENMDSENMKTENMESQNVDFESVSSVTALEALSKLLNPEEEDD

SEQ ID NO: 92214 - protein, 223 aa, Homo sapiens
MAGNFDSEERSSWYWGRLSRQEAVALLQGQRHGVFLVRDSSTSPGDYVLSVSENSRVSHYIINSSGPRPPVPPSPAQPPPGVSPSRLRIGDQEFDSLPALLEFYKIHYLDTTTLIEPVSRSRQGSGVILRQEEECYTLLTLIYSVVLFSFWNHTIKWRQTVPFHPREVIMHRVNSIKQDCFHCMEHDQRVTHSDISDPKNSKNTTRSICSLLVNASYFFLGFF

SEQ ID NO: 92215 - protein, 311 aa, Homo sapiens
  MOD_RES (1)..(1): Any amino acid
XKDEYYRGGLRSAAGGALHSLAGARKWLEWRKEVELLSDVAYFGLTTLAGYQTLGEEYVSIIQVDPSRIHVPSSLRRGVLVTLHAVLPYLLDKALLPLEQELQADPDSGRPLQGSLGPGGRGCSGARRWMRHHTATLTEQQRRALLRAVFVLRQGLACLQRLHVAWFYIHGVFYHLAKRLTGITYLRVRSLPGEDLRARVSYRLLGVISLLHLVLSMGLQLYGFRQRQRARKEWRLHRGLSHRRASLEERAVSRNPLCTLCLEERRHPTATPCGHLFCWECITAWCSSKAECPLCREKFPPQKLIYLRHYR

SEQ ID NO: 92216 - protein, 226 aa, Homo sapiens
SPRLDLATHPTTPRSELSSVVLLAGVGVQMDRLRRASMADYLISGGTGYVPEDGLTAQQLFASADGLTYNDFLILPGFIDFIADEVDLTSALTRKITLKTPLISSPMDTVTEADMAIAMALMGGIGFIHHNCTPEFQANEVRKVKFEQGFITDPVVLSPSHTVGDVLEAKMRHGFSGIPITETGTMGSKLVGIVTSRDIDFLAEKDHTTLLSEANVPGPTGDDAKD

SEQ ID NO: 92217 - protein, 150 aa, Homo sapiens
VMVLLLLSLDFWSVKNVTGRLLVGLRWWNQIDEDGKSHWIFEARKVSPNSIAATEAEARIFWLGLIICPMIWIVFFFSTLFSLKLKWLALVVAGISLQAANLYGYILCKMGGNSDIGKVTASFLSQTVFQTACPGDFQKPGLEGLEIHQH

SEQ ID NO: 92218 - protein, 702 aa, Homo sapiens
MPINKSEKPESCDNVKVVVRCRPLNEREKSMCYKQAVSVDEMRGTITVHKTDSSNEPPKTFTFDTVFGPESKQLDVYNLTARPIIDSVLEGYNGTIFAYGQTGTGKTFTMEGVRAIPELRGIIPNSFAHIFGHIAKAEGDTRFLVRVSYLEIYNEEVRDLLGKDQTQRLEVKERPDVGVYIKDLSAYVVNNADDMDRIMTLGHKNRSVGATNMNEHSSRSHAIFTITIECSEKGIDGNMHVRMGKLHLVDLAGSERQAKTGATGQRLKEATKINLSLSTLGNVISALVDGKSTHVPYRNSKLTRLLQDSLGGNSKTMMCANIGPADYNYDETISTLRYANRAKNIKNKARINEDPKDALLRQFQKEIEELKKKLEEGEEISGSDISGSEEDDDEEGEVGEDGEKRKKRRDQAGKKKVSPDKMIEMQAKIDEERKALETKLDMEEEERNKARAELEKREKDLLKAQQEHQSLLEKLSALEKKVIVGGVDLLAKAEEQEKLLEESNMELEERRKRAEQLRRELEEKEQERLDIEEKYTSLQEEAQGKTKKLKKVWTMLMAAKSEMADLQQEHQREIEGLLENIRQLSRELRLQMLIIDNFIPRDYQEMIENYVHWNEDIGEWQLKCVAYTGNNMRKQTPVPDKKEKDPFEVDLSHVYLAYTEESLRQSLMKLERPRTSKGKARPKTGRRKRSAKPETVIDSLLQ

SEQ ID NO: 92219 - protein, 158 aa, Homo sapiens
MDNLSDTLKKLKITAVDKTEDSLEGCLDCLLQALAQNNTETSEKIQASGILQLFASLLTPQSSCKAKVANIIAEVAKNDSLQAQLINMGVIPTLVKLLGIHCQNAALTEMCLVAFGNLAELESSKEQFASTNIAEELVKLFKKQIEHDKREMIFEVLA

SEQ ID NO: 92220 - protein, 173 aa, Homo sapiens
GYKKDKKKKADDKSCPSTPSSGATVDSGKHRVLPVVRAELQLRRQLSFSEDSDLSSDDVLEKSSQKSRREPRTYTEEELNAKLTRRVQKAARRQAKQEELKRLHRAQIIQRQLQQVEERQRRLEERGVAVEKALRGEAVEPSGGTPRRRPLSFCPCCVQEGMGKKDDPKLMQE

SEQ ID NO: 92221 - protein, 92 aa, Homo sapiens
  MOD_RES (1)..(1): Any amino acid
XGDIGQDSSDDNHSGTLGLSLTSDAPFLSDYQDEGMEDIVKGAQELDNVIKQGYLEKKSKDHSFFGSEWQKRWCVVSRGLFYYYANEKIYSY

SEQ ID NO: 92222 - protein, 109 aa, Homo sapiens
MIDHLVTMKISHWDGVIRELAARALHNLAQQAPEFSATQVFPRLLSMTLSPDLHMRHGSILACAEVAYALYKLAAQENRPVTDHLDEQAVQGLKQIHQQLYDRQLYRGL

SEQ ID NO: 92223 - protein, 65 aa, Homo sapiens
  MOD_RES (1)..(1): Any amino acid
XEVEGWAEAVEPEEMLDVKMEDIKVCPGCAGATPSRSLGFTWGAPLGLTQPPLRSCALQLNYRVH

SEQ ID NO: 92224 - protein, 224 aa, Homo sapiens
MSRRSQRLTRYSQGDDDGSSSSGGSSVAGSQSTLFKDSPLRTLKRKSSNMKRLSPAPQLGPSSDAHTSYYSESLVHESWFPPRSSLEELHGDANWGYSDVDQQSSSSRLRSAVSRAGSLLWMVATSPGRLFRLLYWWAGTTWYRLTTAASLLDVFVLTRRFSSLKTFLWFLLPLLLLTCLTYGAWYFYPYGLQTFHPALVSWWAAKDSRRPDEGWEARDSSPHF

SEQ ID NO: 92225 - protein, 245 aa, Homo sapiens
MAVQESAAQLSMTLKVQEYPTLKVPYETLNKRFRAAQKNIDRETSHVTMVVAELEKTLSGCPAVDSVVSLLDGVVEKLSVLKRKAVESIQAEDESAKLCKRRIEHLKEHSSDQPAAASVWKRKRMDRMMVEHLLRCGYYNTAVKLARQSGIETCKKALQPSRREPAGRGAPGHGHAGLPARHAHLPVQGPSGPCTVADADPAVPVRQLPTTPAGKQFCVHPHPAGWPLSHQDTTVLQGGRQLQEP

SEQ ID NO: 92226 - protein, 64 aa, Homo sapiens
MRLPSLLSYRAVSKARKHILQIHTRDWNPKLSDAFLGELAEKCVGYCGADIKALCTEAALIALR

SEQ ID NO: 92227 - protein, 70 aa, Homo sapiens
MDKDKRIRVSQPLTRGPSAFIPEKEVVQANTVDERTNFLVEEYSTSGRLDNITQVMSLHTQYLESFLRSQ

SEQ ID NO: 92228 - protein, 394 aa, Homo sapiens
AGMAGAGAGAGARGGAAAGVEARARDPPPAHRAHPRHPRPAAQPSARRMDGGSGGLGSGDNAPTTEALFVALGAGVTALSHPLLYVKLLIQVGHEPMPPTLGTNVLGRKVLYLPSFFTYAKYIVQVDGKIGLFRGLSPRLMSNALSTVTRGSMKKVFPPDEIEQVSNKDDMKTSLKKVVKETSYEMMMQCVSRMLAHPLHVISMRCMVQFVGREAKYSGVLSSIGKIFKEEGLLGFFVGLIPHLLGDVVFLWGCNLLAHFINAYLVDDSFSQALAIRSYTKFVMGIAVSMLTYPFLLVGDLMAVNNCGLQAGLPPYSPVFKSWIHCWKYLSVQVSKHWTAEAFPVLCYILQLKWFCGCFIACKDKWFHGIQYCEEILGIYKAFKFSSYIISERI

SEQ ID NO: 92229 - protein, 106 aa, Homo sapiens
MEANHCSLGVYPSYPDLVIDVGEVTLGEENRKKLQKTQRDQERARVIRAACALLNSGGGVIQMEMANRDERPTEMGLDLEESLRKLIQYPYLQAFFETKQHGRCFY

SEQ ID NO: 92230 - protein, 179 aa, Homo sapiens
VGFVSEDEYLEIQGITREQSGDYECSASNDVAAPVVRRVKVTVNYPPYISEAKGTGVPVGQKGTLQCEASAVPSAEFQWYKDDKRLIEGKKGVKVENRPFLSKLIFFNVSEHDYGNYTCVASNKLGHTNASIMLFEVKTTALTPWKGPGAVSEVSNGTSRRAGCVWLLPLLVLHLLLKF

SEQ ID NO: 92231 - protein, 91 aa, Homo sapiens
  MOD_RES (1)..(1): Any amino acid
XPFCNLLSVKDSQVVQVVLDGLKNILIMAGDEASTIAEIIEECGGLEKIEVLQQHENEDIYKLAFEIIDQYFSGDDIDEDPCLIPEATQGG

SEQ ID NO: 92232 - protein, 115 aa, Homo sapiens
MSDPITLNVGGKLYTTSLATLTSFPDSMLGAMFSGKMPTKRDSQGNCFIDRDGKVFRYILNFLRTSHLDLPEDFQEMGLLRREADFYQVQPLIEALQEKEVELSKAEKNAMLNIT

SEQ ID NO: 92233 - protein, 142 aa, Homo sapiens
MHPGRTTGKGPSTHTQIDQQPPRLLIVHIALPSWADICTNLCEALQNFFSLACSLMGPSRMSLFSLYMVQDQHECILPFVQVKGNFARLQTCISELRMLQREGCFRSQGASLRLAVEDGLQQFKQYSRHVTTRAALTYTSLE

SEQ ID NO: 92234 - protein, 46 aa, Homo sapiens
ANLAAFMIQEEYVDQVSGLSDKKMRTLRLRRSIFPKVTKLVTEPGF

SEQ ID NO: 92235 - protein, 56 aa, Homo sapiens
MDARRVPQKDLRVKKNLKKFRYVKLISMETSSSSDDSCDSFASDNFANTKVRCKMY

SEQ ID NO: 92236 - protein, 86 aa, Homo sapiens
  MOD_RES (1)..(1): Any amino acid
XLSNSVKESSSCLSSSHPRSRSAAAQSSSRAASEISEIEYIDITDQNELSLDDTTDQHTLDNLEKELQVLRSLAGPQPEAWSPVWD

SEQ ID NO: 92237 - protein, 232 aa, Homo sapiens
MVKLANPLYTEWILEAIQKIKKQKQRPSEERICHAVSTSHGLDKKTVSEQLELSVQDGSVLKVTNKGLASYKDPDNPGRFSSVKPGTFPKSAKGSRGSCNDLRNVDWNKLLRRAIEGLEEPNGSSLKNIEKYLRSQSDLTSTTNNPAFQQRLRLGAKRAVNNGRLLKDGPQYRVNYGSLDGKGAPQYPSAFPSSLPPVSLLPHEKDQDTFLSLQRVVCSHYKQNQPNPPRFA

SEQ ID NO: 92238 - protein, 1307 aa, Homo sapiens
MKSLKSRLRRQDVPGPASSGAAAASAHAADWNKYDDRLMKAAERGDVEKVTSILAKKGVNPGKLDVEGRSVFHVVTSKGNLECLNAILIHGVDITTSDTAGRNALHLAAKYGHALCLQKLLQYNCPTEHADLQGRTALHDAAMADCPSSIQLLCDHGASVNAKDVRNLTHMQDEVNVKSHQREHQNIQDLEIENEDLKERLRKIQQEQRILLDKVNGLQLQLNEEVMVADDLESEREKLKSLLAAKEKQHEESLRTIEALKNRFKYFESDHLGSGSHFSNRKEDMLLKQGQMYMADSQCTSPGIPAHMQSRSMLRPLELSLPSQTSYSENEILKKELEAMRTFCESAKQDRLKLQNELAHKVAECKALALECERVKEDSDEQIKQLEDALKDVQKRMYESEGKVKQMQTHFLALKEHLTSEAASGNHRLTEELKDQLKDLKVKYEGASAEVGKLRNQIKQNEMIVEEFKRDEGKLIEENKRLQKELSMCEMEREKKGRKVTEMEGQAKELSAKLALSIPAEKFENMKSSLSNEVNEKAKKLVEMEREHEKSLSEIRQLKRELENVKAKLAQHVKPEEHEQVKSRLEQKSGELGKKITELTLKNQTLQKEIEKVYLDNKLLKEQAHNLTIEMKNHYVPLKVSEDMKKSHDAIIDDLNRKLLDVTQKYTEKKLEMEKLLLENDSLSKDVSRLETVFVPPEKHEKEIIALKSNIVELKKQLSELKKKCGEDQEKIHALTSENTNLKKMMSNQYVPVKTHEEVKMTLNDTLAKTNRELLDVKKKFEDINQEFVKIKDKNEILKRNLENTQNQIKAEYISLAEHEAKMSSLSQSMRKVQDSNAEILANYRKGQEEIVTLHAEIKAQKKELDTIQECIKVKYAPIVSFEECERKFKATEKELKDQLSEQTQKYSVSEEEVKKNKQENDKLKKEIFTLQKDLRDKTVLIEKSHEMERALSRKTDELNKQLKDLSQKYTEVKNVKEKLVEENAKQTSEILAVQNLLQKQHVPLEQVEALKKSLNGTIENLKEELKSMQRCYEKEQQTVTKLHQLLENQKNSSVPLAEHLQIKEAFEKEVGIIKASLREKEEESQNKMEEVSKLQSEVQNTKQALKKLETREVVDLSKYKATKSDLETQISSLNEKLANLNRKYEEVCEEVLHAKKKEISAKDEKELLHFSIEQEIKDQKERCDKSLTTITELQRRIQESAKQIEAKDNKITELLNDVERLKQALNGLSQLTYTSGNPTKRQSQLIDTLQHQVKSLEQQLADADRQHQEVIAIYRTHLLSAAQGHMDEDVQEALLQIIQMRQGLVC

SEQ ID NO: 92239 - protein, 107 aa, Homo sapiens
  MOD_RES (1)..(1): Any amino acid
XKECIRALGQNKAHTPFRESKLTQVLRDSFIGENSRTCMIATISPGISSCEYTLNTLRYADRQGCHSIPLEPQASKPGRCHIPLLSKEEEELSSQMSSFNEAMTQIR

SEQ ID NO: 92240 - protein, 139 aa, Homo sapiens
MELGPLEGGYLELLNSDADPLCLYHFYDQMDLAGEEEIELYSEPDTDTINCDQFSRLLCDMEGDEETREAYANIAELDQYVFQDSQLEGLSKDIFIEHIGPDEVIGESMEMPAEVGQKSQKRPFPEELPADLKHWKPGV

SEQ ID NO: 92241 - protein, 156 aa, Homo sapiens
MWLLYLLVPALFCRAGGSIPIPQKLFGEVTSPLFPKPYPNNFETTTVITVPTGYRVKLVFQQFDLEPSEGCFYDYVKISADKKSLGRFCGQLGSPLGNPPGKKEFMSQGNKMLLTFHTDFSNEENGTIMFYKGFLAYYQAVGEEDPQPQCQHLCHN

SEQ ID NO: 92242 - protein, 245 aa, Homo sapiens
  MOD_RES (1)..(1): Any amino acid
XAGTGRELEMLDSLLALGGLVLLRDSVEWEGRSLLKALVKKSALCGEQVHILGCEVSEEEFREGFDSDINNRLVYHDFFRDPLNWSKTEEAFPGGPLGALRAMCKRTDPVPVTIALDSLSWLLLRLPCTTLCQVLHAVSHQDSCPGDSSSVGKVSVLGLLHEELHGPGPVGALSSLAQTEVTLGGTMGQASAHILCRRPRQRPTDQTQWFSILPDFSLDLQEGPSVESQPYSDPHIPPTAGSPAA

SEQ ID NO: 92243 - protein, 249 aa, Homo sapiens
MHVFDRPYPLAPPTPPPRIDALGSGAPTSQRRYRNWNPPLLGNLPDDFLRILPQQLDSIQGNAGGPKPGSGEGCPPAMAGPGPGDQESRWKQYLEDERIALFLQNEEFMKELQRNRDFLLALERDRLKYESQKSKSSSVAVGNDFGFSSPVPGTGDANPAVSEDALFRDKLKHMGKSTRRKLFELARAFSEKTKMRKSKRKHLLKHQSLGAAASTANLLDDVEGHACDEDFRGRRQEAPKVEEGLREGQ

SEQ ID NO: 92244 - protein, 51 aa, Homo sapiens
CHECGDSFSHSSNRIRHLRTHTGERPYKCSECGESFSRSSRLMSHQRTHTV

SEQ ID NO: 92245 - protein, 451 aa, Homo sapiens
EPSSVAWSEARSRALELPSDREVLHPFVRRHALHRNSLEGGHTESNTSLPSGIQASLTSISSLPFEEDEREVALTKLTKSVSAPHISSPEEAAEDADTKQQDGGFAEPSDMHSKSQGSPGSCSQLCGDSGTDAGADHPLVEIVLDADNQQGPGYIDIPKGKGKQFDAQGHCLPDGRTENTPGVETKGLNLKIPRVIALENPRTRSLHRALEETPKGMPKDLNVGQQALSNSGISEVEGLSQHQVPELSCTSAADAINRNSTGQQSQSGSPCIMDDTAFNRGVNAFPEAKHKAGTVCPTVTHSVHSQVLKNQELKAGTSIMGSHLTSAETFTLDSLKAVEVVNLSVSCTATCLPFSSVPKETPARAGFSSKQTLFPITHQPLGSFGVVSTHSSTLDEEVSERMFRGRGRKFGRWNSPGCLCPWPGWEQCRPPAGKDFHRTGAPWRKTGLPNV

SEQ ID NO: 92246 - protein, 1165 aa, Homo sapiens
  MOD_RES (1)..(1): Any amino acid
XGPSPGPPSAGHPIPTQGPGGYPQDNMHQMHKPMESMHEKGMSDDPRYNQMKGMGMRSGGHAGMGPPPSPMDQHSQGYPSPLGGSEHASSPVPASGPSSGPQMSSGPGGAPLDGADPQALGQQNRGPTPFNQNQLHQLRAQIMAYKMLARGQPLPDHLQMAVQGKRPMPGMQQQMPTLPPPSVSATGPGPGPGPGPGPGPGPAPPNYSRPHGMGGPNMPPPGPSGVPPGMPGQPPGGPPKPWPEGPMANAAAPTSTPQKLIPPQPTGRPSPAPPAVPPAASPVMPPQTQSPGQPAQPAPMVPLHQKQSRITPIQKPRGLDPVEILQEREYRLQARIAHRIQELENLPGSLAGDLRTKATIELKALRLLNFQRQLRQEVVVCMRRDTALETALNAKAYKRSKRQSLREARITEKLEKQQKIEQERKRRQKHQEYLNSILQHAKDFKEYHRSVTGKIQKLTKAVATYHANTEREQKKENERIEKERMRRLMAEDEEGYRKLIDQKKDKRLAYLLQQTDEYVANLTELVRQHKAAQVAKEKKKKKKKKKAENAEGQTPAIGPDGEPLDETSQMSDLPVKVIHVESGKILTGTDAPKAGQLEAWLEMNPGYEVAPRSDSEESGSEEEEEEEEEEQPQAAQPPTLPVEEKKKIPDPDSDDVSEVDARHIIENAKQDVDDEYGVSQALARGLQSYYAVAHAVTERVDKQSALMVNGVLKQYQIKGLEWLVSLYNNNLNGILADEMGLGKTIQTIALITYLMEHKRINGPFLIIVPLSTLSNWAYEFDKWAPSVVKVSYKGSPAARRAFVPQLRSGKFNVLLTTYEYIIKDKHILAKIRWKYMIVDEGHRMKNHHCKLTQVLNTHYVAPRRLLLTGTPLQNKLPELWALLNFLLPTIFKSCSTFEQWFNAPFAMTGEKVDLNEEETILIIRRLHKVLRPFLLRRLKKEVEAQLPEKVEYVIKCDMSALQRVLYRHMQAKGVLLTDGSEKDKKGKGGTKTLMNTIMQLRKICNHPYMFQHIEESFSEHLGFTGGIVQGLDLYRASGKFELLDRILPKLRATNHKVLLFCQMTSLMTIMEDYFAYRGFKYLRLDGTTKAEDRGMLLKTFNEPGSEYFIFLLSTRAGGLGLNLQSADTVIIFDSDWNPHQVKAGRAPGRGEGRGCLQNLEETALA

SEQ ID NO: 92247 - protein, 543 aa, Homo sapiens
  MOD_RES (1)..(1): Any amino acid
XWSYQTPPSSPSTTMSRKSSVCSSLNSVNSSDSRSSGSHSHSPSSHYRYRSSNLAQQAPVRLSSVSSHDSGFISQDAFQSKSPSPMPPEAPNQNSSSSASSEASETCQSVSECSSPTSVSSGSTMGAWVSTEKLSNGFSHYSLSSESHVGPTGAGLFPHCLPASRLLPRVTSVHLPDYAHYYTIGPGMFPSSQIPSWKDWAKPGPYDQPLVNTLQRRKEKREPDPNGGGPTTASGPPAAAEEAQRPRSMTVSAATRPGEEMEACEELALALSRGLQLDTQRSSRDSLQCSSGYSTQTTTPCCSEDTIPSQVSDYDYFSVSGDQEADQQEFDKSSTIPRNSDISQSYRRMFQAKRPASTAGLPTTLGPAMVTPGVATIRRTPSTKPSVRRGTIGAGPIPIKTPVIPVKTPTVPDLPGVLPAPPDGPEERGEHSPESPSVGEGPQGVTSMPSSMWSGQASVNPPLPGPKPSIPEEHRQAIPESEAEDQEREPPSATVSPGQIPESDPADLSPRDTPQGEDMLNAIRRGVKLKKTTTNDRSAPRFS

SEQ ID NO: 92248 - protein, 592 aa, Homo sapiens
MDPNSILLSPQPQICSHLAEACTEGERSSSPPELDRDSPFPWSQVPSSSPTDPEWFGDEHIQAKRARVETIVRGMCLSPNPLVPGNAQAGVSPRCPKKARERKRKQNLPTPQGLLMPAPAWDQGNRKGGPRVREQLHLLKQQLRHLQEHILQAAKPRDTAQGPGGCGTGKGPLSAKQGNGCGPRPWVVDGDHQQGTSKDLSGAEKHQESEKPSFLPSGAPASLEILRKELTRAVSQAVDSVLQKVLLDPPGHLTQLGRSFQGQVAEGRSEPSPPVGGACKDPLALAALPRRVQLQAGVPVGNLSLAKRLDSPRYPIPPRMTPKPCQDPPANFPLTAPSHIQENQILSQLLGHRYNNGHWSSSPPQDSSSQRHPSSEPALRPWRTTKPQPLVLSQQQCPLPFTSAHLESLPLLPSVKMEQRGLHAVMEALPFSLVHIQEGLNPGHLKKAKLMFFFTRYPSSNLLKVYFPDVQFNRCITSQMIKWFSNFREFYYIQMEKSARQAISDGVTNPKMLVVLRNSELFQALNMHYNKGNDFEVPDCFLEIASLTLQEFFRAVSAGRDSDPSWKKPIYKIISKLDSDIPEIFKSSSYPQ

SEQ ID NO: 92249 - protein, 142 aa, Homo sapiens
MRRREGHGTDSEMGQGPVRESQSSDPPALQFRISEYKPLNMAGVEQPPSPELRQEGVTEYEDGGAPAGDGEAGPQQAEDHPQNPPEDPNQDPPEDDSTCQCQACGPHQAAGPDLGSSNDGCPQLFQERDRGMSAGAALLLAA

SEQ ID NO: 92250 - protein, 152 aa, Homo sapiens
MDSLEEPQKKVFKARKTMRVSDRQQLEAVYKVKEELLKTDVKLLNGNHENGDLDPTSPLENMDYIKDKEEVNGIEEICFDPEGSKAEWKETPCILSVNVKNKQDDDLNCEPLSPHNITPEPVSKLPAEPVSGDPAPGDLDAGDPASGVLASG

SEQ ID NO: 92251 - protein, 240 aa, Homo sapiens
MPFHHCHRDPLPPPGLTPERLHARRQLYAACAVCFVFMAGEVVGGYLAHSLAIMTDAAHLLADVGSMMGSLFSLWLSTRPATRTMTFGWHRSETLGALASVVSLWMVTGILLYLAFVRLLHSDYHIEGGAMLLTASIAVCANLLMAFVLHQAGPPHSHGSRGAEYAPLEEGPEEPLPLGNTSVRAAFVHVLGDLLQSFGVLAASILIYFKPQYKAADPISTFLFSICALGSTAPTLRDVL

SEQ ID NO: 92252 - protein, 138 aa, Homo sapiens
MRRPLCATGLVRVGDHWEEYVNMQDPEMDMKSVTDRAARTLLWTELFRGLGMTLSYLFREPATINYPFEKGPLSPRFRGEHALRRYPSGEERCIACKLCEAICPAQAITIEAEPRADGSRRTTRYDIDMTKCIYCGFC

SEQ ID NO: 92253 - protein, 167 aa, Homo sapiens
MSNPSAPPPYEDRNPLYPGPPPPGGYGQPSVLPGGYPAYPGYPQPGYGHPAGYPQPMPPTHPMPMNYGPGHGYDGEERAVSDSFGPGEWDDRKVRHTFIRKVYSIISVQLLITVAIIAIFTFVEPVSAFVRRNVAVYYVSYAVFVVTYLILACCQGPRRRFPWNIIL

SEQ ID NO: 92254 - protein, 424 aa, Homo sapiens
MAGTRWVLGALLRGCGCNCSSCRRTGAACLPFYSAASYSALRASLLPQSLAAAAAVPTRSYSQESKTTYLEDLPPPPEYELAPSKLEEEVDDVFLIRAQGLPWSCTMEDVLNFFSDCRIRNGENGIHFLLNRDGKRRGDALIEMESEQDVQKALEKHRMYMGQRYVEVYEINNEDVDALMKSLQVKSSPVVNDGVVRLRGLPYSCNEKDIVDFFAGLNIVDITFVMDYRGRRKTGEAYVQFEEPEMANQALLKHREEIGNRYIEIFPSRRNEVRTHVGSYKGKKIASFPTAKYITEPEMVFEEHEVNEDIQPMTAFESEKEIELPKEVPEKLPEAADFGTTSSLHFVHMRGLPFQANAQDIINFFAPLKPVRITMEYSSSGKATGEADVHFETHEDAVAAMLKDRSHVHHRYIELFLNSCPKGK

SEQ ID NO: 92255 - protein, 33 aa, Homo sapiens
MFEVNMKERDDGSVTITNLSSKAVKAFLDYAYT

SEQ ID NO: 92256 - protein, 49 aa, Homo sapiens
MKCFSRYLPYIFRPPNTILSSSCHTEGNSSFLEIGPIYTQNELKRLRCY

SEQ ID NO: 92257 - protein, 93 aa, Homo sapiens
RVVDIYSKFDVINLAAEKTYNNLDVSVTKALQHRSHYFEGVLKCYLHETLETIINRLVEAEVHRLVVVDENDVVKGICPTHCLLEALWESDET

SEQ ID NO: 92258 - protein, 1084 aa, Homo sapiens
IYYKVIKDIEPGEELLVHVKEGVYPLGTVPPGLDEEPTFRCDECDELFQSKLDLRRHKKYTCGSVGAALYEGLAEELKPEGLGGGSGQAHECKDCERMFPNKYSLEQHMVIHTEEREYKCDQCPKAFNWKSNLIRHQMSHDSGKRFECENCVKVFTDPSNLQRHIRSQHVGARAHACPDCGKTFATSSGLKQHKHIHSTVKPFICEVCHKSYTQFSNLCRHKRMHADCRTQIKCKDCGQMFSTTSSLNKHRRFCEGKNHYTPGGIFAPGLPLTPSPMMDKAKPSPSLNHASLGFNEYFPSRPHPGSLPFSTAPPTFPALTPGFPGIFPPSLYPRPPLLPPTSLLKSPLNHTQDAKLPSPLGNPALPLVSAVSNSSQGTTAAAGPEEKFESRLEDSCVEKLKTRSSDMSDGSDFEDVNTTTGTDLDTTTGTGSDLDSDVDSDPDKDKGKGKSAEGQPKFGGGLAPPGAPNSVAEVPVFYSQHSFFPPPDEQLLTATGAAGDSIKAIASIAEKYFGPGFMGMQEKKLGSLPYHSAFPFQFLPNFPHSLYPFTDRALAHNLLVKAEPKSPRDALKVGGPSAECPFDLTTKPKDVKPILPMPKGPSAPASGEEQPLDLSIGSRARASQNGGGREPRKNHVYGERKLGAGEGLPQVCPARMPQQPPLHYAKPSPFFMDPIYRVEKRKVTDPVGALKEKYLRPSPLLFHPQMSAIETMTEKLESFAAMKADSGSSLQPLPHHPFNFRSPPPTLSDPILRKGKERYTCRYCGKIFPRSANLTRHLRTHTGEQPYRCKYCDRSFSISSNLQRHVRNIHNKEKPFKCHLCNRCFGQQTNLDRHLKKHEHENAPVSQHPGVLTNHLGTSASSPTSESDNHALLDEKEDSYFSEIRNFIANSEMNQASTRTEKRADMQIVDGSAQCPGLASEKQEDVEEEDDDDLEEDDEDSLAGKSQDDTVSPAPEPQAAYEDEEDEEPAASLAVGFDHTRRCAEDHEGGLLALEPMPTFGKGLDLRRAAEEAFEVKDVLNSTLDSEALKHTLCRQAKNQAYAMMLSLSEDTPLHTPSQGSLDAWLKVTGATSESGAFHPINHL

SEQ ID NO: 92259 - protein, 112 aa, Homo sapiens
MLDLRDDVVKITIDWNKLQSLSAFQPALLFSALEQHILYLQPFLAKLQSPIKEENTTAVEEIGRTEMGNKNEVNDKFSIGDLQEEEKHKESDLRDVKKTQIHFDPEVVQIKA

SEQ ID NO: 92260 - protein, 372 aa, Homo sapiens
  MOD_RES (1)..(1): Any amino acid
XASEWPKDRVLINRIDLVCQAVLSGKWPSSRRSQEMVTGGILGPGNHLLDSPSLTPGEYGDSPVPTPRSSSAASMAEEEASAVSTAAAQFTKLRRGMDEKEFTVQIKDEEGLKLTFQKHKLMANGVMGDGHPLFHKKKGNRKKLVEYMEDRRKQKWQRCKKNNKAELNCLGMEPVQTANSRNGKKGHHTETVFNRVLPGPIAPESSKKRARRMRPDLSKMMALMQGGSTGSLSLHNTFQHSSSGLQSVSSLGHSSATSASLPFMPFVMGGAPSSPHVDSSTMLHHHHHHPHPHHHHHHHPGLRAPGYPSSPVTTASGTTLRLPPLQPEEDDDEDEEDDDDLSQGYDSSERDFSLIDDPMMPANSDSSEDADD

SEQ ID NO: 92261 - protein, 53 aa, Homo sapiens
MLHTTQLYQHVPETRWPIVYSPRYNITFMGLEKLHPFDAGKWGKVINFLKVSV

SEQ ID NO: 92262 - protein, 154 aa, Homo sapiens
  MOD_RES (1)..(1): Any amino acid
XKQQHEDNKYFLGTPVMEPAFIIQHFAGKVKYQIKDFREKNMDYMRPDIVALLRGSDSSYVRELIGMDPVAVFRWAVLRAAIRAMAVLREAGRLRAERAEKAAGMSSPGAQSHPEELPRGASTPSEKLYRKSKGIKQKQIIPKNLLDSKSLKLI

SEQ ID NO: 92263 - protein, 103 aa, Homo sapiens
MHYPTALLFLILANGAQAFRICAFNAQRLTLAKVAREQVMDTLVRILARCDIMVLQEVVDSSGSAIPLLLRELNRFDGSGPYSTLSSPQLGRSTYMETYVYFY

SEQ ID NO: 92264 - protein, 2332 aa, Homo sapiens
MKKVPIKPEQPEKLRAFNISTHSFSLHWSLPSGHVERYQVDLVPDSGFVTIRDLGGGEYQVDVSNVVPGTRYDITISSISTTYTSPVTRIVTTNVTKPGPPVFLAGERVGSAGILLSWNTPPNPNGRIISYIVKYKEVCPWMQTVYTQVRSKPDSLEVLLTNLNPGTTYEIKVAAENSAGIGVFSDPFLFQTAESAPGKVVNLTVEAYNASAVKLIWYLPRQPNGKITSFKISVKHARSGIVVKDVSIRVEDILTGKLPECNENSESFLWSTASPSPTLGRVTPPSRTTHSSSTLTQNEISSVWKEPISFVVTHLRPYTTYLFEVSAATTEAGYIDSTIVRTPESVPEGPPQNCVTGNITGKSFSILWDPPTIVTGKFSYRVELYGPSGRILDNSTKDLKFAFTNLTPFTMYDVYIAAETSAGTGPKSNISVFTPPDVPGAVFDLQLAEVESTQVRITWKKPRQPNGIINQYRVKVLVPETGIILENTLLTGNNEYINDPMAPEIVNIVEPMVGLYEGSAEMSSDLHSLATFIYNSHPDKNFPARNRAEDQTSPVVTTRNQYITDIAAEQLSYVIRRLVPFTEHMISVSAFTIMGEGPPTVLSVRTRQQVPSSIKIINYKNISSSSILLYWDPPEYPNGKITHYTIYAMELDTNRAFQITTIDNSFLITGLKKYTKYKMRVAASTHVGESSLSEENDIFVRTSEDEPESSPQDVEVIDVTADEIRLKWSPPEKPNGIIIAYEVLYKNIDTLYMKNTSTTDIILRNLRPHTLYNISVRSYTRFGHGNQVSSLLSVRTSETVPDSAPENITYKNISSGEIELSFLPPSSPNGIIQKYTIYLKRSNGNEERTINTTSLTQNIKVLKKYTQYIIEVSASTLKGEGVRSAPISILTEEDAPDSPPQDFSVKQLSGVTVKLSWQPPLEPNGIILYYTVYVWNRSSLKTINVTETSLELSDLDYNVEYSAYVTASTRFGDGKTRSNIISFQTPEGAPSDPPKDVYYANLSSSSIILFWTPPSKPNGIIQYYSVYYRNTSGTFMQNFTLHEVTNDFDNMTVSTIIDKLTIFSYYTFWLTASTSVGNGNKSSDIIEVYTDQDIPEGFVGNLTYESISSTAINVSWVPPAQPNGLVFYYVSLILQQTPRHVRPPLVTYERSIYFDNLEKYTDYILKITPSTEKGFSDTYTAQLYIKTEEDVPETSPIINTFKNLSSTSVLLSWDPPVKPNGAIISYDLTLQGPNENYSFITSDNYIILEELSPFTLYSFFAAARTRKGLGPSSILFFYTDESVPLAPPQNLTLINCTSDFVWLKWSPSPLPGGIVKVYSFKIHEHETDTIYYKNISGFKTEAKLVGLEPVSTYSIRVSAFTKVGNGNQFSNVVKFTTQESVPDVVQNMQCMATSWQSVLVKWDPPKKANGIITQYMVTVERNSTKVSPQDHMYTFIKLLANTSYVFKVRASTSAGEGDESTCHVSTLPETVPSVPTNIAFSDVQSTSATLTWIRPDTILGYFQNYKITTQLRAQKCKEWESEECVEYQKIQYLYEAHLTEETVYGLKKFRWYRFQVAASTNAGYGNASNWISTKTLPGPPDGPPENVHVVATSPFSISISWSEPAVITGPTCYLIDVKSVDNDEFNISFIKSNEENKTIEIKDLEIFTRYSVVITAFTGNISAAYVEGKSSAEMIVTTLESAPKDPPNNMTFQKIPDEVTKFQLTFLPPSQPNGNIQVYQALVYREDDPTAVQIHNLSIIQKTNTFVIAMLEGLKGGHTYNISVYAVNSAGAGPKVPMRITMDIKAPARPKTKPTPIYDATGKLLVTSTTITIRMPICYYSDDHGPIKNVQVLVTETGAQHDGNVTKWYDAYFNKARPYFTNEGFPNPPCTEGKTKFSGNEEIYIIGADNACMIPGNEDKICNGPLKPKKQYLFKFRATNIMGQFTDSDYSDPVKTLGEGLSERTVEIILSVTLCILSIILLGTAIFAFARIRQKQKEGGTYSPQDAEIIDTKLKLDQLITVADLELKDERLTRPISKKSFLQHVEELCTNNNLKFQEEFSELPKFLQDLSSTDADLPWNRAKNRFPNIKPYNNNRVKLIADASVPGSDYINASYISGYLCPNEFIATQGPLPGTVGDFWRMVWETRAKTLVMLTQCFEKGRIRCHQYWPEDNKPVTVFGDIVITKLMEDVQIDWTIRDLKIERHGDCMTVRQCNFTAWPEHGVPENSAPLIHFVKLVRASRAHDTTPMIVHCSAGVGRTGVFIALDHLTQHINDHDFVDIYGLVAELRSERMCMVQNLAQYIFLHQCILDLLSNKGSNQPICFVNYSALQKMDSLDAMEGDVELEWEETTM

SEQ ID NO: 92265 - protein, 1036 aa, Homo sapiens
  MOD_RES (1)..(1): Any amino acid
XTSSRRPLLSSPSWGGPEPEGRAGGGIPGSSSPHPGTGSRRLKVAPPPPAPKPCKTVTTSGAKAGGGKGAGSRLSWPESEGKPRVKGSKSSAGTGASVSAAATAAAAGGGGSTASTSGGVGAGAGARGKLSPRKGKSKTLDNSDLHPGPPAGSPPPLTLPPTPSPATAVTAASAQPPGPAPPITLEPPAPGLKRGREGGRASTRDRKMLKFISGIFTKSTGGPPGSGPLPGPPSLSSGSGSRELLGAELRASPKAVINSQEWTLSRSIPELRLGVLGDARSGKSSLIHRFLTGSYQVLEKTESEQYKKEMLVDGQTHLVLIREEAGAPDAKFSGWADAVIFVFSLEDENSFQAVSRLHGQLSSLRGEGRGGLALALVGTQDRISASSPRVVGDARARALCADMKRCSYYETCATYGLNVDRVFQEVAQKVVTLRKQQQLLAACKSLPSSPSHSAASTPVAGQASNGGHTSDYSSSLPSSPNVGHRELRAEAAAVAGLSTPGSLHRAAKRRTSLFANRRGSDSEKRSLDSRGETTGSGRAIPIKQSFLLKRSGNSLNKEWKKKYVTLSSNGFLLYHPSINDYIHSTHGKEMDLLRTTVKVPGKRPPRAISAFGPSASINGLVKDMSTVQMGEGLEATTPMPSPSPSPSSLQPPPDQTSKHLLKPDRNLARALSTDCTPSGDLSPLSREPPPSPMVKKQRRKKLTTPSKTEGSAGQAEEENFEFLIVSSTGQTWHFEAASFEERDAWVQAIESQILASLQCCESSKVKLRTDSQSEAVAIQAIRNAKGNSICVDCGAPNPTWASLNLGALICIECSGIHRNLGTHLSRVRSLDLDDWPRELTLVLTAIGNDTANRVWESDTRGRAKPSRDSSREERESWIRAKYEQLLFLAPLSTSEEPLGRQLWAAVQAQDVATVLLLLAHARHGPLDTSVEDPQLRSPLHLAAELAHVVITQLLLWYGADVAARDAQGRTALFYARQAGSQLCADILLQHGCPGEGGSAATTPSAATTPSITATPSPRRRSSAASVGRADAPVALV

SEQ ID NO: 92266 - protein, 440 aa, Homo sapiens
MSFVKETVDKLLKGYDIRLRPDFGGPPVCVGMNIDIASIDMVSEVNMDYTLTMYFQQYWRDKRLAYSGIPLNLTLDNRVADQLWVPDTYFLNDKKSFVHGVTVKNRMIRLHPDGTVLYGLRITTTAACMMDLRRYPLDEQNCTLEIESYGYTTDDIEFYWRGGDKAVTGVERIELPQFSIVEHRLVSRNVVFATGAYPRLSLSFRLKRNIGYFILQTYMPSILITILSWVSFWINYDASAARVALGITTVLTMTTINTHLRETLPKIPYVKAIDMYLMGCFVFVFLALLEYAFVNYIFFGRGPQRQKKLAEKTAKAKNDRSKSESNRVDAHGNILLTSLEVHNEMNEVSGGIGDTRNSAISFDNSGIQYRKQSMPREGHGRFLGDRSLPHKKTHLRRRSSQLKIKIPDLTDVNAIDRWSRIVFPFTFSLFNLVYWLYYVN

SEQ ID NO: 92267 - protein, 1658 aa, Homo sapiens
MPARTAPARVPTLAVPAISLPDDVRRRLKDLERDSLTEKECVKEKLNLLHEFLQTEIKNQLCDLETKLRKEELSEEGYLAKVKSLLNKDLSLENGAHAYNREVNGRLENGNQARSEARRVGMADANSPPKPLSKPRTPRRSKSDGEAKPEPSPSPRITRKSTRQTTITSHFAKGPAKRKPQEESERAKSDESIKEEDKDQDEKRRRVTSRERVARPLPAEEPERAKSGTRTEKEEERDEKEEKRLRSQTKEPTPKQKLKEEPDREARAGVQADEDEDGDEKDEKKHRSQPKDLAAKRRPEEKEPEKVNPQISDEKDEDEKEEKRRKTTPKEPTEKKMARAKTVMNSKTHPPKCIQCGQYLDDPDLKYGQHPPDAVDEPQMLTNEKLSIFDANESGFESYEALPQHKLTCFSVYCKHGHLCPIDTGLIEKNIELFFSGSAKPIYDDDPSLEGGVNGKNLGPINEWWITGFDGGEKALIGFSTSFAEYILMDPSPEYAPIFGLMQEKIYISKIVVEFLQSNSDSTYEDLINKIETTVPPSGLNLNRFTEDSLLRHAQFVVEQVESYDEAGDSDEQPIFLTPCMRDLIKLAGVTLGQRRAQARRQTIRHSTREKDRGPTKATTTKLVYQIFDTFFAEQIEKDDREDKENAFKRRRCGVCEVCQQPECGKCKACKDMVKFGGSGRSKQACQERRCPNMAMKEADDDEEVDDNIPEMPSPKKMHQGKKKKQNKNRISWVGEAVKTDGKKSYYKKVCIDAETLEVGDCVSVIPDDSSKPLYLARVTALWEDSSNGQMFHAHWFCAGTDTVLGATSDPLELFLVDECEDMQLSYIHSKVKVIYKAPSENWAMEGGMDPESLLEGDDGKTYFYQLWYDQDYARFESPPKTQPTEDNKFKFCVSCARLAEMRQKEIPRVLEQLEDLDSRVLYYSATKNGILYRVGDGVYLPPEAFTFNIKLSSPVKRPRKEPVDEDLYPEHYRKYSDYIKGSNLDAPEPYRIGRIKEIFCPKKSNGRPNETDIKIRVNKFYRPENTHKSTPASYHADINLLYWSDEEAVVDFKAVQGRCTVEYGEDLPECVQVYSMGGPNRFYFLEAYNAKSKSFEDPPNHARSPGNKGKGKGKGKGKPKSQACEPSEPEIEIKLPKLRTLDVFSGCGGLSEGFHQAGISDTLWAIEMWDPAAQAFRLNNPGSTVFTEDCNILLKLVMAGETTNSRGQRLPQKGDVEMLCGGPPCQGFSGMNRFNSRTYSKFKNSLVVSFLSYCDYYRPRFFLLENVRNFVSFKRSMVLKLTLRCLVRMGYQCTFGVLQAGQYGVAQTRRRAIILAAAPGEKLPLFPEPLHVFAPRACQLSVVVDDKKFVSNITRLSSGPFRTITVRDTMSDLPEVRNGASALEISYNGEPQSWFQRQLRGAQYQPILRDHICKDMSALVAARMRHIPLAPGSDWRDLPNIEVRLSDGTMARKLRYTHHDRKNGRSSSGALRGVCSCVEGGSSGKACDPAARQFNTLIPWCLPHTGNRHNHWAGLYGRLEWDGFFSTTVTNPEPMGKQGRVLHPEQHRVVSVRECARSQGFPDTYRLFGNILDKHRQVGNAVPPPLAKAIGLEIKLCMLAKARESASGMVGWARLPLGPDCPLGVHVGAVAGHRFGLWDSGGSPTHVRGPIFLKGLL

SEQ ID NO: 92268 - protein, 137 aa, Homo sapiens
MGPLQFRDVAIEFSLEEWHCLDAAQRNLYRDVMLENYRNLIFLGIVVSKPNLITCLEQGKKPLTMKRHEMIAKPPDGVSVFHPGWSAVARSRLTATSTSQVDCLRSGVQDHPGQHSETPSEEALLSRGHSLWMNKVH

SEQ ID NO: 92269 - protein, 131 aa, Homo sapiens
MEQPHDEKDPASKRPHPVCLFVLPALRTHPSAQLGPLGGDAMIPTFTALLCLGLSLGPRTHMQAGPLPKPTLWAEPGSVISWGNSVTIWCQGTLEAREYRLDKEESPAPWDRQNPLEPKNKARFSIPSMTE

SEQ ID NO: 92270 - protein, 171 aa, Homo sapiens
MLYFSLFWAARPLQRCGQLVRMAIRAQHSNAAQTQTGEANRGWTGQESLSDSDPEMWELLQREKDRQCRGLELIASENFCSRAALEALGSCLNNKYSEGYPGKRYYGGAEVVDEIELLCQRRALEAFDLDPAQWGVNVQPYSGSPANLAVYTALLQPHDRIMGLDLPDGGQ

SEQ ID NO: 92271 - protein, 406 aa, Homo sapiens
SGTKVDEYGAKDYRLQMPLKDDHTSRPLWVAPDGHIFLEAFSPVYKYAQDFLVAIAEPVCRPTHVHEYKLTAYSLYAAVSVGLQTSDITEYLRKLSKTGVPDGIMQFIKLCTVSYGKVKLVLKHNRYFVESCHPDVIQHLLQDPVIRECRLRNSEGEATELITETFTSKSAISKTAESSGGPSTSRVTDPQGKSDIPMDLFDFYEQMDKDEEEEEETQTVSFEVKQEMIEELQKRCIHLEYPLLAEYDFRNDSVNPDINIDLKPTAVLRPYQEKSLRKMFGNGRARSGVIVLPCGAGKSLVGVTAACTVRKRCLVLGNSAVSVEQWKAQFKMWSTIDDSQICRFTSDAKDKPIGCSVAISTYSMLGHTTKRSWEAERVMEWLKTQEWGLMILDEVHTIPGLVPYVS

SEQ ID NO: 92272 - protein, 165 aa, Homo sapiens
MKSTADLHQKLGKAIELEAIKPTYQVLNVQEKKRKSLDNEVEKTANLVISNWNQQIKAKKKLMVSTKKHEALFQLVESSKQSMTEKEKRKLLNKLTKSTEKLEKEDENYYQKNMAGYSTRLKWENTLENCYQSILELEKERIQLLCNNLNQYSQHISLFGQTLTT

SEQ ID NO: 92273 - protein, 569 aa, Homo sapiens
MDHISDSFLETNVPLLVLIEAAKSGNEKEVKEYAQVFREHANKLVEVANLACSISNNEEGVKLVRMAATQIDSLCPQVINAALTLAARPQSKVAQDNMDVFKDQWEKQVRVLTEAVDDITSVDDFLSVSENHILEDVNKCVIALQEGDVDTLDRTAGAIRGRAARVIHIINAEMENYEAGVYTEKVLEATKLLSETVMPRFAEQVEVAIEALSANVPQPFEENEFIDASRLVYDGVRDIRKAVLMIRTPEELEDDSDFEQEDYDVRSRTSVQTEDDQLIAGQSARAIMAQLPQEEKAKIAEQVEIFHQEKSKLDAEVAKWDDSGNDIIVLAKQMCMIMMEMTDFTRGKGPLKNTSDVINAAKKIAEAGSRMDKLARAVADQCPDSACKQDLLAYLQRIALYCHQLNICSKVKAEVQNLGGELIVSGTGVQSTFTTFYEVDCDVIDGGRASQLSTHLPTCAEGAPIGSGSSDSSMLDSATSLIQAAKNLMNAVVLTVKASYVASTKYQKVYGTAAVNSPVVSWKMKAPEKKPLVKREKPEEFQTRVRRGSQKKHISPVQALSEFKAMDSF

SEQ ID NO: 92274 - protein, 120 aa, Homo sapiens
MAAAAAAVGPGAGGAGSAVPGGAGPCATVSVFPGARLLTIGDANGEIQRHAEQQALRLEVRAGPDSAGIALYSHFCSFYNILKTCRGHTLERSVFSERTEESSAVQYFQFYGYLSQQQNM

SEQ ID NO: 92275 - protein, 156 aa, Homo sapiens
MYPESTTGSPARLSLRQTGSPGMIYSTRYGSPKRQLQFYRNLGKSGLRVSCLGLGTWVTFGGQITDEMAEQLMTLAYDNGINLFDTAEVYAAGKAEVVLGNIIKKKGWRIFAASQPLRSSLFPSVRGRSSLVITTKIFWGGKAETERGLSRKHIIE

SEQ ID NO: 92276 - protein, 351 aa, Homo sapiens
MTILTYPFKNLPTASKWALRFSIRPLSCSSQLRAAPAVQTKTKKTLAKPNIRNVVVVDGVRTPFLLSGTSYKDLMPHDLARAALTGLLHRTSVPKEVVDYIIFGTVIQEVKTSNVAREAALGAGFSDKTPAHTVTMACISANQAMTTGKDTVTKDNGIRPSSLEQMAKLKPAFIKPYGTVTAANSSFLTDGASAMLIMAEEKALAMGYKPKAYLRDFMYVSQDPKDQLLLGPTYATPKVLEKAGLTMNDIDAFEFHEAFSGQILANFKAMDSDWFAENYMGRKTKVGLPPLEKFNNWGGSLSLGHPFGATGCRLVMAAANRLRKEGGQYGLVAACAAGGQGHAMIVEAYPK

SEQ ID NO: 92277 - protein, 115 aa, Homo sapiens
MPAIMTMLADHAARQLLDFSQKLDINLLDNVVNCLYHGEGAQQRMAQEVLTHLKEHPDAWTRVDTILEFSQNMNTKYYGLQILENVIKTRWKILPRNQCEGMVSRCVAHAAGCWA

SEQ ID NO: 92278 - protein, 224 aa, Homo sapiens
MPAPSMDCDVSTLVACVVDVEVFTNQEVKEKFEGLFRTYDDCVTFQLFKSFRRVRINFSNPKSAARARIELHETQFRGKKLKLYFAQVQTPETDGDKLHLAPPQPAKQFLISPPSSPPVGWQPINDATPVLNYDLLYAVAKLGPGEKYELHAGTESTPSVVVHVCDSDIEEEEDPKTSPKPKIIQTRRPGLPPSVSNAACSFSIIAVSSLSCFFPLLFVKKNCL

SEQ ID NO: 92279 - protein, 102 aa, Homo sapiens
  MOD_RES (1)..(1): Any amino acid
XELLDGIRTCELALSCEKISEVIVRDWLVCLAKQKNGILAQKVESKINTDVQLDSQEKIGVKEESHSDFPYGSFPYVARPVHWQPGHTAFLVKLRKVKPQLN

SEQ ID NO: 92280 - protein, 263 aa, Homo sapiens
MGADGMYDKLRMLNGQTGSWGTRPGWYPGTSVPGQPTQDGCQQQEGGGENTNSISSNGEDSDEAQMRLQLKRKLQRNRTSFTQEQIEALEKEFERTHYPDVFARERLAAKIDLPEARIQVWFSNRRAKWRREEKLRNQRRQASNTPSHIPISSSFSTSVYQPIPQPTTPVSSFTSGSMLGRTDTALTNTYSALPPMPSFTMANNLPMQPPVPSQTSSYSCMLPTSPSVNGRSYDTYTPPHMQTHMNSQPMGTSGTTSTGLISP

SEQ ID NO: 92281 - protein, 108 aa, Homo sapiens
MITRRSLGYAYVNFQQPADAERALDTMNFDVIKGKPVRIMWSQRDPSLRKSGVGNIFIKNLDKSIDNKALYDTFSAFGNILSCKVVCDENGSKGYGFVHFETQEAAER

SEQ ID NO: 92282 - protein, 135 aa, Homo sapiens
MMPAERRLPLSFVLDVLEGRAQHPGVLYVQKQCSNLPSELPQLLPDLESHVPWASEALGKMPDAVNFWLGEAAAVTSLHKDHYENLYCVVSGEKHFLFHPPSDRPFIPYELYTPATYQLTEEGTFKVVDEEAMEK

SEQ ID NO: 92283 - protein, 81 aa, Homo sapiens
MAHGSVTFRDVAIDFSQEEWEFLDPAQRDLYRDVMWENYSNFISLAGPSISKPDVITLLDEERKEPGMVVREGTRRYCPGE

SEQ ID NO: 92284 - protein, 190 aa, Homo sapiens
LFQDRRELAGYFAGLKMIFILKNLYQPPLWKQMEDCCDPAHLFAMTKMNSPMGKSMWYDGEFLYSFTIDNSTYSLFPQATPFQLPLKKCAVVGNGGILKKSGCGRQIDEANFVMRCNLPPLSSEYTKDVGSKSQLVTANPSIIRQRFQNLLWSRKTFVDNMKIYNHSYIYMPAFSMKTGTEPSLRVYYTL

SEQ ID NO: 92285 - protein, 41 aa, Homo sapiens
LTDPFRPMLRKPGKWCAMHVHIAWQIYHHQQKVKVSPTFVV

SEQ ID NO: 92286 - protein, 30 aa, Homo sapiens
MVDSTEYEVASQPEVETSPLGDGASPGPEQ

SEQ ID NO: 92287 - protein, 155 aa, Homo sapiens
MVKTGAPTVTVTNLKPATRYVFQIRAASPGPSWEAQSFNPSIEVQTLGEAASGSRDQSPAIVVTVVTISALLVLGSVMSVLAIWRRPCSYGKGGGDAHDEEELYFHFKVPTRRTFLDPQSCGDLLQAVHLFAKELDAKSVTLERSLGGGLETSPH

SEQ ID NO: 92288 - protein, 76 aa, Homo sapiens
MGRRKSKRKPPPKKKMTGTLETQFTCPFCNHEKSCDVKMDRARNTGVISCTVCLEEFQTPITSQICQNPWMCTVIG

SEQ ID NO: 92289 - protein, 156 aa, Homo sapiens
MSGLGRSRRGGRSRVDQEERFPQGLWTGVAMRSCPEEQYWDPLLGTCMSCKTICNHQSQRTCAAFCRSLSCRKEQGKFYDHLLRDCISCASICGQHPKQCAYFCENKLRSPVNLPPELRRQRSGEVENNSDNSGRYQGLEHRGSEASPGKRSPLLY

SEQ ID NO: 92290 - protein, 59 aa, Homo sapiens
EFRKNLKGVNGGKDFEQDILEDMYHAIKKCAMISAHYGLSDVFDNLIISLCKFTALSSE

SEQ ID NO: 92291 - protein, 793 aa, Homo sapiens
YAIKKHFAATHSLEFMWRQTWDSDSSTDIFCHMMPFYSYDVPHTCGPDPKICCQFDFKRLPGGRINCPWKVPPRAITEANVAERAALLLDQYRKKSQLFRSNVLLVPLGDDFRYDKPQEWDAQFFNYQRLFDFFNSRPNLHVQDHYWTGYYTSRPFYKSLDRVLEAHLRGAEVLYSLAAAHARRSGLAGRYPLSDFTLLTEARRTLGLFQHHDAITGTAKEAVVVDYGVRLLRSLVNLKQVIIHAAHYLVLGDKETYHFDPEAPFLQVDDTRLSHDALPERTVIQLDSSPRFVVLFNPLEQERFSMVSLLVNSPRVRVLSEEGQPLAVQISAHWSSATEAVPDVYQVSVPVRLPALGLGVLQLQLGLDGHRTLPSSVRIYLHGRQLSVSRHEAFPLRVIDSGTSDFALSNRYMQVWFSGLTGLLKSIRRVDEEHEQQVDMQVLVYGTRTSKDKSGAYLFLPDGEAKPYVPKEPPVLRVTEGPFFSEVVAYYEHIHQAVRLYNLPGVEGLSLDISSLVDIRDYVNKELALHIHTDIDSQGIFFTDLNGFQVQPRRYLKKLPLQANFYPMPVMAYIQDAQKRLTLHTAQALGVSSLKDGQLEVILDRRLMQDDNRGLGQGLKDNKRTCNRFRLLLERRTVGSEVQDSHSTSYPSLLSHLTSMYLNAPALALPVARMQLPGPGLRSFHPLASSLPCDFHLLNLRTLQAEEDTLPSAETALILHRKGFDCGLEAKNLGFNCTTSQGKVALGSLFHGLDVVFLQPTSLTLLYPLASPSNSTDVYLEPMEIATFRLRLG

SEQ ID NO: 92292 - protein, 128 aa, Homo sapiens
  MOD_RES (1)..(1): Any amino acid
XYAIYDLLDTAMINNSRNLNIQLKWKRPPENEAPPVPFLHAQRYVSGYGLQKGELSTLLYNTHPYRAFPVLLLDTVPWYLRLYVHTLTITSKGKENKPSEDLSPEPGPQPALSCPLQVPQTLISQGSS

SEQ ID NO: 92293 - protein, 49 aa, Homo sapiens
MGFLQLLVVAVLASEHRVAGAAEVFGNSSEDSPFQFLGNRHCQWTGFHP

SEQ ID NO: 92294 - protein, 128 aa, Homo sapiens
MAVLLLLLRALRRGPGPGPRPLWGPGPAWSPGFPARPGRGRPYMASRPPGDLAEAGGRALQSLQLRLLTPTFEGINGLLLKQHLVQNPVRLWQLLGGTFYFNTSRLKQKNKEKDKSKGKAPEEDEESA

SEQ ID NO: 92295 - protein, 274 aa, Homo sapiens
MSDRYLEQRISIKFCVKLNKSASETHHLLKEAYGDEVMSRARVFDWHKRFKEGREDVRDDARSGRPVTHRTDDNIQKVKDLVCSNRQLTVRMMAEELNLDKETVRLILKENLNMRKISAKVISGVLKETEPHYVAQAGLELLVSRDPPTLASQSSGIISMSHHAKPKPGVQWCKFQSESTGRRARSADVQGQEKMDVTAQEARTNLPFYLFVLFSPGSLGQEAAAVKQSHISAPASELRCIQLRSRSRTRGNKIIWEQGQEGAGLHGRCIFNEQ

SEQ ID NO: 92296 - protein, 183 aa, Homo sapiens
  MOD_RES (1)..(1): Any amino acid
XNSTSDNQQEDSVLHNVILWPPNPEPTQRTLSAQTPRSAQPPGNSQNIKRKQQDTPGSPDHRDASSVGLGGFCTASESSASLDPCLVSPEVTEPRKDPQGARGPEGSLLPSPPPSQEREHPSSSMPFAECPPEGCLASPAAAPEDGPQTQSPRREPAPNAPGDIAAAFPAERDSSTPYQEIAA

SEQ ID NO: 92297 - protein, 247 aa, Homo sapiens
MSDVTIVKEGWVQKRGEYIKNWRPRYFLLKTDGSFIGYKEKPQDVDLPYPLNNFSVAKCQLMKTERPKPNTFIIRCLQWTTVIERTFHVDTPEEREEWTEAIQAVADRLQRQEEERMNCSPTSQIDNIGEEEMDASTTHHKRKTMNDFDYLKLLGKGTFGKVILVREKASGKYYAMKILKKEVIIAKDEVAHTLTESRVLKNTRHPFLTSLKYSFQTKDRLCFVMEYVNGGEMEFRSVVRLECSSTI

SEQ ID NO: 92298 - protein, 66 aa, Homo sapiens
MAHCVTLVQLSISCDHLIDKDIGSKSDPLCVLLQDVGGGSWAELGRTERVRNCSSPEFSKTLQLEY

SEQ ID NO: 92299 - protein, 92 aa, Homo sapiens
MGAMTQLLAGVFLAFLALATEGGVLKKVIRHKRQSGVNATLPEENQPVVFNHVYNIKLPVGSQCSVDLESASGEKDLAPPSEPSESFQEHTV

SEQ ID NO: 92300 - protein, 38 aa, Homo sapiens
MKLKLKNVFLAYFLVSIAGLLYALVQLVSASSTKQKAR

SEQ ID NO: 92301 - protein, 76 aa, Homo sapiens
MAAIYLSRGFFSREPICPFEEKTKVERMVEDYLASGYQDSVTFDDVAVDFTPEEWALLDTTEKYLYRDVMLENYMN

SEQ ID NO: 92302 - protein, 157 aa, Homo sapiens
MQQRAGSKTAGPPCQWSRMASEGTNIPSPVVRQIDKQFLICSICLERYKNPKVLPCLHTFCERCLQNYIPAHSLTLSCPVCRQTSILPEKGVAALQNNFFITNLMDVLQRTPGSNAEESSILETVTAVAAGKPLSCPNHDGNVPKEEIKESLQIFRG

SEQ ID NO: 92303 - protein, 679 aa, Homo sapiens
MNQPQRMAPVGTDKELSDLLDFSMMFPLPVTNGKGRPASLAGAQFGGSGLEDRPSSGSWGSGDQSSSSFDPSRTFSEGTHFTESHSSLSSSTFLGPGLGGECLAWCGPSAVHRCADVGLGMVSARTAPGKSGERGAYASFGRDAGVGGLTQAGFLSGELALNSPGPLSPSGMKGTSQYYPSYSGSSRRRAADGSLDTQPKKVRKVPPGLPSSVYPPSSGEDYGRDATAYPSAKTPSSTYPAPFYVADGSLHPSAELWSPPGQAGFGPMLGGGSSPLPLPPGSGPVGSSGSSSTFGGLHQHERMGYQLHGAEVNGGLPSASSFSSAPGATYGGVSSHTPPVSGADSLLGSRGTTAGSSGDALGKALASIYSPDHSSNNFSSSPSTPVGSPQGLAGTSQWPRAGAPGALSPSYDGGLHGLQSKIEDHLDEAIHVLRSHAVGTAGDMHTLLPGHGALASGFTGPMSLGGRHAGLVGGSHPEDGLAGSTSLMHNHAALPSQPGTLPDLSRPPDSYSGLGRAGATAAASEIKREEKEDEENTSAADHSEEEKKELKAPRARTSTDEVLSLEEKDLRDRERRMANNARERVRVRDINEAFRELGRMCQMHLKSDKAQTKLLILQQAVQVILGLEQQVRERNLNPKAACLKRREEEKVSGVVGDPQMVLSAPHPGLSEAHNPAGHM

SEQ ID NO: 92304 - protein, 138 aa, Homo sapiens
MSTVLCVSKMEADLSGFNIDAPRWDQRTFLGRVKHFLNITDPRTVFVSERELDWAKVMVEKSRMGVVPPGTQVEQLLYAKKLYDSAFHPDTGEKMNVIGRMSFQLPGGMIITGFMLQFYRTMPAVIFWQWVNQSFNAL

SEQ ID NO: 92305 - protein, 51 aa, Homo sapiens
  MOD_RES (1)..(1): Any amino acid
XESTSPSLLTTDNTLERSFFIRMKSTLTKRGVHIKSSGYKQKKPTQTKGRN

SEQ ID NO: 92306 - protein, 147 aa, Homo sapiens
ILPTIGFSIEKFKSSSLSFTVFDMSGQGRYRNLWEHYYKEGQAIIFVIDSSDRLRMVVAKEELDTLLNHPDIKHRRIPILFFANKMDLRDAVTSVKVSQLLCLENIKDKPWHICASDAIKGEGLQEGVDWLQEKTIQSDPDCEDMKR

SEQ ID NO: 92307 - protein, 156 aa, Homo sapiens
MGQGMGMVGDLRSPRPTSPLPLPQLTLLVVQVSILYYGGHLVISGQMTSGNLIAFIIYEFVLGDCMESVGSVYSGLMQGVGAAEKVFEFIDRQPTMVHDGSLAPDHLEGRVDFENVTFTYRTRPHTQVLQNVSFSLSPGKVTALVGPSGSGKSSCV

SEQ ID NO: 92308 - protein, 82 aa, Homo sapiens
MEQPPAPKSKLKKLSEDSLTKQPEEVFDVLEKLGEGSYGSVFKAIHKESGQVVAIKQVPVESDLQEIIKEISIMQQCDRLFL

SEQ ID NO: 92309 - protein, 136 aa, Homo sapiens
MILRPPQPCGTEDSLATDDFLVDYFNEFLSLPCLSREEGIKWIKKERLPAFLESDCYFEYRLAKLVSQVRWSKSGMNFTVGSNFSPWIVKKPPSLPPPATEEDNLVIMKKFYVSLGEASYTQTKDWFALAKQSQQT

SEQ ID NO: 92310 - protein, 707 aa, Homo sapiens
MLQQIEEPCSLGVHAAVVIPPTWILRARRPQNTLKASKKKKRASFKRKSSKKGPEEGRWRPFIIRPTPSPLMKPLLVFVNPKSGGNQGAKIIQSFLWYLNPRQVFDLSQGGPKEALEMYRKVHNLRILACGGDGTVGWILSTLDQLRLKPPPPVAILPLGTGNDLARTLNWGGGYTDEPVSKILSHVEEGNVVQLDRWDLHAEPNPEAGPEDRDEGATDRLPLDVFNNYFSLGFDAHVTLEFHESREANPEKFNSRFRNKMFYAGTAFSDFLMGSSKDLAKHIRVVCDGMDLTPKIQDLKPQCVVFLNIPRYCAGTMPWGHPGEHHDFEPQRHDDGYLEVIGFTMTSLAALQVGGHGERLTQCREVVLTTSKAIPVQVDGEPCKLAASRIRIALRNQATMVQKAKRRSAAPLHSDQQPVPEQLRIQVSRVSMHDYEALHYDKEQLKEASVPLGTVVVPGDSDLELCRAHIERLQQEPDGAGAKSPTCQKLSPKWCFLDATTASRFYRIDRAQEHLNYVTEIAQDEIYILDPELLGASARPDLPTPTSPLPTSPCSPTPRSLQGDAAPPQGEELIEAAKRNDFCKLQELHRAGGDLMHRDEQSRTLLHHAVSTGSKDVVRYLLDHAPPEILDAVEENGETCLHQAAALGQRTICHYIVEAGASLMKTDQQGDTPRQRAEKAQDTELAAYLENRQHYQMIQREDQETAV

SEQ ID NO: 92311 - protein, 41 aa, Homo sapiens
MRLRVRLLKRTWPLEVPETEPTLGHLRSHLRQSLLCTWGYS

SEQ ID NO: 92312 - protein, 391 aa, Homo sapiens
  MOD_RES (1)..(1): Any amino acid
XTCFMSTHRIVTEGRVVTEDQLLMLEAVVMHLGIRSARCVLGMEGQQVILHLPLSQKGPFWTWEPSAPRTLLQVLQDPALKDLVLTCPTLPWHSLILRPQYEIQAIMHMRRTIVKIPSTLEVDVEDVTASSRHVHFIKPLLLSERLSDQAGEDEEEECKEEAESPERVLLPFHFPGSFVEEMSDSRRYSLADLTAQFSLPCEVKVVAKDTSHPTDPLTSFLGLRLEEKITEPFLVVSLDSEPGMCFEIPPRWLDLTVVKAKGQPDLPEGSLPIATVEELTDTFYYRLRKLPACEIQAPPPRPPKNQGLSKQRRHSSEGGVKSSQVLGLQQHARLPKPKAKTLPEFIKDGSSTYSKIPAHRKGHRPAKPQRQDLDDDEHDYEEILEQFQKTI

SEQ ID NO: 92313 - protein, 35 aa, Homo sapiens
  MOD_RES (1)..(1): Any amino acid
XKYSSNKEEWISLAYRPFLDASSFEGWKTKITMPV

SEQ ID NO: 92314 - protein, 61 aa, Homo sapiens
  MOD_RES (1)..(1): Any amino acid
XSQEEDFRLQNSTLMAEFSKPCRNAMGKKPGSSQLSVRARGIPQGAWPPPSWPPCRWQRWS

SEQ ID NO: 92315 - protein, 273 aa, Homo sapiens
MASRIGLRMQLMREQAQQEEQRERMQQQAVMHYMQQQQQQQQQQLGGPPTPAINTPVHFQSPPPVPGEVLKVQSYLENPTSYHLQQSQHQKVREYLSETYGNKFAAHISPAQGSPKPPPAASPGVRAGHVLSSSAGNSAPNSPMAMLHIGSNPERELDDVIDNIMRLDDVLGYINPEMQMPNTLPLSSSHLNVYSSDPQVTASLVGVTSSSCPADLTQKRELTDAESRALAKERQKKDNHNLIERRRRFNINDRIKELGMLIPKANDLSGVAG

SEQ ID NO: 92316 - protein, 163 aa, Homo sapiens
MEYLGGGSALDLLKPGPLEETYIATILREILKGLDYLHSERKIHRDIKAANVLLSEQGDVKLADFGVAGQLTDTQIKRNTFVGTPFWMAPEVIKQSAYDFKADIWSLGITAIELAKGEPPNSDLHPMRVLFLIPKNSPPTLEGQHSKPFKEFVEACLNKDPRF

SEQ ID NO: 92317 - protein, 90 aa, Homo sapiens
RTAVRGSIQQVTHEPERQDSAIHLRVSRLYRQKSRVFEPVPEGDGHWQGRVRTLLECGARLGCAPRFKDFQRMYRDAQERGLNPCEVGTD

SEQ ID NO: 92318 - protein, 211 aa, Homo sapiens
MGRLHCTEDPVPEAVGGDMQQLNQLGAQQFSALTEVLFHFLTEPKEVERFLAQLSEFATTNQISLGSLRSIVKSLLLVPNGALKKSLTAKQVQADFITLGLSEEKATYFSEKWKQNAPTLARWAIGQTLMINQLIDMEWKFGVTSGSSELEKVGSIFLQLKLVVKKGNQTENVYIDRVSLFCPGWMECSGVISARCNLHLPGSSDSPISAS

SEQ ID NO: 92319 - protein, 160 aa, Homo sapiens
GRQQSRQDGDYSPDNSAQPGDRVICLQVHGDASFCGQGIVPETFTLSNLPHFRIGGSVHLIVNNQLGYTTPAERGRSSLYCSDIGKLVGCAIIHVNGDSPEEVVRATRLAFEYQRQFRKDVIIDLLCYRQWGHNELDEPFYTNPIMYKIIRYNYKPLCDM

SEQ ID NO: 92320 - protein, 460 aa, Homo sapiens
  MOD_RES (1)..(1): Any amino acid
XCKSEFNVYSQEVITVLGEIDFMLENLPEWVTAKPVKKNVLTMLDEAYIQPQPLGVVLIIGAWNYPFVLTIQPLIGAIAAGNAVIIKPSELSENTAKILAKLLPQYLDQDLYIVINGGVEETTELLKQRFDHIFYTGNTAVGKIVMEAAAKHLTPVTLELGGKSPCYIDKDCDLDIVCRRITWGKYMNCGQTCIAPDYILCEASLQNQIVWKIKETVKEFYGENIKESPDYERIINLRHFKRILSLLEGQKIAFGGETDEATRYIAPTVLTDVDPKTKVMQEEIFGPILPIVPVKNVDEAINFINEREKPLALYVFSHNHKLIKRMIDETSSGGVTGNDVIMHFTLNSFPFGGVGSSGMGAYHGKHSFDTFSHQRPCLLKSLKREGANKLRYPPNSQSKVDWGKFFLLKRFNKEKLGLLLLTFLGIVAAVLVKKYQAVLRRKALLIFLVVHRLRWSSKQR

SEQ ID NO: 92321 - protein, 257 aa, Homo sapiens
MFGFFKGMSFPLASIAVYNSVVFGVFSNTQRFLSQHRCGEPEASPPRTLSDLLLASMVAGVVSVGLGGPVDLIKIRLQMQTQPFRDANLGLKSRAVAPAEQPAYQGPVHCITTIVRNEGLAGLYRGASAMLLRDVPGYCLYFIPYVFLSEWITPEACTGPSPCAVWLAGGMAGAISWGTATPMDVVKSRLQADGVYLNKYKGVLDCISQSYQKEGLKVFFRGITVNAVRGFPMSAAMFLGYELSLQAIRGDHAVTSP

SEQ ID NO: 92322 - protein, 115 aa, Homo sapiens
MAALGCARLRWALRGAGRGLCPHGARAKAAIPAALPSDKATGAPGAGPGVRRRQRSLEEIPRLGQLRFFFQLFVQGYALQLHQLQGRTPLVPAAPGSEPAVAEASGSSALYGCFQ

SEQ ID NO: 92323 - protein, 200 aa, Homo sapiens
MVIVTPQDRKNSVWTQDGPSAQILQQLVVLAAEALPMLEKQLMDPRGPGDIRTVFRPPLDIYDVLIRLSPRHIPRHRQAVDSPAASFCRGLLSQPGPSSLMPVLGYDPPQLYLTQLREAFGDLALFFYDQHGGEVIGVLWKPTSFQPQPFKASSTKGRMVMSRGGELVMVPNVEAILEDFAVLGEGLVQTVEARSERWTV

SEQ ID NO: 92324 - protein, 134 aa, Homo sapiens
MCNTPTYCDLGKAAKDVFNKGYGFGMVKIDLKTKSCSGVMEFSTSGHAYTDTGKASGNLETKYKVCNYGLTFTQKWNTDNTLGTEISWENKLAEGLKLTLDTIFVPNTGKKSGKLKASYKRDCFSVGLGFELEA

SEQ ID NO: 92325 - protein, 40 aa, Homo sapiens
MAFRTICVLVGVFICSICVKGSSQPQARVYLTFDGPSFHD

SEQ ID NO: 92326 - protein, 130 aa, Homo sapiens
MDAFKGGMSLERLPEGLRPPPPPPHDMGPAFHLARPADPREPLENSASESSDTELPEKERGGEPKGPEDSGAGGTGCGGADDPAKKKKQRRQRTHFTSQQLQELEATFQRNRYPDMSMREEIAVWTNLTE

SEQ ID NO: 92327 - protein, 32 aa, Homo sapiens
MSRVPSPPPPAEMSSGPVAESWCYTQIKVVKF

SEQ ID NO: 92328 - protein, 208 aa, Homo sapiens
KDAPVDHLGTEHCYDSSAPPKVRRYQVLLSLMLSSQTKDQVTAGAMQRLRARGLTVDSILQTDDATLGKLIYPVGFWRSKVKYIKQTSAILQQHYGGDIPASVAELVALPGVGPKMAHLAMAVAWGTVSGIAAVDTHVHRIANRLRWTKKATKSPEETRAALEEWLPRELWHEINGLLVGFGQQTCLPVHPRCHACLNQALCPAAQGL

SEQ ID NO: 92329 - protein, 94 aa, Homo sapiens
MSGLRVAFPDTRKTYCFDAFPSIDKISKVTSPVLVIHGTEDEVIDFSHGLAMYERCPRAVEPLWVEGAGHNDIELYAQYLERLKQFISHELPNS

SEQ ID NO: 92330 - protein, 122 aa, Homo sapiens
  MOD_RES (1)..(1): Any amino acid
XHRPDFPAGTCARAFLHLGQNNFAEAHRFFTEILRMDPRNAVANNNAAVCLLYLGKLKDSLRQLEAMVQQDPRHYLHESVLFNLTTMYELESSRSMQKKQALLEAVAGKEGDSFNTQCLKLA

SEQ ID NO: 92331 - protein, 326 aa, Homo sapiens
MDIDKDLEAPLYLTPEGWSLFLQRYYQVVHEGAELRHLDTQVQRCEDILQQLQAVVPQIDMEGDRNIWIVKPGAKSRGRGIMCMDHLEEMLKLVNGNPVVMKDGKWVVQKYIERPLLIFGTKFDLRQWFLVTDWNPLTVWFYRDSYIRFSTQPFSLKNLDNSVHLCNNSIQKHLENSCHRHPLLPPDNMWSSQRFQAHLQEMGAPNAWSTIIVPGMKDAVIHALQTSQDTVQCRKASFELYGADFVFGEDFQPWLIEINASPTMAPSTAVTARLCAGVQADTLRVVIDRMLDRNCDTGAFELIYKQGPAPNMQVSPERNAPLCPAP

SEQ ID NO: 92332 - protein, 149 aa, Homo sapiens
MPTTTALRWTAAARVRRKGRGGWVLAALRSVSQDGVPGCTVMGGETRSPENAVDFTGRCYFTKICKCKLKDIACLKCGNIVGYHVIVPCSSCLPSCNNGHFWMFHSQAVYDINRLDSTGVNILLWGNLPEIEESTDEDVLNISAEECIR

SEQ ID NO: 92333 - protein, 260 aa, Homo sapiens
MPMLLPHPHQHFLKGLLRAPFRCYHFIFHSSTHLGSGIPCAQPFNSLGLHCTKWMLLSDGLKRKLCVQTTLKDHTEGLSDKEQRFVDKLYTGLIQGQRACLAEAITLVESTHSRKKELAQVLLQKVLLYHREQEQSNKGKPLAFRVGLSGPPGAGKSTFIEYFGKMLTERGHKLSVLAVDPSSCTSGGSLLGDKTRMTELSRDMNAYIRPSPTRGTLGGVTRTTNEAILLCEGAGYDIILIETVGYQKGYNRDGRSGSCN

SEQ ID NO: 92334 - protein, 134 aa, Homo sapiens
MAHESAEDLFHFNVGGWHFSVPRSKLSQFPDSLLWKEASALTSSESQRLFIDRDGSTFRHVHYYLYTSKLSFSSCAELNLLYEQALGLQLMPLLQTLDNLKEGKHHLRVRPADLPVAERASLNYWRTWKCISKP

SEQ ID NO: 92335 - protein, 81 aa, Homo sapiens
  MOD_RES (1)..(1): Any amino acid
XSLSDGKIALPEKKSGATEERKPAEVLIVEGQQYAVVGTVLLLIRIILEYCQCVDNIPSVTTDMLTRLSDLLKVLNMTEAT

SEQ ID NO: 92336 - protein, 239 aa, Homo sapiens
  MOD_RES (1)..(1): Any amino acid
XSDHGNGLGRGTRGSGCSGGSLVADWGGGAAAAAAVALALAPALSTMRRGSSESELAARWEAEAVAAAKAAAKAEAEATAETVAEQVRVDAGAAGEPECKAGEEQPKVLAPAPAQPSAAEEGNTQVLQRPPPTLPPSKPKPVQGLCPHGKPRDKGRSCKRSSGHGSGENGSQRPVTVDSSKARTSLDALKISIRQLKWKEFPFGRRLPCDIYWHGVSFHDNDIFSGQVNKFPGSNGERR

SEQ ID NO: 92337 - protein, 84 aa, Homo sapiens
MELGRGAYGVVEKMRHVPSGQIMAVKRIRATVNSQEQKRLLMDLDISMRTVDCPFTVTFYGALFREGDVWICMELMDTSLDKFY

SEQ ID NO: 92338 - protein, 650 aa, Homo sapiens
MQRAGSKTAGPPCQWSRMASEGTNIPSPVVRQIDKQFLICSICLERYKNPKVLPCLHTFCERCLQNYIPAHSLTLSCPVCRQTSILPEKGVAALQNNFFITNLMDVLQRTPGSNAEESSILETVTAVAAGKPLSCPNHDGNVLQSQLDTLLQGQESIKSCSNFTAQALNHGTETEVLLVKKQMSEKLNELADQDFPLHPRENDQLDFIVETEGLKKSIHNLGTILTTNAVASETVATGEGLRQTIIGQPMSVTITTKDKDGELCKTGNAYLTAELSTPDGSVADGEILDNKNGTYEFLYTVQKEGDFTLSLRLYDQHIRGSPFKLKVIRSADVSPTTEGVKRRVKSPGSGHVKQKAVKRPASMYSTGKRKENPIEDDLIFRVGTKGRNKGEFTNLQGVAASTNGKILIADSNNQCVQIFSNDGQFKSRFGIRGRSPGQLQRPTGVAVHPSGDIIIADYDNKWVSIFSSDGKFKTKIGSGKLMGPKGVSVDRNGHIIVVDNKACCVFIFQPNGKIVTRFGSRGNGDRQFAGPHFAAVNSNNEIIITDFHNHSVKVFNQEGEFMLKFGSNGEGNGQFNAPTGVAVDSNGNIIVADWGNSRIQVFDGSGSFLSYINTSADPLYGPQGLALTSDGHVVVADSGNHCFKVYRYLQ

SEQ ID NO: 92339 - protein, 701 aa, Homo sapiens
MSRVQTMNYVGQLAGQVFVTVKELYKGLNPATLSGCIDIIVIRQPNGNLQCSPFHVRFGKMGVLRSREKVVDIEINGESVDLHMKLGDNGEAFFVQETDNDQEVIPMHLATSPILSEGASRMECQLKRGSVDRMRGLDPSTPAQVIAPSETPSSSSVVKKRRKRRRKSQLDSLKRDDNMNTSEDEDMFPIEMSSDEAMELLESSRTLPNDIPPFQDDIPEENLSLAVIYPQSASYPNSDREWSPTPSSLVDCKRTAPHLAVAAEGGLSSSCPPQSSLFHPSESPSGSRPSTPKSDSELVSKSTERTGQKNPEMLWLWGELPQAAKSSSPHKMKESSPLSSRKICDKSHFQAIHSESSDTFSDQSPTLVGGALLDQNKPQTEMQFVNEEDLETLGAAAPLLPMIEELKPPSASVVQTANKTDSPSRKRDKRSRHLGADGVYLDDLTDMDPEVAALYFPKNGDPSGLAKHASDNGARSANQSPQSVGSSGVDSGVESTSDGLRDLPSIAISLCGGLSDHREITKDAFLEQAVSYQQFVDNPAIIDDPNLVVKIGSKYYNWTTAAPLLLAMQAFQKPLPKATVESIMRDKMPKKGGRWWFSWRGRNTTIKEESKPEQCLAGKAHSTGEQPPQLSLATRVKHESSSSDEERAAAKPSNAGHLPLLPNVSYKKTLRLTSEQLLEVEEWPQRRGFQCHHAVPRHVPL

SEQ ID NO: 92340 - protein, 202 aa, Homo sapiens
MMDLRNTPAKSLDKFIEDYLLPDTCFRMQINHAIDIICGFLKERCFRGSSYPVCVSKVVKGGSSGKGTTLRGRSDADLVVFLSPLTTFQDQLNRRGEFIQEIRRQLEACQRERAFSVKFEVQAPRWGNPRALSFVLSSLQLGEGVEFDVLPAFDALAHRGVHRPAERGRVLHLLHRTTERLPEAAPHQAQEPHPPSQALVPK

SEQ ID NO: 92341 - protein, 103 aa, Homo sapiens
MAKHGADEPSSRSGSPDREGRASEDRSLLHQRLAVRELIDTEVSYLHMLQLCASDIRSRLQQLPQGDLDVLFSNIDDIIKVNSRFLHDLQETASKEEEQVQLV

SEQ ID NO: 92342 - protein, 405 aa, Homo sapiens
MAAAALGQIWARKLLSVPWLLCGPRRYASSSFKAADLQLEMTQKPHKKPGPGEPLVFGKTFTDHMLMVEWNDKGWGQPRIQPFQNLTLHPASSSLHYSLQLFEGMKAFKGKDQQVRLFRPWLNMDRMLRSAMRLCLPSFDKLELLECIRRLIEVDKDWVPDAAGTSLYVRPVLIGNEPSLGVSQPTRALLFVILCPVGAYFPGGSVTPVSLLADPAFIRAWVGGVGNYKLGGNYGPTVLVQQEALKRGCEQVLWLYGPDHQLTEVGTMNIFVYWTHEDGVLELVTPPLNGVILPGVVRQSLLDMAQTWGEFRVVERTITMKQLLRALEEGRVREVFGSGTACQVCPVHRILYKDRNLHIPTMENGPELILRFQKELKEIQVSCRELGNGLGACSLEKLVSHEPLD

SEQ ID NO: 92343 - protein, 155 aa, Homo sapiens
MHKEEHEVAVLGPPPSTILPRSTVINIHSETSVPDHVVWSLFNTLFLNWCCLGFIAFAYSVKGQEDGWRRDRGPGLCLHRQVPEHLGPDSGHPHDHWIHPVTGIRLCDSLPYYVTDNTGKTGLLVAAHSLQPLHSTVQCWPCTLGLLPLPPWSCP

SEQ ID NO: 92344 - protein, 674 aa, Homo sapiens
MSELADSGPSGASAPSQLRAVTLEDLGLLLAGGLASPEPLSLEELSERYESSHPTSTASVPEQDTAKHWNQLEQWVVELQAEVACLREHKQRCERATRSLLRELLQVRARVQLQGSELRQLQQEARPAAQAPEKEAPEFSGLQNQMQALDKRLVEVREALTRLRRRQVQQEAERRGAEQEAGLRLAKLTDLLQQEEQGREVACGALQKNQEDSSRRVDLEVARMQAQVTKLGEEVSLRFLKREAKLCGFLQKSFLALEKRMKASESSRLKLEGSLRGELESRWEKLRGLMEERLRALQGQHEVGPGGRRAEESHLLEQCQGLDAAVAQLTKFVQQNQASLNRVLLAEEKAWDAKGRLEESRAGELAAYVQENLEAAQLAGELARQEMHGELVLLREKSRALEASVAQLAGQLKELSGHLPALSSRLDLQEQMLGLRLSEAKTEWEGAERKSLEDLARWRKEVTEHLRGVREKVDGLPQQIESVSDKCLLHKSDSDLRISAEGKAREFKVGALRQELATLLSSVQLLKEDNPGRKIAEMQGKLATNQIMKLENCVQANKTIQNLRFNTEARLRTQEMATLWESVLRLWSEEGPRTPLGSWKALPSLVRPRVFIKDMAPGKVVPMNCWGVYQAVRWLRWKASLIKLRALRRPGGVLEKPHSQEQVQQLTPSLFIQK

SEQ ID NO: 92345 - protein, 371 aa, Homo sapiens
MEPSSPQDEGLRKKQPKKPVPEILPRPPRALFCLTLENPLRKACISIVEWKPFETIILLTIFANCVALAVYLPMPEDDNNSLNLGLEKLEYFFLIVFSIEAAMKIIAYGFLFHQDAYLRSGWNVLDFTIVFLGVFTVILEQVNVIQSHTAPMSSKGAGLDVKALRAFRVLRPLRLVSGVPSLQVVLNSIFKAMLPLFHIALLVLFMVIIYAIIGLELFKGKMHKTCYFIGTDIVATVENEEPSPCARTGSGRRCTINGSECRGGWPGPNHGITHFDNFGFSMLTVYQCITMEGWTDVLYWVGLGPRLQNHLPSSTGLQGSGEGGLASPHRRPVSDLRDHSSLLLLPGESIQDVCPFLVPRYVPQHPMGKSP

SEQ ID NO: 92346 - protein, 605 aa, Homo sapiens
MTMAGGRRGLVAPQNTFLENIVRRSNDTNFVLGNAQIVDWPIVYSNDGFCKLSGYHRAEVMQKSSTCSFMYGELTDKDTIEKVRQTFENYEMNSFEILMYKKNTLLYATIFGNVTTIFQQMYANTNRYHEMLNSVRDFLKLYQVPKGLSERVMDYIVSTWSMSRGIDTEKVLQICPKDMRADICVHLNRKVFKEHPAFRLASDGCLRALAMEFQTVHCAPGDLIYHAGESVDSLCFVVSGSLEVIQDDEVVAILGKGDVFGDVFWKEATLAQSCANVRALTYCDLHVIKRDALQKVLEFYTAFSHSFSRNLILTYNLRKRIVFRKISDVKREEEERMKRKNEAPLILPPDHPVRRLFQRFRQQKEARLAAERGGRDLDDLDVEKGNVLTEHASANHSLVKASVVTVRESPATPVSFQAASTSGVPDHAKLQAPGSECLGPKGGGGDCAKRKSWARFKDACGKSEDWNKVSKAESMETLPERTKASGEATLKKTDSCDSGITKSDLRLDNVGEARSPQDRSPILAEVKHSFYPIPEQTLQATVLEVRHELKEDIKALNAKMTNIEKQLSEILRILTSRRSSQSPQELFEISRPQSPESERDIFGAS

SEQ ID NO: 92347 - protein, 68 aa, Homo sapiens
MAGEQKPSSNLLEQFILLAKGTSGSALTALISQVLEAPGVYVFGELLELANVQERRGFTLLARMVSIS

SEQ ID NO: 92348 - protein, 36 aa, Homo sapiens
NLPFELQRNFQLMRDLDQRTEGGQTHSAAGHRPGPF

SEQ ID NO: 92349 - protein, 399 aa, Homo sapiens
MNALLLSAWFGHLRILQILVNSGAKIHCESKDGLTLLHCAAQKGHVPVLAFIMEDLEDVALDHVDKLGRTAFHRAAEHGQLDALDFLVGSGCDHNVKDKEGNTALHLAAGRGHMAVLQRLVDIGLDLEEQNAEGLTALHSAAGGSHPDCVQLLLRAGSTVNALTQKNLSCLHYAALSGSEDVSRVLIHAGGCANVVDHQGASPLHLAVRHNFPALVRLLINSDSDVNAVDNRQQTPLHLAAEHAWQDIADMLLIAGVDLNLRDKDHPSDPSGKSLSFKQDHRQETQQLRSVLWRLASRYLQPREWKKLAYSWEFTEAHVDAIEQQWTGTRSYQEHGHRMLLIWLHGVATAGENPSKALFEGLVAIGRRDLAGWSTMARSQLTATSASRVQMILVPQPPE

SEQ ID NO: 92350 - protein, 133 aa, Homo sapiens
MLKAREYHSSSVLDGLLYVVAADSTERYDHTTDSWEALQPMTYPMDNCSTTACRGRLYAIGSLAGKETMVMQCYDPDTDLWSLVDCGQLPPWSFAPKTATLNGLMYFVRDDSAEVDVYNPTRNEWDKIPSMNQ

SEQ ID NO: 92351 - protein, 194 aa, Homo sapiens
MKPILLQGHERSITQIKYNREGDLLFTVAKDPIVNVWYSVNGERLGTYMGHTGAVWCVDADWDTKHVLTGSADNSCRLWDCETGKQLALLKTNSAVRTCGFDFGGNIIMFSTDKQMGYQCFSGEVLVNVKEHSRQINDIQLSRDMTMFVTASKDNTAKLFDSTTLEHQKTFRTERPVNSAALSPNYDHVLPFGL

SEQ ID NO: 92352 - protein, 55 aa, Homo sapiens
MHQLFRLVLGQKDLSRAGDLFSLDDSEIEDSLTEALEQIKIISSSSDYQTNNNDQ

SEQ ID NO: 92353 - protein, 426 aa, Homo sapiens
MGPLSAPPCTQHITWKGLLLTASLLNFWNPPTTAQVTIEAQPPKVSEGKDVLLLVHNLPQNLTGYIWYKGQIRDLYHYVTSYIVDGQIIKYGPAYSGRETVYSNASLLIQNVTQEDTGSYTLHIIKRGDGTGGVTGRFTFTLYLETPKPSISSSNFNPREATEAVILTCDPETPDASYLWWMNGQSLPMTHSLQLSETNRTLYLFGVTNYTAGPYECEIRNPVSASRSDPVTLNLLPKLPKPYITINNLNPRENKDVSTFTCEPKSENYTYIWWLNGQSLPVSPRVKRRIENRILILPSVTRNETGPYQCEIRDRYGGIRSDPVTLNVLYGPDLPRIYPSFTYYHSGQNLYLSCFADSNPPAQYSWTINGKFQLSGQKLSIPQITTKHSGLYACSVRNSATGKESSKSVTVRVSGKWIPASLAIGF

SEQ ID NO: 92354 - protein, 53 aa, Homo sapiens
MMMVRRGLLAWISRVVVLLVLLCCAISVLYMLACTPKGDEEQLALPRANSPTG

SEQ ID NO: 92355 - protein, 157 aa, Homo sapiens
MAASAAVFSRLRSGLRLGSRGLCTRLATPPRRAPDQDISCLNRDPARVVVVDCKKEAFRLQPYNGVALRPWDGNSDDRVLLDLSAFLKTIALNGVEDVRTVLEHYALEDDPLAAFKQRQSRLEQEEQQRLAELSKSNKQNLFLGSLTSRLWPRSKQP

SEQ ID NO: 92356 - protein, 83 aa, Homo sapiens
PASASQSARITEEPKVGIKTIKVYCQRMQEENITRALIVVQQGMTPSAKQSLVDMAPKYILEQFLQQELLINITEHESLSTSS

SEQ ID NO: 92357 - protein, 185 aa, Homo sapiens
MTVRPPQPCGTGAAEDPQTTLALNFGSTLMKKKSDPEGPALLFPESELSIRIGRAGLLSDKSENGEAYQRKKAAATGLPEGPAVPVPSRGNLAQPGGSSWRRIALLILAITIHNVPEGLAVGVGFGAIEKTASATFESARNLAIGIGIQNFPEGLAVSLPLRGAGFSTWRAFWYGQLSGMVEPLA

SEQ ID NO: 92358 - protein, 53 aa, Homo sapiens
  MOD_RES (1)..(1): Any amino acid
XVWKKYLDQFKNPLILLLLGSALVSVLTKEYEDAVSIATAVLVVVTVAFIQHI

SEQ ID NO: 92359 - protein, 62 aa, Homo sapiens
  MOD_RES (1)..(1): Any amino acid
XSDEEVAGKKSFSAQEREYIRQGKEATAVVDQILAQEENWKFEKNNPTPCLHSPPCHLLSLP

SEQ ID NO: 92360 - protein, 104 aa, Homo sapiens
MAEAALVITPQIPMVTEEFVKPSQGHVTFEDIAVYFSQEEWGLLDEAQRCLYHDVMLENFSLMASVAGLSQSNHKDSCSQQKVPVSLNNCVAQCSPDDGHYDPK

SEQ ID NO: 92361 - protein, 545 aa, Homo sapiens
MLGWCEAIARNPHRIPNNTRTPEISGDLADASQTSTLNEKSPGRSASRSSNISKASSPTTGTAPRSQSRLSVCPSTQDICRSAILHDMSEESFEYCTPVMVLSPARKESGKKSVIQRPRRRRKASERYEHAAEEQIRGRKNDFHLQISSPRWRELYTDSSDSSSTDESHWIQAKRRAQVKFRLSRRRRRNNNKPCENLAGSSTPNGIELVDLGSKGKEQQELIECESCSLNLHRGKHTRYQECNPSLTQGSSEIKRSSRNHEKSKGRYHHRDPQLLQSLRKNEIMKKTFSETDSSTEILGVPEGSKDMNDAGLQVNNPVQKPPATYDDGSDNLEVCRICHCEGDEESPLITPCRCTGTLRFVHQSCLHQWIKSSDTRCCELCKYDFIMETKLKPLRKWEKLQMTTSERRKIFCSVTFHVIAITCVVWSLYVLIDRTAEEIKQGNDNGVLEWPFWTKLVVVAIGFTGGLVFMYVQCKVYVQLWRRLKAYNRVIFVQNCPDTAKKLEKNFSCNVNTDIKDAVVVPVPQTGANSLPSAEGGPPEVVSV

SEQ ID NO: 92362 - protein, 3547 aa, Homo sapiens
MSEPGGGGGEDGSAGLEVSAVQNVADVSVLQKHLRKLVPLLLEDGGEAPAALEAALEEKSALEQMRKFLSDPQVHTVLVERSTLKEDVGDEGEEEKEFISYNINIDIHYGVKSNSLAFIKRTPVIDADKPVSSQLRVLTLSEDSPYETLHSFISNAVAPFFKSYIRESGKADRDGDKMAPSVEKKIAELEMGLLHLQQNIEIPEISLPIHPMITNVAKQCYERGEKPKVTDFGDKVEDPTFLNQLQSGVNRWIREIQKVTKLDRDPASGTALQEISFWLNLERALYRIQEKRESPEVLLTLDILKHGKRFHATVSFDTDTGLKQALETVNDYNPLMKDFPLNDLLSATELDKIRQALVAIFTHLRKIRNTKYPIQRALRLVEAISRDLSSQLLKVLGTRKLMHVAYEEFEKVMVACFEVFQTWDDEYEKLQVLLRDIVKRKREENLKMVWRINPAHRKLQARLDQMRKFRRQHEQLRAVIVRVLRPQVTAVAQQNQGEVPEPQDMKVAEVLFDAADANAIEEVNLAYENVKEVDGLDVSKEGTEAWEAAMKRYDERIDRVETRITARLRDQLGTAKNANEMFRIFSRFNALFVRPHIRGAIREYQTQLIQRVKDDIESLHDKFKVQYPQSQACKMSHVRDLPPVSGSIIWAKQIDRQLTAYMKRVEDVLGKGWENHVEGQKLKQDGDSFRMKLNTQEIFDDWARKVQQRNLGVSGRIFTIESTRVRGRTGNVLKLKVNFLPEIITLSKEVRNLKWLGFRVPLAIVNKAHQANQLYPFAISLIESVRTYERTCEKVEERNTISLLVAGLKKEVQALIAEGIALVWESYKLDPYVQRLAETVFNFQEKVDDLLIIEEKIDLEVRSLETCMYDHKTFSEILNRVQKAVDDLNLHSYSNLPIWVNKLDMEIERILGVRLQAGLRAWTQVLLGQAEDKAEVDMDTDAPQVSHKPGGEPKIKNVVHELRITNQVIYLNPPIEECRYKLYQEMFAWKMVVLSLPRIQSQRYQVGVHYELTEEEKFYRNALTRMPDGPVALEESYSAVMGIVSEVEQYVKVWLQYQCLWDMQAENIYNRLGEDLNKWQALLVQIRKARGTFDNAETKKEFGPVVIDYGKVQSKVNLKYDSWHKEVLSKFGQMLGSNMTEFHSQISKSRQELEQHSVDTASTSDAVTFITYVQSLKRKIKQFEKQVELYRNGQRLLEKQRFQFPPSWLYIDNIEGEWGAFNDIMRRKDSAIQQQVANLQMKIVQEDRAVESRTTDLLTDWEKTKPVTGNLRPEEALQALTIYEGKFGRLKDDREKCAKAKEALELTDTGLLSGSEERVQVALEELQDLKGVWSELSKVWEQIDQMKEQPWVSVQPRKLRQNLDALLNQLKSFPARLRQYASYEFVQRLLKGYMKINMLVIELKSEALKDRHWKQLMKRLHVNWVVSELTLGQIWDVDLQKNEAIVKDVLLVAQGEMALEEFLKQIREVWNTYELDLVNYQNKCRLIRGWDDLFNKVKEHINSVSAMKLSPYYKVFEEDALSWEDKLNRIMALFDVWIDVQRRWVYLEGIFTGSADIKHLLPVETQRFQSISTEFLALMKKVSKSPLVMDVLNIQGVQRSLERLADLLGKIQKALGEYLERERSSFPRFYFVGDEDLLEIIGNSKNVAKLQKHFKKMFAGVSSIILNEDNSVVLGISSREGEEVMFKTPVSITEHPKINEWLTLVEKEMRVTLAKLLAESVTEVEIFGKATSIDPNTYITWIDKYQAQLVVLSAQIAWSENVETALSSMGGGGDAAPLHSVLSNVEVTLNVLADSVLMEQPPLRRRKLEHLITELVHQRDVTRSLIKSKIDNAKSFEWLSQMRFYFDPKQTDVLQQLSIQMANAKFNYGFEYLGVQDKLVQTPLTDRCYLTMTQALEARLGGSPFGPAGTGKTESVKALGHQLGRFVLVFNCDETFDFQAMGRIFVGLCQVGAWGCFDEFNRLEERMLSAVSQQVQCIQEALREHSNPNYDKTSAPITCELLNKQVKVSPDMAIFITMNPGYAGRSNLPDNLKKLFRSLAMTKPDRQLIAQVMLYSQGFRTAEVLANKIVPFFKLCDEQLSSQSHYDFGLRALKSVLVSAGNVKRERIQKIKREKEERGEAVDEGEIAENLPEQEILIQSVCETMVPKLVAEDIPLLFSLLSDVFPGVQYHRGEMTALREELKKVCQEMYLTYGDGEEVGGMWVEKVLQLYQITQINHGLMMVGPSGSGKSMAWRVLLKALERLEGVEGVAHIIDPKAISKDHLYGTLDPNTREWTDGLFTHVLRKIIDSVRGELQKRQWIVFDGDVDPEWVENLNSVLDDNKLLTLPNGERLSLPPNVRIMFEVQDLKYATLATVSRCGMVWFSEDVLSTDMIFNNFLARLRSIPLDEGEDEAQRRRKGKEDEGEEAASPMLQIQRDAATIMQPYFTSNGLVTKALEHAFQLEHIMDLTRLRCLGSLFSMLHQACRNVAQYNANHPDFPMQIEQLERYIQRYLVYAILWSLSGDSRLKMRAELGEYIRRITTVPLPTAPNIPIIDYEVSISGEWSPWQAKVPQIEVETHKVAAPDVVVPTLDTVRHEALLYTWLAEHKPLVLCGPPGSGKTMTLFSALRALPDMEVVGLNFSSATTPELLLKTFDHYCEYRRTPNGVVLAPVQLGKWLVLFCDEINLPDMDKYGTQRVISFIRQMVEHGGFYRTSDQTWVKLERIQFVGACNPPTDPGRKPLSHRFLRHVPVVYVDYPGPASLTQIYGTFNRAMLRLIPSLRTYAEPLTAAMVEFYTMSQERFTQDTQPHYIYSPREMTRWVRGIFEALRPLETLPVEGLIRIWAHEALRLFQDRLVEDEERRWTDENIDTVALKHFPNIDREKAMSRPILYSNWLSKDYIPVDQEELRDYVKARLKVFYEEELDVPLVLFNEVLDHVLRIDRIFRQPQGHLLLIGVSGAGKTTLSRFVAWMNGLSVYQIKVHRKYTGEDFDEDLRTVLRRSGCKNEKIAFIMDESNVLDSGFLERMNTLLANGEVPGLFEGDEYATLMTQCKEGAQKEGLMLDSHEELYKWFTSQVIRNLHVVFTMNPSSEGLKDRAATSPALFNRCVLNWFGDWSTEALYQVGKEFTSKMDLEKPNYIVPDYMPVVYDKLPQPPSHREAIVNSCVFVHQTLHQANARLAKRGGRTMAITPRHYLDFINHYANLFHEKRSELEEQQMHLNVGLRKIKETVDQVEELRRDLRIKSQELEVKNAAANDKLKKMVKDQQEAEKKKVMSQEIQEQLHKQQEVIADKQMSVKEDLDKVEPAVIEAQNAVKSIKKQHLVEVRSMANPPAAVKLALESICLLLGESTTDWKQIRSIIMRENFIPTIVNFSAEEISDAIREKMKKNYMSNPSYNYEIVNRASLACGPMVKWAIAQLNYADMLKRVEPLRNELQKLEDDAKDNQQKANEVEQMIRDLEASIARYKEEYAVLISEAQAIKADLAAVEAKVNRSTALLKSLSAERERWEKTSETFKNQMSTIAGDCLLSAAFIAYAGYFDQQMRQNLFTTWSHHLQQANIQVSADH

SEQ ID NO: 92363 - protein, 57 aa, Homo sapiens
MSMRSPISAQLALDGVGTMVNCTIKSEEKKEPCHEAPQGSATAAEPQPGDPARASQD

SEQ ID NO: 92364 - protein, 17 aa, Homo sapiens
MADLSLLQEDLQEDADG

SEQ ID NO: 92365 - protein, 113 aa, Homo sapiens
  MOD_RES (1)..(1): Any amino acid
XLQHSNQKLKQENLSLRTAVHKSKSLKDLVSACGSGGNTDVLMEGVKTEVEDTLTPPPSDAGSPFQSSPLSLGSRGSGSGGSGSDSEPDSPVFEDSKVGPCHGAPFPTPSHIL

SEQ ID NO: 92366 - protein, 68 aa, Homo sapiens
VLFPLLTKLLENISPADVGGMEETRMRASTLLSKHLSPLLSLSTFAALWLTILDFMDKYMHAGSSDLL

SEQ ID NO: 92367 - protein, 77 aa, Homo sapiens
MEGQDEVSAREQHFHSQVRESTICFLLFAILYVVSYFIITRYKRKSGNPSPHFRDFGHASSSCVTHSWDSVGSFSTH

SEQ ID NO: 92368 - protein, 1570 aa, Homo sapiens
  MOD_RES (1)..(1): Any amino acid
XTDLLFALETDVHVWRSHSTKSVMDFVNSNENIIFVHNTIHLISQMVDNIIIACGGILPLLSAATSPTTELENIEVTQGMSAETAVTFLSRLMAMVDVLVFASSLNFSEIEAEKNMSSGGLMRQCLRLVCCVAVRNCLECRQRQRDRGNKSSHGSSKPQEVPQSVTATAASKTPLENVPGNLSPIKDPDRLLQDVDINRLRAVVFRDVDDSKQAQFLALAVVYFISVLMVSKYRDILEPQRETTRTGSQPGRNIRQEINSPTSTETPAAFPDTIKEKETPTPGEDIQVESSIPHTDSGIGEEQVASILNGAELETSTGPDAMSELLSTLSSEVKKSQESLTENPSETLKPATSISSISQTKGINVKEILKSLVAAPVEIAECGPEPIPYPDPALKRETQAILPMQFHSFDRSVVVPVKKPPPGSLAVTTVGATTAGSGLPTGSTSNIFAATGATPKSMINTTGAVDSGSSSSSSSSSFVNGATSKNLPAVQTVAPMPEDSAENMSITAKLERALEKVAPLLREIFVDFAPFLSRTLLGSHGQELLIEGLVCMKSSTSVVELVMLLCSQEWQNSIQKNAGLAFIELINEGRLLCHAMKDHIVRVANEAEFILNRQRAEDVHKHAEFESQCAQYAADRREEEKMCDHLISAAKHRDHVTANQLKQKILNILTNKHGAWGAVSHSQLHDFWRLDYWEDDLRRRRRFVRNAFGSTHAEALLKAAIEYGTEEDVVKSKKTFRSQAIVNQNAETELMLEGDDDAVSLLQEKEIDNLAGPVVLSTPAQLIAPVVVAKGTLSITTTEIYFEVDEDDSAFKKIDTKVLAYTEGLHGKWMFSEIRAVFSRRYLLQNTALEVFMANRTSVMFNFPDQATVKKVVYSLPRVGVGTSYGLPQARRISLATPRQLYKSSNMTQRWQRREISNFEYLMFLNTIAGRTYNDLNQYPVFPWVLTNYESEELDLTLPGNFRDLSKPIGALNPKRAVFYAERYETWEDDQSPPYHYNTHYSTATSTLSWLVRIEPFTTFFLNANDGKFDHPDRTFSSVARSWRTSQRDTSDVKELIPEFYYLPEMFVNSNGYNLGVREDEVVVNDVDLPPWAKKPEDFVRINRMALESEFVSCQLHQWIDLIFGYKQRGPEAVRALNVFHYLTYEGSVNLDSITDPVLREAMEAQIQNFGQTPSQLLIEPHPPRSSAMHLCFLPQSPLMFKDQMQQDVIMVLKFPSNSPVTHVAANTLPHLTIPAVVTVTCSRLFAVNRWHNTVGLRGAPGYSLDQAHHLPIEMDPLIANNSGVNKRQITDLVDQSIQINAHCFVVTADNRYILICGFWDKSFRVYSTETGKLTQIVFGHWDVVTCLARSESYIGGDCYIVSGSRDATLLLWYWSGRHHIIGDNPNSSECDYPAPRAVLTGHDHEVVCVSVCAELGLVISGAKEGPCLVHTITGDLLRALEGPENCLFPRLISVSSEGHCIIYYERGRFSNFSINGKLLAQMEINDSTRAILLSSDGQNLVTGGDNGVVEVWQACDFKQLYIYPGCDAGIRAMDLSHDQRTLITGMASGSIVAFNIDFNRWHYEHQNRY

SEQ ID NO: 92369 - protein, 351 aa, Homo sapiens
MSPTISHKDSSRQRRPGNFSHSLDMKSGPLPPGGWDDSHLDSAGREGDREALLGDTGTGDFLKAPQSFRAELSSILLLLFLYVLQGIPLGLAGSIPLILQSKNVSYTDQAFFSFVFWPFSLKLLWAPLVDAVYVKNFGRRKSWLVPTQYILGLFMIYLSTQVDRLLGNTDDRTPDVIALTVAFFLFEFLAATQDIAVDGWALTMLSRENVGYASTCNSVGQTAGYFLGNVLFLALESADFCNKYLRFQPQPRGIVTLSDKVSLYWPCQSAVVQSQLTAASTSWAQVVLSLPGGWDYRCAPPSLANFLFFVGIGSHYVAQAGLEFLSSSNPPTLASQSARITGMSTCTWLIF

SEQ ID NO: 92370 - protein, 398 aa, Homo sapiens
MQVSFVCSEHSLKGRGPEDRLGRPAASSPSLGSRGRFRAVAMVARSLGQLSVQSLPCAGDTSVKQQRMKYRNLGKSGLRVSCLGLGTWVTFGGQITDEMAEQLMTLAYDNGINLFDTAEVYAAGKAEVVLGNIIKKKGWRRSSLVITTKIFWGGKAETERGLSRKHIIEGLKASLERLQLEYVDVVFANRPDPNTPMEETVRAMTHVINQGMAMYWGTSRWSSMEIMEAYSVARQFNLTPPICEQAEYHMFQREKVEVQLPELFHKIGVGAMTWSPLACGIVSGKYDSGIPPYSRASLKGYQWLKDKILSEEGRRQQAKLKELQAIAERLGCTLPQLAIAWCLRNEGVSSVLLGASNADQLMENIGAIQVLPKLSSSIIHEIDSILGNKPYSKKDYRS

SEQ ID NO: 92371 - protein, 153 aa, Homo sapiens
MLRGPWRQLWLFFLLLLPGAPEPRGASRPWEGTDEPGSAWAWPGFQRLQEQLRAAGALSKRYWTLFSCQVWPDDCDEDEEAATGPLGWRLPLLGQRYLDLLTTWYCSFKDCCPRGDCRISNNFTGKNFVARMLVENLYRDGLMSDCVRMFIAT

SEQ ID NO: 92372 - protein, 52 aa, Homo sapiens
MVRVPGPAVQRNRALPGLAPFPDSPLASAWRARQAWRALGHACAPPPLELDG

SEQ ID NO: 92373 - protein, 171 aa, Homo sapiens
MEEDEFIGEKTFQRYCAEFIKHSQQIGDSWEWRPSKDCSDGYMCKIHFQIKNGSVMSHLGASTHGQTCLPMEEAFELPLDDCEVIETAAASEVIKYEYHVLYSCSYQVPVLYFRASFLDGRPLTLKDIWEGVHECYKMRLLQGPWDTITQQIFTKRCSEGHISVTKNIIPE

SEQ ID NO: 92374 - protein, 44 aa, Homo sapiens
  MOD_RES (1)..(1): Any amino acid
XNVVIWSIKSFPVRYMKIIEKSGYQALPWVRYITQSGDYQLRTS

SEQ ID NO: 92375 - protein, 57 aa, Homo sapiens
MKKLKILYMSNNLVKDWAEFVKLAELPCLEDLVFVGNPLEEKHSAENNWIEEATKRV

SEQ ID NO: 92376 - protein, 62 aa, Homo sapiens
MSTVKEAAHRLSKSEMSLYAVLDLKKGASPEDFKKSYRHLSSCVLCSLVAVSVVAAVFAVEH

SEQ ID NO: 92377 - protein, 186 aa, Homo sapiens
MTECFLPPTSSPSEHRRVEHGSGLTRTPSSEEISPTKFPGLYRTGEPSPPHDILHEPPDVVSDDEKDHGKKKGKFKKKEKRTEGYAAFQEDSSGDEAESPSKMKRSKGIHVFKKPSFSKKKEKDFKIKEKPKEEKHKEEKHKEEKHKEKKSKDLTAADVVKQWKEKKKKKKPIQEPEVPQIDVPNL

SEQ ID NO: 92378 - protein, 486 aa, Homo sapiens
MLHLSEFSEPDALLVKSTEGCCAEPSAELPRLPARDAPAATGYPGAGDFLSWALNSCGASGDLADSCFLEGPAPTPPPGLSYSGSFFIQAVPEHPHDPEALFNLMSGILGLAPFPGPEAAASRSPLDAPFPAGSDALLPGPPDLYSPDLGAAPFPEAFWEASPCAGAPSQCLYEPQLSPPDVKPGLRAPPASPALDAVSAFKGPYAPWELLSVGAPGNCGSQGDYQAAPEARFPVIGTKIEDLLSISCPAELPAVPANRLYPSGAYDAFPLAPGDLGEGAEGLPGLLTPPSGEGGSSGDGGEFLASTQPQLSPLGLRSAAAADFPKPLVADIPGSSGVAAPPVPPPPPTPFPQAKARRKGRRGGKCSTRCFCPRPHAKAFACPVESCVRSFARSDELNRHLRIHTGHKPFQCRICLRNFSRSDHLTTHVRTHTGEKPFACDVCGRRFARSDEKKRHSKVHLKQKARAEERLKGLGFYSLGLSFASL

SEQ ID NO: 92379 - protein, 100 aa, Homo sapiens
  MOD_RES (1)..(1): Any amino acid
XVLLHLSAMISASRAAAARLVGAAASRGPTAARHQDSWNGLSHEAFRLVSRRDYASEAIKGAVVGIDLGTTNSCVAVMEGAGECRRCQNHPFSCGLYSRW

SEQ ID NO: 92380 - protein, 299 aa, Homo sapiens
MMLKGITRLISRIHKLDPGRFLHMGTQARQSIAAHLDNQVPVESPRAISRTNENDPAKHGDQHEGQHYNISPQDLETVFPHGLPPRFVMQVKTFSEACLMVRKPALELLHYLKNTSFAYPAIRYLLYGEKGTGKTLSLCHVIHFCAKQDWLILHIPDAHLWVKNCRDLLQSSYNKQRFDQPLEASTWLKNFKTTNERFLNQIKVQEKYVWNKRESTEKGSPLGEVVEQGITRVRNATDAVGIVLKELKRQSSLGMFHLLVAVDGINALWGRTTLKREDKSPIAPEELALVHNLRKMMKN

SEQ ID NO: 92381 - protein, 201 aa, Homo sapiens
  MOD_RES (1)..(1): Any amino acid
XASAKKIIVKHVTVIGGGLMGAGIAQVAAATGHTVVLVDQTEDILAKSKKGIEESLRKVAKKKFAENLKVIKTPMTSQKTFESLVDFSKALGKHPVSCKDTPGFIVNRLLVPYLMEAIRLYERGDASKEDIDTAMKLGAGYPMGPFELLDYVGLDTTKFIVDGWHEMDAENPLHQPSPSLNKLVAENKFGKKTGEGFYKYK

SEQ ID NO: 92382 - protein, 178 aa, Homo sapiens
GPTCSILPKNPLFPQNLSSQPCIKMEGDKSLTFSSYGLQWCLYELDKEEFQTFKELLKKKSSESTTCSIPQFEIENANVECLALLLHEYYGASLAWATSISIFENMNLRTLSEKARDDMKRHSPEDPEATMTDQGPSKEKVPGISQAVQQDSATAAETKEQESFAVLLRLQCSGYPQA

SEQ ID NO: 92383 - protein, 70 aa, Homo sapiens
MPQLSQDNQECLQKHFSRPSIWTQFLPLFRAQRYNTDIHQITENEGDLRAVPDIKPCSYSGRSQRLGSVI

SEQ ID NO: 92384 - protein, 1186 aa, Homo sapiens
MDPSAPQPRAETSGKDIWHPGERCLAPSPDNGKLCEASIKSITVDENGKSFAVVLYADFQERKIPLKQLQEVKFVKDCPRNLIFDDEDLEKPYFPNRKFPSSSVAFKLSDNGDSIPYTINRYLRDYQREGTRFLYGHYIHGGGCILGDDMGLGKTVQVISFLAAVLHKKGTREDIENNMPEFLLRSMKKEPLSSTAKKMFLIVAPLSVLYNWKDELDTWGYFRVTVLHGNRKDNELIRVKQRKCEIALTTYETLRLCLDELNSLEWSAVIVDEAHRIKNPKARVTEVMKALKCNVRIGLTGTILQNNMKELWCVMDWAVPGLLGSGTYFKKQFSDPVEHGQRHTATKRELATGRKAMQRLAKKMSGWFLRRTKTLIKDQLPKKEDRMVYCSLTDFQKAVYQTVLETEDVTLILQSSEPCTCRSGQKRRNCCYKTNSHGETVKTLYLSYLTVLQKVANHVALLQAASTSKQQETLIKRICDQVFSRFPDFVQKSKDAAFETLSDPKYSGKMKVLQQLLNHCRKNRDKVLLFSFSTKLLDVLQQYCMASGLDYRRLDGSTKSEERLKIVKEFNSTQDVNICLVSTMAGGLGLNFVGANVVVLFDPTWNPANDLQAIDRAYRIGQCRDVKVLRLISLGTVEEIMYLRQIYKQQLHCVVVGSENAKRYFEAVQGSKEHQGELFGIHNLFKFRSQGSCLTKDILEREGQVEAGIMTATTWLKEGPPAHKLEMPRQPDCQECRGTEQAAEPLAKEACDLCSDFSDEEPVGATGIKTAKNKAPDSSKASSSPGQLTLLQCGFSKLLETKCKAVEDSDGNTASDDESSDEQPTCLSTEAKDAGCEKNQDSLGTSKHQKLDNILNPKEKHIFYKSEKILEQNISSKSDEKKIKNTDKHCILQNVTESEDSDVICPTQYTTERFPDNSIRFKPPLEGSEDSETEHTVKTRNNDNSRNTDDKRNGIISKKLSPENTTLKSILKRKGTSDISDESDDIEISSKSRVRKRASSLRFKRIKETKKELHNSPKTMNKTNQVYAANEDHNSQFIDDYSSSDESLSVSHFSFSKQSHRPRTIRDRTSFSSKLPSHNKKNSTFIPRKPMKCSNEKVVNQEQSYESMDKFLDGVQEVAYIHSNQNVIGSSKAENHMSRWAAHDVFELKQFSQLPANIAVCSSKLEATRSCGIFPHSDDTRIHALM

SEQ ID NO: 92385 - protein, 138 aa, Homo sapiens
MLRKFTLLTPSHCFPLRCKRCGPCLRIAPAFSSMSNKYPQAVFLEVDVHQCQGTAATNNISATPTFLFFRNKVRIDQYQGADAVGLEEKIKQHLENDPGSNEDTDIPKGYMDLMPFINKAGCECLNESDEHGFDNCLR

SEQ ID NO: 92386 - protein, 81 aa, Homo sapiens
MMRVNGDDDSVAALSFLYDYYMGPKEKRILSSSTGGRNDQGKRYYHGMEYETDLTPLESPTHLMKFLTENVSGTPEYPDLL

SEQ ID NO: 92387 - protein, 62 aa, Homo sapiens
  MOD_RES (1)..(1): Any amino acid
XMSVSEAAVPGEEVGRVKAKDPDIGENGLVTYNIVDGDGMESFEITTDYETQEGVIKLKKVS

SEQ ID NO: 92388 - protein, 134 aa, Homo sapiens
MKDFGSRQEFDSVENAGAIGPSRFGLKRAEVLGHKTPEPAPRRTEITIVKPQESAHRRMEPPASKVPEVPTAPATDAAPKRVEIQMPKPAEAPTAPSPAQTLENSEPAPVSQLQSRLEPKPQPPVAEATPRSQE

SEQ ID NO: 92389 - protein, 450 aa, Homo sapiens
  MOD_RES (1)..(1): Any amino acid
XIGLQNFEIAKDFVVKVIDRLSRDELVKFEPGQSYAGVVQYSHSQMQEHVSLRSPSIRNVQELKEAIKSLQWMAGGTFTGEALQYTRDQLLPPSPNNRIALVITDGRSDTQRDTTPLNVLCSPGIQVVSVGIKDVFDFIPGSDQLNVISCQGLAPSQGRPGLSLVKENYAELLEDAFLKNVTAQICIDKKCPDYTCPITFSSPADITILLDGSASVGSHNFDTTKRFAKRLAERFLTAGRTDPAHDVRVAVVQYSGTGQQRPERASLQFLQNYTALASAVDAMDFINDATDVNDALGYVTRFYREASSGAAKKRLLLFSDGNSQGATPAAIEKAVQEAQRAGIEIFVVVVGRQVNEPHIRVLVTGKTAEYDVAYGESHLFRVPSYQALLRGVFHQTVSRKLGAAIGLCLVLGNQGQEAVADINLGDSAPSPEGPAGDRPGPWPYSPGGRC

SEQ ID NO: 92390 - protein, 231 aa, Homo sapiens
MSRAMALFFVLCWIQGYSQQKSLNNAAFASGSNEREEHLAKIFDEILLQVFPKFPYDPSFNEATAVRSITKTDMRKGTSIAWNSPKPEYFLGSVDKIPDKDHLSEEKNFKESCLFDRDLREQLTTIDKETLQGAAKPDAHFRTMPCGQLLHFLQRNTIIAAVSGVAILMAIVLLLLGLASYIRKKQPSSPLANTTYNIFIMDGKTWWHNSEEKNFTKLAKKQKQLKSSSCV

SEQ ID NO: 92391 - protein, 64 aa, Homo sapiens
MKQTKLEIQKALAEDATVYEYDSIYDEMQKKKEENNPKLLLGKDRKPKYIHNLLKAVEIRKKEQ

SEQ ID NO: 92392 - protein, 190 aa, Homo sapiens
MRCGFAGGVGHQRKRTRRRRLNPGDETQGSRPEEGDPERKESQAGKQGNPSWSFPKAMDSPSLRELQQPLLEGTECETPAQKPGRHELGSPLREIAFAESLRGLQFLSPPLPSVSAGLGEPRPPDVEDMSSSDSDSDWDGGSRLSPFLPHDHLGLAVFSMLCCFWPVGIAAFCLAQKTRPSCPYSPHCEP

SEQ ID NO: 92393 - protein, 181 aa, Homo sapiens
MKYAENVPHNMTEKEFWTRFFQSHYFHRDRLNTGSKDLFAECAKIDEKGLKTMVSLGVKNPLLDLTALEDKPLDEGYGISSVPSASNSKSIKENSNAAIIKRFNHHSAMVLAAGLRKQEAQNEQTSEPSNMDGNSGDADCFQPAVKRVWAKKYEPFGAQVSPNTLCDCKYCIRLFPVTQFF

SEQ ID NO: 92394 - protein, 128 aa, Homo sapiens
MQIPKHISIEDITATSTSTTGTSHLVKCAEKEKTFCVNGGECFMVKDLSNPSRYLCKCQPGFTGARCTENVPMKVQNQEKAEELYQKRVLTITGICIALLVVGIMCVVAYCKTKKQRKKLHDRLRQSL

SEQ ID NO: 92395 - protein, 105 aa, Homo sapiens
MPPKKQAQAGGSKKAEQKKKEKIIEDKTFGLKNKKGAKQQKFIKAVTHQVKFGQQNPRQVAQSEAEKKLKKDDKKKELQELNELFKPVVAAQKISKGVQAFPGSY

SEQ ID NO: 92396 - protein, 58 aa, Homo sapiens
MAQSKLDCRSPVGLDCCNCCLDLAHRSGLQRGSSGENNNPGSPTVSNFRQLQEKLVFE

SEQ ID NO: 92397 - protein, 49 aa, Homo sapiens
AIILSSLLQSCDLEVANKVKAALKSLIPTLEKTKSTSKGIEILLEKLST

SEQ ID NO: 92398 - protein, 194 aa, Homo sapiens
MASVTRAVFGELPSGGGTVEKFQLQSDLLRVDIISWGCTITALEVKDRQGRASDVVLGFAELEGEVAPVQGTAFDLRKPVELGKHLQDFHLNGFDHNFCLKGSKEKHFCARVHHAASGRVLEVYTTQPGVQFYTGNFLDGTLKGKNGAVYPKHSGFCLETQNWPDAVNQPRFPPVLLRPGEEYDHTTWFKFSVA

SEQ ID NO: 92399 - protein, 1493 aa, Homo sapiens
MASITQLFDDLCEALLPAAKTHLGQRSVNRKRAKRSLKKVAYNALFTNLFQDETQQLQPDMSKLPARNKILMLSFDLRVGGLGPKADRLEELVEELEAAPCCPLLEVGSVLDLLVQLAGSGPPQVLPRKRDYFLNNKHVGRNVPYSGYDCDDLSVFEMDVQSLISREECLCHSMIQETLQVMEAAPGTGLPTVGLFSFGDPCGDRFERDTRVSLFGALVHSRTYDMDVRLGLPPVPDNADLSGLAIKVPPSVDQWEDEGFQSASNLTPDSQSEPSVTPDVDLWEAALTYEASKRRCWERVGCPPGHREEPYLTEAGRDAFDKFCRLHQGELQLLAGGVLQAPQPVLVKECELVKDVLNVLIGVVSATFSLCQPAQAFVVKRGVHVSGASPESISSLLSEVAEYGTCYTRLSHFSLQPVLDSLYSKGLVFQAFTSGLRRYLQYYRACVLSTPPTLSLLTIGFLFKKLGRQLRYLAELCGVGAVLPGTCGGGPRAAFPTGVKLLSYLYQEALHNCSNEHYPVLLSLLKTSCEPYTRFIHDWVYSGVFRDAYGEFMIQVNHEYLSFRDKLYWTHGYVLISKEVEDCVPVFLKHIAHDIYVCGKTINLLKLCCPRHYLCWSDVPVPRISVIFSLEELKEIEKDCAVYVGRMERVARHSSVSKEEKELRMEIAKQELIAHAREAASRVLSALSDRQMSERMALDARKREQFQRLKEQFVKDQERRQAARQEELDDDFSYARELRDRERRLKSLEEELERKARQALVDHYSKLSAEAARREQKALWRIQRHRLESARLRFLLEDEKHIQEMLKAVSEAHQPQEPPDVLLSVHPQVTSPGPEHPEGGQGCDSGSAEQHSPAWDGWNRPGLLTPQPLKPLAVGAGGRGLQQAEGARPFSDSLSIGDFLPVGPGAEPSVQTGMVPLLEVALQTINLDLPPSAPGEAPAAASTQPSRPQEYDFSTVLRPAVATSPAPGPLQAAECSLGSSGLQLWEDSCGKMDACGSASRETLLPSHPPRRAALEEGSSQPTERLFGQVSGGGLPTGDYASEIAPTRPRWNTHGHVSDASIRVGENVSDVAPTQPRWNTHGHVSNASISLGESVSDVAPTRPRWNIHGHVSNASIRVGENVSDVAPTRPRWNTHGHVSNASIRVGENVSDVAPTRPRWNTHGHVSDASISLGESVSDMAPARPRWNTHGHVSDASISLGESVSDMAPTRPRWNTHGHVSDTSIRVGENVSDVAPIRSRCNTHGHVSDASISLGEPVSDVVSTRPRWNTHVPIPPPHMVLGALSPEAEPNTPRPQQSPPGHTSQSALSLGAQSTVLDCGPRLPVEVGPSLSSPSSGCGEGSISVGENVSDVAPTQPWWPNTPGDSVSEELGQSRVAGGQEWDCGTHRAWEALGGAGTLRTSLQIGLSTHRKTQLPRAAQAVVRRRRHRRRRLRVGSRPTWQAWQGSTTWSGTRTVTSPCPSRPLLIFCAPCFPGPSPSPWTPRSSLPLMRLLCS

SEQ ID NO: 92400 - protein, 376 aa, Homo sapiens
MLDHEYTTKEVFRKNFFNDWRKEMAVEEREVIKSLDKCDFTEIHRYFVDKAAARKVLSREEKQKLKEEAEKLQQEFGYCILDGHQEKIGNFKIEPPGLFRGRGDHPKMGMLKRRITPEDVVINCSRDSKIPEPPAGHQWKEVRSDNTVTWLAAWTESVQNSIKYIMLNPCSKLKGETAWQKFETARRLRGFVDEIRSQYRADWKSREMKTRQRAVALYFIDKLALRAGNEKEDGEAADTVGCCSLRVEHVQLHPEADGCQHVVEFDFLGKDCIRYYNRVPVEKPVYKNLQLFMENKDPRDDLFDRLTVSWDGPAKPRNYRDHFPPQTTSLNKHLQELMDGLTAKVFRTYNASITLQEQLRALTRAEDSIAAKILSY

SEQ ID NO: 92401 - protein, 139 aa, Homo sapiens
MARGGSQSWSSGESDGQPKEQTPEKPRHKMVKETQYYDILGVKPSASPEEIKKAYRKLALKYHPDKNPDEGEKGHGHLQPDISLYSYSGFSVTSDTQLIISTNHRLKMLCILETEVKSFSILFTESLLFISKEAHDPPE

SEQ ID NO: 92402 - protein, 43 aa, Homo sapiens
MMAAKVVPMPPKPKQSFILRVPPDSKLGQDLLRDATNGPKTIH

SEQ ID NO: 92403 - protein, 78 aa, Homo sapiens
MKSILDGLADTTFRTITTDLLYVGSNDIQYEDIKGDMASKLGYFPQKFPLTSFRGSPFQEKMTAGDNPQLVPADQVNI

SEQ ID NO: 92404 - protein, 202 aa, Homo sapiens
MAAKVFESIGKFGLALAVAGGVVNSALYNVDAGHRAVIFDRFRGVQDIVVGEGTHFLIPWVQKPIIFDCRSRPRNVPVITGSKDLQNVNITLRILFRPVASQLPRIFTSIGEDYDERVLPSITTEILKSVVARFDAGELITQRELVSRQVSDDLTERAATFGLILDDVSLTHLTFGKEFTEAVEAKQVAQQEAERARFVVEK

SEQ ID NO: 92405 - protein, 125 aa, Homo sapiens
  MOD_RES (1)..(1): Any amino acid
XEHDSKGNKIAWKVEIEKLDYHHYLPLFFDGLCEMTFPYEFFARQGIHDMLEHGGNKILPVLPQLIIPIKNALNLRNRQVICVTLKVLQHLVVSAEMVGKALVPYYRQILPVLNIFKNMNGWAPP

SEQ ID NO: 92406 - protein, 217 aa, Homo sapiens
MLLPWATSAPGLAWGPLVLGLFGLLAASQPQAVPPYASENQTCRDQEKEYYEPQHRICCSRCPPAKCSRIRDTVCATCAENSYNEHWNYLTICQLCRPCDPVMGLEEIAPCTSKRKTQCRCQPGMFCAAWALECTHCELLSDCPPGTEAELKDEVGKGNNHCVPCKAGHFQNTSSPSARCQPHTRCENQGLVEAAPGTAQSDTTCKNPLEPLPPEMS

SEQ ID NO: 92407 - protein, 115 aa, Homo sapiens
MNDQYHRAARDGYLELLKEATRKELNAPDEDGMTPTLWAAYHGNLESLRLIVSRGFQWPLALPVLPGVLRSQHLVPRQRLPHAAGHGCHEGPHGMRALPGLHRGQAEQPQPQAGG

SEQ ID NO: 92408 - protein, 215 aa, Homo sapiens
  MOD_RES (1)..(1): Any amino acid
XEEVIKNSPVKTFASPTFSSLLDVFLSTTVFLTLSTTCFLKYEAATVPPPPAALAVFSAALLLEVLSLAVSIRMVFFLEDVMACTKRLLEWIAGWLPRHCIGAILVSLPALAVYSHVTSEYETNIHFPVFTGSAALIAVVHYCNFCQLSSWMRSSLATVVGAGPLLLLYVSLCPDSSVLTSPLDAVQNFRRREPCGEGDSKFPFSSQEESCRAGA

SEQ ID NO: 92409 - protein, 129 aa, Homo sapiens
MLKLYAMFLTLVFLVELVAAIVGFVFRHEIKNSFKNNYEKALKQYNSTGDYRSHAVDKIQNTLHCCGVTDYRDWTDTNYYSEKGFPKSCCKLEDCTPQRDADKVNNELIGIFLAYCLSRAITNNQYEIV

SEQ ID NO: 92410 - protein, 418 aa, Homo sapiens
MSTEKVDQKEEAGEKEVCGDQIKGPDKEEEPPAAASHGQGWRPGGRAARNARPEPGARHPALPAMVNDPPVPALLWAQEVGQVLAGRARRLLLQFGVLFCTILLLLWVSVFLYGSFYYSYMPTVSHLSPVHFYYRTDCDSSTTSLCSFPVANVSLTKGGRDRVLMYGQPYRVTLELELPESPVNQDLGMFLVTISCYTRGGRIISTSSRSVMLHYRSDLLQMLDTLVFSSLLLFGFAEQKQLLEVELYADYRENSYVPTTGAIIEIHSKRIQLYGAYLRIHAHFTGLRYLLYNFPMTCAFIGVASNFTFLSVIVLFSYMQWVWGGIWPRHRFSLQVNIRKRDNSRKEVQRRISAHQPGPEGQEESTPQSDVTEDGESPEDPSGTEGQLSEEEKPDQQPLSGEEELEPEVQAPGKMQLC

SEQ ID NO: 92411 - protein, 453 aa, Homo sapiens
MDPVATHSCHLLQQLHEQRIQGLLCDCMLVVKGVCFKAHKNVLAAFSQYFRSLFQNSSSQKNDVFHLDVKNVSGIGQILDFMYTSHLDLNQDNIQVMLDTAQCLQVQNVLSLCHTFLKSATVVQPPGMPCNSTLSLQSTLTPDATCVISENYPPHLLQECSADAQQNKTLDESHPHASPSVNRHHSAGEISKQAPDTSDGSCTELPFKQPNYYYKLRNFYSKQYHKHAAGPSQERVVEQPFAFSTSTDLTTVESQPCAVSHSECILESPEHLPSNFLAQPVNDSAPHPESDATCQQPVKQMRLKKAIHLKKLNFLKSQKYAEQVSEPKSDDGLTKRLESASKNTLEKASSQSAEEKESEEVVSCENFNCISETERPEDPAALEDQSQTLQSQRQYACELCGKPFKHPSNLELHKRSHTGLQPLATSSVTLLFTQEKNHTCVTSVVEGLVTSVI

SEQ ID NO: 92412 - protein, 758 aa, Homo sapiens
MPIAQLLELWKKIEVEPMEIETTEEDLNLDVEPTTEDTAEEGKSDSAACKTKVAGSVEEEGVVKEIDISHHVKEGFEKADPSQFELLKVLGQGSYGKVFLVRKVKGSDAGQLYAMKVLKKATLKVRDRVRSKMERDILAEVNHPFIVKLHYAFQTEGKLYLILDFLRGGDLFTRLSKEVMFTEEDVKFYLAELALALDHLHSLGIIYRDLKPENILLDEEGHIKITDFGLSKEAIDHDKRAYSFCGTIEYMAPEVVNRRGHTQSADWWSFGVLMFEMLTGSLPFQGKDRKETMALILKAKLGMPQFLSGEAQSLLRALFKRNPCNRLGAGIDGVEEIKRHPFFVTIDWNTLYRKEIKPPFKPAVGRPEDTFHFDPEFTARTPTDSPGVPPSANAHHLFRGFSFVASSLIQEPSQQDLHKVPVHPIVQQLHGNNIHFTDGYEIKEDIGVGSYSVCKRCVHKATDTEYAVKIIDKSKRDPSEEIEILLRYGQHPNIITLKDVYDDGKFVYLVMELMRGGELLDRILRQRYFSEREASDVLCTITKTMDYLHSQGVVHRDLKPSNILYRDESGSPESIRVCDFGFAKQLRAGNGLLMTPCYTANFVAPEVLKRQGYDAACDIWSLGILLYTMLAGFTPFANGPDDTPEEILARIGSGKYALSGGNWDSISDAAKDVVSKMLHVDPHQRLTAMQVLKHPWVVNREYLSPNQLSRQDVHLVKGAMAATYFALNRTPQAPRLEPVLSSNLAQRRGMKRLTSTRL

SEQ ID NO: 92413 - protein, 359 aa, Homo sapiens
MAASSSEISEMKGVEESPKVPGEGPGHSEAETGPPQVLAGVPDQPEAPQPGPNTTAAPVDSGPKAGLAPETTETPAGASETAQATDLSLSPGGESKANCSPEDPCQETVSKPEVSKEATADQGSRLESAAPPEPAPEPAPQPDPRPDSQPTPKPALQPELPTQEDPTPEILSESVGEKQENGAVVPLQAGDGEEGPAPEPHSPPSKKSPPANGAPPRVLQQLVEEDRMRRAHSGHPGSPRGSLSRHPSSQLAGPGVEGGEGTQKPRDYIILAILSCFCPMWPVNIVAFAYAVMPAAGGRGRGPASGPGSQALKHRGAGGGSPHHHRLLRHQLRRVPALVAYVPCSGPWRHCGQYGGASV

SEQ ID NO: 92414 - protein, 2081 aa, Homo sapiens
  MOD_RES (1)..(1): Any amino acid
XQSAVFCGRSGKQLKRCHSSQPGMLLDSWSRMVKSLNVSSSVNQASRLIDGSEPCWQSSGSQGKHWIRLEIFPDVLVHRLKMIVDPADSSYMPSLVVVSGGNSLNNLIELKTININPSDTTVPLLNDCTEYHRYIEIAIKQCRSSGIDCKIHGLILLGRIRAEEEDLAAVPFLASDNEEEEDEKGNSGSLIRKKAAGLESAATIRTKVFVWGLNDKDQLGGLKGSKIKVPSFSETLSALNVVQVAGGSKSLFAVTVEGKVYACGEATNGRLGLGISSGTVPIPRQITALSSYVVKKVAVHSGGRHATALTVDGKVFSWGEGDDGKLGHFSRMNCDKPRLIEALKTKRIRDIACGSSHSAALTSSGELYTWGLGEYGRLGHGDNTTQLKPKMVKVLLGHRVIQVACGSRDAQTLALTDEGLVFSWGDGDFGKLGRGGSEGCNIPQNIERLNGQGVCQIECGAQFSLALTKSGVVWTWGKGDYFRLGHGSDVHVRKPQVVEGLRGKKIVHVAVGALHCLAVTDSGQVYAWGDNDHGQQGNGTTTVNRKPTLVQGLEGQKITRVACGSSHSVAWTTVDVATPSVHEPVLFQTARDPLGASYLGVPSDADSSAASNKISGASNSKPNRPSLAKILLSLDGNLAKQQALSHILTALQIMYARDAVVGALMPAAMIAPVECPSFSSAAPSDASAMASPMNGEECMLAVDIEDRLSPNPWQEKREIVSSEDAVTPSAVTPSAPSASARPFIPVTDDLGAASIIAETMTKTKEDVESQNKAAGPEPQALDEFTSLLIADDTRVVVDLLKLSVCSRAGDRGRDVLSAVLSGMGTAYPQVADMLLELCVTELEDVATDSQSGRLSSQPVVVESSHPYTDDTSTSGTVKIPGAEGLRVEFDRQCSTERRHDPLTVMDGVNRIVSVRSGREWSDWSSELRIPGDELKWKFISDGSVNGWGWRFTVYPIMPAAGPKELLSDRCVLSCPSMDLVTCLLDFRLNLASNRSIVPRLAASLAACAQLSALAASHRMWALQRLRKLLTTEFGQSININRLLGENDGETRALSFTGSALAALVKGLPEALQRQFEYEDPIVRGGKQLLHSPFFKVLVALACDLELDTLPCCAETHKWAWFRRYCMASRVAVALDKRTPLPRLFLDEVAKKIRELMADSENMDVLHESHDIFKREQDEQLVQWMNRRPDDWTLSAGGSGTIYGWGHNHRGQLGGIEGAKVKVPTPCEALATLRPVQLIGGEQTLFAVTADGKLYATGYGAGGRLGIGGTESVSTPTLLESIQHVFIKKVAVNSGGKHCLALSSEGEVYSWGEAEDGKLGHGNRSPCDRPRVIESLRGIEVVDVAAGGAHSACVTAAGDLYTWGKGRYGRLGHSDSEDQLKPKLVEALQGHRVVDIACGSGDAQTLCLTDDDTVWSWGDGDYGKLGRGGSDGCKVPMKIDSLTGLGVVKVECGSQFSVALTKSGAVYTWGKGDYHRLGHGSDDHVRRPRQVQGLQGKKVIAIATGSLHCVCCTEDGEVYTWGDNDEGQLGDGTTNAIQRPRLVAALQGKKVNRVACGSAHTLAWSTSKPASAGKLPAQVPMEYNHLQEIPIIALRNRLLLLHHLSELFCPCIPMFDLEGSLDETGLGPSVGFDTLRGILISQGKEAAFRKVVQATMVRDRQHGPVVELNRIQVKRSRSKGGLAGPDGTKSVFGQMCAKMSSFGPDSLLLPHRVWKVKFVGESVDDCGGGYSESIAEICEELQNGLTPLLIVTPNGRDESGANRDCYLLSPAARAPVHSSMFRFLGVLLGIAIRTGSPLSLNLAEPVWKQLAGMSLTIADLSEVDKDFIPGLMYIRDNEATSEEFEAMSLPFTVPSASGQDIQLSSKHTHITLDNRAEYVRLAINYRLHEFDEQVAAVREGMARVVPVPLLSLFTGYELETMVCGSPDIPLHLLKSVATYKGIEPSASLIQWFWEVMESFSNTERSLFLRFVWGRTRLPRTIADFRGRDFVIQVLDKYNPPDHFLPESYTCFFLLKLPRYSCKQVLEEKLKYAIHFCKSIDTDDYARIALTGEPAADDSSDDSDNEDVDSFASDSTQDYLTGH

SEQ ID NO: 92415 - protein, 762 aa, Homo sapiens
MWSCGRLREITWTSWTTRLLNNAFEELVAFQRALKDFVASIDATYAKQYEEFYVGLEGSFGSKHVSPRTLTSCFLSCVVCVEGIVTKCSLVRPKVVRSVHYCPATKKTIERRYSDLTTLVAFPSSSVYPTKDEENNPLETEYGLSVYKDHQTITIQEMPEKAPAGQLPRSVDVILDDDLVDKAKPGDRVQVVGTYRCLPGKKGGYTSGTFRTVLIACNVKQMSKDAQPSFSAEDIAKIKKFSKTRSKDIFDQLAKSLAPSIHGHDYVKKAILCLLLGGVERDLENGSHIRGDINILLIGDPSVAKSQLLRYVLCTAPRAIPTTGRGSSGVGLTAAVTTDQETGERRLEAGAMVLADRGVVCIDEFDKMSDMDRTAIHEVMEQGRVTIAKAGIHARLNARCSVLAAANPVYGRYDQYKTPMENIGLQDSLLSRFDLLFIMLDQMDPEQDREISDHVLRMHRYRAPGEQDGDAMPLGSAVDILATDDPNFSQEDQQDTQIYEKHDNLLHGTKKKKEKMVSAAFMKKYIHVAKIIKPVLTQESATYIAEEYSRLRSQDSMSSDTARTSPVTARTLETLIRLATAHAKARMSKTVDLQDAEEAVELVQYAYFKKVLEKEKKRKKRSEDESETEDEEEKSQEDQEQKRKRRKTRQPDAKDGDSYDPYDFSDTEEEMPQVHTPKTADSQETKESQKVELSESRLKAFKVALLDVFREAHAQSIGMNRLTESINRDSEEPFSSVEIQAALSKMQDDNQVMVSEGIIFLI

SEQ ID NO: 92416 - protein, 74 aa, Homo sapiens
MAKFLAELLGCTLPSKGASPMFESKSHSRVGLKSSTKQKTTIFSTLASEKSLSDCKKIIEPGHKETFVLVQVTQ

SEQ ID NO: 92417 - protein, 761 aa, Homo sapiens
MASLGEETLASASSSSDSDTGGASPPPRKKPRASAAEGVGEPGASAGRAGLSPPSSSSSSSSSSSSSVVVVVGLPPAAAPPAAAAVPHRSSGHSLVSGSIMQANGAGGGGGGGGGGGGGGGGGGGQGQTPELACLSAQNGESSPSSSSSAGDLAHANGLLPSAPSAASNNSNSLNVNNGVPGGAAAASSATVAAASATTAASSSLATPELGSSLKKKKRLSQSDEDVIRLIGQHLNGLGLNQTVDLLMQESGCRLEHPSATKFRNHVMEGDWDKAENDLNELKPLVHSPHAIVVRGALEISQTLLGIIVRMKFLLLQQKYLEYLEDGKVLEALQVLRCELTPLKYNTERIHVLSGYLMCSHAEDLRAKAEWEGKGTASRSKLLDKLQTYLPPSVMLPPRRLQTLLRQAVELQRDRCLYHNTKLDNNLDSVSLLIDHVCSRRQFPCYTQQILTEHCNEVWFCKFSNDGTKLATGSKDTTVIIWQVDPDTHLLKLLKTLEGHAYGVSYIAWSPDDNYLVACGPDDCSELWLWNVQTGELRTKMSQSHEDSLTSVAWNPDGKRFVTGGQRGQFYQCDLDGNLLDSWEGVRVQCLWCLSDGKTVLASDTHQRIRGYNFEDLTDRNIVQEDHPIMSFTISKNGRLALLNVATQGVHLWDLQDRVLVRKYQGVTQGFYTIHSCFGGHNEDFIASGSEDHKVYIWHKRSELPIAELTGHTRTVNCVSWNPQIPSMMASASDDGTVRIWGPAPFIDHQNIEEECSSMDS

SEQ ID NO: 92418 - protein, 53 aa, Homo sapiens
  MOD_RES (1)..(1): Any amino acid
XDLSALRDPAGIFELVEVVGNGTYGQVYKGRHVKTGQLAAIKVMDVTELLPSA

SEQ ID NO: 92419 - protein, 230 aa, Homo sapiens
  MOD_RES (1)..(1): Any amino acid
XETFVFCCWKAAQIKEHLLKSKWCRPTSLNVVRIITSELYRSLGDVLRDVDAKALVRSDFLLVYGDVISNINITRALEEHRLRRKLEKNVSVMTMIFKESSPSHPTRCHEDNVVVAVDSTTNRVLHFQKTQGLRRFAFPLSLFQGSSDGVEVRYDLLDCHISICSPQVAQLFTDNFDYQTRDDFVRGLLVNEEVITWCWTRPTCGRVFEWRLEHRSISLCFVTMLRSRNE

SEQ ID NO: 92420 - protein, 137 aa, Homo sapiens
  MOD_RES (1)..(1): Any amino acid
XDTMQSDDVIWDTLGNKQFCSFKIRTKTQSFCRNEYSLTGLCNRSSCPLANSQYATIKEEKGQCYLYMKVIERAAFPRRLWERVRLSKNYEKALEQIDENLIYWPRFIRHKCKQRFTKITQYLIRIRKLTLKRQKRH

SEQ ID NO: 92421 - protein, 159 aa, Homo sapiens
  MOD_RES (1)..(1): Any amino acid
XCQRIEKQRASDTMVQERKNEKPVRIFNTNSSFQDQAPTCCQEDLSSASPLRIWSKFYRSDPRIALGKYSPLEKEILRLGGIHTIAARRLLAYKQEEECRMLKELQLLSPDYKQAMEYKKKHSSPCAICVPLEKIWTAKVIAPLEAFKMPQREQNSLVT

SEQ ID NO: 92422 - protein, 767 aa, Homo sapiens
MDISTRSKDPGSAERTAQKRKFPSPPHSSNGHSPQDTSTSPIKKKKKPGLLNSNNKEQDGRNDFYCWVCHREGQVLCCELCPRVYHAKCLRLTSEPEGDWFCPECEKITVAECIETQSKAMTMLTIEQLSYLLKFAIQKMKQPGTDAFQKPVPLEQHPDYAEYIFHPMDLCTLEKNAKKKMYGCTEAFLADAKWILHNCIIYNGGNHKLTQIAKVVIKICEHEMNEIEVCPECYLAACQKRDNWFCEPCSNPHPLVWAKLKGFPFWPAKALRDKDGQVDARFFGQHDRAWVPINNCYLMSKEIPFSVKKTKSIFNSAMQEMEVYVENIRRKFGVFNYSPFRTPYTPNSQYQMLLDPTNPSAGTAKIDKQEKVKLNFDMTASPKILMSKPVLSGGTGRRISLSDMPRSPMSTNSSVHTGSDVEQDAEKKATSSHFSASEESMDFLDKSTASPASTKTGQAGSLSGSPKPFSPQLSAPITTKTDKTSTTGSILNLNLDRSKAEMDLKELSESVQQQSTPVPLISPKRQIRSRFQLNLDKTIESCKAQLGINEISEDVYTAVEHSDSEDSEKSDSSDSEYISDDEQKSKNEPEDTEDKEGCQMDKEPSAVKKKPKPTNPVEIKEELKSTSPASEKADPGAVKDKASPEPEKDFSEKAKPSPHPIKDKLKGKDETDSPTVHLGLDSDSESELTIPGVINPVGAAVMRRGDRHVPITTPVPARRASSRKSLGWTPSGTSSESGHKPPTPLGEKPRRQEKKKQQRQENSHFQT

SEQ ID NO: 92423 - protein, 1101 aa, Homo sapiens
MARPVQLAPGSLALVLCRLEAQKAAGAAEEPGGRAVFRAFRRANARCFWNARLARAASRLAFQGWLRRGVLLVRAPPACLQVLRDAWRRRALRPPRGFRIRAVGECGTRRGGASRPVQLAPGSLALVLCRLEAQKAAGAAEEPGGRAVFRAFRRANARCFWNARLARAASRLAFQGWLRRGVLLVRAPPACLQVLRDAWRRRALRPPRGFRIRAVGDVFPVQMNPITQSQFVPLGEVLCCAISDMNTAQIVVTQESLLERLMKHYPGIAIPSEDILYTTLGTLIKERKIYHTGEGYFIVTPQTYFITNTTTQENKRMLPSDESRLMPASMTYLVSMESCAESAQENAAPISHCQSCQCFRDMHTQDVQEAPVAAEVTRKSHRGLGESVSWVQNGAVSVSAEHHICESTKPLPYTRDKEKGKKFGFSLLWRSLSRKEKPKTEHSSFSAQFPPEEWPVRDEDDLDNIPRDVEHEIIKRINPILTVDNLIKHTVLMQKYEEQKKYNSQGTSTDMLTIGHKYPSKEGVKKRQGLSAKPQGQGHSRRDRHKARNQGSEFQPGSIRLEKHPKLPATQPIPRIKSPNEMVGQKPLGEITTVLGSHLIYKKRISNPFQGLSHRGSTISKGHKIQKTSDLKPSQTGPKEKPFQKPRSLDSSRIFDGKAKEPYAEQPNDKMEAESIYINDPTVKPINDDFRGHLFSHPQQSMLQNDGKCCPFMESMLRYEVYGGENEVIPEVLRKSHSHFDKLGETKQTPHSLPSRGASFSDRTPSACRLVDNTIHQFQNLGLLDYPVGVNPLRQAARQDKDSEELLRKGFVQDAETTSLENEQLSNDDQALYQNEVEDDDGACSSLYLEEDDISENDDLRQMLPGHSQYSFTGGSQGNHLGKQKVIERSLTEYNSTMERVESQVLKRNECYKPTGLHATPGESQEPNLSAESCGLNSGAQFGFNYEEEPSVAKCVQASAPADERIFDYYSARKASFEAEVIQDTIGDTGKKPASWSQSPQNQEMRKHFPQKFQLFNTSHMPVLAQDVQYEHSHLEGTENHSMAGDSGIDSPRTQSLGSNNSVILDGLKRRQNFLQNVEGTKSSQPLTSNSLLPLTPVINV

SEQ ID NO: 92424 - protein, 141 aa, Homo sapiens
MIDHLVTMKISHWDGVIRELAARALHNLAQQAPEFSATQVFPRLLSMTLSPDLHMRHGSILACAEVAYALYKLAAQENRPVTDHLDEQAVQGLKQIHQQLYDRQLYRGLGGQLMRQAVCVLIEKLSLSKMPFRGDTVIDGW

SEQ ID NO: 92425 - protein, 143 aa, Homo sapiens
MPDHDSTALLSRQTKRRRVDIGVKRTVGTASAFFAKARATFFSAMNPQGSEQDVEYSVVQHADGEKSNVLRKLLKRANSYEDAMMPFPGATIISQLLKNNMNKNGGTEPSFQASGLSSTGSEVHQEDICSNSSRDSPPECLSP

SEQ ID NO: 92426 - protein, 63 aa, Homo sapiens
MGNLLKVLTCTDLEQGPNFFLDFENAQPTESEKEIYNQVNVVLKDAEGILEDLQSYRGAGHEI

SEQ ID NO: 92427 - protein, 151 aa, Homo sapiens
SNQWLDFWLRHRLQWWRKFAMSPSNFSSSDCQDEEGRKGNKLYYNFPWGKELIETLWNLGDHELLHMYPGNVSKLHGRDGRKNVVPCVLSVNGDLDRGMLAYLYDSFQLTENSFTRKKNLHRKVLKLHPCLAPIKVALDVGRGPTLELRQV

SEQ ID NO: 92428 - protein, 1209 aa, Homo sapiens
MSLTARVSCSMLSCFGEEGPPSLEYIQAKDLFPPKELVKEEENLQVPFTVLQGEGVEFLGRAADALIAISNYRLHIKFKDSVINVPLRMIDSVESRDMFQLHISCKDSKVVRCHFSTFKQCQEWLSRLSRATARPAKPEDLFAFAYHAWCLGLTEEDQHTHLCQPGEHIRCRQEAELARMGFDLQNVWRVSHINSNYKLCPSYPQKLLVPVWITDKELENVASFRSWKRIPVVVYRHLRNGAAIARCSQPEISWWGWRNADDEYLVTSIAKACALDPGTRATGGSLSTGNNDTSEACDADFDSSLTACSGVESTAAPQKLLILDARSYTAAVANRAKGGGCECEEYYPNCEVVFMGMANIHAIRNSFQYLRAVCSQMPDPSNWLSALESTKWLQHLSVMLKAAVLVANTVDREGRPVLVHCSDGWDRTPQIVALAKILLDPYYRTLEGFQVLVESDWLDFGHKFGDRCGHQENVEDQNEQCPVFLQWLDSVHQLLKQFPCLFEFNEAFLVKLVQHTYSCLYGTFLANNPCEREKRNIYKRTCSVWALLRAGNKNFHNFLYTPSSDMVLHPVCHVRALHLWTAVYLPASSPCTLGEENMDLYLSPVAQSQEFSGRSLDRLPKTRSMDDLLSACDTSSPLTRTSSDPNLNNHCQEVRVGLEPWHSNPEGSETSFVDSGVGGPQQTVGEVGLPPPLPSSQKDYLSNKPFKSHKSCSPSYKLLNTAVPREMKSNTSDPEIKVLEETKGPAPDPSAQDELGRTLDGIGEPPEHCPETEAVSALSKVISNKCDGVCNFPESSQNSPTGTPQQAQPDSMLGVPSKCVLDHSLSTVCNPPSAACQTPLDPSTDFLNQDPSGSVASISHQEQLSSVPDLTHGEEDIGKRGNNRNGQLLENPRFGKMPLELVRKPISQSQISEFSFLGSNWDSFQGMVTSFPSGEATPRRLLSYGCCSKRPNSKQMRATGPCFGGQWAQREGVKSPVCSSHSNGHCTGPGGKNQMWLSSHPKQVSSTKPVPLNCPSPVPPLYLDDDGLPFPTDVIQHRLRQIEAGYKQEVEQLRRQVRELQMRLDIRHCCAPPAEPPMDYEDDFTCLKESDGSDTEDFGSDHSEDCLSEASWEPVDKKETEVTRWVPDHMASHCYNCDCEFWLAKRRHHCRNCGNVFCAGCCHLKLPIPDQQLYDPVLVCNSCYEHIQVSRARELMSQQLKKPIATASS

SEQ ID NO: 92429 - protein, 123 aa, Homo sapiens
  MOD_RES (1)..(1): Any amino acid
XPGFVFAPCPHELPCPQLTNLACSFSQAYHPIPFSWNKKPKEEKFSMVILARGSPEEAHRWPRITQPVLKRPRHVHCHLCCPDGHMQHAVLTARRHGSSWGDLLPVLTPSAFPPSTAQDPSES

SEQ ID NO: 92430 - protein, 294 aa, Homo sapiens
  MOD_RES (1)..(1): Any amino acid
XSLEALDPNVDEHLSTQILAPSVHSDNSQERIQARRLRIAARLEARRREALGEYLDGKKESEEDQSKSYKQKEESRLKLAKLLLCGTELVTNIQVAIDIREIHRRVEEEEIKRQRIEKLENEVKTSQDKFDEITSKWEEGKQKRIPQELWEMLNTQQLHCAGLLEDKNKLISELQQELKTKDDQYVKDLKKQSDDICLLLERMEEQVKNVMKTFREELYNIEKAFEVERQELLASNKKKWEQALQAHNAKELEYLNNRMKKVEDYEKQLNRQRIWDCEEYNMIKIKLEQDVQPA

SEQ ID NO: 92431 - protein, 415 aa, Homo sapiens
MSAYAGQTQYSGMQQPAVYTAYSQTGQPYSLPTYDLGVMLPAIKTESGLSQTQSPLQSGCLSYSPGFSTPQPGQTPYSYQMPGSSFAPSSTIYANNSVSNSTNFSGSQQDYPSYTAFGQNQYAQYYSASTYGAYMTSNNTADGTPSSTSTYQLQESLPGLTNQPGEFDTMQSPSTPIKDLDERTCRSSGSKSRGRGRKNNPSPPPDSDLERVFVWDLDETIIVFHSLLTGSYAQKYGKDPPMAVTLGLRMEEMIFNLADTHLFFNDLEECDQVHIDDVSSDDNGQDLSTYSFATDGFHAAASSANLCLPTGVRGGVDWMRKLAFRYRRVKELYNTYKNNVGGLLGPAKRDAWLQLRAEIEGLTDSWLTNALKSLSIISTRSNCINVLVTTTQLIPALAKVLLYSLGGAFPIENIY

SEQ ID NO: 92432 - protein, 27 aa, Homo sapiens
IIGLKPEGVPRIDCVSKLVGVLVISAI

SEQ ID NO: 92433 - protein, 160 aa, Homo sapiens
MNRLRNAKIYVERAVKQKKIFTIQGCYPVIRCLLRRRGWVEKKMVHRSGPTLLPPQKDLDSSAMGDSDTTEDEDEDEDEEFQPSQLFDFDDLLKFDDLDGTHALMVGLCLNLRNLPWFDEVDANSFFPRCYCLGAEDDKKAFIEDFWLTAARNVLKLVVK

SEQ ID NO: 92434 - protein, 92 aa, Homo sapiens
MQISEKEEDDNEKRQDPGDNWEEGGGGGGGMEKSSGPWNKTAPVQAPPAPVIVTETPEPAMTSGVYRPPGARLTTTRKTPQGPPEIYSDTQF

SEQ ID NO: 92435 - protein, 70 aa, Homo sapiens
MKMMKTKEEPELQTRREMEERTITIEIPEVLKKQLEDDCYYINRRKRLVKLPCQTNIITILESYVKHFAI

SEQ ID NO: 92436 - protein, 111 aa, Homo sapiens
MEAAATPAAAGAARREELDMDVMRPLINEQNFDGTSDEEHEQELLPVQKHYQLDDQEGISFVQTLMHLLKGNIGTGLLGLPLAIKNAGIVLGPISLVFIGIISVHCMHILV

SEQ ID NO: 92437 - protein, 48 aa, Homo sapiens
MRDPNTKRSRGFGFVTYATVEEVDAAMNARPHKVDGRVVEPKRAVSRE

SEQ ID NO: 92438 - protein, 35 aa, Homo sapiens
MVTLHGYIESHPFSVLTLPALPHLPVGAPQLPLSR

SEQ ID NO: 92439 - protein, 77 aa, Homo sapiens
MRPMRIFVNDDRHVMAKHSSVYPTQEELEAVQNMVSHTERALKAVSDWIDEQEKGSSEQAESDNMDVPPEDDSKEGA

SEQ ID NO: 92440 - protein, 635 aa, Homo sapiens
MPKNSKVVKRELDDDVTESVKDLLSNEDAADDAFKTSELIVDGQEEKDTDVEEGSEVEDERPAWNSKLQYILAQVGFSVGLGNVWRFPYLCQKNGGVVEPECEQSSATTYYWYREALNISSSISESGGLNWKMTICLLAAWVMVCLAMIKGIQSSGKIIYFSSLFPYVVLICFLIRAFLLNGSIDGIRHMFTPKLEIMLEPKVWREAATQVFFALGLGFGGVIAFSSYNKRDNNCHFDAVLVSFINFFTSVLATLVVFAVLGFKANVINEKCITQNSETIMKFLKMGNISQDIIPHHINLSTVTAEDYHLVYDIIQKVKEEEFPALHLNSCKIEEELNKAVQGTGLAFIAFTEAMTHFPASPFWSVMFFLMLVNLGLGSMFGTIEGIVTPIVDTFKVRKEILTVICCLLAFCIGLIFVQRSGNYFVTMFDDYSATLPLLIVVILENIAVCFVYGIDKFMEDLKDMLGFAPSRYYYYMWKYISPLMLLSLLIASVVNMGLSPPGYNAWIEDKASEEFLSYPTWGLVVCVSLVVFAILPVPVVFIVRRFNLIDDSSGNLASVTYKRGRVLKEPVNLEGDDTSLIHGKIPSEMPSPNFGKNIYRKQSGSPTLDTAPNGRYGIGYLMADIMPDMPESDL

SEQ ID NO: 92441 - protein, 282 aa, Homo sapiens
  MOD_RES (1)..(1): Any amino acid
XRNSIQFTDGYEVKEDIGVGSYSVCKRCIHKATNMEFAVKIIDKSKRDPTEEIEILLRYGQHPNIITLKDVYDDGKYVYVVTELMKGGELLDKILRQKFFSEREASAVLFTITKTVEYLHAQGLRAENGLLMTPCYTANFVAPEVLKRQGYDAACDIWSLGVLLYTMLTGYTPFANGPDDTPEEILARIGSGKFSLSGGYWNSVSDTAKDLVSKMLHVDPHQRLTAALVLRHPWIVHWDQLPQYQLNRQDAPHLVKGAMAATYSALNRNQSPVLEPVGRSTL

SEQ ID NO: 92442 - protein, 98 aa, Homo sapiens
MAAKQPPPLMKKHSQTDLVSRLKTRKILGVGGEDDDGEVHRSKISQVLGNEIKFTIREPLGLRVWQFVSAVLFSGIAIMALAFPDQLYDAVFDGAQVT

SEQ ID NO: 92443 - protein, 30 aa, Homo sapiens
MEDALFLRKSPPYIFSPIPFLGHAIAFGKS

SEQ ID NO: 92444 - protein, 207 aa, Homo sapiens
MRLNQNTLLLGKKVVLVPYTSEHVPRYHEWMKSEELQRLTASEPLTLEQEYAMQCSWQEDADKCTFIVLDAEKWQAQPGATEESCMVGDVNLFLTDLEDLTLGEIEVMIAAWDRRVGAGASLLAPVSSPLRGVTTLGLTKFEAKIGQGNEPSIRMFQKLHFEQVATSSVFQEVTLRLTVSESEHQWLLEQTSHVEEKPYRDGSAEPC

SEQ ID NO: 92445 - protein, 84 aa, Homo sapiens
MAHSEEVRARQPARAGCPRLGPAARGSLEGPSAPPQAALLPGNHVPNGCAADPKASRELPPPPPPPPPPLPEAASSPPPAPPLP

SEQ ID NO: 92446 - protein, 178 aa, Homo sapiens
MGTLPHGPRPWLQRDVAAHVSADHAALNSIVSLQASVSFEDVTVDFSKEEWQHLDPAQRRLYWDVTLENYSHLLSVGYQIPKSEAAFKLEQGEGPWMLEGEAPHQSCSGEAIGKMQQQGIPGGIFFHCERFDQPIGEDSLCSILEELWQDNDQLEQRQENQNNLLSHVKVLIKERGYE

SEQ ID NO: 92447 - protein, 309 aa, Homo sapiens
MEREKEQFRKLFIGGLSFETTEESLRNYYEQWGKLTDCVVMRDPASKRSRGFGFVTFSSMAEVDAAMAARPHSIDGRVVEPKRAVAREESGKPGAHVTVKKLFVGGIKEDTEEHHLRDYFEEYGKIDTIEIITDRQSGKKRGFGFVTFDDHDPVDKIVLQKYHTINGHNAEVRKALSRQEMQEVQSSRSGRGGNFGFGDSRGGGGNFGPGPGSNFRGGSDGYGSGRGFGDGYNGYGGGPGGGYDNYGGGNYGSGNYNDFGNYNQQPSNYGPMKSGNFGGSRNMGGPYGGGNYGPGGSGGSGGYGGRSRY

SEQ ID NO: 92448 - protein, 85 aa, Homo sapiens
  MOD_RES (1)..(1): Any amino acid
XGRILSMVNTDDVNAIILAQKNMLDRFEKTNEMLLNFNNLSSARLQQMSERFLHHTRTLVEMKRDLDSIFRRIRYPRGILPGGRG

SEQ ID NO: 92449 - protein, 1143 aa, Homo sapiens
MSSNDSSLMAGIIYYSQEKYFHHVQQAAAVGLEKFSNDPVLKFFKAYGVLKEEHIQDAISDLESIRHHPDVSLCSTMALIYAHKRCEIIDREAIQELEYSLKEIRKTVSGTALYYAGLFLWLIGRHDKAKEYIDRMLKISRGFREAYVLRGWVDLTSDKPHTAKKAIEYLEQGIQDTKDVLGLMGKAMYFMMQQNYSEALEVVNQITVTSGSFLPALVLKMQLFLARQDWEQTVEMGHRILEKDESNIDACQILTVHELAREGNMTTATNHVRNLIKALETREPENPSLHLKKIIVVSRLCGSHQVILGLVCSFIERTFMATPSYVHVATELGYLFILKNQVKEALLWYSEAMKLDKDGMAGLTGIILCHILEGHLEEAEYRLEFLKEVQKSLGKSEVLIFLQALLMSRKHKGEEETTALLKEAVELHFSSMQGIPLGSEYFEKLDPYFLVCIAKEYLLFCPKQPRLPGQIVSPLLKQVAVILNPVVKAAPALIDPLYLMAQVRYYSGELENAQSILQRCLELDPASVDAHLLMCQIYLAQGNFGMCFHCLELGVSHNFQVRDHPLYHLIKARALNKAGDYPEAIKTLKMVIKLPALKKEEGRKFLRPSVQPSQRASILLELVEALRLNGELHEATKVMQDTINEFGGTPEENRITIANVDLVLSKGNVDVALNMLRNILPKQSCYMEAREKMANIYLQTLRDRRLYIRCYRELCEHLPGPHTSLLLGDALMSILEPEKALEVYDEAYRQNPHDASLASRIGHAYVKAHQYTEAIEYYEAAQKINGQDFLCCDLGKLLLKLKKVNKAEKVLKQALEHDIVQDIPSMMNDVKCLLLLAKVYKSHKKEAVIETLNKALDLQSRILKRVPLEQPEMIPSQKQLAASICIQFAEHYLAEKEYDKAVQSYKDVFSYLPTDNKVMLELAQLYLLQGHLDLCEQHCAILLQTEQNHETASVLMADLMFRKQKHEAAINLYHQVLEKAPDNFLVLHKLIDLLRRSGKLEDIPAFFELAKKVSSRVPLEPGFNYCRGIYCWHIGQPNEALKFLNKARKDSTWGQSAIYHMVQICLNPDNEVVGGEAFENQGAESNYMEKKELEQQGVSTAEKLLQGQRPCPAGLGTSLRVPEADPQGAYAVEAPGQDPLGAE

SEQ ID NO: 92450 - protein, 447 aa, Homo sapiens
MATDSWALAVDEQEAAVKSMTNLQIKEEKVKADTNGIIKTSTTAEKTDEEEKEDRAAQSLLNKLIRSNLVDNTNQVEVLQRDPNSPLYSVKSFEELRLPQNLIAQSQSGTGKTAAFVLAMLSRVEPSDRYPQCLCLSPTYELALQTGKVIEQMGKFYPELKLAYAVRGNKLERGQKISEQIVIGTPGTVLDWCSKLKFIDPKKIKVFVLDEADVMIATQGHQDQSIRIQRMLPRNCQMLLFSATFEDSVWKFAQKVVPDPNVIKLKREEETLDTIKQYYVLCSSRDEKFQALCNLYGAITIAQAMIFCHTRKTASWLAAELSKEGHQVALLSGEMMVEQRAAVIERFREGKEKVLVTTNVCARGIDVEQVSVVINFDLPVDKDGNPDNETYLHRIGRTGRFGKRGLAVNMVDSKHSMNILNRIQEHFNKKIERLDTDDLDEIEKIAN

SEQ ID NO: 92451 - protein, 86 aa, Homo sapiens
MDVSEGTTMSSSHSYLISSRQCWNHSDRLISKCSPEDLATAYNNRGQIKYFRVDFYEAMDDYTSAIEVQPNFEVPYYNRGLILYRL

SEQ ID NO: 92452 - protein, 88 aa, Homo sapiens
MTSCLPALRFIATPRLSAMPHIDNDVKLDFKDVLLRPKRSTLKSRSEVDLTRSFSFRNSKQTYSGVPIIAANMDTVGTFEMAKVLCKS

SEQ ID NO: 92453 - protein, 446 aa, Homo sapiens
  MOD_RES (1)..(1): Any amino acid
XKPKLPENYTDETWQKLKEAVEAIQNSTSIKYNLEELYQAVENLCSYKISANLYKQLRQICEDHIKAQIHQFREDSLDSVLFLKKIDRCWQNHCRQMIMIRSIFLFLDRTYVLQNSMLPSIWDMGLELFRAHIISDQKVQNKTIDGILLLIERERNGEAIDRSLLRSLLSMLSDLQIYQDSFEQRFLEETNRLYAAEGQKLMQEREVPEYLHHVNKRLEEEADRLITYLDQTTQKSLIATVEKQLLGEHLTAILQKGLNNLLDENRIQDLSLLYQLFSRVRGGVQVLLQQWIEYIKAFGSTIVINPEKDKTMVQELLDFKDKVDHIIDICFLKNEKFINAMKEAFETFINKRPNKPAELIAKYVDSKLRAGNKEATDEELEKMLDKIMIIFRFIYGKDVFEAFYKKDLAKRLLVGKSASVDAEKSMLSKLKHVDKVTTGLKSLTLN

SEQ ID NO: 92454 - protein, 473 aa, Homo sapiens
MLNYDAASGTMRKSQAKYGISGEKDVSPDLSCADEISECYHKLDSLTYKIDECEKKKREDYESQSNPVFRRYLNKILIEAGKLGLFHDFETWKWRFEDSFGVDPYNVLMVLLCLLCIVVLVATELWTYVRWYTQLRRVLIISFLFSLGWNWMYLYKLAFAQHQAEVAKMEPLNNVCAKKMDWTGSIWEWFRSSWTYKDDPCQKYYELLLVNPIWLVPPTKALAVTFTTFVTEPLKHIGKGTGEFIKALMKEIPALLHLPVLIIMALAILSFCYGAGKSVHVLRHIGGPESEPPQALRPRDRRRQEEIDYRPDGGAGDADFHYRGQMGPTEQGPYAKTYEGRREILRERDVDLRFQTGNKSPEVLRAFDVPDAEAREHPTVVPSHKSPVLDTKPKETGGILGEGTPKESSTESSQSAKPVSGQDTSGNTEGSPAAEKAQLKSEAAGSPDQGSTYSPARGVAGPRGQDPVSSPCG

SEQ ID NO: 92455 - protein, 93 aa, Homo sapiens
MTESQVKVWFQNRRTKWRKKHAAEMATAKKKQDSETERLKGASENEEEDDDYNKPLDPNSDDEKITQLLKKHKSSSGGGGGLLLHASEPESSS

SEQ ID NO: 92456 - protein, 76 aa, Homo sapiens
  MOD_RES (1)..(1): Any amino acid
XDSGKVTTVVATLGQGPERSQEVAYTDIKVIGNGSFGVVYQARLAETRELVAIKKVLQDKRTESCRSCVSWTTAIL

SEQ ID NO: 92457 - protein, 121 aa, Homo sapiens
MMAAAPIQQNGTHTGVPIDLDPPDSRKRPLEAPPEAGSTKRTNTGEDGQYFLKVLIPSYAAGSIIGKGGQTIVQLQKETGATIKLSKSKDFYPGADSCRRNCTWCCTEGISPLCHLQSETD

SEQ ID NO: 92458 - protein, 217 aa, Homo sapiens
MANLGCWMLVLFVATWSDLGLCKKRPKPGGWNTGGSRYPGQGSPGGNRYPPQGGGGWGQPHGGGWGQPHGGGWGQPHGGGWGQPHGGGWGQGGGTHSQWNKPSKPKTNMKHMAGAAAAGAVVGGLGGYMLGSAMSRPIIHFGSDYEDRYYRENMHRYPNQVYYRPMDEYSNQNNFVHDCVNITIKQHTVTTTTKGENFTETDVKMMERVVEQMCITQ

SEQ ID NO: 92459 - protein, 1153 aa, Homo sapiens
MAVPARTCGASRPGPARTARPWPGCGPHPGPGTRRPTSGPPRPLWLLLPLLPLLAAPGASAYSFPQQHTMQHWARRLEQEVDGVMRIFGGVQQLREIYKDNRNLFEVQENEPQKLVEKVAGDIESLLDRKVQALKRLADAAENFQKAHRWQDNIKEEDIVYYDAKADAELDDPESEDVERGSKASTLRLDFIEDPNFKNKVNYSYAAVQIPTDIYKGSTVILNELNWTEALENVFMENRRQDPTLLWQVFGSATGVTRYYPATPWRAPKKIDLYDVRRRPWYIQGASSPKDMVIIVDVSGSVSGLTLKLMKTSVCEMLDTLSDDDYVNVASFNEKAQPVSCFTHLVQANVRNKKVFKEAVQGMVAKGTTGYKAGFEYAFDQLQNSNITRANCNKMIMMFTDGGEDRVQDVFEKYNWPNRTVRVFTFSVGQHNYDVTPLQWMACANKGYYFEIPSIGAIRINTQEYLDVLGRPMVLAGKEAKQVQWTNVYEDALGLGLVVTGTLPVFNLTQDGPGEKKNQLILGVMGIDVALNDIKRLTPNYTLGANGYVFAIDLNGYVLLHPNLKPQTTNFREPVTLDFLDAELEDENKEEIRRSMIDGNKGHKQIRTLVKSLDERYIDEVTRNYTWVPIRSTNYSLGLVLPPYSTFYLQANLSDQILQVKLPISKLKDFEFLLPSSFESEGHVFIAPREYCKDLNASDNNTEFLKNFIELMEKVTPDSKQCNNFLLHNLILDTGITQQLVERVWRDQDLNTYSLLAVFAATDGGITRVFPNKAAEDWTENPEPFNASFYRRSLDNHGYVFKPPHQDALLRPLELENDTVGILVSTAVELSLGRRTLRPAVVGVKLDLEAWAEKFKVLASNRTHQDQPQKQCGPNSHCEMDCEVNNEDLLCVLIDDGGFLVLSNQNHQWDQVGRFFSEVDANLMLALYNNSFYTRKESYDYQAACAPQPPGNLGAAPRGVFVPTVADFLNLAWWTSAAAWSLFQQLLYGLIYHSWFQADPAEAEGSPETRESSCVMKQTQYYFGSVNASYNAIIDCGNCSRLFHAQRLTNTNLLFVVAEKPLCSQCEAGRLLQKETHCPADGPEQCELVQRPRYRRGPHICFDYNATEDTSDCGRGASFPPSLGVLVSLQLLLLLGLPPRPQPQVLVHASRRL

SEQ ID NO: 92460 - protein, 38 aa, Homo sapiens
MYQPGLPNFETTYEKDPFGLKFKSQHLSTVHGYQLPKD

SEQ ID NO: 92461 - protein, 391 aa, Homo sapiens
MLLFFTLGLLIHFVFFASIFDIYFTSPLVHGMTPQFTPLPPPARRLVLFVADGLRADALYELDENGNSRAPFIRNIIMHEGSWGISHTRVPTESRPGHVALIAGFYEDVSAVAKGWKENPVEFDSLFNESKYTWSWGSPDILPMFAKGASGDHVYTYSYDAKREDFGAQDATKLDTWVFDNVKDFFHHARNNQSLFSKINEEKIVFFLHLLGIDTNGHAHRPSSRDYKHNIKKVDDGVKEIVSMFNHFYGNDGKTTFIFTSDHGMTDWGSHGAGHPSETLTPLVTWGAGIKYPQRVSAQQFDDAFLKEWRLENWKRLDVNQADIAPLMTSLIGVPFPLNSVGILPVDYLNNTDLFKAESMFTNAVQILEQFKVKMTQKKEVTLPFLFTPFK

SEQ ID NO: 92462 - protein, 118 aa, Homo sapiens
MELLSFEDVAMYFTREEWGHLNWGQKDLYRDVMLENYRNMVLLGFQFPKPEMICQLENWDEQWILDLPRTGNRKASGSACPAAPVFHIQGFSSMALLTFWADEFFGDRMGHVLCILGC

SEQ ID NO: 92463 - protein, 471 aa, Homo sapiens
MAQSRVLLLLLLLPPQLHLGPVLAVRAPGFGRSGGHSLSPEENEFAEEEPVLVLSPEEPGPGPAAVSCPRDCACSQEGVVDCGGIDLREFPGDLPEHTNHLSLQNNKLEKIPPGAFSELSSLRELYLQNNYLTDEGLDNETFWKLSSLEYLDLSSNNLSRVPAGLPRSLVLLHLEKNAIRSVDANVLTPIRSLEYLLLHSNQLREQGIHPLAFQGLKRLHTVHLYNNALERVPSGLPRRVRTLMILHNQITGIGREDFATTYFLEELNLSYNRITSPQVHRDAFRKLRLLRSLDLSGNRLHTLPPGLPRNVHVLKVKRNELAALARGALVGMAQLRELYLTSNRLRSRALGPRAWVDLAHLQLLDIAGNQLTEIPEGLPESLEYLYLQNNKISAVPANAFDSTPNLKGIFLRFNKLAVGSVVDSAFRRLKHLQVLDIEGNLEFGDISKDRGRLGKEKEEEEEEEEEEEETR

SEQ ID NO: 92464 - protein, 56 aa, Homo sapiens
ASEKQEAKSGILEAAGFPDPGKKASPLVVAAAAAAAVAAQGGPLPSAAALSSLTSP

SEQ ID NO: 92465 - protein, 28 aa, Homo sapiens
MMPLWTKDGQKHVVTLLQVQDCHVLKYT

SEQ ID NO: 92466 - protein, 568 aa, Homo sapiens
MEPAPARSPRPQQDPARPQEPTMPPPETPSEGRQPSPSPSPTERAPASEEEFQFLRCQQCQAEAKCPKLLPCLHTLCSGCLEASGMQCPICQAPWPLGADTPALDNVFFESLQRRLSVYRQIVDAQAVCTRCKESADFWCFECEQLLCAKCFEAHQWFLKHEARPLAELRNQSVREFLDGTRKTNNIFCSNPNHRTPTLTSIYCRGCSKPLCCSCALLDSSHSELKCDISAEIQQRQEELDAMTQALQEQDSAFGAVHAQMHAAVGQLGRARAETEELIRERVRQVVAHVRAQERELLEAVDARYQRDYEEMASRLGRLDAVLQRIRTGSALVQRMKCYASDQEVLDMHGFLRQALCRLRQEEPQSLQAAVRTDGFDEFKVRLQDLSSCITQGKDAAVSKKASPEAASTPRDPIDVDLDVSNTTTAQKRKCSQTQCPRKVIKMESEEGKEARLARSSPEQPRPSTSKAVSPPHLDGPPSPRSPVIGSEVFLPNSNHVASGAGEAGREVGRAVAWVLPARVWAVPLFCILAPSRKPKANRSPLFPLNKIGKVHSVRGGESGHSLPCVLP

SEQ ID NO: 92467 - protein, 207 aa, Homo sapiens
MKQQQWCGMTAKMGTVLSGVFTIMAVDMYLIFEQKHLGNGSCTEITPKYRGASNIINNFIICWSFKIVLFLSFITILISCFLLYSVYAQIFRGLVIYIVWIFFYETANVVIQILTNNDFDIKEVRIMRWFGLVSRTVMHCFWMFFVINYAHITYKNRSQGNIISYKRRISTAEILHSRNKRLSISSGFSGSHLESQYFERQSSSSLT

SEQ ID NO: 92468 - protein, 24 aa, Homo sapiens
MDHFFIKRKRNSEVKYTEACSSSS

SEQ ID NO: 92469 - protein, 102 aa, Homo sapiens
MAERKNAKALACSSLQERANVNLDVPLQVDFPTPKTELVQKFHVQYLGMLPVDKPVGMDILNSAIENLMTSSNKEDWLSVNMNVADATVTVISEKNEEEVLV

SEQ ID NO: 92470 - protein, 358 aa, Homo sapiens
MITSAAGIISLLDEDEPQLKEFALHKLNAVVNDFWAEISESVDKIEVLYEDEGFRSRQFAALVASKVFYHLGAFEESLNYALGAGDLFNVNDNSEYVETIIAKCIDHYTKQCVENADLPEGEKKPIDQRLEGIVNKMFQRCLDDHKYKQAIGIALETRRLDVFEKTILESNDVPGMLAYSLKLCMSLMQNKQFRNKVLRVLVKIYMNLEKPDFINVCQCLIFLDDPQAVSDILEKLVKEDNLLMAYQICFDLYESASQQFLSSVIQNLRTVGTPIASVPGSTNTGTVPGSEKDSDSMETEEKTSSAFVGKTPEASPEPKDQTLKMIKILSGEMAIELHLQFLIRNNNTDLMILKNTKR

SEQ ID NO: 92471 - protein, 68 aa, Homo sapiens
MIEEAYMTKCGHSFCYKCIHQSLEDNNRCPKCNYVVDNIDHLYPNFLVCILCLLLSASLGFECSLSLS

SEQ ID NO: 92472 - protein, 236 aa, Homo sapiens
MNNKFDALKDDDSGDHDQNEENSTQKDGEKEKTERDKNQSSSKRKAVVPGPAEHPLQYNYTFWYSRRTPGRPTSSQSYEQNIKQIGTFASVEQFWRFYSHMVRPGDLTGHSDFHLFKEGIKPMWEDDANKNGGKWIIRLRKGLASRCWENLILAMLGEQFMVGEEICGAVVSVRFQEDIISIWNKTASDQATTARIRDTLRRVLNLPPNTIMEYKTHTDSIKAWEEFHGLVNSSGR

SEQ ID NO: 92473 - protein, 95 aa, Homo sapiens
MPQAFLLGSIHEPAGALMEPQPCPGSLAESFLEEELRLNAELSQLQFSEPVGIIYNPVEYAWEPHRNYVTRYCQGPKEVLFLGMNPGPFGMAQTG

SEQ ID NO: 92474 - protein, 20 aa, Homo sapiens
  MOD_RES (1)..(1): Any amino acid
XDMARYEREQYVDRARYSAF

SEQ ID NO: 92475 - protein, 1206 aa, Homo sapiens
MTSAAEIKKPPVAPKPKFVVANNKPAPPPIAPKPDIVISSVPQSTKKMKPAIAPKPKVLKTSPVREIGQSPSRKIMLNLEGHKQELAESTDNFNCKYEGNQSNDYISPMCSCSSECIHKLGHRENLCVKQLVLEPLEMNENLENSKIDETLTIKTRSKCDLYGEKAKNQGGVVLKASVLEEELKDALIHQMPPFISAQKHRPTDSPEMNGGCNSNGQFRIEFADLSPSPSSFEKVPDHHSCHLQLPSDECEHFETCQDDSEKSNNCFQSSELEALENGKRSTLISSDGVSKKSEVKDLGPLEIHLVPYTPKFPTPKPRKTRTARLLRQKCVDTPSESTEEPGNSDSSSSCLTENSLKINKISVLHQNVLCKQEQVDKMKLGNKSELNMESNSDAQDLVNSQKAMCNETTSFEKMAPSFDKDSNLSSDSTTVDGSSMSLAVDEGTGFIRCTVSMSLPKQLKLTCNEHLQSGRNLGVSAPQMQKESVIKEENSLRIVPKKPQRHSLPATGVLKKAASEELLEKSSYPSSEEKSSEKSLERNHLQHLCAQNRGVSSSFDMPKRASEKPVWKLPHPILPFSGNPEFLKSVTVSSNSEPSTALTKPRAKSLSAMDVEKCTKPCKDSTKKNSFKKLLSMKLSICFMKSDFQKFWSKSSQLGDTTTGHLSSGEQKGIESDWQGLLVGEEKRSKPIKAYSTENYSLESQKKRKKSRGQTSAANGLRAESLDDQMLSRESSSQAPYKSVTSLCAPEYENIRHYEEIPEYENLPFIMAIRKTQELEWQNSSSMEDADANVYEVEEPYEAPDGQLQLGPRHQHSSSGASQEEQNDLGLGDLPSDEEEIINSSDEDDVSSESSKGEPDPLEDKQDEDNGMKSKVHHIAKEIMSSEKVFVDVLKLLHIDFRDAVAHASRQLGKPVIEDRILNQILYYLPQLYELNRDLLKELEERMLHWTEQQRIADIFVKKGPYLKMYSTYIKEFDKNIALLDEQCKKNPGFAAVVREFEMSPRCANLALKHYLLKPVQRIPQYRLLLTDYLKNLIEDAGDYRDTQDALAVVIEVANHANDTMKQGDNFQKLMQIQYSLNGHHEIVQPGRVFLKEGILMKLSRKVMQPRMFFLFNDALLYTTPVQSGMYKLNNMLSLAGMKVRKPTQEAYQNELKIESVERSFILSASSATERDEWLEAISRAIEEYAKKRITFCPSRSLDEADSENK

SEQ ID NO: 92476 - protein, 85 aa, Homo sapiens
MWSWKCLLFWAVLVTATLCTARPSPTLPEQDALPSSEDDDDDDDSSSEEKETDNTKPNPVAPYWTSPEKMEKKLHAVPAAKTVKF

SEQ ID NO: 92477 - protein, 299 aa, Homo sapiens
MVVSAGPLSGEKAAINILEINEKLRPQLAEKKQQFRNLKEKCFLTQLAGFLANQQNKYKYEECKDLIKSMLRNERQFKEEKLAEQLKQAEELRQYKVLVHAQERELTQLREKLREGRDASRSLNEHLQALLTPDEPDKSQGQDLQEQLAEGCRLAQHLVQKLSPENDNDDDEDVQVEVAEKVQKSSAPREMQKAEEKEVPEDSLEECAITCSNSHGPYDCNQPHRKTKITFEEDKVDSTLIGSSSHVEWEDAVHIIPENESDDEEEEEKGPVSPRTSVGSSEKGGPRGNRSQAQQGAAG

SEQ ID NO: 92478 - protein, 213 aa, Homo sapiens
MGNCQAGHNLHLCLAHHPPLVCATLILLLLGLSGLGLGSFLLTHRTGLRSPDIPQDWVSFLRSFGQLTLCPRNGTVTGKWRGSHVVGLLTTLNFGDGPDRNKTRTFQATVLGSQMGLKGSSAGQLVLITARVTTERTAGTCLYFSAVPGILPSSQPPISCSEEGAGNATLSPRMGEECVSVWSHEGLVLTKLLTSELALCGSRLLVLGSFLLL

SEQ ID NO: 92479 - protein, 113 aa, Homo sapiens
SDTLWLIPITFLTIGYGDVVPGTMWGKIVCLCTGVMGVCCTALLVAVVARKLEFNKAEKHVHNFMMDIQYTKEMKESAARVLQEAWMFYKHTRRKESHAARRHQRKLLAAINA

SEQ ID NO: 92480 - protein, 333 aa, Homo sapiens
MMLIPTHHFRNIERKPEYLQPEKCVPPPYPGPVGTMWFIRDGCGIACAIVTWFLVLYAEFVVLFVMLIPSRDYVYSIINGIVFNLLAFLALASHCRAMLTDPVRTCTEMAFTLLGRGASFPEKLDKPVSGRSKCLLGAVPKGNATKEFIESLQLKPGQVVYKCPKCCSIKPDRAHHCSVCKRCIRKMDHHCPWVNNCVGENNQKYFVLFTMYIALISLHALIMVGFHFLHCFEEDWTKCSSFSPPTTVILLILLCFEGLLFLIFTSVMFGTQVHSICTDETGIEQLKKEERRWAKKTKWMNMKAVFGHPFSLGWASPFATPDQGKADPYQYVV

SEQ ID NO: 92481 - protein, 29 aa, Homo sapiens
MSHQEGSTDGLPDLGTESLFSSPEEQSGA

SEQ ID NO: 92482 - protein, 240 aa, Homo sapiens
MARRGPGWRPLLLLVLLAGAAQGGLYFRRGQTCYRPLRGDGLAPLGRSTYPRPHEYLSPADLPKSWDWRNVDGVNYASITRNQHIPQYCGSCWAHASTSAMADRINIKRKGAWPSTLLSVQNVIDCGNAGSCEGGNDLSVWDYAHQHGIPDETCNNYQAKDQGLIVQPEILLDWLSESFEKGDRWKVQREGLSDGSGSRKQVSGGLQGHAHSTPKCSRPAEARPLQPTQPDRSRWSSSET

SEQ ID NO: 92483 - protein, 557 aa, Homo sapiens
MQPSSLLPLALCLLAAPASALVRIPLHKFTSIRRTMSEVGGSVEDLIAKGPVSKYSQAVPAVTEGPIPEVLKNYMDAQYYGEIGIGTPPQCFTVVFDTGSSNLWVPSIHCKLLDIACWIHHKYNSDKSSTYVKNGTSFDIHYGSGSLSGYLSQDTVSVPCQSASSASALGGVKVERQVFGEATKQPGITFIAAKFDGILGMAYPRISVNNVLPVFDNLMQQKLVDQNIFSFYLSRDPDAQPGGELMLGGTDSKYYKGSLSYLNVTRKAYWQVHLDQVEVASGLTLCKEGCEAIVDTGTSLMVGPVDEVRELQKAIGAVPLIQGEYMIPCEKVSTLPAITLKLGGKGYKLSPEDYTLKAQGPGQCPAPLGDPASTTDGAQEARVPLDGAFWIPRPPAGSPKGCFACVSKPPALQAPAAPAPEPSASPPMAPTLFPMESKSSKTDSVRAAGAPPACKHLAEKKTMTNPTTVIEVYPDTTEVNDYYLWSIFNFVYLNFCCLGFIALAYSLKVRDKKLLNDLNGAVEDAKTARLFNITSSALAASCIILVFIFLRYPLTDY

SEQ ID NO: 92484 - protein, 192 aa, Homo sapiens
TVSCMAGARVQVTLDGVPAAAPGQPAQLQLNATESDDGRSFFCSATLEVDGEFLHRNSSVQLRVLYGPKIDRATCPQHLKWKDKTRHVLQCQARGNPYPELRCLKEGSSREVPVGIPFFVNVTHNAGSSHFVPVFVAVLLTLGVVTIVLALMYVFREHQRSGSYHVREESTYLPLTSMQPTEAMGEEPSRAE

SEQ ID NO: 92485 - protein, 104 aa, Homo sapiens
MDKLLRKENLDLKLTPYKVLATSTKHGFMQFIQSVPVAEVLDTEGSIQNFFRKYAPSENGPNGISAEVMDTYVKSCAGYCVITYILGVGDRHLDNLLLTKTGNN

SEQ ID NO: 92486 - protein, 66 aa, Homo sapiens
MATSSQYRQLLSDYGPPSLGYTQGTGNSQVPQSKYAELLAIIEELGKEIRPTYAGSKSAMERLKRG

SEQ ID NO: 92487 - protein, 127 aa, Homo sapiens
  MOD_RES (1)..(1): Any amino acid
XISGAALLADSSCTRDLHRERIIAECNAIRQALQDLLSEYMNNAGKKERSNTLNIALDNMCKKTRDLRRQLRKAIIDHVSDSFLDTTVPLLVLIEAAKNGREKEIKEYAAIFHEHTSRLVEVSMLEL

SEQ ID NO: 92488 - protein, 808 aa, Homo sapiens
MIPFLPMFSLLLLLIVNPINANNHYDKILAHSRIRGRDQGPNVCALQQILGTKKKYFSTCKNWYKKSICGQKTTVLYECCPGYMRMEGMKGCPAVLPIDHVYGTLGIVGATTTQRYSDASKLREEIEGKGSFTYFAPSNEAWDNLDSDIRRGLESNVNVELLNALHSHMINKRMLTKDLKNGMIIPSMYNNLGLFINHYPNGVVTVNCARIIHGNQIATNGVVHVIDRVLTQIGTSIQDFIEAEDDLSSFRAAAITSDILEALGRDGHFTLFAPTNEAFEKLPRGVLERIMGDKVASEALMKYHILNTLQCSESIMGGAVFETLEGNTIEIGCDGDSITVNGIKMVNKKDIVTNNGVIHLIDQVLIPDSAKQVIELAGKQQTTFTDLVAQLGLASALRPDGEYTLLAPVNNAFSDDTLSMDQRLLKLILQNHILKVKVGLNELYNGQILETIGGKQLRVFVYRTAVCIENSCMEKGSKQGRNGAIHIFREIIKPAEKSLHEKLKQDKRFSTFLSLLEAADLKELLTQPGDWTLFVPTNDAFKGMTSEEKEILIRDKNALQNIILYHLTPGVFIGKGFEPGVTNILKTTQGSKIFLKEVNDTLLVNELKSKESDIMTTNGVIHVVDKLLYPADTPVGNDQLLEILNKLIKYIQIKFVRGSTFKEIPVTVYTTKIITKVVEPKIKVIEGSLQPIIKTEGPTLTKVKIEGEPEFRLIKEGETITEVIHGEPIIKKYTKIIDGVPVEITEKETREERIITGPEIKYTRISTGGGETEETLKKLLQEDTPVRKLQANKKVQGSRRRLREGRSQ

SEQ ID NO: 92489 - protein, 115 aa, Homo sapiens
MPCCSHRSCREDPGTSESREMRPESSDCKLKPVRNLQREVIESSHQAQWLTPVIPALWEAKADGASQMFQDPVACEDVAVNFTQEEWALLDISQRKLYREVMLETFRNLTSIGVS

SEQ ID NO: 92490 - protein, 173 aa, Homo sapiens
MTEAGKLPLPLPPRLDWDAENLLESQPLGSFLIRVSHSHVGYTLSYKAQSSCCHFMVKLLDDGTFMIPGEKVAHTSLDALVTFHQQKPIEPRRELLTQPCRQKDPANVDYEDLFLYSNAVAEEAACPVSAPEEASPKPVLCHQSKERKPSAEMNRITTKEATSSCPPKSPLGE

SEQ ID NO: 92491 - protein, 145 aa, Homo sapiens
  MOD_RES (1)..(1): Any amino acid
XDARASPLPNEAWVALRRRHPGLAVELELEPALPAESVTRVLQPAVPVAALRLNLSGDTVGPVRFAAHHYAATLCALEVRAAASAELNAALEELAARCAALREVHCFCVVSHSVLDAFRAHCPRLRTYTLKLTREPHPWRPTLVA

SEQ ID NO: 92492 - protein, 102 aa, Homo sapiens
MNSSTSTMSEEPDALSVVNQLRDLAADPLNRRAIVQDQGCLPGLILFMDHPNPPVVHSALLALRYLAECRANREKMKGELGMMLSLQNVIQNLGEIYVKRLC

SEQ ID NO: 92493 - protein, 71 aa, Homo sapiens
  MOD_RES (1)..(1): Any amino acid
XVTERATYIGTSNWSGNYFTETAGTSLLVTQNGRGGLRSQLEAIFLRDWDSPYSHDLDTSADSVGNACRLL

SEQ ID NO: 92494 - protein, 372 aa, Homo sapiens
  MOD_RES (1)..(1): Any amino acid
XTPSSPSIDQVEPYSSTAQVQFDEPEATGGVPILKYKAEWRAVGEEVWHSKWYDAKEASMEGIVTIVGLKPETTYAVRLAALNGKGLGEISAASEFKTQPVHSPPPPASASSSTPVPLSPPDKGEPSAPKLEGQMGEDGNSIKVNLIKQDDGGSPIRHYLVRYRALSSEWKPEIRLPSGSDHVMLKSLDWNAEYEVYVVAENQQGKSKAAHFVFRTSAQPTAIPANGSPTSGLSTGAIVGILIVIFVLLLVVVDITCYFLNKCGLFMCIAVNLCGKAGPGAKGKDMEEGKAAFSKDESKEPIVEVRTEEERTPNHDGGKHTEPNETTPLTEPEKGPVEAKPECQETETKPAPAEVKTVPNDATQTKENESKA

SEQ ID NO: 92495 - protein, 145 aa, Homo sapiens
MGVTCVSQMPVAEGKSVQQTVELLTRKLEMLGAEKQGTFCVDCETYHTAASTLGSQGQTGKLMYVMHNSEYPLSCFALFENGPCLIADTNFDVLMVKLKGFFQSAKASKIETRGTRYQYCDFLVKVGTVTMGPSARGISVEVRPW

SEQ ID NO: 92496 - protein, 240 aa, Homo sapiens
MSENSSDSDSSCGWTVISHEGSDIEMLNSVTPTDSCEPAPECSSLEQEELQALQIEQGESSQNGTVLMEETAYPALEETSSTIEAEEQKIPEDSIYIGTASDDSDIVTLEPPKLEEIGNQEVVIVEEAQSSEDFNMGSSSSSQYTFCQPETERWWEKLWKIPECIWGWDDQLKHHVPSQLAFQVFSSQPSDDESSSDETSNQPSPAFRRRRARKKTVSASESEDRLVAEQETEPSKELSK

SEQ ID NO: 92497 - protein, 235 aa, Homo sapiens
MESGALDDFDKAKPSPAPPSTTTAPDASGPQKRSPGDTAKDALFASQEKFFQELFDSELASQATAEFEKAMKELAEEEPHLVEQFQKLSEAAGRVGSDMTSQQEFTSCLKETLSGLAKNATDLQNSSMSEEELTKAMEGLGMDEGDGEGNILPIMQSIMQNLLSKDVLYPSLKEITEKYPEWLQSHRESLPPEQFEKYQEQHSVMCKICEQFEAETPTDSETTQKARFEMVLDLM

SEQ ID NO: 92498 - protein, 268 aa, Homo sapiens
  MOD_RES (1)..(1): Any amino acid
XGRSGLQQGKGNVDGVAATPTAASASCQYRCIECNQEAKELYRDYNHGVLKITICKSCQKPVDKYIEYDPVIILINAILCKAQAYRHILFNTQINIHGKLCIFCLLCEAYLRWWQLQDSNQNTAPDDLIRYAKEWDFYRMFAIAALEQTAYFIGIFTFLWVERPMTAKKKPNFILLLKALLLSSYGKLLLIPAVIWEHDYTSVCLKLIKVFVLTSNFQAIRVTLNINRKLSFLAVLSGLLLESIMVYFFQSMEWDVGSDYAIFKSQDF

SEQ ID NO: 92499 - protein, 114 aa, Homo sapiens
MDAFKGGMSLERLPEGLRPPPPPPHDMGPAFHLARPADPREPLENSASESSDTELPEKERGGEPKGPEDSGAGGTGCGGADDPAKKKKQRRQRTHFTSQQLQELEATFQRNRYP

SEQ ID NO: 92500 - protein, 364 aa, Homo sapiens
IKEYEKSSEGALYILEIVTIVVFGVEYFVRIWAAGCCCRYRGWRGRLKFARKPFCVIDIMVLIASIAVLAAGSQGNVFATSALRSLRFLQILRMIRMDRRGGTWKLLGSVVYAHSKELVTAWYIGFLCLILASFLVYLAEKGENDHFDTYADALWWGLITLTTIGYGDKYPQTWNGRLLAATFTLIGVSFFALPAGILGSGFALKVQEQHRQKHFEKRRNPAAGLIQSAWRFYATNLSRTDLHSTWQYYERTVTVPMYSSQTQTYGASRLIPPLNQLELLRNLKSKSGLAFRKDPPPEPSPSPRGVAAKGKGSPQAQTVRRSPSADQSLEDSPSKVPKSWSFGDRSRARQAFRIKGAASRQNSE

SEQ ID NO: 92501 - protein, 138 aa, Homo sapiens
MEEASLCLGVSSAEPEAEPHLSGPVLNGQYAMSQKLHQITSQLSHAFPELHPRPNPEEKPPASLEEKAHVPMSGQPMGSQMALLANQLGREVDTSLNGRVDLQQFLNGQNLGIMSQMSDIEDDARKNRKYPCPLCGKR

SEQ ID NO: 92502 - protein, 35 aa, Homo sapiens
MSYFGEHFWGEKNHGFEVLYHSVKQGPISTKELAD

SEQ ID NO: 92503 - protein, 52 aa, Homo sapiens
MKAYCERQGLSMRQIRFRFDGQPINETDTPAQLEMEDEDTIDVFQQQTGGVY

SEQ ID NO: 92504 - protein, 588 aa, Homo sapiens
MSDTSESGAGLTRFQAEASEKDSSSMMQTLLTVTQNVEVPETPKASKATEVSKTPEAREAPATQASSTTQLTDTQVLAAENKSLAADTKKQNADPQAVTMPATETKKVSHVADTKVNTKAQETEAAPSQAPADEPEPESAAAQSQENQDTRPKVKAKKARKVKHLDGEEDGSSDQSQASGTTGGRRVSKALMASMARRASRGPIAFWARRASRTRLAAWARRALLSLRSPKARRGKARRRAAKLQSSQEPEAPPPRDVALLQGRANDLVKYLLAKDQTKIPIKRSDMLKDIIKEYTDVYPEIIERAGYSLEKVFGIQLKEIDKNDHLYILLSTLEPTDAGILGTTKDSPKLGLLMVLLSIIFMNGNRSSEAVIWEVLRKLGLRPGIHHSLFGDVKKLITDEFVKQKYLDYARVPNSNPPEYEFFWGLRSYYETSKMKVLKFACKVQKKDPKEWAAQYREAMEADLKAAAEAAAEAKARAEIRARMGIGLGSENAAGPCNWDEADIGPWAKARIQAGAEAKAKAQESGSASTGASTSTNNSASASASTSGGFSAGASLTATLTFGLFAGLGGAGASTSGSSGACGFSYK

SEQ ID NO: 92505 - protein, 165 aa, Homo sapiens
MKGFIDDANYSVGLLDEGTNLGNVIDNYVYEHTLNEMALVQELGVPPENIIYISPCKQVSQIKYAAKVGVNILTCDNEIELKKIARNHPNAKVLLHIATEDNIGGEEGNMKFGTTLKNCRHLLECAKELDVQIIGVKFHVSSACKESQVYVHALSDARCVFDMAG

SEQ ID NO: 92506 - protein, 42 aa, Homo sapiens
MQRNGSASRGLEKTRLRLCREARIPESAFLTGLTRESWEARC

SEQ ID NO: 92507 - protein, 107 aa, Homo sapiens
MILNSLSLCYHNKLILAPMVRVGTLPMRLLALDYGADIVYCEELIDLKMIQCKRVVNEVLSTVDFVAPDDRVVFRTCEREQNRVVFQMGTSDAERALAVARLVENDV

SEQ ID NO: 92508 - protein, 136 aa, Homo sapiens
MHQDIVPLCAADIQDQLKKRFAYLSGGRGQDGSPVITFPDYPAFSEIPDKEFQNVMTYLTSIPSLQDAGIGFILVIDRRRDKWTSVKASVLRIAASFPANLQLVLVLRPTGFFQRTLSDIAFKFNRDDFKMKVPVI

SEQ ID NO: 92509 - protein, 633 aa, Homo sapiens
MAVVATLRLSAQGTVTFEDVAVKFTQEEWNLLSEAQRCLYRDVTLENLALMSSLGCWCGVEDEAAPSKQSIYIQRETQVRTPVTGVSPKKAHPCEMCGPILGDILHVADHQGTHHKQKLHRCEAWGNKLYDSGNFHQHQNEHIGEKPYRGSVEEALFVKRCKLHVSGESSVFSESGKDFLPRSGLLQQEASHTGEKSNSKTECVSPFQCGGAHYSHGDSMKHFSTKHILSQHQRLLPREECYVCCECGKSFSKYVSFSNHQRVHSGKRPYECGECEKSFSQKSSLIQHQQFHTGGKPYGCEECGKYFSLEGYLRRHQKVHAGKGPYECGECGKSFSSNVNLKSHQRIHTGERPYKCGECEKSFSRKPSLSYHQRIHTEVRPYKCGECGKSYISKGHLRIHQRMHTGERPYKCGDCGKSFNEKGHLRSHQRVHTTERPYKCGECGKCFSHKGNLILHQHGHTRKRPYMCWECGKLFKKKSHLLVHQRIHSGEKPYACEACQKFFRHKCHLTAHQRVHTGERPYECSDCGKSFTHSCAFIVHKRVHTGQKPYECSECGKSFAASSYLTSHRRVHTGQKPYECSECGKSFAGISSLTNHRRVHTGEKPYGCSECEKKFRKSSSLRYHQRVHERKAL

SEQ ID NO: 92510 - protein, 36 aa, Homo sapiens
MTSPSPRIQIISTDSAVASPQRIQGSEPASGPLSVF

SEQ ID NO: 92511 - protein, 267 aa, Homo sapiens
MTSFSTSAQCSTSDSACRISPGQINQVRPKLPLLKILHAAGAQGEMFTVKEVIEVGKNDDLEDSKSLSDDTDVEVTSEDEWQCTECKKFNSPSKRYCFRCWALRKDWYSDCSKLTHSLSTSDITAIPEKENEGNDVPDCRRTISAPVVRPKDAYIKKENSKLFDPCNSVEFLDLAHSSESQETISSMGEQLDNLSEQRTDTENMEDCQNLLKPCSLCEKRPRDGNIIHGRTGHLVTCFHCARRLKKAGASCPICKKEIQLVIKVFIA

SEQ ID NO: 92512 - protein, 188 aa, Homo sapiens
  MOD_RES (1)..(1): Any amino acid
XYVNAVDSRWSSYGNEATSSAHYVERDRFIVTDLSGHRKHSSTGDLLSLELQQAKSNSLLLQREANALAMQQKWNSLDEGRHLTLNLLSKEIELRNGELQSDYTEDATDTKPDRDIELELSALDTDEPDGQSEPIEEILDIQLGISSQNDQLLNGMAVENGHPVQQHQKEPPKQKKQSLGRSKKQFCR

SEQ ID NO: 92513 - protein, 203 aa, Homo sapiens
  MOD_RES (1)..(1): Any amino acid
XIHAATPQFIIGPGGVVNLTGLVSSENSSKATDETGVSAVQFGNSSTSVLATLAALAEASAPLSNSSETPVVATEEVVTAESVDGAIQQVVSSGGQQVITIVTDGIQLGNLHSIPTSGIGQPIIVTMPDGQQVLTVPATDIAEETVISEEPPAKRQCIEIIENRVESAEIERGCLAMLPRLVLDSWPQVILPPQPPEELRLLA

SEQ ID NO: 92514 - protein, 265 aa, Homo sapiens
  MOD_RES (1)..(1): Any amino acid
XLTKKRTKVQKKSLLLKKPLRVDLILENTSKVPAPKDVLAHQVPNAKKLRRKEQLWEKLAKQGELPREVRRAQARLLNPSATRAKPGPQDTVERPFYDLWASDNPLDRPLVGQDEFFLEQTKKKGVKRPARLHTKPSQAPAVEVAPAGASYNPSFEDHQTLLSAAHEVELQRQKEAEKLERQLALPATEQAATQESTFQELCEGLLEESDAELGADRLAQDPEARGQHPSRPVQELPEEEYDRASRESQVQTQVQGEAGGEAGVP

SEQ ID NO: 92515 - protein, 274 aa, Homo sapiens
MKLIILEHYSQASEWAAKYIRNRIIQFNPGPEKYFTLGLPTGSTPLGCYKKLIEYYKNGDLSFKYVKTFNMDEYVGLPRDHPESYHSFMWNNFFKHIDIHPENTHILDGNAVDLQAECDAFEEKIKAAGGIELFVGGIGPDGHIAFNEPGSSLVSRTRVKTLAMDTILANARFFDGELTKVPTMALTVGVGTVMDAREVMILITGAHKAFALYKAIEEGVNHMWTVSAFQQHPRTVFVCDEDATLELKVKTVKYFKAPPQVNRKGYIYSTNFGI

SEQ ID NO: 92516 - protein, 169 aa, Homo sapiens
LDTDEYEETKKETLEQLSEFNDSLKKIMSGNMTLVDELSGMQLAIQAAISQAFKTPEVIRLFAKKQPGQLRTRLAEMDRDLMVGKLERDLYTQQKVEILTALRKLGEKLTADDEAFLSANAGAILSQFEKVSTDLGRPPSYMNYLLDSHPSKNIDVPSKISFLLKIQDL

SEQ ID NO: 92517 - protein, 192 aa, Homo sapiens
MELEELGIREECGVFGCIASGEWPTQLDVPHVITLGLVGLQHRGQESAGIVTSDGSSVPTFKSHKGMGLVNHVFTEDNLKKLYVSNLGIGHTRYATTGKCELENCQPFVVETLHGKIAVAHNGELVNAARLRKKISYCLQPWSSVISIYILLAQESPTPVLGTSTSLWLVRNQATQQEVSASASWYWSVYKF

SEQ ID NO: 92518 - protein, 90 aa, Homo sapiens
  MOD_RES (1)..(1): Any amino acid
XHYVVSEPLGRNSYKERYLFVYRPDQVSAVDSYYYDDGCEPCGNDTFNREPAIVRFFSRFTGSVPHTTWLSPQRSGSLPLFPCMRPRGTQ

SEQ ID NO: 92519 - protein, 46 aa, Homo sapiens
MGRPLLLPLLLLLQPPAFLQPEGQESGFLRISNLRKEDQSVYFCRV

SEQ ID NO: 92520 - protein, 97 aa, Homo sapiens
  MOD_RES (1)..(1): Any amino acid
XLFGLMDEEDDGSRIREHELLYRINAQMKAFRKELQTFIDRLEVPKSADDRGAEEPISVSQMFQPIILLILILVLFSSLSYTTIFKLVFLFTLFFVL

SEQ ID NO: 92521 - protein, 228 aa, Homo sapiens
MKRLAARCFAGLLILSPLTVISDSRPADSGKAIEDGNLEEMEEEVRLKKRKRRRNVDKDPAKEDVEKAKKRRGRPPAEKLSPNPPKLTKQMNAIIDTVINYKDSSGRQLSEVFIQLPSRKELPEYYELIRKPVDFKKIKERIRNHKYRSLGDLEKDVMLLCHNAQTFNLEGSQIYEDSIVLQSVFKSARQKIAKEEESEDESNEEEEEEDEEESESEAKSVKVKIKLN

SEQ ID NO: 92522 - protein, 216 aa, Homo sapiens
MAAKVFESIGKFGLALAVAGGVVNSALYNVDAGHRAVIFDRFRGVQDIVVGEGTHFLIPWVQKPIIFDCRSRPRNVPVITGSKDLQNVNITLRILFRPVASQLPRIFTSIGEDYDERVLPSITTEILKSVVARFDAGELITQRELVSRQVSDDLTERAATFGLILDDVSLTHLTFGKEFTEAVEAKQVAQQEAERARFVVEKAEQQKKAAIISAEG

SEQ ID NO: 92523 - protein, 75 aa, Homo sapiens
NLQLLGATAIEDKLQDQVPETIETLMKADIKIWILTGDKQETAINIGHSCKLLKKNMGMIVINEGSLDGFSSSKI

SEQ ID NO: 92524 - protein, 308 aa, Homo sapiens
MRRPGAPASWIWWRMLRQVLRRGLQSFCHRLGLCVSRHPVFFLTVPAVLTITFGLSALNRFQPEGDLERLVAPSHSLAKIERSLASSLFPLDQSKSQLYSDLHTPGRYGRVILLSPTGDNILLQAEGILQTHRAVLEMKDGRNSFIGHQLGGVVEVPNSKDQRVKSARAIQITYYLQTYGSATQDLIGEKWENEFCKLIRKLQEEHQELQLYSLASFSLWRDFHKTSILARSKVLVSLVLILTTATLSSSMKDCLRSKPFLGLLGVLTVCISIITAAGIFFITDGKYNSTLLGIPFFAMGISTEFTSS

SEQ ID NO: 92525 - protein, 110 aa, Homo sapiens
MVCFSDLPKLRKAADSKREQFRRYLEKSGVLDTLTKVLVALYEEPEKPNSALDFLKHHLGAATPENPEIELLRLELAEMKEKYEAIVEENKKLKAKLAQYEPPQEEKRAE

SEQ ID NO: 92526 - protein, 97 aa, Homo sapiens
AHGSVWGPLRLGIPGLCCRRPPLGLYARMRRLPGPEVSGRSVAAASGPGAWGTDHYCLELLRKRDYEGYLCSLLLPAESRSSVFALRAFNVELAQAG

SEQ ID NO: 92527 - protein, 252 aa, Homo sapiens [sequence omitted]

SEQ ID NO: 92528 - protein, 45 aa, Homo sapiens
MTDGLVTFRDVAIDFSQEEWECLDPAQRDLYVDVMLENYSNLVSL

SEQ ID NO: 92529 - protein, 50 aa, Homo sapiens
MASGSGDSVTRRSVASQFFTQEEGPGIDGMTTSERVVDLLNQAALITNDS

SEQ ID NO: 92530 - protein, 699 aa, Homo sapiens [sequence omitted]

SEQ ID NO: 92531 - protein, 193 aa, Homo sapiens
MTSAAPAKKPYRKAPPEHRELRLEIPGSRLEQEEPLTDAERMKLLQEENEELRRRLASATRRTEALERELEIGQDCLELELGQSREELDKFKDKFRRLQNSYTASQRTNQELEDKLHTLASLSHSWIFAIKKAEMDRKTLDWEIVELTNKLLDAKNTINKLEELNERYRLDCNLAVQLLKCNKSHFRNHKFAD

SEQ ID NO: 92532 - protein, 280 aa, Homo sapiens
MGDTVVEPAPLKPTSEPTSGPPGNNGGSLLSVITEGVGELSVIDPEVAQKACQEVLEKVKLLHGGVAVSSRGTPLELVNGDGVDSEIRCLDDPPAQIREEEDEMGAAVASGTAKGARRRRQNNSAKQSWLLRLFESKLFDISMAISYLYNSKEPGVQAYIGNRLFCFRNEDVDFYLPQLLNMYIHMDEDVGDAIKPYIVHRCRQSINFSLQCALLLGAYSSDMHISTQRHSRGTKLRKLILSDELKPAHRKRELPSLSPAPDTGLSPSKRTHQRSKSDAT

SEQ ID NO: 92533 - protein, 219 aa, Homo sapiens
MDDFLQKLRQKIKIGVVGGSDFEKVQEQLGNDVVEKYDYVFPENGLVAYKDGKLLCRQNIQSHLGEALIQDLINYCLSYIAKIKLPKKRGTFIEFRNGMLNVSPIGRSCSQEERIEFYELDKKENIRQKFVADLRKEFAGKGLTFSIGGQISFDVFPDGWDKRYCLRHVENDGYKTIYFFGDKTMPGGNDHEIFTDPRTMGYSVTAPEDTRRICELLFS

SEQ ID NO: 92534 - protein, 496 aa, Homo sapiens
MLLKKHAGKGGGREPRSEDPTPAEQHCARTMPPCAVLAALLSVVAVVSCLYLGVKTNDLQARIAALESAKGAPSIHLLPDTLDHLKTMVQEKVERLLAQKSYEHMAKIRIAREAPSECNCPAGPPGKRGKRGRRGESGPPGQPGPQGPPGPKGDKGEQGDQGPRGPLGPPGQKGSIGAPGIPGMNGQKGEPGLPGAVGQNGIPGPKGEPGEQGEKGDAGENGPKGDTGEKGDPGSSAAGIKGEPGESGRPGQKGEPGLPGLPGLPGIKGEPGFIGPQGEPGLPGLPGTKGERGEAGPPGRGERGEPGAPGPKGKQGESGTRGPKGSKGDRGEKGDSGAQGPRGPPGQKGDQGATEIIDYNGNLHEALQRITTLTVTGPPGPPGPQGLQGPKGEQGSPGIPGMDGEQGLKGSKGDMGDPGSQWNERRKRRFWNAGSTGSFYHRPTRPTRSPWPTWPHGTSWTSWTKGSIWLRRKARIPGYRWSYGTPWPCRSQRRKR

SEQ ID NO: 92535 - protein, 23 aa, Homo sapiens
MAQLGKLLKEQKYDRQLRVQKTF

SEQ ID NO: 92536 - protein, 22 aa, Homo sapiens
MESCYNPGLDGIIEYDDFKLNS

SEQ ID NO: 92537 - protein, 91 aa, Homo sapiens
MYRISQLMSTPVASSSRLEREYAGELSPTCIFPSFTCDSLDGYHSFECGSIDPLTGSHYTCRRSPRLLTNGYYIWTEDSFLCDKDGNITLN

SEQ ID NO: 92538 - protein, 445 aa, Homo sapiens
  MOD_RES (1)..(1): Any amino acid
XLSRSTLLCVSALAVISYVTPVFLVALLPLAIVCYFIQKYFRVASRDLQQLDDTTQLPLLSHFAETVEGLTTIRAFRYEARFQQKLLEYTDSNNIASLFLTAANRWLEVRMEYIGACVVLIAAVTSISNSLHRELSAGLVGLGLTYALMVSNYLNWMVRNLADMELQLGAVKRIHGLLKTEAESYEGLLARPPAPSLIPKNWPDQGKIQIQNLSVRYDSSLKPVLKHVNALIAPGQKIGICGRTGSGKSSFSLAFFRMVDTFEGHIIIDGIDIAKLPLHTLRSRLSIILQDPVLFSGTIRFNLDPERKCSDSTLWEALEIAQLKLVVKALPGGLDAIITEGGENFSQGQRQLFCLARAFVRKTSIFIMDEATASIDMATENILQKVVMTAFADRTVVTIAHRVHTILSADLVIVLKRGAILEFDKPEKLLSRKDSVFASFVRADK

SEQ ID NO: 92539 - protein, 102 aa, Homo sapiens
MSAPKLLSLGCIFFPLLLFQQARAQFPRQCATVEALRSGMCCPDLSPVSGPGTDRCGSSSGRGRCEAVTADSRPHSPQYPHDGRDDREVWPLRFFNRTCHCN

SEQ ID NO: 92540 - protein, 92 aa, Homo sapiens
MDNVQPKIKHRPFCFSVKGHVKMLRLDIINSLVTTVFMLIVSVLALIPETTTLTVGGGDLTNSIITAVFLSVVAILAMQEKKRRHLLYVGGR

SEQ ID NO: 92541 - protein, 129 aa, Homo sapiens
MNTSRFADHHDLLTETKRPIDTVISQQAFYSDESVSAMEKQYLRNSNLTPQQKIDELHHGFTGLDLEEQWMYPSRSDHSNCHNIQTNDTAKTTFQEYPLIKNCFTPQTGLSDIMKESGVDIYHYGRDRI

SEQ ID NO: 92542 - protein, 213 aa, Homo sapiens
MHNLITNTKFCNIMGSSNGVDQEHFSNVVKGEKILPVFDEPPNPTNVEESLKRTKENDAHLVEVNLNNIKNIPIPTLKDFAKALETNTHVKCFSLAATRSNDPVATAFAEMLKVNKTLKSLNVESNFITGVGILALIDALRDNETLAELKIDNQRQQLGTAVELEMAKMLEENTNILKFGYQFTQQGPRTRAANAITKNNDLVRKRRVEGDHQ

SEQ ID NO: 92543 - protein, 218 aa, Homo sapiens
MPDYFSRRAGVFPMKPGDPGRRSDSRGHPCLDLRARMSRQVVRSSKFRHVFGQPAKADQCYEDVRVSQTTWDSGFCAVNPKFVALICEASGGGAFLVLPLGKTGRVDKNAPTVCGHTAPVLDIAWCPHNDNVIASGSEDCTVMVWEIPDGGLMLPLREPVVTLEGHTKRVGIVAWHTTAQNVLLSAGCDNVIMVWDVGTGAAMLTLGPEVHPDTIYSV

SEQ ID NO: 92544 - protein, 44 aa, Homo sapiens
MAVQISKKRKFVADGIFKAELNEFLTRELAEDGYSGVENTECSW

SEQ ID NO: 92545 - protein, 588 aa, Homo sapiens
MNPSAPSYPMASLYVGDLHPDVTEAMLYEKFSPAGPILSIRVCRDMITRRSLGYAYVNFQQPADAERALDTMNFDVIKGKPVVCDENGSKGYGFVHFETQEAAERAIEKMNGMLLNDRKVFVGRFKSRKEREAELGARAKEFTNVYIKNFGEDMDDERLKDLFGKFGPALSVKVMTDESGKSKGFGFVSFERHEDAQKAVDEMNGKELNGKQIYVGRAQKKVERQTELKRKFEQMKQDRITRYQGVNLYVKNLDDGIDDERLRKEFSPFGTITSAKVMMEGGRSKGFGFVCFSSPEEATKAVTEMNGRIVATKPLYVALAQRKEERQAHLTNQYMQRMASVRAVPNPVINPYQPAPPSGYFMAAIPQTQNRAAYYPPSQIAQLRPSPRWTAQGARPHPFQNMPGAIRPAAPRPPFSTMRPASSQVPRVMSTQRVANTSTQTMGPRPAAAAAAATPAVRTVPQYKYAAGVRNPQQHLNAQPQVTMQQPAVHVQGQEPLTASMLASAPPQEQKQMLGERLFPLIQAMHPTLAGKITGMLLEIDNSELLHMLESPESLRSKVDEAVAVLQAHQAKEAAQKAVNSATGVPTV

SEQ ID NO: 92546 - protein, 158 aa, Homo sapiens
  MOD_RES (1)..(1): Any amino acid
XQQITENPQLMQNMLSAPYMRSMMQSLSQNPDLAAQLQEQMRQQLPTFLQQMQNPDTLSAMSNPRAMQALLQIQQGLQTLATEAPGLIPGFTPGLGALGSTGGSSGTNGSNATPSENTSPTAGTTEPGHQQFIQQMLQALAGVNPQLQNPEVRFQQQL

SEQ ID NO: 92547 - protein, 118 aa, Homo sapiens
MGCVQCKDKEATKLTEERDGSLNQSSGYRYGTDPTPQHYPSFGVTSIPNYNNFHAAGGQGLTVFGGVNSSSHTGTLRTRGGTGVTLFVALYDYEARTEDDLSFHKGEKFQILNSSEGD

SEQ ID NO: 92548 - protein, 173 aa, Homo sapiens
MRKPAAGFLPSLLKVLLLPLAPAAAQDSTQASTPGSPLSPTEYERFFALLTPTWKAETTCRLRATHGCRNPTLVQLDQYENHGLVPDGAVCSNLPYASWFESFCQFTHYRCSNHVYYAKRVLCSQPVSILSPNTLKEIEASAEVSPTTMTSPISPHFTERQTFQPWPERLSNN

SEQ ID NO: 92549 - protein, 25 aa, Homo sapiens
MPFTLHLRSRLPSAIRSLILQKKPN

SEQ ID NO: 92550 - protein, 96 aa, Homo sapiens
  MOD_RES (1)..(1): Any amino acid
XSAARGAAALRRSINQPVAFVRRIPWTAASSQLKEHFAQFGHVRRCILPFDKETGFHRGLGWVQFSSEEGLRNALQQENHIIDGVKVNLFLCQIHT

SEQ ID NO: 92551 - protein, 37 aa, Homo sapiens
MKMLQAPESVLAEHYQDLRRKPFYPALIRYMSSGPVV

SEQ ID NO: 92552 - protein, 172 aa, Homo sapiens
GPIEQKEARWESSWEEQPDWTLGCLSPESHTNHVALRDTGNQLIVTMSCLTKEDTGWYWCGIQRDFARDDMDFTELIVTDDKGTLANDFWSGKDLSGNKTRSCKAPKVVRKADRSRTSILIICILITGLGIISVISHLTKRRRSQRNRRVGNTLKPFSRVLTPKEMAPTEQM

SEQ ID NO: 92553 - protein, 15 aa, Homo sapiens
MSDKDDIETPLLTEA

SEQ ID NO: 92554 - protein, 368 aa, Homo sapiens
MRVMAPRTLILLLSGALALTETWACSHSMRYFDTAVSRPGRGEPRFISVGYVDDTQFVRFDSDAASPRGEPRAPWVEQEGPEYWDRETQKYKRQAQADRVNLRKLRGYYNQSEDGSHTLQWMYGCDLGPDGRLLRGYDQSAYDGKDYIALNEDLRSWTAADTAAQITQRKWEAAREAEQWRAYLEGTCVEWLRRYLENGKETLQRAEHPKTHVTHHPVSDHEATLRCWALGFYPAEITLTWQRDGEDQTQDTELVETRPAGDGTFQKWAAVVVPSGEEQRYTCHVQHEGLPEPLTLRWEPSSQPTIPIVGIVAGLAVLAVLAVLGAVMAVVMCRRKSSAACVGLRCRISSHLSFVTSRASGISFCKGI

SEQ ID NO: 92555 - protein, 50 aa, Homo sapiens
MATEGMILTNHDHQIRVGVLTVSDSCFRNLAEDRSGINLKDLVQDPSLKP

SEQ ID NO: 92556 - protein, 167 aa, Homo sapiens
MMLSLNNLQNIIYNPVIPFVGTIPDQLDPGTLIVIRGHVPSDADRFQVDLQNGSSMKPRADVAFHFNPRFKRAGCIVCNTLINEKWGREEITYDTPFKREKSFEIVIMVLKDKFQVAVNGKHTLLYGHRIGPEKIDTLGIYGKVNIHSIGFSFSSDLQSTQASSLEL

SEQ ID NO: 92557 - protein, 62 aa, Homo sapiens
MTSIIKLTTLSGVQEESALCYLLQVDEFRFLLDCGWDEHFSMDIIDSLRNLDTIQKILHSLH

SEQ ID NO: 92558 - protein, 55 aa, Homo sapiens
MPDVVQTRQQAYRDKLAQQQAAAAAAAAAAASQQGSAKNGENTANGEENGAHTIA

SEQ ID NO: 92559 - protein, 98 aa, Homo sapiens
MSEGVDLIDIYADEEFNQDPEFNNTDQIDLYDDVLTATSQPSDDRSSSTEPPPPVRQEPSPKPNNKTPAILYTYSGLRNRRAAVYVGSFSWESMMWWS

SEQ ID NO: 92560 - protein, 1471 aa, Homo sapiens
EKCAQDLGSTSKAVGSSMAQLLTCAAQGNEHYTGVAARETAQALKTLAQAARGVAASTTDPAAAHAMLDSARDVMEGSAMLIQEAKQALIAPGDAERQQRLAQVAKAVSHSLNNCVNCLPGQKDVDVALKSIGESSKKLLVDSLPPSTKPFQEAQSELNQAAADLNQSAGEVVHATRGQSGELAAASGKFSDDFDEFLDAGIEMAGQAQTKEDQIQVIGNLKNISMASSKLLLAAKSLSVDPGAPNAKNLLAAAARAVTESINQLITLCTQQAPGQKECDNALRELETVKGMLDNPNEPVSDLSYFDCIESVMENSKVLGESMAGISQNAKTGDLPAFGECVGIASKALCGLTEAAAQAAYLVGISDPNSQAGHQGLVDPIQFARANQAIQMACQNLVDPGSSPSQVLSAATIVAKHTSALCNACRIASSKTANPVAKRHFVQSAKEVANSTANLVKTIKALDGDFSEDNRNKCRIATAPLIEAVENLTAFASNPEFVSIPAQISSEGSQAQEPILVSAKTMLESSSYLIRTARSLAINPKDPPTWSVLAGHSHTVSDSIKSLITSIRDKAPGQRECDYSIDGINRCIRDIEQASLAAVSQSLATRDDISVEALQEQLTSVVQEIGHLIDPIATAARGEAAQLGHKVTQLASYFEPLILAAVGVASKILDHQQQMTVLDQTKTLAESALQMLYAAKEGGGNPKAQHTHDAITEAAQLMKEAVDDIMVTLNEAASEVGLVGGMVDAIAEAMSKLDEGTPPEPKGTFVDYQTTVVKYSKAIAVTAQEMMTKSVTNPEELGGLASQMTSDYGHLAFQGQMAAATAEPEEIGFQIRTRVQDLGHGCIFLVQKAGALQVCPTDSYTKRELIECARAVTEKVSLVLSALQAGNKGTQACITAATAVSGIIADLDTTIMFATAGTLNAENSETFADHRENILKTAKALVEDTKLLVSGAASTPDKLAQAAQSSAATITQLAEVVKLGAASLGSDDPETQVVLINAIKDVAKALSDLISATKGAASKPVDDPSMYQLKGAAKVMVTNVTSLLKTVKAVEDEATRGTRALEATIECIKQELTVFQSKDVPEKTSSPEESIRMTKGITMATAKAVAAGNSCRQEDVIATANLSRKAVSDMLTACKQASFHPDVSDEVRTRALRFGTECTLGYLDLLEHVLVILQKPTPEFKQQLAAFSKRVAGAVTELIQAAEAMKGTEWVDPEDPTVIAETELLGAAASIEAAAKKLEQLKPRAKPKQADETLDFEEQILEAAKSIAAATSALVKSASAAQRELVAQGKVGSIPANAADDGQWSQGLISAARMVAAATSSLCEAANASVQGHASEEKLISSAKQVAASTAQLLVACKVKADQDSEAMRRLQVMVTDAGGKILLLERAAGNAVKRASDNLVRAAQKAAFGKADDDDVVVKTKFVGGIAQIIAAQEEMLKKERELEEARKKLAQIRQQQYKFLPTELREDEG

SEQ ID NO: 92561 - protein, 127 aa, Homo sapiens
VRQDDCMVLKEFLRANSPTMDKLLADSKTAQKAEQEVEQWKKEAAAQEAGADTPGKGEPPAPKVGNCSWAWYWAAGMHGISSPSGATPTPSLLQTDPAPGAWDGKGFFLLKPAVLAVGDQADIPGFW

SEQ ID NO: 92562 - protein, 124 aa, Homo sapiens
MQKGDTNIKPILQVINIRPITTGNSPPRYRLLMSDGLNTLSSFMLATQLNPLVEEEQLSSNCVCQIHRFIVNTLKDGRRVVILMELEVLKSAEAVGVKIGNPVPYNEGLGQPQVAPPAPAASPA

SEQ ID NO: 92563 - protein, 100 aa, Homo sapiens
MRMLSSCCKMTDIMTEGITIVEDINKRREPLPSLEAVYLITPSEKSVHSLISDFKDPPTAKYRAAHVFFTDSCPDALFNELVKSRAAKVIKTLTEINIAF

SEQ ID NO: 92564 - protein, 283 aa, Homo sapiens
MSEAGEEQPMETTGATENGHEAVPEGESPAGAGTGAAAGAGGATAAPPSGNQNGAEGDQINASKNEEDAGKMFVGGLSWDTSKKDLKDYFTKFGEVVDCTIKMDPNTGRSRGFGFILFKDAASVEKVLDQKEHRLDGRVIDPKKAMAMKKDPVKKIFVGGLNPEATEEKIREYFGEFGEIEAIELPMDPKLNKRRGFVFITFKEEEPVKKVLEKKFHTVSGSKCEIKVAQPKEVYQQQQYGSGGRGNRNRGNRGSGGGGGGQGSTNYGKSQRRGGHQNNYKPY

SEQ ID NO: 92565 - protein, 198 aa, Homo sapiens
LSVAFSCCYGAEAEDIKCCNTCEDVREAYRRRGWAFKNPDTIEQCRREGFSQKMQEQKNEGCQVYGFLEVNKVAGNFHFAPGKSFQQSHVHVHDLQSFGLDNINMTHYIQHLSFGEDYPGIVNPLDHTNVTAPQASMMFQYFVKVVPTVYMKVDGEVLRTNQFSVTRHEKVANGLLGDQGLPGVFAHLPLSTSHPEEN

SEQ ID NO: 92566 - protein, 163 aa, Homo sapiens
MPLEMEPKMSKLAFGCQRSSTSDDDSGCALEEYAWVPPGLRPEQIQLYFACLPEEKVPYVNSPGEKHRIKQLLYQLPPHDNEVRYCQSLSEEEKKELQVFSAQRKKEALGRGTIKLLSRAVMHAVCEQCGLKINGGEVAVFASRAGPGVCWHPSCFVCFTCNE

SEQ ID NO: 92567 - protein, 214 aa, Homo sapiens
MGNVLAASSPPAGPPPPPAPALVGLPPPPPSPPGFTLPPLGGSLGAGTSTSRSSERTPGAATASASGAAEDGACGCLPNPGTFEECHRKCKELFPIQMEGVKLTVNKGLSNHFQVNHTVALSTIGESNYHFGVTYVGTKQLSPTEAFPVLVGDMDNSGSLNAQVIHQLGPGLRSKMAIQTQQSKFVNWQVDGEYRGSDFTAAVTLGNPDVLVGS

SEQ ID NO: 92568 - protein, 312 aa, Homo sapiens
MSDFDSNPFADPDLNNPFKPPPGGVKMPNVPNTQPAIMKPTEEHPAYTQIAKEHALAQAELLKRQEELERKAAELDRREREMQNLSQHGRKNNWPPLPSNFPVGPCFYQDFSVDIPVEFQKTVKLMYYLWMFHAVTLFLNIFGCLAWFCVDSARAVDFGLSILWFLLFTPCSFVCWYRPLYGAFRSDSSFRFFVFFFVYICQFAVHVLQAAGFHNWGNCGWISSLTGLNQNIPVGIMMIIIAALFTASAVISLVMFKKVHGLYRTTGASFEKAQQEFATGVMSNKTVQTAAANAASTAASSAAQNAFKGNQI

SEQ ID NO: 92569 - protein, 115 aa, Homo sapiens
MGTRLLCWAALCLLGADHTGAGVSQTPSNKVTEKGKYVELRCDPISGHTALYWYRQSLGQGPEFLIYFQGTGAADDSGLPNDRFFAVRPEGSVSTLKIQRTERGDSAVYLCASSL

SEQ ID NO: 92570 - protein, 95 aa, Homo sapiens
MLAPGSSPGQRGRLALQWRQVSWITCWIALYAVEALPTCPFSCKCDSRSLEVDCSGLGLTTVPPDVPAATRTLLLLNNKLSALPSWAFANLSSLQ

SEQ ID NO: 92571 - protein, 717 aa, Homo sapiens
MVWCLGLAVLSLVISQGADGRGKPEVVSVVGRAGESVVLGCDLLPPAGRPPLHVIEWLRFGFLLPIFIQFGLYSPRIDPDYVGRVRLQKGASLQIEGLRVEDQGWYECRVFFLDQHIPEDDFANGSWVHLTVNSPPQFQETPPAVLEVQELEPVTLRCVARGSPLPHVTWKLRGKDLGQGQGQVQVQNGTLRIRRVERGSSGVYTCQASSTEGSATHATQLLVLGPPVIVVPPKNSTVNASQDVSLACHAEAYPANLTYSWFQDNINVFHISRLQPRVRILVDGSLRLLATQPDDAGCYTCVPSNGLLHPPSASAYLTVLYPAQVTAMPPETPLPIGMPGVIRCPVRANPPLLFVSWTKDGKALQLDKFPGWSQGTEGSLIIALGNEDALGEYSCTPYNSLGTAGPSPVTRVLLKAPPAFIERPKEEYFQEVGRELLIPCSAQGDPPPAAPPSPLPGPGPLLQYLSLPFFREMNVDGDWPPLEEPSPAAPPDYMDTRRCPTSSFLRSPETPPVSPRESLPGAVVGAGATAEPPYTALADWTLRERLLPGLLPAAPRGSLTSQSSGRGSASFLRPPSTAPSAGGSYLSPAPGDTSSWASGPERWPRREHVVTVSKRRNTSVDENYEWDSEFPGDMELLETLHLGLASSRLRPEAEPELGVKTPEEGCLLNTAHVTGPEARCAALREEFLAFRRRRDATRARLPAYRQPVPHPEQATLL

SEQ ID NO: 92572 - protein, 71 aa, Homo sapiens
MTKKTRDLRRQLRKAVMDHVSDSFLETNVPLLVLIEAAKNGNEKEVKEYAQVFREHANKLIEVANLACSIS

SEQ ID NO: 92573 - protein, 232 aa, Homo sapiens
MAAAVLGQLGKDFLVVKRQKGVEMESELTACVDVAGALWIHNLRSRGKLALGVLPQSYIHTSASLDISRKWEKKNKIVYPPQLPGEPRRPAEIYHCRRQIKYSKDKMWYLAKLIRGMSIDQALAQLEFNDKKGAKIIKEVLLEAQDMAVRDHNVEFRSNLYIAESTSGRGQCLKRIRYHGRGRFGIMEKVYCHYFVKLVEGPPPPPEPPKTAVAHAKEYIQQLRSRTIVHTL

SEQ ID NO: 92574 - protein, 521 aa, Homo sapiens
KKMLCSKDSLGLKEELTDEDREKVAVHEGINSGTAMSRGLYQPATIFMGRQMSAILSMRDFSTEHKSPQPTKNFSIPDPHSHRQTAQSSNVTDSCVVQTSNDTQCLNKSDNIDGKASLQIGEKMPVTASVLSEEEQTHCLEIGSNTRHGKSNLSEGKKSAELNSPLRERLSPENRTTDLKCDSSSGSEGEILTREHIEVEEKRASPPVSPIPVSEYCESENKWSQEKHSPWEGVSDHLAHREPKSQKPFRKMQEEEEESWSTSSDLTISISEDDLILESPEPQPNPGGKMEGEDGIEALKLIHAEQERVALSTEKNCILQTLSSPDSEKESSTNAPTREPGQTPDSDVPRAQVGQHVATLKEHDNSVKEEATALLRKALTEECGRRSAIHSSESSCSLPSILNDNSGIKEAKPAVWLNSVPTREQETEAYQLLKKATLQDNTNQTENRFQKTDASVSHLSGLNIGSGAFETKTANKIASEASFSSSEGSPLSRHENKKKPVINLKSNGERDNRTLDFLFLF

SEQ ID NO: 92575 - protein, 54 aa, Homo sapiens
MAGAEGAAGRQSELEPVVSLVDVLEEDEELENEACAVLGGSDSEKCSYSQKFSL

SEQ ID NO: 92576 - protein, 493 aa, Homo sapiens
SEAVYLNDSTYDGHTVGGLQYGGLGQLADGVVGLDDFRKSQELRVWPGYDYVGWSNHSFSSGYVEMEFEFDRLRAFQAMQVHCNNMHTLGARLPGGVECRFRRGPAMAWEGEPMRHNLGGNLGDPRARAVSVPLGGRVARFLQCRFLFAGPWLLFSEISFISDVVNNSSPALGGTFPPAPWWPPGPPPTNFSSLELEPRGQQPVAKAEGSPTAILIGCLVAIILLLLLIIALMLWRLHWRRLLSKVLESHPRTRSPGLVGIRPTLLPVSPMALRCCSPIQPTASFWPLTPVPLEARAPPHPPGPNPPTPRGVTGGNTYAVPALPPGAVGDGPPRVDFPRSRLRFKEKLGEGQFGEVHLCEVDSPQDLVSLDFPLNVRKGHPLLVAVKILRPDATKNARNDFLKEVKIMSRLKDPNIIRLLGVCVQDDPLCMITDYMENGDLNQFLSAHQLEDKAAEGAPGDGQAAQGPTISYPMLLHVAAQIASGMRYLATLN

SEQ ID NO: 92577 - protein, 130 aa, Homo sapiens
MLFNLRILLNNAAFRNGHNFMVRNFRCGQPLQNKVQLKGRDLLTLKNFTGEEIKYMLWLSADLKFRIKQKGEYLPLLQGKSLGMIFEKRSTRTRLSTETGEIETGVLTAVSKSSSVQRCQCKNCDTIVQL

SEQ ID NO: 92578 - protein, 198 aa, Homo sapiens
  MOD_RES (1)..(1): Any amino acid
XALLKGKSEEELEASKSFGPGNEEEEEEEEEYEEEEEEDYDEEEEESSEAPLDENDLEEDVDSEPAEIEGEAAEDGDPGDTGAELDDDQHWSDSPSDADRELRLPCPAEGEAELELRVSEDEEKLPASPKHQERGPSQATSPIRSPQESALLFIPVHSPSTEGPQLPPVPAATQEKSPEERLFPEPLLPKEKPKADAP

SEQ ID NO: 92579 - protein, 120 aa, Homo sapiens
MSQVTFSDVAIDFSHEEWACLDSAQRDLYKDVMVQNYENLVSVGLSVTKPYVIMLLEDGKEPWMMEKKLSKAYPFPLSHSVPASVNFGFSALFEHCSEVTEIFELSELCVFWVLHFLSNS

SEQ ID NO: 92580 - protein, 71 aa, Homo sapiens
  MOD_RES (1)..(1): Any amino acid
XATQGLAVALALSVLPGSRALRPGDCEVCISYLGRFYQDLKDRDVTFSPATIENELIKFCREARGKENRLV

SEQ ID NO: 92581 - protein, 111 aa, Homo sapiens
MESALPAAGFLYWVGAGTVAYLALRISYSLFTALRVWGVGNEAGVGPGLGEWAGESDAAPRPRSRGGPDQAWAVMTSSGVCSWPSPPQLSSFSGSCAPRAPPGSLGCLLLA

SEQ ID NO: 92582 - protein, 776 aa, Homo sapiens
VVYSRVGQESRRLLLLLLLLAAWEAGNGQLHYSVSEEAKHGTFVGRIAQDLGLELAELVPRLFRVASKGRGGLLEVNLQNGILFVNSRIDREELCRRSAECSIHLEVIVDRPLQVFHVDVEVRDINDNPPVFPATQKNLSIAESRPLDSRFPLEGASDADIGENALLTYRLSPNEYFSLEKPPDDELVKGLGLILRKSLDREEAPEIFLVLTATDGGKPELTGTVQLLITVLDANDNAPAFDRTIYKVRLLENVPNGTLVIKLNASDLDEGLNGDIVYSFSNDISPNVKSKFHIDPITGQIIVKGYIDFEESKSYEIIVEGIDKGQLPLSGHCRVIVEVEDNNDNVPDLEFKSLSLPIREDAPLGTVIALISVSDKDMGVNGLVTCSLTSHVPFKLVSTFKNYYSLVLDSALDRESVSAYELVVTARDGGSPSLWATASVSVEVADVNDNAPAFAQPEYTVFVKENNPPGCHIFTVSAWDADAQENALVSYSLVERRVGERALSSYVSVHAESGKVYALQPLDHEELELLQFQVTARDAGVPPLGSNVTLQVFVLDENDNAPALLAPRAGGTGGAVSELVPWSVGVGHVVAKVRAVDADSGYNAWLSYELQPGTGGARIPFRVGLYTGEISTTRALDETDAPRHRLLVLVKDHGEPALTATATVLVSLVESGQAPKASSRALVGAVGPDAALVDVNVYLIIAICAVSSLLVLTLLLYTALRCSALPTEGACAPGKPTLVCSSAVGSWSYSQQRRPRVCSGEGPPKTDLMAFSPSLP

SEQ ID NO: 92583 - protein, 68 aa, Homo sapiens
  MOD_RES (1)..(1): Any amino acid
XKKQRTGKKIHVCQYCEKQFDHFGHFKEHLRKHTVLDAKKFTVMRPHLVRALPVATLQSPEAMQGITW

SEQ ID NO: 92584 - protein, 72 aa, Homo sapiens
MTCWLRGVTATFGRPAEWPGYLSHLCGRSAAMDLGPMRKSYRGDREVPPLGPGLLQGRGKRGPRSHLQRGGE

SEQ ID NO: 92585 - protein, 161 aa, Homo sapiens
  MOD_RES (1)..(1): Any amino acid
XFSDEVGALVFDIGSYTVRAGYAGEDCPKVDFPTAIGMVVERDDGSTLMEIDGDKGKQGGPTYYIDTNALRVPRENMEAISPLKNGMVEDWDSFQAILDHTYKMHVKSEASLHPVLMSEAPWNTRAKREKLTELMFEHYNIPAFFLCKTAVLTAFIHHLLH

SEQ ID NO: 92586 - protein, 268 aa, Homo sapiens
MLAKISTTWKLFLKLLGPEILLSSLKSRHSFSHSPSHLGLMHRHEHLLRKTTKNFKTATTTLQSTLLLLLLVPLIKPAPPTQQDSRIIYDYGTDNFEESIFSQDYEDKYLDGKNIKEKETVIIPNEKSLQLQKDEAITPLPPKKENDEMPTCLLCVCLSGSVYCEEVDIDAVPPLPKESAYLYARFNKIKKLTAKDFADIPNLRRLDFTGNLIEDIEDGTFSKLSLLEELSLAENQLLKLPVLPPKLTLFNAKYNKIKSRGIKANAFK

SEQ ID NO: 92587 - protein, 1121 aa, Homo sapiens
MLQQVPENINFPAEEEKILEFWTEFNCFQECLKQSKHKPKFTFYDGPPFATGLPHYGHILAGTIKDIVTRYAHQSGFHVDRRFGWDCHGLPVEYEIDKTLGIRGPEDVAKMGITEYNNQCRAIVMRYSAEWKSTVSRLGRWIDFDNDYKTLYPQFMESVWWVFKQLYDKGLVYRGVKVMPFSTACNTPLSNFESHQNYKDVQDPSVFVTFPLEEDETVSLVAWTTTPWTLPSNLAVCVNPEMQYVKIKDVARGRLLILMEARLSALYKLESDYEILERFPGAYLKGKKYRPLFDYFLKCKENGAFTVLVDNYVKEEEGTGVVHQAPYFGAEDYRVCMDFNIIRKDSLPVCPVDASGCFTTEVTDFAGQYVKDADKSIIRTLKEQGRLLVATTFTHSYPFCWRSDTPLIYKAVPSWFVRVENMVDQLLRNNDLCYWVPELVREKRFGNWLKDARDWTISRNRYWGTPIPLWVSDDFEEVVCIGSVAELEELSGAKISDLHRESVDHLTIPSRCGKGSLHRISEVFDCWFESGSMPYAQVHYPFENKREFEDAFPADFIAEGIDQTRGWFYTLLVLATALFGQPPFKNVIVNGLVLASDGQKMSKRKKNYPDPVSIIQKYGADALRLYLINSPVVRAENLRFKEEGVRDVLKDVLLPWYNAYRFLIQNVLRLQKEEEIEFLYNENTVRESPNITDRWILSFMQSLIGFFETEMAAYRLYTVVPRLVKFVDILTNWYVRMNRRRLKGENGMEDCVMALETLFSVLLSLCRLMAPYTPFLTELMYQNLKVLIDPVSVQDKDTLSIHYLMLPRVREELIDKKTESAVSQMQSVIELGRVIRDRKTIPIKYPLKEIVVIHQDPEALKDIKSLEKYIIEELNVRKVTLSTDKNKYGIRLRAEPDHMVLGKRLKGAFKAVMTSIKQLSSEELEQFQKTGTIVVEGHELHDEDIRLMYTFDQATGGTAQFEAHSDAQALVLLDVTPDQSMVDEGMAREVINRIQKLRKKCNLVPTDEITVYYKAKSEGTYLNSVIESHTEFIFTTIKAPLKPYPVSPSDKVLIQEKTQLKGSELEITLTRGSSLPGPACAYVNLNICANGSEQGEMQWIIPEIYHFWKPRWSIAPGKSKR

SEQ ID NO: 92588 - protein, 1278 aa, Homo sapiens
MAEAASPHLSLPSGLLELCALLGAPRDSLRSLEQVAYKKGVKHLSALLDPEVLSIFVPPFISKEDSQMAGANCGTLGKTRMRSLRKKREKPRPEQWKGLPGPPRAPEPEDVAVPGGVDLLTLPQLCFPGGVCVATEPKEDCVHFLVLTDVCGNRTYGVVAQYYRPLHDEYCFYNGKTHRECPGCFVPFAVCVVSRFPYYNSLKDCLSCLLALLKPCKDFEVDSHIKDFAAKLSLIPSPPPGPLHLVFNMKSLQIVLPARADPESPILDLDLHLPLLCFRPEKVLQILTCILTEQRIVFFSSDWALLTLVTECFMAYLYPLQWQHPFVPILSDQMLDFVMAPTSFLMGCHLDHFEEVSKEADGLVLINIDHGSITYSKSTDDNVDIPDVPLLAAQTFIQRVQSLQLHHELHAAHLLSSTDLKEGRAHRRSWQQKLNCQIQQTTLQLLVSIFRDVKNHLNYEHRVFNSEEFLKTRAPGDHQFYKQVLDTYMFHSFLKARLNRRMDAFAQMDLDTQSEEDRINGMLLSPRRPTVEKRASRKSSHLHVTHRRMVVSMPNLQDIAMPELAPRNSSLRLTDTAGCRGSSAVLNVTPKSPYTFKIPEIHFPLESKCVQAYHAHFVSMLSEAMCFLAPDNSLLLARYLYLRGLVYLMQGQLLNALLDFQNLYKTDIRIFPTDLVKRTVESMSAPEWEGAEQAPELMRLISEILDKPHEASKLDDHVKKFKLPKKHMQLGDFMKRVQESGIVKDASIIHRLFEALTVGQEKQIDPETFKDFYNCWKETEAEAQEVSLPWLVMEHLDKNECVCKLSSSVKTNLGVGKIAMTQKRLFLLTEGRPGYLEISTFRNIEEVRRTTTTFLLRRIPTLKIRVASKKEVFEANLKTECDLWHLMVKEMWAGKKLADDHKDPHYVQQALTNVLLMDAVVGTLQSPGAIYAASKLSYFDKMSNEMPMTLPETTLETLKHKINPSAGEAFPQAVDVLLYTPGHLDPAEKVEDAHPKLWCALSEGKVTVFNASSWTIHQHSFKVGTAKVNCMVMADQNQVWVGSEDSVIYIINVHSMSCNKQLTAHCSSVTDLIVQDGQEAPSNVYSCSMDGMVLVWNVSTLQVTSRFQLPRGGLTSIRLHGGRLWCCTGNSIMVMKMNGSLHQELKIEENFKDTSTSFLAFQLLPEEEQLWAACAGRSEVYIWSLKDLAQPPQRVPLEDCSEINCMIRVKKQVWVGSRGLGQGTPKGKIYVIDAERKTVEKELVAHMDTVRTLCSAEDRYVLSGSGREEGKVAIWKGE

SEQ ID NO: 92589 - protein, 180 aa, Homo sapiens
  MOD_RES (1)..(1): Any amino acid
XNFQPKMGELYMLLAAELSSCSAFFVAVALTNLEDIENAKRAYAEAVHLDKCNPLVNLNYAVLLYNQGEKKNALAQYQEMEKKVSLLKDNSSLEFDSEMVEMAQKLGAALQVGEALVWTKPVKDPKSKHQTTSTSKPASFQQPLGSNQALGQAMSSAAAYRTLPSGAGGTSQFTKPPSLP

SEQ ID NO: 92590 - protein, 100 aa, Homo sapiens
  MOD_RES (1)..(1): Any amino acid
XCYERAGQHGKAEEILRQELEKKETPSLYCLLGDVLGDHSCYDKAWELSRYRSARAQRSKALLHLRNKEFQECVECFERSVKINPMQGSGRPEEREKIGE

SEQ ID NO: 92591 - protein, 23 aa, Homo sapiens
MSYFGEHFWGEKNHGFEVLYHSV

SEQ ID NO: 92592 - protein, 48 aa, Homo sapiens
MKGSRIELGDVTPHNIKQLKRLNQVIFPVSYNDKFYKDVLEPISMILL

SEQ ID NO: 92593 - protein, 168 aa, Homo sapiens
  MOD_RES (1)..(1): Any amino acid
XMTVFLHQSWRDSRLSYNHTNETLGLDSRFVDKLWLPDTFIVNAKSAWFHDVTVENKLIRLQPDGVILYSIRITSTVACDMDLAKYPMDEQECMLDLESYGYSSEDIVYYWSESQEHIHGLDKLQLAQFTITSYRFTTELMNFNWPVPTAQPALPPAEEPRRVHHPIL

SEQ ID NO: 92594 - protein, 261 aa, Homo sapiens
MASPRTRKVLKEVRVQDENNVCFECGAFNPQWVSVTYGIWICLECSGRHRGLGVHLSFVRSVTMDKWKDIELEKMKAGGNAKFREFLESQEDYDPCWSLQEKYNSRAAALFRDKVVALAEGREWSLESSPAQNWTPPQPRTLPSMVHRVSGQPQSVTASSDKAFEDWLNDDLGSYQGAQGNRYVGFGNTPPPQKKEDDFLNNAMSSLYSGWSSFTTGASRFASAAKEGATKFGSQASQKASELGHSLNENVLKPAQEKVKE

SEQ ID NO: 92595 - protein, 72 aa, Homo sapiens
MKVKIKCWNGVATWLWVANDENCGICRMAFNGCCPDCPLHGESISRCLGWCPQPVPVLGGRAHPQARCPATT

SEQ ID NO: 92596 - protein, 54 aa, Homo sapiens
MGITLHLFLTNISILLLWKMICLYYVIKIRSLFHIVPLTGQISQTRKWKLLWTL

SEQ ID NO: 92597 - protein, 298 aa, Homo sapiens
MWSWKCLLFWAVLVTATLCTARPSPTLPEQAQPWGAPVEVESFLVHPGDLLQLRCRLRDDVQSINWLRDGVQLAESNRTRITGEEVEVQDSVPADSGLYACVTSSPSGSDTTYFSVNVSDALPSSEDDDDDDDSSSEEKETDNTKPNRMPVAPYWTSPEKMEKKLHAVPAAKTVKFKCPSSGTPNPTLRWLKNGKEFKPDHRIGGYKVRYATWSIIMDSVVPSDKGNYTCIVENEYGSINHTYQLDVVERSPHRPILQAGLPANKTVALGSNVEFMCKVYSDPQPHIQWLKHIEVNGS

SEQ ID NO: 92598 - protein, 226 aa, Homo sapiens
MPVEEFVAGWISGALGLVLGHPFDTVKVRLQTQTTYRGIVDCMVKIYRHESAYCLAPFDLIKVRLQNQTEPRAQPGSPPPRYQGPVHCAASIFREEGPRGLFRGAWALTLRDTPTVGIYFITYEGLCRQYTPEGQNPSSATVLVAGGFAGIASWVAATPLDMIKSRMQMDGLRRRVYQGMLDCMVSSIRQEGLGVFFRGVTINSARAFPVNAVTFLSYEYLLRWWG

SEQ ID NO: 92599 - protein, 51 aa, Homo sapiens
MVMIFTLVTAVQEKLNEIVDQIKTRREEEKKQKEKEAEEAEKQLFHGTPVT

SEQ ID NO: 92600 - protein, 163 aa, Homo sapiens
MNRKDFVVLPWGKPGNSVKLKYRNAQELRMEKVQLEFENQEMEKKLQEFRSTRNKEKEDRESSEYYWKSGKVGKLVNQSYMMSQNKGNVVKFSAGKVKLKLLKEQIQEPVKPTVNYKMANSSECEKPKINGKVCGQCENKAALLVCLECGEDYCSGCFAKVHQ

SEQ ID NO: 92601 - protein, 206 aa, Homo sapiens
  MOD_RES (1)..(1): Any amino acid
XSLLRRVSVTAVAALSGRPLGTRLGFGGFLTRGFPKAAAPVRHSGDHGKRLFVIRPSRFYDRRFLKLLALYEQSRGLENGRLSGPSATRFYIALTGIPVAIFITLVNVFIGQAELAEIPEGYVPEHWEYYKHPISRWIARNFYDSPEKIYERTMAVLQIEAEKAELRVKELEVRKLMHVRGDGPWYYYETIDKELIDHSPKATPDN

SEQ ID NO: 92602 - protein, 123 aa, Homo sapiens
MGRKKIQITRIMDERNRQVTFTKRKFGLMKKAYELSVLCDCEIALIIFNSTNKLFQYASTDMDKVLLKYTEYNEPHESRTNSDIVETLRKKGLNGCDSPDPDADDSVGHSPESEDKYRKINED

SEQ ID NO: 92603 - protein, 304 aa, Homo sapiens
MLQTLYDYFWWERLWLPVNLTWADLEDRDGRVYAKASDLYITLPLALLFLIVRYFFELYVATPLAALLNIKEKTRLRAPPNATLEHFYLTSGKQPKQVEVELLSRQSGLSGRQVERWFRRRRNQDRPSLLKKFREASWRFTFYLIAFIAGMAVIVDKPWFYDMKKVWEGYPIQSTIPSQYWYYMIELSFYWSLLFSIASDVKRKDFKEQIIHHVATIILISFSWFANYIRAGTLIMALHDSSDYLLESAKMFNYAGWKNTCNNIFIVFAIVFIITRLVILPFWILHCTLVYPLELYPAFFGYYF

SEQ ID NO: 92604 - protein, 376 aa, Homo sapiens
MDSPGYNCFVDKDKMDAAIQDLGPKELSCTELQELKQLARQGYWAQSHALRGKVYQRLIRDIPCRTVTPDASVYSDIVGKIVGKHSSSCLPLPEFVDNTQVPSYCLNARGEGAVRKILLCLANQFPDISFCPALPAVVALLLHYSIDEAECFEKACRILACNDPGRRLIDQSFLAFESSCMTFGDLVNKYCQAAHKLMVAVSEDVLQVYADWQRWLFGELPLCYFARVFDVFLVEGYKVLYRVALAILKFFHKVRAGQPLESDSVKQDIRTFVRDIAKTVSPEKLLEKAFAIRLFSRKEIQLLQMANEKALKQKGITVKQKSPGRCLWHSQERYRHCGHVCHAAGADHEVHHPSGHGWHHRHLRPGGGSPHRQLPE

SEQ ID NO: 92605 - protein, 155 aa, Homo sapiens
MAVAAVKWVMSKRTILKHLFPVQNGALYCVCHKSTYSPLPDDYNCNVELALTSDGRTIVCYHPSVDIPYEHTKPIPRPDPVHNNEETHDQVLKTRLEEKVEHLEEGPMIEQLSKMFFTTKHRWYPHGRGKVSLTVLRRLILNSWTQVILLPQLGL

SEQ ID NO: 92606 - protein, 198 aa, Homo sapiens
MVFLQFFPGHESRATEALCWAEGQRLFSAGLNGEIMEYDLQALNIKYAMDAFGGPIWSMAASPSGSQLLVGCEDGSVKLFQITPDKIQFERNFDRQKSRILSLSWHPSGTHIAAGSIDYISVFDVKSGSAVHKMIVDRQYMGVSKRKCIVWGVAFLSDGTIISVDSAGKVQFWDSATGTLVKSHLIANADVQSIAVAD

SEQ ID NO: 92607 - protein, 132 aa, Homo sapiens
MSAPFEERSGVVPCGTPWGQWYQTLEEVFIEVQVPPGTRAQDIQCGLQSRHVALSVGGREILKGKLFDSTIADEGTWTLESEYAADPWVQDQMQRKLTLERFQKENPGFDFSGAEISGNYTKGGPDFSNLEK

SEQ ID NO: 92608 - protein, 111 aa, Homo sapiens
MKRLDVNAAGIWEPKKGDVLCSRHFKKTDFDRSAPNIKLKPGVIPSIFDSPYHLQGKREKLHCRKNFTLKTVPATNYNHHLVGASSCIEEFQSQFIFVSKLLAELMLILLR

SEQ ID NO: 92609 - protein, 858 aa, Homo sapiens
MGDHLDLLLGVVLMAGPVFGIPSCSFDGRIAFYRFCNLTQVPQVLNTTERLLLSFNYIRTVTASSFPFLEQLQLLELGSQYTPLTIDKEAFRNLPNLRILDLGSSKIYFLHPDAFQGLFHLFELRLYFCGLSDAVLKDGYFRNLKALTRLDLSKNQIRSLYLHPSFGKLNSLKSIDFSSNQIFLVCEHELEPLQGKTLSFFSLAANSLYSRVSVDWGKCMNPFRNMVLEILDVSGNGWTVDITGNFSNAISKSQAFSLILAHHIMGAGFGFHNIKDPDQNTFAGLARSSVRHLDLSHGFVFSLNSRVFETLKDLKVLNLAYNKINKIADEAFYGLDNLQVLNLSYNLLGELYSSNFYGLPKVAYIDLQKNHIAIIQDQTFKFLEKLQTLDLRDNALTTIHFIPSIPDIFLSGNKLVTLPKINLTANLIHLSENRLENLDILYFLLRVPHLQILILNQNRFSSCSGDQTPSENPSLEQLFLGENMLQLAWETELCWDVFEGLSHLQVLYLNHNYLNSLPPGVFSHLTALRGLSLNSNRLTVLSHNDLPANLEILDISRNQLLAPNPDVFVSLSVLDITHNKFICECELSTFINWLNHTNVTIAGPPADIYCVYPDSFSGVSLFSLSTEGCDEEEVLKSLKFSLFIVCTVTLTLFLMTILTVTKFRGFCFICYKTAQRLVFKDHPQGTEPDMYKYDAYLCFSSKDFTWVQNALLKHLDTQYSDQNRFNLCFEERDFVPGENRIANIQDAIWNSRKIVCLVSRHFLRDGWCLEAFSYAQGRCLSDLNSALIMVVVGSLSQYQLMKHQSIRGFVQKQQYLRWPEDLQDVGWFLHKLSQQILKKEKEKKKDNNIPLQTVATIS

SEQ ID NO: 92610 - protein, 361 aa, Homo sapiens
MALSAQQIPRWFNSVKLRSLINAAQLTKRFTRPARTLLHGFSAQPQISSDNCFLQWGFKTYRTSSLWNSSQSTSSSSQENNSAQSSLLPSMNEQSQKTQNISSFDSELFLEELDELPPLSPMQPISEEEAIQIIADPPLPPASFTLRDYVDHSETLQKLVLLGVDLSKIEKHPEAANLLLRLDFEKDIKQMLLFLKDVGIEDNQLGAFLTKNHAIFSEDLENLKTRVAYLHSKNFSKADVAQMVRKAPFLLNFSVERLDNRLGFFQKELELSVKKTRDLVVRLPRLLTGSLEPVKENMKVYRLELGFKHNEIQHMITRIPKMLTANKMKLTETFDFVHNVMSIPHHIIVKFPQFLHRKYRI

SEQ ID NO: 92611 - protein, 867 aa, Homo sapiens
MAGRVPSLLVLLVFPSSCLAFRSPLSVFKRFKETTRPFSNECLGTTRPVVPIDSSDFALDIRMPGVTPKQSDTYFCMSMRIPVDEEAFVIDFKPRASMDTVHHMLLFGCNMPSSTGSYWFCDEGTCTDKANILYAWARNAPPTRLPKGVGFRVGGETGSKYFVLQVHYGDISAFRDNNKDCSGVSLHLTRLPQPLIAGMYLMMSVDTVIPAGEKVVNSDISCHYKNYPMHVFAYRVHTHHLGKVVSGYRVRNGQWTLIGRQSPQLPQAFYPVGHPVDVSFGDLLAARCVFTGEGRTEATHIGGTSSDEMCNLYIMYYMEAKHAVSFMTCTQNVAPDMFRTIPPEANIPIPVKSDMVMMHEHHKETEYKDKIPLLQQPKREEEEVLDQDFHMEEALDWPGVYLLPGQVSGVALDPKNNLVIFHRGDHVWDGNSFDSKFVYQQIGLGPIEEDTILVIDPNNAAVLQSSGKNLFYLPHGLSIDKDGNYWVTDVALHQVFKLDPNNKEGPVLILGRSMQPGSDQNHFCQPTDVAVDPGTGAIYVSDGYCNSRIVQFSPSGKFITQWGEESSGSSPLPGQFTVPHSLALVPLLGQLCVADRENGRIQCFKTDTKEFVREIKHSSFGRNVFAISYIPGLLFAVNGKPHFGDQEPVQGFVMNFSNGEIIDIFKPVRKHFDMPHDIVASEDGTVYIGDAHTNTVWKFTLTEKLEHRSVKKAGIEVQEIKEAEAVVETKMENKPTSSELQKMQEKQKLIKEPGSGVPVVLITTLLVIPVVVLLAIAIFIRWKKSRAFGADSEHKLETSSGRVLGRFRGKGSGGLNLGNFFASRKGYSRKGFDRLSTEGSDQEKEDDGSESEEEYSAPLPALAPSSS

SEQ ID NO: 92612 - protein, 195 aa, Homo sapiens
SSSDAEELERCREAAMPAWGLEQRPHVAGKPRAGAANSQLSTSQPSLSFITISEAAKEPAKAKVQKVALEDDGFRLFFTSVPGGREKEESPQPRRKRQPSSSSSEDSDEEWRRCREAAVSASDILQESAIHSPGTVEKEAKKKRKLKKKAKKVASVDSAVAATTPTSMATVQKQKSGELNGDQVSLGTKKKKKAK

SEQ ID NO: 92613 - protein, 97 aa, Homo sapiens
  MOD_RES (1)..(1): Any amino acid
XVTTPELLSPVFEELSPVLEAVLAQGHPGVVIALVGACRRVGAYQAKVLQLLLEAFHCAEPSSRQVACVPLFATLMAYEVYYGLTEEEGAVPAEHQG

SEQ ID NO: 92614 - protein, 123 aa, Homo sapiens
MLTLASKLKRDDGLKGSRTAATASDSTRRVSVRDKLLVKEVAELEANLPCTCKVHFPDPNKLHCFQLTVTPDEGYYQGGKFQFETEVPDAYNMVPPKVKCLTKIWHPNITETGEICLRMSFGD

SEQ ID NO: 92615 - protein, 276 aa, Homo sapiens
MAWWKSWIEQEGVTVKSSSHFNPDPDAETLYKAMKGIGVGSQLLSHQAAAFAFPSSALTSVSPWGQQGHLCCNPAGTNEQAIIDVLTKRSNTQRQQIAKSFKAQFGKDLTETLKSELSGKFERLIVALMYPPYRYEAKELHDAMKGSRDDVSSFVDPGLALQDAQDLYAAGEKIRGTDEMKFITILCTRSATHLLRVKCTQNLHSYFAERLYYAMKGAGTRDGTLIRNIVSRSEIDLNLIKCHFKKMYGKTLSSMIMEDTSGDYKNALLSLVGSDP

SEQ ID NO: 92616 - protein, 123 aa, Homo sapiens
MQQSDLFKAEYVLIVDSEGEDEAASRKVEQGPPGGIGTAAVRPKSLAISSSLVSDVVRPKTQGTDLKTSSHPEMLHGMAPQQKHGQLTSSPTTSEQLACKPPAFSFVSPTNPNTPPDPVNLEG

SEQ ID NO: 92617 - protein, 247 aa, Homo sapiens
MQSNKTFNLEKQNHTPRKHHQHHHQQQHHQQQQQQPPPPPIPANGQQASSQNEGLTIDLKNFRKPGEKTFTQRSRLFVGNLPPDITEEEMRKLFEKYGKAGEVFIHKDKGFGFIRLETRTLAEIAKVELDNMPLRGKQLRVRFACHSASLTVRNLPQEREQPPRFAQPGSFEYEYAMRWKALIEMEKQQQDQVDRNIKEAREKLEMEMEAARHEHQVMLMRQDLMRRQEELRRMEELHNQEVQKRKQ

SEQ ID NO: 92618 - protein, 94 aa, Homo sapiens
MYRNEFTAWYRRMSVVYGIGTWSVLGSLLYYSRTMAKSSDQKDGSASEVPSELSERPKGFYVETVVTYKEDFVPNTEKILNYWKSWTGGPGTEP

SEQ ID NO: 92619 - protein, 157 aa, Homo sapiens
MFWKFDLHTSSHLDTLLEREDLSLPELLDEEDVLQECKVVNRKLLDFLLQPPHLQAMVAWVTQEPPDSGEERLRYKYPSVACEILTSDVPQINDALGADESLLNRLYGFLQSTGSLNPLLASFFSKVMGILINRKTDQLVSFLRKKDDFVDLLLQHI

SEQ ID NO: 92620 - protein, 109 aa, Homo sapiens
QVLHEDETTNRMHESLMLFDSICNNKFFIDTSIILFLNKKDLFGEKIKKSPLTICFPEYTGPNTYEDAAAYIQAQFESKNRSPNKEIYCHMTCATDTNNIQTASRTLCC

SEQ ID NO: 92621 - protein, 181 aa, Homo sapiens
MESRGPLATSRLLLLLLLLLLRHTRQGWALRPVLPTQSAHDPPAVHLSNGPGQEPIAVMTFDLTKITKTSSSFEVRTWDPEGVIFYGDTNPKDDWFMLGLRDGRPEIQLHNHWAQLTVGAAPETGLWAPDQQTPSHHEDCAWGAALPRFQPSVAAGSCPGWLPAPGFLAGQTGRDLSICPH

SEQ ID NO: 92622 - protein, 118 aa, Homo sapiens
MAPKRAKRRTVEGGSSSVFSMFDQTQIQEFKEAFTVIDQNRDGIIDKEDLRDTFAAMGRLNVKNEELDAMMKEASGPINFTVFLTMFGEKLKGADPEDVITGAFKVLDPEGKGTIKKK

SEQ ID NO: 92623 - protein, 72 aa, Homo sapiens
  MOD_RES (1)..(1): Any amino acid
XQDVSLHSRRLHWETPLHFDNSTYISTHYSQVLWDYLQGKLPVSAKADAQLARLAALQHLSKANRNTPSGTC

SEQ ID NO: 92624 - protein, 57 aa, Homo sapiens
MNMCSAGVARKAAEEVTLQTGIKRFVAGALGPTNKTLSVSPSVERPDYRNINLPVGS

SEQ ID NO: 92625 - protein, 74 aa, Homo sapiens
MTTFERKLQDQDKKSQEVSSTSNQENENGSGSEEVCYTVINHIPHQRSSLSSNDDGYENIDSLTRKVRQFRERS

SEQ ID NO: 92626 - protein, 53 aa, Homo sapiens
MLRNLLEDDEIPLYLKGGVADALLYRATMILTVGGTAYAIYELAVASFPKKQE

SEQ ID NO: 92627 - protein, 215 aa, Homo sapiens
MLFALNIMNSQEGGPSSQRQVQNGPSPDEMDIQRRQVMEQHQQQRQESLERRTSATGPILPPGHPSSAASAPVSCSGPPPPPPPPVPPPPTGATPPPPPPLPAGGAQGSSHDESSMSGLAAAIAGAKLRRVQRPEDASGGSSPSGTSKSDANRASSGGGGGGLMEEMNKLLAKRRKAASQSDKPAEKKEDESQMEDPSTSPSPGTRAASQPPNSS

SEQ ID NO: 92628 - protein, 903 aa, Homo sapiens
MNITHSQCQMLPYHATLTPLLSVVRNMEMEKFLKFFTYLHRLSCYQHIMLFGCTLAFPECIIDGDDSHGLLPCRSFCEAAKEGCESVLGMVNYSWPDFLRCSQFRNQTESSNVSRICFSPQQENGKQLLCGRGENFLCASGICIPGKLQCNGYNDCDDWSDEAHCNCSENLFHCHTGKCLNYSLVCDGYDDCGDLSDEQNCDCNPTTEHRCGDGRCIAMEWVCDGDHDCVDKSDEVNCSCHSQGLVECRNGQCIPSTFQCDGDEDCKDGSDEENCSVIQTSCQEGDQRCLYNPCLDSCGGSSLCDPNNSLNNCSQCEPITLELCMNLPYNSTSYPNYFGHRTQKEASISWESSLFPALVQTNCYKYLMFFSCTILVPKCDVNTGEHIPPCRALCEHSKERCESVLGIVGLQWPEDTDCSQFPEENSDNQTCLMPDEYVEECSPSHFKCRSGQCVLASRRCDGQADCDDDSDEENCGCKERDLWECPSNKQCLKHTVICDGFPDCPDYMDEKNCSFCQDDELECANHACVSRDLWCDGEADCSDSSDEWDCVTLSINVNSSSFLMVHRAATEHHVCADGWQEILSQLACKQMGLGEPSVTKLIQEQEKEPRWLTLHSNWESLNGTTLHELLVNGQSCESRSKISLLCTKQDCGRRPAARMNKRILGGRTSRPGRWPWQCSLQSEPSGHICGCVLIAKKWVLTVAHCFEGRENAAVWKVVLGINNLDHPSVFMQTRFVKTIILHPRYSRAVVDYDISIVELSEDISETGYVRPVCLPNPEQWLEPDTYCYITGWGHMGNKMPFKLQEGEVRIISLEHCQSYFDMKTITTRMICAGYESGTVDSCMGDSGGPLVCEKPGGRWTLFGLTSWGSVCFSKVLGPGVYSNVSYFVEWIKRQIYIQTFLLN

SEQ ID NO: 92629 - protein, 612 aa, Homo sapiens
  MOD_RES (1)..(1): Any amino acid
XMKFHSFSTNMAFNILNDTTATVEYPFRVGELEYAVIDLNPRPLEPIILIGRSGTGKTTCCLYRLWKKFHVYWEKAEQAGSPLLAKQVWLKRRLEVEPGKESPGGEEEEEEEDEEEEDSIEVETVESIDEQEYEACAGGAGVEPAGDGQAAEVCAPEHPHQLEHLHQIFVTKNHVLCQEVQRNFIELSKSTKATSHYKPLDPNIHKLQDLRDENFPLFVTSKQLLLLLDASLPKPFFLRNEDGSLKRTIIGWSAQEESTIPSWQEDEEEAEVDGDYSEEDKAVEMRTGDSDPRVYVTFEVFKNEIWPKMTKGRTAYNPALIWKEIKSFLKGSFEALSCPHGRLTEEVYKKLGRKRCPNFKEDRSEIYSLFSLYQQIRSQKGYFDEEDVLYNISRRLSKLRVLPWSIHELYGDEIQDFTQAELALLMKCINDPNSMFLTGDTAQSIMKGVAFRFSDLRSLFHYASRNTIDKQCAVRKPKKIHQLYQNYRSHSGILNLASGVVDLLQFYFPESFDRLPRDSGLFDGPKPTVLESCSVSDLAILLRGNKRKTQPIEFGAHQVILVANETAKEKIPEELGLALVLTIYEAKGLEFDDVLLYNFFTDSEGCPSWSKL

SEQ ID NO: 92630 - protein, 271 aa, Homo sapiens
MSRRVVRQSKFRHVFGQAAKADQAYEDIRVSKVTWDSSFCAVNPKFLAIIVEAGGGGAFIVLPLAKTGRVDKNYPLVTGHTAPVLDIDWCPHNDNVIASASDDTTIMVWQIPDYTPMRNITEPIITLEGHSKRVGILSWHPTARNVLLSAGGDNVIIIWNVGTGEVLLSLDDMHPDVIHSVCWNSNGSLLATTCKDKTLRIIDPRKGQVVAGDSSIRYFEITDEPPFVHYLNTFSSKEPQRGMGFMPKRGLDVSKCEIARFYKLHERKCEP

SEQ ID NO: 92631 - protein, 160 aa, Homo sapiens
MPDLNDCVSINRAVPQMPTGMEKEEESEHHLQRAISAQQVFREKKESMVIPVPEAESNVNYYNRLYKGEFKQPKQFIHIQPFNLDNEQPDYDMDSEDETLLNRLNRKMEIKPLQFEIMIDRLEKASSNQLVTLQEAKLLLNEDDYLIKAVYDYWVRKRKN

SEQ ID NO: 92632 - protein, 827 aa, Homo sapiens
MAFPHLQQPSFLLASLKADSINKPFAQQCQDLVKVIEDFPAKELHTIFPWLVESIFGSLDGVLVGWNLRCLQGRVNPVEYSIVMEFLDPGGPMMKLVYKLQAEDYKFDFPVSYLPGPVKASIQECILPDSPLYHNKVQFTPTGGLGLNLALNPFEYYIFFFALSLITQKPLPVSLHVRTSDCAYFILVDRYLSWFLPTEGSVPPPLSSSPGGTSPSPPPRTPAIPFASYGLHHTSLLKRHISHQTSVNADPASHEIWRSETLLQVFVEMWLHHYSLEMYQKMQSPHAKLEVLHYRLSVSSALYSPAQPSLQALHAYQESFTPTEEHVLVVRLLLKHLHAFANSLKPEQASPSAHSHATSPLEEFKRAAVPRFVQQKLYLFLQHCFGHWPLDASFRAVLEMWLSYLQPWRYAPDKQAPGSDSQPRCVSEKWAPFVQENLLMYTKLFVGFLNRALRTDLVSPKHALMVFRVAKVFAQPNLAEMIQKGEQLFLEPELVIPHRQHRLFTAPTFTGSFLSPWPPAVTDASFKVKSHVYSLEGQDCKYTPMFGPEARTLVLRLAQLITQAKHTAKSISDQCAESPAGHSFLSWLGFSSMDTNGSYTANDLDEMGQDSVRKTDEYLEKALEYLRQIFRLSEAQLRQFTLALGTTQDENGKKQLPDCIVGEDGLILTPLGRYQIINGLRRFEIEYQGDPELQPIRSYEIASLVRTLFRLSSAINHRFAGQMAALCSRDDFLGSFCRYHLTEPGLASRHLLSPVGRRQVAGHTRGPRLSLRFLGSYRTLVSLLLAFFVASLFCVGPLPCTLLLTLGYVLYASAMTLLTERGKLHQP

SEQ ID NO: 92633 - protein, 72 aa, Homo sapiens
MAQAIFEALEGMDNQTVLAVQSLLDGQGAVPDPTGQSVNAPPAIQPLDLHIHHSAPVPTDPDPGAGEHLGER

SEQ ID NO: 92634 - protein, 608 aa, Homo sapiens
EHESEGGRTPLMKAARAGHLCTVQFLISKGANVNRATANNDHTVVSLACAGGHLAVVELLLAHGADPTHRLKDGSTMLIEAAKGGHTNVVSYLLDYPNNVLSVPTTDVSQLPPPSQDQSQVPRVPTHTLAMVVPPQEPDRTSQENSPALLGVQKAVSTRVPTGSNSSSQTTECLTPESCSQTTSNVASQSMPPVYPSVDIDAHTESNHDTALTLACAGGHEELVSVLIARDAKIEHRDKKGFTPLILAATAGHVGVVEILLDKGGDIEAQSERTKDTPLSLACSGGRQEVVDLLLARGANKEHRNVSDYTPLSLAASGGYVNIIKILLNAGAEINSRTGSKLGISPLMLAAMNGHVPAVKLLLDMGSDINAQIETNRNTALTLACFQGRAEVVSLLLDRKANVEHRAKTGLTPLMEAASGGYAEVGRVLLDKGADVNAPPVPSSRDTALTIAADKGHYKFCELLIHRGAHIDVRNKKGNTPLWLASNGGHFDVVQLLVQAGADVDAADNRKITPLMSAFRKGHVKVVQYLVKEVNQFPSDIECMRYIATITDKELLKKCHQCVETIVKAKDQQAAEANKNASILLKELDLEKSREESRKQALAAKREK

SEQ ID NO: 92635 - protein, 73 aa, Homo sapiens
MDPGSRWRNLPSGPSLKHLTDPSYGIPREQQKAALQELTRAHVESFNYAVHEGLGLAVQRRGLPMWPSLVSNS

SEQ ID NO: 92636 - protein, 813 aa, Homo sapiens
MKRAAAKHLIERYYHQLTEGCGNEACTNEFCASCPTFLRMDNNAAAIKALELYKINAKLCDPHPSKKGASSAYLENSKGAPNNSCSEIKMNKKGARIDFKDVTYLTEEKVYEILELCREREDYSPLIRVIGRVFSSAEALVQSFRKVKQHTKEELKSLQAKDEDKDEDEKEKAACSAAAMEEDSEASSSRIGDSSQGDNNLQKLGPDDVSVDIDAIRRVYTRLLSNEKIETAFLNALVYLSPNVECDLTYHNVYSRDPNYLNLFIIVMENRNLHSPEYLEMALPLFCKAMSKLPLAAQGKLIRLWSKYNADQIRRMMETFQQLITYKVISNEFNSRNLVNDDDAIVAASKCLKMVYYANVVGGEVDTNHNEEDDEEPIPESSELTLQELLGEERRNKKGPRVDPLETELGVKTLDCRKPLIPFEEFINEPLNEVLEMDKDYTFFKVETENKFSFMTCPFILNAVTKNLGLYYDNRIRMYSERRITVLYSLVQGQQLNPYLRLKVRRDHIIDDALVRLEMIAMENPADLKKQLYVEFEGEQGVDEGGVSKEFFQLVVEEIFNPDIGMFTYDESTKLFWFNPSSFETEGQFTLIGIVLGLAIYNNCILDVHFPMVVYRKLMGKKGTFRDLGDSHPVLYQSLKDLLEYEGNVEDDMMITFQISQTDLFGNPMMYDLKENGDKIPITNENRKEFVNLYSDYILNKSVEKQFKAFRRGFHMVTNESPLKYLFRPEEIELLICGSRNLDFQALEETTEYDGGYTRDSVLIREFWEIVHSFTDEQKRLFLQFTTGTDRAPVGGLGKLKMIIAKNGPDTER

SEQ ID NO: 92637 - protein, 76 aa, Homo sapiens
  MOD_RES (1)..(1): Any amino acid
XLSDISVVSNYSSEWELDPVKDVLILSALRRMLWAADDFLEDLPFEQIGRWFGGVEAWKRSGNLREEIINCAQGKK

SEQ ID NO: 92638 - protein, 57 aa, Homo sapiens
MIETLARKLNEKSKEQMELHHQNLNLQETLKRVANCSAPCPQDWIWHGENCYLFSSG

SEQ ID NO: 92639 - protein, 155 aa, Homo sapiens
MAAPGPALCLFDVDGTLTAPRQKITKEMDDFLQKLRQKIKIGVVGGSDFEKVQEQLGNDENIRQKFVADLRKEFAGKGLTFSIGGQISFDVFPDGWDKRYCLRHVENDGYKTIYFFGDKTMPGGNDHEIFTDPRTMGYSVTAPEDTRRICELLFS

SEQ ID NO: 92640 - protein, 52 aa, Homo sapiens
MAAVSLRLGDLVWGKLGRYPPWPGKIVNPPKDLKKPRGKKCFFVKFFGTEDQ

SEQ ID NO: 92641 - protein, 205 aa, Homo sapiens
MAEPGHSHHLSARVRGRTERRIPRLWRLLLWAGTAFQVTQGTGPELHACKESEYHYEYTACDSTGSRWRVAVPHTPGLCTSLPDPIKGTECSFSCNAGEFLDMKDQSCKPCAEGRYSLGTGIRFDEWDELPHGFASLSANMELDDSAAESTGNCTSSKWVPRGDYIASNTDECTATLMYAVNLKQSGTVNFEYYYPDSSIIFEFF

SEQ ID NO: 92642 - protein, 37 aa, Homo sapiens
METWSVEQVCSWLVEKNLGELVHRFQGRSKWGRSSCT

SEQ ID NO: 92643 - protein, 135 aa, Homo sapiens
EDYKDRLKSGEHLNPDQLEAVEKYEEVLHNLEFAKELQKTFSGLSLDLLKAQKKAQRREHMLKLEAEKKKLRTILQVQYVLQNLTQEHVQKDFKGGLNGAVYLPSKELDYLIKFSKLTCPERNESLRQTLEGSTV

SEQ ID NO: 92644 - protein, 237 aa, Homo sapiens
MDFLRNLFSQTLSLGSQKERLLDELTLEGVARYMQSERCRRVICLVGAGISTSAGIPDFRSPSTGLYDNLEKYHLPYPEAIFEISYFKKHPEPFFALAKELYPGQFKPTICHYFMRLLKDKGLLLRCYTQNIDTLERIAGLEQEDLVEAHGTFYTSHCVSASCRHEYPLSWMKEKIFSEVTPKCEDCQSLVKPDIVFFGESLPARFFSCMQSDFLKVDLLLVMGTSLQVQPFASLIS

SEQ ID NO: 92645 - protein, 158 aa, Homo sapiens
MTCLSHPLQLEVTADLAERRRIRSAIRELQRQELEREEEALASKRFRAERQDNKENWLHSQQREAEQRAALARLAGQLESMNDVEELTALLRSAGEYEERKLIRAAIRRVRAQEIEAATLAGRLYSGRPNSGSREDSKGLAAHRLEQCEVPEREEQEQ

SEQ ID NO: 92646 - protein, 112 aa, Homo sapiens
MAGFAELGLSSWLVEQCRQLGLKQPTPVQLGCIPAILEGRDCLGCAKTGSGKTAAFVLPILQKLSEDPYGIFCLVLTPTRHGGPGAGALSETTRGHRHAGAPGRSPAQLQHF

SEQ ID NO: 92647 - protein, 62 aa, Homo sapiens
MAAALPRTLGELQLYRILQKANLLSYFDAFIQQGGDDVQQLCEAGEEEFLEIMALVGMASKP

SEQ ID NO: 92648 - protein, 53 aa, Homo sapiens
MLSSLGCLLLCGSITLALGNAQKLPKANKRTELVIQHGWMSLIKMMLNERSQV

SEQ ID NO: 92649 - protein, 81 aa, Homo sapiens
MCTGGCARCLGGTLIPLAFFGFLANILLFFPGGKVIDDNDHLSQEIWFFGGILGSGVLMFTSTIFAVVGFLGAGYSFIISA

SEQ ID NO: 92650 - protein, 59 aa, Homo sapiens
VFSGITLTKFGGIVVLAFAKSQIFQIFYFRMYLAMVLLGATHGLIFLPVLLSYIGPFNS

SEQ ID NO: 92651 - protein, 22 aa, Homo sapiens
  MOD_RES (1)..(1): Any amino acid
XHVTVIGGGLMGAGIAQPQINM

SEQ ID NO: 92652 - protein, 61 aa, Homo sapiens
MIGIFHIFMWYFLLVLYMGQIKGAFGTYEPVTYKTGCTLWGIFFRRQNDLTSVTEEAESTP

SEQ ID NO: 92653 - protein, 117 aa, Homo sapiens
MSKLPRELTRDLERSLPAVASLGSSLSHSQSLSSHLLPPPEKRRAISDVRRTFCLFVTFDLLFISLLWIIELNTNTGIRKNLEQEIIQYNFKTSFFDIFVLAFFRFSGLLLGYAVLR

SEQ ID NO: 92654 - protein, 124 aa, Homo sapiens
MKETIFELEDQVEQHRAVKLHNNQLISELESSVIKLEEQKSDLERQLKTLTKQMKEETEEWRRFQADLQTAVVVANDIKCEAQQELRTVKRKLLEEEEKNARLQKELGDVQGHGRVVTSRAAPP

SEQ ID NO: 92655 - protein, 105 aa, Homo sapiens
MAGEKVEKPDTKEKKPEAKKVDAGGKVKKGNLKAKKPKKGKPHCSRNPVLVRGIGRYSRSAMYSRKAMYKRKYSAAKSKVEKKKKEKVLATVTKPVGGDKNGGTR

SEQ ID NO: 92656 - protein, 152 aa, Homo sapiens
GGSEEPPDRRQSSVDSRQSRSGQGGISTESDCAFEPDYAVPPLPVSEGMQHIRIMEGMSRSLPSSPLLTHQSISVRLQPVKKLTAPLRKAKFVESPRIPESELGSPTLTSAQKLDVDAYCPGDAEQELGPPPSVDEAANTLMTRLGFLLGEK

SEQ ID NO: 92657 - protein, 102 aa, Homo sapiens
MFFFFDSVQVVFTICTAVLATIAFAFLLLPMCQYLTRPCSPQNKISFGCCGRFTAAELLSFSLSVMLVLIWVLTGHWLLMDALAMGLCVAMIAFVRLPSLKV

SEQ ID NO: 92658 - protein, 154 aa, Homo sapiens
MALACIFQCCFCQRGQQSHGSSRTSPELSEECPGEMVKMTKSKTFQAYLPNCHRTYSCIHCRAHLANHDELISKSFQGSQGRAYLFNSVVNVGCGPAEERVLLTGLHAVADIYCENCKTTLGWKYEHAFESSQKYKEGKFIIELAHMIKDNGWE

SEQ ID NO: 92659 - protein, 195 aa, Homo sapiens
MESVTFEDVAVEFIQEWALLDSARRSLCKYRMLDQCRTLASRGTPPCKPSCVSQLGQRAEPKATERGILRATGVAWESQLKPEELPSMQDLLEEASSRDMQMGPGLFLRMQLVPSIEERETPLTREDRPALQEPPWSLGCTGLKAAMQIQRVVIPVPTLGHRNPWVARDSGQKEDAWCRARSGVDLKAGGKEVSF

SEQ ID NO: 92660 - protein, 138 aa, Homo sapiens
MNQPCNSMEPRVMDDDMLKLAVGDQGPQEEAGQLAKQEGILFKDVLSLQLDFRNILRIDNLWQFENLRKLQLDNNIIEKIEGLENLAHLVWLDLSFNNIETIEGLDTLVNLEDLSLFNNRISKIDSLDALVKLQVLSL

SEQ ID NO: 92661 - protein, 51 aa, Homo sapiens
MGVVVGWIGDPGSGTLRIPVPVHKNHQLCTEEIFQGIGTLESQTVQGGTVE

SEQ ID NO: 92662 - protein, 62 aa, Homo sapiens
VSPNSIAATEAEARIFWLGLIICPMIWIVFFFSTLFSLKLKWLACPGDFQKPGLEGLEIHQH

SEQ ID NO: 92663 - protein, 286 aa, Homo sapiens
MSHGPKQPGAAAAPAGGKAPGQHGGFVVTVKQERGEGPRAGEKGSHEEEPGSAAGEETRLAQGQEAEEDSAEWAQGTGHGLRALPERAARADPHAPPGSALSRDHQDAGRRVEQAAANGKAGFPCFKPSGAAPQRYLDEAEREKQQYMKELRAYQQSEAYKMCTEKIQEKKIKKEDSSSGLMNTLLNGHKGGDCDGFSTFDVPIFTEEFLDQNKAREAELRRLRKMNVAFEEQNAVLQRHTQSMSSARERLEQELALEERRTLALQQQLQAVRQALTASFASLPVP

SEQ ID NO: 92664 - protein, 126 aa, Homo sapiens
MALRSAQGDGPTSGHWDGGAEKADFNAKRKKKVAEIHQALNSDPTDVAALRRMAISEGGLLTDEIRRKVWPKLLNVNANDPPPISGKNLRQMSKDYQQVLLDVRRSLRRFPPGHEERRIAKGNRSL

SEQ ID NO: 92665 - protein, 678 aa, Homo sapiens
MSSTRSQNPHGLKQIGLDQIWDDLRAGIQQVYTRQSMAKSRYMELYTHVYNYCTSVHQSNQARGAGVPPSKSKKGQTPGGAQFVGLELYKRLKEFLKNYLTNLLKDGEDLMDESVLKFYTQQWEDYRFSSKVLNGICAYLNRHWVRRECDEGRKGIYEIYSLALVTWRDCLFRPLNKQVTNAVLKLIEKERNGETINTRLISGVVQSYVELGLNEDDAFAKGPTLTVYKESFESQFLADTERFYTRESTEFLQQNPVTEYMKKDPKMYVQTVLDVHKKYNALVMSAFNNDAGFVAALDKACGRFINNNAVTKMAQSSSKSPELLARYCDSLLKKSSKNPEEAELEDTLNQVMVVFKYIEDKDVFQKFYAKMLAKRLVHQNSASDDAEASMISKLKQACGFEYTSKLQRMFQDIGVSKDLNEQFKKHLTNSEPLDLDFSIQVLSSGSWPFQQSCTFALPSELERSYQRFTAFYASRHSGRKLTWLYQLSKGELVTNCFKNRYTLQASTFQMAILLQYNTEDAYTVQQLTDSTQIKMDILAQVLQILLKSKLLVLEDENANVDEVELKPDTLIKLYLGYKNKKLRVNINVPMKTEQKQEQETTHKNIEEDRKLLIQAAIVRIMKMRKVLKHQQLLGEVLTQLSSRFKPRVPVIKKCIDILIEKEYLERVDGEKDTYSYLA

SEQ ID NO: 92666 - protein, 105 aa, Homo sapiens
GLEQLFQELAGEAIFNKFDEDTSGTMNSYELRLALNAAGFHLNNQLTQTLTSRYRDSRLRVDFERFVSCVAHLTCIFCHCSQHLDGGEGVICLTHRQWMEVATFS

SEQ ID NO: 92667 - protein, 114 aa, Homo sapiens
MMLTQAPSSVVRSRNSRNHTVNSGGSCLSASTVAIPAINDSSAAMSACSTISAQPASSMDTQMHSPKKQERVNKRVIWGIEVAEELHWKGWELGKETTRNLVLKNRSLKLQKMK

SEQ ID NO: 92668 - protein, 94 aa, Homo sapiens
MFQVGRSTESPIDFVVTDTISGSQNTDEAQITQSTISRFACRIVCDRNEPYTARIFAAGFDSSKNIFLGEKAAKWKNPDGHMDGLTTNGVLVMH

SEQ ID NO: 92669 - protein, 367 aa, Homo sapiens
MLLSGAPPAGSRPGPRTQGSAGGGPGGSRRGAGGAGAGPGGGGSGGVAKWLREHLGFRGGGGGGGGSKPAPPEPDYRPPAPSPAAPPAPPPDILAAYRLQRERDFEDPYSGGSSGSAALATPVAPGPTPPPRHGSPPHRLIRVETPGPPAPPADERISGPPASSDRLAILEDYADPFDVQETGEGSAGASGAPEKVPENDGYMEPYEAQKMMAEIRGSKETATQPLPLYDTPYEPEEDGATAEGEGAPWPRESRLPEDDERPPEEYDQPWEWKKERISKAFAAQFEGPEKSCLSPGREEKGRLPPRLSAGNPKSAKPLSMEPSSPLGEWTDPALPLENQLVSRGHQPNRRREPAPAVQRGQLPGAQQ

SEQ ID NO: 92670 - protein, 91 aa, Homo sapiens
MGKKTKRTADSSSSEDEEEYVVEKVLDRRVVKGQVEYLLKWKGFSEEHNTWEPEKNLDCPELISEFMKKYKKMKEGENNKPREKSESNKRK

SEQ ID NO: 92671 - protein, 157 aa, Homo sapiens
MELLIMAYALKTACARNIIGVIPYFPYSKQSKMRKRGSIVCKLLASMLAKAGLTHIITMDLHQKEIQGFFSFPVDNLRASPFLLQYIQEEIPNYRNAVIVAKSPDAAKRAQSYAERLRLGLAVIHGEAQCTELDMDDGRHSPPMVKNATVHPGLELP

SEQ ID NO: 92672 - protein, 693 aa, Homo sapiens
  MOD_RES (1)..(1): Any amino acid
XQQSLLQEKLREHLAEKEKLNEERLEQEEKLKAKIRQLTEEKAALEEYITQERNRAKETLEEERKRMQELESLLAQQKKALAKSITQEKNRVKEALEEEQTRVQELEERLARQKEISESNIAYEKRKAKEAMEKEKKKVQDLENRLTKQKEELELKEQKEDVLNNKLSDALAMVEETQKTKATESLKAESLALKLNETLAELETTKTKMIMVEERLILQQKMVKALQDEQESQRHGFEEEIMEYKEQIKQHAQTIVSLEEKLQKVTQHHKKIEGEIATLKDNDPAPKEERPQDPLVAPMTESSAKDMAYEHLIDDLLAAQKEILSQQEVIMKLRKDLTEAHSRMSDLRGELNEKQKMELEQNVVLVQQQSKELSVLKEKMAQMSSLVEKKDRELKALEEALRASQEKHRLQLNTEKEQKPRKKTQTCDTSVQIEPVHTEAFSSSQEQQSFSDLGVRCKGSRHEEVIQRQKKALSELRARIKELEKARSPDHKDHQNESFLDLKNLRMENNVQKILLDAKPDLPTLSRIEILAPQNGLCNARFGSAMEKSGKMDVAEALELSEKLYLDMSKTLGSLMNIKNMSGHVSMKYLSRQEREKVNQLRQRDLDLVFDKITQLKNQLGRKEELLRGYEKDVEQLRRSKVSIEMYQSQVAKLEDDIYKEAEEKALLKEALERMEHQLCQEKRINRAIRQQK

SEQ ID NO: 92673 - protein, 69 aa, Homo sapiens
MKSHRCYDLIPTSSKLVVFDTSLQVKKAFFALVTNGVRAAPLWDSKKQSFVGMLTITDFINILHRYYKS

SEQ ID NO: 92674 - protein, 229 aa, Homo sapiens
SKQAKFAYKDEYEKFKLYLTIILILISFTCRFLLNSRVTDAAFNFLLVWYYCTLTIRESILINNGSRIKGWWVFHHYVSTFLSGVMLTWPDGLMYQKFRNQFLSFSMYQSFVQFLQYYYQSGCLYRLRALGERHTMDLTVEGFQSWMWRGLTFLLPFLFFGHFWQLFNALTLFNLAQDPQCKEWQVSRGPWTGWMGGQAHVQPSPYSSGRCLCAAFPSSSFSSAISSPP

SEQ ID NO: 92675 - protein, 58 aa, Homo sapiens
MGKSCKVVVCGQASVGKTSILEQLLYGNHVVGSEMIETQEDIYVGSIETDRGVREQHR

SEQ ID NO: 92676 - protein, 104 aa, Homo sapiens
MNLQPIFWIGLISSVCCVFAQTDENRCLKANAKSCGECIQAGPNCGWCTNSTFLQEGMPTSARCDDLEALKKKGCPPDDIENPRGSKDIKKNKNVTNRSKGTAE

SEQ ID NO: 92677 - protein, 278 aa, Homo sapiens
MDASSSPWNPTPAPVSSPPLLLPIPAIVFIAVGIYLLLLGLVLLTRNCLLAQGCCADGSSPCRKQGSSGPPDCCWTCAEACNFPLPSPAHFLDACCPQPTRAGFHSGDGEREITRPLQQRVRNDVLWSSGCSALHAIRSRTGHLAAPAAAHSATVPVRASSPTARASTVSASRSSSDEDPGPLPSGERPAPRAHVPSSLKSLSPRHWNHRWPAEHPGLGTGSGSAGPGSLQGRTLGRLDGSSSGGPEKRGASARVPGQRFISLDNQGPPSGFPRKNFL

SEQ ID NO: 92678 - protein, 419 aa, Homo sapiens
MARRPRHSIYSSDEDDEDFEMCDHDYDGLLPKSGKRHLGKTRWTREEDEKLKKLVEQNGTDDWKVIANYLPNRTDVQCQHRWQKVLNPELIKGPWTKEEDQRVIELVQKYGPKRWSVIAKHLKGRIGKQCRERWHNHLNPEVKKTSWTEEEDRIIYQAHKRLGNRWAEIAKLLPGRTDNAIKNHWNSTMRRKVEQEGYLQESSKASQPAVATSFQKNSHLMGFAQAPPTAQLPATGQPTVNNDYSYYHISEAQNVSSHVPYPVALHVNIVNVPQPAAAAIQRHYNDEDPEKEKRIKELELLLMSTENELKGQQTQNHTCSYPGWHSTTIADHTRPHGDSAPVSCLGEHHSTPSLPADPGSLPEESASPARILHHGVISAVLNSLKKQIFHLANITQAKPYSFSKERAMGLNLQENLAQG

SEQ ID NO: 92679 - protein, 69 aa, Homo sapiens
MSLLSLSWLGLRPVAASPWLLLLVVGASWLLARILAWTYAFYHNGRRLRCFPQPRKQNWFLGHLGLEAQ

SEQ ID NO: 92680 - protein, 282 aa, Homo sapiens
MESAIAEGGASRFSASSGGGGSRGAPQHYPKTAGNSEFLGKTPGQNAQKWIPARSTRRDDNSAANNSANEKERHDAIFRKVRGILNKLTPEKFDKLCLELLNVGVESKLILKGVILLIVDKALEEPKYSSLYAQLCLRLAEDAPNFDGPAAEGQPGQKQSTTFRRLLISKLQDEFENRTRNVDVYDKRENPLLPEEEEQRAIAKIKMLGNIKFIGELGKLDLIHESILHKCIKTLLEKKKRVQLKDMGEDLECLCQIMRTVGPRLDHERAKSLMDQYFARMC

SEQ ID NO: 92681 - protein, 77 aa, Homo sapiens
LSFLCRYVPVGLLERLPQRINERPPYYLGRDYLETLMASQKAADWIRIRLLEPVSSPRPRERGVSSPTSRYRPPLSP

SEQ ID NO: 92682 - protein, 131 aa, Homo sapiens
  MOD_RES (1)..(1): Any amino acid
XLEKNVKEVLEDFAEDGEKKIKLLTGKRVQLAEDLTRTQHYTPGHHMAPHPALTLLLPCLGSDIRARLLFVMESLLLSSALTLCARCLSISSFPPASLCPTPDRFLPHLKPDHAFVEIPSLPCLCFASLHQ

SEQ ID NO: 92683 - protein, 760 aa, Homo sapiens
KTDAANRYTAVADKPSKRSNDGKSKKVKNSSPEKHILENKIDATKIHVPMETTGDQGIEGMAYMDENRNITFTCPRTPSELINKSSPLEVLESAACEKLPTPTPQVVKEGDSFPDTLAKNGQEIAPAQISKSLMVDNYTKDGVPGQERPKGPSAVVPSTSTGGVALPITTAIETVNIHGDHSLKNKAELADSMKNEAGIDEGHVIGESESVHSGASKHSVEKVTELAKGHLLPGVPVEDQSLPGEARALEGYADRGNFPAHPVNEEKETKEGSVAVQIPDLLEDKAQKLSFCEDQNAQDRNSKGSDSLNKKVDLTLLSPKSENDKLKEISLACKITELESVSLPTPEIQSDFLHSKVEAPPSEVADTLVIMTASKGVRLPEPKDKILETPQKMTEKSESKTPGEGKKEDKSRMAEPMKGYMRPTKSRGLTPLLPKSTIQEQERHKQLKSAGIARPEEGRPVVSGTGNDITTPPNKELPPSPEKKTKPLATTQPAKTSTSKAKTQPTSLPKQPAPTTIGGLNKKPMSLASGLVPAAPPKRPAVASARPSILPSKDVKPKPIADAKAPEKRASPSKPASAPASRSGSKSTQTVAKTTTAAAVASTGPSSRSPSTLLPKKPTAIKTEGKPAEVKKMTAKSVPADLSRPKSTSTSSMKKTTTLSGTAPAAGVVPSRVKATPMPSRPSTTPFIDKKPTSAKPSSTTPRLSRLATNTSAPDLKNVRSKAKVEKKTEAAATTRKPESNAVTKTAGPIASAQKQPAGK

SEQ ID NO: 92684 - protein, 57 aa, Homo sapiens
MAAIQDGLAKGENDETVSNTLTLTNGLERRTKTYSEDNFEELQYFPNFYALLKSIDS

SEQ ID NO: 92685 - protein, 65 aa, Homo sapiens
RLISRIHKAKHGDQHEGQHYNISPQDLETVFPHGLPPRFVMQVLKTGNGIGGSPEYKLLLAKGWG

SEQ ID NO: 92686 - protein, 44 aa, Homo sapiens
MPTPDATTPQAKGFRRAVSELDAKQAEAIMGHQALGAVPSCEGV

SEQ ID NO: 92687 - protein, 396 aa, Homo sapiens
MSVQVAAPGSAGLGPERLSPEELVRQTRQVVQGLEALRAEHHGLAGHLAEALAGQGPAAGLEMLEEKQQVVSHSLEAIELGLGEAQVLLALSAHVGALEAEKQRLRSQARRLAQENVWLREELEETQRRLRASEESVAQLEEEKRHLEFLGQLRQYDPPAESQQSESPPRRDSLASLFPSEEEERKGPEAAGAAAAQQGGYEIPARLRTLHNLVIQYAGQGRYEVAVPLCRQALEDLERSSGHCHPDVATMLNILALVYRDQNKYKEATDLLHDALQIREQTLGPEHPAVAATLNNLAVLYGKRGRYREAEPLCQRALEIREKVLGADHPDVAKQLNNLALLCQNQGKFEDVERHYARALSIYEALGGPHDPNVAKTKNNLASAYLKQNKYQQAEE

SEQ ID NO: 92688 - protein, 913 aa, Homo sapiens
MVQLRKLLRVLTLMKFPCCVLEVLLCALAAAARGQEMYAPHSIRIEGDVTLGGLFPVHAKGPSGVPCGDIKRENGIHRLEAMLYALDQINSDPNLLPNVTLGARILDTCSRDTYALEQSLTFVQALIQKDTSDVRCTNGEPPVFVKPEKVVGVIGASGSSVSIMVANILRLFQIPQISYASTAPELSDDRRYDFFSRVVPPDSFQAQAMVDIVKALGWNYVSTLASEGSYGEKGVESFTQISKEAGGLCIAQSVRIPQERKDRTIDFDRIIKQLLDTPNSRAVVIFANDEDIKQILAAAKRADQVGHFLWVGSDSWGSKINPLHQHEDIAEGAITIQPKRATVEGFDAYFTSRTLENNRRNVWFAEYWEENFNCKLTISGSKKEDTDRKCTGQERIGKDSNYEQEGKVQFVIDAVYAMAHALHHMNKDLCADYRGVCPEMEQAGGKKLLKYIRNVNFNGSAGTPVMFNKNGDAPGRYDIFQYQTTNTSNPGYRLIGQWTDELQLNIEDMQWGKGVREIPASVCTLPCKPGQRKKTQKGTPCCWTCEPCDGYQYQFDEMTCQHCPYDQRPNENRTGCQDIPIIKLEWHSPWAVIPVFLAMLGIIATIFVMATFIRYNDTPIVRASGRELSYVLLTGIFLCYIITFLMIAKPDVAVCSFRRVFLGLGMCISYAALLTKTNRIYRIFEQGKKSVTAPRLISPTSQLAITSSLISVQLLGVFIWFGVDPPNIIIDYDEHKTMNPEQARGVLKCDITDLQIICSLGYSILLMVTCTVYAIKTRGVPENFNEAKPIGFTMYTTCIVWLAFIPIFFGTAQSAEKLYIQTTTLTISMNLSASVALGMLYMPKVYIIIFHPELNVQKRKRSFKAVVTAATMSSRLSHKPSDRPNGEAKTELCENVDPNNFFFWLYSGTWITL

SEQ ID NO: 92689 - protein, 167 aa, Homo sapiens
MAAGGAAPETPAISPSKRARPAEVGGMQLRFARLSEHATAPTRGSARAAGYDLYSAYDYTIPPMEKAVVKTDIQIALPSGCYGRVAPRSGLAAKHFIDVGAGVIDEDYRGNVGVVLFNFGKEKFEVKKGDRIAQLICERIFYPEIEEVQALDDTERGSGGFGSTGKN

SEQ ID NO: 92690 - protein, 669 aa, Homo sapiens
  MOD_RES (1)..(1): Any amino acid
XFKNQLLADHGHNPLMKKVFDVYLCFLQKHQSETALKNVFTALRSLIYKFPSTFYEGRADMCAALCYEILKCCNSKLSSIRTEASQLLYFLMRNNFDYTGKKSFVRTHLQVIISVSQLIADVVGIGGTRFQQSLSIINNCANSDRLIKHTSFSSDVKDLTKRIRTVLMATAQMKEHENDPEMLVDLQYSLAKSYASTPELRKTWLDSMARIHVKNGDLSEAAMCYVHVTALVAEYLTRKGVFRQGCTAFRVITPNIDEEASMMEDVGMQDVHFNEDVLMELLEQCADGLWKAERYELIADIYKLIIPIYEKRRDFERLAHLYDTLHRAYSKVTEVMHSGRRLLGTYFRVAFFGQQYQFTDSETDVEGFFEDEDGKEYIYKEPKLTPLSEISQRLLKLYSDKFGSENVKMIQDSGKVNPKDLDSKYAYIQVTHVIPFFDEKELQERKTEFERSHNIRRFMFEMPFTQTGKRQGGVEEQCKRRTILTAIHCFPYVKKRIPVMYQHHTDLNPIEVAIDEMSKKVAELRQLCSSAEVDMIKLQLKLQGSVSVQVNAGPLAYARAFLDDTNTKRYPDNKVKLLKEVFRQFVEACGQALAVNERLIKEDQLEYQEEMKANYREMAKELSEIMHEQICPLEEKTSVLPNSLHIFNAISGTPTSTMVHGMTSSSSVV

SEQ ID NO: 92691 - protein, 79 aa, Homo sapiens
  MOD_RES (1)..(1): Any amino acid
XKFYGASVAYENALRVFNIVFTSLFSLECVLKVMAFGILNYFRDAWNIFDFVTVLGSITDILVTEFGAWSRATPPSPRS

SEQ ID NO: 92692 - protein, 144 aa, Homo sapiens
MDVGSKEVLMESPPVLEMSIGAPEAQQRLALSEHLVTTATFSIGSTGLVVYDYQQLLIAYKPAPGTCCYIMKIAPESIPSLEALTRKVHNFQMECSLQAKPAVPTSKLGQAEGRDAGSAPSGGDPAFLGMAVSTLCGEVPLYYI

SEQ ID NO: 92693 - protein, 135 aa, Homo sapiens
MEDFNMESDSFEDFWKGEDLSNYSYSSTLPPFLLDAAPCEPESLEINKYFVVIIYALVFLLSLLGNSLVMLVILYSRVGRSVTDVYLLNLALADLLFALTLPIWAASKVNGWIFGTFLCKVVSLLKEVNFYSGIL

SEQ ID NO: 92694 - protein, 398 aa, Homo sapiens
VIERTFHVDTPEEREEWTEAIQAVADRLQRQEEERMNCSPTSQIDNIGEEEMDASTTHHKRKTMNDFDYLKLLGKGTFGKVILVREKASGKYYAMKILKKEVIIAKDEVAHTLTESRVLKNTRHPFLTSLKYSFQTKDRLCFVMEYVNGGELFFHLSRERVFSEDRTRFYGAEIVSALDYLHSGKIVYRDLKLENLMLDKDGHIKITDFGLCKEGITDAATMKTFCGTPEYLAPEVLEDNDYGRAVDWWGLGVVMYEMMCGRLPFYNQDHEKLFELILMEDIKFPRTLSSDAKSLLSGLLIKDPNKRLGGGPDDAKEIMRHSFFSGVNWQDVYDKKLVPPFKPQVTSETDTRYFDEEFTAQTITITPPEKYDEDGMDCMDNERRPHFPQFSYSASGRE

SEQ ID NO: 92695 - protein, 176 aa, Homo sapiens
VCVDLGDWEATERALGSVGPVDLLVNNAAVALLQPFLEVTKEAFDRSFEVNLRAVIQVSQIVARGLIARGVPGAIVNVSSQCSQRAVTNHSVYCSTKGALDMLTKVMALELGPHKIRVNAVNPTVVMTSMGQATWSDPHKAKTMLNRIPLGKFAGPTDVHNRGAEKTVVYAEISRK

SEQ ID NO: 92696 - protein, 78 aa, Homo sapiens
MSLPSTPDIKIKEEEPVEVDSSPPDSPASSPCSPPLKEKEVTPKPVLISTPTPTIVRPGSLPLHLGYDPLHPTLPSPT

SEQ ID NO: 92697 - protein, 1724 aa, Homo sapiens
MDGPGASAVVVRVGIPDLQQTKCLRLDPAAPVWAAKQRVLCALNHSLQDALNYGLFQPPSRGRAGKFLDEERLLQEYPPNLDTPLPYLEFRYKRRVYAQNLIDDKQFAKLHTKANLKKFMDYVQLHSTDKVARLLDKGLDPNFHDPDSGECPLSLAAQLDNATDLLKVLKNGGAHLDFRTRDGLTAVHCATRQRNAAALTTLLDLGASPDYKDSRGLTPLYHSALGGGDALCCELLLHDHAQLGITDENGWQEIHQACRFGHVQHLEHLLFYGADMGAQNASGNTALHICALYNQESCARVLLFRGANRDVRNYNSQTAFQVAIIAGNFELAEVIKTHKDSDVVPFRETPSYAKRRRLAGPSGLASPRPLQRSASDINLKGEAQPAASPGPSLRSLPHQLLLQRLQEEKDRDRDADQESNISGPLAGRAGQSKIREGAGRPCPAPPAPPAPPPRGPKRKLYSAVPGRKFIAVKAHSPQGEGEIPLHRGEAVKVLSIGEGGFWEGTVKGRTGWFPADCVEEVQMRQHDTRPETREDRTKRLFRHYTVGSYDSLTSHSDYVIDDKVAVLQKRDHEGFGFVLRGAKAETPIEEFTPTPAFPALQYLESVDVEGVAWRAGLRTGDFLIEVNGVNVVKVGHKQVVALIRQGGNRLVMKVVSVTRKPEEDGARRRAPPPPKRAPSTTLTLRSKSMTAELEELASIRRRKGEKLDEMLAAAAEPTLRPDIADADSRAATVKQRPTSRRITPAEISSLFERQGLPGPEKLPGSLRKGIPRTKSVGEDEKLASLLEGRFPRSTSMQDPVREGRGIPPPPQTAPPPPPAPYYFDSGPPPAFSPPPPPGRAYDTVRSSFKPGLEARLGAGAAGLYEPGAALGPLPYPERQKRARSMIILQDSAPESGDAPRPPPAATPPERPKRRPRPPGPDSPYANLGAFSASLFAPSKPQRRKSPLVKQLQVEDAQERAALAVGSPGPGGGSFAREPSPTHRGPRPGGLDYGAGDGPGLAFGGPGPAKDRRLEERRRSTVFLSVGAIEGSAPGADLPSLQPSRSIDERLLGTGPTAGRDLLLPSPVSALKPLVSGPSLGPSGSTFIHPLTGKPLDPSSPLALALAARERALASQAPSRSPTPVHSPDADRPGPLFVDVQARDPERGSLASPAFSPRSPAWIPVPARREAEKVPREERKSPEDKKSMILSVLDTSLQRPAGLIVVHATSNGQEPSRLGGAEEERPGTPELAPAPMQSAAVAEPLPSPRAQPPGGTPADAGPGQGSSEEEPELVFAVNLPPAQLSSSDEETREELARIGLVPPPEEFANGVLLATPLAGPGPSPTTVPSPASGKPSSEPPPAPESAADSGVEEADTRSSSDPHLETTSTISTVSSMSTLSSESGELTDTHTSFADGHTFLLEKPPVPPKPKLKSPLGKGPVTFRDPLLKQSSDSELMAQQHHAASAGLASAAGPARPRYLFQRRSKLWGDPVESRGLPGPEDDKPTVISELSSRLQQLNKDTRSLGEEPVGGLGSLLDPAKKSPIAAARLFSSLGELSSISAQRSPGGPGGGASYSVRPSGRYPVARRAPSPVKPASLERVEGLGAGAGGAGRPFGLTPPTILKSSSLSIPHEPKEVRFVVRSVSARSRSPSPSPLPSPASGPGPGAPGPRRPFQQKPLQLWSKFDVGDWLESIHLGEHRDRFEDHEIEGAHLPALTKDDFVELGVTRVGHRMNIERALRQLDGS

SEQ ID NO: 92698 - protein, 45 aa, Homo sapiens
YSSLMAYKLPVEDVHPLSRAFFKLEAMKQTFNLEEYSLSQATLEQ

SEQ ID NO: 92699 - protein, 112 aa, Homo sapiens
MKEKGLVSIQRLAACHSEVLTGKLHDVCLVVTGEVTNLRSKVSHLAISTLGDLFQALKKNMDQEAEEIARCLLQKMADTNEFIQRAAGQSLRAMVENVTLARSLVVLTSAGV

SEQ ID NO: 92700 - protein, 542 aa, Homo sapiens
MELENIVANTVLLKAREGGGGNRKGKSKKWRQMLQFPHISQCEELRLSLERDYHSLCERQPIGRLLFREFCATRPELSRCVAFLDGVAEYEVTPDDKRKACGRQLTQNFLSHTGPDLIPEVPRQLVTNCTQRLEQGPCKDLFQELTRLTHEYLSVAPFADYLDSIYFNRFLQWKWLERQPVTKNTFRQYRVLGKGGFGEVCACQVRATGKMYACKKLEKKRIKKRKGEAMALNEKQILEKVNSRFVAGFPEARAVFYAAEICCGLEDLHRERIVYRDLKPENILLDDHGHIRISDLGLAVHVPEGQTIKGRVGTVGYMAPEVVKNERYTFSPDWWALGCLLYEMIAGQSPFQQRKKKIKREEVERLVKEVPEEYSERFSPQARSLCSQLLCKDPAERLGCRGGSAREVKEHPLFKKLNFKRLGAGMLEPPFKPDPQAIYCKDVLDIEQFSTVKGVELEPTDQDFYQKFATGSVPIPWQNEMVETECFQELNVFGLDGSVPPDLDWKGQPPAPPKKGLLQRLFSRQDCCGNCSDSEEELPTRL

SEQ ID NO: 92701 - protein, 933 aa, Homo sapiens
MKGKERSPVKAKRSRGGEDSTSRGERSKKLGGSGGSNGSSSGKTDSGGGSRRSLHLDKSSSRGGSREYDTGGGSSSSRLHSYSSPSTKNSSGGGESRSSSRGGGGESRSSGAASSAPGGGDGAEYKTLKISELGSQLSDEAVEDGLFHEFKRFGDVSVKISHLSGSGSGDERVAFVNFRRPEDARAAKHARGRLVLYDRPLKIEAVYVSRRRSRSPLDKDTYPPSASVVGASVGGHRHPPGGGGGQRSLSPGGAALGYRDYRLQQLALGRLPPPPPPPLPRDLERERDYPFYERVRPAYSLEPRVGAGAGAAPFREVDEISPEDDQRANRTLFLGNLDITVTESDLRRAFDRFGVITEVDIKRPSRGQTSTYGFLKFENLDMSHRAKLAMSGKIIIRNPIKIGYGKATPTTRLWVGGLGPWVPLAALAREFDRFGTIRTIDYRKGDSWAYIQYESLDAAHAAWTHMRGFPLGGPDRRLRVDFADTEHRYQQQYLQPLPLTHYELVTDAFGHRAPDPLRGARDRTPPLLYRDRDRDLYPDSDWVPPPPPVRERSTRTAATSVPAYEPLDSLDRRRDGWSLDRDRGDRDLPSSRDQPRKRRLPEESGGRHLDRSPESDRPRKRHCAPSPDRSPELSSSRDRYNSDNDRSSRLLLERPSPIRDRRGSLEKSQGDKRDRKNSASAERDRKHRTTAPTEGKSPLKKEDRSDGSAPSTSTASSKLKSPSQKQDGGTAPVASASPKLCLAWQGMLLLKNSNFPSNMHLLQGDLQVASSLLVEGSTGGKVAQLKITQRLRLDQPKLDEVTRRIKVAGPNGYAILLAVPGSSDSRSSSSSAASDTATSTQRPLRNLVSYLKQKQAAGVISLPVGGNKDKENTGVLHAFPPCEFSQQFLDSPAKALAKSEEDYLVMIIVRGFGFQIGVRYENKKRENLALTLL

SEQ ID NO: 92702 - protein, 340 aa, Homo sapiens
MSILIIEAFYGGSHKQLVDLLQEELGDCVVYTLPAKKWHWRARTSALYFSQTIPISEHYRTLFASSVLNLTELAALRPDLGKLKKILYFHENQLIYPVKKCQERDFQYGYNQILSCLVADVVVFNSVFNMESFLTSMGKFMKLIPDHRPKDLESIIRPKCQVIYFPIRFPDVSREHDKDPESFFKVLMHLKDLGLNFHVSVLGETFTDVPDIFSEAKKALGSSVLHWGYLPSKDDYFQVLCMADVVISTAKHEFFGVAMLEAVYCGCYPLCPKDLVYPEIFPAEYLYSTPEQLSKRLQNFCKRPDIIRKHLYKGEIAPFSWAALHGKFRSLLTTEPREDL

SEQ ID NO: 92703 - protein, 808 aa, Homo sapiens
PHEFQCGNRSCLAAVFVCDGDDDCGDGSDERGCADPACGPREFRCGGDGGGACIPERWVCDRQFDCEDRSDEAAELCGRPGPGATSAPAACATASQFACRSGECVHLGWRCDGDRDCKDKSDEADCPLGTCRGDEFQCGDGTCVLAIKHCNQEQDCPDGSDEAGCLQVPPTFLGNRRRPRGLNECLHNNGGCSHICTDLKIGFECTCPAGFQLLDQKTCGDIDECKDPDACSQICVNYKGYFKCECYPGYEMDLLTKNCKAAAGKSPSLIFTNRHEVRRIDLVKRNYSRLIPMLKNVVALDVEVATNRIYWCDLSYRKIYSAYMDKASDPKEQEVLIDEQLHSPEGLAVDWVHKHIYWTDSGNKTISVATVDGGRRRTLFSRNLSEPRAIAVDPLRGFMYWSDWGDQAKIEKSGLNGVDRQTLVSDNIEWPNGITLDLLSQRLYWVDSKLHQLSSIDFSGGNRKTLISSTDFLSHPFGIAVFEDKVFWTDLENEAIFSANRLNGLEISILAENLNNPHDIVIFHELKQPRAPDACELSVQPNGGCEYLCLPAPQISSHSPKYTCACPDTMWLGPDMKRCYRAPQSTSTTTLASTMTRTVPATTRAPGTTVHRSTYQNHSTETPSLTAAVPSSVSVPRAPSISPSTLSPATSNHSQHYANEDSKMGSTVTAAVIGIIVPIVVIALLCMSGYLIWRNWKRKNTKSMNFDNPVYRKTTEEEDEDELHIGRTAQIGHVYPAAISSFDRPLWAEPCLGETREPEDPAPALKELFVLPGEPRSQLHQLPKNPLSELPVVKSKRVALSLEDDGLP

SEQ ID NO: 92704 - protein, 142 aa, Homo sapiens
MGLLVFVRNLLLALCLFLVLGFLYYSAWKLHLLQWEEDSNSVVLSFDSAGQTLGSEYDRLGFLLNLDSKLPAELATKYANFSEGACKPGYASALMTAIFPRFSKPAPMFLDDSFRKWARIREFVPPFGIKGQETSLLCLQTI

SEQ ID NO: 92705 - protein, 639 aa, Homo sapiens
MVVSEVDIAKADPAAASHPLLLNGDATVAQKNPGSVAENNLCSQYEEKVRPCIDLIDSLRALGVEQDLALPAIAVIGDQSSGKSSVLEALSGVALPRGSGIVTRCPLVLKLKKLVNEDKWRGKVSYQDYEIEISDASEVEKEINKAQNAIAGEGMGISHELITLEISSRDVPDLTLIDLPGITRVAVGNQPADIGYKIKTLIKKYIQRQETISLVVVPSNVDIATTEALSMAQEVDPEGDRTIGILTKPDLVDKGTEDKVVDVVRNLVFHLKKGYMIVKCRGQQEIQDQLSLSEALQREKIFFENHPYFRDLLEEGKATVPCLAEKLTSELITHICKSLPLLENQIKETHQRITEELQKYGVDIPEDENEKMFFLIDKVNAFNQDITALMQGEETVGEEDIRLFTRLRHEFHKWSTIIENNFQEGHKILSRKIQKFENQYRGRELPGFVNYRTFETIVKQQIKALEEPAVDMLHTVTDMVRLAFTDVSIKNFEEFFNLHRTAKMEQIVYCQDQVYRGALQKVREKELEEEKKKKSWDFGAFQSSSATDSSMEEIFQHLMAYHQEASKRISSHIPLIIQFFMLQTYGQQLQKAMLQLLQDKDTYSWLLKERSDTSDKRKFLKERLARLTQARRRLAQFPG

SEQ ID NO: 92706 - protein, 491 aa, Homo sapiens
MSGRGDGGQQQLLHSKFLAGFVCHIEKNESQRGRNCNEKPTNVRKRKFINRDLAHDSEELFQDLSQLQETWLAEAQVPDNDEQFVPDYQAESLAFHGLPLKIKKEPHSPCSEISSACSQEQPFKFSYGEKCLYNVSAYDQKPQVGMRPSNPPTPSSTPVSPLHHASPNSTHTPKPDRAFPAHLPPSQSIPDSSYPMDHRFRRQLSEPCNSFPPLPTMPREGRPMYQRQMSEPNIPFPPQGFKQEYHDPVYEHNTMVGSAASQSFPPPLMIKQEPRDFAYDSEVPSCHSIYMRQEGFLAHPSRTEGCMFEKGPRQFYDDTCVVPEKFDGDIKQEPGMYREGPTYQRRGSLQLWQFLVALLDDPSNSHFIAWTGRGMEFKLIEPEEVARRWGIQKNRPAMNYDKLSRSLRYYYEKGIMQKVAGERYVYKFVCDPEALFSMAFPDNQRPLLKTDMERHINEEDTVPLSHFDESMAYMPEGGCCNPHPYNEGYVY

SEQ ID NO: 92707 - protein, 52 aa, Homo sapiens
MPIVDKLKEALKPGRKDSADDGELGKLLASSAKKVLLQKIEFEPASKSFSYQ

SEQ ID NO: 92708 - protein, 122 aa, Homo sapiens
MKQPIMADGPRCKRRKQANPRRKNVVNYDNVVDTGSETDEEDKLHIAEDDGIANPLDQETSPASVPNHESSPHVSQALLPREEEEDEIREGGVEHPWHNNEILQASVDGPESSLFLCLACLV

SEQ ID NO: 92709 - protein, 147 aa, Homo sapiens
MRMEDEDYNTSISYGDEYPDYLDSIVVLEDLSPLEARVTRIFLVVVYSIVCFLGILGNGLVIIIATFKMKKTVNMVWFLNLAVADFLFNVFLPIHITYAAMDYHWVFGTAMCKISNFLLIHNMFTSVFLLTIISSDRCISVLLPVWS

SEQ ID NO: 92710 - protein, 1879 aa, Homo sapiens
MTTMLQKSDSNASFLRAARAGNLDKVVEYLKGGIDINTCNQNGLNALHLAAKEGHVGLVQELLGRGSSVDSATKKGNTALHIASLAGQAEVVKVLVKEGANINAQSQNGFTPLYMAAQENHIDVVKYLLENGANQSTATEDGFTPLAVALQQGHNQAVAILLENDTKGKVRLPALHIAARKDDTKSAALLLQNDHNADVQSKMMVNRTTESGFTPLHIAAHYGNVNVATLLLNRGAAVDFTARNGITPLHVASKRGNTNMVKLLLDRGGQIDAKTRDGLTPLHCAARSGHDQVVELLLERGAPLLARTKNGLSPLHMAAQGDHVECVKHLLQHKAPVDDVTLDYLTALHVAAHCGHYRVTKLLLDKRANPNARALNGFTPLHIACKKNRIKVMELLVKYGASIQAITESGLTPIHVAAFMGHLNIVLLLLQNGASPDVTNIRGETALHMAARAGQVEVVRCLLRNGALVDARAREEQTPLHIASRLGKTEIVQLLLQHMAHPDAATTNGYTPLHISAREGQVDVASVLLEAGAAHSLATKKGFTPLHVAAKYGSLDVAKLLLQRRAAADSAGKNGLTPLHVAAHYDNQKVALLLLEKGASPHATAKNGYTPLHIAAKKNQMQIASTLLNYGAETNIVTKQGVTPLHLASQEGHTDMVTLLLDKGANIHMSTKSGLTSLHLAAQEDKVNVADILTKHGADQDAHTKLGYTPLIVACHYGNVKMVNFLLKQGANVNAKTKNGYTPLHQAAQQGHTHIINVLLQHGAKPNATTANGNTALAIAKRLGYISVVDTLKVVTEEVTTTTTTITEKHKLNVPETMTEVLDVSDEEGDDTMTGDGGEYLRPEDLKELGDDSLPSSQFLDGMNYLRYSLEGGRSDSLRSFSSDRSHTLSHASYLRDSAVMDDSVVIPSHQVSTLAKEAERNSYRLSWGTENLDNVALSSSPIHSGFLVSFMVDARGGAMRGCRHNGLRIIIPPRKCTAPTRVTCRLVKRHRLATMPPMVEGEGLASRLIEVGPSGAQFLGPVIVEIPHFAALRGKERELVVLRSENGDSWKEHFCDYTEDELNEILNGMDEVLDSPEDLEKKRICRIITRDFPQYFAVVSRIKQDSNLIGPEGGVLSSTVVPQVQAVFPEGALTKRIRVGLQAQPMHSELVKKILGNKATFSPIVTLEPRRRKFHKPITMTIPVPKASSDVMLNGFGGDAPTLRLLCSITGGTTPAQWEDITGTTPLTFVNECVSFTTNVSARFWLIDCRQIQESVTFASQVYREIICVPYMAKFVVFAKSHDPIEARLRCFCMTDDKVDKTLEQQENFAEVARSRDVEVLEGKPIYVDCFGNLVPLTKSGQHHIFSFFAFKENRLPLFVKVRDTTQEPCGRLSFMKEPKSTRGLVHQAICNLNITLPIYTKESESDQEQEEEIDMTSEKNPQDEQERIEERLAYIADHLGFSWTELARELDFTEEQIHQIRIENPNSLQDQSHALLKYWLERDGKHATDTNLVECLTKINRMDIVHLMETNTEPLQERISHSYAEIEQTITLDHSEGFSVLQEELCTAQHKQKEEQAVSKESETCDHPPIVSEEDISVGYSTFQDGVPKTEGDSSATALFPQTHKEQVQQDFSGKMQDLPEESSLEYQQEYFVTTPGTETSETQKAMIVPSSPSKTPEEVSTPAEEEKLYLQTPTSSERGGSPIIQEPEEPSEHREESSPRKTSLVIVESADNQPETCERLDEDAAFEKGDDMPEIPPETVTEEEYIDEHGHTVVKKVTRKIIRRYVSSEGTEKEEIMVQGMPQEPVNIEEGDGYSKVIKRVVLKSDTEQSEVTLCEPSILSSTSQFQAEPVEGRRVSKVVKTTVVLGERMEKHLGDSSLATDLPSAKDDFEEDNNE

SEQ ID NO: 92711 - protein, 250 aa, Homo sapiens
MAGLRNESEQEPLLGDTPGSREWDILETEEHYKSRWRSIRILYLTMFLSSVGFSVVMMSIWPYLQKIDPTADTSFLGWVIASYSLGQMVASPIFGLWSNYRPRKEPLIVSILISVAANCLYAYLHIPASHNKYYMLVARGLLGIGAVFQTCFTFLGEKGVTWDVIKLQINMYTTPVLLSAFLGILNIILILAILREHRVDDSGRQCKSINFEEASTDEAQVPQGNIDQVAVVAINVLFFVTLFIFALFET

SEQ ID NO: 92712 - protein, 756 aa, Homo sapiens
MAAPLIPLSQQIPTGNSLYESYYKQVDPAYTGRVGASEAALFLKKSGLSDIILGKIWDLADPEGKGFLDKQGFYVALRLVACAQSGHEVTLSNLNLSMPPPKFHDTSSPLMVTPPSAEAHWAVRVEEKAKFDGIFESLLPINGLLSGDKVKPVLMNSKLPLDVLGRVWDLSDIDKDGHLDRDEFAVAMHLVYRALEKEPVPSALPPSLIPPSKRKKTVFPGAVPVLPASPPPKDSLRSTPSHGSVSSLNSTGSLSPKHSLKQTQPTVNWVVPVADKMRFDEIFLKTDLDLDGYVSGQEVKEIFMHSGLTQNLLAHIWALADTRQTGKLSKDQFALAMYFIQQKVSKGIDPPQVLSPDMVPPSERGTPGPDSSGSLGSGEFTGVKELDDISQEIAQLQREKYSLEQDIREKEEAIRQKTSEVQELQNDLDRETSSLQELEAQKQDAQDRLDEMDQQKAKLRDMLSDVRQKCQDETQMISSLKTQIQSQESDLKSQEDDLNRAKSELNRLQQEETQLEQSIQAGRVQLETIIKSLKSTQDEINQARSKLSQLHESRQEAHRSLEQYDQVLDGAHGASLTDLANLSEGVSLAERGSFGAMVKDDPFKNKALLFSNNTQELHPDPFQTEDPFKSDPFKGADPFKGDPFQNDPFAEQQTTSTDPFGGDPFKESDPFRGSATDDFFKKQTKNDPFTSDPFTKNPSLPSKLDPFESSDPFSSSSVSSKGSDPFGTLDPFGSGSFNSAEGFADFSQMSKVKVHL

SEQ ID NO: 92713 - protein, 557 aa, Homo sapiens
MAGGAREVLTLQLGHFAGFVGAHWWNQQDAALGRATDSKEPPGELCPDVLYRTGRTLHGQETYTPRLILMDLKGSLSSLKEEGGLYRDKQLDAAIAWQGKLTTHKEELYPKNPYLQDFLSAEGVLSSDGVWRVKSIPNGKGSSPLPTATTPKPLIPTEASIRVWSDFLRVHLHPRSICMIQKYNHDGEAGRLEAFGQGESVLKEPKYQEELEDRLHFYVEECDYLQGFQILCDLHDGFSGVGAKAAELLQDEYSGRGIITWGLLPGPYHRGEAQRNIYRLLNTAFGLVHLTAHSSLVCPLSLGGSLGLRPEPPVSFPYLHYDATLPFHCSAILATALDTVTVPYRLCSSPVSMVHLADMLSFCGKKVVTAGAIIPFPLAPGQSLPDSLMQFGGATPWTPLSACGEPSGTRCFAQSVVLRGIDRACHTSHRLMVVLALFWQPAHPRDTSTLCPSCMYHWGRNLGSVFTTAAAWSHEFFPSAADSLQGGSSLPPPLLKLQSTGYGSGWFPQGSSGEHPSVWGTVFLFVPAPDPGSLGQRPHQTRLAALGQLHGCWSGAR

SEQ ID NO: 92714 - protein, 149 aa, Homo sapiens
  MOD_RES (1)..(1): Any amino acid
XLPDAGGSPLLRLQRLHASPPGGIPESAGRPGGRGRVSTYLEDCKFDRERIELFCTEYQNNKNSLEILLGSIGRSLPHITDVSWRLEYQIKTNQLHRMYRPAYLVTLSVQNTDSPSYPEISFSCSMEQLQDLVGKLKDASKSLERATQL

SEQ ID NO: 92715 - protein, 54 aa, Homo sapiens
MGPERTGAAPLPLLLVLALSQGYWLVHPGVAFLRTEWEMCINVLLTYPLPHVKN

SEQ ID NO: 92716 - protein, 110 aa, Homo sapiens
MSDTLTADVIGRRVEVNGEHATVRFAGVVPPVADIRKVDLSKNLLSSWDEVIHIADQLRHLEVLNVSENKLKFPSGSVLTGTLSVLKVLVLNQTGITWAEVLRCVAGCPG

SEQ ID NO: 92717 - protein, 253 aa, Homo sapiens
MSVGFIGAGQLAFALAKGFTAAGVLAAHKIMASSPDMDLATVSALRKMGVKLTPHNKETVQHSDVLFLAVKPHIIPFILDEIGADIEDRHIVVSCAAGVTISSIEKKLSAFRPAPRVIRCMTNTPVVVREGATVYATGTHAQVEDGRLMEQLLSSVGFCTEVEEDLIDAVTGLSGSGPAYAFTALDALADGGVKMGLPRRLAVRLGAQALLGAAKMLLHSEQHPGQLKDNVSSPGGATIHALHVLESGGFRSL

SEQ ID NO: 92718 - protein, 1004 aa, Homo sapiens
MTTRKLSAHSAATPGYKAVTHKHHTGWARMAKTGLPEKGQSQAGGESGSGQLLDQENGAGESALVSVYVHLDFPDKTWPPELSRTLTLPAASASSSPRPLLTGLRLTTECNVNHKGNFYCACLSGYQWNTSICLHYPPCQSLHNHQPCGCLVFSHPEPGYCQLLPPVPGILNLNSQLQMPGDTLSLTLHLSQEATNLSWFLRHPGSPSPILLQPGTQVSVTSSHGQAALSVSNMSHHWAGEYMSCFEAQGFKWNLYEVVRVPLKATDVARLPYQLSISCATSPGFQLSCCIPSTNLAYTAAWSPGEGSKASSFNESGSQCFVLAVQRCPMADTTYACDLQSLGLAPLRVPISITIIQDGDITCPEDASVLTWNVTKAGHVAQAPCPESKRGIVRRLCGADGVWGPVHSSCTDARLLALFTRTKLLQAGQGSPAEEVPQILAQLPGQAAEASSPSDLLTLLSTMKYVAKVVAEARIQLDRRALKNLLIATDKVLDMDTRSLWTLAQARKPWAGSTLLLAVETLACSLCPQDHPFAFSLPNVLLQSQLFGPTFPADYSISFPTRPPLQAQIPRHSLAPLVRNGTEISITSLVLRKLDHLLPSNYGQGLGDSLYATPGLVLVISIMAGDRAFSQGEVIMDFGNTDGSPHCVFWDHSLFQGRGGWSKEGCQAQVASASPTAQCLCQHLTAFSVLMSPHTVPEEPALALLTQVGLGASILALLVCLGVYWLVWRVVVRNKISYFRHAALLNMVFCLLAADTCFLGAPFLSPGPRSPLCLAAAFLCHFLYLATFFWMLAQALVLAHQLLFVFHQLAKHRVLPLMVLLGYLCPLGLAGVTLGLYLPQGQYLREGECWLDGKGGALYTFVGPVLAIIGVNGLVLAMAMLKLLRPSLSEGPPAEKRQALLGVIKALLILTPIFGLTWGLGLATLLEEVSTVPHYIFTILNTLQGVFILLFGCLMDRKIQEALRKRFCRAQAPSSTISLATNEGCILEHSKGGSDTARKTDASE

SEQ ID NO: 92719 - protein, 372 aa, Homo sapiens
MRVMAPRTLILLLSGALALTETWAGSHSMRYFYTAVSRPGRGEPHFIAVGYVDDTQFVRFDSDAASPRGEPRAPWVEQEGPEYWDRETQKYKRQAQTDRVSLRNLRGYYNQSEAGSHIIQRMYGCDVGPDGRLLRGYDQYAYDGKDYIALNEDLRSWTAADTAAQITQRKWEAAREAEQLRAYLEGLCVEWLRRYLKNGKETLQRAEHPKTHVTHHPVSDHEATLRCWALGFYPAEITLTWQWDGEDQTQDTELVETRPAGDGTFQKWAAVVVPSGEEQRYTCHVQHEGLPEPLTLRWEPSSQPTIPIVGIVAGLAVLAVLAVLGAVVAVVMCRRKSSGHFLPTGGKGGSCSQAASSNSAQGSDESLIACKA

SEQ ID NO: 92720 - protein, 115 aa, Homo sapiens
GHNCEVKKALSKQEMQSAGSQRGRGGGSGNFMGRGGNFGGGGGNFGRDGGYNGFGGDGNYGGGGNYNDFGNYSGQQQSNYGPMKGGSFGGRSSGSPYGGGYGSGGGSGGYGSRRF

SEQ ID NO: 92721 - protein, 188 aa, Homo sapiens
MAKGDPKKPKGKMSAYAFFVQTCREEHKKKNPEVPVNFAEFSKKCSERWKTMSGKEKSKFDEMAKADKVRYDREMKDYGPAKGGKKKKDPNAPKRPPSGFFLFCSEFRPKIKSTNPGISIGDVAKKLGEMWNNLNDSEKQPYITKAAKLKEKYEKDVADYKSKGKFDGAKGPAKVARKKVEEEDEEEE

SEQ ID NO: 92722 - protein, 1107 aa, Homo sapiens
MSYNYVVTAQKPTAVNGCVTGHFTSAEDLNLLIAKNTRLEIYVVTAEGLRPVKEVGMYGKIAVMELFRPKGESKDLLFILTAKYNACILEYKQSGESIDIITRAHGNVQDRIGRPSETGIIGIIDPECRMIGLRLYDGLFKVIPLDRDNKELKAFNIRLEELHVIDVKFLYGCQAPTICFVYQDPQGRHVKTYEVSLREKEFNKGPWKQENVEAEASMVIAVPEPFGGAIIIGQESITYHNGDKYLAIAPPIIKQSTIVCHNRVDPNGSRYLLGDMEGRLFMLLLEKEEQMDGTVTLKDLRVELLGETSIAECLTYLDNGVVFVGSRLGDSQLVKLNVDSNEQGSYVVAMETFTNLGPIVDMCVVDLERQGQGQLVTCSGAFKEGSLRIIRNGIGIHEHASIDLPGIKGLWPLRSDPNRETDDTLVLSFVGQTRVLMLNGEEVEETELMGFVDDQQTFFCGNVAHQQLIQITSASVRLVSQEPKALVSEWKEPQAKNISVASCNSSQVVVAVGRALYYLQIHPQELRQISHTEMEHEVACLDITPLGDSNGLSPLCAIGLWTDISARILKLPSFELLHKEMLGGEIIPRSILMTTFESSHYLLCALGDGALFYFGLNIETGLLSDRKKVTLGTQPTVLRTFRSLSTTNVFACSDRPTVIYSSNHKLVFSNVNLKEVNYMCPLNSDGYPDSLALANNSTLTIGTIDEIQKLHIRTVPLYESPRKICYQEVSQCFGVLSSRIEVQDTSGGTTALRPSASTQALSSSVSSSKLFSSSTAPHETSFGEEVEVHNLLIIDQHTFEAMVYPEEAEPKQGRIVVFQYSDGKLQTVAEKEVKGAVYSMVEFNGKLLASINSTVRLYEWTTEKELRTECNHYNNIMALYLKTKGDFILVGDLMRSVLLLAYKPMEGNFEEIARDFNPNWMSAVEILDDDNFLGAENAFNLFVCQKDSAATTDEERQHLQEVGLFHLGEFVNVFCHGSLVMQNLGETSTPTQGSVLFGTVNGMIGLVTSLSESWYNLLLDMQNRLNKVIKSVGKIEHSFWRSFHTERKTEPATGFIDGDLIESFLDISRPKMQEVVANLQYDDGSGMKREATADDLIKVVEELTRIH

SEQ ID NO: 92723 - protein, 69 aa, Homo sapiens
LYMYQLFRSLAYIHSFGICHRDIKPQNLLLDPDTAVLKLCDFGRSSDPELHRRQLHCVAVCWSIHQLPD

SEQ ID NO: 92724 - protein, 131 aa, Homo sapiens
  MOD_RES (1)..(1): Any amino acid
XDERLKDLFGKFGPALSVKVMTDESGKSKGFGFVSFERHEDAQKAVDEMNGKELNGKQIYVGRAQKKVERQTELKRKFEQMKQDRITRYQGVNLYVKNLDDGIDDERLRKEFSPFGTITSAKKKPLKQLQK

SEQ ID NO: 92725 - protein, 52 aa, Homo sapiens
  MOD_RES (1)..(1): Any amino acid
XELESEGTTRRILIPFSQRKLTKQVLKVVNTIFHGQLLSQANDENPIPNPLF

SEQ ID NO: 92726 - protein, 112 aa, Homo sapiens
MCQVDREKQPSEGAFSENNAENESGGDKPPIDPNNPAANWLHARSTRKKRCPYTKHQTLELEKEFLFNMYLTRDRRYEVARLLNLTERQVKIWFQNRRMKMKKINKDRAKDE

SEQ ID NO: 92727 - protein, 83 aa, Homo sapiens
MMCGAPSATQPATAETQHIADQVRSQLEEKENKKFPVFKAVSFKSQVVAGTNYFIKVECGPQEGLPRTGAGRKPPVQARAVWS

SEQ ID NO: 92728 - protein, 170 aa, Homo sapiens
MLPPQKKPWESMAKGLVLGALFTSFLLLVYSYAVPPLHAGLASTTPEAAASCSPPALEPEAVIRANGSAGECQPRRNIVFLKTHKTASSTLLNILFRFGQKHRLKFAFPNGRNDFDYPTFFARSLVQDYRPGACFNIICNHMRFHYDEVRGLVPTNAIFITVLRDPARLF

SEQ ID NO: 92729 - protein, 38 aa, Homo sapiens
EPVYFAEKVMSLGRNWHRPCLRCQRCHKTLTAGSHAEV

SEQ ID NO: 92730 - protein, 160 aa, Homo sapiens
MSPRRTLPRPLSLCLSLCLCLCLAAALGSAQSGSCRDKKNCKVVFSQQELRKRLTPLQYHVTQEKGTESAFEGEYTHHKDPGIYKCVVCGTPLFKSETKFDSGSGWPSFHDVINSEAITFTDDFSYGMHRVETSCSQVSSSFLKTQYIAFRTPGCAKYSN

SEQ ID NO: 92731 - protein, 73 aa, Homo sapiens
MASQKRPSQRHGSKYLATASTMDHARHGFLPRHRDTGILDSIGRFFGGDRGAPKRGSGKGGRDSRSGSPMARR

SEQ ID NO: 92732 - protein, 187 aa, Homo sapiens
  MOD_RES (1)..(1): Any amino acid
XGCGLRRVVFRSLKFMASHGNDAARARFESKVPSFYYRPTPSDCQLLREQWIRAKYERQEFIYPEKQEPYSAGYREGFLWKRGRDNGQFLSRKFVLTEREGALKYFNRNDAKEPKAVMKIEHLNATFQPAKIGHPHGLQVTYLKDNSTRNIFIYHEDGKEIVDWFNALRAARFHYLQVAFPGAGDAD

SEQ ID NO: 92733 - protein, 176 aa, Homo sapiens
MYVWPCAVVLAQYLWFHRRSLPGKAILEIGAGVSLPGILAAKCGAEVILSDSSELPHCLEVCRQSCQMNNLPHLQVVGLTWGHISWDLLALPPQDIILASDVFFEPEDFEDILATIYFLMHKNPKVQLWSTYQVRSADWSLEALLYKWDMKCVHIPLESFDADKEDIAESTLPGRH

SEQ ID NO: 92734 - protein, 633 aa, Homo sapiens
MMEGLKKRTRKAFGIRKKEKDTDSTGSPDRDGIQPSPHEPPYNSKAECAREGGKKVSKKSNGAPNGFYAEIDWERYNSPELDEEGYSIRPEEPGSTKGKHFYSSSESEEEEESHKKFNIKIKPLQSKDILKNAATVDELKASIGNIALSPSPVGAIKRNLSSEEVARPRRSTPTPELISKKPPDDTTALAPLFGPPLESAFDEQKTEVLLDQPEIWGSGQPINPSMESPKLTRPFPTGTPPPLPPKNVPATPPRTGSPLTIGPGASSPARPATPLVPCRSTTPPPPPPRPPSRPKLPPGKPGVGDVSRPFSPPIHSSSPPPIAPLARAESTSSISSTNSLSAATTPTVGSSRGPSPLTMGAQDTLPVAAAFTETVNAYFKGADPSKCIVKITGEMVLSFPAGITRHFANNPSPAALTFRVINFSRLEHVLPNPQLLCCDNTQNDANTKEFWVNMPNLMTHLKKVSEQKPQATYYNVDMLKYQVSAQGIQSTPLNLAVNWRCEPSSTDLRIDYKYNTDAMTTAVALNNVQFLVPIDGGVTKLQAVLPPAVWNAEQQRILWKIPDISQKSENGGVGSLLARFQLSEGPSKPSPLVVQFTSEGSTLSGCDIELVGAGYRFSLIKKRFAAGKYLADN

SEQ ID NO: 92735 - protein, 298 aa, Homo sapiens
MAAAGARPVELGFAESAPAWRLRSEQFPSKVGGRPAWLGAAGLPGPQALACELCGRPLSFLLQVYAPLPGRPDAFHRCIFLFCCREQPCCAGLRVFRNQLPRKNDFYSYEPPSENPPPETGESVCLQLKSGAHLCRVCGCLGPKTCSRCHKAYYCSKEHQTLDWRLGHKQACAQPDHLDHIIPDHNFLFPEFEIVIETEDEIMPEVVEKEDYSEIIGSMGEALEEELDSMAKHESREDKIFQKFKTQIALEPEQILRYGRGIAPIWISGENIPQEKDIPDCPCGAKRILEFQFSDTVY

SEQ ID NO: 92736 - protein, 38 aa, Homo sapiens
MDSRDSSFGQNDSPTVLPITTREANNSLISQNIPGPLT

SEQ ID NO: 92737 - protein, 215 aa, Homo sapiens
MSTPTDPGAMPHPGPSPGPGPSPGPILGPSPGPGPSPGSVHSMMGPSPGPPSVSHPMPTMGSTDFPQEGMHQMHKPIDGIHDKGIVEDIHCGSMKGTGMRPPHPGMGPPQSPMDQHSQGYMSPHPSPLGAPEHVSSPMSGGGPTPPQMPPSQPGALIPGDPQAMSQPNRGPSPFSPVQLHQLRAQILAYKMLARGQPLPETLQLAVQGKRTLPGL

SEQ ID NO: 92738 - protein, 126 aa, Homo sapiens
MDLIPNFAMETWVLVATSLVLLYIYGTHSHKLFKKLGIPGPTPLPFLGTILFYLRGLWNFDRECNEKFLWGLHHGCNHWHIIWSELGFSQQSTRSLSEKYEEAFKIGFFGSLFTLNITLSISYPSF

SEQ ID NO: 92739 - protein, 153 aa, Homo sapiens
MKIPWGSIPVLMLLLLLGLIDISQAQLSCTGPPAIPGIPGIPGTPGPDGQPGTPGIKGEKGLPGLAGDHGEFGEKGDPGIPGNPGKVGPKGPMGPKGGPGAPGAPGPKGESGDYKATQKIAFSATRTINVPLRRDQTIRFDHVITNMNNNYEP

SEQ ID NO: 92740 - protein, 151 aa, Homo sapiens
QRLQARVEELERWVYGPGGARGSRKVADGLVKVQVALGNISSKRERVKILYKKIEDLIKYLDPEYIDRIAIPDASKLQFILAAVPEHAARLQRLAQIHIQQQDQCVEITEESKALLEEYNKTTMLLSKQFVQWDELLCQLEAATQVKPAEE

SEQ ID NO: 92741 - protein, 188 aa, Homo sapiens
  MOD_RES (1)..(1): Any amino acid
XRHTVKVTPSTVLLQVLEDTCRRQDFNPCEYDLKFQRSVLDLSLQWRFANLPNNAKLEMVPASRSREGPENMVRIALQLDDGSRLQDSFCSGQTLWELLSHFPQIRECLQHPGGATPVCVYTRDEPSPGQWRETRALESTTCFMEKEGVAGPRSPGCPETSLGALFVFSASLKAQESQKWFHLINICF

SEQ ID NO: 92742 - protein, 132 aa, Homo sapiens
MASSPAVDVSCRRREKRRQLDARRSKCRIRLGGHMEQWCLLKERLGFSLHSQLAKFLLDRYTSSGCVLCAGPEPLPPKGLQYLVLLSHAHSRECSLVPGLRGPGGQDGGLVWECSAGHTFSWGPSLSPTPSE

SEQ ID NO: 92743 - protein, 162 aa, Homo sapiens
MTFLIVTVAWAAHTRLFQVVGKTDDTLALLNLFSLMVTFPDVPLGIFLFCVCVIAIGVVQALIVGYAFHFPHLLSPQIQRSAHRALYRRHVLGIVLQGPALCFAAAIFSLFFVPLSYLLMVTVILLPYVSKVTGWCRDRLLGHREPSAHPVEVFSFDLHEPL

SEQ ID NO: 92744 - protein, 1038 aa, Homo sapiens
MFHLRTCAAKLRPLTASQTVKTFSQNRPAAARTFQQIRCYSAPVAAEPFLSGTSSNYVEEMYCAWLENPKSVHKSWDIFFRNTNAGAPPGTAYQSPLPLSRGSLAAVAHAQSLVEAQPNVDKLVEDHLAVQSLIRAYQIRGHHVAQLDPLGILDADLDSSVPADIISSTDKLDLAVFKERLRMLTVGGFYGLDESDLDKVFHLPTTTFIGGQESALPLREIIRRLEMAYCQHIGVEFMFINDLEQCQWIRQKFETPGIMQFTNEEKRTLLARLVRSTRFEEFLQRKWSSEKRFGLEGCEVLIPALKTIIDKSSENGVDYVIMGMPHRGRLNVLANVIRKELEQIFCQFDSKLEAADEGSGDVKYHLGMYHRRINRVTDRNITLSLVANPSHLEAADPVVMGKTKAEQFYCGDTEGKKVMSILLHGDAAFAGQGIVYETFHLSDLPSYTTHGTVHVVVNNQIGFTTDPRMARSSPYPTDVARVVNAPIFHVNSDDPEAVMYVCKVAAEWRSTFHKDVVVDLVCYRRNGHNEMDEPMFTQPLMYKQIRKQKPVLQKYAELLVSQGVVNQPEYEEEISKYDKICEEAFARSKDEKILHIKHWLDSPWPGFFTLDGQPRSMSCPSTGLTEDILTHIGNVASSVPVENFTIHGGLSRILKTRGEMVKNRTVDWALAEYMAFGSLLKEGIHIRLSGQDVERGTFSHRHHVLHDQNVDKRTCIPMNHLWPNQAPYTVCNSSLSEYGVLGFELGFAMASPNALVLWEAQFGDFHNTAQCIIDQFICPGQAKWVRQNGIVLLLPHGMEGMGPEHSSARPERFLQMCNDDPDVLPDLKEANFDINQLYDCNWVVVNCSTPGNFFHVLRRQILLPFRKPLIIFTPKSLLRHPEARSSFDEMLPGTHFQRVIPEDGPAAQNPENVKRLLFCTGKVYYDLTRERKARDMVGQVAITRIEQLSPFPFDLLLKEVQKYPNAELAWCQEEHKNQGYYDYVKPRLRTTISRAKPVWYAGRDPAAAPATGNKKTHLTELQRLLDTAFDLDVFKNFS

SEQ ID NO: 92745 - protein, 333 aa, Homo sapiens
  MOD_RES (1)..(1): Any amino acid
XDLTDEWRSTHEAYVTVLEGFSGNTTLFSCSHNFWLAIDMSFEPPEFEIVGFTNHINVMVKFPSIVEEELQFDLSLVIEEQSEGIVKKHKPEIKGNMSGNFTYIIDKLIPNTNYCVSVYLEHSDEQAVIKSPLKCTLLPPGQESALGMVPPPENVRMNSVNFKNILQWESPAFAKGNLTFTAQYLSYRIFQDKCMNTTLTECDFSSLSKYGDHTLRVRAEFADEHSDWVNITFCPVDDTIIGPPGMQVEVLADSLHMRFLAPKIENEYETWTMKNVYNSWTYNVQYWKNGTDEKFQITPQYDFEVLRNLEPWTTYCVQVRGFLPDRNKAGEWS

SEQ ID NO: 92746 - protein, 165 aa, Homo sapiens
MCNTPTYCDLGKAAKDVFNKGYGFGMVKIDLKTKSCSGVEFSTSGHAYTDTGKASGNLETKYKVCNYGLTFTQKWNTDNTLGTEISWENKLAEGLKLTLDTIFVPNTGKKSGKLKASYKRDCFSVGSNVDIDFSGPTIYGWAVLAFEGWLAGYQMSFDTAKSKLS

SEQ ID NO: 92747 - protein, 477 aa, Homo sapiens
MCRPGQPPGSESVCFEVLGFDILLDRKLKPWLLEINRAPSFGTDQKIDYDVKRGVLLNALKLLNIRTSDKRRNLAKQKAEAQRRLYGQNSIKRLLPGSSDWEQQRHQLERRKEELKERLAQVRKQISREEHENRHMGNYRRIYPPEDKALLEKYENLLAVAFQTFLSGRAASFQRELNNPLKRMKEEDILDLLEQCEIDDEKLMGKTTKTRGPKPLCSMPESTEIMKRPKYCSSDSSYDSSSSSSESDENEKEEYQNKKREKQVTYNLKPSNHYKLIQQPSSIRRSVSCPRSISAQSPSSGDTRPFSAQQMISVSRPTSASRSHSLNRASSYMRHLPHSNDACSTNSQVSESLRQLKTKEQEDDLTSQTLFVLKDMKIRFPGKSDAESELLIEDIIDNWKYHKTKVASYWLIKLDSVKQRKVLDIVKTSIRTVLPRIWKVPDVEEVNLYRIFNRVFNRLLWSRGQGLWNCFCDSGYV

SEQ ID NO: 92748 - protein, 120 aa, Homo sapiens
MIAPEGSLVFHEKAWNAYPYCRTIVTNEYMKDDFFIKIETWHKPDLGTLENVHGLDPNTWKTVEIVHIDIADRSQVEPADYKADEDPALFQSVKTKRGPLGPNWKKELANSPDCPQMCAY

SEQ ID NO: 92749 - protein, 103 aa, Homo sapiens
MRDLYMKNGQGFALVYSITAQSTFNDLQDLREQILRVKDTDDVPMILVGNKCDLEDERVVGKEQGQNLARQWNNCAFLESSAKSKINVNEIFYDLVRQINRKT

SEQ ID NO: 92750 - protein, 67 aa, Homo sapiens
MSSRKQGSQPRGQQSAEEENFKKPTRSNMQRSKMRGASSGKKTAGPQQKNLEPALPGRWGGRSAENP

SEQ ID NO: 92751 - protein, 55 aa, Homo sapiens
  MOD_RES (1)..(1): Any amino acid
XPAASNSSDLFDLMGSSQATMTSSQSMNFSMMSTNTVGLGLPMSRSQILVFGVLG

SEQ ID NO: 92752 - protein, 234 aa, Homo sapiens
ISLLKQEGIATSDNFMQAFLNVLDQCPKLEVDIPLVKSYLAQFAARAIISELVSISELAQPLESGTHFPLFLLCLQQLAKLQDREWLTELFQQSKVNMQKMLPDNISPKLHVDKGFVNILMTSFLQYISSEVNPPSDETDSSSAPSKEQLEQEKQLLLSFKPVMQKFLHDHVDLQVSALYALQVHCYNSNFPKGMLLRFFVHFYDMEIIEEEAFLAWKEDITQEFPGKGKALFQ

SEQ ID NO: 92753 - protein, 51 aa, Homo sapiens
MPSRKFADGEVVRGRWPGSSLYYEVEILSHDSTSQLYTVKYKDGTELELKE

SEQ ID NO: 92754 - protein, 64 aa, Homo sapiens
MGEFNEKKTTCGTVCLKYLLFTYNCCFWLAGLAVMAVGIWTLALKSDYISLLASGTYLATAYIL

SEQ ID NO: 92755 - protein, 65 aa, Homo sapiens
MQGPAGNASRGLPGGPPSTVASGAGRCESGALMHSFGIFLQGLLGVVAFSTLMLIICDNLAKIRC

SEQ ID NO: 92756 - protein, 39 aa, Homo sapiens
METNSSLPTNISGGTPAVSAGYLFLDIITYLVFAVTFVL

SEQ ID NO: 92757 - protein, 422 aa, Homo sapiens
MARRPRHSIYSSDEDDEDFEMCDHDYDGLLPKSGKRHLGKTRWTREEDEKLKKLVEQNGTDDWKVIANYLPNRTDVQCQHRWQKVLNPELIKGPWTKEEDQRVIELVQKYGPKRWSVIAKHLKGRIGKQCRERWHNHLNPEVKKTSWTEEEDRIIYQAHKRLGNRWAEIAKLLPGRTDNAIKNHWNSTMRRKVEQEGYLQESSKASQPAVATSFQKNSHLMGFAQAPPTAQLPATGQPTVNNDYSYYHISEAQNVSSHVPYPVALHVNIVNVPQPAAAAIQRHYNDEDPEKEKRIKELELLLMSTENELKGQQVLPTQNHTCSYPGWHSTTIADHTRPHGDSAPVSCLGEHHSTPSLPADPGSLPEESASPARILHHGVISAVLNSLKKQIFHLANITQAKPYSFSKERAMGLNLQENLAQG

SEQ ID NO: 92758 - protein, 33 aa, Homo sapiens
EYPIYEETKIKLTVYDVKDKSHDTFRINRLTSL

SEQ ID NO: 92759 - protein, 56 aa, Homo sapiens
MKFLLTTAFLILISLWVEEAYSKEKSSKKGKGKKKQYLCPSLVRPDAKKFVLLSLI

SEQ ID NO: 92760 - protein, 95 aa, Homo sapiens
MEYYLVKWKGWPDSTNTWEPLQNLKCPLLLQQFSNDKHNYLSQVKKGKAITPKDNNKTLKPAIAEYIVKKAKQRIALQRWQDELNRRKNHKGMIF

SEQ ID NO: 92761 - protein, 122 aa, Homo sapiens
MDSLDHMLTDPLELGPCGDGHGTRIMEDCLLGGTRVSLPEDLLEDPEIFFDVVSLSTWQEVLSDSQREHLQQFLPQFPEDSAEQQNELILALFSGENFRFGNPLHIAQKLFRDTEAAKSGFV

SEQ ID NO: 92762 - protein, 68 aa, Homo sapiens
MSSPRDFRAEPVNDYEGNDSEAEDLNFRETLPSSSQENTPRSKVFENKVNSEKVKLSLRNFPHNDYED

SEQ ID NO: 92763 - protein, 203 aa, Homo sapiens
MDTDVVVLTTGVLVLITMLPMIPQSGKQHLLDFFDIFGRLSSWCLKKPGHVAEVYLVHLHASVYALFHRLYGMYPCNFVSFLRSHYSMKENLETFEEVVKPMMEHVRIHPELVTGSKDHELDPRRWKRLETHDVVIECAKISLDPTEASYEDGYSVSHQISARFPHRSADVTTSPYADTQNSYGCATSTPYSTSRLMLLNMPG

SEQ ID NO: 92764 - protein, 122 aa, Homo sapiens
MDICESILERKRHDSERSTCSILEQTDMEAVEALVCMSSWGQRSQKGDLLRIRPLTPVSDSGDVTTTVHMDAATPELPKDFHSLSTLCITPPQSPDLVEPSTRTPVSPQVTDSKACTATDVL

SEQ ID NO: 92765 - protein, 187 aa, Homo sapiens
MEPRTRGKYGEGAKQETFTFALTLVFIQCVINAVFAKILIQFFDTARVDRTRSWLYAACSISYLGAMVSSNSALQFVNYPTQVLGKSCKPIPVMLLGVTLLKKKYPLAKYLCVLLIVAGVALFMYKPKKVVGIEEHTVGYGELLLLLSLTLDGLTGVSQDHMRAHYQTGSNHMMLNINLWSTLLLGM

SEQ ID NO: 92766 - protein, 377 aa, Homo sapiens
MAESVERLQQRVQELERELAQERSLQVPRSGDGGGGRVRIEKMSSEVVDSNPYSRLMALKRMGIVSDYEKIRTFAVAIVGVGGVGSVTAEMLTRCGIGKLLLFDYDKVELANMNRLFFQPHQAGLSKVQAAEHTLRNINPDVLFEVHNYNITTVENFQHFMDRISNGGLEEGKPVDLVLSCVDNFEARMTINTACNELGQTWMESGVSENAVSGHIQLIIPGESACFACAPPLVVAANIDEKTLKREGVCAASLPTTMGVVAGILVQNVLKFLLNFGTVSFYLGYNAMQDFFPTMSMKPNPQCDDRNCRKQQEEYKKKVAALPKQEVIQEEEEIIHEDNEWGIELVSEVSEEELKNFSGPVPDLPEGITVAYTIPKK

SEQ ID NO: 92767 - protein, 766 aa, Homo sapiens
MDWQPDEQGLQQVLQLLKDSQSPNTATQRIVQDKLKQLNQFPDFNNYLIFVLTRLKSEDEPTRSLSGLILKNNVKAHYQSFPPPVADFIKQECLNNIGDASSLIRATIGILITTIASKGELQMWPELLPQLCNLLNSEDYNTCEGAFGALQKICEDSSELLDSDALNRPLNIMIPKFLQFFKHCSPKIRSHAIACVNQFIMDRAQALMDNIDTFIEHLFALAVDDDPEVRKNVCRALVMLLEVRIDRLIPHMHSIIQYMLQRTQDHDENVALEACEFWLTLAEQPICKEVLASHLVQLIPILVNGMKYSEIDIILLKGDVEEDEAVPDSEQDIKPRFHKSRTVTLPHEAERPDGSEDAEDDDDDDALSDWNLRKCSAAALDVLANVFREELLPHLLPLLKGLLFHPEWVVKESGILVLGAIAEGCMQGMVPYLPELIPHLIQCLSDKKALVRSIACWTLSRYAHWVVSQPPDMHLKPLMTELLKRILDGNKRVQEAACSAFATLEEEACTELVPYLSYILDTLVFAFGKYQHKNLLILYDAIGTLADSVGHHLNQPEYIQKLMPPLIQKWNELKDEDKDLFPLLECLSSVATALQSGFLPYCEPVYQRCVTLVQKTLAQAMMYTQHPEQYEAPDKDFMIVALDLLSGLAEGLGGHVEQLVARSNIMTLLFQCMQDSMPEVRQSSFALLGDLTKACFIHVKPCIAEFMPILGTNLNPEFISVCNNATWAIGEICMQMGAEMQPYVQMVLNNLVEIINRPNTPKTLLE

SEQ ID NO: 92768 - protein, 54 aa, Homo sapiens
MSMKWTSALLLIQLSCYFSSGSCGKVLVWPTEFSHWMNIKTILDELVQRGHEVT

SEQ ID NO: 92769 - protein, 137 aa, Homo sapiens
MGCGCSSHPEDDWMENIDVCENCHYPIVPLDGKGTLLIRNGSEVRDPLVTYEGSNPPASPLQDNLVIALHSYEPSHDGDLGFEKGEQLRILEQSGEWWKAQSLTTGQEGFIPFNFVAKANSLEPEPWFFKNLSRKDA

SEQ ID NO: 92770 - protein, 141 aa, Homo sapiens
MAFMEKPPAGKVLLDDTVPLTAAIEASQSLQSHTEYIIRVQRGISVENSWQIVRRYSDFDLLNNSLQIAGLSLPLPPKKLIGNMDREFIAERQKGLQNYLNVITTNHILSNCELVKKFLDPNNYSANYTAPLHLSGYLCHS

SEQ ID NO: 92771 - protein, 173 aa, Homo sapiens
MPGRSCVALVLLAAAVSCAVAQHAPPWTEDCRKSTYPPSGPTYRGAVPWYTINLDLPPYKRWHELMLDKAPVLKVIVNSLKNMINTFVPSGKIMQVVDEKLPGLLGNFPGPFEEEMKGIAAVTDIPLGEIISFNIFYELFTICTSIVAEDKKGNCALREGGQHEALHKEKSSK

SEQ ID NO: 92772 - protein, 124 aa, Homo sapiens
MEPLASNIQVLLQAAEFLERREREAEHGYASLCPHRSPGPIHRRKKRPPQAPGAQDSGRRAQLKRCLERLKQQMPLGADCARYTTLSLLRRARMHIQKLEDQEQRARQLKERLRSKQQSLQRQL

SEQ ID NO: 92773 - protein, 199 aa, Homo sapiens
MQSPAVLVTSRRLQNAHTGLDLTVPQHQEVRGKMMSGHVEYQILVVTRLAAFKSAKHRPEDVVQFLVSKKYSEIEEFYQKLSSRYAAASLPPLPRKVLFVGESDIRERRAVFNEILRCVSKDAELAGSPELLEFLGTQGSAPCPSGLPGPELGPAAVPQWEHVHSCLCSLEASARLVRQVASLTSLAGWWAEGGLPLRD

SEQ ID NO: 92774 - protein, 144 aa, Homo sapiens
MHLLGPWLLLLEYLAFSDSSKWVFEHPETLYAWEGACVWIPCTYRALDGDLESFILFHNPEYNKNTSKFDGTRLYESTKDGKVPSEQKRVQFLGDKNKNCTLSIHPVHLNDSGQLGLRMESKTEKWMERIHLNVSERPFPPHIQ

SEQ ID NO: 92775 - protein, 346 aa, Homo sapiens [sequence omitted]

SEQ ID NO: 92776 - protein, 638 aa, Homo sapiens
MVSKLSQLQTELLAALLESGLSKEALIQALGEPGPYLLAGEGPLDKGESCGGGRGELAELPNGLGETRGSEDETDDDGEDFTPPILKELENLSPEEAAHQKAVVETLLQEDPWRVAKMVKSYLQQHNIPQREVVDTTGLNQSHLSQHLNKGTPMKTQKRAALYTWYVRKQREVAQQFTHAGQGGLIEEPTGDELPTKKGRRNRFKWGPASQQILFQAYERQKNPSKEERETLVEECNRAECIQRGVSPSQAQGLGSNLVTEVRVYNWFANRRKEEAFRHKLAMDTYSGPPPGPGPGPALPAHSSPGLPPPALSPSKVHGVRYGQPATSETAEVPSSSGGPLVTVSTPLHQVSPTGLEPSHSLLSTEAKLVSAAGGPLPPVSTLTALHSLEQTSPGLNQQPQNLIMASLPGVMTIGPGEPASLGPTFTNTGASTLVIGLASTQAQSVPVINSMGSSLTTLQPVQFSQPLHPSYQQPLMPPVQSHVTQSPFMATMAQLQSPHALYSHKPEVAQYTHTGLLPQTMLITDTTNLSALASLTPTKQEAALLPQVFTSDTEASSESGLHTPASQATTLHVPSQDPASIQHLQPAHRLSASPTVSSSSLVLYQSSDSSNGQSHLLPSNHSVIETFISTQMASSSQ

SEQ ID NO: 92777 - protein, 254 aa, Homo sapiens
  MOD_RES (1)..(1): Any amino acid
XDGSNSGNIGTLSTIPTAAPPSSTGVRKGWHEHVTQDLRSHLVHKLVQAIFPTPDPAALKDRRMENLVAYAKKVEGDMYESANSRDEYYHLLAEKIYKIQKELEEKRRSRLHKQGILGNQPALPAPGAQPPVIPQAQPVRPPRMNSFNPMSLGNVQLPQAPMGPRAASPMNHSVQMNSMGSVPGMAISPSRMPQPPNMMGAHTNNMMAQAPAQSQFLPQNQFPSSSGAMSVGMGQPPAQTGVSQVLCPTGTVAP

SEQ ID NO: 92778 - protein, 852 aa, Homo sapiens
MEPLTFKDVAIEFSLEEWQCLDTAQRDLYRNVLLENYRNLVFLGIAVSKPYLITCLEQKKEPWNIKRHEMVAKPPVMSFHFAQDLWPEQNIKDSFQKVTLRRYGKCEYENLQLRKGCKHVDECTGHKGGHNTVNQCLTATPSKIFQCNKYVKVFDKFSNSNRYKRRHTGNKHFKCKECSKSFCVLSQLTQHRRIHTRVNSYKCEECGKAFNWFSTLTKHKRIHTGEKPYKCEECGKAFNQSSQLTRHKIIHTEEKPNKCEECGKAFKQASHLTIHKIIHTGEKPYKYEECGKVFSQSSHLTTQKILHTGENLYKCKECGKAFNLFSNLTNHKRIHAGEKPYKCKECGRAFNISSNLNKQEKIHTGGKLNKCEECDKAFNRSLKLTAHKKILMEEKPYKCEECGKVFNQFSTLTRHKIIHTGEKPYKCKECGKAFNQSSNLTEHKKIHTAEKSYKCEECGKAFNQHSNLINHRKIYSGEKPYKCEECGKAFNRSSTLTRHKKIHTGEKPYKCEECDRAFSQSSNLTEHKKIHTGEKPYKCEECGKAFNRFSTLTKHKRIHTGEKPYKCEECGKAFNQSYQLTRHKIVHTKEKLNKCEEFGKAFKQSSHRTIHKIIHTGEKPYKCEEHGKVFNQSSNLTTQKIIHTGENLYKFEEHGKAFNLFSNITNHKIIYTGEKPHKCEECGKAYNRFSNLTIHKRIHTGEKPYQCAECGKAFNCSSTLNRHKIIHTGEKPYKCKECGKAFNLSSTLTAHKKIHTGEKPYKCEECGKAFNQSSNLTTHKKIHTSEKPYKCEECGKSFNQFSSLNIHKIIHTGEKPYKCGDYGRAFNLSSNLTTHKKIHTGEKPYKCEYGKT

SEQ ID NO: 92779 - protein, 153 aa, Homo sapiens
MKLTSEKLPKNPFYASVSQYAAKNQKFFQWKKEKTDYTHANLVDKALQLLKERILKGDTLAYFLRGQLYFEEGWYEEALEQFEEIKEKDHQATYQLGVMYYDGLGTTLDAEKGVDYMKKILDSPCPKARHLKFAAAYNLGRAYYEGKGVKRSN

SEQ ID NO: 92780 - protein, 97 aa, Homo sapiens
MHTVATSGPNASWGAPANASGCPGCGANASDGPVPSPRAVDAWLVPLFFAALMLLGLVGNSLVIYVICRHKPMRTVTNFYIGLGAGHVCHSDRHECG

SEQ ID NO: 92781 - protein, 361 aa, Homo sapiens
MIRIAALNASSTIEDDHEGSFKSHKTQTKEAQEAEAFALYHKALDLQKHDRFEESAKAYHELLEASLLREAVMLDSTDVNLWYKIGHVALRLIRIPLARHAFEEGLRCNPDHWPCLDNLITVLYTLSDYTTCLYFICKALEKDCRYSKGLVLKEKIFEEQPCLRKDSLRMFLKCDMSIHDVSVSAAETQAIVDEALGLRKKRQALIVREKEPDLKLVQPIPFFTWKCLGESLLAMYNHLTTCEPPRPSLGKRIDLSDYQDPSQPLESSMVVTPVNVIQPSTVSTNPAVAVAEPVVSYTSVATTSFPLHSPGLLETGAPVGDISGGDKSKKGVKRKKISEESGETAKRRSARVRNTKCKKEE

SEQ ID NO: 92782 - protein, 181 aa, Homo sapiens
MDTSRTPSVCRETGGAALSRGERRPQGRRGSPTPTAGPVHTGLANTSYTSPGLQRLKDSPQTAPDKGQCSTWGAGHFSTFDHHVYDFSGTCNYIFAATCKDAFPTFSVQLRRGPDGSISRIIVELGASVVTVSEAIISVKDIGVISLPYTSNGLQITPFGQSVRLVAKQLELELEVVWGPD

SEQ ID NO: 92783 - protein, 918 aa, Homo sapiens
  MOD_RES (1)..(1): Any amino acid
XYLCLAPDGIWDPQGPDLSNCSSPWVNHITQKLKSGETAANIARELAEQTRNHLNAGDITYSVRAMDQLVGLLDVQLRNLTPGGKDSAARSLNKAMVETVNNLLQPQALNAWRDLTTSDQLRAATMLLHTVEESAFVLADNLLKTDIVRENTDNIKLEVARLSTEGNLEDLKFPENMGHGSTIQLSANTLKQNGRNGEIRVAFVLYNNLGPYLSTENASMKLGTEALSTNHSVIVNSPVITAAINKEFSNKVYLADPVVFTVKHIKQSEENFNPNCSFWSYSKRTMTGYWSTQGCRLLTTNKTHTTCSCNHLTNFAVLMAHVEVKHSDAVHDLLLDVITWVGILLSLVCLLICIFTFCFFRGLQSDRNTIHKNLCISLFVAELLFLIGINRTDQPIACAVFAALLHFFFLAAFTWMFLEGVQLYIMLVEVFESEHSRRKYFYLVGYGMPALIVAVSAAVDYRSYGTDKVCWLRLDTYFIWSFIGPATLIIMLNVIFLGIALYKMFHHTAILKPESGCLDNIKSWVIGAIALLCLLGLTWAFGLMYINESTVIMAYLFTIFNSLQGMFIFIFHCVLQKKVRKEYGKCLRTHCCSGKSTESSIGSGKTSGSRTPGRYSTGSQSRIRRMWNDTVRKQSESSFITGDINSSASLNREGLLNNARDTSVMDTLPLNGNHGNSYSIASGEYLSNCVQIIDRGYNHNETALEKKILKELTSNYIPSYLNNHERSSEQNRNLMNKLVNNLGSGREDDAIVLDDATSFNHEESLGLELIHEESDAPLLPPRVYSTENHQPHHYTRRRIPQDHSESFFPLLTNEHTEDLQSPHRDSLYTSMPTLAGVAATESVTTSTQTEPPPAKCGDAEDVYYKSMPNLGSRNHVHQLHTYYQLGRGSSDGFIVPPNKDGTPPEGSSKGPAHLVTSL

SEQ ID NO: 92784 - protein, 169 aa, Homo sapiens
  MOD_RES (1)..(1): Any amino acid
XGTPSRFLASVLHNGLGRYVQQLQRLSFSVSRDGASSRGAREFVEREVIDFARRNPGVVIYVNSRPCCVPRVVAEYLNGAVREESIHCKSVEEISTLVQKLADQSGLDVIRIRKPFHTDNPSIQGQWHPFTNKPTTFRGLRPREVQDPAPAQDAAEFLGEGAGPCWTLA

SEQ ID NO: 92785 - protein, 321 aa, Homo sapiens
  MOD_RES (1)..(1): Any amino acid
XDPLSSSVSSVRLSGYCGSPWRVIGYHVVVWMMAGIPLLLFRWKPLWGVRLRLRPCNLAHAETLVIEIRDKEDSSWQLFTVQVQTEAIGEGSLEPSPQSQAEDGRSQAAVGAVPEGAWKDTAQLHKSEEAVSVGQRVLRYYLFQGQRYIWIETQQAFYQVSLLDHGRSCDDVHRSRHGLSLQDQMVRKAIYGPNVISIPVKSYPQLLVDEALNPYYGFQAFSIALWLADHYYWYALCIFLISSISICLSLYKTRKQSQTLRDMVKLSMRVCVCRPGGEEEWVDSSELVPGDCLVLPQEGGLMPCDAALVAGECMVNESSLT

SEQ ID NO: 92786 - protein, 5207 aa, Homo sapiens
MECPSCQHVSKEETPKFCSQCGERLPPAAPIADSENNNSTMASASEGEMECGQELKEEGGPCLFPGSDSWQENPEEPCSKASWTVQESKKKKRKKKKKGNKSASSELASLPLSPASPCHLTLLSNPWPQDTALPHSQAQQSGPTGQPSQPPGTATTPLEGDGLSAPTEVGDSPLQAQALGEAGVATGSEAQSSPQFQDHTEGEDQDASIPSGGRGLSQEGTGPPTSAGEGHSRTEDAAQELLLPESKGGSSEPGTELQTTEQQAGASASMAVDAVAEPANAVKGAGKEMKEKTQRMKQPPATTPPFKTHCQEAETKTKDEMAAAEEKVGKNEQGEPEDLKKPEGKNRSAAAVKNEKEQKNQEADVQEVKASTLSPGGGVTVFFHAIISLHFPFNPDLHKVFIRGGEEFGESKWDSNICELHYTRDLGHDRVLVEGIVCISKKHLDKYIPYKYVIYNGESFEYEFIYKHQQKKGEYVNRCLFIKSSLLGSGDWHQYYDIVYMKPHGRLQKVMNHITDGPRKDLVKGKQIAAALMLDSTFSILQTWDTINLNSFFTQFEQFCFVLQQPMIYEGQAQLWTDLQYREKEVKRYLWQHLKKHVVPLPDGKSTDFLPVDCPVRSKLKTGLIVLFVVEKIELLLEGSLDWLCHLLTSDASSPDEFHRDLSHILGIPQSWRLYLVNLCQRCMDTRTYTWLGALPVLHCCMELAPRHKDAWRQPEDTWAALEGLSFSPFREQMLDTSSLLQFMREKQHLLSIDEPLFRSWFSLLPLSHLVMYMENFIEHLGRFPAHILDCLSGIYYRLPGLEQVLNTQDVQDVQNVQNILEMLLRLLDTYRDKIPEEALSPSYLTVCLKLHEAICSSTKLLKFYELPALSAEIVCRMIRLLSLVDSAGQRDETGNNSVQTVFQGTLAATKRWLREVFTKNMLTSSGASFTYVKEIEVWRRLVEIQFPAEHGWKESLLGDMEWRLTKEEPLSQITAYCNSCWDTKGLEDSVAKTFEKCIIEAVSSACQSQTSILQGFSYSDLRKFGIVLSAVITKSWPRTADNFDDILKHLLTLADVKHVFRLCGTDEKILANVTEDAKRLIAVADSVLTKVVGDLLSGTILVGQLELIIKHKNQFLDIWQLREKSLSPQDEQCAVEEALDWRREELLLLKKEKRCVDSLLKMCGNVKHLIQVDFGVLAVRHSQDLSSKRLNDTVTVRLSTSSNSQRATHYHLSSQVQEMAGKIDLLRDSHIFQLFWREAAEPLSEPKEDQEAAELLSEPEEESERHILELEEVYDYLYQPSYRKFIKLHQDLKSGEVTLAEIDVIFKDFVNKYTDLDSELKIMCTVDHQDQRDWIKDRVEQIKEYHHLHQAVHAAKVILQVKESLGLNGDFSVLNTLLNFTDNFDDFRRETLDQINQELIQAKKLLQDISEARCKGLQALSLRKEFICWVREALGGINELKVFVDLASISAGENDIDVDRVACFHDAVQGYASLLFKLDPSVDFSAFMKHLKKLWKALDKDQYLPRKLCDSARNLEWLKTVNESHGSVERSSLTLATAINQRGIYVIQAPKGGQKISPDTVLHLILPESPGSHEESREYSLEEVKELLNKLMLMSGKKDRNNTEVERFSEVFCSVQRLSQAFIDLHSAGNMLFRTWIAMAYCSPKQGVSLQMDFGLDLVTELKEGGDVTELLAALCRQMEHFLDSWKRFVTQKRMEHFYLNFYTAEQLVYLSTELRKQPPSDAALTMLSFIKSNCTLRDVLRASVGCGSEAARYRMRRVMEELPLMLLSEFSLVDKLRIIMEQSMRCLPAFLPDCLDLETLGHCLAHLAGMGGSPVERCLPRGLQVGQPNLVVCGHSEVLPAALAVYMQTPSQPLPTYDEVLLCTPATTFEEVALLLRRCLTLGSLGHKVYSLLFADQLSYEVARQAEELFHNLCTQQHREDYQLVMVCDGDWEHCYLPSAFSQHKVFVTPQAPLEAIQAYLAGHYRVPKQTLSAAAVFNDRLCVGIVASERAGVGKSLYVKRLHDKMKMQLNVKNVPLKTIRLIDPQVDESRVLGALLPFLDAQYQKVPVLFHLDVTSSVQTGIWVFLFKLLILQYLMDINGKMWLRNPCHLYIVEILERRTSVPSRSSSALRTRVPQFSFLDIFPKVTCRPPKEVIDMELSALRSDTEPGMDLWEFCSETFQRPYQYLRRFNQNQDLDTFQYQEGSVEGTPEECLQHFLFHCGVINPSWSELRNFARFLNYQLRDCEASLFCNPSFIGDTLRGFKKFVVTFMIFMARDFATPSLHTSDQSPGKHMVTMDGVREEDLAPFSLRKRWESEPHPYVFFNDDHTTMTFIGFHLQPNINGSVDAISHLTGKVIKRDVMTRDLYQGLLLQRVPFNVDFDKLPRHKKLERLCLTLGIPQATDPDKTYELTTDNMLKILAIEMRFRCGIPVIIMGETGCGKTRLIKFLSDLRRGGTNADTIKLVKVHGGTTADMIYSRVREAENVAFANKDQHQLDTILFFDEANTTEAISCIKEVLCDHMVDGQPLAEDSGLHIIAACNPYRKHSEEMICRLESAGLGYRVSMEETADRLGSIPLRQLVYRVHALPPSLIPLVWDFGQLSDVAEKLYIQQIVQRLVESISLDENGTRVITEVLCASQGFMRKTEDECSFVSLRDVERCVKVFRWFHEHSAMLLAQLNAFLSKSSVSKNHTERDPVLWSLMLAIGVCYHASLEKKDSYRKAIARFFPKPYDDSRLLLDEITRAQDLFLDGVPLRKTIAKNLALKENVFMMVVCIELKIPLFLVGKPGSSKSLAKTIVADAMQGPAAYSDLFRSLKQVHLVSFQCSPHSTPQGIISTFRQCARFQQGKDLQQYVSVVVLDEVGLAEDSPKMPLKTLHPLLEDGCIEDDPAPHKKVGFVGISNWALDPAKMNRGIFVSRGSPNETELIESAKGICSSDILVQDRVQGYFASFAKAYETVCKRQDKEFFGLRDYYSLIKMVFAAAKASNRKPSPQDIAQAVLRNFSGKDDIQALDIFLANLPEAKCSEEVSPMQLIKQNIFGPSQKVPGGEQEDAESRYLLVLTKNYVALQILQQTFFEGDQQPEIIFGSGFPKDQEYTQLCRNINRVKICMETGKMVLLLNLQNLYESLYDALNQYYVHLGGQKYVDLGLGTHRVKCRVHPNFRLIVIEEKDVVYKHFPIPLINRLEKHYLDINTVLEKWQKSIVEELCAWVEKFINVKAHHFQKRHKYSPSDVFIGYHSDACASVVLQVIERQGPRALTEELHQKVSEEAKSILLNCATPDAVVRLSAYSLGGFAAEWLSQEYFHRQRHNSFADFLQAHLHTADLERHAIFTEITTFSRLLTSHDCEILESEVTGRAPKPTLLWLQQFDTEYSFLKEVRNCLTNTAKCKILIFQTDFEDGIRSAQLIASAKYSVINEINKIRENEDRIFVYFITKLSRVGRGTAYVGFHGGLWQSVHIDDLRRSTLMVSDVTRLQHVTISQLFAPGDLPELGLEHRAEDGHEEAMETEASTSGEVAEVAEEAMETESSEKVGKETSELGGSDVSILDTTRLLRSCVQSAVGMLRDQNESCTRNMRRVVLLLGLLNEDDACHASFLRVSKMRLSVFLKKQEESQFHPLEWLAREACNQDALQEAGTFRHTLWKRVQGAVTPLLASMISFIDRDGNLELLTRPDTPPWARDLWMFIFSDTMLLNIPLVMNNERHKGEMAYIVVQNHMNLSENASNNVPFSWKIKDYLEELWVQAQYITDAEGLPKKFVDIFQQTPLGRFLAQLHGEPQQELLQCYLKDFILLTMRVSTEEELKFLQMALWSCTRKLKAASEAPEEEVSLPWVHLAYQRFRSRLQNFSRILTIYPQVLHSLMEARWNHELAGCEMTLDAFAAMACTEMLTRNTLKPSPQAWLQLVKNLSMPLELICSDEHMQGSGSLAQAVIREVRAQWSRIFSTALFVEHVLLGTESRVPELQGLVTEHVFLLDKCLRENSDVKTHGPFEAVMRTLCECKETASKTLSRFGIQPCSICLGDAKDPVCLPCDHVHCLRCLRAWFASEQMICPYCLTALPDEFSPAVSQAHREAIEKHARFRQMCNSFFVDLVSTICFKDNAPPEKEVIESLLSLLFVQKGRLRDAAQRHCEHTKSLSPFNDVVDKTPVIRSVILKLLLKYSFHDVKDYIQEYLTLLKKKAFITEDKTELYMLFINCLEDSILEKTSAYSRNDELNHLEEEGRFLKAYSPASRGREPANEASVEYLQEVARIRLCLDRAADFLSEPEGGPEMAKEKQCYLQQVKQFCIRVENDWHRVYLVRKLSSQRGMEFVQGLSKPGRPHQWVFPKDVVKQQGLRQDHPGQMDRYLVYGDEYKALRDAVAKAVLECKPLGIKTALKACKTPQSQQSAYFLLTLFREVAILYRSHNASLHPTPEQCEAVSKFIGECKILSPPDISRFATSLVDNSVPLLRAGPSDSNLDGTVTEMAIHAAAVLLCGQNELLEPLKNLAFSPATMAHAFLPTMPEDLLAQARRWKGLERVHWYTCPNGHPCSVGECGRPMEQSICIDCHAPIGGIDHKPRDGFHLVKDKADRTQTGHVLGNPQRRDVVTCDRGLPPVVFLLIRLLTHLALLLGASQSSQALINIIKPPVRDPKGFLQQHILKDLEQLAKMLGHSADETIGVVHLVLRRLLQEQHQLSSRRLLNFDTELSTKEMRNNWEKEIAAVISPELEHLDKTLPTMNNLISQDKRISSNPVAKIIYGDPVTFLPHLPRKSVVHCSKIWSCRKRITVEYLQHIVEQKNGKERVPILWHFLQKEAELRLVKFLPEILALQRDLVKQFQNVQQVEYSSIRGFLSKHSSDGLRQLLHNRITVFLSTWNKLRRSLETNGEINLPKDYCSTDLDLDTEFEILLPRRRGLGLCATALVSYLIRLHNEIVYAVEKLSKENNSYSVDAAEVTELHVISYEVERDLTPLILSNCQYQVEEGRETVQEFDLEKIQRQIVSRFLQGKPRLSLKGIPTLVYRHDWNYEHLFMDIKNKMAQDSLPSSVISAISGQLQSYSDACEVLSVVEVTLGFLSTAGGDPNMQLNVYTQDILQMGDQTIHVLKALNRCQLKHTIALWQFLSAHKSEQLLRLHKEPFGEISSRYKADLSPENAKLLSTFLNQTGLDAFLLELHEMIILKLKNPQTQTEERFRPQWSLRDTLVSYMQTKESEILPEMASQFPEEILLASCVSVWKTAAVLKWNREMR

SEQ ID NO: 92787 - protein, 18 aa, Homo sapiens
  MOD_RES (1)..(1): Any amino acid
XNTLWASTIVASGWFVGP

SEQ ID NO: 92788 - protein, 36 aa, Homo sapiens
MINAQELLTLEDVTVEFTWEEWQLLGPFQKDLYRDV

SEQ ID NO: 92789 - protein, 126 aa, Homo sapiens
MAQEVSEYLSQNPRVAAWVEALRCDGETDKHWRHRRDFLLRNAGDLAPAGGAASASTDEAADAESGTRNRQLQQLISFSMAWANHVFLGCRYPQKVMDKILSMAEGIKVTDAPTYTTRDELVAKKG

SEQ ID NO: 92790 - protein, 224 aa, Homo sapiens
MVPWVRTMGQKLKQRLRLDVGREICRQYPLFCFLLLCLSAASLLLNRYIHILMIFWSFVAGVVTFYCSLGPDSLLPNIFFTIKYKPKQLGLQELFPQGHSCAVCGKVKCKRHRPSLLLENYQPWLDLKISSKVDASLSEVLELVLENFVYPWYRDVTDDESFVDELRITLRFFASVLIRRIHKGFTLLPRLECSGVISAHCNLCLPGSSDSPTSASRVAGITGL

SEQ ID NO: 92791 - protein, 41 aa, Homo sapiens
  MOD_RES (1)..(1): Any amino acid
XALENRKEPAALQYIFKLLDIENKGYLNVFSLNYFFRIYFY

SEQ ID NO: 92792 - protein, 136 aa, Homo sapiens
  MOD_RES (1)..(1): Any amino acid
XVLEMIRKRQEAQMELKKSLHGEARINKQSPRDHKAKKTLQSTPRNDDHDLLTMLPDEILNRGPDRVSLLLPRLECNGMISAHRKLRLPSSNDSPASASRVAGITGACHHAQLTFVFVVETRFHHVGQAGLELLTS

SEQ ID NO: 92793 - protein, 121 aa, Homo sapiens
MHGAARAPATSVSADCCIPAGLRLGPVPGTFKLGKYLSDRREPGPKKKVLTIQTSAHCAHGERGAGGRVGGLPSGVDRVNPGSQKLPGTDSGSYCRLTRRTDLLPSIARRPARGGADSVVF

SEQ ID NO: 92794 - protein, 155 aa, Homo sapiens
MAGPATQSPMKLMALQLLLWHSALWTVQEATPLGPASSLPQSFLLKCLEQVRKIQGDGAALQEKLAGCLSQLHSGLFLYQGLLQALEGISPELGPTLDTLQLDVADFATTIWQQMEELGMAPALQPTQGAMPAFASAFQRRAGGVLVASHLQSFL

SEQ ID NO: 92795 - protein, 145 aa, Homo sapiens
MAAAPQAPGRGSLRKTRPLVVKTSLNNPYIIRWSALESEDMHFILQTLEDRLKAIGLQKIEDKKKKNKTPFLKKESREKCSIAVDISENLKEKKTDAKQQVSGWTPAHVRKQLAIGVNEVTRALERRELLLVLFHSCCPGWSAVV

SEQ ID NO: 92796 - protein, 193 aa, Homo sapiens
LPYPIFAAIDNDLQPSWQEARAPETWFEFTPHHAGFSALGAFVSITHFGSKFKKGRLVRTHPERDLTFLRDQLRNLTLKGLWRRAVANAKSIGHLIFARLLRLQESSQGEHPPPEDEGGEPEHTWLTEMLENWTRTSLEKQEQPHEDPERKGSLSNLMDFVKKTGICASKWEWGTTHNFLYKHGGIRDKIMSS

SEQ ID NO: 92797 - protein, 82 aa, Homo sapiens
  MOD_RES (1)..(1): Any amino acid
XEENKENDLRPSLPQSYAATVARPSASSASTVPGYSEDGGALRGEVIPEHEFATGPVCLDDENEFPPIILCRGNQKGKTKQS

SEQ ID NO: 92798 - protein, 167 aa, Homo sapiens
  MOD_RES (1)..(1): Any amino acid
XNITKSEQKKNPQAVLDVLEFYNSKKTSNSQKYMSFTDKSAEDYNSSNALNVKAVSETPAVPPVSEDEDDDDDDATPPPVIAPRPEHTKSVYTRSVIEPLPVTPTRDVATSPISPTENNTTPPDALTRNTEKQKKKPKMSDEEILEKLLTSWEMSCGLLWNTWLEAP

SEQ ID NO: 92799 - protein, 71 aa, Homo sapiens
MTKIYGGRQRNGVMPSHFSRGSKSVARRVLQALEGLKMVEKDQDGGRKLTPQGQRDLDRIAGQVAAANKKH

SEQ ID NO: 92800 - protein, 195 aa, Homo sapiens
MATHHTLWMGLALLGVLGDLQAAPEAQVSVQPNFQQDKFLGRWFSAGLASNSSWLREKKAALSMCKSVVAPATDGGLNLTSTFLRKNQCETRTMLLQPAGSLGSYSYRSPREWGLHRPPGPSLGATLAGTTLGQPPAAEIHGVGDWGSTYSVSVVETDYDQYALLYSQGSKGPGEDFRMATLYSRTQTPRAELKE

SEQ ID NO: 92801 - protein, 78 aa, Homo sapiens
MTPQSLLQTTLFLLSLLFLVQGRCPRQGPQGRLSLLQPAEPDTQEQPPLQTHTRPAHLHRELRRGPHSPCPFPCSPPC

SEQ ID NO: 92802 - protein, 159 aa, Homo sapiens
MAATVNLELDPIFLKALGFLHSKSKDSAEKLKALLDESLARGIDSSYRPSQKDVEPPKISSTKNISIKQEPKISSSLPSGNNNGKVLTTEKVKKEAEKRPADKMKSDITEGVDIPKKPRLEKPETQSSPITVQSSKDLPMADLSSFEETSADDFAMEMG

SEQ ID NO: 92803 - protein, 164 aa, Homo sapiens
MEKCKGTSRMAGTTSADVKMSSSEEVSWISWFCGLRGNEFFCEVDEDYIQDKFNLTGLNEQVPHYRQALDMILDLEPDEELEDNPNQSDLIEQAAEMLYGLIHARYILTNRGIAQMVRPLCSYLPPSEHWKSTSKETLVTVLVCTVRTSQCFPLAFQTSQVKPW

SEQ ID NO: 92804 - protein, 246 aa, Homo sapiens
MPRSCCSRSGALLLALLLQASMEVRGWCLESSQCQDLTTESNLLECIRACKPDLSAETPMFPGNGDEQPLTENPRKYVMGHFRWDRFGRRNSSSSGSSGAGQKREDVSAGEDCGPLPEGGPEPRSDGAKPGPREGKRSYSMEHFRWGKPVGKKRRPVKVYPNGAEDESAEAFPLEFKRELTGQRLREGDGPDGPADDGAGAQADLEHSLLVAAEKKDEGPYRMEHFRWGSPPKDKRYGGFMTSEKS

SEQ ID NO: 92805 - protein, 143 aa, Homo sapiens
  MOD_RES (1)..(1): Any amino acid
XLEAAPTTTAYHSLMDEYGYEVGKAIGHGSYGSVYEAFYTKQKVMVAVKIISKKKASDDYLNKFLPREIQVMKVLRHKYLINFYRAIESTSRVYIILELAQGGDVLEWIQRYGACSEPLAGKWFSQLTLGIAYLHSKSIVHRT

SEQ ID NO: 92806 - protein, 399 aa, Homo sapiens
MAERAALEELVKLQGERVRGLKQQKASAELIEEEVAKLLKLKAQLGPDESKQKFVLKTPKGTRDYSPRQMAVREKVFDVIIRCFKRHGAEVIDTPVFELKVNDRRILDGMFAICGVSDSKFRTICSSVDKLDKVSWEEVKNEMVGEKGLAPEVADRIGDYVQQHGGVSLVEQLLQDPKLSQNKQALEGLGDLKLLFEYLTLFGIDDKISFDLSLARGLDYYTGVIYEAVLLQTPAQAGEEPLGVGSVAAGGRYDGLVGMFDPKGRKVPCVGLSIGVERIFSIVEQRLEALEEKIRTTETQVLVASAQKKLLEERLKLVSELWDAGIKAELLYKKNPKLLNQLQYCEEAGIPLVAIIGEQELKDGVIKLRSVTSREEVDVRREDLVEEIKRRTGQPLCIC

SEQ ID NO: 92807 - protein, 2149 aa, Homo sapiens
  MOD_RES (1)..(1): Any amino acid
XAEEETPSPTEPSMEAPEPAEEPLLGELTVTGSSPDSLSLSWTVPQGRFDSFTVQYKDRDGRPQVVRVGGEESEVTVGGLEPGRKYKMHLYGLHEGRRVGPVSAVGVTAPEEESPDAPLAKLRLGQMTVRDITSDSLSLSWTVPEGQFDHFLVQFKNGDGQPKAVRVPGHEDGVTISGLEPDHKYKMNLYGFHGGQRVGPVSAVGLTAPGKDEEMAPASTEPPTPEPPIKPRLEELTVTDATPDSLSLSWTVPEGQFDHFLVQYKNGDGQPKATRVPGHEDRVTISGLEPDNKYKMNLYGFHGGQRVGPVSAIGVTAAEEETPSPTEPSMEAPEPPEEPLLGELTVTGSSPDSLSLSWTVPQGRFDSFTVQYKDRDGRPQVVRVGGEESEVTVGGLEPGRKYKMHLYGLHEGRRVGPVSTVGVTAPQEDVDETPSPTEPGTEAPEPPEEPLLGELTVTGSSPDSLSLSWTVPQGRFDSFTVQYKDRDGRPQAVRVGGQESKVTVRGLEPGRKYKMHLYGLHEGRRLGPVSAVGVTEDEAETTQAVPTMTPEPPIKPRLGELTMTDATPDSLSLSWTVPEGQFDHFLVQYRNGDGQPKAVRVPGHEDGVTISGLEPDHKYKMNLYGFHGGQRVGPISVTGVTAAEEETPSPTELSTEAPEPPEEPLLGELTVTGSSPDSLSLSWTIPQGHFDSFTVQYKDRDGRPQVMRVRGEESEVTVGGLEPGRKYKMHLYGLHEGRRVGPVSTVGVTVPTTTPEPPNKPRLGELTVTDATPDSLSLSWMVPEGQFDHFLVQYRNGDGQPKVVRVPGHEDGVTISGLEPDHKYKMNLYGFHGGQRVGPISVIGVTAAEEETPAPTEPSTEAPEPPEEPLLGELTVTGSSPDSLSLSWTIPQGRFDSFTVQYKDRDGRPQVVRVRGEESEVTVGGLEPGCKYKMHLYGLHEGQRVGPVSAVGVTVPTMTPEPPIKPRLGELTVTDATPDSLSLSWMVPEGQFDHFLVQYRNGDGQPKAVRVPGHEDGVTISGLEPDHKYKMNLYGFHGGQRVGPVSAIGVTEEETPSPTEPSTEAPEAPEEPLLGELTVTGSSPDSLSLSWTVPQGRFDSFTVQYKDRDGQPQVVRVRGEESEVTVGGLEPGRKYKMHLYGLHEGQRVGPVSTVGITAPLPTPLPVEPRLGELAVAAVTSDSVGLSWTVAQGPFDSFLVQYRDAQGQPQAVPVSGDLRAVAVSGLDPARKYKFLLFGLQNGKRHGPVPVEARTAPDTKPSPRLGELTVTDATPDSVGLSWTVPEGEFDSFVVQYKDKDGRLQVVPVAANQREVTVQGLEPSRKYRFLLYGLSGRKRLGPISADSTTAPLEKELPPHLGELTVAEETSSSLRLSWTVAQGPFDSFVVQYRDTDGQPRAVPVAADQRTVTVEDLEPGKKYKFLLYGLLGGKRLGPVSALGMTAPEEDTPAPELAPEAPEPPEEPRLGVLTVTDTTPDSMRLSWSVAQGPFDSFVVQYEDTNGQPQALLVDGDQSKILISGLEPSTPYRFLLYGLHEGKRLGPLSAEGTTGLAPAGQTSEESRPRLSQLSVTDVTTSSLRLNWEAPPGAFDSFLLRFGVPSPSTLEPHPRPLLQRELMVPGTRHSAVLRDLRSGTLYSLTLYGLRGPHKADSIQGTARTLSPVLESPRDLQFSEIRETSAKVNWMPPPSRADSFKVSYQLADGGEPQSVQVDGQARTQKLQGLIPGARYEVTVVSVRGFEESEPLTGFLTTVPDGPTQLRALNLTEGFAVLHWKPPQNPVDTYDIQVTAPGAPPLQAETPGSAVDYPLHDLVLHTNYTATVRGLRGPNLTSPASITFTTGLEAPRDLEAKEVTPRTALLTWTEPPVRPAGYLLSFHTPGGQTQEILLPGGITSHQLLGLFPSTSYNARLQAMWGQSLLPPVSTSFTTGGLRIPFPRDCGEEMQNGAGASRTSTIFLNGNRERPLIVFCDMETDGGGWLVFQRRMDGQTDFWRDWEDYAHGFGNISGEFWLGNEALHSLTQAGDYSMRVDLRAGDEAVFAQYDSFHVDSAAEYYRLHLEGYHGTAGDSMSYHSGSVFSARDRDPNSLLISCAVSYRGAWWYRNCHYANLNGLYGSTVDHQGVSWYHWKGFEFSVPFTEMKLRPRNFRSPAGGG

SEQ ID NO: 92808 - protein, 168 aa, Homo sapiens
MNDFGIKNMDQVAPVANSYRGTLKRQPAFDTFDGSLFAVFPSLNEEQTLQEVPTGLDSISHDSANCELPLLTPCSKAVMSQALKATFSGFKKEQRRLGIPKNPWLWSEQQVCQWLLWATNEFSLVNVNLQRFGMNGQMLCNLGKERFLELAPDFVGDILWEHLEQMIK

SEQ ID NO: 92809 - protein, 54 aa, Homo sapiens
MVAVLEVISSLEKYPITKEALEETRLGKLINDVRKKTKNEELAKRAKKLLRSWQ

SEQ ID NO: 92810 - protein, 183 aa, Homo sapiens
MSEDKKDEGSGTSTSVRKASKETSCKRQSKDSAWDPSQTMKKPKQNQLTPVTNSEVALVNAYPEQRRARRQSQFNEVNQNQHDSDTTEYGSEESNSEASSWKESESEHHPSPDSIKRRKMAQRQRNLGSYQMSERHCLHCKALRTNEWLAHHSRQKPSVTPPMKRDSQEESSISDINKKFSKF

SEQ ID NO: 92811 - protein, 48 aa, Homo sapiens
MAKPCGVRLSGEARKQVEVFRQNLFQEILATENHIPESALARGLPQCG

SEQ ID NO: 92812 - protein, 410 aa, Homo sapiens
MEALLEGIQNRGHGGGFLTSCEAELQELMKQIDIMVAHKKSEWEGRTHALETCLKIREQELKSLRSQLDVTHKEVGMLHQQVEEHEKIKQEMTMEYKQELKKLHEEEFRQKSLDWEKQRLIYQQQVSSLEAQRKALAEQSEIIQAQLVNRKQKLESVELSSQSEIQHLSSKLERANDTICANELEIERLTMRVNDLVGTSMTVLQEQQQKEEKLRESEKLLEALQEEKRELKAALQSQENLIHEARIQKEKLQEKVKATNTQHAVEAISLESVSATCKQLSQELMEKYEELKRMEAHNNEYKAEIKKLKEQILQGEQSYSSALEGMKMEISHLTQELHQRDITIASTKGSSSDMEKRLRAEMQKAEDKAVEHKEILDQLESLKLENRHLSEMVMKLELGLHEANPWPAQT

SEQ ID NO: 92813 - protein, 197 aa, Homo sapiens
MVWRLVLLALWVWPSTQAGHQDKDTTFDLFSISNINRKTIGAKQFRGPDPGVPAYRFVRFDYIPPVNADDLSKITKIMRQKEGFFLTAQLKQDGKSRGTLLALEGPGLSQRQFEIVSNGPADTLDLTYWIDGTRHVVSLEDVGLADSQWKNVTVQVAGETYSLHVGCDLIDSFALDEPFYEHLQAEKSRMVCFRTST

SEQ ID NO: 92814 - protein, 614 aa, Homo sapiens
VAAMIRAGDTTKFDVEVLKQLLKLLPEKHEIENLRAFTEERAKLASADHFYLLLLAIPCYQLRIECMLLCEGAAAVLDMVRPKAQLVLAACESLLTSRQLPIFCQLILRIGNFLNYGSHTGDADGFKISTLLKLTETKSQQNRVTLLHHVLEEAEKSHPDLLQLPRDLEQPSQAAGINLEIIRSEASSNLKKLLETERKVSASVAEVQEQYTERLQASISAFRALDELFEAIEQKQRELADYLCEDAQQLSLEDTFSTMKAFRDLFLRALKENKDRKEQAAKAERRKQQLAEEEARRPRGEDGKPVRKGPGKQEEVCVIDALLADIRKGFQLRKTARGRGDTDGGSKAASMDPPRATEPVATSNPAGDPVGSTRCPASEPGLDATTASESRGWDLVDAVTPGPQPTLEQLEEGGPRPLERRSSWYVDASDVLTTEDPQCPQPLEGAWPVTLGDAQALKPLKFSSNQPPAAGSSRQDAKDPTSLLGVLQAEADSTSEGLEDAVHSRGARPPAAGPGGDEDEDEEDTAPESALDTSLDKSFSEDAVTDSSGSGTLPRARGRASKGTGKRRKKRPSRSQEGNSGRGPGHRPTPGRWHPAGPSPSPLGTASSSGTQER

SEQ ID NO: 92815 - protein, 1330 aa, Homo sapiens
  MOD_RES (1)..(1): Any amino acid
XTGPLLVPFTLNFTITNLQYEENMGHPGSRKFNITESVLQGLLKPLFKSTSVGPLYSGCRLTLLRPEKDGVATRVDAICTHRPDPKIPGLDRQQLYWELSQLTHSITELGPYTLDRDSLYVNGFTQRSSVPTTSTPGTFTVQPETSETPSSLPGPTATGPVLLPFTLNFTITNLQYEEDMRRPGSRKFNTTERVLQGLLMPLFKNTSVSSLYSGCRLTLLRPEKDGAATRVDAVCTHRPDPKSPGLDRERLYWKLSQLTHGITELGPYTLDRHSLYVNGFTHQSSMTTTRTPDTSTMHLATSRTPASLSGPMTASPLLVLFTINFTITNLRYEENMHHPGSRKFNTTERVLQGLLRPVFKNTSVGPLYSGCRLTLLRPKKDGAATKVDAICTYRPDPKSPGLDREQLYWELSQLTHSITELGPYTLDRDSLYVNGFTQRSSVPTTSIPGTPTVDLGTSGTPVSKPGPSAASPLLVLFTLNFTITNLRYEENMQHPGSRKFNTTERVLQGLLRSLFKSTSVGPLYSGCRLTLLRPEKDGTATGVDAICTHHPDPKSPRLDREQLYWELSQLTHNITELGPYALDNDSLFVNGFTHRSSVSTTSTPGTPTVYLGASKTPASIFGPSAASHLLILFTLNFTITNLRYEENMWPGSRKFNTTERVLQGLLRPLFKNTSVGPLYSGCRLTLLRPEKDGEATGVDAICTHRPDPTGPGLDREQLYLELSQLTHSITELGPYTLDRDSLYVNGFTHRSSVPTTSTGVVSEEPFTLNFTINNLRYMADMGQPGSLKFNITDNVMQHLLSPLFQRSSLGARYTGCRVIALRSVKNGAETRVDLLCTYLQPLSGPGLPIKQVFHELSQQTHGITRLGPYSLDKDSLYLNGYNEPGPDEPPTTMGYHLKTLTLNFTISNLQYSPDMGKGSATFNSTEGVLQHLLRPLFQKSSMGPFYLGCQLISLRPEKDGAATGVDTTCTYHPDPVGPGLDIQQLYWELSQLTHGVTQLGFYVLDRDSLFINGYAPQNLSIRGEYQINFHIVNWNLSNPDPTSSEYITLLRDIQDKVTTLYKGSQLHDTFRFCLVTNLTMDSVLVTVKALFSSNLDPSLVEQVFLDKTLNASFHWLGSTYQLVDIHVTEMESSVYQPTSSSSTQHFYLNFTITNLPYSQDKAQPGTTNYQRNKRNIEDALNQLFRNSSIKSYFSDCQVSTFRSVPNRHHTGVDSLCNFSPLARRVDRVAIYEEFLRMTRNGTQLQNFTLDRSSVLVDGYSPNRNEPLTGNSDLPFWAVILIGLAGLLGVITCLICGVLVTTRRRKKEGEYNVQQQCPGYYQSHLDLEDLQ

SEQ ID NO: 92816 - protein, 476 aa, Homo sapiens
MAAAACGTKAMALFKRTLVLSPAAAPRGPGAGTAPRGCCLPPAAWPCKDWPRGEGGRLWSRLPQSHSHSHSHSHSHSCSSTSPTAVCVVCPQDSLSSSLKTCYKYLNQTSRSFAAVIQALDGEMRNAVCIFYLVLRALDTLEDDMTISVEKKVPLLHNFHSFLYQPDWRFMESKEKDRQVLEDFPTISLEFRNLAEKYQTVIADICRRMGIGMAEFLDKHVTSEQEWDKYCHYVAGLVGIGLSRLFSASEFEDPLVGEDTERANSMGLFLQKTNIIRDYLEDQQGGREFWPQEVWSRYVKKLGDFAKPENIDLAVQCLNELITNALHHIPDVITYLSRLRNQSVFNFCAIPQVMAIATLAACYNNQQVFKGAVKIRKGQAVTLMMDATNMPAVKAIIYQYMEEIYHRIPDSDPSSSKTRQIISTIRTQNLPNCQLISRSHYSPIYLSFVMLLAALSWQYLTTLSQVTEDYVQTGEH

SEQ ID NO: 92817 - protein, 19 aa, Homo sapiens
MLPRDERRFKAADLNGDLT

SEQ ID NO: 92818 - protein, 225 aa, Homo sapiens
MNGEEEFFDAVTGFDSDNSSGEFSEANQKVTGMIDLDTSKNNRIGKTGERPSQENGIQKHRTSLPAPMFSRSDFSVWTILKKCVGLELSKITMPIAFNEPLSFLQRITEYMEHVYLIHRASCQPQPLERMQSVAAFAVSAVASQWERTGKPFNPLLGETYELIREDLGFRFISEQVSHHPPISAFHSEGLNHDFLFHGSIYPKLKFWGKSVEAEPRGTITLELLK

SEQ ID NO: 92819 - protein, 142 aa, Homo sapiens
QAQKEEIRRLFQQKLDELGVKALTYNDLIQAQKEISAHNQQLREQSEQLEQDNRALRGQSLQLLKARCEELQLDWATLSLEKLLKEKQALKSQISEKQRHCLELQSPIPSTLCPPAHLTCPQRGFTVDGPGALSLDLCCLFK

SEQ ID NO: 92820 - protein, 151 aa, Homo sapiens
MVTQYWPDREPPPGEAIFPFNIHENDRQQIRDNIVEGIIRSPDLVRVQLTMCLRAIIKHDFPGHWPGVVDKIDYYLQSQSSASWLGSLLCLYQLVKTYEYKKAEEREPLIIAMQIFLPRIQQQIVQLLPDSSYYSVLLQKQILKIFYALVQ

SEQ ID NO: 92821 - protein, 86 aa, Homo sapiens
MGLSAAAPLWGPPGLLLAIALHPALSVPPRRDYCVLGAGPAGLQMAYFLQRAGRDYAVFERAPRPGSFFTRYPRHRKLISINKRYT

SEQ ID NO: 92822 - protein, 189 aa, Homo sapiens
MSVLTSPRGKVEVVHCRRTESQDVYCIKSLIRKFTCKLFGKLNIIYLLEKANLAVTLCNDKEEIMAQATFLDYPNWNVAKQDDWVSVFRELDSDIPCTPLNTLFMHLFVAVDEYSVGCCKEILRTVYKAVPELHFIFLIVPSYMSLGSTLITVFDQVGNIPCLTYEEDFAVHICHRHSHYPQLHVRKAR

SEQ ID NO: 92823 - protein, 53 aa, Homo sapiens
MFCSEKKLREVERIVKANDREYNEKFQYADNRIHTSKYNILTFLPINLFEQFQ

SEQ ID NO: 92824 - protein, 86 aa, Homo sapiens
MEVMNLMEQPIKVTEWQQTYTYDSGIHSGANTCVPSVSSKGIMEEDEACGRQYTLKKTTTYTQGVPPSQGDLEYQMSTTARAKRVR

SEQ ID NO: 92825 - protein, 69 aa, Homo sapiens
MEGKWLLCMLLVLGTAIVEAHDGHDDDVIDIEDDLDDVIEEVEDSKPDTTAPPSSPKVDFIQSQERRYR

SEQ ID NO: 92826 - protein, 248 aa, Homo sapiens
  MOD_RES (1)..(1): Any amino acid
XFSIKQTIVSDCSFVASLAISAAYERRFNKKLITGIIYPQNKDGEPEYNPCGKYMVKLHLNGVPRKNTYKLNISNLKIQNTPVIIDDQLPVDHKGELLCSYSNNKSELWVSLIEKAYMKVMGGYDFPGSNSNIDLHALTGWIPERIAMHSDSQTFSKDNSFRMLYQRFHKGDVLITASTGMMTEAEGEKWGLVPTHAYAVLDIREFKGLRFIQLKNPWSHLRWKGRYSENDVKNWTPELQKYLNFDPR

SEQ ID NO: 92827 - protein, 89 aa, Homo sapiens
MPVNSSGPDWVTVIPRRIKETNSLELSQGSGTFPSGYYYKDQWRPRKFKMRQFNDPTTLQSAYKEKWCIYLVTQQSGNGLNTLLHLFQI

SEQ ID NO: 92828 - protein, 80 aa, Homo sapiens
MSKQQPTQFINPETPGYVGFANLPNQVHRKSVKKGFEFTLMVVGESGLGKSTLINSLFLTDLYPERVIPGAAVCFFSRKN

SEQ ID NO: 92829 - protein, 105 aa, Homo sapiens
MGLLVFVRNLLLALCLFLVLGFLYYSAWKLHLLQWEEDSKYDRLGFLLNLDSKLPAELATKYANFSEGACKPGYASALMTAIFPRAKRNGAWRQKHIQAYVLRQR

SEQ ID NO: 92830 - protein, 83 aa, Homo sapiens
MVAMAEAEAGVAVEVRGLPPAVPDELLTLYFENRRRSGGGPVLSWQRLGCGGVLTFREPADAERVLAQADHELHGAQLSLRPA

SEQ ID NO: 92831 - protein, 125 aa, Homo sapiens
MSYFGEHFWGEKNHGFEVLYHSVKQGPISTKELADFIRERATIEETYSKAMAKLSKLASNGTPMGTFAPLWEVFRVSSDKLALCHLELTRKLQDLIKDVLRYGEEQLKTHKKCKEEVVSTLDAVQ

SEQ ID NO: 92832 - protein, 173 aa, Homo sapiens
FHRVYSFLDYIMGGCQIHFTTKRERGETGVAIDFTASNGDPRNSCSLHYINPYQPNEYLKALVSVGEICQDYDSDKRFSALGFGARIPPKYEVSHDFAINFNPEDDECEGIQGVVEAYQNCLPRVQLYGPTNVAPIISKVARVAAAEESTGKASQYYILLILTDGVVTDMADT

SEQ ID NO: 92833 - protein, 206 aa, Homo sapiens
MGFSNMEDDGPEEEERVAEPQANFNTPQALRFEELLANLLNEQHQIAKELFEQLKMKKPSAKQQKEVEKVKPQCKEVHQTLILDPAQRKRLQQQMQQHVQLLTQIHLLATCNPNLNPEASSTRICLKELGTFAQSSIALHHQYNPKFQTLFQPCNLMGAMQLIEDFSTHVSIDCSPHKTVKKTANEFPCLPKQVAWILATSKVFMY

SEQ ID NO: 92834 - protein, 275 aa, Homo sapiens
MALTESALSQHGLSKVVYSGPHPQREMLTAQNRFEVLTFLLLCYNAALTYMPSVSLQSLCQICSRICVCGYPRQHVRKYKGISSRIPVSSGFMVQMLTGIYFAFYNGEWDLAQKALDDIIYRAQLELYPEPLLVANAIKASLPHGPMKSNKEGTRCIQVEITPTSSRISRNAVTSMSIRGHRWKRHEQPDNNNDATELGILVIPEISVTNVAGERTGNGEKGRTLGEIDAQHIQGVQETATDPRTESKGLPEIRRQKSVRKMMEDGINSPGRVQF

SEQ ID NO: 92835 - protein, 172 aa, Homo sapiens
MYEPEAKKSKTAAKKNDKEAAGEGPALYEDPPDQKTSPSGKPATLKICSWNVDGLRAWIKKKGLDWVKEEAPDILCLQETKCSENKLPAELQELPGLSHQYWSAPSDKEGYSGVGLLSRQCPLKVSYGIGDEEHDQEGRVIVAEFDSFVLVTAYVPNAGRGLVRLEYRQRWD

SEQ ID NO: 92836 - protein, 106 aa, Homo sapiens
MALSSAWRSVLPLWLLWSAACSRAASGDDNAFPFDIEGSSAVGRQDPPETSEPRVALGRLPPAAEKCNAGFFHTLSGECVPCDCNGNSNECLDGSGYCVHCQRNTT

SEQ ID NO: 92837 - protein, 69 aa, Homo sapiens
MTEFRSVAQAGVQWEDLSSLQPSPSGFKQFSCLSLLSNWDYRHAPPRPATFCIFGRNWVSPCWPGLSGL

SEQ ID NO: 92838 - protein, 126 aa, Homo sapiens
MWCLLRGLGRPGALARGALGQQQSLGARALASAGSESRDEYSYVVVGAGSAGCVLAGRLTEDPAERVLLLEAGPKDVLAGSKRLSWKIHMPAALVANLCDDRYNWCYHTEVQRGLDGRVLYWPRGR

SEQ ID NO: 92839 - protein, 81 aa, Homo sapiens
MKPKLMYQELKVPAEEPANELPMNEIEAWKAAEKKARWVLLVLILAVVGFGALMTQLFLWEYGDLHLFGPNQRPAPCYDPC

SEQ ID NO: 92840 - protein, 776 aa, Homo sapiens
MVQLHQDTDPQIPKGQPCTLNSSEGGARPAVPHTLFSSALDRWLHNDSFIMAVGEPLVHIRVTLLLLWFGMFLSISGHSQARPSQYFTSPEVVIPLKVISRGRGAKAPGWLSYSLRFGGQRYIVHMRVNKLLFAAHLPVFTYTEQHALLQDQPFIQDDCYYHGYVEGVPESLVALSTCSGGFLGMLQINDLVYEIKPISVSATFEHLVYKIDSDDTQFPPMRCGLTEEKIAHQMELQLSYNFTLKQSSFVGWWTHQRFVELVVVVDNIRYLFSQSNATTVQHEVFNVVNIVDSFYHPLEVDVILTGIDIWTASNPLPTSGDLDNVLEDFSIWKNYNLNNRLQHDVAHLFIKDTQGMKLGVAYVKGICQNPFNTGVDVFEDNRLVVFAITLGHELGHNLGMQHDTQWCVCELQWCIMHAYRKVTTKFSNCSYAQYWDSTISSGLCIQPPPYPGNIFRLKYCGNLVVEEGEECDCGTIRQCAKDPCCLLNCTLHPGAACAFGICCKDCKFLPSGTLCRQQVGECDLPEWCNGTSHQCPDDVYVQDGISCNVNAFCYEKTCNNHDIQCKEIFGQDARSASQSCYQEINTQGNRFGHCGIVGTTYVKCWTPDIMCGRVQCENVGVIPNLIEHSTVQQFHLNDTTCWGTDYHLGMAIPDIGEVKDGTVCGPEKICIRKKCASMVHLSQACQPKTCNMRGICNNKQHCHCNHEWAPPYCKDKGYGGSADSGPPPKNNMEGLNVMGKLRYLSLLCLLPLVAFLLFCLHVLFKKRTKSKEDEEG

SEQ ID NO: 92841 - protein, 156 aa, Homo sapiens
MSASSSGGSPRFPSCGKNGVTSLTQKKVLRAPCGAPSVTVTKSHKRGMKGDTVNVRRSVRVKTKNPPHCLEITPPSSEKLVSVMRLSDLSTEDDDSGHCKMNRYDKKIDSLMNAVGCLKSEVKMQKGERQMAKRFLEERKEELEEVAHELAETEHE

SEQ ID NO: 92842 - protein, 290 aa, Homo sapiens
MTFDLTKITKTSSSFEVRTWDPEGVIFYGDTNPKDDWFMLGLRDGRPEIQLHNHWAQLTVGAGPRLDDGRWHQLVPALDGCLRRDSWLDKQAEISASAPTSLRSCDVESNPGIFLPPGTQAEFNLRDIPQPHAEPWAFSLDLGLKQAAGSGHLLALGTPENPSWLSLHLQDQKVVLSSGSGPGLDLPLVLGLPLQLKLSMSRVVLSQGSKMKALALPPLGLAPLLNLWAKPQGRLFLGALPGEDSSTSFCLNGLWAQGQRLDVDQALNRSHEIWTHSCPQSPGNGTDASH

SEQ ID NO: 92843 - protein, 4188 aa, Homo sapiens
MEKDAEDGAPSEGAEAPPSTEEAAPPRSEEEEAPRPPTVEAPAEDGFSPSAEDAVSSVVDYRDLIPSEEGIVLPDDHEADLNRVRQRLAPRPVQSVISEVLSLPSSRRSSRYRRSMSGLPNLQETLKERQARFREARESRRLKIDPSYKYIFEILAENLGLDIVTVEELILDCPSLEAFTNFFAKDGCKTLKFLYQEGDVPGIECGRTIAGATKGAKMMKLYIDNAAPDKLKGLCIFFVRCRNDVAINVKTIQEEALFTVLDASKGLLNGIRDMLANIFLPAVLATNNWGALNQSKQGESEKHIFTETINRYLSFLDGARISIEGTVKLKTIDNVNFSKLHTFEEVTAAASNSETVHQLEEVLMVWYKQIEQVLIESEQMRKEAGDSGPLTELEHWKRMSAKFNYIIEQIKGPSCKAVINVLNVAHSKLLKNWRDLDARITDTANESKDNVRYLYTLEKVCQPLYNHDLVSMAHGIQNLINAIRMIHGVSRYYNTSERMTSLFIKVTNQMVTACKAYITDGGLNHVWDQETPVVLKKIQDCIFLFKEYQASFHKTRKLISESSGEKSFEVSEMYIFGKFEAFCKRLEKITEMITVVQTYSTLSNSTIEGIDIMAIKFRNIYQGVKKKQYDILDPRRTEFDTDFLDFMTKINGLEVQIQAFMNSSFGKILSSQQALQLLQRFQKLNIPCLGLEINHTIERILQYYVAELDATKKLYHSQKDDPPLARNMPPIAGKILWVRQLYRRISEPINYFFKNSDILSSPDGKAVIRQYNKISYVLVEFEVVYHTAWIREISQLHYALQATLFVRHPETGKLLVNFDPKILEVVRETKCMIKMKLDVPEQAKRLLKLESKLKADKLYLQGLLQYYDELCQEVPSVFVNLMTPKMKKVESVLRQGLTVLTWSSLTLESFFQEVELVLDMFNQLLKKISDLCEMHIDTVLKEIAKTVLISLPESGATKVEDMLTLNETYTKEWADILNHKSKHVEEAVRELISIFEQIYEVKYTGKVGKQSEQRKHVVFGSETGEGENNDYEANIVNEFDTHDKEDEFKKECKEVFAFFSHQLLDSLQKATRLSLDTMKRRIFVASLYGRKQSEDIISFIKSEVHLAIPNVVMIPSLDDIQQAINRMIQLTLEVSRGVAHWGQQQIRPIKSVIPSPTTTDVTHQNTGKLLKKEERSFEEAIPARKLKNFYPGVAEHKDISKLVLLLSSSVNSLRKAAHEALQDFQKYKTLWTEDRDVKVKEFLANNPSLTEIRSEILHYATFEQEIDELKPIIVVGALELHTEPMKLALSIEAKAWKMLLCRYLNEEYKKKMSYMIAFINEYLKKLSRPIRDLDDVRFAMEALSCIRDNEIQMDMTLGPIEEAYAILNRFEVEVTKEESEAVDTLRYSFNKLQSKAVSVQEDLVQVQPKFKSNLLESVEVFREDVINFAEAYELEGPMVPNIPPQEASNRLQIFQASFDDLWRKFVTYSSGEQLFGLPVTDYEVLHKTRKELNLLQKLYGLYDTVMSSISGYYEILWGDVDIEKINAELLEFQNRCRKLPKGLKDWQAFLDLKKRIDDFSESCPLLEMMTNKAMKQRHWDRISELTGTPFDVESDSFCLRNIMEAPLLKHKDDIEDICISAIKEKDIEAKLTQVIENWTNQNLSFAAFKGKGELLLKGTESGEIITLMEDSLMVLGSLLSNRYNAPFKKNIQNWVYKLSTSSDIIEEWLVVQNLWVYLEAVFVGGDIAKQLPQEAKRFQNIDKSWIKIMQRAHENPNVINCCVGDETMGQLLPHLHEQLEVCQKSLTGYLEKKRLLFPRFFFVSDPVLLEILGQASDSHTIQPHLPAVSDNINEVTFHAKDYDRIMAVISREGEKIVLDNSVMAKGPVEIWLLDLLKMQMSSLHNIIRSAFYQISDSGFQLLPFLSHFPAQVGLLGIQMLWTHDSEEALRNAKDDRKIMQVTNQKFLDILNTLISQTTHDLSKFDRVKFETLITIHVHQRDIFDDLVKMHIKSPTDFEWLKQSRFYFKEDLDQTVVSITDVDFIYQNEFLGCTDRLVITPLTDRCYITLAQALGMNMGGAPAGPAGTGKTETTKDMGRCLGKYVVVFNCSDQMDFRGLGRIFKGLAQSGSWGCFDEFNRIELPVLSVAAQQIYIVLTARKERKKQFIFSDGDCVDLNPEFGIFLTMNPGYAGRQELPENLKIQFRTVAMMVPDRQIIMRVKLASCGFLENVILAQKFYVLYKLCEEQLTKQVHYDFGLRNILSVLRTLGSQKRARPEDSELSIVMRGLRDMNLSKLVDEDEPLFLSLINDLFPGLQLDSNTYAELQNAVAHQVQIEGLINHPPWNLKLVQLYETSLVRHGLMTLGPSGSGKTTVITILMKAQTECGRPHREMRMNPKAITAPQMFGRLDTATNDWTDGIFSTLWRKTLKAKKGENIFLILDGPVDAIWIENLNSVLDDNKTLTLANGDRIPMAPSCKLLFEVHNIENASPATVSRMGMVYISSSALSWRPILQAWLKKRTAQEAAVFLTLYEKVFEDTYTYMKLNLNPKMQLLECNYIVQSLNLLEGLIPSKEEGGVSCVEHLHKLFVFGLMWSLGALLELESREKLEAFLRQHESKLDLPEIPKGSNQTMYEFYVTDYGDWEHWNKKLQPYYYPTDSIPEYSSILVPNVDNIRTNFLIDTIAKQHKAVLLTGEQGTAKTVMVKAYLKKYDPEVQLSKSLNFSSATEPMMFQRTIESYVDKRIGSTYGPPGGRKMTVFIDDINMPVINEWGDQITNEIVRQMMEMEGMYSLDKPGDFTTIVDVQLIAAMIHPGGGRNDIPQRLKRQFTVFNCTLPSNASIDKIFGIIGCGYFDPCRSFKPQICEMIVNLVSVGRVLWQWTKVKMLPTPSKFHYIFNLRDLSRIWQGMLTIKAEECASIPTLLSLFKHECSRVIADRFITPEDEQWFNAHLTRAVEENIGSDAASCILPEPYFVDFLREMPEPTGDEPEDSVFEVPKIYELMPSFDFLAEKLQFYQRQFNEIIRGTSLDLVFFKDAMTHLIKISRIIRTSCGNALLVGVGGSGKQSLSRLASFIAGYQIFQITLTRSYNVTNLTDDLKALYKVAGADGKGITFIFTDSEIKDEAFLEYLNNLLSSGEISNLFARDEMDEITQGLISVMKRELPRHPPTFDNLYEYFISRSRKNLHVVLCFSPVGEKFRARSLKFPGLISGCTMDWFSRWPREALIAVASYFLSDYNIVCSSEIKRQVVETMGLFHDMVSESCESYFQRYRRRAHVTPKSYLSFINGYKNIYAEKVKFINEQAERMNIGLDKLMEASESVAKLSQDLAVKEKELAVASIKADEVLAEVTVSAQASAKIKNEVQEVKDKAQKIVDEIDSEKVKAESKLEAAKPALEEAEAALNTIKPNDIATVRKLAKPPHLIMRIMDCVLLLFQKKIDPVTMDPEKSCCKPSWGESLKLMSATGFLWSLQQFPKDTINEETVELLQPYFNMDDYTFESAKKVCGNVAGLLSWTLAMAIFYGINREVLPLKANLAKQEGRLAVANAELGKAQALLDEKQAELDKVQAKFDAAMNEKMDLLNDADTCRKKMQAASTLIDGLSGEKIRWTQQSKEFKAQINRLVGDILLCTGFLSYLGPFNQIFRNYLLKDQWEMELRARKIPFTENLNLISMLVDPPTIGEWGLQGLPGDDLSIQNGIIVTKATRYPLLIDPQTQGKTWIKSKEKENDLQVTSLNHKYFRTHLEDSLSLGRPLLIEDIHEELDPALDNVLEKNFIKSGTTFKVKVGDKECDIMDTFKLYITTKLPNPAFTPEINAKTSVIDFTVTMKGLENQLLRRVILTEKQELEAERVKLLEDVTFNKRKMKELEDNLLYKLSATKGSLVDDESLIGVLRTTKQTAAEVSEKLHVAAETEIKINAAQEEFRPAATRGSILYFLITEMSMVNIMYQTSLAQFLKLFDQSMARSEKSPLPQKRITNIIEYLTYEVFTYSVRGLYENHKFLFVLLMTLKIDLQRGTVKHREFQALIKGGAALDLKACPPKPYRWILDMTWLNLVELSKLPQFAEIMNQISRNEKGWKSWFDKDAPEEEIIPDGYNDSLDTCHKLLLIRSWCPDRTVFQARKYIADSLEEKYTEPVILNLEKTWEESDTRTPLICFLSMGSDPTNQIDALAKKLKLECRTISMGQGQEVHARKLIQMSMQQVCDKRLLLLQHYC

SEQ ID NO: 92844 - protein, 145 aa, Homo sapiens
  MOD_RES (1)..(1): Any amino acid
XQEYTDSTGIDLHEFLINTLKNNSRDRMILLKMEQEIIDFIADNNNHYKKFPQMSSYQRMLVHRVAAYFGLDHNVDQTGKSVIINKTSSTRIPEQRFCEHLKDEKGEESQKRFILKRDNSSIDKEDNQLCPSVVHKLSWIINTDR

SEQ ID NO: 92845 - protein, 286 aa, Homo sapiens
MSDFSEELKGPVTDDEEVETSVLSGAGMHFPWLQTYVETVAIGGKRRKDFAQTTSACLSFIQEALLKHQWQQAAEYMYSYFQTLEDSDSYKRQAAPEISLQHALYLLHHGMLKDAKRNLSEAETWRHGENTSSREILINLIQAYKGLLQYYTWSEKKMELSKLDKDDYAYNAVAQDVFNHSWKTSANISALIKIPGVWDPFVKSYVEMLEFYGDRDGAQEVLTNYAYDEKFPSNPNAHIYLYNFLKRQKAPRSKLISVLKILYQIVPSHKLMLEFHTLLRKSEKEE

SEQ ID NO: 92846 - protein, 127 aa, Homo sapiens
IVHNWKARWFILRQNTLVYYKLEGGRRVTPPKGRILLDGCTITCPCLEYENRPLLIKLKTQTSTEYFLEACSREERDAWAFEITGAIHAGQPGKVQQLHSLRNSFKLPPHISLQDTRGKTGRCVALF

SEQ ID NO: 92847 - protein, 97 aa, Homo sapiens
MTATEALLRVLLLLLAFGHSTYGAECFPACNPQNGFCEDDNVCRCQPGWQGPLCDQCVTSPGCLHGLCGEPGQCICTDGWDGELCDRDVRACSSAPC

SEQ ID NO: 92848 - protein, 104 aa, Homo sapiens
  MOD_RES (1)..(1): Any amino acid
XFNKSFESTVGQGSDTYIYIFRVCREAGNHTSGAGLVQINKSNGKETVVGRLNETHIFNGSNWIMLIYKGGDEYDNHCGKEQRRAVVMISCNRHTLAESKHLTT

SEQ ID NO: 92849 - protein, 233 aa, Homo sapiens
MCGRTSCHLPRDVLTRACAYQDRRGQQRLPEWRDPDKYCPSYNKSPQSNSPVLLSRLHFEKDADSSERIIAPMRWGLVPSWFKESDPSKLQFNTTNCRSDTVMEKRSFKVPLGKGRRCVVLADGFYEWQRCQGTNQRQPYFIYFPQIKTEKSGSIGAADSPENWEKVWDNWRLLTMAGIFDCWEPPEGGDVLYSYTIITVDSCKGLSDIHHRMPAILDGEEAVSKWLDFGEVS

SEQ ID NO: 92850 - protein, 160 aa, Homo sapiens
MLEPALEDSSSFSPLDSSLPEDIPVFTAAAAATPVPSVVLTRSPPMELQPPVSPQQSECNPVGALQELVVQKGWRLPEYTVTQESGPAHRKEFTMTCRVERFIEIGSGTSKKLAKRNAAAKMLLRVHTVPLDARDGNEVEPDDDHFSIGVGSRLDGLRNR

SEQ ID NO: 92851 - protein, 219 aa, Homo sapiens
MCLVFLGKCNMAAAMETEQLGVEIFETADCEENIESQDRPKLEPFYVERYSWSQLKKLLADTRKYHGYMMAKAPHDFMFVKRNDPDGPHSDRIYYLAMSGENRENTLFYSEIPKTINRAAVLMLSWKPLLDLFQATLDYGMYSREEELLRERKRIGTVGIASYDYHQGSGTFLFQAGSGIYHVKDGGPQGFTQQPLRPNLVETSCPNIRMDPKLCPADP

SEQ ID NO: 92852 - protein, 406 aa, Homo sapiens
MANINLKEITLIVGVVTACYWNSLFCGFVFDDVSAILDNKDLHPSTPLKTLFQNDFWGTPMSEERSHKSYRPLTVLTFRLNYLLSELKPMSYHLLNMIFHAVVSVIFLKVCKLFLDNKSSVIASLLFAVHPIHTEAVTGVVGRAELLSSIFFLAAFLSYTRSKGPDNSIIWTPIALTVFLVAVATLCKEQGITVVGICCVYEVFIAQGYTLPLLCTTAGQFLRGKGSIPFSMLQTLVKLIVLMFSTLLLVVIRVQVIQSQLPVFTRFDNPAAVSPTPTRQLTFNYLLPVNAWLLLNPSELCCDWTMGTIPLIESLLDIRNLATFTFFCFLGMLGVFSIRYSGDSSKTVLMALCLMALPFIPASNLFFPVGFVVAERVLYVPSMGFCILVAHGWQKISTKSLRQNKL

SEQ ID NO: 92853 - protein, 150 aa, Homo sapiens
  MOD_RES (1)..(1): Any amino acid
XQQAFQGLGPGFSGYTPYGWLQLSWFQQIYARQYYMQYILYFYSSLSRFLMVMGATVVMYLHHVGWFPFRPRPVQNFPNDGPPPDVVNQDPNNNLQEGTDPETEDPNHLPPDRDVLDGEQTSPSFMSTAWLVFKTFFASLLPEGPPAIAN

SEQ ID NO: 92854 - protein, 272 aa, Homo sapiens
MSGAGVAAGTRPPSSPTPGSRRRRQRPSVGVQSLRPQSPQLRQSDPQKRNLDLEKSLQFLQQQHSEMLAKLHEEIEHLKRENKDLHYKLIMNQTSQKKDGPSGNHLSRASAPLGARWVCINGVWVEPGGPSPARLKEGSSRTHRPGGKRGRLAGGSADTVRSPADSLSMSSFQSVKSISNSGKARPQPGSFNKQDSKADVSQKADLEEEPLLHNSKLDKVPGVQGQASCGTSSPSWKGARGPRQPRRKLAFPGTKKPRISPRSPPRASPRNA

SEQ ID NO: 92855 - protein, 891 aa, Homo sapiens
MKGSNRNKDHSAEGEGVGKRPKRKCLQWHPLLAKKLLDFSEEEEEEDEEEDIDKVQLLGADGLEQDVGETEDDESPEQRARRPMNAFLLFCKRHRSLVRQEHPRLDNRGATKILADWWAVLDPKEKQKYTDMAKEYKDAFMKANPGYKWCPTTNKPVKSPTPTVNPRKKLWAFPSDSSRDLPSPKKAKTEEMPQLNFGMADPTQMGGLSMLLLAGEHALGTPEVSSGTCRPDVSESPELRQKSPLFQFAEISSSTSHSDASTKQCQTSALFQFAEISSNTSQLGGAEPVKRCGKSALFQLAEMCLASEGMKMEESKLIKAKESDGGRIKELEKGKEEKEIKMEKTDETRLQKEAEFEKSAKENLRDSKELRNFEALQIDDIMAIKMEDPKEIRKEELEEDHKCSHFPDFSYSASSKIIISDVPSRKDHMCHPHGIMIIEDPAALNKPEKLKKKKKKSKMDRHGNDKSTPKKTCKKRQSSESDIESVIYTIEAVAKGDWGIEKLGDTPRKKVRTSSSGKGSILDAKPPKKKVKSREKKMSKEKSSDTTKESRPPDFISISASKNISGETPEGIKAEPLTPMEDALPPSLSGQAKPEDSDCHRKIETCGSRKSERSCKGALYKTLVSEGMLTSLRANVDRGKRSSGKGNSSDHEGCWNEESWTFSQSGTSGSKKFKKTKPKEDCLLGSAKLDEEFEKKFNSLPQYSPVTFDRKCVPVPRKKKKTGNVSSEPTKTSKAIFSEDRNTMEPVHKVKNIPSIFNTPEPTTTQEPLVGSQKRKARKTKITHLVRTADGRVSPAGGTLDDKPKEQLQRSLPKATETDCNDKCSHNTEVGETRSSTPEMPAVSAFFSLAALAEVAAMENVHRGQRSTPLTHDGQPKEMPQAPVLISCADQ

SEQ ID NO: 92856 - protein, 156 aa, Homo sapiens
MGRSRRTGAHRAHSLARQMKAKRRRPDLDEIHRELRPQGSARPQPDPNAEFDPDLPGGGLHRCLACARYFIDSTNLKTHFRSKDHKKRYEGVRRGLMDGCSADRALTWSAPNSCFSFSQAEAAERRALQSGRGGEGSGYGILCAPQAAGSAHGSVH

SEQ ID NO: 92857 - protein, 34 aa, Homo sapiens
  MOD_RES (1)..(1): Any amino acid
XGRHGRRLRLRGDKTCLRSHRQLRAELSLELGSG

SEQ ID NO: 92858 - protein, 165 aa, Homo sapiens
  MOD_RES (1)..(1): Any amino acid
XVRVKELDWLKDDLCTDPKVPFSWSQEEISDLYDHTTILFAAEVFYDDDLTDAVFKTLSRLAHRLKNACTAILSVEKRLNFTLRHLDVTCEAYDHFRSCLHALEQLADGKLRFVVEPVEASFPQLLVYERLQQLPLCHSKIEQPRATKKGGSRPSAPAPARLLRG

SEQ ID NO: 92859 - protein, 359 aa, Homo sapiens [sequence omitted]

SEQ ID NO: 92860 - protein, 136 aa, Homo sapiens
MASSNTVLMRLVASAYSIAQKAGMIVRRVIAEGDLGIVEKTCATDLQTKADRLAQMSICSSLARKFPKLTIIGEELVVWVDPLDGTKEYTEGLLDNVTVLIGIAYEGKAIAGVINQPYYNYEAGPDAVLGRTIWGV

SEQ ID NO: 92861 - protein, 57 aa, Homo sapiens
MGMCSRQERIQKDIDVVIQKSRAEKDCLFADFRYSDSTFTFTYVGGPRRNSELAPGM

SEQ ID NO: 92862 - protein, 236 aa, Homo sapiens
MAPWAEAEHSALNPLRAVWLTLTAAFLLTLLLQLLPPGLLPGCAIFQDLIRYGKTKCGEPSRPAACRAFDVPKRYFSHFYIISVLWNGFLLWCLTQSLFLGAPFPSWLHGLLRILGAAQFQGGELALSAFLVLVFLWLHSLRRLFECLYVSVFSNVMIHVVQYCFGLVYYVLVGLTVLSQVPMDGRNEEVPYFRLAPGSANYIASNDHNQSSILLLGTWMLELLQSHWAMKIKVTP

SEQ ID NO: 92863 - protein, 79 aa, Homo sapiens
  MOD_RES (1)..(1): Any amino acid
XFGKQEPGENSEILPTLKYVRPGGGFVPNFQLFEKGDVNGEKEQKFYTFLKGQAIPQEGLGRKRVRGPQARLTLLLSLL

SEQ ID NO: 92864 - protein, 365 aa, Homo sapiens
  MOD_RES (1)..(1): Any amino acid
XAVMAPRTLVLLLSGALALTQTWAGSHSMRYFFTSVSRPGRGEPRFIAVGYVDDTQFVRFDSDAASQRMEPRAPWIEQEGPEYWDGETRKVKAHSQTHRVDLGTLRGYYNQSEAGSHTVQRMYGCDVGSDWRFLRGYHQYAYDGKDYIALKEDLRSWTAADMAAQTTKHKWEAAHVAEQLRAYLEGTCVEWLRRYLENGKETLQRTDAPKTHMTHHAVSDHEATLRCWALSFYPAEITLTWQRDGEDQTQDTELVETRPAGDGTFQKWAAVVVPSGQEQRYTCHVQHEGLPKPLTLRWEPSSQPTIPIVGIIAGLVLFGAVITGAVVAAVMWRRKSSDRKGGSYSQAASSDSAQGSDVSLTACKV

SEQ ID NO: 92865 - protein, 367 aa, Homo sapiens
LTDFHLWARALSPAQLHRARACAPPSEGLLFRWDPGALDVTPSLLPTVWVRLLCPEPYRRLQDAQSWPGQDVISRVNALANDIVLLPDPLSEVHGALSPAEASSFLGLLEHVLAMEMAPLGPAALLAVVRFLKRVVALGAGDPELLLTGPWEQLSQGVVSVASLVLEEQVIGGPMALVASVQRLAPLLSTSMTSERPRMRIQHRHAGLEVRSLRLREASTRGCLFTMPGGRPEGPGHIHIPASEVRRLLRKGLSGVTVIHSWFTSRVFQHTLEGPDLEPQAPASSEEANRVQRFLSTQVGSAIISSEVWDVTGEVNVAMTFHLQHRAQPIYRGCLGHHRLLRGCPVPGLHRLLLQPQHQLCHPAANL

SEQ ID NO: 92866 - protein, 153 aa, Homo sapiens
MQMEELKRLQNPLEQVNDGKYSFENHQLAMDAENNIEKYPLNLQPLESKVKIIQRAWREYLQRQEPLGKRSPSPPSVSSEKLSSSVSMNTFSDSSTPDYREDGMDLGSDAGSSSSSSRASSQSNSTKVTPCSECKSSSSPGGSLDLVSALEDY

SEQ ID NO: 92867 - protein, 55 aa, Homo sapiens
MTLQLKLKESFLTNSSYESSFLELLEKLCLLLHLPSGTSVTLHHARSQHHVVCNT

SEQ ID NO: 92868 - protein, 58 aa, Homo sapiens
MASDGARKQFWKRSNSKLPGRDGVSLCYPGWSRSPDLVIRPPRPPDKTGFLCSCDMLL

SEQ ID NO: 92869 - protein, 208 aa, Homo sapiens
MREQLKGHETQTTCWDHPKMTELYQSLADLNNVRFSAYRTAMKLRRLQKALCLDLLSLSAACDALDQHNLKQNDQPMDILQIINCLTTIYDRLEQEHNNLVNVPLCVDMCLNWLLNVYDTGRTGRIRVLSFKTGIISLCKAHLEDKYRYLFKQVASSTGFCDQRRLGLLLHDSIQIPRQLGEVASFGGSNIEPSVRSCFQFVQESKAL

SEQ ID NO: 92870 - protein, 51 aa, Homo sapiens
  MOD_RES (1)..(1): Any amino acid
XRNIMFMQELQYLFALMMGSNRKFVDPSAALDLLKGAFRSSEEQQQSQEQI

SEQ ID NO: 92871 - protein, 195 aa, Homo sapiens
  MOD_RES (1)..(1): Any amino acid
XRHLAPTGNAPASRGLPTTTQRVGSECPDRLAMDFGGAGAAQQGLTDSCQSGGVPTAVQNLAPRAAVAAAAPRAVAPYKYASSVRSPHPAIQPLQAPQPAVHVQGQEPLTASMLAAAPPQEQKQMLGERLFPLIQTMHSNLAGKITGMLLEIDNSELLHMLESPESLRSKVDEAVAVLQAHHAKKEAAQKDSKAK

SEQ ID NO: 92872 - protein, 3882 aa, Homo sapiens
MTTMLQKSDSNASFLRAARAGNLDKVVEYLKGGIDINTCNQNGLNALHLAAKEGHVGLVQELLGRGSSVDSATKKGNTALHIASLAGQAEVVKVLVKEGANINAQSQNGFTPLYMAAQENHIDVVKYLLENGANQSTATEDGFTPLAVALQQGHNQAVAILLENDTKGKVRLPALHIAARKDDTKSAALLLQNDHNADVQSKMMVNRTTESGFTPLHIAAHYGNVNVATLLLNRGAAVDFTARNGITPLHVASKRGNTNMVKLLLDRGGQIDAKTRDGLTPLHCAARSGHDQVVELLLERGAPLLARTKNGLSPLHMAAQGDHVECVKHLLQHKAPVDDVTLDYLTALHVAAHCGHYRVTKLLLDKRANPNARALNGFTPLHIACKKNRIKVMELLVKYGASIQAITESGLTPIHVAAFMGHLNIVLLLLQNGASPDVTNIRGETALHMAARAGQVEVVRCLLRNGALVDARAREEQTPLHIASRLGKTEIVQLLLQHMAHPDAATTNGYTPLHISAREGQVDVASVLLEAGAAHSLATKKGFTPLHVAAKYGSLDVAKLLLQRRAAADSAGKNGYTPLHIAAKKNQMQIASTLLNYGAETNIVTKQGVTPLHLASQEGHTDMVTLLLDKGANIHMSTKSGLTSLHLAAQEDKVNVADILTKHGADQDAHTKLGYTPLIVACHYGNVKMVNFLLKQGANVNAKTKNGYTPLHQAAQQGHTHIINVLLQHGAKPNATTANGNTALAIAKRLGYISVVDTLKVVTEEVTTTTTTITEKHKLNVPETMTEVLDVSDEEGDDTMTGDGGEYLRPEDLKELGDDSLPSSQFLDGMNYLRYSLEGGRSDSLRSFSSDRSHTLSHASYLRDSAVMDDSVVIPSHQVSTLAKEAERNSYRLSWGTENLDNVALSSSPIHSGRASPCLERDNSSFLVSFMVDARGGAMRGCRHNGLRIIIPPRKCTAPTRVTCRLVKRHRLATMPPMVEGEGLASRLIEVGPSGAQFLGPVIVEIPHFAALRGKERELVVLRSENGDSWKEHFCDYTEDELNEILNGMDEVLDSPEDLEKKRICRIITRDFPQYFAVVSRIKQDSNLIGPEGGVLSSTVVPQVQAVFPEGALTKRIRVGLQAQPMHSELVKKILGNKATFSPIVTLEPRRRKFHKPITMTIPVPKASSDVMLNGFGGDAPTLRLLCSITGGTTPAQWEDITGTTPLTFVNECVSFTTNVSARFWLIDCRQIQESVTFASQVYREIICVPYMAKFVVFAKSHDPIEARLRCFCMTDDKVDKTLEQQENFAEVARSRDVEVLEGKPIYVDCFGNLVPLTKSGQHHIFSFFAFKENRLPLFVKVRDTTQEPCGRLSFMKEPKSTRGLVHQAICNLNITLPIYTKESESDQEQEEEIDMTSEKNDETESTETSVLKSHLVNEVPVLASPDLLSEVSEMKQDLIKMTAILTTDVSDKAGSIKVKELVKAAEEEPGEPFEIVERVKEDLEKVNEILRSGTCTRDESSVQSSRSERGLVEEEWVIVSDEEIEEARQKAPLEITEYPCVEVRIDKEIKGKVEKDSTGLVNYLTDDLNTCVPLPKEQLQTVQDKAGKKCEALAVGRSSEKEGKDIPPDETQSTQKQHKPSLGIKKPVRRKLKEKQKQKEEGLQASAEKAELKKGSSEESLGEDPGLAPEPLPTVKATSPLIEETPIGSIKDKVKALQKRVEDEQKGRSKLPIRVKGKEDVPKKTTHRPHPAASPSLKSERHAPGSPSPKTERHSTLSSSAKTERHPPVSPSSKTEKHSPVSPSAKTERHSPASSSSKTEKHSPVSPSTKTERHSPVSSTKTERHPPVSPSGKTDKRPPVSPSGRTEKHPPVSPGRTEKRLPVSPSGRTDKHQPVSTAGKTEKHLPVSPSGKTEKQPPVSPTSKTERIEETMSVRELMKAFQSGQDPSKHKTGLFEHKSAKQKQPQEKGKVRVEKEKGPILTQREAQKTENQTIKRGQRLPVTGTAESKRGVRVSSIGVKKEDAAGGKEKVLSHKIPEPVQSVPEEESHRESEVPKEKMADEQGDMDLQISPDRKTSTDFSEVIKQELEDNDKYQQFRLSEETEKAQLHLDQVLTSPFNTTFPLDYMKDEFLPALSLQSGALDGSSESLKNEGVAGSPCGSLMEGTPQISSEESYKHEGLAETPETSPESLSFSPKKSEEQTGETKESTKTETTTEIRSEKEHPTTKDITGGSEERGATVTEDSETSTESFQKEATLGSPKDTSPKRQDDCTGSCSVALAKETPTGLTEEAACDEGQRTFGSSAHKTQTDSEVQESTATSDETKALPLPEASVKTDTGTESKPQGVIRSPQGLELALPSRDSEVLSAVADDSLAVSHKDSLEASPVLEDNSSHKTPDSLEPSPLKESPCRDSLESSPVEPKMKAGIFPSHFPLPAAVAKTELLTEVASVRSRLLRDPDGSAEDDSLEQTSLMESSGKSPLSPDTPSSEEVSYEVTPKTTDVSTPKPAVIHECAEEDDSENGEKKRFTPEEEMFKMVTKIKMFDELEQEAKQKRDYKKEPKQEESSSSSDPDADCSVDVDEPKHTGSGEDESGVPVLVTSESRKVSSSSESEPELAQLKKGADSGLLPEPVIRVQPPSPLPSSMDSNSSPEEVQFQPVVSKQYTFKMNEDTQEEPGKSEEEKDSESHLAEDRHAVSTEAEDRSYDKLNRDTDQPKICDGHGCEAMSPSSSAAPVSSGLQSPTGDDVDEQPVIYKESLALQGTHEKDTEGEELDVSRAESPQADCPSESFSSSSSLPHCLVSEGKELDEDISATSSIQKTEVTKTDETFENLPKDCPSQDSSITTQTDRFSMDVPVSDLAENDEIYDPQITSPYENVPSQSFFSSEESKTQTDANHTTSFHSSEVYSVTITSPVEDVVVASSSSGTVLSKESNFEGQDIKMESQQESTLWEMQSDSVSSSFEPTMSATTTVVGEQISKVIITKTDVDSDSWSEIREDDEAFEARVKEEEQKIFGLMVDRQSQGTTPDTTPARTPTEEGTPTSEQNPFLFQEGKLFEMTRSGAIDMTKRSYADESFHFFQIGQESREETLSEDVKEGATGADPLPLETSAESLALSESKETVDDEADLLPDDVSEEVEEIPASDAQLNSQMGISASTETPTKEAVSVGTKDLPTVQTGDIPPLSGVKQISCPDSSEPAVQVQLDFSTLTRSVYSDRGDDSPDSSPEEQKSVIEIPTAPMENVPFTESKSKIPVRTMPTSTPAPPSAEYESSVSEDFLSSVDEENKADEAKPKSKLPVKVPLQRVEQQLSDLDTSVQKTVAPQGQDMASIAPDNRSKSESDASSLDSKTKCPVKTRSYTETETESRERAEELELESEEGATRPKILTSRLPVKSRSTTSSCRGGTSPTKESKEHFFDLYRNSIEFFEEISDEASKLVDRLTQSEREQEIVSDDESSSALEVSVIENLPPVETEHSVPEDIFDTRPIWDESIETLIERIPDENGHDHAEDPQDEQERIEERLAYIADHLGFSWTELARELDFTEEQIHQIRIENPNSLQDQSHALLKYWLERDGKHATDTNLVECLTKINRMDIVHLMETNTEPLQERISHSYAEIEQTITLDHSEGFSVLQEELCTAQHKQKEEQAVSKESETCDHPPIVSEEDISVGYSTFQDGVPKTEGDSSATALFPQTHKEQVQQDFSGKMQDLPEESSLEYQQEYFVTTPGTETSETQKAMIVPSSPSKTPEEVSTPAEEEKLYLQTPTSSERGGSPIIQEPEEPSEHREESSPRKTSLVIVESADNQPETCERLDEDAAFEKGDDMPEIPPETVTEEEYIDEHGHTVVKKVTRKIIRRYVSSEGTEKEEIMVQGMPQEPVNIEEGDGYSKVIKRVVLKSDTEQSEDNNE

SEQ ID NO: 92873 - protein, 91 aa, Homo sapiens
MAAVFLVTLYEYSPLFYIAVVFTCFIVTTGLVLGWFGWDVPVILRNSEETQFSTRVFKKQMRQVKNPFGLEITNPSSASITNFHGVSDSYS

SEQ ID NO: 92874 - protein, 59 aa, Homo sapiens
MATMVPSVLWPRACWTLLVCCLLTPVLIVPALRKSPWRRPYQRSWWPVAWAGQPSISAT

SEQ ID NO: 92875 - protein, 95 aa, Homo sapiens
MSQSGAVSCCPGATNGSLGRSDGVAKMSPKDLFEQRKKYSNSNVIMHETSQYHVQHLATFIMDKSEAITSVDDAIRKLVQLSSKEKIWTQEMLLQ

SEQ ID NO: 92876 - protein, 76 aa, Homo sapiens
  MOD_RES (1)..(1): Any amino acid
XATLTYDTLRFAEFEDFPETSEPVWILGRKYSIFTEKDEILSDVASRLWFTYRKNFPAIGGCRDISLSSKCGPWRY

SEQ ID NO: 92877 - protein, 104 aa, Homo sapiens
MKSLKAKFRKSDTNEWNKNDDRLLQAVENGDAEKVASLLGKKGASATKHDSEGKTAFHLAAAKGHVECLRVMITHGVDVTAQDTTGHSALHLAAKNSHHECIRK

SEQ ID NO: 92878 - protein, 152 aa, Homo sapiens
MADPKYADLPGIARNEPDVYETSDLPEDDQAEFDAEELTSTSVEHIIVNPNAAYDKFKDKRVGTKGLDFSDRIGKTKRTGYESGEYEMLGEGLGVKETPQQKYQRLLHEVQELTTEVEKIKVAELEKRLTELETAVRCDQDAQNPLSAGLQG

SEQ ID NO: 92879 - protein, 94 aa, Homo sapiens
MDVFVDFTWEEWQLLDPAQKCLYRSVMLENYSNLVSLGYQHTKPDIIFKLEQGEELCMVQAQVPNQTCPNTVWKIDDLMDWHQENKDKLGSTAK

SEQ ID NO: 92880 - protein, 98 aa, Homo sapiens
MIKDCGATWVVLGHSERRHVFGESDELIGQKVAHALAEGLGVIACIGEKLDEREAGITEKVVFEQTKVIADNVKDWSKVVLAYEPVWAIGTGKTATPQ

SEQ ID NO: 92881 - protein, 415 aa, Homo sapiens
MGLLPKLGASQGSDTSTSRAGRCARSVFGNIKVFVLCQGLLQLCQLLYSAYFKSSLTTIEKRFGLSSSSSGLISSLNEISNAILIIFVSYFGSRVHRPRLIGIGGLFLAAGAFILTLPHFLSEPYQYTLASTGNNSRLQAELCQKHWQDLPPSKCHSTTQNPQKETSSMWGLMVVAQLLAGIGTVPIQPFGISYVDDFSEPSNSPLYISILFAISVFGPAFGYLLGSVMLQIFVDYGRVNTAAVNLVPGDPRWIGAWWLGLLISSALLVLTSFPFFFFPRAMPIGAKRAPATADEARKLEEAKSRGSLVDFIKRFPCIFLRLLMNSLFVLVVLAQCTFSSVIAGLSTFLNKFLEKQYGTSAAYANFLIAHQVLYIRSLLPAAGTARAQILSSTRSVETMESSTSPLAMPAAATST

SEQ ID NO: 92882 - protein, 210 aa, Homo sapiens
MVRKKNSLKDCVAVAGPLGVTHFLILSKTETNVYFKLMRLPGGPTLTFQVKKYSLVRDVVSSLRRHRMHEQQFAHPPLLVLNSFGPHGMHVKLMATMFQNLFPSINVHKVNLNTIKRCLLIDYNPDSQELDFRHYSIKVVPVGASRGMKKLLQEKFPNMSRLQDISELLATGAGLSESEAEPDGDHNITELPQAVAGRGNMRAQQSAVRL

SEQ ID NO: 92883 - protein, 911 aa, Homo sapiens
MQRAVPEGFGRRKLGSDMGNAERAPGSRSFGPVPTLLLLAAALLAVSDALGRPSEEDEELVVPELERAPGHGTTRLRLHAFDQQLDLELRPDSSFLAPGFTLQNVGRKSGSETPLPETDLAHCFYSGTVNGDPSSAAALSLCEGVRGAFYLLGEAYFIQPLPAASERLATAAPGEKPPAPLQFHLLRRNRQGDVGGTCGVVDDEPRPTGKAETEDEDEGTEGEDEGAQWSPQDPALQGVGQPTGTGSIRKKRFVSSHRYVETMLVADQSMAEFHGSGLKHYLLTLFSVAARLYKHPSIRNSVSLVVVKILVIHDEQKGPEVTSNAALTLRNFCNWQKQHNPPSDRDAEHYDTAILFTRQDLCGSQTCDTLGMADVGTVCDPSRSCSVIEDDGLQAAFTTAHELGECLMDKPQNPIQLPGDLPGTSYDANRQCQFTFGEDSKHCPDAASTCSTLWCTGTSGGVLVCQTKHFPWADGTSCGEGKWCINGKCVNKTDRKHFDTPFHGSWGMWGPWGDCSRTCGGGVQYTMRECDNPVPKNGGKYCEGKRVRYRSCNLEDCPDNNGKTFREEQCEAHNEFSKASFGSGPAVEWIPKYAGVSPKDRCKLICQAKGIGYFFVLQPKVVDGTPCSPDSTSVCVQGQCVKAGCDRIIDSKKKFDKCGVCGGNGSTCKKISGSVTSAKPGYHDIITIPTGATNIEVKQRNQRGSRNNGSFLAIKAADGTYILNGDYTLSTLEQDIMYKGVVLRYSGSSAALERIRSFSPLKEPLTIQVLTVGNALRPKIKYTYFVKKKKESFNAIPTFSAWVIEEWGECSKSCELGWQRRLVECRDINGQPASECAKEVKPASTRPCADHPCPQWQLGEWSSCSKTCGKGYKKRSLKCLSHDGGVLSHESCDPLKKPKHFIDFCTMAECS

SEQ ID NO: 92884 - protein, 220 aa, Homo sapiens
MTQSVVVQVGQCGNQIGCCFWDLALREHAAVNQKGIYDEAISSFFRNVDTRVVGDGGSISKGKICSLKARAVLIDMEEGVVNEILQGPLRDVFDTKQLITDISGSGNNWAVGHKVFGSLYQDQILEKFRKSAEHCDCLQCFFIIHSMGGGTGSGLGTFLLKVLEDEFPEVYRFVTSIYPSGEDDVITSPYNSILAMKELNEHADCVLPIDNQNIIYIHSS

SEQ ID NO: 92885 - protein, 116 aa, Homo sapiens
MGKMAAAVGSVATLATEPGEDAFRKLFRFYRQSRPGTADLEGVIDFSAAHAARGKGPGAQKVIKSQLNVSSVSEQNAYRAGLQPVSKWQAYGLKGYPGIKKRLNGDPEVYWRNCVG

SEQ ID NO: 92886 - protein, 189 aa, Homo sapiens
KDDQKKSLSTGELEEVNEKLRDTADGTFLVRDASTKMHGDYTLTLRKGGNNKLIKIFHRDGKYGFSDPLTFSSVVELINHYRNESLAQYNPKLDVKLLYPVSKYQQDQVVKEDNIEAVGKKLHEYNTQFQEKSREYDRLYEEYTRTSQEIQMKRTAIEAFNETIKIFEEQCQTQERYSKEYIEKFKREG

SEQ ID NO: 92887 - protein, 113 aa, Homo sapiens
MASLQRSRVLRCCSCRLFQAHQVKKSVKWTCKACGEKQSFLQAYGEGSGADCRRHVQKLNLLQGQVSELPLRSLEETVSASEEENVGHQQCRGAEGSWEGAMESHPAGYSHIL

SEQ ID NO: 92888 - protein, 181 aa, Homo sapiens
MSSLGGGSQDAGGSSSSSTNGSGGSGSSGPKAGAADKSAVVAAAAPASVADDTPPPERRNKSGIISEPLNKSLRRSRPLSHYSSFGSSGGSGGGSMMGGESADKATAAAAAASLLANGHDLAAAMAVDKSNPTSKHKSGAVASLLSKAERATELAAEGQLTLQQFAQSTEMLKRVVQEHLP

SEQ ID NO: 92889 - protein, 633 aa, Homo sapiens
MLPVDGEERKSEGSDTEGDRTSPCAGPTSSATLKDLEVGGSGWRCSDPAGQPSNLLPQRGLGAPLPAETAHTQPSPNDRSLYLSPKSSSASSSLHARQSPCQEQAAVLNSRSIKISRLNDTIKSLKQQKKQVEHQLEEEKKANNEKQKAERELEGQIQRLNTEKKKLNTDLYHMKHSLRYFEEESKDLAGRLQRSSQRIGELEWSLCAVAATQKKKPDGFSSRSKALLKRQLEQSIREQILLKGHVTQLKESLKEVQLERDQYAEQIKGERAQWQQRMRKMSQEVCTLKEEKKHDTHRVEELERSLSRLKNQMAEPLPPDAPAVSSEVELQDLRKELERVAGELQAQVENNQCISLLNRGQKERLREQEERLQEQQERLREREKRLQQLAEPQSDLEELKHENKSALQLEQQVKELQEKLGQVMETLTSAEKEPEAAVPASGTGGESSGLMDLLEEKADLREHVEKLELGFIQYRRERCHQKVHRLLTEPGDSAKDASPGGGHHQAGPGQGGEEGEAAGAAGDGVAACGSYSEGHGKFLAAARNPAAEPSPGAPAPQELGAADKHGDLCEASLTNSVEPAQGEAREGSSQDNPTAQPVLQLLGEMQDHQEHPGLGSNCCVPCFCWAWLPRRRR

SEQ ID NO: 92890 - protein, 288 aa, Homo sapiens
MMRRTLENRNAQTKQLQTAVSNVEKHFGELCQIFAAYVRKTARLRDKADLLVNEINAYAATETPHLKLGLMNFADEFAKLQDYRQAEVERLEAKVVEPLKTYGTIVKMKRDDLKATLTARNREAKQLTQLERTRQRNPSDRHVLLAETELQRAAMDASRTSRHLEETINNFERQKMKDIKTIFSEFITIEMLFHGKALEVYTAAYQNIQNIDEDEDLEVFRNSLYAPDYSSRLDIVRANSKSPLQRSLSAKCVSGTGQVSTCRLRKDQQAEDDEDDELDVTEEENFLK

SEQ ID NO: 92891 - protein, 2016 aa, Homo sapiens
MATGGGPFEDGMNDQDLPNWSNENVDDRLNNMDWGAQQKKANRSSEKNKKKFGVESDKRVTNDISPESSPGVGRRRTKTPHTFPHSRYMSQMSVPEQAELEKLKQRINFSDLDQRSIGSDSQGRATAANNKRQLSENRKPFNFLPMQINTNKSKDASTNPPNRETIGSAQCKELFASALSNDLLQNCQVSEEDGRGEPAMESSQIVSRLVQIRDYITKASSMREDLVEKNERSANVERLTHLIDHLKEQEKSYMKFLKKILARDPQQEPMEEIENLKKQHDLLKRMLQQQEQLRALQGRQAALLALQHKAEQAIAVMDDSVVAETAGSLSGVSITSELNEELNDLIQRFHNQLRDSQPPAVPDNRRQAESLSLTREVSQSRKPSASERLPDEKVELFSKMRVLQEKKQKMDKLLGELHTLRDQHLNNSSSSPQRSVDQRSTSAPSASVGLAPVVNGESNSLTSSVPYPTASLVSQNESENEGHLNPSEKLQKLNEVRKRLNELRELVHYYEQTSDMMTDAVNENRKDEETEESEYDSEHENSEPVTNIRNPQVASTWNEVNSHSNAQCVSNNRDGRTVNSNCEINNRSAANIRALNMPPSLDCRYNREGEQEIHVAQGEDDEEEEEEAEEEGVSGASLSSHRSSLVDEHPEDAEFEQKINRLMAAKQKLRQLQDLVAMVQDDDAAQGVISASASNLDDFYPAEEDTKQNSNNTRGNANKTQKDTGVNEKAREKFYEAKLQQQQRELKQLQEERKKLIDIQEKIQALQTACPDLQLSAASVGNCPTKKYMPAVTSTPTVNQHETSTSKSVFEPEDSSIVDNELWSEMRRHEMLREELRQRRKQLEALMAEHQRRQGLAETASPVAVSLRSDGSENLCTPQQSRTEKTMATWGGSTQCALDEEGDEDGYLSEGIVRTDEEEEEEQDASSNDNFSVCPSNSVNHNSYNGKETKNRWKNNCPFSADENYRPLAKTRQQNISMQRQENLRWVSELSYVEEKEQWQEQINQLKKQLDFSVSICQTLMQDQQTLSCLLQTLLTGPYSVMPSNVASPQVHFIMHQLNQCYTQLTWQQNNVQRLKQMLNELMRQQNQHPEKPGGKERGSSASHPPSPSLFCPFSFPTQPVNLFNIPGFTNFSSFAPGMNFSPLFPSNFGDFSQNISTPSEQQQPLAQNSSGKTEYMAFPKPFESSSSIGAEKPRNKKLPEEEVESSRTPWLYEQEGEVEKPFIKTGFSVSVEKSTSSNRKNQLDTNGRRRQFDEESLESFSSMPDPVDPTTVTKTFKTRKASAQASLASKDKTPKSKSKKRNSTQLKSRVKNIRYESASMSSTCEPCKSRNRHSAQTEEPVQAKVFSRKNHEQLEKIIKCNRSTEISSETGSDFSMFEALRDTIYSEVATLISQNESRPHFLIELFHELQLLNTDYLRQRALYALQDIVSRHISESHEKGENVKSVNSGTWIASNSELTPSESLATTDDETFEKNFERETHKISEQNDADNASVLSVSSNFEPFATDDLGNTVIHLDQALARMREYERMKTEAESNSNMRCTCRIIEDGDGAGAETPVIENRSSQQPVSEVSTIPCPRIDTQQLDRQIKAIMKEVIPFLKEHMDEVCSSQLLTSVRRMVLTLTQQNDESKEFVKFFHKQLGSILQDSLAKFAGRKLKDCGEDLLVEISEVLFNELAFFKLMQDLDNNSITVKQRCKRKIEATGVIQSCAKEAKRILEDHGSPAGEIDDEDKDKDETETVKQTQTSEVYDGPKNVRSDISDQEEDEESEGCPVSINLSKAETQALTNYGSGEDENEDEEMEEFEEGPVDVQTSLQANTEATEENEHDEQVLQRDFKKTAESKNVPLEREATSKNDQNNCPVKPCYLNILEDEQPLNSAAHKESPPTVDSTQQPNPLPLRLPEMEPLVPRVKEVKSAQETPESSLAGSPDTESPVLVNDYEAESGNISQKSDEEDFVKVEDLPLKLTIYSEADLRKKMVEEEQKNHLSGEICEMQTEELAGNSETLKEPETVGAQSI

SEQ ID NO: 92892 - protein, 117 aa, Homo sapiens
MHHCKRYRSPEPDPYLSYRWKRRRSYSREHEGRLRYPSRREPPPRRSRSRSHDRLPYQRRYRERRDSDTYRCEERSPSFGEDYYGPSRSRHRRRSRERGPYRTRKHAHHCHKRRTRS

SEQ ID NO: 92893 - protein, 101 aa, Homo sapiens
NNEKDMALTAFVLISLQEAKDICEEQVNSLPGSITKAGDFLEANYMNLQRSYTVAIAGYALAQMGRLKGPLLNKFLTTAKDEENQKQCQDLGAFTESMVVF

SEQ ID NO: 92894 - protein, 305 aa, Homo sapiens
MAPRAGLGAGPLLLRSRADWVCGGWEAALSAPPPFCTAWVERTGLVHFLREGGHGACFPLALLHPGSVVSFQMIYPLIVLPLCASWHWGLIRKGIVLFWGESVKYFLDNLDRIGQLNYFPSKQDILLARKATKGIVEHDFVIKKIPFKMVDVGGQRSQRQKWFQCFDGITSILFMVSSSEYDQVLMEDRRTNRLVESMNIFETIVNNKLFFNVSIILFLNKMDLLVEKVKTVSIKKHFPDFRGDPHRLEDVQRYLVQCFDRKRRNRSKPLFHHFTTAIDTENVRFVFHAVKDTILQENLKDIMLQ

SEQ ID NO: 92895 - protein, 220 aa, Homo sapiens
KKHTLLRLLYEALVDCKKSDAASKVMVELLGSYTEDNASQARVDAHRCIVRALKDPNAFLFDHLLTLKPVKFLEGELIHDLLTIFVSAKLASYVKFYQNNKDFIDSLGLLHEQNMAKMRLLTFMGMAVENKEISFDTMQQELQIGADDVEAFVIDAVRTKMVYCKIDQTQRKVVVSCSGELEGLGSICHSTHRTFGKQQWQQLYDTLNAWKQNLNKVKNS

SEQ ID NO: 92896 - protein, 48 aa, Homo sapiens
MPKRKVSSAEGAAKEEPKRRSARLSAKPPAKVEAKPKKAAAKILQTPK

SEQ ID NO: 92897 - protein, 130 aa, Homo sapiens
  MOD_RES (1)..(1): Any amino acid
XLGPPLPPPRCVDSPGWREDAPSPSFLPAPGTWRHKAQEEDEEENKYELPPCEALPLSLAPAHLPGTEEDSLYLDHSGPLGPSKPSPPLPQPTMSRVHRPEWCQALQRNLMRTSTWNVSRIQEGNRLFPL

SEQ ID NO: 92898 - protein, 216 aa, Homo sapiens
MESRKDITNQEEIWKMKPRRNLEDNDYLHEDTGETSMLKRPVLLHLQQTAHADEFDCPSELQHAQELFPQWHLPIKIAAVMASLTFLYTLLREVIHPLATSHQQYFYKIPILVINKVLPMVSITLLALVYLPGVIAAIVQVHNGTKYKKFPHWLDKWMLTRKQFGLLSLFFAVLHAIYTLSYAMRRSYRYKLLNWAYQQVQQNKEDAWIEHDVWRM

SEQ ID NO: 92899 - protein, 1149 aa, Homo sapiens
MEASLTRRLLFKDRHFTCSKIIGRRFACFAQRLSHRRKQSQCDLLNESTGQLPTTCSSAASNSINWNCRVKMTQQMQNLHLCQSKKHSAPSSPNAAKRLYRNLSEKLKGSHSSFDEAYFRTRTDRLSLRKTSVNFQGNEAMFEAVEQQDMDAVQILLYQYTPEELDLNTPNSEGLTPLDIAIMTNNVPIARILLRTGARESPHFVSLESRAMHLNTLVQEAQERVSELSAQVENEGFTLDNTEKEKQLKAWEWRYRLYRRMKTGFEHARAPEMPTNVCLMVTSSTSLTVSFQEPLSVNAAVVTRYKVEWSMSEDFSPLAGEIIMDNLQTLRCTITGLTMGQQYFVQVSAYNMKGWGPAQTTTPACASPSNWKDYDDREPRHKGQSEVLEGLLQQVRALHQHYSCRESTKLQTTGRKQSVSRSLKHLFHSSNKFVKTLKRGLYIAVIFYYKDNILVTNEDQVPIVEIDDSHTSSITQDFLWFTKLSCMWEDIRWLRQSIPISSSSSTVLQTRQKMLAATAQLQNLLGTHNLGRVYYEPIKDRHGNILIVTIREVEMLYSFFNGKWMQISKLQSQRKSLSTPEEPTALDILLITIQDILSYHKRSHQRLFPGLYLGYLKLCSSVDQIKVLVTQKLPNILCHVKIRENNNISREEWEWIQKLSGSESMESVDHTSDCPMQLFFYELQMAVKALLQQINIPLHQARNFRLYTQEVLEMGHNVSFLLLLPASDDVCTAPGQNNPYTPHSGFLNLPLQMFELVHFCSYREKFISLYCRLSAVVELDSLNTQQSLREAISDSEVAAAKQRHQQVLDFIQQIDEVWREMRWIMDALQYARYKQPVSGLPITKLIDPSDEQSLKKINSTSSSHIDCLPSPPPSPEMHRRKTVSDSQPCSDEEACSEVFLPTNSDYDSSDALSPRDLDLVYLSSHDIAQQTLSGLSGSAPDVLQVHDVKTPLGPGQDPQGEGPNPDHSCAEFLHSLTLTGFTPKNHAKTVSGGRPPLGFLGKRKPGKHPHYGGFSRHHRWLRIHSETQSLSLSEGIYTQHLSQACGLAQEPKEAKRAGPALDDPRGLTLAHAASLPEERNSSLQDARPSVRRLYVEPYAAAVVAQDEKPWASLSPPSGGRITLPSPTGPDVSQEGPTASPMSEILSSML

SEQ ID NO: 92900 - protein, 139 aa, Homo sapiens
MATGDLKRSLRNLEQVLRLLNYPEEVDCVGLIKGDPAASLPIISYSFTSYSPYVTELIMESNVELIAKNDLRFIDAVYKLLRDQFNYKPILTKKQFIQCGFAEWKIQIVCDILNCVMKKHKELSSLQKIPSQQRKKISS

SEQ ID NO: 92901 - protein, 193 aa, Homo sapiens
MWRLPRALCVHAAKTSKLSGPWSRPAAFMSTLLINQPQYAWLKELGLREENEGVYNGSWGGRGEVITTYCPANNEPIARVRQIPAPKRGEIVRQIGDALREKIQVLGSLVSLEMGKILVEGVGEVQEYVDICDYAVGLSRMIGGPILPSERSGHALIEQWNPVGLVGIITAFNFPVAVYGWNNAIAMICGNVC

SEQ ID NO: 92902 - protein, 1096 aa, Homo sapiens [sequence omitted]

SEQ ID NO: 92903 - protein, 147 aa, Homo sapiens
  MOD_RES (1)..(1): Any amino acid
XEAHRASPREGTSGGERLQDLVKSKMSETSRTAFGGRRAVPPNNSNAAEDDLPTVELQGVVPRGVNLQEFLNVTSVHLFKERWDTNKVDHHTDKYENNKLIVRRGQSFYVQIDFSRPYDPRRDLFRVEYVIGECHVQAPVLTPWVAL

SEQ ID NO: 92904 - protein, 60 aa, Homo sapiens
MAAEHLLPGPPPSLADFRLEAGGKGTERGSGSSKPTGSSRGPRMSTRNASPCMTSSRGGR

SEQ ID NO: 92905 - protein, 115 aa, Homo sapiens
RGGSGEGVSCIIRNSLLGLEKTASISIADPFFRSAQPWIAALAGTLPILLLLLAGASYFLWRQQKEITALSSEIESEQEMKEMGYAATEREISLRESLQEELKRKKIQYLTREWL

SEQ ID NO: 92906 - protein, 41 aa, Homo sapiens
EEPPPPLQAVLVADSFDRRFFPISKDQPRHALEGPASMLLS

SEQ ID NO: 92907 - protein, 54 aa, Homo sapiens
MMNADMDDLSARVDAVKEENLKLKSENQVLGQYIENLMSASSVFQTTDTKSKRK

SEQ ID NO: 92908 - protein, 716 aa, Homo sapiens
MQRHYVMYYEMSYGLNIEMHKQTEIAKRLNTILAQIMPFLSQEHQQQVAQAVERAKQVTMTELNAIIGQQQLQAQHLSHATHGPPVQLPPHPSGLQPPGIPPVTGSSSGLLALGALGSQAHLTVKDEKNHHELDHRERESSANNSVSPSESLRASEKHRGSADYSMEAKKRKAEEKDSLSRYDSDGDKSDDLVVDVSNEDPATPRVSPAHSPPENGLDKARSLKKDAPTSPASVASSSSTPSSKTKDLGHNDKSSTPGLKSNTPTPRNDAPTPGTSTTPGLRSMPGKPPGMDPIGIMASALRTPISITSSYAAPFAMMSHHEMNGSLTSPGAYAGLHNIPPQMSAAAAAAAAAYGRSPMVSFGAVGFDPHPPMRATGLPSSLASIPGGKPAYSFHVSADGQMQPVPFPHDALAGPGIPRHARQINTLSHGEVVCAVTISNPTRHVYTGGKGCVKIWDISQPGSKSPISQLDCLNRDNYIRSCKLLPDGRTLIVGGEASTLTIWDLASPTPRIKAELTSSAPACYALAISPDAKVCFSCCSDGNIAVWDLHNQTLVRQFQGHTDGASCIDISHDGTKLWTGGLDNTVRSWDLREGRQLQQHDFTSQIFSLGYCPTGEWLAVGMESSNVEVLHHTKPDKYQLHLHESCVLSLKFAYCGKWFVSTGKDNLLNAWRTPYGASIFQSKESSSVLSCDISADDKYIVTGSGDKKATVYEVIY

SEQ ID NO: 92909 - protein, 64 aa, Homo sapiens
MADGEEPMAVDGGCGDTGDWEGRWNHVKKFLERSGPFTHPDFEPSTENFILLYVDWTLSSPEDG

SEQ ID NO: 92910 - protein, 188 aa, Homo sapiens
MKKMPLFSKSHKNPAEIVKILKDNLAILEKQDKKTDKASEEVSKSLQAMKEILCGTNEKEPPTEAVAQLAQELYSSGLLVTLIADLQLIDFEGKKDVTQIFNNILRRQIGTRSPTVEYISAHPHILFMLLKGYEAPQIALRCGIMLRECIRHEPLAKIILFSNQFRDFFKYVELSTFDIASDAFATFK

SEQ ID NO: 92911 - protein, 62 aa, Homo sapiens
MEQCACVERELDKVLQKFLTYGQHCERSLEELLHYVGQLRAELASAVLPEDQRYGAETGFGP

SEQ ID NO: 92912 - protein, 119 aa, Homo sapiens
MTKFGFLRLSYEKQDTLLKLLILSMAAVLSFSTRLFAVLRFESVIHEFDPYFNYRTTRFLAEEGFYKFHNWFDDRAWYPLGRIIGGTIYPGLMITSAAIYHVLHFFHITIDIRNVCVFL

SEQ ID NO: 92913 - protein, 193 aa, Homo sapiens
DVDEPLEVFISAPRSEPVINNDNPLESNDEKEGQEATCSRPQIVPEPMDFRKLSTFRESFKKRVIGQDHDFSESSEEEAPAEASSGALRSKHGEKAPMTSRSTSTWRIPSRKRRFSSSDFSDLSNGEELQETCSSSLRRGSGVPRSQEARTESSQASDMMDTMDVENNSTLEKHSGKRRKKRRHRSKVNGLQR

SEQ ID NO: 92914 - protein, 3965 aa, Homo sapiens
MSEPGGGGGEDGSAGLEVSAVQNVADVSVLQKHLRKLVPLLLEDGGEAPAALEAALEEKSALEQMRKFLSDPQVHTVLVERSTLKEDVGDEGEEEKEFISYNINIDIHYGVKSNSLAFIKRTPVIDADKPVSSQLRVLTLSEDSPYETLHSFISNAVAPFFKSYIRESGKADRDGDKMAPSVEKKIAELEMGLLHLQQNIEIPEISLPIHPMITNVAKQCYERGEKPKVTDFGDKVEDPTFLNQLQSGVNRWIREIQKVTKLDRDPASGTALQEISFWLNLERALYRIQEKRESPEVLLTLDILKHGKRFHATVSFDTDTGLKQALETVNDYNPLMKDFPLNDLLSATELDKIRQALVAIFTHLRKIRNTKYPIQRALRLVEAISRDLSSQLLKVLGTRKLMHVAYEEFEKVMVACFEVFQTWDDEYEKLQVLLRDIVKRKREENLKMVWRINPAHRKLQARLDQMRKFRRQHEQLRAVIVRVLRPQVTAVAQQNQGEVPEPQDMKVAEVLFDAADANAIEEVNLAYENVKEVDGLDVSKEGTEAWEAAMKRYDERIDRVETRITARLRDQLGTAKNANEMFRIFSRFNALFVRPHIRGAIREYQTQLIQRVKDDIESLHDKFKVQYPQSQACKMSHVRDLPPVSGSIIWAKQIDRQLTAYMKRVEDVLGKGWENHVEGQKLKQDGDSFRMKLNTQEIFDDWARKVQQRNLGVSGRIFTIESTRVRGRTGNVLKLKVNFLPEIITLSKEVRNLKWLGFRVPLAIVNKAHQANQLYPFAISLIESVRTYERTCEKVEERNTISLLVAGLKKEVQALIAEGIALVWESYKLDPYVQRLAETVFNFQEKVDDLLIIEEKIDLEVRSLETCMYDHKTFSEILNRVQKAVDDLNLHSYSNLPIWVNKLDMEIERILGVRLQAGLRAWTQVLLGQAEDKAEVDMDTDAPQVSHKPGGEPKIKNVVHELRITNQVIYLNPPIEECRYKLYQEMFAWKMVVLSLPRIQSQRYQVGVHYELTEEEKFYRNALTRMPDGPVALEESYSAVMGIVSEVEQYVKVWLQYQCLWDMQAENIYNRLGEDLNKWQALLVQIRKARGTFDNAETKKEFGPVVIDYGKVQSKVNLKYDSWHKEVLSKFGQMLGSNMTEFHSQISKSRQELEQHSVDTASTSDAVTFITYVQSLKRKIKQFEKQVELYRNGQRLLEKQRFQFPPSWLYIDNIEGEWGAFNDIMRRKDSAIQQQVANLQMKIVQEDRAVESRTTDLLTDWEKTKPVTGNLRPEEALQALTIYEGKFGRLKDDREKCAKAKEALELTDTGLLSGSEERVQVALEELQDLKGVWSELSKVWEQIDQMKEQPWVSVQPRKLRQNLDALLNQLKSFPARLRQYASYEFVQRLLKGYMKINMLVIELKSEALKDRHWKQLMKRLHVNWVVSELTLGQIWDVDLQKNEAIVKDVLLVAQGEMALEEFLKQIREVWNTYELDLVNYQNKCRLIRGWDDLFNKVKEHINSVSAMKLSPYYKVFEEDALSWEDKLNRIMALFDVWIDVQRRWVYLEGIFTGSADIKHLLPVETQRFQSISTEFLALMKKVSKSPLVMDVLNIQGVQRSLERLADLLGKIQKALGEYLERERSSFPRFYFVGDEDLLEIIGNSKNVAKLQKHFKKMFAGVSSIILNEDNSVVLGISSREGEEVMFKTPVSITEHPKINEWLTLVEKEMRVTLAKLLAESVTEVEIFGKATSIDPNTYITWIDKYQAQLVVLSAQIAWSENVETALSSMGGGGDAAPLHSVLSNVEVTLNVLADSVLMEQPPLRRRKLEHLITELVHQRDVTRSLIKSKIDNAKSFEWLSQMRFYFDPKQTDVLQQLSIQMANAKFNYGFEYLGVQDKLVQTPLTDRCYLTMTQALEARLGGSPFGPAGTGKTESVKALGHQLGRFVLVFNCDETFDFQAMGRIFVGLCQVGAWGCFDEFNRLEERMLSAVSQQVQCIQEALREHSNPNYDKTSAPITCELLNKQVKVSPDMAIFITMNPGYAGRSNLPDNLKKLFRSLAMTKPDRQLIAQVMLYSQGFRTAEVLANKIVPFFKLCDEQLSSQSHYDFGLRALKSVLVSAGNVKRERIQKIKREKEERGEAVDEGEIAENLPEQEILIQSVCETMVPKLVAEDIPLLFSLLSDVFPGVQYHRGEMTALREELKKVCQEMYLTYGDGEEVGGMWVEKVLQLYQITQINHGLMMVGPSGSGKSMAWRVLLKALERLEGVEGVAHIIDPKAISKDHLYGTLDPNTREWTDGLFTHVLRKIIDSVRGELQKRQWIVFDGDVDPEWVENLNSVLDDNKLLTLPNGERLSLPPNVRIMFEVQDLKYATLATVSRCGMVWFSEDVLSTDMIFNNFLARLRSIPLDEGEDEAQRRRKGKEDEGEEAASPMLQIQRDAATIMQPYFTSNGLVTKALEHAFQLEHIMDLTRLRCLGSLFSMLHQACRNVAQYNANHPDFPMQIEQLERYIQRYLVYAILWSLSGDSRLKMRAELGEYIRRITTVPLPTAPNIPIIDYEVSISGEWSPWQAKVPQIEVETHKVAAPDVVVPTLDTVRHEALLYTWLAEHKPLVLCGPPGSGKTMTLFSALRALPDMEVVGLNFSSATTPELLLKTFDHYCEYRRTPNGVVLAPVQLGKWLVLFCDEINLPDMDKYGTQRVISFIRQMVEHGGFYRTSDQTWVKLERIQFVGACNPPTDPGRKPLSHRFLRHVPVVYVDYPGPASLTQIYGTFNRAMLRLIPSLRTYAEPLTAAMVEFYTMSQERFTQDTQPHYIYSPREMTRWVRGIFEALRPLETLPVEGLIRIWAHEALRLFQDRLVEDEERRWTDENIDTVALKHFPNIDREKAMSRPILYSNWLSKDYIPVDQEELRDYVKARLKVFYEEELDVPLVLFNEVLDHVLRIDRIFRQPQGHLLLIGVSGAGKTTLSRFVAWMNGLSVYQIKVHRKYTGEDFDEDLRTVLRRSGCKNEKIAFIMDESNVLDSGFLERMNTLLANGEVPGLFEGDEYATLMTQCKEGAQKEGLMLDSHEELYKWFTSQVIRNLHVVFTMNPSSEGLKDRAATSPALFNRCVLNWFGDWSTEALYQVGKEFTSKMDLEKPNYIVPDYMPVVYDKLPQPPSHREAIVNSCVFVHQTLHQANARLAKRGGRTMAITPRHYLDFINHYANLFHEKRSELEEQQMHLNVGLRKIKETVDQVEELRRDLRIKSQELEVKNAAANDKLKKMVKDQQEAEKKKVMSQEIQEQLHKQQEVIADKQMSVKEDLDKVEPAVIEAQNAVKSIKKQHLVEVRSMANPPAAVKLALESICLLLGESTTDWKQIRSIIMRENFIPTIVNFSAEEISDAIREKMKKNYMSNPSYNYEIVNRASLACGPMVKWAIAQLNYADMLKRVEPLRNELQKLEDDAKDNQQKANEVEQMIRDLEASIARYKEEYAVLISEAQAIKADLAAVEAKVNRSTALLKSLSAERERWEKTSETFKNQMSTIAGDCLLSAAFIAYAGYFDQQMRQNLFTTWSHHLQQANIQFRTDIARTEYLSNADERLRWQASSLPADDLCTENAIMLKRFNRYPLIIDPSGQATEFIMNEYKDRKITRTSFLDDAFRKNLESALRFGNPLLVQDVESYDPVLNPVLNREVRRTGGRVLITLGDQDIDLSPSFVIFLSTRDPTVEFPPDLCSRVTFVNFTVTRSSLQSQCLNEVLKAERPDVDEKRSDLLKLQGEFQLRLRQLEKSLLQALNEVKGRILDDDTIITTLENLKREAAEVTRKVEETDIVMQEVETVSQQYLPLSTACSSIYFTMESLKQIHFLYQYSLQFFLDIYHNVLYENPNLKGVTDHTQRLSIITKDLFQVAFNRVARGMLHQDHITFAMLLARIKLKGTVGTHWPGHPPPAPDPGFPARSPVGHGPHVCFNKPWGVFHVHHGAAARPDPHCGHRGEAQHSCLNVLCAWL

SEQ ID NO: 92915 - protein, 371 aa, Homo sapiens
MRSLLLLSAFCLLEAALAAEVKKPAAAAAPGTAEKLSPKAATLAERSAGLAFSLYQAMAKDQAVENILVSPVVVASSLGLVSLGGKATTASQAKAVLSAEQLRDEEVHAGLGELLRSLSNSTARNVTWKLGSRLYGPSSVSFADDFVRSSKQHYNCEHSKINFRDKRSALQSINEWAAQTTDGKLPEVTKDVERTDGALLVNAMFFKPHWDEKFHHKMVDNRGFMVTRSYTVGVMMMHRTGLYNYYDDEKEKLQIVEMPLAHKLSSLIILMPHHVEPLERLEKLLTKEQLKIWMGKMQKKAVAISLPKGVVEVTHDLQKHLAGLGLTEAIDKNKADLSRMSGKKDLYLASVFHATAFELDTDGNPFDQDIY

SEQ ID NO: 92916 - protein, 149 aa, Homo sapiens
MQIFVKTLTGKTITLEVEPSDTIENVKAKIQDKEGIPPDQQRLIFAGKQLEDGRTLSDYNIQKESTLHLVLRLRGGMQIFVKTLTGKTITLEVEPSDTIENVKAKIQDKEGIPPDQQRLIFAGKQLEDGRTLSDYNIQKESTLHLVLRL

SEQ ID NO: 92917 - protein, 76 aa, Homo sapiens
MQEASTQLEDSLLGKMLETCGDAENQLALELSQHEVFVEKEIVDPLYGIAEVEIPNIQKQRKQLARLVLDWDSVRA

SEQ ID NO: 92918 - protein, 133 aa, Homo sapiens
MFVEHRCADFGMAADKNKFPGDSVVTGRGRINGRLVYVFSQDFTVFGGSLSGAHAQKICKIMDQAITVGAPVIGLNDSGGARIQEGVESLAGYADIFLRNVTASGVIPQISLIMGPCAGGAVYSPALTDFTFM

SEQ ID NO: 92919 - protein, 133 aa, Homo sapiens
  MOD_RES (1)..(1): Any amino acid
XRYLECISCGSSDMSCERGRHQSLQCRSPEEQCLDVVTHWIQEGEEGRPKDDRHLRGCGYLPGCPGSNGFHNNDTFHFLKCCNTTKCNEGPILELENLPQNGRQCYSCKGNSTHGCSSEETFLIDCRGTLLWT

SEQ ID NO: 92920 - protein, 139 aa, Homo sapiens
MPAIAVLAAAAAAWCFLQVESRHLDALAGGAGPNHGNFLDNDQWLSTVSQYDRDKYWNRFRDDDYFRNWNPNKPFDQALDPSKDPCLKVKCSPHKVCVTQDYQTALCVSRKHLLPRQKKGNVAQKHWVGPSNLVKCKPC

SEQ ID NO: 92921 - protein, 409 aa, Homo sapiens
MAAPMEVAVCTDSAAPMWSCIVWELHSGANLLTYRGGQAGPRGLALLNGEYLLAAQLGKNYISAWELQRKDQLQQKIMCPGPVTCLTASPNGLYVLAGVAESIHLWEVSTGNLLVILSRHYQDVSCLQFTGDSSHFISGGKDCLVLVWSLCSVLQADPSRIPAPRHVWSHHALPITDLHCGFGGPLARVATSSLDQTVKLWEVSSGELLLSVLFDVSIMAVTMDLAEHHMFCGGSEGSIFQVDLFTWPGQRERSFHPEQDAGKVFKGHRNQVTCLSVSTDGSVLLSGSHDETVRLWDVQSKQCIRTVALKGPVTNAAILLAPVSMLSSDFRPSLPLPHFNKHLLGAEHGDEPRHGGLTLRLGLHQQSVLGGQDQLRVRVTELEDEVRNLRKINRDLFDFSTRFITRPAK

SEQ ID NO: 92922 - protein, 165 aa, Homo sapiens
MAPAADREGYWGPTTSTLDWCEENYSVTWYIAEFWNTVSNLIMIIPPMFGAVQSVRDGLEKRYIASYLALTVVGMGSWCFHMTLKYEMQLLDELPMIYSCCIFVYCMFECFKIKNSVNYHLLFTLVLFSLIVTTVYLKVKEPIFHQVMYGMLVFTLVLRSIYIVT

SEQ ID NO: 92923 - protein, 146 aa, Homo sapiens
MGAFCQRPSSDKEQEKEKKSVICVEGNIASGKTTCLEFFSNATDVEVLTEPVSKWRNVRGHNPLGLMYHDASRWGLTLQTYVQLTMLDRHTRPQVSSVRLMERSIHSARYIFVENLYRRNTWKQFTISMRSGSSKAAFSPWQPLFW

SEQ ID NO: 92924 - protein, 477 aa, Homo sapiens
MGRAGGGGPGRGPPPLLLFLGAALVLASGAVPAREAGSAVEAEELVKGSPAWEPPANDTREEAGPPAAGEDEASWTAPGGELAGPEEVLQESAAVTGTAWLEADSPGLGGVTAEAGSGDAQALPATLQAPHEVLGQSIMPPAIPEATEASGPPSPTPGDKLSPASELPKESPLEVWLNLGGSTPDPQGPELTYPFQGTLEPQPASDIIDIDYFEGLDGEGRGADLGSFPGSPGTSENHPDTEGETPSWSLLDLYDDFTPFDESDFYPTTSFYDDLDEEEEEEEDDKDAVGGGDLEDENELLVPTGKPGLGPGTGQPTSRWHAVPPQHTLGSVPGSSIALRPRPGEPGRDLASSENGTECRSGFVRHNGSCRSVCDLFPSYCHNGGQCYLVENIGAFCRCNTQDYIWHKGMRCESIITDFQVMCVAVGSAALVLLLLFMMTVFFAKKLYLLKTENTKLRRTKMILVLPTKSRRFSSPA

SEQ ID NO: 92925 - protein, 27 aa, Homo sapiens
MSALTDKAIVKKELLYDVAGSDKYQVN

SEQ ID NO: 92926 - protein, 81 aa, Homo sapiens
MGTECHYFICDVGNREEVYQTAKAVREKVSQPLSPTEAGDGGPEDSGSCAAQPGPPPPPMDNACPRYLEKHTSTGCTRGDP

SEQ ID NO: 92927 - protein, 76 aa, Homo sapiens
MASQVLVYPPYVYQTQSSAFCSVKKLKVEPSSCVFQERNYPRTYVNGRNFGNSHPPTKGSAFQTKIPFNRPRGHNF

SEQ ID NO: 92928 - protein, 469 aa, Homo sapiens
MEIKDQGAQMEPLLPTRNDEEAVVDRGGTRSILKTHFEKEDLEGHRTLFIGVHVPLGGRKSHRRHRHRGHKHRKRDRERDSGLEDGRESPSFDTPSQRVQFILGTEDDDEEHIPHDLFTELDEICWREGEDAEWRETARWLKFEEDVEDGGERWSKPYVATLSLHSLFELRSCILNGTVLLDMHANTLEEIADMVLDQQVSSGQLNEDVRHRVHEALMKQHHHQNQKKLTNRIPIVRSFADIGKKQSEPNSMDKNAGQVVSPQSAPACVENKNDVSRENSTVDFSKVDLHFMKKIPPGAEASNILVGELEFLDRTVVAFVRLSPAVLLQGLAEVPIPTRFLFILLGPLGKGQQYHEIGRSIATLMTDEVFHDVAYKAKDRNDLVSGIDEFLDQVTVLPPGEWDPSIRIEPPKNVPSQEKRKIPAVPNGTAAHGEAEPHGGHSGPELQRTGRSPISGIFASPEFFHRFCC

SEQ ID NO: 92929 - protein, 48 aa, Homo sapiens
MADHNPDSDSTPRTLLRRVLDTADPRTPRRPRSARAGARRALLETASP

SEQ ID NO: 92930 - protein, 79 aa, Homo sapiens
  MOD_RES (1)..(1): Any amino acid
XQQPGAPPQQDYTKAWEEYYKKQAQVATGGGPGAPPGSQPDYSAAWAEYYRQQAAYYGQTPGPGGPQPPPTQQGQQQPS

SEQ ID NO: 92931 - protein, 63 aa, Homo sapiens
MSAAKENPCRKFQANIFNKSKCQNCFKPRESHLLNDEDLTQQNTHPLEMKRGAHIYDARMFSC

SEQ ID NO: 92932 - protein, 380 aa, Homo sapiens
MYSPLCLTQDEFHPFIEALLPHVRAFAYTWFNLQARKRKYFKKHEKRMSKEEERAVKDELLSEKPEVKQKWASRLLAKLRKDIRPEYREDFVLTVTGKKPPCCVLSNPDQKGKMRRIDCLRQADKVWRLDLVMVILFKGIPLESTDGERLVKSPQCSNPGLCVQPHHIGVSVKELDLYLAYFVHAAGMPSPTTLKKSEKSGFSSPSPSQTSSLGTAFTQHHRPVITGPRASPHATPSTLHFPTSPIIQQPGPYFSHPAIRYHPQETLKEFVQLVCPDAGQQAGQVGFLNPNGSSQGKVHNPFLPTPMLPPPPPPPMARPVPLPVPDTKPPTTSTEGGAASPTSPTYSTPSTSPANRFVSVGPRDPSFVNIPQQTQSWYLG

SEQ ID NO: 92933 - protein, 107 aa, Homo sapiens
MASALEQFVNSVRQLSAQGQMTQLCELINKSGELLAKNLSHLDTVLGALDVQEHSLGVLAVLFVKFSMPSVPDFETLFSQVQLFISTCNGEHIRYATDTSPARNWHP

SEQ ID NO: 92934 - protein, 633 aa, Homo sapiens
MRYRLAWLLHPALPSTFRSVLGARLPPPERLCGFQKKTYSKMNNPAIKRIGNHITKSPEDKREYRGLELANGIKVLLISDPTTDKSSAALDVHIGSLSDPPNIAGLSHFCEHMLFLGTKKYPKENEYSQFLSEHAGSSNAFTSGEHTNYYFDVSHEHLEGALDRFAQFFLCPLFDESCKDREVNAVDSEHEKNVMNDAWRLFQLEKATGNPKHPFSKFGTGNKYTLETRPNQEGIDVRQELLKFHSAYYSSNLMAVCVLGRESLDDLTNLVVKLFSEVENKNVPLPEFPEHPFQEEHLKQLYKIVPIKDIRNLYVTFPIPDLQKYYKSNPGHYLGHLIGHEGPGSLLSELKSKGWVNTLVGGQKEGARGFMFFIINVDLTEEGLLHVEDIILHMFQYIQKLRAEGPQEWVFQECKDLNAVAFRFKDKERPRGYTSKIAGILHYYPLEEVLTAEYLLEEFRPDLIEMVLDKLRPENVRVAIVSKSFEGKTDRTEEWYGTQYKQEAIPDEVIKKWQNADLNGKFKLPTKNEFIPTNFEILPLEKEATPYPALIKDTAMSKLWFKQDDKFFLPKACLNFEFFSPFAYVDPLHCNMAYLYLELLKDSLNEYAYAAELAGLSYDLQNTIYGMYSLHLC

SEQ ID NO: 92935 - protein, 231 aa, Homo sapiens
MLPKSRRALTIQEIAALARSSLHGISQVVKDHVTKPTAMAQGRVAHLIEWKGWSKPSDSPAALESAFSSYSDLSEGEQEARFAAGVAEQFAIAEAKLRAWSSVDGEDSTDDSYDEDFAGGMDTDMAGQLPLGPHLQDLFTGHRFSRPVRQGSVEPESDCSQTVSPDTLCSSLCSLEDGLLGSPARLASQLLGDELLLAKLPPSRESAFRSLGPLEAQDSLYNSPLTESCLS

SEQ ID NO: 92936 - protein, 57 aa, Homo sapiens
MPSRGTRPEDSSVLIPTDNSTPHKEDLSSKIKEQKIVVDELSNLKKNRPKLCFPESI

SEQ ID NO: 92937 - protein, 87 aa, Homo sapiens
MIRVQQMHRPKLIGEELAQLKEQRVHKTDLERVLEANDGSGMLDEDEEDLQRALALSRQEIDMEDEEADLRRAIQLSMQVPETYLKI

SEQ ID NO: 92938 - protein, 198 aa, Homo sapiens
MSRSATLLLCLLGCHVWKAVTKTLREPGAGAQEVTLKVHISDASTHQPVADALIEIFTNQASIASGTSGTDGVAFIKFQYKLGSQLIVTASKHAYVPNSAPWKPIRLPVFSSLSLGLLPERSATLMVYEDVVQIVSGFQGNSTRHDLTPVTAVSVHLLSSNGTPVLVDGPIYVTVPLATQSSLRHNAYVAAWRFDQKL

SEQ ID NO: 92939 - protein, 92 aa, Homo sapiens
RARQDLPSSLVGLFPRAQGPAASSQSALMPPAPTTRWCSQPPTGLDPSPLHLHARLALLRHMAEQDRDFLENEQFFLETLKKGSYNLTSHSA

SEQ ID NO: 92940 - protein, 108 aa, Homo sapiens
  MOD_RES (1)..(1): Any amino acid
XLGAEAQEPGAPAAGMRRRRRLQQEDGISFEYHRYPELREALVSVWLQCTAISRIYTVGRSFEGRELLVIELSDNPGVHEPDCKLYEVGTLIPAPSSCLAHSGLEYTL

SEQ ID NO: 92941 - protein, 148 aa, Homo sapiens
QTQDVPLPAPEAPSPDELAGGVILGVALWLRHDPQTTNLLYLELGDKPAPNTFYVGIYILIAVGAVMMFVGFLGCYGAIQESQCLLGTFFTCLVILFACEVAAGIWGFVNKDQIAKDVKQFYDQALQQAVVDDDANNAKAVVKTFHET

SEQ ID NO: 92942 - protein, 391 aa, Homo sapiens
LEGTAGTITSNEWSSPTSPEGSTASGGSQALDKPIDNDAEGVWSPDIEQSFQEALAIYPPCGRRKIILSDEGKMYGRNELIARYIKLRTGKTRTRKQVSSHIQVLARRKAREIQAKLKFWQGALPGQAGTSHDVKPFSQQTYAVQPPLPLPGFESPAGPAPSPSAPPAPPWQGRSVASSKLWMLEFSAFLEQQQDPDTYNKHLFVHIGQSSPSYSDPYLEAVDIRQIYDKFPEKKGGLKDLFERGPSNAFFLVKFWADLNTNIEDEGSSFYGVSSQYESPENMIITCSTKVCSFGKQVVEKVETEYARYENGHYSYRIHRSPLCEYMINFIHKLKHLPEKYMMNSVLENFTILQVVTNRDTQETLLCIAYVFEVSASEHGAQHHIYRLVKE

SEQ ID NO: 92943 - protein, 162 aa, Homo sapiens
MRLTRCQAALAAAITLNLLVLFYVSWLQHQPRNSRARGPRRASAAGPRVTVLVREFEAFDNAVPELVDSFLQQDPAQPVVVAADTLPYPPLALPRIPNVRLALLQPALDRPAAASRPETYVATEFVALVPDGARAEAPGLLERMVEALRAGSARLVAAPVAT

SEQ ID NO: 92944 - protein, 842 aa, Homo sapiens
MMSTYKRATLDEEDLVDSLSEGDAYPNGLQVNFHSPRSGQRCWAARTQVEKRLVVLVVLLAAGLVACLAALGIQYQTRSPSVCLSEACVSVTSSILSSMDPTVDPCHDFFSYACGGWIKANPVPDGHSRWGTFSNLWEHNQAIIKHLLENSTASVSEAERKAQVYYRACMNETRIEELRAKPLMELIERLGGWNITGPWAKDNFQDTLQVVTAHYRTSPFFSVYVSADSKNSNSNVIQVDQSGLGLPSRDYYLNKTENEKVLTGYLNYMVQLGKLLGGGDEEAIRPQMQQILDFETALANITIPQEKRRDEELIYHKVTAAELQTLAPAINWLPFLNTIFYPVEINESEPIVVYDKEYLEQISTLINTTDRCLLNNYMIWNLVRKTSSFLDQRFQDADEKFMEVMYGTKKTCLPRWKFCVSDTENNLGFALGPMFVKATFAEDSKSIATEIILEIKKAFEESLSTLKWMDEETRKSAKEKADAIYNMIGYPNFIMDPKELDKVFNDYTAVPDLYFENAMRFFNFSWRVTADQLRKAPNRDQWSMTPPMVNAYYSPTKNEIVFPAGILQAPFYTRSSPKALNFGGIGVVVGHELTHAFDDQGREYDKDGNLRPWWKNSSVEAFKRQTECMVEQYSNYSVNGEPVNGRHTLGENIADNGGLKAAYRAYQNWVKKNGAEHSLPTLGLTNNQLFFLGFAQVWCSVRTPESSHEGLITDPHSPSRFRVIGSLSNSKEFSEHFRCPPGSPMNPPHKCEVCSPGLLAQPCLDSALPSPGKLESSCPRGSRRHRDTPATLGSASKLVQGIESGFQMEVLVPARSSPGSSAEETGTREVAEAEASRSPLAT

SEQ ID NO: 92945 - protein, 46 aa, Homo sapiens
MASLLCCGPKLAACGIVLSAWGVIMLVRGLPDNARNIFQCPFRCVD

SEQ ID NO: 92946 - protein, 318 aa, Homo sapiens
  MOD_RES (1)..(1): Any amino acid
XPIALWLRLVLALALVRPRAVGWAPVRAPIYVSSWAVQVSQGNREVERLARKFGFVNLGPIFPDGQYFHLRHRGVVQQSLTPHWGHRLHLKKNPKVQWFQQQTLQRRVKRSVVVPTDPWFSKQWYMNSEAQPDLSILQAWSQGLSGQGIVVSVLDDGIEKDHPDLWANYDPLASYDFNDYDPDPQPRYTPSKENRRTDAGRYHHRCHRGPVAEPAAAAHPHLQRQLGSRGRRPHGGRPRHPHPRGLPAWCDQASTRFPWAAPPSRAACPGTAKPAPPPSPPPTAAAWPPTPRSSPRTCITGAQTSTRAPRPQPHWRPA

SEQ ID NO: 92947 - protein, 207 aa, Homo sapiens
DIAWWYYQYQRDKIEDELEMTMVCHRPEGLEQLEAQTNFTKRELQVLYRGFKNECPSGVVNEDTFKQIYAQFFPHGDASTYAHYLFNAFDTTQTGSVKFEDFVTALSILLRGTVHEKLRWTFNLYDINKDGYINKEEMMDIVKAIYDMMGKYTYPVLKEDTPRQHVDVFFQKMDKNKDGIVTLDEFLESCQEDDNIMRSLQLFQNVM

SEQ ID NO: 92948 - protein, 56 aa, Homo sapiens
MYSSSCETTRNTTGIEESTDGMILGPEDLSYQIYDVSGESNSAVSTEDLKECLKKQ

SEQ ID NO: 92949 - protein, 807 aa, Homo sapiens
  MOD_RES (1)..(1): Any amino acid
XNGGGGSATARGGEYRLPGEGNAGLLGLGPEAAAPGKRIRKPSLLYEGFESPTMASVPALQLTPANPPPPEVSNPKKPGRVTNQLQYLHKVVMKALWKHQFAWPFRQPVDAVKLGLPDYHKIIKQPMDMGTIKRRLENNYYWAASECMQDFNTMFTNCYIYNKPTDDIVLMAQTLEKIFLQKVASMPQEEQELVVTIPKNSHKKGAKLAALQGSVTSAHQVPAVSSVSHTALYTPPPEIPTTVFNIPHPSVISSPLLKSLHSAGPPLLAVTAAPPAQPLAKKKGVKRKADTTTPTPTAILAPGSPASPPGSLEPKAARLPPMRRESGRPIKPPRKDLPDSQQQHQSSKKGKLSEQLKHCNGILKELLSKKHAAYAWPFYKPVDASALGLHDYHDIIKHPMDLSTVKRKMENRDYRDAQEFAADVRLMFSNCYKYNPPDHDVVAMARKLQDVFEFRYAKMPDEPLEPGPLPVSTAMPPGLAKSSSESSSEESSSESSSEEEEEEDEEDEEEEESESSDSEEERAHRLAELQEQLRAVHEQLAALSQGPISKPKRKREKKEKKKKRKAEKHRGRAGADEDDKGPRAPRPPQPKKSKKASGSGGGSAALGPSGFGPSGGSGTKLPKKATKTAPPALPTGYDSEEEEESRPMSYDEKRQLSLDINKLPGEKLGRVVHIIQAREPSLRDSNPEEIEIDFETLKPSTLRELERYVLSCLRKKPRKPYTIKKPVGKTKEELALEKKRELEKRLQDVSGQLNSTKKPPKKANEKTESSSAQQVAVSRLSASSSSSDSSSSSSSSSSSDTSDSDSG

SEQ ID NO: 92950 - protein, 221 aa, Homo sapiens
MLDHEYTTKEVFRKNFFNDWRKEMAVEEREVIKSLDKCDFTEIHRYFVDKAAARKVLSREEKQKLKEEAEKLQQEFGYCILDGHQEKIGNFKIEPPGLFRGRGDHPKMGMLKRRITPEDVVINCSRDSKIPEPPAGHQWKEVRSDNTVTWLAAWTESVQNSIKYIMLNPCSKLKGETAWQKFETARRLRGFVDEIRSQYRADWKSREMKTRQRAVALYFID

SEQ ID NO: 92951 - protein, 55 aa, Homo sapiens
MSINLTVDIYIYLLSNARSVCGKQRSKQLYFLFSPKHYWRISHISLQRGFHTNII

SEQ ID NO: 92952 - protein, 896 aa, Homo sapiens
MADPAECSIKVMCRFRPLNEAEILRGDKFIPKFKGDETVVIGQGKPYVFDRVLPPNTTQEQVYNACAKQIVKDVLEGYNGTIFAYGQTSSGKTHTMEGKLHDPQLMGIIPRIAHDIFDHIYSMDENLEFHIKVSYFEIYLDKIRDLLDVSKTNLAVHEDKNRVPYVKGCTERFVSSPEEVMDVIDEGKANRHVAVTNMNEHSSRSHSIFLINIKQENVETEKKLSGKLYLVDLAGSEKVSKTGAEGAVLDEAKNINKSLSALGNVISALAEGTKTHVPYRDSKMTRILQDSLGGNCRTTIVICCSPSVFNEAETKSTLMFGQRAKTIKNTVSVNLELTAEEWKKKYEKEKEKNKTLKNVIQHLEMELNRWRNGEAVPEDEQISAKDQKNLEPCDNTPIIDNIAPVVAGISTEEKEKYDEEISSLYRQLDDKDDEINQQSQLAEKLKQQMLDQDELLASTRRDYEKIQEELTRLQIENEAAKDEVKEVLQALEELAVNYDQKSQEVEDKTRANEQLTDELAQKTTTLTTTQRELSQLQELSNHQKKRATEILNLLLKDLGEIGGIIGTNDVKTLADVNGVIEEEFTMARLYISKMKSEVKSLVNRSKQLESAQMDSNRKMNASERELAACQLLISQHEAKIKSLTDYMQNMEQKRRQLEESQDSLSEELAKLRAQEKMHEVSFQDKEKEHLTRLQDAEEMKKALEQQMESHREAHQKQLSRLRDEIEEKQKIIDEIRDLNQKLQLEQEKLSSDYNKLKIEDQEREMKLEKLLLLNDKREQAREDLKGLEETVSRELQTLHNLRKLFVQDLTTRVKKSVELDNDDGGGSAAQKQKISFLENNLEQLTKVHKQMGKQTGALLHCTVGGPGLEPAPSLLSCPFLAISDALSDACDVLAFV

SEQ ID NO: 92953 - protein, 120 aa, Homo sapiens
MACAAARSPADQDRFICIYPAYLNNKKTIAEGRRIPISKKNKMYSREWNRDVQYRGRVRVQLKQEDGSLCLVQFPSRKSVMLYAAEMIPKLKTRTQKTGGADQSLQQGEGSKKGKGKKKK

SEQ ID NO: 92954 - protein, 222 aa, Homo sapiens
  MOD_RES (1)..(1): Any amino acid
XTSIVAQDSRGHIYHGRNLDYPFGNVLRKLTVDVQFLKNGQIAFTGTTFIGYVGLWTGQSPHKFTVSGDERDKGWWWENAIAALFRRHIPVSWLIRATLSESENFEAAVGKLAKTPLIADVYYIVGGTSPREGVVITRNRDGPADIWPLDPLNGAWFRVETNYDHWKPAPKEDDRRTSAIKALNATGQANLSLEALFQILSVVPVYNKLFPLAEFPEVGLLS

SEQ ID NO: 92955 - protein, 76 aa, Homo sapiens
  MOD_RES (1)..(1): Any amino acid
XVQSDVFRVAEFPHGYGSCDEIPRVDLRVWQDCCEDCRTRGQFNAFSYHFRGRRSLEFSYQEDKPTKKTRPRKIPR

SEQ ID NO: 92956 - protein, 871 aa, Homo sapiens
MFTLSQTSRAWFIDRARQAREERLVQKERERAAVVIQAHVRSFLCRSRLQRDIRREIDDFFKADDPESTKRSALCIFKIARKLLFLFRIKEDNERFEKLCRSILSSMDAENEPKVWYVSLACSKDLTLLWIQQIKNILWYCCDFLKQLKPEILQDSRLITLYLTMLVTFTDTSTWKILRGKGESLRPAMNHICANIMGHLNQHGFYSVLQILLTRGLARPRPCLSKGTLTAAFSLALRPVIAAQFSDNLIRPFLIHIMSVPALVTHLSTVTPERLTVLESHDMLRKFIIFLRDQDRCRDVCESLEGCHTLCLMGNLLHLGSLSPRVLEEETDGFVSLLTQTLCYCRKYVSQKKSNLTHWHPVLGWFSQSVDYGLNESMHLITKQLQFLWGVPLIRIFFCDILSKKLLESQEPAHAQPASPQNVLPVKSLLKRAFQKSASVRNILRPVGGKRVDSAEVQKVCNICVLYQTSLTTLTQIRLQILTGLTYLDDLLPKLWAFICELGPHGGLKLFLECLNNDTEESKQLLAMLMLFCDCSRHLITILDDIEVYEEQISFKLEELVTISSFLNSFVFKMIWDGIVENAKGETLELFQSVHGWLMVLYERDCRRRFTPEDHWLRKDLKPSVLFQELDRDRKRAQLILQYIPHVIPHKNRVLLFRTMVTKEKEKLGLVETSSASPHVTHITIRRSRMLEDGYEQLRQLSQHAMKGVIRVKFVNDLGVDEAGIDQDGVFKEFLEEIIKRVFDPALNLFKTTSGDERLYPSPTSYIHENYLQLFEFVGKMLGKAVYEGIVVDVPFASFFLSQLLGHHHSVFYSSVDELPSLDSEFYKNLTSIKRYDGDITDLGLTLSYDEDVMGQLVCHELIPGGKTIPV

SEQ ID NO: 92957 - protein, 55 aa, Homo sapiens
MATLVELPDSVLLEIFSYLPVRDRIRISRVCHRWKRLVDDRWLWRHVDLTLYTAL

SEQ ID NO: 92958 - protein, 77 aa, Homo sapiens
MLRSTLAQQGTPVYSVAWGPDSEKVLYTAGKQLIIKPLQPNAKVLQWKAHDGIILKVDWNSVNDLILSAGEDCKYKV

SEQ ID NO: 92959 - protein, 35 aa, Homo sapiens
MFISLWEFFYGHFFRFWMKWLLRQMTGKCELQRIF

SEQ ID NO: 92960 - protein, 193 aa, Homo sapiens
AAAAPAEQAPRAKGRPRRSPESHRRSSSPERRSPGSPVCRADKAKSQQVRTSSTIRRTSSLDTITGPYLTGQWPRDPHVHYPSCMKDKATQTPSCWAEEGAEKRSHQRSASWGSADQLKEQIAKLRQQLQRSKQSSRHSKEKDRQSPLHGNHITISHTQATGSSRWTYQMVEELHFLLITGAVVLAALTLRLL

SEQ ID NO: 92961 - protein, 313 aa, Homo sapiens
AQSRPGWLGVAALGLTAVALGAVAWRRAWPTRRRRLLQQVGTVAQLWIYPVKSCKGVPVSEAECTAMGLRSGNLRDRFWLVINQEGNMVTARQEPRLVLISLTCDGDTLTLSAAYTKDLLLPIKTPTTNAVHKCRVHGLEIEGRDCGEATAQWITSFLKSQPYRLVHFEPHMRPRRPHQIADLFRPKDQIAYSDTSPFLILSEASLADLNSRLEKKVKATNFRPNIVISGCDVYAEDSWDELLIGDVELKRVMACSRCILTTVDPDTGVMSRKEPLETLKRSHFPANRWAARRGAPLRPAALGRPVLRISRSH

SEQ ID NO: 92962 - protein, 176 aa, Homo sapiens
NSQLKALFDGLSHIYTTQGQSRKKGHPSYAPPKRMRRKTELSSTAKSKAHFFGKRDIRSRFISHSSSSSWGMARGSIFKAIAHFKRTTFLKKHRMLGRLKYKVTPQMGTPSPGKGSLTDGRIKPDQDDDTEIKINIKQESADVNVIGNKDVVTEEDLDVFKQAQELSWEITKALPV

SEQ ID NO: 92963 - protein, 1130 aa, Homo sapiens
MSAAPAYSEDKGGSAGPGEPEYGHDPASGGIFSSDYKRHDDLKEMLDTNKDSLKLEAMKRIVAMIARGKNASDLFPAVVKNVACKNIEVKKLVYVYLVRYAEEQQDLALLSISTFQRGLKDPNQLIRASALRVLSSIRVPIIVPIMMLAIKEAASDMSPYVRKTAAHAIPKLYSLDSDQKDQLIEVIEKLLADKTTLVAGSVVMAFEEVCPERIDLIHKNYRKLCNLLIDVEEWGQVVIISMLTRYARTQFLSPTQNESLLEENAEKAFYGSEEDEAKGAGSEETAAAAAPSRKPYVMDPDHRLLLRNTKPLLQSRSAAVVMAVAQLYFHLAPKAEVGVIAKALVRLLRSHSEVQYVVLQNVATMSIKRRGMFEPYLKSFYIRSTDPTQIKILKLEVLTNLANETNIPTVLREFQTYIRSMDKDFVAATIQAIGRCATNIGRVRDTCLNGLVQLLSNRDELVVAESVVVIKKLLQMQPAQHGEIIKHLAKLTDNIQVPMARASILWLIGEYCEHVPRIAPDVLRKMAKSFTAEEDIVKLQVINLAAKLYLTNSKQTKLLTQYVLSLAKYDQNYDIRDRARFTRQLIVPSEQGGALSRHAKKLFLAPKPAPVLESSFKDRDHFQLGSLSHLLNAKATGYQELPDWPEEAPDPSVRNVEVPEWTKCSNREKRKEKEKPFYSDSEGESGPTESADSDPESESESDSKSSSESGSGESSSESDNEDQDEDEEKGRGSESEQSEEDGKRKTKKKVPERKGEASSSDEGSDSSSSSSESEMTSESEEEQLEPASWSRKTPPSSKSAPATKEISLLDLEDFTPPSVQPVSPPAIVSTSLAADLEGLTLTDSTLVPSLLSPVSGVGRQELLHRVAGEGLAVDYTFSRQPFSGDPHMVSVHIHFSNSSDTPIKGLHVGTPKLPAGISIQEFPEIESLAPGESATAVMGINFCDSTQAANFQLCTQTRQFYVSIQPPVGELMAPVFMSENEFKKEQGKLMGMNEITEKLMLPDTCRSDHIVVQKVTATANLGRVPCGTSDEYSSSSPLLFPPQVCREDTDWWKPRSADPGCPASWSCPADCQQRENGDWHHAGKGCDTGSDPVTSKCCDLFGSHLYLPMTPRLSVSLIFLSLSHHPPHAR

SEQ ID NO: 92964 - protein, 536 aa, Homo sapiens
HMAVPFYIPTSNVWSDPVSQHPRQHLVLSVFFILAILNMVSSFRVSELQVLLGFAGRNKSGRKHDLLMRALHLLKSGCSPAVQIKIRELYRRRYPRTLEGLSDLSTIKSSVFSLDGGSSPVEPDLAVAGIHSLPSTSVTPHSPSSPVGSVLLQDTKPTFEMQQPSPPIPPVHPDVQLKNLPFYDVLDVLIKPTSLVQSSIQRFQEKFFIFALTPQQVREICISRDFLPGGRRDYTVQVQLRLCLAETSCPQEDNYPNSLCIKVNGKLFPLPGYAPPPKNGIEQKRPGRPLNITSLVRLSSAVPNQISISWASEIGKNYSMSVYLVRQLTSAMLLQRLKMKGIRNPDHSRALIKEKLTADPDSEIATTSLRVSLMCPLGKMRLTIPCRAVTCTHLQCFDAALYLQMNEKKPTWICPVCDKKAAYESLILDGLFMEILNDCSDVDEIKFQEDGSWCPMRPKKEAMKVSSQPCTKIESSSVLSKPCSVTVASEASKKKVDVIDLTIESSSDEEEDPPAKRKCIFMSETQSSPTKGFVNL

SEQ ID NO: 92965 - protein, 37 aa, Homo sapiens
MPLAAYCYLRVVGKGSYGEVTLVKHRRDGKQPRAASC

SEQ ID NO: 92966 - protein, 99 aa, Homo sapiens
MVLELNASDDRGIDIIRGPILSFASTRTIFKKGFKLVILDEADAMTQDAQNALRRVIEKFTENTRFCLICNYLSKIIPALQSRCTRFRFGPLTPELMVP

SEQ ID NO: 92967 - protein, 130 aa, Homo sapiens
MLLTISEFKPTYQDRVAPPGLTQIPQIQKTEISFRPNDPKSYEAYVLNIVRFLEKYKDSAQRDDMIFEDCGDVPSEPKERGDFNHERGERKVCRFKLEWLGNCSGLNDETYGYKEGKPCIIIKLNRVLGF

SEQ ID NO: 92968 - protein, 523 aa, Homo sapiens
MRTPQLALLQVFFLVFPDGVRPQPSSSPSGAVPTSLELQRGTDGGTLQSPSEATATRPAVPGLPTVVPTLVTPSAPGNRTVDLFPVLPICVCDLTPGACDINCCCDRDCYLLHPRTVFSFCLPGSVRSSSWVCVDNSVIFRSNSPFPSRVFMDSNGIRQFCVHVNNCFLESKSTTCTRFFKNLASSCTLDSALNAASYYNFTVLKVPRSMTDPQNMEFQVPVILTSQANAPLLAGNTCQNVVSQVTYEIETNGTFGIQKVSVSLGQTNLTVEPGASLQQHFILRFRAFQQSTAASLTSPRSGNPGYIVGKPLLALTDDISYSSQGNGSCSVKRHEVQFGVNAISGCKLRLKKADCSHLQQEIYQTLHGRPRPEYVAIFGNADPAQKGGWTRILNRHCSISAINCTSCCLIPVSLEIQVLWAYVGLLSNPQAHVSGVRFLYQCQSIQDSQQVTEVSLTTLVNFVDITQKPQPPRGQPKMDWKWPFDFFPFKVAFSRGVFSQKCSVSPILILCLLLLGVLNLETM

SEQ ID NO: 92969 - protein, 82 aa, Homo sapiens
MVDHLANTEINSQRIAAVESCFGASGQPLALPGRVLLGEGVLTKECRKKAKPRIFFLFNDILVYGSIVLNKRKYRSQHIIPL

SEQ ID NO: 92970 - protein, 787 aa, Homo sapiens
MTTEKSLVTEAENSQHQQKEEGEEAINSGQQEPQQEESCQTAAEGDNWCEQKLKASNGDTPTHEDLTKNKERTSESRGLSRLFSSFLKRPKSQVSEEEGKEVESDKEKGEGGQKEIEFGTSLDEEIILKAPIAAPEPELKTDPSLDLHSLSSAETQPAQEELREDPDFEIKEGEGLEECSKIEVKEESPQSKAETELKASQKPIRKHRNMHCKVSLLDDTVYECVVEKHAKGQDLLKRVCEHLNLLEEDYFGLAIWDNATSKTWLDSAKEIKKQVRGVPWNFTFNVKFYPPDPAQLTEDITRYYLCLQLRQDIVAGRLPCSFATLALLGSYTIQSELGDYDPELHGVDYVSDFKLAPNQTKELEEKVMELHKSYRSMTPAQADLEFLENAKKLSMYGVDLHKAKDLEGVDIILGVCSSGLLVYKDKLRINRFPWPKVLKISYKRSSFFIKIRPGEQEQYESTIGFKLPSYRAAKKLWKVCVEHHTFFRLTSTDTIPKSKFLALGSKFRYSGRTQAQTRQASALIDRPAPHFERTASKRASRSLDGAAAVDSADRSPRPTSAPAITQGQVAEGGVLDASAKKTVVPKAQKETVKAEVKKEDEPPEQAEPEPTEAWKVEKTHIEVTVPTSNGDQTQKLAEKTEDLIRMRKKKRERLDGENIYIRHSNLMLEDLDKSQEEIKKHHASISELKKNFMESVPEPRPSEWDKRLSTHSPFRTLNINGQIPTGEGVKKTSVLPSERKVGGPESPSYFLPDTYHLGVCKEPVLNFQTDQRRLAQLRELRAKFFLS

SEQ ID NO: 92971 - protein, 213 aa, Homo sapiens
  MOD_RES (1)..(1): Any amino acid
XKAVAGYKCTGYRSQDKSFHVEGALNHIFTRSLPFEGSQPRIFRIKLGNQWFSFPEPEALVGKLNRGFLEAPSCHPIKTINEKLIAELGKVFPLKRLKCSYPLLPQEGTSVLPFWNCDFLSAAFWISLHEDNSNSESLTGGTSQDVEDFLVSFSELSLLKNPGRDGKEEACEGTCGQAKICLRPSLLVHVQDVIEVPDFLSGLPWLVEGLGSA

SEQ ID NO: 92972 - protein, 181 aa, Homo sapiens
AAAASISEHPQKATTELPLLRAALKETLRKGAESTGSPIQLRTLSMDAPTSRLYPVGLFLERVASSDLVLQNYHIPAGTLVRVFLYSLGRNPALFPRPERYNPQRWLDIRGSGRNFYHVPFGFGMRQCLGRRLAEAEMLLLLHHVLKHLQVETLTQEDIKMVYSFILRPSMFPLLTFRAIN

SEQ ID NO: 92973 - protein, 219 aa, Homo sapiens [sequence omitted]

SEQ ID NO: 92974 - protein, 426 aa, Homo sapiens
MAPWPPKGLVPAMLWGLSLFLNLPGPIWLQPSPPPQSSPPPQPHPCHTCRGLVDSFNKGLERTIRDNFGGGNTAWEEENLSKYKDSETRLVEVLEGVCSKSDFECHRLLELSEELVESWWFHKQQEAPDLFQWLCSDSLKLCCPAGTFGPSCLPCPGGTERPCGGYGQCEGEGTRGGSGHCDCQAGYGGEACGQCGLGYFEAERNASHLVCSACFGPCARCSGPEESNCLQCKKGWALHHLKCVDIDECGTEGANCGADQFCVNTEGSYECRDCAKACLGCMGAGPGRCKKCSPGYQQVGSKCLDVDECETEVCPGENKQCENTEGGYRCICAEGYKQMEGICVKEQIPDAVLGAFPILTDLTPETTRRWKLGSHPHSTYVKMKMQRDEATFPGLYGKQVAKLGSQSRQSDRGTRLIHSQQASSQR

SEQ ID NO: 92975 - protein, 194 aa, Homo sapiens
ISGLLCYSAGCLALPSLDQKKRGGHKACCLLTPPPPPLFPPPFFRGGRSPGPPGLPGKTGPKGEKGELGRPGRKGRPGPPGVPGMPGPIGWPGPEGPRGEKGDLGMMGLPGSRGPMGSKGYPGSRGEKGSRGEKGDLGPKGEKGFPGFPGMLGQKGEMGPKGEPGIAGHRGPTGRPGKRGKQGQKGDSGVMGPP

SEQ ID NO: 92976 - protein, 47 aa, Homo sapiens
MAAADLSHGHYLSGDPVCLHEEKTPAGRIVADCLTDCYQEVRSSNPV

SEQ ID NO: 92977 - protein, 225 aa, Homo sapiens
IDAFGKGKQLTVKECEYLIGQHVTAALYGVVNVKKVLQRMVGNLLSLGKREGIDQSYQLLRDSLDLYLAMYPDQVQLLLLQARLYFHLGIWPEKSFCLVLKVLDILQHIQTLDPGQHGAVGYLVQHTLEHIERKKEEVGVEVKLRSDEKHRDVCYSIGLIMKHKRYGYNCVIYGWDPTCMMGHEWIRNMNVHSLPHGHHQPFYNVLVEDGSCRYAAQGAALARGQ

SEQ ID NO: 92978 - protein, 135 aa, Homo sapiens
MAADIFPRKKPANSSSTSVQQYHQQNLSNNNLIPAPNWQGLYPTIRERNAMMFNNDLMADVHFVVGPPGGTQRLPGHKYVLAVGSSVFHAMFYGELAEDKDEIRIPDVEPAAFLAMLKYIYCDEIDLAADTVLAT

SEQ ID NO: 92979 - protein, 347 aa, Homo sapiens
MLPAVGSVDEEEDPAEEDCPELVPIETTQSEEEEKSGLGAKIPVTIITGYLGAGKTTLLNYILTEQHSKRVAVILNESGEGSALEKSLAVSQGGELYEEWLELRNGCLCCSVKDNGLRAIENLMQKKGKFDDILLETTGLADPGAVASMFWVDAELGSDIYLDGIITIVDSKYGLKHLTEEKPDGLINEATRSINGLGQILETQRSSLQKKLQHVPGTQPHLDQSIVTITFEVPGNAKEEHLNMFIQNLLWEKNVRNKDNHCMEVIRLKGLVSIKDKSQQVIVQGVHELYDLEETPVSWKDDTERTNRLVLIGRNLDKDILKQLFIATVTETEKQWTTHFKEDQVCT

SEQ ID NO: 92980 - protein, 173 aa, Homo sapiens
MSWIKEGELSLWERFCANIIKAGPMPKHIAFIMDGNRRYAKKCQVERQEGHSQGFNKLAETLRWCLNLGILEVTVYAFSIENFKRSKSEVDGLMDLARQKFSRLMEEKEKLQKHGVCIRVLGDLHLLPLDLQELIAQAVQATKNYNKCFLNVCFAYTSRHEISNAVREMAWGV

SEQ ID NO: 92981 - protein, 30 aa, Homo sapiens
MGLKPDGTITPLEEALNQYSVIEETSSDTD

SEQ ID NO: 92982 - protein, 76 aa, Homo sapiens
MVTFSENHGVVIQPAYKDKINITQLGLQNSTITFWNITLEDEGCYMCLFNTFGFGKISGTACLTVYAHSIPSLQIL

SEQ ID NO: 92983 - protein, 80 aa, Homo sapiens
MESIYLQKHLGACLTQGLAEVARVRPVDPIEYLALWIYKYKENVTMEQLRQKEMAKLERERELALMEQEMMERLKAEELL

SEQ ID NO: 92984 - protein, 170 aa, Homo sapiens
MATSRYEPVAEIGVGAYGTVYKARDPHSGHFVALKSVRVPNGGGGGGGLPISTVREVALLRRLEAFEHPNVVRLMDVCATSRTDREIKVTLVFEHVDQDLRTYLDKAPPPGLPAETIKDLMRQFLRGLDFLHANCIVHRDLKPENILVTSGGTVKLADFGLARIYSYQMA

SEQ ID NO: 92985 - protein, 50 aa, Homo sapiens
  MOD_RES (1)..(1): Any amino acid
XMSVPTDGAVTTSQIPASEQETLENIYHDLQELGSSQSAGTIGNALHAMK

SEQ ID NO: 92986 - protein, 718 aa, Homo sapiens
METLESELTCPICLELFEDPLLLPCAHSLCFNCAHRILVSHCATNESVESITAFQCPTCRHVITLSQRGLDGLKRNVTLQNIIDRFQKASVSGPNSPSETRRERAFDANTMTSAEKVLCQFCDQDPAQDAVKTCVTCEVSYCDECLKATHPNKKPFTGHRLIEPIPDSHIRGLMCLEHEDEKVNMYCVTDDQLICALCKLVGRHRDHQVAALSERYDKLKQNLESNLTNLIKRNTELETLLAKLIQTCQHVETVKDQKVIGREKQQYYPRNRRKWVSNSLQARLMGRRCISRRERKLTLDVEKVNASRQEAKLTEECDLLIEIIQQRRQIIGTKIKEGKVMRLRKLAQQIANCKQCIERSASLISQAEHSLKENDHARFLQTAKNITERVSMATASSQVLIPEINLNDTFDTFALDFSREKKLLECLDYLTAPNPPTIREELCTASYDTITVHWTSDDEFSVVSYELQYTIFTGQANVVSLCNSADSWMIVPNIKQNHYTVHGLQSGTKYIFMVKAINQAGSRSSEPGKLKTNSQPFKLDPKSAHRKLKVSHDNLTVERDESSSKKSHTPERFTSQGSYGVAGNVFIDSGRHYWEVVISGSTWYAIGLAYKSAPKHEWIGKNSASWALCRCNNNWVVRHNSKEIPIEPAPHLRRVGILLDYDNGSIAFYDALNSIHLYTFDVAFAQPVCPTFTVWNKCLTIITGLPIPDHLDCTEQLP

SEQ ID NO: 92987 - protein, 72 aa, Homo sapiens
  MOD_RES (1)..(1): Any amino acid
XSQGVREGLIVGFVHSMCQTAQSFCDSPGEKGGATPPALLLLLSRLCLDYETATISYILTLTDEQFLVQVKH

SEQ ID NO: 92988 - protein, 490 aa, Homo sapiens
MPVPWFLLSLALGRSPVVLSLERLVGPQDATHCSPGLSCRLWDSDILCLPGDIVPAPGPVLAPTHLQTELVLRCQKETDCDLCLRVAVHLAVHGHWEEPEDEEKFGGAADSGVEEPRNASLQAQVVLSFQAYPTARCVLLEVQVPAALVQFGQSVGSVVYDCFEAALGSEVRIWSYTQPRYEKELNHTQQLPALPWLNVSADGDNVHLVLNVSEEQHFGLSLYWNQVQGPPKPRWHKNLTGPQIITLNHTDLVPCLCIQVWPLEPDSVRTNICPFREDPRAHQNLWQAARLQLLTLQSWLLDAPCSLPAEAALCWRAPGGDPCQPLVPPLSWENVTVDVNSSEKLQLQECLWADSLGPLKDDVLLLETRGPQDNRSLCALEPSGCTSLPSKASTRAARLGEYLLQDLQSGQCLQLWDDDLGALWACPMDKYIHKRWALVWLACLLFAAALSLILLLKKDHAKGPGENHPGQLWRWKHCLGGREFVQIQRQ

SEQ ID NO: 92989 - protein, 303 aa, Homo sapiens
ASGWRVCSINEGYMISTCLPEYIVVPSSLADQDLKIFSHSFVGRRMPLWCWSHSNGSALVRMALIKDVLQQRKIDQRICNAITKSHPQRSDVYKSDLDKTLPNIQEVQAAFVKLKQLCVNEPFEETEEKWLSSLENTRWLEYVRAFLKHSAELVYMLESKHLSVVLQEEEGRDLSCCVASLVQVMLDPYFRTITGFQSLIQKEWVMAGYQFLDRCNHLKRSEKESPLFLLFLDATWQLLEQYPAAFEFSETYLAVLYDSTRISLFGTFLFNSPHQRVKQSTDKKLYKTRLFSFTSLKFLVTIH

SEQ ID NO: 92990 - protein, 163 aa, Homo sapiens
MDDKEPKRWPTLRDRLCSDGFLFPQYPIKPYHLKGIHRAVFYRDLEELKFVLLTRYDINKRDRKERTALHLACATGQPEMVHLLVSRRCELNLCDREDRTPLIKAVQLRQEACATLLLQNGADPNITDVFGRTALHYAVYNEDTSMIEKLLSYGANIEECSEV

SEQ ID NO: 92991 - protein, 239 aa, Homo sapiens
MTPGTQSPFFLLLLLTVLTATTAPKPATVVTGSGHASSTPGGEKETSATQRSSVPSSTEKNAIPAPTTTKSCRETFLKWPGSVVVQLTLAFREGTINVHDVETQFNQYKTEAASRYNLTISDVSVSDVPFPFSAQSGAGVPGWGIALLVLVCVLVALAIVYLIALAVCQCRRKNYGQLDIFPARDTYHPMSEYPTYHTHGRYVPPSSTDRSPYEKVSAGNGGSSLSYTNPAVAATSANL

SEQ ID NO: 92992 - protein, 183 aa, Homo sapiens
RMESGFGFRILGGDEPGQPILIGAVIAMGSADRDGRLHPGDELVYVDGIPVAGKTHRYVIDLMHHAARNGQVNLTVRRKVLCGGEPCPENGRSPGSVSTHHSSPRSDYATYTNSNHAAPSSNASPPEGFASHSLQTSDVVIHRKENEGFGFVIISSLNRPESGSTIIFQSSFSSLQAVEQKRG

SEQ ID NO: 92993 - protein, 56 aa, Homo sapiens
MAAASAVSVLLVAAERNRWHRLPSLLLPPRLSIQDAVFSQKTWNLLNFVSKKELFL

SEQ ID NO: 92994 - protein, 130 aa, Homo sapiens
MRMCMGSRRSFICRMRCGNAPLDHLPLNRITTMRKRFRNGLGPVKEGEAQYAVVHCTGYIKAWPPAGMTIPEEDADVGQGSKYCLVAIGRLQVTSSPVCMDMNGMSVPTEFLSRHNSDGIITFVDPRCIS

SEQ ID NO: 92995 - protein, 200 aa, Homo sapiens
MDEGGTPLLPDSLVYQIFLSLGPADVLAAGLVCRQWQAVSRDEFLWREQFYRYYQVARDVPRHPAAMSWYEEFQRLYDTVPCVEVQTLREHTDQVLHLSFSHSGYQFASCSKDCTVKAITTAAPAEQIWSNDLTISLLHSADMRPYNWSYTQFSQFNKDDSLLLASGVFLGPHNSSSGEIAVISLDSFALLSRVRNKPYD

SEQ ID NO: 92996 - protein, 91 aa, Homo sapiens
MSRMRPVCQPWPSPHAPTTVKREGSTVSNSIQPPPPEYQLGSRTWLEAETPGQKRQCSAFMEFTEESRRIHQSVGTLLPRVKSFGRPNPHA

SEQ ID NO: 92997 - protein, 167 aa, Homo sapiens
MDLGSDAGSSSSSSRASSQSNSTKVTPCSECKSSSSPGGSLDLVSALEDYEEPFPVYQKKVIDEWAPEEDGEEEEEEDERDQRGYRDDRSPAREPGDVSARTRSGGGGGRSATTAMPPPVPNGNLHQHDPQDLRHNGNVVVAGRPSCSRGPRRAIQKPQPAGGRRSG

SEQ ID NO: 92998 - protein, 282 aa, Homo sapiens
MEDSGKTFSSEEEEANYWKDLAMTYKQRAENTQEELREFQEGSREYEAELETQLQQIETRNRDLLSENNRLRMELETIKEKFEVQHSEGYRQISALEDDLAQTKAIKDQLQKYIRELEQANDDLERAKRATIMSLEDFEQRLNQAIERNAFLESELDEKENLLESVQRLKDEARDLRQELAVQQKQEKPRTPMPSSVEAERTDTAVQATGSVPSTPIAHRGPSSSLNTPGSFRRGTGVQTRFLPEPRVRSVPKPNRWPSLWAEQQEQRWRGETAKQHQRAFG

SEQ ID NO: 92999 - protein, 81 aa, Homo sapiens
MATCAVEVFGLLEDEENSRIVRVRVIAGIGLAKKDILGASDPYVRVTLYDPMNGVLTSVQTKTIKKLYYVYYFLEFESKVE

SEQ ID NO: 93000 - protein, 421 aa, Homo sapiens
NLSLCTAALMYILSRDRLNMDLDRASLDLMIRLLELEQDASSAKLLNEKDMNKIKEKIRRLCETVHNKHLDLENITTGHLAMETLLSLTSKRAGDWFKEELRLLGGLDHIVDKVKECVDHLSRDEDEEKLVASLWGAERCLRVLESVTVHNPENQSYLIAYKDSQLIVSSAKALQHCEELIQQYNRAEDSICLADSKPLPHQNVTNHVGKAVEDCMRAIIGVLLNLTNDNEWGSTKTGEQDGLIGTALNCVLQVPKYLPQEQRFDIRVLLFLERERAAQLAESKTDELIKDAPTTQHDKSGEWQETSGEIQWVSTEKTDGTEEKHKKEEEDEELDLNKALQHAGKHMEDCIVASYTALLLGCLCQESPINVTTVREYLPEGDFSIMTEMLKKFLSFMNLTCAVGTTGQKSISRVIEYLEHC

SEQ ID NO: 93001 - protein, 238 aa, Homo sapiens
MAEGETESPGPKKCGPYISSVTSQSVNLMIRGVVLFFIGVFLALVLNLLQIQRNVTLFPPDVIASIFSSAWWVPPCCGTASAVIGLLYPCIDRHLGEPHKFKREWSSVMRCVAVFVGINHASAKVDFDNNIQLSLTLAALSIGLWWTFDRSRSGFGLGVGIAFLATVVTQLLVYNGVYQYTSPDFLYVRSWLPCIFFAGGITMGNIGRQLAMYECKVIAENLIRNEEGKKYLLYRKAR

SEQ ID NO: 93002 - protein, 60 aa, Homo sapiens
MSCTIEKALADAKALVERLRDHDDAAESLIEQTTALNKRVEAMKQYQEEIQELNEVARHR

SEQ ID NO: 93003 - protein, 64 aa, Homo sapiens
MSAEASARPLRVGSRVEVIGKGHRGTVAYVGATLFATGKWVGVILDEAKGKNDGTVQGRKYFTC

SEQ ID NO: 93004 - protein, 174 aa, Homo sapiens
MKTGHFEIVTMLLATMILVDIFQVKAEVLDMADNAFDDEYLKCTDRMEIKYVPQLLKEEKASHQQLDTVWENAKAKWAARKTQIFLPMNFKDNHGIALMAYISEAQEQTPFYHLFSEAVKMAGQSREDYIYGFQFKAFHFYLTRALQLLRKPCEASSKTVVYRTSQGTSFTFGG

SEQ ID NO: 93005 - protein, 92 aa, Homo sapiens
MGNGESQLSSVPAQKLGWFIQEYLKPYEECQTLIDEMVNTICDVLQEPEQFPLVQGVAIIQKQNILSPPEPWAPDPVSTSKPRVAPMDGKQS

SEQ ID NO: 93006 - protein, 113 aa, Homo sapiens
MEEKEDKHQQHKIEDAAITYGDWWSHGKALEPVFLPPYDSKSTQRSDFQKPSCPLVLPVKHSKMQKPSCGIDETLRKGAKTVTVVLCHSAGRKGTERSRACFFRWFHAILFSP

SEQ ID NO: 93007 - protein, 93 aa, Homo sapiens
  MOD_RES (1)..(1): Any amino acid
XKGKVKDIAISRERITLKDVLQEGTFGRIFHGILIDEKDPNKEKQAFVKTVKDQASEIQVTMMLTESCKLRGLHHRQFLSKTWYTWLFRLPVE

SEQ ID NO: 93008 - protein, 1260 aa, Homo sapiens
MGSVTGAVLKTLLLLSTQNWNRVEAGNSYDCDDPLVSALPQASFSSSSELSSSHGPGFARLNRRDGAGGWSPLVSNKYQWLQIDLGERMEVTAVATQGGYGSSNWVTSYLLMFSDSGWNWKQYRQEDSIWGFSGNANADSVVYYRLQPSIKARFLRFIPLEWNPKGRIGMRIEVFGCAYRSEVVDLDGKSSLLYRFDQKSLSPIKDIISLKFKTMQSDGILLHREGPNGDHITLQLRRARLFLLINSGEAKLPSTSTLVNLTLGSLLDDQHWHSVLIQRLGKQVNFTVDEHRHHFHARGEFNLMNLDYEGNVSFSCSQPQSMPVTFLSSRSYLALPDFSGEEEVSATFQFRTWNKAGLLLFSELQLISGGILLFLSDGKLKSNLYQPGKLPSDITAGVELNDGQWHSVSLSAKKNHLSVAVDGQMASAAPLLGPEQIYSGGTYYFGGCPDKSFGSKCKSPLGGFQGCMRLISISGKVVDLISVQQGSLGNFSDLQIDSCGISDRCLPNYCEHGGECSQSWSTFHCNCTNTGYRGATCHNSIYEQSCEAYKHRGNTSGFYYIDSDGSGPLEPFLLYCNMTETAWTIIQHNGSDLTRVRNTNPENPYAGFFEYVASMEQLQATINRAEHCEQEFTYYCKKSRLVNKQDGTPLSWWVGRTNETQTYWGGSSPDLQKCTCGLEGNCIDSQYYCNCDADRNEWTNDTGLLAYKEHLPVTKIVITDTGRLHSEAAYKLGPLLCQGDRSFWNSASFDTEASYLHFPTFHGELSADVSFFFKTTASSGVFLENLGIADFIRIELRSPTVVTFSFDVGNGPFEISVQSPTHFNDNQWHHVRVERNMKEASLQVDQLTPKTQPAPADGHVLLQLNSQLFVGGTATRQRGFLGCIRSLQLNGMTLDLEERAQVTPEVQPGCRGHCSSYGKLCRNGGKCRERPIGFFCDCTFSAYTGPFCSNEISAYFGSGSSVIYNFQENYLLSKNSSSHAASFHGDMKLSREMIKFSFRTTRTPSLLLFVSSFYKEYLSVIIAKNGSLQIRYKLNKYQEPDVVNFDFKNMADGQLHHIMINREEGVVFIEIDDNRRRQVHLSSGTEFSAVKSLVLGRILEHSDVDQDTALAGAQGFTGCLSAVQLSHVAPLKAALHPSHPDPVTVTGHVTESSCMAQPGTDATSRERTHSFADHSGTIDDREPLANAIKSDSAVIGGLIAVVIFILLCITAIAVRIYQQKRLYKRSEAKRSENVDSAEAVLKSELNIQNAVNENQKEYFF

SEQ ID NO: 93009 - protein, 41 aa, Homo sapiens
FLVAFSWMLVEGLLLWRKVVAVSMHPGPGMRLYHATGWGPR

SEQ ID NO: 93010 - protein, 311 aa, Homo sapiens
MELRVGNKYRLGRKIGSGSFGDIYLGANIASGEEVAIKLECVKTKHPQLHIESKFYKMMQGGVGIPSIKWCGAEGDYNVMVMELLGPSLEDLFNFCSRKFSLKTVLLLADQMISRIEYIHSKNFIHRDVKPDNFLMGLGKKGNLVYIIDFGLAKKYRDARTHQHIPYRENKNLTGTARYASINTHLGIEQSRRDDLESLGYVLMYFNLGSLPWQGLKAATKRQKYERISEKKMSTPIEVLCKGYPSEFSTYLNFCRSLRFDDKPDYSYLRQLFRNLFHRQGFSYDYVFDWNMLKFTDTVQDGSHWPHATHF

SEQ ID NO: 93011 - protein, 97 aa, Homo sapiens
MATPSLRGRLARFGNPRKPVLKPNKPLILANRVGERRREKGEATCITEMSVMMACWKQNEFRDDACRKEIQGFLDCAARAQVTDGSWGAFSGKEWGR

SEQ ID NO: 93012 - protein, 197 aa, Homo sapiens
MLLSQNAFIFRSLNLVLMVYISLVFGISYDSPDYTDESCTFKISLRNFRSILSWELKNHSIVPTHYTLLYTIMSKPEDLKVVKNCANTTRSFCDLTDEWRSTHEAYVTVLEGFSGNTTLFSCSHNFWLAIDMSFEPPEFEIVGFTNHINVMVKFPSIVEEELQFDLSLVIEEQSEGIVKKGEDEKLDISQFCHRQAL

SEQ ID NO: 93013 - protein, 248 aa, Homo sapiens
MGESPPWDVPTKLVAKAVPLPMTVRGHWFLSPRTEYSVAVQTAVKQSDGEYLVSGWSETVEFCTGDYAKEHLAQLQEKAEQIAGRMLRFSVFYRNHHKEYFQHARTHCGNMLQPYLKDNSGSHGSPTSGMLHGVFFSCNTEFNTGQPPQDSPYGRWRFQIPAQRLFNPSTNLYFADFYCMYTAYHYAILVLAPKGSLGDRFCRDRLPLLDIACNKFLTCSVEDGELVFRHAQDLILEIIYTEPVDLSL

SEQ ID NO: 93014 - protein, 26 aa, Homo sapiens
MPAPIRLRELIRTIRTARTQAEEREM

SEQ ID NO: 93015 - protein, 97 aa, Homo sapiens
MQFLYTDKIKYPRKERAGCVRECRPAAAEPTQGALPELRGKGVPLQPGDHDEGVRAPLLSTDSGDCAAEAAAAPSHSLGPASGHWPLHSPSSPWGLC

SEQ ID NO: 93016 - protein, 102 aa, Homo sapiens
  MOD_RES (1)..(1): Any amino acid
XIQGEAQLTESGGDLVHLEGPLRLSCAASWFTFSIYEIHWVCQASGKGLEWVAVIWRGESHQYNADYVRGRLTTSRDNTKYMLYMQMISLRTQNMAAFNCAG

SEQ ID NO: 93017 - protein, 218 aa, Homo sapiens; identical to SEQ ID NO: 66723
  MOD_RES (1)..(1): Any amino acid

SEQ ID NO: 93018 - protein, 218 aa, Homo sapiens; identical to SEQ ID NO: 43869
  MOD_RES (1)..(1): Any amino acid

SEQ ID NO: 93019 - protein, 362 aa, Homo sapiens
  MOD_RES (1)..(1): Any amino acid
XVFVRFNSSHGFPVEVDSDTSIFQLKEVVAKRQGVPADQLRVIFAGKELRNDWTVQNCDLDQQSIVHIVQRPWRKGQEMNATGGDDPRNAAGGCEREPQSLTRVDLSSSVLPGDSVGLAVILHTDSRKDSPPAGSPAGRSIYNSFYVYCKGPCQRVQPGKLRVQCSTCRQATLTLTQGPSCWDDVLIPNRMSGECQSPHCPGTSAEFFFKCGAHPTSDKETSVALHLIATNSRNITCITCTDVRSPVLVFQCNSRHVICLDCFHLYCVTRLNDRQFVHDPQLGYSLPCVAGCPNSLIKELHHFRILGEEQYNRYQQYGAEECVLQMGGVLCPRPGCGAGLLPEPDQRKVTCEGGNGLGCGVS

SEQ ID NO: 93020 - protein, 145 aa, Homo sapiens
MELEQREGTMAAVGFEEFSAPPGSELALPPLFGGHILESELETEVEFVSGGLGGSGLRERDEEEEAARGRRRRQRELNRRKYQALGRRCREIEQVNERVLNRLHQVQRITRRLQQERRFLMRVLDSYGDDYRASQFTIVLEQEMR

SEQ ID NO: 93021 - protein, 122 aa, Homo sapiens
MTERRVPFSLLRGPSWDPFRDWYPHSRLFDQAFGLPRLPEEWSQWLGGSSWPGYVRPLPPAAIESPAVAAPAYSRALSRQLSSGVSEIRHTADRWRVSLDVNHFAPDELTVKTKDGVVEITV

SEQ ID NO: 93022 - protein, 376 aa, Homo sapiens
MQKPPLLLRRPLPPKFTKLSLHEKKTHTAKTGKIESLHVAFTEDETTSIKMDRTRFPDVLRNQSLTPINIQNIFLDHCVQERVTAISSPQKSTKHVREQIPDTATGSIFFPHCNSASTRIFGKQTNKMESSRKFKTMKDVYTEKRLENILILSSKFSKPKSTPGSVIAQKLEKMHPKHQPLPESPGYTYQHISRDLSATVPSPPPMTVSMKPEGQWPEHFKSTATLTLRVTEFPGFVSLPTPVLPRKPHRQSVIETLVTENGNIESVPKQIPPRPPEGLTKTEKIESEIHVVRGEGFKTVAATRYETITAMTNLAIVNCQVYGRNALNLKGFFILNCPDLTPLAFQLIYLNLSFNDLHYFPTEMEEGSHESRNEAA

SEQ ID NO: 93023 - protein, 36 aa, Homo sapiens
MSTRTPLPTVNERDTENKGSSSVQEDLKHSVKLLLF

SEQ ID NO: 93024 - protein, 241 aa, Homo sapiens
  MOD_RES (1)..(1): Any amino acid
XPDGRLLRGHDQSAYDGKDYIALNEDLSSWTAADTAAQITQRKWEAARVAEQLRAYLEGTCVEWLRRHLENGKETLQRADPPKTHVTHHPISDHEATLRCWALGFYPAEITLTWQRDGEDQTQDTELVETRPAGDRTFQKWAAVVVPSGEEQRYTCHVQHEGLPKPLTLRWEPSSQSTIPIVGIVAGLAVLAVVVIGAVVATVMCRRKSSGHFLPTGGKGGSYSQAASSDSAQGSDVSLTA

SEQ ID NO: 93025 - protein, 85 aa, Homo sapiens
SIENLPSVFGSNPKAHIAAKTVFHLAHRHGDILREGWKNIMEAMLQLFRAQLLPKAMIEKISWIPMARSLYSGKRHHQTEESQQC

SEQ ID NO: 93026 - protein, 192 aa, Homo sapiens
SNSLLVPDSLRGTDKRRNGPEFSNDIKKRKVDDKDSSHYDSDGDKSDDNLVVDVSNEDPSSPRASPAHSPRENGIDKNRLLKKDASSSPASTASSASSTSLKSKEMSLHEKASTPVLKSSTPTPRSDMPTPGTSATPGLRPAAGLRTPLAVPGPYPAPFGMVPHAGMNGELTSPGAAYASLHNMSPQMSAAA

SEQ ID NO: 93027 - protein, 315 aa, Homo sapiens
VASKSSSVVPDQACISQRFLQGTIIALVVVMAFSVVSMSTLYVLSLRTEEDLVDTDGSFAVSTSCLLALLRPQPPGGSEALCPWSSQSFGTTQLRQSPLTTGLPGIQPSLLLVTTSLTSSAPGSAVRTLDMCSSHPCPVICCSSPTTNPTTGPSLGPSFNPGHVLSPSPSPSTNRSGPSQMALLPVTNIRAKSWGLSVNGIGHSKHHKSLEPLASPAVPFPGGQGKAKNSPSLGFHGRARRGALQSSVGPAEPTWAQGQSEPVPSLTSIQVLENSMSITSQYCAPGDACRPGNFTYHIPVSSGTPLHLSLTLQMK

SEQ ID NO: 93028 - protein, 243 aa, Homo sapiens
  MOD_RES (1)..(1): Any amino acid
XSLLLTATRTVSFQGERLRRGNVCLVSMLGCLPLWSPLLEMEHSPGQGPGGGVSRPLGKRRRPEPEPLRRRQKGKVEELGPPSAVRNQPEPQEQRERAHLQRALQASVSPPSPSPNQSYQGSSGYNFRPTDARCLPSPIRMFASFHPSASTAGTSGDSGPPDRSPLELHIGFPTDIPKSAPHSMTASSSSVSSPSPGLPRRSAPPSPLCRSLSPGTGGGVRGGVGYLSRGDPVRVLARRVRPD

SEQ ID NO: 93029 - protein, 112 aa, Homo sapiens
MVVGTGTSLALSSLLSLLLFAGMQMYSRQLASTEWLTIQGGLLGSGLFVFSLTEAPGWQMPTGAMTFLSSPYSFIFSMVGLYYINKISSTLYQAAAPVLTPAKVTGKSKKRN

SEQ ID NO: 93030 - protein, 48 aa, Homo sapiens
MAANLSRNGPALQEAYVRVVTEKSPTDWWAARRARVGPGAASGGSLYL

SEQ ID NO: 93031 - protein, 118 aa, Homo sapiens
MDLAGLLKSQFLCHLVFCYVFIASGLIINTIQLFTLLLWPINKQLFRKINCRLSYCISSRLQGPGQERAGLCPNYRLDVVLHRDGLLFAQVGAGSQDGCHQFAAPPGLPREVFFPDSL

SEQ ID NO: 93032 - protein, 58 aa, Homo sapiens
MAEGSAVSDPQHAARLLRALSSFREESRFCDAHLVLDGEEIPVQKNILAAASPYIRST

SEQ ID NO: 93033 - protein, 249 aa, Homo sapiens
MKQPSKAEYGHCDVLEHLIHKGGDVLALADDGASVLFEAAGGGNPDCISLLLEYGGSGNVPNRAGHLPIHRAAYEGHYLALKYLIPVTSKNAIRKSGLTPIHSAADGQNAQCLELLIENGFDVNTLLADHISQSYDDERKTALYFGVSNNDVHCTEVLLAAGADPNLDPLNCLLVAVRANNYEIVRLLLSHGANVNCYFMHVNDTRFPSVIQYALNDEVMLRLLLNNGYQVEMCFDCMHGDIFGNSFVC

SEQ ID NO: 93034 - protein, 136 aa, Homo sapiens
MGIGVSLLLQFSLTPGGYRSVGRSRRCSRGSIPRNIPKRSWKKPHPQLCSLQGSSVSVCPASQSCCAARMWHRKQQTQGEGSIRHCREQWPHFLQRKNRCWNVVAGAPWPWAWPSPDSFLGPPRSHPRPWGRSPAG

SEQ ID NO: 93035 - protein, 85 aa, Homo sapiens
MEEAILVPCVLGLLLLPILAMLMALCVHCHRLPGSYDSTSSDSLYPRGIQFKRPHTVAPWPPAYPPVTSYPPLSQPDLLPIPHDP

SEQ ID NO: 93036 - protein, 4483 aa, Homo sapiens
  MOD_RES (1)..(1): Any amino acid
XTTEDTLITGSKTAAPVTSTGSTTATLEGQSTAASSRTSNQDISASSQNHQTKSTETTSKAQTDTLTQMMTSTLFSSPSVHNVMETAPPDEMTTSFPSSVTNTLMMTSKTITMTTSTDSTLGNTEETSTAGTESSTPVTSAVSITAGQEGQSRTTSWRTSIQDTSASSQNHWTRSTQTTRESQTSTLTHRTTSTPSFSPSVHNVTGTVSQKTSPSGETATSSLCSVTNTSMMTSEKITVTTSTGSTLGNPGETSSVPVTGSLMPVTSAALVTFDPEGQSPATFSRTSTQDTTAFSKNHQTQSVETTRVSQINTLNTLTPVTTSTVLSSPSGFNPSGTVSQETFPSGETTTSSPSSVSNTFLVTSKVFRMPTSRDSTLGNTEETSLSVSGTISAITSKVSTIWWSDTLSTALSPSSLPPKISTAFHTQQSEGAETTGRPHERSSFSPGVSQEIFTLHETTTWPSSFSSKGHTTWSQTELPSTSTGAATRLVTGNPSTGTAGTIPRVPSKVSAIGEPGEPTTYSSHSTTLPKTTGAGAQTQWTQETGTTGEALLSSPSYSVTQMIKTATSPSSSPMLDRHTSQQITTAPSTNHSTIHSTSTSPQESPAVSQRGHTQAPQTTQESQTTRSVSPMTDTKTVTTPGSSFTASGHSPSEIVPQDAPTISAATTFAPAPTGDGHTTQAPTTALQAAPSSHDATLGPSGGTSLSKTGALTLANSVVSTPGGPEGQWTSASASTSPDTAAAMTHTHQAESTEASGQTQTSEPASSGSRTTSAGTATPSSSGASGTTPSGSEGISTSGETTRFSSNPSRDSHTTQSTTELLSASASHGAIPVSTGMASSIVPGTFHPTLSEASTAGRPTGQSSPTSPSASPQETAAISRMAQTQRTRTSRGSDTISLASQATDTFSTVPPTPPSITSTGLTSPQTETHTLSPSGSGKTFTTALISNATPLPVTYASSASTGHTTPLHVTDASSVSTGHATPLPVTSPSSVSTGHTTPLPVTDTSSESTGHVTPLPVTSFSSASTGDSTPLPVTDTSSASTGHVTPLPVTSLSSASTGDTTPLPVTDTSSASTGHATSLPVTDTSSVSTGHTTPLPVTDTSSASTGHATSLPVTDTSSVSTGHTTPLHVTDASSASTGQATPLPVTSLSSVSTGDTTPLPVTSPSSASTGHATPLLVTDTSSASTGHATPLPVTDASSVSTDHATSLPVTIPSAASTGHTTPLPVTDTSSASTGQATSLLVTDTSSVSTGDTTPLPVTSTSSASTGHVTPLHVTSPSSASTGHATPLPVTSLSSASTGDTMPLPVTSPSSASTGDTTPLPVTDASSVSTGHTTPLHVTDASSASTGQATPLPVTSLSSVSTGDTTPLPVTSPSSASTGHATPLLVTDTSSASTGHATPLPVTDASSVSTDHATSLPVTIPSAASTGHTTPLPVTDTSSASTGQATSLLVTDTSSVSTGDTTPLPVTSTSSASTGHVTPLHVTSPSSASTGHATPLPVTSLSSASTGDTMPLPVTSPSSASTGDTTPLPVTDASSVSTGHTTPLPVTSPSSASTGHTTPLPVTDTSSASKGDTTPLPVTSPSSASTGHTTPLPVTDTSSASTGDTTPLPVTNASSLSTGHATPLHVTSPSSASTGHATPLPVTSTSSASTGHATPLPVTGLSSATTDDTTRLPVTDVSSASTGQATPLPVTSLSSVSTGDTTPLPVTSPSSASTGHASPLLVTDASSASTGQATPLPVTDTSSVSTAHATPLPVTGLSSASTDDTTRLPVTDVSSASTGQAIPLPVTSPSSASTGDTTPLPVTDASSASTGDTTSLPVTIPSSASSGHTTSLPVTDASSVSTGHATSLLVTDASSVSTGDTTPLPVTDTNSASTGDTTPLHVTDASSVSTGHATSLPVTSLSSASTGDTTPLPVTSPSSASSGHTTPLPVTDASSVPTGHATSLPVTDASSVSTGHATPLPVTDASSVSTGHATPLPVTDTSSVSTGQATPLPVTSLSSASTGDTTPLPVTDTSSASTGQDTPLPVTSLSSVSTGDTTPLPVTNPSSASTGHATPLLVTDASSISTGHATSLLVTDASSVSTGHATALHDTDASSLSTGDTTPLPVTSPSSTSTGDTTPLPVTETSSVSTGHATSLPVTDTSSASTGHATSLPVTDTSSASTGHATPLPVTDTSSASTGQATPLPVTSPSSASTGHAIPLLVTDTSSASTGQATPLPVTSLSSASTGDTTPLPVTDASSVSTGHATSLPVTSLSSVSTGDTTPLPVTSPSSASTGHATPLHVTDASSASTGHATPLPVTSLSSASTGDTTPLPVTSPSSASTGHATPLHVTDASSVSTGDTTPLPVTSSSSASSGHTTPLPVTDASSASTGDTTPLPVTDTSSASTGHATHLPVTGLSSASTGDTTRLPVTNVSSASTGHATPLPVTSTSSASTGDTTPLPGTDTSSVSTGHTTPLLVTDASSVSTGDTTRLPVTSPSSASTGHTTPLPVTDTPSASTGDTTPLPVTNASSLSTRHATSLHVTSPSSASTGHATSLPVTDTSAASTGHATPLPVTSTSSASTGDTTPLPVTDTYSASTGQATPLPVTSLSSVSTGDTTPLPVTSPSSASTGHATPLLVTDASSASTGQATPLPVTSLSSVSTGDTTPLPVTSPSSASTGHATSLPVTDTSSASTGDTTSLPVTDTSSAYTGDTTSLPVTDTSSSSTGDTTPLLVTETSSVSTGDTTPLPVTDTSSASTGHATPLPVTNTSSVSTGHATPLHVTSPSSASTGHTTPLPVTDASSVSTGHATSLPVTDASSVFTGHATSLPVTIPSSASSGHTTPLPVTDASSVSTGHATSLPVTDASSVSTGHATPLPVTDASSVSTGHATPLPLTSLSSVSTGDTTPLPVTDTSSASTGQATPLPVTSLSSVSTGDTTPLPVTDTSSASTGHATSLPVTDTSSASTGHATPLPDTDTSSASTGHATLLPVTDTSSASIGHATSLPVTDTSSISTGHATPLHVTSPSSASTGHATPLPVTDTSSASTGHANPLHVTSPSSASTGHATPLPVTDTSSASTGHATPLPVTSLSSVSTGDTTPLPVTSPSSASTGHTTPLPVTDTSSASTGQATALPVTSTSSASTGDTTPLPVTDTSSASTGQATPLPVTSLSSVSTGDTTPLPVTSPSSASTGHATPLLVTDASSASTGQATPLPVTSLSSVSTGDTTPLPVTSPSSASTGHATSLPVTDTSSASTGDTTSLPVTDTSSAYTGDTTSLPVTDTSSSSTGDTTPLLVTETSSVSTGHATPLLVTDASSASTGHATPLHVTSPSSASTGDTTPVPVTDTSSVSTGHATPLPVTGLSSASTGDTTRLPVTDISSASTGQATPLPVTNTSSVSTGDTMPLPVTSPSSASTGHATPLPVTSTSSASTGHATPVPVTSTSSASTGHTTPLPVTDTSSASTGDTTPLPVTSPSSASTGHTTPLHVTIPSSASTGDTSTLPVTGASSASTGHATPLPVTDTSSVSTGHATPLPVTSLSSVSTGDTTPLPVTDASSASTGQATPLPVTSLSSVSTGDTTPLLVTDASSVSTGHATPLPVTDTSSASTGDTTRLPVTDTSSASTGQATPLPVTSLSSVSTGDTTPLLVTDASSVSTGHATPLPVTDTSSASTGDTTRLPVTDTSSASTGQATPLPVTIPSSSSSGHTTPLPVTSTSSVSTGHVTPLHVTSPSSASTGHVTPLPVTSTSSASTGHATPLLVTDASSVSTGHATPLPVTDASSASTGDTTPLPVTDTSSASTGQATPLPVTSLSSVSTGDTTPLPVTDASSASTGHATPLPVTIPSSVSTGDTMPLPVTSPSSASTGHATPLPVTGLSSASTGDTTPLPVTDTSSASTRHATPLPVTDTSSASTDDTTRLPVTDVSSASTGHATPLPVTSTSSASTGDTTPLPVTDTSSVSTGHATSLPVTSRSSASTGHATPLPVTDTSSVSTGHATPLPVTSTSSVSTGHATPLPVTSPSSASTGHATPVPVTSTSSASTGDTTPLPVTNASSLSTGHATPLHVTSPSSASRGDTSTLPVTDASSASTGHATPLPLTSLSSVSTGDTTPLPVTDTSSASTGQATPLPVTSLSSVSTGDTTPLPVTIPSSASSGHTTSLPVTDASSVSTGHGTPLPVTSTSSASTGDTTPLPVTDTSSASTGHATPLPVTDTSSASTGHATPLPVTSLSSVSTGHATPLAVSSATSASTVSSDSPLKMETPGMTTPSLKTDGGRRTATSPPPTTSQTIISTIPSTAMHTRSTAAPIPILPERGVSLFPYGAGAGDLEFVRRTVDFTSPLFKPATGFPLGSSLRDSLYFTDNGQIIFPESDYQIFSYPNPLPTGFTGRDPVALVAPFWDDADFSTGRGTTFYQEYETFYGEHSLLVQQAESWIRKMTNNGGYKARWALKVTWVNAHAYPAQWTLGSNTYQAILSTDGSRSYALFLYQSGGMQWDVAQRSVEMAISKTAH

SEQ ID NO: 93037 - protein, 324 aa, Homo sapiens
MDSQELKTLINYYCQERYFHHVLLVASEGIKRYGSDPVFRFYHAYGTLMEGKTQEALREFEAIKNKQDVSLCSLLALIYAHKMSPNPDREAILESDARVKEQRKGAGEKALYHAGLFLWHIGRHDKAREYIDRMIKISDGSKQGHVLKAWLDITRGKEPYTKKALKYFEEGLQDGNDTFALLGKAQCLEMRQNYSGALETVNQIIVNFPSFLPAFVKKMKLQLALQDWDQTVETAQRLLLQDSQNVEALRMQALYYVCREGDIEKASTKLENLGNTLDAMEPQNAQLFYNITLAFSRTVRVPTIVDVVNLFFKKFKRYLRELLV

SEQ ID NO: 93038 - protein, 138 aa, Homo sapiens
MATRGGAGVAMAVWSLLSARAVTAFLLLFLPRFLQAQTFSFPFQQPEKCDNNQYFDISALSCVPCGANQRQDARGTSCVCLPGFQMISNNGGPAIICKKCPENMKGVTEDGWNCISCPSDLTAEGKCHCPIGHILGWS

SEQ ID NO: 93039 - protein, 424 aa, Homo sapiens
MNSEKSMHRKSTELVNEITCENTEWPGQRSTNFQIISSYPDDESVYCTTEKYNVMEHRHNDMHYECMTPCQVTSDSDKEKTIAFLLKELDILRTSNKKLQQKLAKEDKEQRKLKFKLELQEKETEAKIAEKTAALVEEVYFAQKERDEAVMSRLQLAIEERDEAIARAKHMEMSLKVLENINPEENDMTLQELLNRINNADTGIAIQKNGAIIVDRIYKTKECKMRITAEEMSALIEERDAALSKCKRLEQELHHVKEQNQTSANNMRHLTAENNQERALKAKLLSMQQARETAVQQYKKLEEEIQTLRVYYSLHKSLSQEENLKDQFNYTLSTYEEALKNRENIVSITQQQNEELATQLQQALTERANMELQLQHAREASQVANEKVQKSQIQIYFIPNKKDEREKFLMDKRRKIVAHSKQNS

SEQ ID NO: 93040 - protein, 313 aa, Homo sapiens
MDSLNQTRVTEFVFLGLTDNRVLEMLFFMAFSAIYMLTLSGNILIIIATVFTPSLHTPMYFFLSNLSFIDICHSSVTVPKMLEGLLLERKTISFDNCITQLFFLHLFACAEIFLLIIMAYDRYVAICTPLHYPNVMNMRVCIQLVFALWLGGTVHSLGQTFLTIRLPYCGPNIIDSYFCDVPLVIKLACTDTYLTGILIVTNSGTISLSCFLAVVTSYMVILVSLRKHSAEGRRKALSTCSAHFMVVALFFGPCIFIYTRPDTSFSIDKVVSVFYTVVTPLLNPFIYTLRNEEVKSAMKQLRQRQVFFTKSYT

SEQ ID NO: 93041 - protein, 422 aa, Homo sapiens
MADTRSVHETRFEAAVKVIQSLPKNGSFQPTNEMMLKFYSFYKQATEGPCKLSRPGFWDPIGRYKWDAWSSLGDMTKEEAMIAYVEEMKKIIETMPMTEKVEELLRVIGPFYEIVEDKKSGRSSDITSDLGNVLTSTPNAKTVNGKAESSDSGAESEEEEAQEEVKGAEQSDNDINDDHVEDVTGIQHLTSDSDSEVYCDSMEQFGQEESLDSFTSNNGPFQYYLGGHSSQPMENSGFREDIQVPPGNGNIGNMQVVAVEGKGEVKHGGEDGRNNSGAPHREKRGGETDEFSNVRRGRGHRMQHLSEGTKGRQVGSGGDGERWGSDRGSRGSLNEQIALVLMRLQEDMQNVLQRLQKLETLTALQAKSSTSTLQTAPQPTSQRPSWWPFEMSPGVLTFAIIWPFIAQWLVYLYYQRRRRKLN

SEQ ID NO: 93042 - protein, 1077 aa, Homo sapiens
MEPNDSTSTAVEEPDSLEVLVKTLDSQTRTFIVGAQMNVKEFKEHIAASVSIPSEKQRLIYQGRVLQDDKKLQEYNVGGKVIHLVERAPPQTHLPSGASSGTGSASATHGGGSPPGTRGPGASVHDRNANSYVMVGTFNLPSDGSAVDVHINMEQAPIQSEPRVRLVMAQHMIRDIQTLLSRMECRGGPQPQHSQPPPQPPAVTPEPVALSSQTSEPVESEAPPREPMEAEEVEERAPAQNPELTPGPAPAGPTPAPETNAPNHPSPAEYVEVLQELQRLESRLQPFLQRYYEVLGAAATTDYNNNHEGREEDQRLINLVGESLRLLGNTFVALSDLRCNLACTPPRHLHVVRPMSHYTTPMVLQQAAIPIQINVGTTVTMTGNGTRPPPTPNAEAPPPGPGQASSVAPSSTNVESSAEGAPPPGPAPPPATSHPRVIRISHQSVEPVVMMHMNIQDSGTQPGGVPSAPTGPLGPPGHGQTLGQQVPGFPTAPTRVVIARPTPPQARPSHPGGPPVSGTLQGAGLGTNASLAQMVSGLVGQLLMQPVLVAQGTPGMAPPPAPATASASAGTTNTATTAGPAPGGPAQPPPTPQPSMADLQFSQLLGNLLGPAGPGAGGPGVASPTITVAMPGVPAFLQGMTDFLQATQTAPPPPPPPPPPPPAPEQQTMPPPGSPSGGAGSPGGLGLESLSPEFFTSVVQGVLSSLLGSLGARAGSSESIAAFIQRLSGSSNIFEPGADGALGFFGALLSLLCQNFSMVDVVMLLHGHFQPLQRLQPQLRSFFHQHYLGGQEPTPSNIRMATHTLITGLEEYVRESFSLVQVQPGVDIIRTNLEFLQEQFNSIAAHVLHCTDSGFGARLLELCNQGLFECLALNLHCLGGQQMELAAVINGRIRRMSRGVNPSLVSWLTTMMGLRLQVVLEHMPVGPDAILRYVRRVGDPPQPLPEEPMEVQGAERASPEPQRENASPAPGTTAEEAMSRGPPPAPEGGSRDEQDGASAETEPWAAAVPPEWVPIIQQDIQSQRKVKPQPPLSDAYLSGMPAKRRKLRSDIQKRLQEDPNYSPQRFPNAQRAFADDP

SEQ ID NO: 93043 - protein, 455 aa, Homo sapiens
MSLTVVSMACVGFFLLQGAWPLMGGQDKPFLSARPSTVVPRGGHVALQCHYRRGFNNFMLYKEDRSHVPIFHGRIFQESFIMGPVTPAHAGTYRCRGSRPHSLTGWSAPSNPVVIMVTGNHRKPSLLAHPGPLLKSGETVILQCWSDVMFEHFFLHREGISEDPSRLVGQIHDGVSKANFSIGPLMPVLAGTYRCYGSVPHSPYQLSAPSDPLDIVITGLYEKPSLSAQPGPTVQAGENVTLSCSSWSSYDIYHLSREGEAHERRLRAVPKVNRTFQADFPLGPATHGGTYRCFGSFRALPCVWSNSSDPLLVSVTGNPSSSWPSPTEPSSKSGICRHLHVLIGTSVVIFLFILLLFFLLYRWCSNKKNAAVMDQEPAGDRTVNRQDSDEQDPQEVMYAQLDHCVFIQRKISRPSQRPKTPLTDTSVYTELPNAEPRSKVVSCPRAPQSGLEGVF

SEQ ID NO: 93044 - protein, 218 aa, Homo sapiens
MASAGGEDCESPAPEADRPHQRPFLIGVSGGTASGKDERFQAGIPLLCLQSTVCEKIMELLGQNEVEQRQRKVVILSQDRFYKVLTAEQKAKALKGQYNFDHPDAFDNDLMHRTLKNIVEGKTVEVPTYDFVTHSRLPETTVVYPADVVLFEGILVFYSQEIRDMFHLRLFVDTDSDVRLSRRVLRDVRRGRDLEQILTQYTTFVKPAFEEFCLPQSI

SEQ ID NO: 93045 - protein, 156 aa, Homo sapiens
MSAQESCLSLIKYFLFVFNLFFFVLGSLIFCFGIWILIDKTSFVSFVGLAFVPLQIWSKVLAISGIFTMGIALLGCVGALKELRCLLGLYFGMLLLLFATQITLGILISTQRAQKDTPTWTKGDRHKQLQRETHGKKREQEKEIDALKEETETYEP

SEQ ID NO: 93046 - protein, 91 aa, Homo sapiens
MQSLLKTAGPYGIFAGRDASRGLATFCLDKDALRDEYDDLSDLNAVQMESVREWEMQFKEKYDYVGRLLKPGEEPSEYTDEEDTKDHNKQD

SEQ ID NO: 93047 - protein, 1153 aa, Homo sapiens
MSLKPQQQQQQQQQQQQQQQQQQQQQQQPPPAAANVRKPGGSGLLASPAAAPSPSSSSVSSSSATAPSSVVAATSGGGRPGLGRGRNSNKGLPQSTISFDGIYANMRMVHILTSVVGSKCEVQVKNGGIYEGVFKTYSPKCDLVLDAAHEKSTESSSGPKREEIMESILFKCSDFVVVQFKDMDSSYAKRDAFTDSAISAKVNGEHKEKDLEPWDAGELTANEELEALENDVSNGWDPNDMFRYNEENYGVVSTYDSSLSSYTVPLERDNSEEFLKREARANQLAEEIESSAQYKARVALENDDRSEEEKYTAVQRNSSEREGHSINTRENKYIPPGQRNREVISWGSGRQNSPRMGQPGSGSMPSRSTSHTSDFNPNSGSDQRVVNGGVPWPSPCPSPSSRPPSRYQSGPNSLPPRAATPTRPPSRPPSRPSRPPSHPSAHGSPAPVSTMPKRMSSEGPPRMSPKAQRHPRNHRVSAGRGSISSGLEFVSHNPPSEAATPPVARTSPSGGTWSSVVSGVPRLSPKTHRPRSPRQNSIGNTPSGPVLASPQAGIIPTEAVAMPIPAASPTPASPASNRAVTPSSEAKDSRLQDQRQNSPAGNKENIKPNETSPSFSKAENKGISPVVSEHRKQIDDLKKFKNDFRLQPSSTSESMDQLLNKNREGEKSRDLIKDKIEPSAKDSFIENSSSNCTSGSSKPNSPSISPSILSNTEHKRGPEVTSQGVQTSSPACKQEKDDKEEKKDAAEQVRKSTLNPNAKEFNPRSFSQPKPSTTPTSPRPQAQPSPSMVGHQQPTPVYTQPVCFAPNMMYPVPVSPGVQPLYPIPMTPMPVNQAKTYRAVPNMPQQRQDQHHQSAMMHPASAAGPPIAATPPAYSTQYVAYSPQQFPNQPLVQHVPHYQSQHPHVYSPVIQGNARMMAPPTHAQPGLVSSSATQYGAHEQTHAMYACPKLPYNKETSPSFYFAISTGSLAQQYAHPNATLHPHTPHPQPSATPTGQQQSQHGGSHPAPSPVQHHQHQAAQALHLASPQQQSAIYHAGLAPTPPSMTPASNTQSPQNSFPAAQQTVFTIHPSHVQPAYTNPPHMAHVPQAHVQSGMVPSHPTAHAPMMLMTTQPPGGPQAALAQSALQPIPVSTTAHFPYMTHPSVQAHHQQQL

SEQ ID NO: 93048 - protein, 502 aa, Homo sapiens
MPEIRVTPLGACPVLSWNLVLPPGRGSRAPSSTDTRTGFHVLPHGVDDELEIKAYYAGHVLGAAMFQIKVGSESVVYTGDYNMTPDRHLGAAWIDKCRPNLLITESTYATTIRDSKRCRERDFLKKVHETVERGGKVLIPVFALGRAQELCILLETFWERMNLKVPIYFSTGLTEKANHYYKLFIPWTNQKIRKTFVQRNMFEFKHIKAFDRAFADNPGPMVVFATPGMLHAGQSLQIFRKWAGNEKNMVIMPGYCVQGTVGHKILSGQRKLEMEGRQVLEVKMQVEYMSFSAHADAKGIMQLVGQAEPESVLLVHGEAKKMEFLKQKIEQELRVNCYMPANGETVTLPTSPSIPVGISLGLLKREMAQGLLPEAKKPRLLHGTLIMKDSNFRLVSSEQALKELGLAEHQLRFTCRVHLHDTRKEQETALRVYSHLKSVLKDHCVQHLPDGSVTVESVLLQAAAPSEDPGTKVLLVSWTYQDEELGSFLTSLLKKGLPQAPS

SEQ ID NO: 93049 - protein, 466 aa, Homo sapiens
MSYRPVVSPVMSLTRRCMRSRTSMRTDAVFLILYKELYYRHIYAKVSGGPSLEQRFESYYNYCNLFNYILNADGPAPLELPNQWLWDIIDEFIYQFQSFSQYRCKTAKKSEEEIDFLRSNPKIWNVHSVLNVLHSLVDKSNINRQLEVYTSGGDPESVAGEYGRHSLYKMLGYFSLVGLLRLHSLLGDYYQAIKVLENIELNKKSMYSRVPECQVTTYYYVGFAYLMMRRYQDAIRVFANILLYIQRTKSMFQRTTYKYEMINKQNEQMHALLAIALTMYPMRIDESIHLQLREKYGDKMLRMQKGDPQVYEELFSYSCPKFLSPVVPNYDNVHPNYHKEPFLQQLKVFSDEVQQQAQLSTIRSFLKLYTTMPVAKLAGFLDLTEQEFRIQLLVFKHKMKNLVWTSGISALDGEFQSASEVDFYIDKDMIHIADTKVARRYGDFFIRQIHKFEELNRTLKKMGQRP

SEQ ID NO: 93050 - protein, 824 aa, Homo sapiens
MVPSSSRTPGFKQSSHHLRLPKCWDYRDDFGKLLLAEALLEQCLKENHAKIKDSMPLLEKNEPKMSEAKNYLSSILNHGRLSPQYMCEAMLILGKLHYVEGSYRDAISMYARAGIDDMSMENKPLYQMRLLSEAFVIKGLSLERLPNSIASRFRLTEREEEVITCFERASWIAQVFLQELEKTTNNSTSRHLKGCHPLDYELTYFLEAALQSAYVKNLKKGNIVKGMRELREVLRTVETKATQNFKVMAAKHLAGVLLHSLSEECYWSPLSHPLPEFMGKEESSFATQALRKPHLYEGDNLYCPKDNIEEALLLLLISESMATRDVVLSRVPEQEEDRTVSLQNAAAIYDLLSITLGRRGQYVMLSECLERAMKFAFGEFHLWYQVALSMVACGKSAYAVSLLRECVKLRPSDPTVPLMAAKVCIGSLRWLEEAEHFAMMVISLGEEAGEFLPKGYLALGLTYSLQATDATLKSKQDELHRKALQTLERAQQLAPSDPQVILYVSLQLALVRQISSAMEQLQEALKVRKDDAHALHLLALLFSAQKHHQHALDVVNMAITEHPENFNLMFTKVKLEQVLKGPEEALVTCRQVLRLWQTLYSFSQLGGLEKDGSFGEGLTMKKQSGMHLTLPDAHDADSGSRRASSIAASRLEEAMSELTMPSSVLKQGPMQLWTTLEQIWLQAAELFMEQQHLKEAGFCIQEAAGLFPTSHSVLYMRGRLAEVKGNLEEAKQLYKEALTVNPDGVRIMHSLGLMLSRLGHKSLAQKVLRDAVERQSTCHEAWQGLGEVLQAQGQNEAAVDCFLTALELEASSPVLPFSIIPREL

SEQ ID NO: 93051 - protein, 104 aa, Homo sapiens
MGLSHSKTHLRVIKVAPLQNKEVETPSAGRVDFAFNQNLEEKTSYSLARLQDQNKALEGQLPPLQENWYGRYSTASRDMYFDIPLEHRETSIIKRHPPQRLQVR

SEQ ID NO: 93052 - protein, 244 aa, Homo sapiens
MIFTQSSEKTAVSCLSQNDWKLDVATDNFFQNPELYIRESVKGSLDRKKLEQLYNRYKDPQDENKIGIDGIQQFCDDLALDPASISVLIIAWKFRAATQCEFSKQEFMDGMTELGCDSIEKLKAQIPKMEQELKEPGRFKDFYQFTFNFAKNPGQKGLDLEMAIAYWNLVLNGRFKFLDLWNKFLLEHHKRSIPKDTWNLLLDFSTMIADDMSNYDEEGAWPVLIDDFVEFARPQIAGTKSTTV

SEQ ID NO: 93053 - protein, 1721 aa, Homo sapiens
MSVSRTMEDSCELDLVYVTERIIAVSFPSTANEENFRSNLREVAQMLKSKHGGNYLLFNLSERRPDITKLHAKVLEFGWPDLHTPALEKICSICKAMDTWLNADPHNVVVLHNKGNRGRIGVVIAAYMHYSNISASADQALDRFAMKRFYEDKIVPIGQPSQRRYVHYFSGLLSGSIKMNNKPLFLHHVIMHGIPNFESKGGCRPFLRIYQAMQPVYTSGIYNIPGDSQTSVCITIEPGLLLKGDILLKCYHKKFRSPARDVIFRVQFHTCAIHDLGVVFGKEDLDDAFKDDRFPEYGKVEFVFSYGPEKIQGMEHLENGPSVSVDYNTSDPLIRWDSYDNFSGHRDDGMEEVVGHTQGPLDGSLYAKVKKKDSLHGSTGAVNATRPTLSATPNHVEHTLSVSSDSGNSTASTKTDKTDEPVPGASSATAALSPQEKRELDRLLSGFGLEREKQGAMYHTQHLRSRPAGGSAVPSSGRHVVPAQVHVNGGALASERETDILDDELPNQDGHSAGSMGTLSSLDGVTNTSEGGYPEALSPLTNGLDKSYPMEPMVNGGGYPYESASRAGPAHAGHTAPMRPSYSAQEGLAGYQREGPHPAWPQPVTTSHYAHDPSGMFRSQSFSEAEPQLPPAPVRGGSSREAVQRGLNSWQQQQQQQQQPRPPPRQQERAHLESLVASRPSPQPLAETPIPSLPEFPRAASQQEIEQSIETLNMLMLDLEPASAAAPLHKSQSVPGAWPGASPLSSQPLSGSSRQSHPLTQSRSGYIPSGHSLGTPEPAPRASLESVPPGRSYSPYDYQPCLAGPNQDFHSKSPASSSLPAFLPTTHSPPGPQQPPASLPGLTAQPLLSPKEATSDPSRTPEEEPLNLEGLVAHRVAGVQAREKQPAEPPAPLRRRAASDGQYENQSPEATSPRSPGVRSPVQCVSPELALTIALNPGGRPKEPHLHSYKEAFEEMEGTSPSSPPPSGVRSPPGLAKTPLSALGLKPHNPADILLHPTGVTRRRIQPEPRSYVESVARTAVAGPRAQDSEPKSFSAPATQAYGHEIPLRNGTLGGSFVSPSPLSTSSPILSADSTSVGSFPSGESSDQGPRTPTQPLLESGFRSGSLGQPSPSAQRNYQSSSPLPTVGSSYSSPDYSLQHFSSSPESQARAQFSVAGVHTVPGSPQARHRTVGTNTPPSPGFGWRAINPSMAAPSSPSLSHHQMMGPPGTGFHGSTVSSPQSSAATTPGSPSLCRHPAGVYQVSGLHNKVATTPGSPSLGRHPGAHQGNLASGLHSNAIASPGSPSLGRHLGGSGSVVPGSPCLDRHVAYGGYSTPEDRRPTLSRQSSASGYQAPSTPSFPVSPAYYPGLSSPATSPSPDSAAFRQGSPTPALPEKRRMSVGDRAGSLPNYATINGKVSSPVASGMSSPSGGSTVSFSHTLPDFSKYSMPDNSPETRAKVKFVQDTSKYWYKPEISREQAIALLKDQEPGAFIIRDSHSFRGAYGLAMKVSSPPPTIMQQNKKDMTHELVRHFLIETGPRGVKLKGCPNEPNFGSLSALVYQHSIIPLALPCKLVIPNRDPTDESKDSSGPANSTADLLKQGAACNVLFVNSVDMESLTGPQAISKATSETLAADPTPAATIVHFKVSAQGITLTDNQRKLFFRRHYPLNTVTFCDLDPQERKWMKTEGGAPAKLFGFVARKQGSTTDNACHLFAELDPNQPASAIVNFVSKVMLNAGQKR

SEQ ID NO: 93054 - protein, 46 aa, Homo sapiens
MAALKSWLSRSVTSFFRFLLGSSLSLQPLQVNPRACYRLAVVPYEI

SEQ ID NO: 93055 - protein, 746 aa, Homo sapiens
MNAAVRAVVRMGIYVGAKVYFIYEGYQGMVDGGSNIAEADWESVSSILQVGGTIIGSARCQAFRTREGRLKAACNLLQRGITNLCVIGGDGSLTGANLFRKEWSGLLEELARNGQIDKEAVQKYAYLNVVGMVGSIDNDFCGTDMTIGTDSALHRIIEVVDAIMTTAQSHQRTFVLEVMGRHCGYLALVSALACGADWVFLPESPPEEGWEEQMCVKLSENRARKKRLNIIIVAEGAIDTQNKPITSEKIKELVVTQLGYDTRVTILGHVQRGGTPSAFDRILASRMGVEAVIALLEATPDTPACVVSLNGNHAVRLPLMECVQMTQDVQKAMDERRFQDAVRLRGRSFAGNLNTYKRLAIKLPDDQIPKTNCNVAVINVGAPAAGMNAAVRSAVRVGIADGHRMLAIYDGFDGFAKGQIKEIGWTDVGGWTGQGGSILGTKRVLPGKYLEEIATQMRTHSINALLIIGGFEAYLGLLELSAAREKHEEFCVPMVMVPATVSNNVPGSDFSIGADTALNTITDTCDRIKQSASGTKRRVFIIETMGGYCGYLANMGGLAAGADAAYIFEEPFDIRDLQSNVEHLTEKMKTTIQRGLVLRNESCSENYTTDFIYQLYSEEGKGVFDCRKNVLGHMQQGGAPSPFDRNFGTKISARAMEWITAKLKEARGRGKKFTTDDSICVLGISKRNVIFQPVAELKKQTDFEHRIPKEQWWLKLRPLMKILAKYKASYDVSDSGQLEHVQPWSV

SEQ ID NO: 93056 - protein, 131 aa, Homo sapiens
FDGLYYSYQGNCTYVLVEEISPSVDNFGVYIDNYHCDPNDKVSCPRTLIVRHETQEVLIKTVHMMPMQVQVQVNRQAVALPYKKYGLEVYQSGINYVVDIPELGVLVSYNGLSFSVRLPYHRFGNNTKGQC

SEQ ID NO: 93057 - protein, 70 aa, Homo sapiens
MAGTVLGVGAGVFILALLWVAVLLLCVLLSRASGAARFSVIFLFFGAVIITSVLLLFPRAGEFPAPEVEV

SEQ ID NO: 93058 - protein, 20 aa, Homo sapiens
VHVSAQEPHYLPPEMPQGNI

SEQ ID NO: 93059 - protein, 268 aa, Homo sapiens
MENEIFTPLLEQFMTSPLVTWVKTFGPLAAGNGTNLDEYVALVDGVFLNQVMLQINPKLESQRVNKKVNNDASLRMHNLSILVRQIKFYYQETLQQLIMMSLPNVLIIGKNPFSEQGTEEVKKLLLLLLGCAVQCQKKEEFIERIQGLDFDTKAAVAAHIQEVTHNQENVFDLQWMEVTDMSQEDIEPLLKNMALHLKRLIDERDEHSETIIELSEERDGLHFLPHASSSAQSPCGSPGMKRTESRQHLSVELADAKAKIRRLRQELT

SEQ ID NO: 93060 - protein, 80 aa, Homo sapiens
  MOD_RES (1)..(1): Any amino acid
XTGYMLRCSLSHAITLVCTAYGVSYLEKRLPCGCQERLTSQEYCKRRNFIRMEMGVRMWGFITSPKESTDSACPSLVCTK

SEQ ID NO: 93061 - protein, 422 aa, Homo sapiens
MSLHFLYYCSEPTLDVKIAFCQGFDKQVDVSYIAKHYNMSKSKVDNQFYSVEVGDSTFTVLKRYQNLKPIGSGAQGIVCAAYDAVLDRNVAIKKLSRPFQNQTHAKRAYRELVLMKCVNHKNIISLLNVFTPQKTLEEFQDVYLVMELMDANLCQVIQMELDHERMSYLLYQMLCGIKHLHSAGIIHRDLKPSNIVVKSDCTLKILDFGLARTAGTSFMMTPYVVTRYYRAPEVILGMGYKENVDMWSVGCIMGEMIKGAVLFPGTDHIDQWNKVIEQLGTPCPEFMKKLQPTVRNYVENRPKYAGLTFPKLFPDSLFPADSEHNKLKASQARDLLSKMLVIDPAKRISVDDALQHPYINVWYDPAEVEAPPPQIYDKQLDEREHTIEEWKELIYKEVMNSEEKTKNGVVKGQPSPSAQVQQ

SEQ ID NO: 93062 - protein, 140 aa, Homo sapiens
MTSFSTSAQCSTSDSACRISPGQINQVRPKLPLLKILHAAGAQGEMFTVKEVMHYLGQYIMVKQLYDQQEQHMVYCGGDLLGELLGRQSFSVKDPSPLYDMLRKNLVTLATATTAKCRGKFHFQKKNYRRRYPHTAYLRA

SEQ ID NO: 93063 - protein, 57 aa, Homo sapiens
MAGTLLSPPSGVPLERLIRVATERGYTAQGEMFSAPATTRTSTMSRVRGRATRHTGR

SEQ ID NO: 93064 - protein, 503 aa, Homo sapiens
MGFKAHFRKAQALATLGKVEEALREFLYCVSLDGKNKRARCEAQRLLLSFFSPSVPGDSQEHSPDILKLLAPHPRLKENVESMTTEVTSHNLPRLLQDNLELPHCSSQEEAAARGDGSSLMDPAKVKGDGQQHHMKDQEEEEEKWDATSPKAASSKTGKCQEKKRKHCQIESQEETGMPNKASKQDPPTDQGDKPALSLPLASFDASDLECALCMRLFYEPVTTPCGHTFCLKCLERCLDHNAKCPLCKDGLSQCLASRKYSKNVIMEELIAKFLPEELKERRKLYEEEMEELSNLNKNVPIFVCTMAYPTVPCPLHIFEPCYRLMIRRCIETGTRQFGMCLGDPVKGFAEYGCILEIRNVQFFADGRSVVDSIGKRRFRVLHQSQRDGYNTADIEYIEDQKVQGEDCAELMGLHNCVYQQASLWFHSLKLSLKNRILNHFGPMPEKDADPQMNPNGPAWCWWMLAVLPLESRAQLPFLAMRSLKDRLNGIRRVLAFISRNQN

SEQ ID NO: 93065 - protein, 347 aa, Homo sapiens
MAAAAECDVVMAATEPELLDDQEAKREAETFKEQGNAYYAKKDYNEAYNYYTKAIDMCPKNASYYGNRAATLMMLGRFREALGDAQQSVRLDDSFVRGHLREGKCHLSLGNAMAACRSFQRALELDHKNAQAQQEFKNANAVMEYEKIAETDFEKRDFRKVVFCMDRALEFAPACHRFKILKAECLAMLGRYPEAQSVASDILRMDSTNADALYVRGLCLYYEDCIEKAVQFFVQALRMAPDHEKACIACRNAKALKAKKEDGNKAFKEGNYKLAYELYTEALGIDPNNIKTNAKLYCNRGTVNSKLRKLDDAIEDCTNAVKLDDTYIKAYLRRAQWWDCSSPRLSL

SEQ ID NO: 93066 - protein, 1103 aa, Homo sapiens
MAPACQILRWALALGLGLMFEVTHAFRSQDEFLSSLESYEIAFPTRVDHNGALLAFSPPPPRRQRRGTGATAESRLFYKVASPSTHFLLNLTRSSRLLAGHVSVEYWTREGLAWQRAARPHCLYAGHLQGQASSSHVAISTCGGLHGLIVADEEEYLIEPLHGGPKGSRSPEESGPHVVYKRSSLRHPHLDTACGVRDEKPWKGRPWWLRTLKPPPARPLGNETERGQPGLKRSVSRERYVETLVVADKMMVAYHGRRDVEQYVLAIMNIVAKLFQDSSLGSTVNILVTRLILLTEDQPTLEITHHAGKSLDSFCKWQKSIVNHSGHGNAIPENGVANHDTAVLITRYDICIYKNKPCGTLGLAPVGGMCERERSCSVNEDIGLATAFTIAHEIGHTFGMNHDGVGNSCGARGQDPAKLMAAHITMKTNPFVWSSCSRDYITSFLDSGLGLCLNNRPPRQDFVYPTVAPGQAYDADEQCRFQHGVKSRQCKYGEVCSELWCLSKSNRCITNSIPAAEGTLCQTHTIDKGWCYKRVCVPFGSRPEGVDGAWGPWTPWGDCSRTCGGGVSSSSRHCDSPRPTIGGKYCLGERRRHRSCNTDDCPPGSQDFREVQCSEFDSIPFRGKFYKWKTYRGGGVKACSLTCLAEGFNFYTERAAAVVDGTPCRPDTVDICVSGECKHVGCDRVLGSDLREDKCRVCGGDGSACETIEGVFSPASPGAGYEDVVWIPKGSVHIFIQDLNLSLSHLALKGDQESLLLEGLPGTPQPHRLPLAGTTFQLRQGPDQVQSLEALGPINASLIVMVLARTELPALRYRFNAPIARDSLPPYSWHYAPWTKCSAQCAGGSQVQAVECRNQLDSSAVAPHYCSAHSKLPKRQRACNTEPCPPDWVVGNWSLCSRSCDAGVRSRSVVCQRRVSAAEEKALDDSACPQPRPPVLEACHGPTCPPEWAALDWSECTPSCGPGLRHRVVLCKSADHRATLPPAHCSPAAKPPATMRCNLRRCPPARWVAGEWGECSAQCGVGQRQRSVRCTSHTGQASHECTEALRPPTTQQCEAKCDSPTPGDGPEECKDVNKVAYCPLVLKFQFCSRAYFRQMCCKTCHGH

SEQ ID NO: 93067 - protein, 416 aa, Homo sapiens
MATPLVAGPAALRFAAAASWQVVRGRCVEHFPRVLEFLRSLRAVAPGLVRYRHHERLCMGLKAKTKQDLRKILEAQETFYQQVKQLSEAPVDLASKLQELEQEYGEPFLAAMEKLLFEYLCQLEKALPTPQAQQLQDVLSWMQPGVSITSSLAWRQYGVDMGWLLPECSVTDSVNLAEPMEQNPPQQQRLALHNPLPKAKPGTHLPQGPSSRTHPEPLAGRHFNLAPLGRRRVQSQWASTRGGHKERPTVMLFPFRNLGSPTQVISKPESKEEHAIYTADLAMGTRAASTGKSKSPCQTLGGRALKENPVDLPATEQKENCLDCYMDPLRLSLLPPRARKPVCPPSLCSSVITIGDLVLDSDEEENGQGEGKESLENYQKTKFDTLIPTLCEYLPPSGHGAIPVSSCDCRDSSRPL

SEQ ID NO: 93068 - protein, 502 aa, Homo sapiens
MPKTEETVLQNDPSVAENGAPEPKTPGQSQKSKSFCLDDQSPDLIETVNEVSKLSISHEIVVNQDFYVEETILPPNSVEGRFAEAMYNAFWNHLKEQLLSTPPDFTCALELLKDVKETLLSLLLPWQNRLRNEIEEALDTDLLKQEAEHGALDVPHLSNYILNLMALLCAPVRDEAIQKLETIRDPVQLLRGILRVLGLMKMDMVNYTIQSFRPYLQEHSIQYEQAKFQELLDKQPSLLDYTTKWLTKAATDITTLCPSSPDSPSSSCSMACSLPSGAGNNSEPPSPTMVLYQGYLNLLLWDLENVEFPETLLMDRIRLQELAFQLHQLTVLASVLLVARSFSGEVLFRSPEFVDRLKCTTKALTEEFISRPEETMLSVSEQVSQEVHQGLKDMGLTTLSSENTASLLGQLQNITKKENCIRSIVDQWIRFFLKCCLLHGMQESLLHFPGGLILIEKELAELGWKFLNLMHHNQQVFGPYYAEILKHIIHPAQAQETDVEPN

SEQ ID NO: 93069 - protein, 142 aa, Homo sapiens
MDPKQTTLLCLVLCLGQRIQAQEGLYGKPFLSADRGLVLMPGENISLTCSSAHIPFDRFSLAKEGELSLPQHQSGEHPANFSLGPVDLNVSGIYRCYGWYNRSPYLWSFPSNALELVVTGRYRPVQPCVWVGCPGPCHRAGI

SEQ ID NO: 93070 - protein, 169 aa, Homo sapiens
MEAADASRSNGSSPEARDARSPSGPSGSLENGTKADGKDAKTTNGHGGEAAEGKSLGSALKPGEEATRYLCRKGRAAQVHFLGVPEAHGVHHGARGDPAEQLPPGRHGPFFTVQVRLRGGAVRLLHRQQAEGGQVLPGVPGLLLRAASQAPPGGRRLPRPPAARAHPGL

SEQ ID NO: 93071 - protein, 72 aa, Homo sapiens
MYGKIIFVLLLSEITLIIFGVMAGVIGTILLISYGIRRLIKKSPSDVKPLPSPDTDVPLSSVEIENPETSDQ

SEQ ID NO: 93072 - protein, 196 aa, Homo sapiens
MGNGKSIAGDQKAVPTQETHVWYRTFMMEYPSGLQTLHEFKTLLGLQGLNQKANKHIDQVYNTFDTNKDGFVDFLEFIAAVNLIMQEKMEQKLKWYFKLYDADGNGSIDKNELLDMFMAVQALNGQQTLSPEEFINLVFHKIDINNDGNGATLYWITFPTKGIDFRRIYQWHGKRSGSPGDCLQELRLLQCAESNL

SEQ ID NO: 93073 - protein, 108 aa, Homo sapiens
MAKPTSKDSGLKEKFKILLGLGTPRPNPRSAEGKQTEFIITAEILRELSMECGLNNRIRMIGQICEVAKTKKFEEDDLSAVRPDRVLCGHRGLPAGAGRRGLLQLPAG

SEQ ID NO: 93074 - protein, 402 aa, Homo sapiens
MLRYLQPLGCVHGGKGLTDMRLLLLREIVINESRNCSFMIISTMEPQVSNGPTSNTSNGPSSNNRNCPSPMQTGATTDDSKTNLIVNYLPQNMTQEEFRSLFGSIGEIESCKLVRDKITGQSLGYGFVNYIDPKDAEKAINTLNGLRLQTKTIKVSYARPSSASIRDANLYVSGLPKTMTQKELEQLFSQYGRIITSRILVDQVTGVSRGVGFIRFDKRIEAEEAIKGLNGQKPSGATEPITVKFANNPSQKSSQALLSQLYQSPNRRYPGPLHHQAQRFRLDNLLNMAYGVKRFSPITIDGMTSLVGMNIPGHTGTGWCIFVYNLSPDSDESVLWQLFGPFGAVNNVKVIRDFNTNKCKGFGFVTMTNYDEAAMAIASLNGYRLGDRVLQVSFKTNKAHKS

SEQ ID NO: 93075 - protein, 71 aa, Homo sapiens
MVRPVRHKKPVNYSQFDHSDSDDDFVSATVPLNKKSRTAPKELKQDKPKPNLNNLRKEEIPVQEKTPKKRH

SEQ ID NO: 93076 - protein, 70 aa, Homo sapiens
MKSPALQPLSMAGLQLMTPASSPMGPFFGLPWQQEAIHDNIYTPRKYQVELLEAALDHNTIVCLNTGSGK

SEQ ID NO: 93077 - protein, 177 aa, Homo sapiens
MDLTTTMSSKRTKTKTKKRPQRATSNVFAMFDQSQIQEFKEAFNMIDQNRDGFIDKEDLHDMLASLGKNPTDEYLDAMMNEAPGPINFTMFLTMFGEKLNGTDPEDVIRNAFACFDEEATGTIQEDYLRELLTTMGDRFTDEEVDELYREAPIDKKGNFNYIEFTRILKHGAKDKDD

SEQ ID NO: 93078 - protein, 481 aa, Homo sapiens
MASNKFKRILNRELTHLSETSRSGNQVSEYISRTFLDQQTEVELPKVTAEEAPQPMSRISGLHGLCHSASLSSATVPRFGVQTDQEEQLAKELEDTNKWGLDVFKVAELSGNRPLTAIIFSIFQERDLLKTFQIPADTLATYLLMLEGHYHANVAYHNSLHAADVAQSTHVLLATPALEAVFTDLEILAALFASAIHDVDHPGVSNQFLINTNSELALMYNDASVLENHHLAVGFKLLQAENCDIFQNLSAKQRLSLRRMVIDMVLATDMSKHMNLLADLKTMVETKKVTSLGVLLLDNYSDRIQVLQNLVHCADLSNPTKPLPLYRQWTDRIMAEFFQQGDRERESGLDISPMCDKHTASVEKSQVGFIDYIAHPLWETWADLVHPDAQDLLDTLEDNREWYQSKIPRSPSDLTNPERDGPDRFQFELTLEEAEEEDEEEEEEGEETALAKEALELPDTELLSPEAGPDPGDLPLDNQRT

SEQ ID NO: 93079 - protein, 83 aa, Homo sapiens
MLLGLAAMELKVWVDGIQRVVCGVSEQTTCQEVVIALAQAIGQTGRFVLVQRLREKERQLLPQECPVGAQATCGQFASDVQFV

SEQ ID NO: 93080 - protein, 73 aa, Homo sapiens
MEVLIGDPITTCLSPSVYDIICNLGFQLRENCDINSIVTQNGEVCWKTITDCVSYTESGSGLLGKREAAGPCV

SEQ ID NO: 93081 - protein, 281 aa, Homo sapiens
MATELQCPDSMPCHNQQVNSASTPSPEQLRPGDLILDHAGGNRASRAKVILLTGYAHSSLPAELDSGACGGSSLNSEGNSGSGDSSSYDAPAGNSFLEDCELSRQIGAQLKLLPMNDQIRELQTIIRDKTASRGDFMFSADRLIRLVVEEGLNQLPYKECMVTTPTGYKYEGVKFEKGNCGVSIMRSGEAMEQGLRDCCRSIRIGKILIQSDEETQRAKVYYAKFPPDIYRRKVLLMYPILSTGNTVIEAVKVLIEHGVQPSVIILLSLFSTPHGEFSMRQ

SEQ ID NO: 93082 - protein, 118 aa, Homo sapiens
MREIVHIQAGQCGNQIGAKFWEVISDEHGIDPSGNYVGDSDLQLERISVYYNEASSHKYVPRAILVDLEPGTMDSVRSGAFGHLFRPDNFIFAGHWRPRERVLWGEQKPLMHFKWNEV

SEQ ID NO: 93083 - protein, 266 aa, Homo sapiens
MADFGISAGQFVAVVWDKSSPVEALKGLVDKLQALTGNEGRVSVENIKQLLQSAHKESSFDIILSGLVPGSTTLHSAEILAEIARILRPGGCLFLKEPVETAVDNNSKVKTASKLCSALTLSGLVEVKELQREPLTPEEVQSVREHLGHESDNLLFVQITGKKPNFEVGSSRQLKLSITKKSSPSVKPAVDPAAAKLWTLSANDMEDDSMHLWPCRRTGKREVKGTDELPTQVSLWKLLPGRCLPLCQLPLPWDASLQTWGKGASE

SEQ ID NO: 93084 - protein, 122 aa, Homo sapiens
MLKVSAVLCVCAAAWCSQSLAAAAAVAAAGGRSDGGNFLDDKQWLTTISQYDKEVGQWNKFRDEVEDDYFRTWSPGKPFDQALDPAKDPCLKMKCSRHKVCIAQDSQTAVCISHRRLTHSAN

SEQ ID NO: 93085 - protein, 125 aa, Homo sapiens
MPNMCSTSGCDLEEIPLDDDDLNTIEFKILAYYTRHHVFKSTPALFSPKLLRTRSLSQRGLGNCSANESWTEVSWPCRNSQSSEKAINLGKKKSSWKAFFGVVEKEDSQSTPAKVSAQGQRTLEY

SEQ ID NO: 93086 - protein, 154 aa, Homo sapiens
MKQYQGSGGVAMDVERSRFPYCVVWTPIPVLTWFFPIIGHMGICTSTGVIRDFAGPYFVSEDNMAFGKPAKYWKLDPAQVYASGPNAWDTAVHDASEEYKHRMHNLCCDNCHSHVALALNLMRYNNSTNWNMVTLCFFCLLYGKYVRSLPRQRD

SEQ ID NO: 93087 - protein, 611 aa, Homo sapiens
MQETIRNLDCVGMKWKDQNIEDQYRYPRKNLRCRMLERFVESKDGTQCGETSSQIQDSIVTKNTLPGVGPYESRMSGEVIMGHSSLNCYIRVGAGHKPYEYHECGEKPDTHKQRGKAFSYHNSLQTHERLHTGKKPYNCKECGKSFSSLGNLQRHMAVQRGDGPYKCKLCGKAFFWPSLLHMHERTHTGEKPYECKQCSKAFSFYSSYLRHERTHTGEKLYECKQCSKAFPDYSSCLRHERTHTGKKPYTCKQCGKAFSASTSLRRHETTHTDEKPYACQQCGKAFHHLGSFQRHMVMHTRDGPHKCKICGKGFDCPSSLKSHERTHTGEKLYECKQCGKALSHSSSFRRHMTMHTGDGPHKCKICGKAFVYPSVFQRHEKTHTAEKPYKCKQCGKAYRISSSLRRHETTHTGEKPYKCKCGKAFIDFYSFQNHKTTHAGEKPYECKECGKAFSCFQYLSQHRRTHTGEKPYECNTCKKAFSHFGNLKVHERIHSGEKPYECKECGKAFSWLTCFLRHERIHMREKPYECQQCGKAFTHSRFLQGHEKTHTGENPYECKECGKAFASLSSLHRHKKTHWKKTHTGENPYGCKECGKAFASLSSLHRHKKTH

SEQ ID NO: 93088 - protein, 269 aa, Homo sapiens
MGTEKESPEPDCQKQFQAAVSVIQNLPKNGSYRPSYEEMLRFYSYYKQATMGPCLVPRPGFWDPIGRYKWDAWNSLGKMSREEAMSAYITEMKLVAQKVIDTVPLGEVAEDMFGYFEPLYQVIPDMPRPPETFLRRVTGWKEQVVNGDVGAVSEPPCLPKEPAPPSPESHSPRDLDSEVFCDSLEQLEPELVWTEQRAASGGKRDPRNSPVPPTKKEAAAQAQCSAMAPWAPGARAALLPPVALRRPVALPNVSDPKEVTVSGGVSAAN

SEQ ID NO: 93089 - protein, 141 aa, Homo sapiens
MHRKHLQEIPDLSSNVATSFTWGWDSSKTSELLSGMGVSALEKEEPDSENIPQELLSNLGHPESPPRKRLKSKGSDKDFVIVRRPKLNRENFPGVSWDSLPDELLLGIFSCLCLPELLKVSGVCKRWYRLAPSVWLLPPHT

SEQ ID NO: 93090 - protein, 110 aa, Homo sapiens
MAKPYEFNWQKEVPSFLQEGAVFDRYEEESFVFEPNCLFKVDEFGFFLTWRSEGKEGQVLECSLINSIRSGAIPKDPKILAALEAVGKSENDLEGRIVCVCSGTDLVNIS

SEQ ID NO: 93091 - protein, 60 aa, Homo sapiens
  MOD_RES (1)..(1): Any amino acid
XSSVSTDSAGSSYSISGILGITSPSADTNKRKRDEGSPYYYSAAARGAAPPAAATAYDRH

SEQ ID NO: 93092 - protein, 42 aa, Homo sapiens
MAEYSYVKSTKLVLKGTKTKRFARGTYKCRVFPPGLRDKQRF

SEQ ID NO: 93093 - protein, 520 aa, Homo sapiens
MAGGGSDLSTRLFTEDQDVDEGLVYDTVFKHFKRHKLEISNAIKKTFPFLEGLRDRELITNKMFEDSEDSCRNLVPVQRVVYNVLSELEKTFNLSVLEALFSEVNMQEYPDLIHIYKSFKNAIQDKLSFQESDRKEREERPDIKLSLKQGEVPESPEARKESDQACGKMDTVDIANNSTLGKPKRKRRKKKGHGWSRMGTRTQKNNQQNDNSKADGQLVSSEKKANMNLKDLSKIRGRKRGKPGTHFTQSDRAPQKRVRSRGTLAKCIQTEDGKWFTPMEFEIKGGYARSKNWRLSVRCGGWPLRRLMEEGSLPNPPRIYYRNKKRILKSQNNSSVDPCMRNLDECEVCRDGGELFCCDTCSRVFHEDCHIPPVESEKTPWNCIFCRMKESPGSQQCCQESEVLERQMCPEEQLKCEFLLLKVYCCSESSFFAKIPYYYYIREACQGLKEPMWLDKIKKRLNEHGYPQVEGFVQDMRLIFQNHRASYKYKDFGQMGLRLEAEFEKDFKEVFAIQETNGNS

SEQ ID NO: 93094 - protein, 168 aa, Homo sapiens
MEESHFNSNPYFWPSIPTVSGQIENTMFINKMKDQLLPEKGCGLAPPHYPTLLTVPASVSLPSGISMDTESKSDQLTPHSQASVTQNITVVPVPSTGLMTAGPGLVITSPSGSLVTTASSAQTFPISAPMIVSALPPGSQALQVVPDLSKKVASTLTEEGGGGGGGGG

SEQ ID NO: 93095 - protein, 68 aa, Homo sapiens
MVPGTPSPLLGRGKELWLESLACLPGAVKRDCTITGWSEPFPPYPVACPVPLELLAEEGCPCSSLARG

SEQ ID NO: 93096 - protein, 113 aa, Homo sapiens
MSSPSLSDLGKREPAAAADERGTQQRRACANATWNSIHNGVIAVFQRKGLPDQELFSLNEGVRQLLKTELGSFFTEYLQNQLLTKGMVILRDKIRFYEEAAGLTGRDLGLLLQ

SEQ ID NO: 93097 - protein, 302 aa, Homo sapiens
MSDSWVPNSASGQDPGGRRRAWAELLAGRVKREKYNPERAQKLKESAVRLLRSHQDLNALLLEVEGPLCKKLSLSKVIDCDSSEAYANHSSSFIGSALQDQASRLGVPVGILSAGMVASSVGQICTAPAETSHPVLLTVEQRKKLSSLLEFAQYLLAHSMFSRLSFCQELWKIQSSLLLEAVWHLHVQGIVSLQELLESHPDMHAVGSWLFRNLCCLCEQMEASCQHADVARAMLSDFVQMFVLRGFQKNSDLRRTVEPEKMPQVTVDVLQRMLIFALDALAAGVQEESSTHKIVRASAARS

SEQ ID NO: 93098 - protein, 68 aa, Homo sapiens
MTEAITEAAVASSEEVSEERDDLGPLELHDSGTFQQVVNLLDIIDSESAKTDTTGAGLDMRKTLASVI

SEQ ID NO: 93099 - protein, 170 aa, Homo sapiens
MGEPSREEYKIQSFDAETQQLLKTALKDPGAVDLEKVANVIVDHSLQDCVFSKEAGRMCYAIIQVNNMPMMALVNPVYDCLFRLAQPDSLSKEEEVDCLVLQLHRVGEQLEKMNGQRMDELFVLIRDGFLLPTGLSSLAQLLLLEIIEFRAAGWKTTPAAHKYYYSEVSD

SEQ ID NO: 93100 - protein, 348 aa, Homo sapiens
MMNHSMSSGSGSLRTNQKRSLYVRAMFDYDKSKDSGLPSQGLSFKYGDILHVINASDDEWWQARRVMLEGDSEEMGVIPSKRRVERKERARLKTVKFNAKPGVIDSKGDIPGLGDDGYGTKTLKHVSSNASDSESSYRGQEDLILSYEPVTRQEINYTRPVIILGPMKDRINDDLISEFPDKFGSCVPHTTRPKRDYEVDGRDYHFVISREQMEKDIQEHKFIEAGQYNDNLYGTSVQSVRFVAERGKHCILDVSGNAIKRLQVAQLYPIAIFIKPRSLEPLMEMNKRLTEEQAKKTYDRAIKLEQEFGEYFTAIVQGDTLEDIYNQCKLVIEEQSGPFIWIPSKEKL

SEQ ID NO: 93101 - protein, 113 aa, Homo sapiens
MEDTQAIDWDVEEEEETEQSSESLRCNVEPVGRLHIFSGAHGPEKDFPLHLGKNVVGRMPDCSVALPFPSISKQHAEIEILAWDKAPILRDCGSLNGTQILRPPKVLSPGVSH

SEQ ID NO: 93102 - protein, 151 aa, Homo sapiens
MKIELFADVVPKTAENFRQFCTGEFRKDGVPIGYKGSTFHRVIKDFMIQGGDFVNGDGTGVASIYRGPFADENFKLRHSAPGLLSMANSGPSTNGCQFFITCSKCDWLDGKHVVFGKIIDGLLVMRKIENVPTGPNNKPKLPVVISQCGEM

SEQ ID NO: 93103 - protein, 147 aa, Homo sapiens
MRIFAPNHVVAKSRFWYFVSQLKKMKKSSGEIVYCGQVFEKSPLRVKNFGIWLRYDSRSGTHNMYREYRDLTTAGAVTQCYRDMGARHRARAHSIQIMKVEEIAASKCRRPAVKQFHDSKIKFPLPHRVLRRQHKPRFTTKRPNTFF

SEQ ID NO: 93104 - protein, 656 aa, Homo sapiens
MADKVRRQRPRRRVCWALVAVLLADLLALSDTLAVMSVDLGSESMKVAIVKPGVPMEIVLNKESRRKTPVIVTLKENERFFGDSAASMAIKNPKATLRYFQHLLGKQADNPHVALYQARFPEHELTFDPQRQTVHFQISSQLQFSPEEVLGMVLNYSRSLAEDFAEQPIKDAVITVPVFFNQAERRAVLQAARMAGLKVLQLINDNTATALSYGVFRRKDINTTAQNIMFYDMGSGSTVCTIVTYQMVKTKEAGMQPQLQIRGVGFDRTLGGLEMELRLRERLAGLFNEQRKGQRAKDVRENPRAMAKLLREANRLKTVLSANADHMAQIEGLMDDVDFKAKVTRVEFEELCADLFERVPGPVQQALQSAEMSLDEIEQVILVGGATRVPRVQEVLLKAVGKEELGKNINADEAAAMGAVYQAAALSKAFKVKPFVVRDAVVYPILVEFTREVEEEPGIHSLKHNKRVLFSRMGPYPQRKVITFNRYSHDFNFHINYGDLGFLGPEDLRVFGSQNLTTVKLKGVGDSFKKYPDYESKGIKAHFNLDESGVLSLDRVESVFETLVEDSAEEESTLTKLGNTISSLFGGGTTPDAKENGTDTVQEEEESPAEGSKDEPGEQVELKEEAEAPVEDGSQPPPPEPKGDATPEGEKATEKE

SEQ ID NO: 93105 - protein, 128 aa, Homo sapiens
  MOD_RES (1)..(1): Any amino acid
XSVKLEYSSFKTNQEKEFNKLSERHMHVQLQLDNLRLENEKLLESKACLQDSYDNLQEIMKFEIDQLSRNLQNFKKENETLKSDLNNLMELLEAEKERNNKLSLQFEEDKENSSKPWYTVVNVELTSS

SEQ ID NO: 93106 - protein, 289 aa, Homo sapiens
MRVKDPTKALPEKAKRSKRPTVPHDEDSSDDIAVGLTCQHVSHAISVNHVKRAIAENLWSVCSECLKERRFYDGQLVLTSDIWLCLKCGFQGCGKNSESQHSLKHFKSSRTEPHCIIINLSTWIIWCYECDEKLSTHCNKKVLAQIVDFLQKHASKTQTSAFSRIMKLCEEKCETDEIQKGGKCRNLSVRGITNLGNTCFFNAVMQNLAQTYTLTDLMNEIKESSTKLKIFPSSDSQLDPLVVELSRPGPLTSALFLFLHSMKETEKGPLSPKVLFNQLCQKWVHLHLI

SEQ ID NO: 93107 - protein, 157 aa, Homo sapiens
MVSRMDIFWHQGPPQDEEGWPPPNSTTRPWRSAPPSPPPPGTRHTALGPRSASLLSLQTELLLDLVAEAQSRRLEEQRATFYTPQNPSSLAPAPLRPLEDREQLYSTILSHQCQRMEAQRSEPPLPPGGQELLELLLRVQGGGRMEEQRSRPPTHTC

SEQ ID NO: 93108 - protein, 125 aa, Homo sapiens
MGSEVTLQRWQDVCSRASLCRGQGVWATHKELALSRLGCRKTPSAWGGQGPMSVLKEAGLDEKGHSLARSVTVPPDPIWGRAGQVLRPRRGPSQNLLPWHVSSRPSSRAVILRRAALHASLQSGS

SEQ ID NO: 93109 - protein, 511 aa, Homo sapiens
MFGTESSLSMFLNTLTPKFYVALTGTSSLISGLILIFEWWYFRKYGTSFIEQVSVSHLRPLLGGVDNNSSNNSNSSNGDSDSNRQSVSECKVWRNPLNLFRGAEYNRYTWVTGREPLTYYDMNLSAQDHQTFFTCDSDHLRPADAIMQKAWRERNPQARISAAHEALEINECATAYILLAEEEATTIAEAEKLFKQALKAGDGCYRRSQQLQHHGSQYEAQHRRDTNVLVYIKRRLAMCARRLGRTREAVKMMRDLMKEFPLLSMFNIHENLLEALLELQAYADVQAVLAKYDDISLPKSATICYTAALLKARAVSDKFSPEAASRRGLSTAEMNAVEAIHRAVEFNPHVPKYLLEMKSLILPPEHILKRGDSEAIAYAFFHLAHWKRVEGALNLLHCTWEGTFRMIPYPLEKGHLFYPYPICTETADRELLPSFHEVSVYPKKELPFFILFTAGLCSFTAMLALLTHQFPELMGVFAKAFLSTLFAPLNFVMEKVESILPSSLWHQLTRI

SEQ ID NO: 93110 - protein, 52 aa, Homo sapiens
  MOD_RES (1)..(1): Any amino acid
XTGDRGRTLESEARSKRPRASSSDMGSTAKKPRKCSLCHQPGHTRPFCPQNR

SEQ ID NO: 93111 - protein, 276 aa, Homo sapiens
MKRLAARCFAGLLILSPLTVISDSRPADSGKAIEDGNLEEMEEEVRLKKRKRRRNVDKDPAKEDVEKAKKRRGRPPAEKLSPNPPKLTKQMNAIIDTVINYKDSSGRQLSEVFIQLPSRKELPEYYELIRKPVDFKKIKERIRNHKYRSLGDLEKDVMLLCHNAQTFNLEGSQIYEDSIVLQSVFKSARQKIAKEEESEDESNEEEEEEDEEESESEAKSVKVKIKLNKKDDKGRDKGKGKKRPNRGKAKPVVSDFDSDEEQDEREQSEGSGTDDE

SEQ ID NO: 93112 - protein, 192 aa, Homo sapiens
MSLMPKMHLLFPLTLVRSFWSDMMDSAQSFITSSWTFYLQADDGKIVIFQSKPEIQYAPHLEQEPTNLRESSLSKMSYLQMRNSQAHRNFLEDGESDGFLRCLSLNSGWILTTTLVLSVMVLLWICCATVATAVEQYVPSEKLSIYGDLEFMNEQKLNRYPASSLVVVRSKTEDHEEAGPLPTKVNLAHSEI

SEQ ID NO: 93113 - protein, 165 aa, Homo sapiens
MDEEPERTKRWEGGYERTWEILKEDESGSLKATIEDILFKAKRKRVFEHHGQVRLGMMRHLYVVVDGSRTMEDQDLKPNRLTCTLKLLEYFVEEYFDQNPISQIGIIVTKSKRAEKLTELSGNPRKHITSLKEAVDMTCHGEPSLYNSLSMAMQTLKLVLYIMYN

SEQ ID NO: 93114 - protein, 230 aa, Homo sapiens
MGLELFLDLVSQPSRAVYIFAKKNGIPLELRTVDLVKGQHKSKEFLQINSLGKLPTLKDGDFILTESSAILIYLSCKYQTPDHWYPSDLQARARVHEYLGWHADCIRGTFGIPLWVQVLGPLIGVQVPEEKVERNRTAMDQALQWLEDKFLGDRPFLAGQQPVALGYELFEGRPRLAAWRGRVEAFLGAELCQEAHSIILSILEQAAKKTLPTPSPEAYQAMLLRIARIP

SEQ ID NO: 93115 - protein, 1011 aa, Homo sapiens
MTLLKSSKTNSDKFERDSIEIFTVETLDLGDLWKVRLGHDNTGKAPGWFVDWVEVDAPSLGKCMTFPCGRWLAKNEDDGSIIRDLFHAELQTRLYTPFVPYEITLYTSDVFAAGTDANIFIIIYGCDAVCTQQKYLCTNKREQKQFFERKSASRFIVELEDVGEIIEKIRIGHNNTGMNPGWHCSHVDIRRLLPDKDGAETLTFPCDRWLATSEDDKKTIRELVPYDIFTEKYMKDGSLRQVYKEVEEPLDIVLYSVQIFTGNIPGAGTDAKVYITIYGDLGDTGERYLGKSENRTNKFERGTADTFIIEAADLGVIYKIKLRHDNSKWCADWYVEKVEIWNDTNEDEFLFLCGRWLSLKKEDGRLERLFYEKEYTGDRSSNCSSPADFWEIALSSKMADVDISTVTGPMADYVQEGPIIPYYVSVTTGKHKDAATDSRAFIFLIGEDDERSKRIWLDYPRGKRGFSRGSVEEFYVAGLDVGIIKKIELGHDGASPESCWLVEELCLAVPTQGTKYMLNCNCWLAKDRGDGITSRVFDLLDAMVVNIGVKVLYEMTVWTGDVVGGGTDSNIFMTLYGINGSTEEMQLDKKKARFEREQNDTFIMEILDIAPFTKMRIRIDGLGSRPEWFLERILLKNMNTGDLTMFYYGDWLSQRKGKKTLVCEMCAVIDEEEMMEWTSYTVAVKTSDILGAGTDANVFIIIFGENGDSGTLALKQSANWNKFERNNTDTFNFPDMLSLGHLCKLRVWHDNKGIFPGWHLSYVDVKDNSRDETFHFQCDCWLSKSEGDGQTVRDFACANNKICDELEETTYEIVIETGNGGETRENVWLILEGRKNRSKEFLMENSSRQRAFRKGTTDTFEFDSIYLGDIASLCVGHLAREDRFIPKRELAWHVKTITITEMEYGNVYFFNCDCLIPLKRKRKYFKVFEVTKTTESFASKVQSLVPVKYEVIVTTGYEPGAGTDANVFVTIFGANGDTGKRELKQKMRNLFERGSTDRFFLETLELGELRK

SEQ ID NO: 93116 - protein, 62 aa, Homo sapiens
MFLLLALLTELGRLQAHEGSEGIFLHVTVPRKIKSNDSEVSERKVFGEQVVFGYMNDLHHYN

SEQ ID NO: 93117 - protein, 317 aa, Homo sapiens
MQHNEGQERSSNNFNYGAYHSLEAIYHEMDNIAADFPDLARRVKIGHSFENRPMYVLKFSTGKGVRRPAVWLNAGIHSREWISQATAIWTARKIVSDYQRDPAITSILEKMDIFLLPVANPDGYVYTQTQNRLWRKTRSRNPGSSCIGADPNRNWNASFAGKGASDNPCSEVYHGPHANSEVEVKSVVDFIQKHGNFKGFIDLHSYSQLLMYPYGYSVKKAPDAEELDKVARLAAKALASVSGTEYQVGPTCTTVYPASGSSIDWAYDNGIKFAFTFELRDTGTYGFLLPANQIIPTAEETWLGLKTIMEHVRDNLY

SEQ ID NO: 93118 - protein, 48 aa, Homo sapiens
MVITSENDEDRGGQEKESKEESVLAMLGIIGTILNLIVIIFVYIYTTL

SEQ ID NO: 93119 - protein, 168 aa, Homo sapiens
MASDEGKLFVGGLSFDTNEQSLEQVFSKYGQISEVVVVKDRETQRSRGFGFVTFENIDDAKDAMMAMNGKSVDGRQIRVDQAGKSSDNRSRGYRGGSAGGRGFFRGGRGRGRGFSRGGGDRGYGGNRFESRSGGYGGSRDYYSSRSQSGGYSDRSSGGSYRDSYDSYG

SEQ ID NO: 93120 - protein, 122 aa, Homo sapiens
MATQISTRGSQCTIGQEEYSLYSSLSEDELVQMAIEQSLADKTRGPTTAEATASACTNRQPAHFYPWTRPADPLIKAIKDGDEEALKTMIKEGKNLAEPNKEGWLPLHEAAYYGQVGCLKVL

SEQ ID NO: 93121 - protein, 839 aa, Homo sapiens
MVQLYNLHPFGSQQVVPCKLEPDRFCGGGRDALFVAAGCKVEAFAVAGQELCQPRCAFSTLGRVLRLAYSEAGISNEISQLESDDFVICQKPLELLGEKSEQSGLSVTLESTGLADEKRKYSHFQHLLYRRFAPDISSYVLSDDIKLHSLQLLPIYQTGSLTSDGKNLSQEKELLSLFCFFSLPHVGYLYMVVKSVELMSVYQYPEKSQQAVLTPQFLHVITSNNLQCFTVRCSAAAAREEDPYMDTTLKACPPVSMDVCALRIQLFIGLKAICHFKNHIILLTKAEPEAIPERRQSPKRLLSRKDTSVKIKIPPVAEAGWNLYIVNTISPVQLYKEMVDYSNTYKTVKTQSCIHLLSEAHLLVRAALMDASQLEPGEKAELLEAFKESCGHLGDCYSRLDSQHSHLTLPYYKMSGLSMAEVLARTDWTVEDGLQKYERGLIFYINHSLYENLDEELNEELAAKVVQMFYVAEPKQVPHILCSPSMKNINPLTAMSYLRKLDTSGFSSILVTLTKAAVALKMGDLDMHRNEMKSHSEMKLVCGFILEPRLLIQQRKGQIVPTELALHLKETQPGLLVASVLGLQKNNKIGIEEADSFFKVLCAKDEDTIPQLLVDFWEAQLVACLPDVVLQELFFKLTSQYIWRLSKRQPPDTTPLRTSEDLINACSHYGLIYPWVHVVISSDSLADKNYTEDLSKLQSLICGPSFDIASIIPFLEPLSEDTIAGLSVHVLCRTRLKEYEQCIDILLERCPEAVIPYANHELKEENRTLWWKKLLPELCQRIKCGGEKYQLYLSSLKETLSIVAVELELKDFMNVLPEDGTATFFLPYLLYCSRKKPLT

SEQ ID NO: 93122 - protein, 35 aa, Homo sapiens
MISREAADQLLIVAEGSYLIRESQRQPGTYTLALS

SEQ ID NO: 93123 - protein, 41 aa, Homo sapiens
MWFWILWRFWHDSEEVLGHFPYPDPSQWTDEELGIPPDDED

SEQ ID NO: 93124 - protein, 110 aa, Homo sapiens
MPSEYTYVKLRSDCSRPSLQWYTRAQSKMRRPSLLLKDILKCTLLVFGVWILYILKLNYTTEECDMKKMHYVDPDHVKTYTVPLKEAGPSLLKHSVSPGTSIFKPSLFSP

SEQ ID NO: 93125 - protein, 418 aa, Homo sapiens
MGIKFLEVIKPFCAVLPEIQKPERKIQFREKVLWTAITLFIFLVCCQIPLFGIMSSDSADPFYWMRVILASNRGTLMELGISPIVTSGLIMQLLAGAKIIEVGDTPKDRALFNGAQKLFGMIITIGQAIVYVMTGMYGDPAEMGAGICLLIIIQLFVAGLIVLLLDELLQKGYGLGSGISLFIATNICETIVWKAFSPTTINTGRGTEFEGAVIALFHLLATRTDKVRALREAFYRQNLPNLMNLIATVFVFAVVIYFQGFRVDLPIKSARYRGQYSSYPIKLFYTSNIPIILQSALVSNLYVISQMLSVRFSGNFLVNLLGQWADVSGGGPARSYPVGGLCYYLSPPESMGAIFEDPVHVVVYIIFMLGSCAFFSKTWIEVSGSSAKDVAKQLKEQQMVMRGHRDTSMVHELNSARA

SEQ ID NO: 93126 - protein, 144 aa, Homo sapiens
MTSCWANSGMTLCPGHMAGRVPGALWPASPAPWHQPAWPRSMGVPRTPSRTVLFERERTGLTYRVPSLLPVPPGPTLLAFVEQRLSPDDSHAHRLVLRRGTLAGGSVRWGALHVLGTAALAEHRSMNPCPVHDAGTGTVFLFFI

SEQ ID NO: 93127 - protein, 228 aa, Homo sapiens
MVKLANPLYTEWILEAIQKIKKQKQRPSEERICHAVSTSHGLDKKTVSEQLELSVQDGSVLKVTNKGLASYKDPDNPGRFSSVKPGTFPKSAKGSRGSCNDLRNVDWNKLLRRAIEGLEEPNGSSLKNIEKYLRSQSDLTSTTNNPAFQQRLRLGAKRAVNNGRLLKDGPQYRVNYGSLDGKGAPQYPSAFPSSLPPVSLLPHEKDQVSEGVMFVHSHYCPFVFYGFT

SEQ ID NO: 93128 - protein, 490 aa, Homo sapiens
MRFTFTSRCLALFLLLNHPTPILPAFSNQTYPTIEPKPFLYVVGRKKMMDAQYKCYDRMQQLPAYQGEGPYCNRTWDGWLCWDDTPAGVLSYQFCPDYFPDFDPSEKVTKYCDEKGVWFKHPENNRTWSNYTMCNAFTPEKLKNAYVLYYLAIVGHSLSIFTLVISLGIFVFFRKLTTIFPLNWKYRKALSLGCQRVTLHKNMFLTYILNSMIIIIHLVEVVPNGELVRRDPVSCKILHFFHQYMMACNYFWMLCEGIYLHTLIVVAVFTEKQRLRWYYLLGWGFPLVPTTIHAITRAVYFNDNCWLSVETHLLYIIHGPVMAALVVNFFFLLNIVRVLVTKMRETHEAESHMYLKAVKATMILVPLLGIQFVVFPWRPSNKMLGKIYDYVMHSLIHFQGFFVATIYCFCNNEVQTTVKRQWAQFKIQWNQRWGRRPSNRSARAAAAAAEAGDIPIYICHQELRNEPANNQGEESAEIIPLNIIEQESSA

SEQ ID NO: 93129 - protein, 73 aa, Homo sapiens
MAADAEPLEIILHLPLLCEDKNVPYVFVRSKQALGRACGVSRPVIACSVTIKEGSQLKQQIQSIQQSIERLLV

SEQ ID NO: 93130 - protein, 649 aa, Homo sapiens
MMTTLQNKEECGKGPKRIFAPPAQKSYSLLPCSPNSPKEETPGISSPETEARISLPKASLKKKEEKATMKNVPSREQEKKRKAQINKQAEKKEKEKSSLTNAEFEEIVQIVLQKSLQECLGMGSGLDFAETSCAQPVVSTQSDKEPGITASATDTDNANGEEVPHTQEISVSWEGEAAPEIRTSKLGQPDPAPSKKKSNRLTLSKRKKEAQDEKVEKTQGGHEHRQEDRLKKTVQDHSQIRDQQKGEISGFGQCLVWVQCSFPNCGKWRRLCGNIDPSVLPDNWSCDQNTDVQYNRCDIPEETWTGLESDVAYASYIPGSIIWAKQYGYPWWPGMIESDPDLGEYFLFTSHLDSLPSKYHVTFFGETVSRAWIPVNMLKNFQELSLELSVMKKRRNDCSQKLGVALMMAQEAEQISIQERVNLFGFWSRFNGSNSNGERKDLQLSGLNSPGSCLEKKEKEEELEKEEGEKTDPILPIRKRVKIQTQKTKPRGLGGDAGTADGRGRTLQRKIMKRSLGRKSTAPPAPRMGRKEGQGNSDSDQPGPKKKFKAPQSKALAASFSEGKEVRTVPKNLGLSACKGACPSSAKEEPRHREPLTQEAGSVPLEDEASSDLDLEQLMEDVGRELGQSGELQHSNSDGEDFPVALFGK

SEQ ID NO: 93131 - protein, 873 aa, Homo sapiens
  MOD_RES (1)..(1): Any amino acid
XTFKSKVLARYPENVEWNPFDQDAVGMLCMPKGLAFKTQADPREPQFHAFIITREDGSRTFGFALTFYEEVTSKQICSAMQTLYHMHNAEYDVLHAPPADDRDQSSMEDGEDTPVTKLQRFNSYDISRDTLYVSKCICLITPMSFMKACRSVLEQLHQAVTSPQPPPLPLESYIYNVLYEVPLPPPGRSLKFSGVYGPIICQRPSTNELPLFDFPVKEVFELLGVENVFQLFTCALLEFQILLYSQHYQRLMTVAETITALMFPFQWQHVYVPILPASLLHFLDAPVPYLMGLHSNGLDDRSKLELPQEANLCFVDIDNHFIELPEDLPQFPNKLEFVQEVSEILMAFGIPPEGNLHCSESASKLKRLRASELVSDKRNGNIAGSPLHSYELLKENETIARLQALVKRTGVSLEKLEVREDPSSNKDLKVQCDEEELRIYQLNIQIREVFANRFTQMFADYEVFVIQPSQDKESWFTNREQMQNFDKASFLSDQPEPYLPFLSRFLETQMFASFIDNKIMCHDDDDKDPVLRVFDSRVDKIRLLNVRTPTLRTSMYQKCTTVDEAEKAIELRLAKIDHTAIHPHLLDMKIGQGKYEPGFFPKLQSDVLSTGPASNKWTKRNAPAQWRRKDRQKQHTEHLRLDNDQREKYIQEARTMGSTIRQPKLSNLSPSVIAQTNWKFVEGLLKECRNKTKRMLVEKMGREAVELGHGEVNITGVEENTLIASLCDLLERIWSHGLQVKQGKSALWSHLLHYQDNRQRKLTSGSLSTSGILLDSERRKSDASSLMPPLRISLIQDMRHIQNIGEIKTDVGKARAWVRLSMEKKLLSRHLKQLLSDHELTNDPVPHSDRTKQEAGGLHVHCQPMDLYIRRIG

SEQ ID NO: 93132 - protein, 110 aa, Homo sapiens
MVGVAEVSCGQAESSEKPNAEDMTSKDYYFDSYAHFGIHEEMLKDEVRTLTYRNSMFHNRHLFKDKVVLDVGSGTGILCMFAAKAGARKVIGIECSSISDYAVKIVKANK

SEQ ID NO: 93133 - protein, 455 aa, Homo sapiens
MSLTVVSMACVGFFLLQGAWPLMGGQDKPFLSARPSTVVPRGGHVALQCHYRRGFNNFMLYKEDRSHVPIFHGRIFQESFIMGPVTPAHAGTYRCRGSRPHSLTGWSAPSNPLVIMVTGNHRKPSLLAHPGPLLKSGETVILQCWSDVMFEHFFLHREGISEDPSRLVGQIHDGVSKANFSIGPLMPVLAGTYRCYGSVPHSPYQLSAPSDPLDIVITGLYEKPSLSAQPGPTVQAGENVTLSCSSWSSYDIYHLSREGEAHERRLRAVPKVNRTFQADFPLGPATHGGTYRCFGSFRALPCVWSNSSDPLLVSVTGNPSSSWPSPTEPSSKSGICRHLHVLIGTSVVIFLFILLLFFLLYRWCSNKKNAAVMDQEPAGDRTVNRQDSDEQDPQEVMYAQLDHCVFIQRKISRPSQRPKTPLTDTSVYTELPNAEPRSKVVSCPRAPQSGLEGVF

SEQ ID NO: 93134 - protein, 426 aa, Homo sapiens
MVMEKPSPLLVGREFVRQYYTLLNQAPDMLHRFYGKNSSYVHGGLDSNGKPADAVYGQKEIHRKVMSQNFTNCHTKIRHVDAHATLNDGVVVQVMGLLSNNNQALRRFMQTFVLAPEGSVANKFYVHNDIFRYQDEVFGGFVTEPQEESEEEVEEPEERQQTPEVVPDDSGTFYDQAVVSNDMEEHLEEPVAEPEPDPEPEPEQEPVSEIQEEKPEPVLEETAPEDAQKSSSPAPADIAQTVQEDLRTFSWASVTSKNLPPSGAVPVTGIPPHVVKVPASQPRPESKPESQIPPQRPQRDQRVREQRINIPPQRGPRPIREAGEQGDIEPRRMVRHPDSHQLFIGNLPHEVDKSELKDFFQSYGNVVELRINSGGKLPNFGFVVFDDSEPVQKVLSNRTGVQWRDLGSLQPPPPGFKQFSCLSLLE

SEQ ID NO: 93135 - protein, 229 aa, Homo sapiens
MAISGVPVLGFFIIAVLMSAQESWAIKEEHVIIQAEFYLNPDQSGEFMFDFDGDEIFHVDMAKKETVWRLEEFGRFASFEAQGALANIAVDKANLEIMTKRSNYTPITNDKFTPPVVNVTWLRNGKPVTTGVSETVFLPREDHLFRKFHYLPFLPSTEDVYDCRVEHWGLDEPLLKHWEFDAPSPLPETTENVVCALGLTVGLVGIIIGTIFIIKGVRKSNAAERRGPL

SEQ ID NO: 93136 - protein, 41 aa, Homo sapiens
MLGSGFKAERLRVNLRLVINRLKLLEKKKSRSSSWGRDRSY

SEQ ID NO: 93137 - protein, 367 aa, Homo sapiens
MWAVLRLALRPCARASPAGPRAYHGDSVASLGTQPDLGSALYQENYKQMKALVNQLHERVEHIKLGGGEKARALHISRGKLLPRERIDNLIDPGSPFLELSQFAGYQLYDNEEVPGGGIITGIGRVSGVECMIIANDATVKGGAYYPVTVKKQLRAQEIAMQNRLPCIYLVDSGGAYLPRQADVFPDRDHFGRTFYNQAIMSSKNIAQIAVVMGSCTAGGAYVPAMADENIIVRKQGTIFLAGPPLVKAATGEEVSAEDLGGADLHCRKSGVSDHWALDDHHALHLTRKVVRNLNYQKKLDVTIEPSEEPLFPADELYGIVGANLKRSFDVREVIARIVDGSRFTEFKAFYGDTLVTGIKPLEKHKT

SEQ ID NO: 93138 - protein, 202 aa, Homo sapiens
MKSLSLLLAVALGLATAVSAGPAVIECWFVEDASGKGLAKRPGALLLRQGPGEPPPRPDLDPELYLSVHVVLTVLTHTPAPRVRLGQDALLDLSFAYMPPTSEAASSLAPGPPPFGLEWRRQHLGKGHLLLAATPGLNGQMPAAQEGAVAFAAWDDDEPWGPWTGNGTFWLPRVQPFQEGTYLATIHLPYLQGQVTLELAVY

SEQ ID NO: 93139 - protein, 193 aa, Homo sapiens
MDCRVHMRPIGLTWVLQLTLAWILLEACGGSRPLQARSQQHHGLAADLGKGKLHLAEMDTTETSGPGNHPERCGVPSPECESFLEHLQRALRSRFRLRLLGVRQAQPLCEELCQAWFANCEDDITCGPTWLPLSEKRGCEPSCLTYGQTFADGTDLCRSALGHALPVAAPGARHCFNISISAVPRPRPGRRGR

SEQ ID NO: 93140 - protein, 112 aa, Homo sapiens
MNSLPDIEEVKDQSRNKGSSAVRVYRMLPPLTKNQRKERKSKSSRDAKSKAKRKSCGDSSPDTFSDGLSSSTLPDDHSSYTVPGYMQDLEVEQALTPGYKLWHLQKTRKVND

SEQ ID NO: 93141 - protein, 99 aa, Homo sapiens
MSTRTPLPTVNERDTENHTSHGDGRQEVTSRTSRSGARCRNSIASCADEQPHIGNYRLLKTIGKGNFAKVKLARHILTGREVAIKIIDKTQLNPTSLQK

SEQ ID NO: 93142 - protein, 285 aa, Homo sapiens
MSSRRDTDSDTQDANDSSCKSSERSLPDCTPHPNSISIDAGPRQAPKIAQIKRNLSYGDNSDPALEASSLPPPDPWLETSSSSPAEPAQPGACRRDGYWFLKLLQAETERLEGWCCQMDKETKENNLSEEVLGKVLSAVGSAQLLMSQKFQQFRGLCEQNLNPDANPRPTAQDLAGFWDLLQLSIEDISMKFDELYHLKANSWQLVETPEKRKEEKKPPPPVPKKPAKSKPAVSRDKASDASDKQRQEARKRLLAAKRAASVRQNSATESADSIEIYVPEAQTRL

SEQ ID NO: 93143 - protein, 130 aa, Homo sapiens
MTFTTFDLGGHVQARRVWKNYLPAINGIVFLVDCADHERLLESKEELDSLMTDETIANVPILILGNKIDRPEAISEERLREMFGLYGQTTGKGSISLKELNARPLEVFMCSVLKRQGYGEGFRWMAQYID

SEQ ID NO: 93144 - protein, 39 aa, Homo sapiens
MINMGDSHVDTSSTVSEAVAEEVSLFSMTDMILFSLIVG

SEQ ID NO: 93145 - protein, 151 aa, Homo sapiens
WVRLLRRLIPNATGTGTFSPGASPGSEARTTGDISVEKLNLGTDSDSSPQKSSRDPPSSPSSLSSPIQESTAPELPSETQETPGPALCSPVGPAPATALCAHAVRPHRRQQLRRGVHRGGPHTEPAPRRAAPHSRGAGSLPGLRLRGRGLL

SEQ ID NO: 93146 - protein, 228 aa, Homo sapiens
MMVLQVSAAPRTVALTALLMVLLTSVVQGRATPENYLFQGRQECYAFNGTQRFLERYIYNREEFARFDSDVGEFRAVTELGRPAAEYWNSQKDILEEKRAVPDRMCRHNYELGGPMTLQRRGSIQVRWFLNGQEETAGVVSTNLIRNGDWTFQILVMLEMTPQQGDVYTCQVEHTSLDSPVTVEWKAQSDSARSKTLTGAGGFVLGLIICGVGIFMHRRSKKVQRGSA

SEQ ID NO: 93147 - protein, 126 aa, Homo sapiens
MELRVGNRYRLGRKIGSGSFGDIYLGTDIAAGEEVAIKLECVKTKHPQLHIESKIYKMMQGGVGIPTIRWCGAEGDYNVMVMELLGPSLEDLFNFCSRKFSLKTVLLLADQMNNPEEMTWSLWATC

SEQ ID NO: 93148 - protein, 560 aa, Homo sapiens
MESQPAQECLMQMFLPIEPACFVEWLGTSPSQLGVVMVDEAHERTLHTDILFGLIKDVARFRPELKVLVASATMDTARFSTFFDDAPVFRIPGRRFPVDIFYTKAPEADYLEACVVSVLQIHVTQPPGDILVFLTGQEEIEAACEMLQDRCRRLGSKIRELLVLPIYANLPSDMQARIFQPTPPGARKVVVATNIAETSLTIEGIIYVLDPGFCKQKSYNPRTGMESLTVTPCSKASANQRAGRAGRVAAGKCFRLYTAWAYQHELEETTVPEIQRTSLGNVVLLLKSLGIHDLMHFDFLDPPPYETLLLALEQLYALGALNHLGELTTSGRKMAELPVDPMLSKMILASEKYSCSEEILTVAAMLSVNNSIFYRPKDKVVHADNARVNFFLPGGDHLVLLNVYTQWAESGYSSQWCYENFVQFRSMRRARDVREQLEGLLERVEVGLSSCQGDYIRVRKAITAGYFYHTARLTRSGYRTVKQQQTVFIHPNSSLFEQQPRWLLYHELVLTTKEFMRQVLEIESSWLLEVAPHYYKAKELEDPHAKKMPKKIGKTREELG

SEQ ID NO: 93149 - protein, 121 aa, Homo sapiens
MSSSDEETLSERSCRSERSCRSERSYRSERSGSLSPCPPGDTLPWNLPLHEQKKRKSQDSVLDPAERAVVRVADALPSTSFCFPHCSLLRNAAAVSPIRSKRKSKTKRRKPQSFCDCVVWL

SEQ ID NO: 93150 - protein, 219 aa, Homo sapiens
MAQALGEDLVQPPELQDDSSSLGSDSELSGPGPYRQADRYGFIGGSSAEPGPGHPPADLIRQREMKWVEMTSHWEKTMSRRYKKVKMQCRKGIPSALRARCWPLLCGAHVCQKNSPGTYQELAEAPGDPQWMETIGRDLHRQFPLHEMFVSPQGHGQQGLLQVLKAYTLYRPEQGYCQAQGPVAAVLLMHLPPEEAFWCLVQICEVYLPGYYGPHMVRG

SEQ ID NO: 93151 - protein, 82 aa, Homo sapiens
MATVAELKAVLKDTLEKKGVLGHLKARIRAEVFNALDDDREPRPSLSHENLLINELIREYLEFNKYKYTASVLIADLFYMGF

SEQ ID NO: 93152 - protein, 383 aa, Homo sapiens
MSARAAAAKSTAMEETAIWEQHTVTLHRAPGFGFGIAISGGRDNPHFQSGETSIVISDVLKGGPAEGQLQENDRVAMVNGVSMDNVEHAFAVQQLRKSGKNAKITIRRKKKVQIPVSRPDPEPVSDNEEDSYDEEIHDPRSGRSGVVNRRSEKIWPRDRSASRERSLSPRSDRRSVASSQPAKPTKVTLVKSRKNEEYGLRLASHIFVKEISQDSLAARDGNIQEGDVVLKINGTVTENMSLTDAKTLIERSKGKLKMVVQRDERATLLNVPDLSDSIHSANASERDDISEIQSLASDHSGRSHDRPPRRSRSRSPDQRSEPSDHSRHSPQQPSNGRVTRTFENLKKIMILLSRKMCMCTYTQQLHTISGDSQGSIGHHLTHG

SEQ ID NO: 93153 - protein, 217 aa, Homo sapiens
MTKYTEKLEEIKKNYRYKKDELFKRLKVTTFAQLIIQVASLSDQTLEVTAEEIQRLEDNDSAASDPDAETTARTNGKGNPGEQSPSPEQFINNAGAGDSSRSTLQSVISGVGELDLDKGPVKKAEPHTKDKPYPDCPFLLLDVRDRDSYQQCHIVGAYSYPIATLSRTMNPYSNDILEYKNAHGKIIILYDDDERLASQAATTMCERGFENLFMLSG

SEQ ID NO: 93154 - protein, 743 aa, Homo sapiens
MCRPSPSPVSPASNPRTSLVQVKTKACLSGHHSASSTSKPFKTPKDNLLTSSSKQHTVFPAKGSRDKPCVPVPVVSLEKIPNLVKADGANVKMNSTTTTAVSASSTSSSAVSTPPLIKPVLMSKSVPPSPEKILNGKGILPTTIDKKHQNGTKNSNKPYRRLSEREFDPNKHCGVLDPETKKPCTRSLTCKTHSLSHRRAVPGRKKQFDLLLAEHKAKSREKEVKDKEHLLTSTREILPSQSGPAQDSLLGSSGSSGPEPKVASPAKSRPPNSVLPRPSSANSISSSTSSNHSGHTPEPPLPPVGGDLASRLSSDEGEMDGADESEKLDCQFSTHHPRPLAFCSFGSRLMGRGYYVFDRRWDRFRFALNSMVEKHLNSQMWKKIPPAADSPLPSPAAHITTPVPASVLQPFSNPSAVYLPSAPISSRLTSSYIMTSAMLSNAAFVTSPDPSALMSHTTAFPHVAATLSIMDSTFKAPSAVSPIPAVIPSPSHKPSKTKTSKSSKVKDLSTRSDESPSNKKRKPQSSTSSSSSSSSSSLQTSLSSPLSGPHKKNCVLNASSALNSYQAAPPYNSLSVHNSNNGVSPLSAKLEPSGRTSLPGGPADIVRQVGAVGGSSDSCPLSVPSLALHAGDLSLASHNAVSSLPLSFDKSEGKKRKNSSSSSKACKITKMPGMNSVHKKNPPSLLAPVPDPVNSTSSRQVRDLLAPPSPALGGRGSWAAPLLSRAAPTGNTSLIPVLVFPEG

SEQ ID NO: 93155 - protein, 421 aa, Homo sapiens
MSNQQEKYEAQNIVNSTEESDDAFDTVTIPVPSEEPQESDQTEEHESGIEQFSESHAIHVEEQSDQSFSSLEPDNEQLMEEVISPRQVSYTPQHHEKQYAMQRPNDDSLAFLDKIKSVKESLQESVEDSLATVKVVLIPVGQEIVIPFKVDTILKYLKDHFSHLLGIPHSVLQIRYSGKILKNNETLVQHGVKPQEIVQVEIFSTNPDLYPVRRIDGLTDVSQIITVTVQTGLDQYQQVPVEIVKSDFHKPFLGGFRHKVTGVEYHNAGTQTVPKRIPERLSIFCRDTQTVFQKKNLQQTTNTTSTQMTNIGVYVSNMTDKLVTPGKYFSAAEYHAQRLKAVIVIQTYYRQWHAKIFVENLRRQKSLRLEWETQQELRKIREKEEWIKLDYHRRHNPKTNEDFEFLYNALELFSSKNMENP

SEQ ID NO: 93156 - protein, 234 aa, Homo sapiens
MAAGTAVGAWVLVLSLWGAVVGAQNITARIGEPLVLKCKGAPKKPPQRLEWKLNTGRTEAWKVLSPQGGGPWDSVARVLPNSSLFLPAVGIQDEGIFRCQAMNRNGKETKSNYRSLRTFTITASDWIFPPSEIPGKPEIVDSASELTAGVPNKVGTCVSEGSYPAGTLSWHLDGKPLVPNEKGVSVKEQTRRHPETGLFTLQSELMVTPARGGDPRPTFSCSFSPGLPRHRALR

SEQ ID NO: 93157 - protein, 300 aa, Homo sapiens
MRSGKASCTLETVWEDKHKYEEAERRFYEHEATQAAASAQQLPAEGPAMNGPGQDDPEDADEAEAPDGGSRRDPRKSQDSRKPLQKKRKRSPKSGLGPADLALLGLSAERVWLDKSLFDQAESSYRQKLADVAAQAAWPPALAPWGLCTHGNQVACHHVTWGIWVNKSSFDQAERAFVEWSQALLLAPDGSRRQGTPNTGQQVAVPDLAHQPSPPVNGQPPLGSLQALVREVWLEKPRYDAAERGFYEALFDGHPPGKVRLQERAGLAEGARRGRRDRRGRNILGNKRAGLRRADGEAPS

SEQ ID NO: 93158 - protein, 604 aa, Homo sapiens
MGLSSHLQSSKAGPTRIFTSNTHSSVVLQGFDQLRLEGLLCDVTLMPGDTDDAFPVHRVMMASASDYFKAMFTGGMKEQDLMCIKLHGVSKVGLRKIIDFIYTAKLSLNMDNLQDTLEAASFLQILPVLDFCKVFLISGVTLDNCVEVGRIANTYNLTEVDKYVNSFVLKNFPALLSTGEFLKLPFERLAFVLSSNSLKHCTELELFKATCRWLRLEEPRMDFAAKLMKNIRFPLMTPQELINYVQTVDFMRTDNTCVNLLLEASNYQMMPYMQPVMQSDRTAIRSDTTHLVTLGGVLRQQLVVSKELRMYDEKAHEWKSLAPMDAPRYQHGIAVIGNFLYVVGGQSNYDTKGKTAVDTVFRFDPRYNKWMQVASLNEKRTFFHLSALKGYLYAVGGRNAAGELPTVECYNPRTNEWTYVAKMSEPHYGHAGTVYGGVMYISGGITHDTFQKELMCFDPDTDKWIQKAPMTTVRGLHCMCTVGERLYVIGGNHFRGTSDYDDVLSCEYYSPILDQWTPIAAMLRGQSDVGVAVFENKIYVVGGYSWNNRCMVEIVQKYDPDKDEWHKVFDLPESLGGIRACTLTVFPPEETTPSPSRESPLSAP

SEQ ID NO: 93159 - protein, 80 aa, Homo sapiens
  MOD_RES (1)..(1): Any amino acid
XAPPNTMTEKFSDLLQFTTQVSRLMVTEIRRRASNKSTEKQCALLSPKDFKATTPSEAASRAIVQFLEINQSEEASRGWM

SEQ ID NO: 93160 - protein, 139 aa, Homo sapiens
MIFPVARYALRWLRRPEDRAFSRAAMEMALRGVRKVLCVAEKNDAAKGIADLLSNGRMRRREGLSKFNKIYEFDYHLYGQNVTMVMTSVSGHLLAHDFQMQFRKWSVQFSREGLSDYSRAATLLSSLKQKLKSTAQRIL

SEQ ID NO: 93161 - protein, 361 aa, Homo sapiens
MAADDDNGDGTSLFDVFSASPLKNNDEGSLDIYAGLDSAVSDSASKSCVPSRNCLDLYEEILTEEGTAKEATYNDLQVEYGKCQLQMKELMKKFKEIQTQNFSLINENQSLKKNISALIKTARVEINRKDEEISNLHQRLSEFPHFRNNHKTARTFDTVKTKDLKSRSPHLDDCSKTDHRAKSDVSKDVHHSTSLPNLEKEGKPHSDKRSTSHLPTSVEKHCTNGVWSRSHYQVGEGSSNEDSRRGRKDIRHSQFNRGTERVRKDLSTGCGDGEPRILEASQRLQGHPEKYGKGEPKTESKSSKFKSNSDSDYKGERINSSWEKETPGERSHSRVDSQSDKKLERQSERSQNINRKEVKSQ

SEQ ID NO: 93162 - protein, 365 aa, Homo sapiens
  MOD_RES (1)..(1): Any amino acid
XLIDRYCGVKSPPLIRSTGRFMWIKFSSDEELEGLGFRAKYSFIPDPDFTYLGDCQFELSGADGIVRSSQVEQEEKTKPGQAVDCIWTIKATPKAKIYLRFLDYQMEHSNECKRNFVAVYDGSSSIENLKAKFCSTVANDVMLKTGIGVIRMWADEGSRLSRFRMLFTSFVEQKKKAGVFEQITKTHGTIIGITSGIVLVLLIISILVQVKQPRKKVMACKTAFNKTGFQEVFDPPHYELFSLRDKEISADLADLSEELDNYQKMRRSSTASRCIHDHHCGSQASSVKQSRTNLSSMELPFRNDFAQPQPMKTFNSTFKKSSYTFKQGHECPEQALEDRVMEEIPCEIYVRGREDSAQASISIDF

SEQ ID NO: 93163 - protein, 123 aa, Homo sapiens
MTFEPDPADLALSSIPGHETFDPRRHRFSEEELKPQPIMKKARKIQVPEEQKDEKYWSRRYKNNEAAKRSRDARRLKENQISVRAAFLEKENALLRQEVVAVRQELSHYRAVLSRYQAQHGAL

SEQ ID NO: 93164 - protein, 196 aa, Homo sapiens
MSAHMSGLEIMDEDQLIKDVLDKFLNCHEQTYDEEFLNTFTHLSQEDHVSKRGVFGTDSSENIFTSAKVTHKNEADDYHLRNKTIFLRTSSQCLEEQVDNFLDLEDLDMDEEIKPQMSEDLLLLPGEVEQDVSTSIPSCIPFVAQPPTCEVKPKPSVKRMDKQTEEVLHREFSHSPHCLDFVIHPFKEMLHASVFF

SEQ ID NO: 93165 - protein, 148 aa, Homo sapiens
ISSSVSVPAKPERRPSLPPSKQANKNLILKAISEAQESVTKTTNYSTVPQKQTLPVAPRTRTSQEELLAEVVQGQSRTPRISPPIKEEETKGDSVEKNQGDLSFLSGCFQDLLFVFDVLQFHYDVSRRGFPFIFPVWYNVWKHPIYLK

SEQ ID NO: 93166 - protein, 110 aa, Homo sapiens
  MOD_RES (1)..(1): Any amino acid
XNLQEFHHLWNKIKAWQKIFKHYDTDQSGTINSYEMRNAVNDAGFHLNNQLYDIITMRYADKHMNIDFDSFICCFVRLEGMFRAFHAFDKDGDGIIKLNVLEWLQLTMYA

SEQ ID NO: 93167 - protein, 117 aa, Homo sapiens
MEFVLKHTAFAHLREVGSFPCTLNPHEAESLALVGAMIDQVLELHPGAQRLHIGCDEVYYLGEGEASRRWLQQEQNSTGKLCLSHMRAVASGVKARRPSVTPLVWDDMLRDLPEDQL

SEQ ID NO: 93168 - protein, 449 aa, Homo sapiens
MGRCCFYTAGTLSLLLLVTSVTLLVARVFQKAVDQSIEKKIVLRNGTEAFDSWEKPPLPVYTQFYFFNVTNPEEILRGETPRVEEVGPYTYRELRNKANIQFGDNGTTISAVSNKAYVFERDQSVGDPKIDLIRTLNIPVLTVIEWSQVHFLREIIEAMLKAYQQKLFVTHTVDELLWGYKDEILSLIHVFRPDISPYFGLFYEKNGTNDGDYVFLTGEDSYLNFTKIVEWNGKTSLDWWITDKCNMINGTDGDSFHPLITKDEVLYVFPSDFCRSVYITFSDYESVQGLPAFRYKVPAEILANTSDNAGFCIPEGNCLGSGVLNVSICKNGAPIIMSFPHFYQADERFVSAIEGMHPNQEDHETFVDINPLTGIILKAAKRFQINIYVKKLDDFVETGDIRTMVFPVMYLNESVHIDKETASRLKSMINTTLIITNIPYIIMALGNSG

SEQ ID NO: 93169 - protein, 115 aa, Homo sapiens
MDVVEVAGSWWAQEREDIIMKYEKGHRAGLPEDKGPKPFRSYNNNVDHLGIVQSGQPPFQGQNSSLTPLQVQPEVVRPEVWGPSREPVGMETGLGQAPGRSAVLSASEHKRSGAA

SEQ ID NO: 93170 - protein, 141 aa, Homo sapiens
  MOD_RES (1)..(1): Any amino acid
XDVQEIFRMTPHEKQVMMFSATLSKEIRPVCRKFMQDPMEIFVDDETKLTLHGLQQYYVKLKDNEKNRKLFDLLDVLEFNQVVIFVKSVQRCIALAQLLVEQNFPAIAIHRGMPQEESLKIFNDEFLWLPTYLAEAWTSSG

SEQ ID NO: 93171 - protein, 592 aa, Homo sapiens
MRRWEGGDPGVSNQKTPTTILLTPERKFHSFGYAARDFYHDLDPNEAKQWLYLEKFKMKLHTTGDLTMDTDLTAANGKKVKALEIFAYALQYFKEQALKELSDQAGSEFENSDVRWVITVPAIWKQPAKQFMRQAAYQAGLASPENSEQLIIALEPEAASIYCRKLRLHQMIELSSKAAVNGYSGSDTVGAGFTQAKEHIRRNRQSRTFLVENVIGEIWSELEEGDKYVVVDSGGGTVDLTVHQIRLPEGHLKELYKATGGPYGSLGVDYEFEKLLYKIFGEDFIEQFKIKRPAAWVDLMIAFESRKRAAAPDRTNPLNITLPFSFIDYYKKFRGHSVEHALRKSNVDFVKWSSQGMLRMSPDAMNALFKPTIDSIIEHLRDLFQKPEVSTVKFLFLVGGFAEAPLLQQAVQAAFGDQCRIIIPQDVGLTILKGAVLFGLDPAVIKVRRSPLTYGVGVLNRYVEGKHPPEKLLVKDGTRWCTDVFDKFISADQSVALGELVKRSYTPAKPSQLVIVINIYSSEHDNVSFITDPGVKKCGTLRLDLTGTSGTAVPARREIQTLMQFGDTEIKATAIDIATSKSVKVGIDFLNY

SEQ ID NO: 93172 - protein, 89 aa, Homo sapiens
MEQPRKAVVVTGFGPFGEHTVNASWIAVQRWDLTILPWLVLNFRAQMILPPRPPKEAGIIGVSHRALPSGARKARPWRQRGPACVRDSG

SEQ ID NO: 93173 - protein, 35 aa, Homo sapiens
MARMNRPAPVEVTYKNMRFLITHNPTNATLNKFIE

SEQ ID NO: 93174 - protein, 208 aa, Homo sapiens
GGGGGGGGGGGGGGGGGQGQTPELACLSAQNGESSPSSSSSAGDLAHANGLLPSAPSAASNNSNSLNVNNGVPGGAAAASSATVAAASATTAASSSLATPELGSSLKKKKRLSQSDEDVIRLIGQHLNGLGLNQTVDLLMQESGCRLEHPSATKFRNHVMEGDWDKAENDLNELKPLVHSPHAIVAQTFSETSINFFPLTAAFCHVRG

SEQ ID NO: 93175 - protein, 32 aa, Homo sapiens
VIEADHHMERMLELFEQNRDRILTPENRKHCP

SEQ ID NO: 93176 - protein, 104 aa, Homo sapiens
VDKDRSGVISDTELQQALSNGTWTPFNPVTVRSIICYRLSDQFHDILIRKFDRQGRGQIAFDDFIQGCIVLQRLTDIFRRYDTDQDGWIQVSYEQYLSMVFSIV

SEQ ID NO: 93177 - protein, 104 aa, Homo sapiens
MPNSEPASLLELFNSIATQGELVRSLKAGNASKDEIDSAVKMLVSLKMSYKAAAGEDYKADCPPGNPAPTSNHGPDATEAEEDFVDPWTVQTSSAKGIDYDKLI

SEQ ID NO: 93178 - protein, 585 aa, Homo sapiens
MHFKCKYSYPALYQMDHTSPTYMLANLTHLHSEQLLQGLNLLRQHHELCDIILRVGDVKIHAHKVVLASVSPYFKAMFTGNLSEKENSEVEFQCIDETALQAIVEYAYTGTVFISQDTVESLLPAANLLQIKLVLKECCAFLESQLDPGNCIGISRFAETYGCRDLYLAATKYICQNFEAVCQTEEFFELTHADLDEIVSNDCLNVATEETVFYALESWIKYDVQERQKYLAQLLNSVRLPLLSVKFLTRLYEANHLIRDDRTCKHLLNEALKYHFMPEHRLSHQTVLMTRPRCAPKVLCAVGGKSGLFACLDSVEMYFPQNDSWIGLAPLNIPRYEFGICVLDQKVYVIGGIATNVRPGVTIRKHENSVECWNPDTNTWTSLERMNESRSTLGVVVLAGELYALGGYDGQSYLQSVEKYIPKIRKWQPVAPMTTTRSCFAAAVLDGMIYAIGGYGPAHMNSVERYDPSKDSWEMVASMADKRIHFGVGVMLGFIFVVGGHNGVSHLSSIERYDPHQNQWTVCRPMKEPRTGVGAAVIDNYLYVVGGHSGSSYLNTVQKYDPISDTWLDSAGMIYCRCNFGLTAL

SEQ ID NO: 93179 - protein, 127 aa, Homo sapiens
MASLAAANAEFCFNLFREMDDNQGNGNVFFSSLSLFAALALVRLGAQDDSLSQIDKLLHVNTASGYGNSSNSQSGLQSQLKRVFSDINASHKDYDLSIVNGLFAEKVYGFHKDYIECAEKLYDAKVE

SEQ ID NO: 93180 - protein, 1060 aa, Homo sapiens
MHQCRSDEYNCSSGMCIRSSWVCDGDNDCRDWSDEANCTAIYHTCEASNFQCRNGHCIPQRWACDGDTDCQDGSDEDPVNCEKKCNGFRCPNGTCIPSSKHCDGLRDCSDGSDEQHCEPLCTHFMDFVCKNRQQCLFHSMVCDGIIQCRDGSDEDAAFAGCSQDPEFHKVCDEFGFQCQNGVCISLIWKCDGMDDCGDYSDEANCENPTEAPNCSRYFQFRCENGHCIPNRWKCDRENDCGDWSDEKDCGDSHILPFSTPGPSTCLPNYYRCSSGTCVMDTWVCDGYRDCADGSDEEACPLLANVTAASTPTQLGRCDRFEFECHQPKTCIPNWKRCDGHQDCQDGRDEANCPTHSTLTCMSREFQCEDGEACIVLSERCDGFLDCSDESDEKACSDELTVYKVQNLQWTADFSGDVTLTWMRPKKMPSASCVYNVYYRVVGESIWKTLETHSNKTNTVLKVLKPDTTYQVKVQVQCLSKAHNTNDFVTLRTPEGLPDAPRNLQLSLPREAEGVIVGHWAPPIHTHGLIREYIVEYSRSGSKMWASQRAASNFTEIKNLLVNTLYTVRVAAVTSRGIGNWSDSKSITTIKGKVIPPPDIHIDSYGENYLSFTLTMESDIKVNGYVVNLFWAFDTHKQERRTLNFRGSILSHKVGNLTAHTSYEISAWAKTDLGDSPLAFEHVMTRGVRPPAPSLKAKAINQTAVECTWTGPRNVVYGIFYATSFLDLYRNPKSLTTSLHNKTVIVSKDEQYLFLVRVVVPYQGPSSDYVVVKMIPDSRLPPRHLHVVHTGKTSVVIKWESPYDSPDQDLLYAVAVKDLIRKTDRSYKVKSRNSTVEYTLNKLEPGGKYHIIVQLGNMSKDSSIKITTVSLSAPDALKIITENDHVLLFWKSLALKEKHFNESRGYEIHMFDSAMNITAYLGNTTDNFFKISNLKMGHNYTFTVQARCLFGNQICGEPAILLYDELGSGADASATQAARSTDVAAVVVPILFLILLSLGVGFAILYTKHRRLQSSFTAFANSHYSSRLGSAIFSSGDDLGEDDEDAPMITGFSDDVPMVIA

SEQ ID NO: 93181 - protein, 217 aa, Homo sapiens
MMAAVKSTEAHPSSNKDPTQGQKSALQGNSPDSEASRQRFRQFCYQEVTGPHEAFSKLWELCCQWLRPKTHSKEEILELLVLEQFLTILPEEIQTWVREQHPENGEEAVALVEDVQRAPGQQVLDSEKDLKVLMKEMAPLGATRESLRSQWKQEVQPEEPTFKGSQSSHQRPGEQSEATGVPWGYEETKTLLAILSSSQFYGKLQTCQQNSQIYRAM

SEQ ID NO: 93182 - protein, 150 aa, Homo sapiens
MYGKIIFVLLLSEIVSISALSTTEVAMHTSTSSSVTKSYISSQTNDTHKRDTYAATPRAHEVSEISVRTVYPPEEETGERVQLAHHFSEPEITLIIFGVMAGVIGTILLISYGIRRLIKKSPSDVKPLPSPDTDVPLSSVEIENPETSDQ

SEQ ID NO: 93183 - protein, 290 aa, Homo sapiens
MAASKTQGAVARMQEDRDGSCSTVGGVGYGDSKDCILEPLSLPESPGGTTTLEGSPSVPCIFCEEHFPVAEQDKLLKHMIIEHKIVIADVKLVADFQRYILYWRKRFTEQPITDFCSVIRINSTAPFEEQENYFLLCDVLPEDRILREELQKQRLREILEQQQQERNDTNFHGVCMFCNEEFLGNRSVILNHMAREHAFNIGLPDNIVNCNEFLCTLQKKLDNLQCLYCEKTFRDKNTLKDHMRKKQHRKINPKNREYDRFYVINYLVRLSFHNLKFDCSTANKIFLRTN

SEQ ID NO: 93184 - protein, 185 aa, Homo sapiens
  MOD_RES (1)..(1): Any amino acid
XEVVPRDWERRESRGGATWGVTRSGGRGEIRKVVQSLEQTAREILTLLQGVHQGAGFQDIPKRCLKAREHFGTVKTHLTSLKTKFPAEQYYRFHEHWRFVLQRLVFLAAFVVYLETETLVTREAVTEILGIEPDREKGFHLDVEDYLSGVLILASELSRLSVNSVTAGDYSRPLHISTFINELDS

SEQ ID NO: 93185 - protein, 117 aa, Homo sapiens
MASNVTNKTDPRSMNSRVFIGNLNTLVVKKSDVEAIFSKYGKIVGCSVHKGFAFVQYVNERNARAAVAGEDGRMIAGQVLDINLAAEPKVNRGKAGVKRSAAEMYGSSFDLDYDFQR

SEQ ID NO: 93186 - protein, 393 aa, Homo sapiens
MAENWKNCFEEELICPICLHVFVEPVQLPCKHNFCRGCIGEAWAKDSGLVRCPECNQAYNQKPGLEKNLKLTNIVEKFNALHVEKPPAALHCVFCRRGPPLPAQKVCLRCEAPCCQSHVQTHLQQPSTARGHLLVEADDVRAWSCPQHNAYRLYHCEAEQVAVCQYCCYYSGAHQGHSVCDVEIRRNEIRKMLMKQQDRLEEREQDIEDQLYKLESDKRLVEEKVNQLKEEVRLQYEKLHQLLDEDLRQTVEVLDKAQAKFCSENAAQALHLGERMQEAKKLLGSLQLLFDKTEDVSFMKNTKSVKILMDRTQTCTSSSLSPTKIGHLNSKLFLNEVAKKEKQLRKMLEGEGGVFRRRETGTFGEGFSATAFPPRGSVAQSGRPVLISRLCHL

SEQ ID NO: 93187 - protein, 244 aa, Homo sapiens
MSALVPDTPPDTPPAMKNATSSKQLPLEPESPSGQVGPRPAPPQEESPSSEAKSRGPTPPAMGPRDARPPRRSSQPSPTAVPASDSPPTKQEVKKAGERHKLAKERREERAKYLAAKKAVWLEKEEKAKALREKQLQERRRRLEEQRLKAEQRRAALEERQRQKLEKNKERYEAAIQRSVKKTWAEIRQQRWSWAGALHHSSPGHKTSGSRCSVSAVNLPKHVDSIINKRLSKSSATLWNSPSR

SEQ ID NO: 93188 - protein, 122 aa, Homo sapiens
  MOD_RES (1)..(1): Any amino acid
XKGSVRALRATSGKRPSNMKRESPTCNLFPASKSPASSPLTRSTPPVRGRAGPSGRAAASEETRAAKLRGAAAKSSSQLPIPSAIPRPASRMPLTSRSVPPGRGALPPDSLSTRKGLPRPST

SEQ ID NO: 93189 - protein, 127 aa, Homo sapiens
MQSTPFCGFCSLGKMITAKPGKTPIQVLHEYGMKTKNIPVYECERSDVQIHVPTFTFRVTVGDITCTGEGTSKKLAKHRAAEAAINILKANASIWNWLFIMAGDFLNIPFPRREDLLIRENILQFAG

SEQ ID NO: 93190 - protein, 438 aa, Homo sapiens
MGRCCFYTAGTLSLLLLVTSVTLLVARVFQKAVDQSIEKKIVLRNGTEAFDSWEKPPLPVYTQFYFFNVTNPEEILRGETPRVEEVGPYTYRELRNKANIQFGDNGTTISAVSNKAYVFERDQSVGDPKIDLIRTLNIPVLTVIEWSQVHFLREIIEAMLKAYQQKLFVTHTVDELLWGYKDEILSLIHVFRPDISPYFGLFYEKNGTNDGDYVFLTGEDSYLNFTKIVEWNGKTSVYITFSDYESVQGLPAFRYKVPAEILANTSDNAGFCIPEGNCLGSGVLNVSICKNGAPIIMSFPHFYQADERFVSAIEGMHPNQEDHETFVDINPLTGIILKAAKRFQINIYVKKLDDFVETGDIRTMVFPVMYLNESVHIDKETASRLKSMINTTLIITNIPYIIMALGVFFGLVFTWLACKGQGSMDEGTADERAPLIRT

SEQ ID NO: 93191 - protein, 418 aa, Homo sapiens
  MOD_RES (1)..(1): Any amino acid
XLFLLPSPGDEENCKHCVLLHAGLPQANRTAGYIRTMYLGIQSQRRKEHQRRFYWAMMYEYADVNMLRLLETFLESAPQLVLQLYIMLQKNSAETLPCVSSVTSLMSLAWVLASYHKLLRDSRDDKKSMSYRGAIIQVFWRLFTISSRVISFALFASIFQLYFGIFVVVHWCAMAFWIIHGGTDFCMSKWEEILFNMVVGIVYIFCWFNVKEGRTRYRMFAYYTIVLTENAALTFLWYFYRDPETTDSYAVPALCCVFISFVAGIAMMLLYYGVLHPTGPRAKILASSCCAELLWGIPLPPDVEPMAPEIPGYRGTQVTPTRAVTEQQEDLTADTCLPVFQVRPMGPPTPLGRPYLPEGPLIKIDMPRKRYPAWDAHFVDRRLRRTINILQYVTPTAVGIRYRDGPLLYELLQYESSL

SEQ ID NO: 93192 - protein, 26 aa, Homo sapiens
MYTSEEKCNQRTQKRKIYNVCPRKGK

SEQ ID NO: 93193 - protein, 2077 aa, Homo sapiens
MPTLVVGTPPTCLGDTPQPCHKNSQRQGPFSHGAPGRAADWKAVAKPRLCAPAAEDDVAALRWPGPSQQPDPPWAAPHVVGSDDLKEPGPWGKACSLPMWSTGPEARDGDSSVSSGRLSCSSGGHDVCVSWKERPPQVLGPQQRPRKSDARLEQLRDKIRAQAWQQGSCASLGTSAPSSASRLHKASTLMLRRKGQEAKNPPPAPECSGFSILSAAERRVEAKASHGQGRELSRVSQHQVPVLREKPKRVKSSSCKREKTPKLPSPRRAAKDKHKDEDSELVGVYAWRKGQALVRSLLGPPPVLRRHHSKDPSRDPALTVDLGDSEKVIAAKCSPVCAQLPDATSAYSDQQVSGNTPSLASFDQPATIQTAMAILQDLRQQIQAGLELAQARKGGQELGPSKRRLQDVAGRGCCRDPNAQSSFSKSPWAMTERKHSSLERARSVHTWEPWSSSTARESCPQRAWGAQGQDRSFQRPESPHERLGHFSQRPWSALAGQACSPQRAWGAQRQGPSSQRPGSPPEKRSPFPQQPWSAVATQPCPRRAWTACETWEDPGPRLRNPLERPSPPAQRPWSSSGVQRAGPQGKGRGIGSPVSAAKHALPRPTGSFPQNPLGKEKDTLRPCPRSRGLLGPSHSSESLREFMRQKAQARRRQALEEKASALRTRELRSRRLQEVYRQQREAVLGRAVPVVSRTTPGIVTFVPSSAQSGGLEASGSLESPVLEWSKVTSGMVLGGQEAPGSFCLCLNRAWNHAETLDPPGMGGPQDGRDAPVLLSASPSLGSLELQDLTTRYLPRGMCIYLDPKEAEHLGTSSSLHLRHKQAQLQALETTAKVLKQRVDSLTAKLQGAEALDTVRDPAVGLLRSCPHSLPAAPTLATPTLATPACPGALGPNWGRGAPGEWVSMQPQPLLPPTYFLDGETLSWGPSWEQQQSVSPRAHCESKPRGFPEEGHVDVKPDKRLQRGVAPFQALSPSAGSSYAGPATLHPIWGSLGLEETPSVGGADSVAPCTPRSCGQQEDPCVRCLPNTQQKTSSFLDSLKLDQQKQALALLRQRAELEARETQQTLDGLLFRRRLEQLMERHSTQARPEEALKLEQPPMCKDREPTTASQSTGMATPRSHPPLDTDAATSSQGPEDRPENVVAKPASAEVEGPDGALSQLPLAKFFPPDNPTHQMLERSLREEELRAQHQAALLRLREMALQEKTLAELAWLEHRRGCLDSKRDRAVLAALVEKQQQALSRLEKEQREIQYLRHTQLFRHRDRKLLLQHQRDVVSMPGPVDILPIPGPTDVVPAHELQAQAKLQQGSSPKVKAAWEGGSETSQQPEASLCPLTPCRPSSSTSHRPQSSPASSKATRPPTEQQDVTPPQTTSDADGHQQPPRPAWGEDTHDPQGPLVESGSHVSQEPGEQPRAPLLGLQHVSPPDGQRLGPAFPAEEAEGRLPTAQCRSREVKEPPPGDPQTKPGPSLAGKPRAPTDSHVGSFRERSRRSCGREGPCGPQEASQVAEDSMSEEGLESGLDFAESPVEESQETESWRSGEQRTEACQQEVPGISSTWLEAAQAAASPAAPVVPEEAAPPILHQGSPLLPTTSSCGPGSESASGTCWGPSEEATVSSHTSPAGSVSSLSCPSLWEFQKAAATLIQLSGSSSSLPSLEAEDSPDEGFSWPGELSARHSSGEAGLPLSWRSNQGEPRPGSAPGGGGWVTWQRPQGRRAGPLRGSSLDTAMAEVSAPEQSPKAGWLLPFPDIPSPRSGSELSEASSKVWEEDCEEDLPEPCTGAKPASGSSLPAGGSLGLGSGVEPQVAPPSPRSGEGREASGTSESLKGGVRSGMEPQVALPSPWPGEGLEASGTSESLMGVSDTGEALQAPPEAAGVVFPLQISSAGDSDSLLVFPSWTSLSEGADFGKGGETSGYQEGTRDADPSPSTKSKLPYLMPEPETPVTLQAPPGDPGRLAPPVAESRAPGPGGNGAPTVLEEACPLLAGDVLTEILSPVDELLSYGSADLPSSIHREAPLPPPPPTPQAQSDGEDTNPCSDAFPSPPSGPLEEDTAITTQDLSSLSEESLPEGLFPGPQGSAGTQ

SEQ ID NO: 93194 - protein, 128 aa, Homo sapiens
MLEAEGSMKQALGELQARHPQLEAVLMGTRRTDPYSCSLCPFSPTDPGWPAFMRINPLLDWTYRDIWDFLRQLFVPYCILYDRGYTSLGSRENTVRNPALKCLSPGGHPTYRPAYLLENEEEERNSRT

SEQ ID NO: 93195 - protein, 256 aa, Homo sapiens
MSNLAQFDSDFYQSNFTIDNQEQSGNDSNAYGNLYGSRKQQAGEQPQPASFVPSEMLMSSGYAGQFFQPASNSDYYSQSPYIDSFDEEPPLLEELGIHFDHIWQKTLTVLNPMKPVDGSIMNETDLTGPILFCVALGATLLLAGKVQFGYVYGMSAIGCLVIHALLNLMSSSGVSYGCVASVLGYCLLPMVILSGCAMFFSLQGIFGIMSSLVIIGWCSLSASKIFIAALHMEGQQLLVAYPCAILYGLFALLTIF

SEQ ID NO: 93196 - protein, 152 aa, Homo sapiens
  MOD_RES (1)..(1): Any amino acid
XPREGSKEKAGARSKRALEEEEGGTEVLSKNKQKKQLRNPHKTFDPSLKPKYAKCDQCGNPKGNRCVFSLCRGCCKKRASKETADCPGLLLEPGHVLLKKMPFTQGISCYLMWKDTPMSPFGPLWGPGNAAVGSRPQAGPALSSARVCKSEQ

SEQ ID NO: 93197 - protein, 151 aa, Homo sapiens
MATLLRPVLRRLCGLPGLQRPAAEMPLRARSDGAGPLYSHHLPTSPLQKGLLAAGSAAMALYNPYRHDMVAVLGETTGHRTLKVLRDQMRRDPEGAQILQERPRISTSTLDLGKLQSLPEGSLGREYLRFLDVNVSFQLLCIWQSPDRTEE

SEQ ID NO: 93198 - protein, 1235 aa, Homo sapiens
MANDSPAKSLVDIDLSSLRDPAGIFELVEVVGNGTYGQVYKGRHVKTGQLAAIKVMDVTEDEEEEIKLEINMLKKYSHHRNIATYYGAFIKKSPPGHDDQLWLVMEFCGAGSITDLVKNTKGNTLKEDWIAYISREILRGLAHLHIHHVIHRDIKGQNVLLTENAEVKLVDFGVSAQLDRTVGRRNTFIGTPYWMAPEVIACDENPDATYDYRSDLWSCGITAIEMAEGAPPLCDMHPMRALFLIPRNPPPRLKSKKWSKKFFSFIEGCLVKNYMQRPSTEQLLKHPFIRDQPNERQVRIQLKDHIDRTRKKRGEKDETEYEYSGSEEEEEEVPEQEGEPSSIVNVPGESTLRRDFLRLQQENKERSEALRRQQLLQEQQLREQEEYKRQLLAERQKRIEQQKEQRRRLEEQQRREREARRQQEREQRRREQEEKRRLEELERRRKEEEERRRAEEEKRRVEREQEYIRRQLEEEQRHLEVLQQQLLQEQAMLLHDHRRPHPQHSQQPPPPQQERSKPSFHAPEPKAHYEPADRAREVQWSHLASLKNNVSPVSRSHSFSDPSPKFAHHHLRSQDPCPPSRSEVLSQSSDSKSEAPDPTQKAWSRSDSDEVPPRVPVRTTSRSPVLSRRDSPLQGSGQQNSQAGQRNSTSSIEPRLLWERVEKLVPRPGSGSSSGSSNSGSQPGSHPGSQSGSGERFRVRSSSKSEGSPSQRLENAVKKPEDKKEVFRPLKPAVRIDLTALAKELRAVEDVRPPHKVTDYSSSSEESGTTDEEDDDVEQEGADESTSGPEDTRAASSLNLSNGETESVKTMIVHDDVESEPAMTPSKEGTLIVRQTQSASSTLQKHKSSSSFTPFIDPRLLQISPSSGTTVTSVVGFSCDGMRPEAIRQDPTRKGSVVNVNPTNTRPQSDTPEIRKYKKRFNSEILCAALWGVNLLVGTESGLMLLDRSGQGKVYPLINRRRFQQMDVLEGLNVLVTISGKKDKLRVYYLSWLRNKILHNDPEVEKKQGWTTVGDLEGCVHYKVVKYERIKFLVIALKSSVEVYAWAPKPYHKFMAFKSFGELVHKPLLVDLTVEEGQRLKVIYGSCAGFHAVDVDSGSVYDIYLPTHIQCSIKPHAIIILPNTDGMELLVCYEDEGVYVNTYGRITKDVVLQWGEMPTSVAYIRSNQTMGWGEKAIEIRSVETGHLDGVFMHKRAQRLKFLCERNDKVFFASVRSGGSSQVYFMTLGRTSLLSW

SEQ ID NO: 93199 - protein, 86 aa, Homo sapiens
MMSDASDMLAAALEQMDGIIAGSKALEYSNGIFDCQSPTSPFMGSLRALHLVEDLRGLLEMMETDEKEGLRCQIPDSTAETLVEWL

SEQ ID NO: 93200 - protein, 99 aa, Homo sapiens
MSTQRLRNEDYHDYSSTDVSPEESPSEGLNNLSSPGSYQRFGQSNSTTWFQTLIHLLKGNIGTGLLGLPLAVKNAGIVMGPISLLIIGIVAVHCMGILV

SEQ ID NO: 93201 - protein, 249 aa, Homo sapiens
MRVDSSADPTMSQEQGPGSSTPPSSPTLLDALLQNLYDFGGTEGETEQKKIIKKRENKKRDVMASAALAAEPSPLPGSLIRGQRKSASSFFKELREERHCAPSGTPTGPEILAAAVPPSSLKNNREQVEVVEFHSNKKRKLTPDHNKNTKQANPSVLERDVDTQEFNLEKARLEVHRFGITGYGKGKERILEQERAIMLGAKPPKKSYVNYKVLQEQIKEKKAAKEEEKRLAQETDIFKKKKRKGQEDR

SEQ ID NO: 93202 - protein, 239 aa, Homo sapiens
MPESAWKFLFYLGSWSYSAYLLFGTDYPFFHDPPSVFYDWTPGMAVPRDIAAAYLLQGSFYGHSIYATLYMDTWRKDSVVMLLHHVVTLILIVSSYAFRYHNVGILVLFLHDISDVQLEFTKLNIYFKSRGGSYHRLHALAADLGCLSFGFSWFWFRLYWFPLKVLYATSHCSLRTVPDIPFYFFFNALLLLLTLMNLYWFLYIVAFAAKVLTGQVHELKDLREYDTAEAQSLKPSKAE

SEQ ID NO: 93203 - protein, 424 aa, Homo sapiens
MHGRLKVKTSEEQAEAKRLEREQKLKLYQSATQAVFQKRQAGELDESVLELTSQILGANPDFATLWNCRREVLQQLETQKSPEELAALVKAELGFLESCLRVNPKSYGTWHHRCWLLGRLPEPNWTRELELCARFLEVDERNFHCWDYRRFVATQAAVPPAEELAFTDSLITRNFSNYSSWHYRSCLLPQLHPQPDSGPQGRLPEDVLLKELELVQNAFFTDPNDQSAWFYHRWLLGRADPQDALRCLHVSRDEACLTVSFSRPLLVGSRMEILLLMVDDSPLIVEWRTPDGRNRPSHVWLCDLPAASLNDQLPQHTFRVIWTAGDVQKECVLLKGRQEGWCRDSTTDEQLFRCELSVEKSTVLQSELESCKELQELEPENKWCLLTIILLMRALDPLLYEKETLQYFQTLKASRGPHAGNVSG

SEQ ID NO: 93204 - protein, 810 aa, Homo sapiens
MKSARAKTPRKPTVKKGSQTNLKDPVGVYCRVRPLGFPDQECCIEVINNTTVQLHTPEGYRLNRNGDYKETQYSFKQVFGTHTTQKELFDVVANPLVNDLIHGKNGLLFTYGVTGSGKTHTMTGSPGEGGLLPRCLDMIFNSIGSFQAKRYVFKSNDRNSMDIQCEVDALLERQKREAMPNPKTSSSKRQVDPEFADMITVQEFCKAEEVDEDSVYGVFVSYIEIYNNYIYDLLEEVPFDPIKPKWNSCSTPMRNTDFVPPQSKLLREDKNHNMYVAGCTEVEVKSTEEAFEVFWRGQKKRRIANTHLNRESSRSHSVFNIKLVQAPLDADGDNVLQEKEQITISQLSLVDLAGSERTNRTRAEGNRLREAGNINQSLMTLRTCMDVLRENQMYGTNKMVPYRDSKLTHLFKNYFDGEGKVRMIVCVNPKAEDYEENLQVMRFAEVTQEVEVARPVDKAICGLTPGRRYRNQPRGPVGNEPLVTDVVLQSFPPLPSCEILDINDEQTLPRLIEALEKRHNLRQMMIDEFNKQSNAFKALLQEFDNAVLSKENHMQGKLNEKEKMISGQKLEIERLEKKNKTLEYKIEILEKTTTIYEEDKRNLQQELETQNQKLQRQFSDKRRLEARLQGMVTETTMKWEKECLLFQPDQNAPPIRLRHRRSRSAGDRWVDHKPASNMQTETVMQPHVPHAITVSVANEKALAKCEKYMLTHQELASDGEIETKLIKGDIYKTRGGGQSVQFTDIETLKQESPNGSRKRRSSTVAPAQPDGAESEWTDVETRCSVAVEMRAGSQLGPGYQHHAQPKRKKP

SEQ ID NO: 93205 - protein, 110 aa, Homo sapiens
MDWDKVLVNIGNHFDLASSIFVAPRKGIYSFSFHVVKVYNRQTIQVSLMQNGYPVISAFAGDQDVTREAASNGVLLLMEREDKVHLKLERGNLMGGWKYSTFSGFLVFPL

SEQ ID NO: 93206 - protein, 64 aa, Homo sapiens
MDFTLGDWEQLGLEQGDTFWDTALDNCQDLFLLGFSQESSQPAVSPSSAHQCHTVRQQQGPDSS

SEQ ID NO: 93207 - protein, 185 aa, Homo sapiens
MAALTAEHFAALQSLLKASSKDVVRQLCQESFSSSALGLKKLLDVTCSSLSVTQEEAEELLQALHRLTRLVAFRDLSSAEAILALFPENFHQNLKNLLTKIILEHVLSATPGRSGLESGYQNLLRQHQPHGRPHLPAPDEDPRRSQPMRRQTLHLSCHRGAEQRNTGHHVRWPGPHPRPTLCRGQ

SEQ ID NO: 93208 - protein, 84 aa, Homo sapiens
MSSWSRQRPKRVTLFAARCLKKRRLRSPDPVCGSRTSRTWCSVWWLCPWSGPRAPRSAMFTVQPRTGTRCWAPPAAWLRTACAA

SEQ ID NO: 93209 - protein, 262 aa, Homo sapiens
  MOD_RES (1)..(1): Any amino acid
XKTIELSDDDFLGECECTLGQIVSSKKLTRPLVMKTGRPAGKGSITISAEEIKDNRVVLFEMEARKLDNKVVKNNLNPVWRPFKISLNSLCYGDMDKTIKVECYDYDNDGSHDLIGTFQTTMTKLKEASRSSPVEFECINEKKRQKKKSYKNSGVISVKQCEITVECTFLDYIMGGCQLNFTVGVDFTGSNGDPRSPDSLHYISPNGVNEYLTALWSVGLVIQDYDADKMFPAFGFGAQIPPQWQVSHEFPMNFNPSNPYCN

SEQ ID NO: 93210 - protein, 61 aa, Homo sapiens
MLLLEVISGERLPKPDRGKMRFHKIANVNKALDYIASKGVKLVSIGAEEIVDGNVKMTLGM

SEQ ID NO: 93211 - protein, 101 aa, Homo sapiens
MAAARLLPVPAGPQAKLTFEDVAVLLSQDEWDRLCPAQRGLYRNVMMETYGNVVSLGLPGSKPDIISQLERGEDPWVLDRKGAKKSQGLWSDYSDPVPQKP

SEQ ID NO: 93212 - protein, 157 aa, Homo sapiens
MWLKVGGLLRGTGGQLGQTVGWPCGALGPGPHRWGPCGGSWAQKFYQDGPGRGLGEEDIRRAREARPRKTPRPQLSDRSRERKVPASRISRLANFGGLAVGLGLGVLAEMAKKSMPGGRLQSEGGSGLDSSPFLSEANAERIVQTLCTVRGAALKVG

SEQ ID NO: 93213 - protein, 114 aa, Homo sapiens
MKDCEIKQPVFGANYIKGTVKAEAGGGWEGSASYKLTFTAGGAIEFGQRMLQVASQASRGEVPSGAYGYSYMPSGAYVYPPPVANGMYPCPPGYPYPPPPPGPPMMDGAMGYVQ

SEQ ID NO: 93214 - protein, 335 aa, Homo sapiens
MPNPRPGKPSAPSLALGPSPGASPSWRAAPKASDLLGARGPGGTFQGRDLRGGAHASSSSLNPMPPSQLQLPTLPLVMVAPSGARLGPLPHLQALLQDRPHFMHQLSTVDAHARTPVLQVHPLESPAMISLTPPTTATGVFSLKARPGLPPGINVASLEWVSREPALLCTFPNPSAPRKDSTLSAVPQSSYPLLANGVCKWPGCEKVFEEPEDFLKHCQADHLLDEKGRAQCLLQREMVQSLEQQLVLEKEKLSAMQAHLAGKMALTKASSVASSDKGSCCIVAAGSQGPVVPAWSGPREAPDSLFAVRRHLWGSHGNSTFPGHPGGSREAADTQ

SEQ ID NO: 93215 - protein, 12 aa, Homo sapiens
MQDYNKDDMSYR

SEQ ID NO: 93216 - protein, 220 aa, Homo sapiens
MSLSENSVFAYESSVHSTNVLLSLNDQRKKDVLCDVTIFVEGQRFRAHRSVLAACSSYFHSRIVGQADGELNITLPEEVTVKGFEPLIQFAYTAKLILSKENVDEVCKCVEFLSVHNIEESCFQFLKFKFLDSTADQQECPRKKCFSSHCQKTDLKLSLLDQRDLETDEVEEFLENKNVQTPQCKLRRYQGNAKASPPLQDSASQTYESMCLEKDAALAL

SEQ ID NO: 93217 - protein, 147 aa, Homo sapiens
MAIENLQKSEGITSHKSGLLNSHLQWLLDNYETAEGVSLPRSSLYNHYLRHCQEHKLDPVNAASFGKLIRSVFMGLRTRRLGTRGNSKYHYYGIRLKPDSPLNRLQEDTQYMAMRQQPMHQKPRYRPAQKTDSLGDSGSHSGLHSTP

SEQ ID NO: 93218 - protein, 5537 aa, Homo sapiens
MSSGNASYRCSMSSSADFSDEDDFSQKSGSASPAPGDTLPWNLPKHERSKRKIQGGSVLDPAERAVLRIADERDKVQKKTFTKWINQHLMKVRKHVNDLYEDLRDGHNLISLLEVLSGDTLPREKGRMRFHRLQNVQIALDYLKRRQVKLVNIRNDDITDGNPKLTLGLIWTIILHFQISDIHVTGESEDMSAKERLLLWTQQATEGYAGIRCENFTTCWRDGKLFNAIIHKYRPDLIDMNTVAVQSNLANLEHAFYVAEKIGVIRLLDPEDVDVSSPDEKSVITYVSSLYDAFPKVPEGGEGIGANDVEVKWIEYQNMVNYLIQWIRHHVTTMSERTFPNNPVELKALYNQYLQFKETEIPPKETEKSKIKRLYKLLEIWIEFGRIKLLQGYHPNDIEKEWGKLIIAMLEREKALRPEVERLEMLQQIANRVQRDSVICEDKLILAGNALQSDSKRLESGVQFQNEAEIAGYILECENLLRQHVIDVQILIDGKYYQADQLVQRVAKLRDEIMALRNECSSVYSKGRILTTEQTKLMISGITQSLNSGFAQTLHPSLTSGLTQSLTPSLTSSSMTSGLSSGMTSRLTPSVTPAYTPGFPSGLVPNFSSGVEPNSLQTLKLMQIRKPLLKSSLLDQNLTEEEINMKFVQDLLNWVDEMQVQLDRTEWGSDLPSVESHLENHKNVHRAIEEFESSLKEAKISEIQMTAPLKLTYAEKLHRLESQYAKLLNTSRNQERHLDTLHNFVSRATNELIWLNEKEEEEVAYDWSERNTNIARKKDYHAELMRELDQKEENIKSVQEIAEQLLLENHPARLTIEAYRAAMQTQWSWILQLCQCVEQHIKENTAYFEFFNDAKEATDYLRNLKDAIQRKYSCDRSSSIHKLEDLVQESMEEKEELLQYKSTIANLMGKAKTIIQLKPRNSDCPLKTSIPIKAICDYRQIEITIYKDDECVLANNSHRAKWKVISPTGNEAMVPSVCFTVPPPNKEAVDLANRIEQQYQNVLTLWHESHINMKSVVSWHYLINEIDRIRASNVASIKTMLPGEHQQVLSNLQSRFEDFLEDSQESQVFSGSDITQLEKEVNVCKQYYQELLKSAEREEQEESVYNLYISEVRNIRLRLENCEDRLIRQIRTPLERDDLHESVFRITEQEKLKKELERLKDDLGTITNKCEEFFSQAAASSSVPTLRSELNVVLQNMNQVYSMSSTYIDKLKTVNLVLKNTQAAEALVKLYETKLCEEEAVIADKNNIENLISTLKQWRSEVDEKRQVFHALEDELQKAKAISDEMFKTYKERDLDFDWHKEKADQLVERWQNVHVQIDNRLRDLEGIGKSLKYYRDTYHPLDDWIQQVETTQRKIQENQPENSKTLATQLNQQKMLVSEIEMKQSKMDECQKYAEQYSATVKDYELQTMTYRAMVDSQQKSPVKRRRMQSSADLIIQEFMDLRTRYTALVTLMTQYIKFAGDSLKRLEEEEKSLEEEKKEHVEKAKELQKWVSNISKTLKDAEKAGKPPFSKQKISSEEISTKKEQLSEALQTIQLFLAKHGDKMTDEERNELEKQVKTLQESYNLLFSESLKQLQESQTSGDVKVEEKIVAERQQEYKEKLQGICDLLTQTENRLIGHQEAFMIGDGTVELKKYQSKQEELQKDMQGSAQALAEVVKNTENFLKENGEKLSQEDKALIEQKLNEAKIKCEQLNLKAEQSKKELDKVVTTAIKEETEKVAAVKQLEESKTKIENLLDWLSNVDKDSERAGTKHKQVIEQNGTHFQEGDGKSAIGEEDEVNGNLLETDVDGQVGTTQENLNQQYQKVKAQHEKIISQHQAVIIATQSAQVLLEKQGQYLSPEEKEKLQKNMKELKVHYETALAESEKKMKLTHSLQEELEKFDADYTEFEHWLQQSEQELENLEAGADDINGLMTKLKRQKSFSEDVISHKGDLRYITISGNRVLEAAKSCSKRDGGKVDTSATHREVQRKLDHATDRFRSLYSKCNVLGNNLKDLVDKYQHYEDASCGLLAGLQACEATASKHLSEPIAVDPKNLQRQLEETKALQGQISSQQVAVEKLKKTAEVLLDARGSLLPAKNDIQKTLDDIVGRYEDLSKSVNERNEKLQITLTRSLSVQDGLDEMLDWMGNVESSLKEQGQVPLNSTALQDIISKNIMLEQDIAGRQSSINAMNEKVKKFMETTDPSTASSLQAKMKDLSARFSEASHKHKETLAKMEELKTKVELFENLSEKLQTFLETKTQALTEVDVPGKDVTELSQYMQESTSEFLEHKKHLEVLHSLLKEISSHGLPSDKALVLEKTNNLSKKFKEMEDTIKEKKEAVTSCQEQLDAFQVLVKSLKSWIKETTKKVPIVQPSFGAEDLGKSLEDTKKLQEKWSLKTPEIQKVNNSGISLCNLISAVTTPAKAIAAVKSGGAVLNGEGTATNTEEFWANKGLTSIKKDMTDISHGYEDLGLLLKDKIAELNTKLSKLQKAQEESSAMMQWLQKMNKTATKWQQTPAPTDTEAVKTQVEQNKSFEAELKQNVNKVQELKDKLTELLEENPDTPEAPRWKQMLTEIDSKWQELNQLTIDRQQKLEESSNNLTQFQTVEAQLKQWLVEKELMVSVLGPLSIDPNMLNTQRQQVQILLQEFATRKPQYEQLTAAGQGILSRPGEDPSLRGIVKEQLAAVTQKWDSLTGQLSDRCDWIDQAIVKSTQYQSLLRSLSDKLSDLDNKLSSSLAVSTHPDAMNQQLETAQKMKQEIQQEKKQIKVAQALCEDLSALVKEEYLKAELSRQLEGILKSFKDVEQKAENHVQHLQSACASSHQFQQMSRDFQAWLDTKKEEQNKSHPISAKLDVLESLIKDHKDFSKTLTAQSHMYEKTIAEGENLLLKTQGSEKAALQLQLNTIKTNWDTFNKQVKERENKLKESLEKALKYKEQVETLWPWIDKCQNNLEEIKFCLDPAEGENSIAKLKSLQKEMDQHFGMVELLNNTANSLLSVCEIDKEVVTDENKSLIQKVDMVTEQLHSKKFCLENMTQKFKEFQEVSKESKRQLQCAKEQLDIHDSLGSQAYSNKYLTMLQTQQKSLQALKHQVDLAKRLAQDLVVEASDSKGTSDVLLQVETIAQEHSTLSQQVDEKCSFLETKLQGIGHFQNTIREMFSQFAEFDDELDSMAPVGRDAETLQKQKETIKAFLKKLEALMASNDNANKTCKMMLATEETSPDLVGIKRDLEALSKQCNKLLDRAQAREEQVEGTIKRLEEFYSKLKEFSILLQKAEEHEESQGPVGMETETINQQLNMFKVFQKEEIEPLQGKQQDVNWLGQGLIQSAAKSTSTQGLEHDLDDVNARWKTLNKKVAQRAAQLQEALLHCGRFQDALESLLSWMVDTEELVANQKPPSAEFKVVKAQIQEQKLLQRLLDDRKSTVEVIKREGEKIATTAEPADKVKILKQLSLLDSRWEALLNKAETRNRQLEGISVVAQQFHETLEPLNEWLTTIEKRLVNCEPIGTQASKLEEQIAQHKALEDDIINHNKHLHQAVSIGQSLKVLSSREDKDMVQSKLDFSQVWYIEIQEKSHSRSELLQQALCNAKIFGEDEVELMNWLNEVHDKLSKLSVQDYSTEGLWKQQSELRVLQEDILLRKQNVDQALLNGLELLKQTTGDEVLIIQDKLEAIKARYKDITKLSTDVAKTLEQALQLARRLHSTHEELCTWLDKVEVELLSYETQVLKGEEASQAQMRPKELKKEAKNNKALLDSLNEVSSALLELVPWRAREGLEKMVAEDNERYRLVSDTITQKVEEIDAAILRSQQFDQAADAELSWITETEKKLMSLGDIRLEQDQTSAQLQVQKTFTMEILRHKDIIDDLVKSGHKIMTACSEEEKQSMKKKLDKVLKNYDTICQINSERYLQLERAQSLVNQFWETYEELWPWLTETQSIISQLPAPALEYETLRQQQEEHRQLRELIAEHKPHIDKMNKTGPQLLELSPGEGFSIQEKYVAADTLYSQIKEDVKKRAVALDEAISQSTQFHDKIDQILESLERIVERLRQPPSISAEVEKIKEQISENKNVSVDMEKLQPLYETLKQRGEEMIARSGGTDKDISAKAVQDKLDQMVFIWENIHTLVEEREAKLLDVMELAEKFWCDHMSLIVTIKDTQDFIRDLEDPGIDPSVVKQQQEAAETIREEIDGLQEELDIVINLGSELIAACGEPDKPIVKKSIDELNSAWDSLNKAWKDRIDKLEEAMQAAVQYQDGLQAVFDWVDIAGGKLASMSPIGTDLETVKQQIEELKQFKSEAYQQQIEMERLNHQAELLLKKVTEESDKHTVQDPLMELKLIWDSLEERIINRQHKLEGALLALGQFQHALDELLAWLTHTEGLLSEQKPVGGDPKAIEIELAKHHVLQNDVLAHQSTVEAVNKAGNDLIESSAGEEASNLQNKLEVLNQRWQNVLEKTEQRKQQLDGALRQAKGFHGEIEDLQQWLTDTERHLLASKPLGGLPETAKEQLNVHMEVCAAFEAKEETYKSLMQKGQQMLARCPKSAETNIDQDINNLKEKWESVETKLNERKTKLEEALNLAMEFHNSLQDFINWLTQAEQTLNVASRPSLILDTVLFQIDEHKVFANEVNSHREQIIELDKTGTHLKYFSQKQDVVLIKNLLISVQSRWEKVVQRLVERGRSLDDARKRAKQFHEAWSKLMEWLEESEKSLDSELEIANDPDKIKTQLAQHKEFQKSLGAKHSVYDTTNRTGRSLKEKTSLADDNLKLDDMLSELRDKWDTICGKSVERQNKLEEALLFSGQFTDALQALIDWLYRVEPQLAEDQPVHGDIDLVMNLIDNHKAFQKELGKRTSSVQALKRSARELIEGSRDDSSWVKVQMQELSTRWETVCALSISKQTRLEAALRQAEEFHSVVHALLEWLAEAEQTLRFHGVLPDDEDALRTLIDQHKEFMKKLEEKRAELNKATTMGDTVLAICHPDSITTIKHWITIIRARFEEVLAWAKQHQQRLASALAGLIAKQELLEALLAWLQWAETTLTDKDKEVIPQEIEEVKALIAEHQTFMEEMTRKQPDVDKVTKTYKRRAADPSSLQSHIPVLDKGRAGRKRFPASSLYPSGSQTQIETKNPRVNLLVSKWQQVWLLALERRRKLNDALDRLEELREFANFDFDIWRKKYMRWMNHKKSRVMDFFRRIDKDQDGKITRQEFIDGILSSKFPTSRLEMSAVADIFDRDGDGYIDYYEFVAALHPNKDAYKPITDADKIEDEVTRQVAKCKCAKRFQVEQIGDNKYRFFLGNQFGDSQQLRLVRILRSTVMVRVGGGWMALDEFLVKNDPCRAKGRTNMELREKFILADGASQGMAAFRPRGRRSRPSSRGASPNRSTSVSSQAAQAASPQVPATTTPKILHPLTRNYGKPWLTNSKMSTPCKAAECSDFPVPSAEGTPIQGSKLRLPGYLSGKGFHSGEDSGLITTAAARVRTQFADSKKTPSRPGSRAGSKAGSRASSRRGSDASDFDISEIQSVCSDVETVPQTHRPTPRAGSRPSTAKPSKIPTPQRKSPASKLDKSSKR

SEQ ID NO: 93219 - protein, 165 aa, Homo sapiens
  MOD_RES (1)..(1): Any amino acid
XGSSAGGAGEQDYEVLLVTSSFMSPSESRSGSNPNRVRMFGPDKLVRAAAEKRWDRVKIVCSQPYSKDSPFGLSFVRFHSPPDKDEAEAPSQKVTVTKLGQFRVKEEDESANSLRPGALFFSRINKTSPANHQPSCRHLFPRDLNCQLQLVPQPQPQSLPEHRGQ

SEQ ID NO: 93220 - protein, 54 aa, Homo sapiens
MAAAVGVRGRYELPPCSGPGWLLSLSALLSVAARGAFATTHWVVTEDGKIQQQL

SEQ ID NO: 93221 - protein, 314 aa, Homo sapiens
MPNVAETERSNDSGNGEHKSERKSPEENLQGAVKSFCTSASGAPLGPKGDGHYPWSCPVTHTREKIYAICSDYAFLNQATSIYKTPNPSRSPCLPDSTSLSAGNNSSRYIGIPTSTSEIIYNEENSLENLSNSLGKLPLAWEIDKSEFDGVTTNSKHKSGNAKKQVSKRKTSDKKGRYQKECPQHSPLEDIKQRKVLDLRRWYCISRPQYKTSCGISSLISCWNFLYSTMGAGNLPPITQEEALHILGFQPPFEDIRFGPFTGNTTLMRWFRQINDHFHVKGCSYVLYKPHGKNKTAGETAGDLSHHRKLNIGS

SEQ ID NO: 93222 - protein, 110 aa, Homo sapiens
  MOD_RES (1)..(1): Any amino acid
XCPSLGGSWACCQLPHAVCCEDRQHCCPAGYTCNVKARSCEKEVVSAQPATFLARSPHVGVKDVECGEGHFCHDNQTCCRDNRQGWACCPYRQPGVPSVCAGRPRAGTPL

SEQ ID NO: 93223 - protein, 58 aa, Homo sapiens
MFKLCSNKMVSQEGSEVELLVSPGARSEHGRYLQDPIVSIDLSEWLRIIEFLLQGLKV

SEQ ID NO: 93224 - protein, 148 aa, Homo sapiens
AGLGEFRIRDLNDEINKLLREKGHWEVRIKELGGPDYGKVGPKMLDHEGKEVPGNRGYKYFGAAKDLPGVRELFEKEPLPPPRKTRAELMKAIDFEYYGYLDEDDGVIVPLEQEYEKKLGRGRQPGERRGRQPAEVHCSRPCSLAARD

SEQ ID NO: 93225 - protein, 68 aa, Homo sapiens
  MOD_RES (1)..(1): Any amino acid
XMIEKKLEPLSQDEDQHADLTQSRRPLTSCTIFLGYTSNLISSGIRETIRYLVQHNMQSSLIRVTGQG

SEQ ID NO: 93226 - protein, 52 aa, Homo sapiens
MAEAATGFLEQLKSCIVWSWTYLWTVWFFIVLFLVYILRVPLKINDNLSTDI

SEQ ID NO: 93227 - protein, 69 aa, Homo sapiens
  MOD_RES (1)..(1): Any amino acid
XGATLARRLSFIGTPYWMAPEVAAVALKGGYNELCDIWSLGITAIELAELQPPLFDVHPLSINWYPSLG

SEQ ID NO: 93228 - protein, 61 aa, Homo sapiens
PGPRAPDPSLCHHNLQPTDDPNWDSYATTMRTAFTPKTGAVPALIRTFSCGHYLTVNKRGH

SEQ ID NO: 93229 - protein, 218 aa, Homo sapiens
MQEIIQNFVRVHVDAPGMEEGAPVFPLGYQYPSLDQLADMIPCVLQYLNFSTIIGVGVGAGAYILARYALNHPDTVEGLVLINIDPNAKGWMDWAAHKLTGLTSSIPEMILGHLFSQEELSGNSELIQKYRNIITHAPNLDNIELYWNSYNNRRDLNFERGGDITLRCPVMLVVGDQAPHEDAVVECNSKLDPTQTSFLKMADSGGQPQLTQPGKLTE

SEQ ID NO: 93230 - protein, 127 aa, Homo sapiens
MWMGLIQLVEGVKRKDQGFLEKEFYHKTNIKMRCEFLACWPAFTVLGEAWRDQVDWSRLLRDTGLVKMSRKPRASSPLSNNHPPTPKRRGSGRHPLNPGPEALSKFPRQPGREKGPIKEVPGTKGSP

SEQ ID NO: 93231 - protein, 547 aa, Homo sapiens
ERLKLERNKEYNQFLRGKEESSEKFRQVEKSTEPKSQRNKKPIGQVKPDLTSQIQTSCENSEGPRKDVLTPSEAYEELLNQRRLEEDRYRQLDDEIELRNRRIIKKANEEVGISNLKHQRFASKAGIPDRRFHRFNEDRVFDRRYHRPDQDPEVSEEMDERFRYESDFDRRLSRVYTNDRMHRNKRGNMPPMEHDGDVIEQSNIRISSAENKRDGVSPYWPGWFPTPDLRQSTHVGLPKCWNYSAPDNETSKSANQDTCSPFAGMLFGGEDRELIQRRKEKYRLELLEQMAEQQRNKRREKDLELRVAASGAQDPEKSPDRLKQFSVAPRHFEEMIPPERPRIAFQTPLPPLSAPSVPPIPSVHPVPSQNEDLRSGLSSALGEMVSPRIAPLPPPPLLPPLATNYRTPYDDAYYFYGSRNTFDPSLAYYGSGMMGVQPAAYVSAPVTHQLAQPVVNTVGQNELKITSDQVINSGLIFEDKPKPSKQSLQSYQEALQQQIREREERRKKEREEKEEYEAKLEAEMRTYNPWGKGGGGAPLRDAKGNLI

SEQ ID NO: 93232 - protein, 527 aa, Homo sapiens
MPGVANSGPSTSSRETANPCSRKKVHFGSIHDAVRAGDVKQLSEIVVRGASINELDVLHKFTPLHWAAHSGSLECLHWLLWHGADITHVTTRGWTASHIAAIRGQDACVQALIMNGANLTAQDDRGCTPLHLAATHGHSFTLQIMLRSGVDPSVTDKREWRPVHYAAFHGRLGCLQLLVKWGCSIEDVDYNGNLPVHLAAMEGHLHCFKFLVSRMSSATQVLKAFNDNGENVLDLAQRFFKQNILQFIQGAEYEGKDLEDQETLAFPGHVAAFKGDLGMLKKLVEDGVININERADNGSTPMHKAAGQGHIECLQWLIKMGADSNITNKAGERPSDVAKRFAHLAAVKLLEELQKYDIDDENEIDENDVKYFIRHGVEGSTDAKDDLCLSDLDKTDARMRAYKKIVELRHLLEIAESNYKHLGGITEEDLKQKKEQLESEKTIKELQGQLEYERLRREKLECQLDEYRAEVDQLRETLEKIQVPNFVAMVGVLFNTFIFLKKYIQEWPRVQALGWGSLDLNPGYSLF

SEQ ID NO: 93233 - protein, 265 aa, Homo sapiens
PDERRFAVFSIAVSSDGREVLGGANDGCLYVFDREQNRRTLQIESHEDDVNAVAFADISSQILFSGGDDAICKVWDRRTMREDDPKPVGALAGHQDGITFIDSKGDARYLISNSKDQTIKLWDIRRFSSREGMEASRQAATQQNWDYRWQQVPKKAWRKLKLPGDSSLMTYRGHGVLHTLIRCRFSPIHSTGQQFIYSGCSTGKVVVYDLLSGHIVKKLTNHKACVRDVSWHPFEEKIVSSSVRLQGLRVLAHVWGLDLGGGSTS

SEQ ID NO: 93234 - protein, 2519 aa, Homo sapiens
MEKLHGHVSAHPDILSLENRCLAMLPDLQPLEKLHQHVSTHSDILSLKNQCLATLPDLKTMEKPHGYVSAHPDILSLENQCLATLSDLKTMEKPHGHVSAHPDILSLENRCLATLSSLKSTVSASPLFQSLQISHMTQADLYRVNNSNCLLSEPPSWRAQHFSKGLDLSTCPIALKSISATETAQEATLGRWFDSEEKKGAETQMPSYSLSLGEEEEVEDLAVKLTSGDSESHPEPTDHVLQEKKMALLSLLCSTLVSEVNMNNTSDPTLAAIFEICRELALLEPEFILKGMEPPFSHRCFPRYIGFLREEQRKFEKAGDTVSEKKNPPRFTLKKLVQRLHIHKPAQHVQALLGYRYPSNLQLFSRSRLPGPWDSSRAGKRMKLSRPETWERELSLRGNKASVWEELIENGKLPFMAMLRNLCNLLRVGISSRHHELILQRLQHAKSVIHSRQFPFRFLNAHDAIDALEAQLRNQALPFPSNITLMRRILTRNEKNRPRRRFLCHLSRQQLRMAMRIPVLYEQLKREKLRVHKARQWKYDGEMLNRYRQALETAVNLSVKHSLPLLPGRTVLVYLTDANADRLCPKSNPQGPPLNYALLLIGMMITRAEQVDVVLCGGDTLKTAVLKAEEGILKTAIKLQAQVQEFDENDGWSLNTFGKYLLSLAGQRVPVDRVILLGQSMDDGMINVAKQLYWQRVNSKCLFVGILLRRVQYLSTDLNPNDVTLSGCTDAILKFIAEHGASHLLEHVGQMDKIFKIPPPPGKTGVQSLRPLEEDTPSPLAPVSQQGWRSIRLFISSTFRDMHGERDLLLRSVLPALQARAAPHRISLHGIDLRWGVTEEETRRNRQLEVCLGEVENAQLFVGILGSRYGYIPPSYNLPDHPHFHWAQQYPSGRSVTEMEVMQFLNRNQRLQPSAQALIYFRDSSFLSSVPDAWKSDFVSESEEAARRISELKSYLSRQKGITCRRYPCEWGGVAAGRPYVGGLEEFGQLVLQDVWNMIQKLYLQPGALLEQPVSIPDDDLVQATFQQLQKPPSPARPRLLQDTVQRLMLPHGRLSLVTGQSGQGKTAFLASLVSALQAPDGAKVASLVFFHFSGARPDQGLALTLLRRLCTYLRGQLKEPGALPSTYRSLVWELQQRLLPKSAESLHPGQTQVLIIDGADRLVDQNGQLISDWIPKKLPRCVHLVLSVSSDAGLGETLEQSQGAHVLALGPLEASARARLVREELALYGKRLEESPFNNQMRLLLVKRESGRPLYLRLVTDHLRLFTLYEQVSERLRTLPATVPLLLQHILSTLEKEHGPDVLPQALTALEVTRSGLTVDQLHGVLSVWRTLPKGTKSWEEAVAAGNSGDPYPMGPFACLVQSLRSLLGEGPLERPGARLCLPDGPLRTAAKRCYGKRPGLEDTAHILIAAQLWKTCDADASGTFRSCPPEALGDLPYHLLQSGNRGLLSKFLTNLHVVAAHLELGLVSRLLEAHALYASSVPKEEQKLPEADVAVFRTFLRQQASILSQYPRLLPQQAANQPLDSPLCHQASLLSRRWHLQHTLRWLNKPRTMKNQQSSSLSLAVSSSPTAVAFSTNGQRAAVGTANGTVYLLDLRTWQEEKSVVSGCDGISACLFLSDDTLFLTAFDGLLELWDLQHGCRVLQTKAHQYQITGCCLSPDCRLLATVCLGGCLKLWDTVRGQLAFQHTYPKSLNCVAFHPEGQVIATGSWAGSISFFQVDGLKVTKDLGAPGASIRTLAFNVPGGVVAVGRLDSMVELWAWREGARLAAFPAHHGFVAAALFLHAGCQLLTAGEDGKVQVWSGSLGRPRGHLGSLSLSPALSVALSPDGDRVAVGYRADGIRIYKISSGSQGAQGQALDVAVSALAWLSPKVLVSGAEDGSLQGWALKECSLQSLWLLSRFQKPVLGLATSQELLASASEDFTVQLWPRQLLTRPHKAEDFPCGTELRGHEGPVSCCSFSTDGGSLATGGRDRSLLCWDVRTPKTPVLIHSFPACHRDWVTGCAWTKDNLLISCSSDGSVGLWDPESGQRLGQFLGHQSAVSAVAAVEEHVVSVSRDGTLKVWDHQGVELTSIPAHSGPISHCAAAMEPRAAGQPGSELLVVTVGLDGATRLWHPLLVCQTHTLLGHSGPVRAAAVSETSGLMLTASEDGSVRLWQVPKEADDTCIPRSSAAVTAVAWAPDGSMAVSGNQAGELILWQEAKAVATAQAPGHIGALIWSSAHTFFVLSADEKISEWQVKLRKGSAPGNLSLHLNRILQEDLGVLTSLDWAPDGHFLILAKADLKLLCMKPGDAPSEIWSSYTENPMILSTHKEYGIFVLQPKDPGVLSFLRQKESGEFEERLNFDINLENPSRTLISITQAKPESESSFLCASSDGILWNLAKCSPEGEWTTGNMWQKKANTPETQTPGTDPSTCRESDASMDSDASMDSEPTPHLKTRQRRKIHSGSVTALHVLPELLVTASKDRDVKLWERPSMQLLGLFRCEGSVSCLEPWLGANSTLQLAVGDVQGNVYFLNWE

SEQ ID NO: 93235 - protein, 41 aa, Homo sapiens
MTPPRLFWVWLLVAGTQAPGIPSDDDLEVPGGSPGFRRERW

SEQ ID NO: 93236 - protein, 313 aa, Homo sapiens
MDGIVPDIAVGTKRGSDELFSTCVTNGPFIMSSNSASAANGNDSKKFKGDSRSAGVPSRVIHIRKLPIDVTEGEVISLGLPFGKVTNLLMLKGKNQAFIEMNTEEAANTMVNYYTSVTPVLRGQPIYIQFSNHKELKTDSSPNQARAQAALQAVNSVQSGNLALAASAAAVDAGMAMAGQSPVLRIIVENLFYPVTLDVLHQIFSKFGTVLKIITFTKNNQFQALLQYADPVSAQHAKLSLDGQNIYNACCTLRIDFSKLTSLNVKYNNDKSRDYTRPDLPSGDSQPSLDQTMAAAFAPPGEREDRQWLEGCL

SEQ ID NO: 93237 - protein, 194 aa, Homo sapiens
MSVKEGAQRKWAALKEKLGPQDSDPTEANLESADPELCIRLLQMPSVVNYSGLRKRLEGSDGGWMVQFLEQSGLDLLLEALARLSGRGVARISDALLQLTCVSCVRAVMNSRQGIEYILSNQGYVRQLSQALDTSNVMVKKQVFELLAALCIYSPEGHVLTLDALDHYKPAVPLQHCHERALRQRQRALRGHPA

SEQ ID NO: 93238 - protein, 93 aa, Homo sapiens
MESMFSSPAEAALQRETGVPGLLTPLPDLDGVLPCSSLTSYWEMLWLWLHDWRRRQGQRCSFWVTQPTAAAAWMCWVLSKLELRLSYILALPA

SEQ ID NO: 93239 - protein, 29 aa, Homo sapiens
MAAAALRAPTQVVAMEQRMKRHLLTRMFL

SEQ ID NO: 93240 - protein, 29 aa, Homo sapiens
MGSAEDAVKEKLLWNVKKEVQWRLASCIS

SEQ ID NO: 93241 - protein, 69 aa, Homo sapiens
MEKSSSCESLGSQPAAARPPSVDSLSSASTSHSENSVHTKSASVVSSDSISTSADNFSPDLRRESRSIP

SEQ ID NO: 93242 - protein, 217 aa, Homo sapiens
MSVGFIGAGQLAFALAKGFTAAGVLAAHKIMASSPDMDLATVSALRKMGVKLTPHNKETVQHSDVLFLAVKPHIIPFILDEIGADIEDRHIVVSCAAGVTISSIEKKLSAFRPAPRVIRCMTNTPVVVREGATVYATGTHAQVEDGRLMEQLLSSVGFCTEVEEDLIDAVTGLSGSGPAYAFTALDALADGGVKMGLPRRLAVRLGAQALLGAAVHG

SEQ ID NO: 93243 - protein, 398 aa, Homo sapiens
  MOD_RES (1)..(1): Any amino acid
XMSPTVIILACLGFFLDQSVWAHVGGQDKPFCSAWPSAVVPQGGHVTLRCHCRRGFNIFTLYKKDGVPVPELYNRIFWNSFLISPVTPAHAGTYRCRGFHPHSPTEWSAPSNPLVIMVTGLYEKPSLTARPGPTVRAGENVTLSCSSQSSFDIYHLSREGEAHELRLPAVPSINGTFQADFPLGPATHGETYRCFGSFHGSPYEWSDPSDPLPVSVTGNPSSSWPSPTEPSFKTGIARHLHAVIRYSVAIILFTILPFFLLHRWCSKKKVSLTKQRPENSGPCAEAGWEHADAAVMNQEPAGHRTVNREDSDEQDPQEVTYAQLDHCIFTQRKITGPSQRSKRPSTDTSVCIELPNAEPRALSPAHEHHSQALMGSSRETTALSQTQLASSNVPAAGI

SEQ ID NO: 93244 - protein, 280 aa, Homo sapiens
  MOD_RES (1)..(1): Any amino acid
XNNFVIRRNPADPQRIPSNPSHRIQCAAGYEQSEHNVCQDIDECTAGTHNCRADQVCINLRGSFACQCPPGYQKRGEQCVDIDECRTSSYLCQYQCVNEPGKFSCMCPQGYQVVRSRTCQDINECETTNECREDEMCWNYHGGFRCYPRNPCQDPYILTPENRCVCPVSNAMCRELPQSIVYKYMSIRSDRSVPSDIFQIQATTIYANTINTFRIKSGNENGEFYLRQTSPVSAMLVLVKSLSGPREHIVDLEMLTVSSIGTFRTSSVLRLTIIVGPFSF

SEQ ID NO: 93245 - protein, 81 aa, Homo sapiens [sequence omitted]

SEQ ID NO: 93246 - protein, 171 aa, Homo sapiens
MAAARLLPVPAGPQAKLTFEDVAVLLSQDEWDRLCPAQRGLYRNVMMETYGNVVSLGLPGSKPDIISQLERGEDPWVLDRKGAKKSQGLWSDYSECETKGESQNTDLSPKPLISEQTVILGKTPLGRIDQENNETKQSFCLSPNSVDHREVQVLSQSMPLTPHQAVPSGER

SEQ ID NO: 93247 - protein, 149 aa, Homo sapiens
MLRYPYFCRMYKECLSCWLESGIPNLGVWPNRIHTTAEKYREYEAREQTDQTQAQELHRSQDRDFETMAKLHIPVMVDEVVHCLSPQKGQNSVRLHGLFPMCSSFCTCYQNFILQQPCFCCHLKSVPNFSSCNSLPMLLLGYLILHRSF

SEQ ID NO: 93248 - protein, 385 aa, Homo sapiens
MAAEPNKTEIQTLFKRLRAVPTNKACFDCGAKNPSWASITYGVFLCIDCSGVHRSLGVHLSFIRSTELDSNWNWFQLRCMQVGGNANALGAKKGLGAQKVSSQSFSEIERQAQVAEKLREQQAADAKKQAEESMVASMRLAYQELQIDRKKEEKKLQNLEGKKREQAERLGMGLVSRSSVSHSVLSEMQVIEQETPVSAKSSRSQLDLFDDVGTFASGPPKYKDNPFSLGESFGSRWDTDAAWGMDRVEEKEPEVTISSIRPISERATNRREVESRSSGLESSEARQKFAGAKAISSDMFFGREVDAEYEARSRLQQLSGSSAISSSDLFGDMDGAHGAGSVSLGNVLPTADIAQFKQGVKSVAGKMAVLANGVMNSLQDRYGSY

SEQ ID NO: 93249 - protein, 217 aa, Homo sapiens
MSLNNSSNVFLDSVPSNTNRFQVSVINENHESSAAADDNTDPPHYEETSFGDEAQKRLRISFRPGNQECYDNFLQSGETAKTDASFHAYDSHTNTYYLQTFGHNTMDAVPKIEYYRNTGSISGPKVNRPSLLEIHEQLAKNVAVTPSSADRVANGDGIPGDEQAENKEDDQAGVVKFGWVKGVLVRCMLNIWGVMLFIRLSWIVGEAGIEYPSWHDW

SEQ ID NO: 93250 - protein, 116 aa, Homo sapiens
MGRMHAPGKGLSQSALPYRRSVPTWLKLTSDDVKEQIYKLAKKGLTPSQIVLLLSPSLECSGAISAHCNLHLLDSSDSPASASRIGVILRDSHGVAQVRFVTGNKILRILKSKGLA

SEQ ID NO: 93251 - protein, 262 aa, Homo sapiens
MAPWLQLLSLLGLLPGAVAAPAQPRAASFQAWGPPSPELLAPTRFALEMFNRGRAAGTRAVLGLVRGRVRRAGQGSLYSLEATLEEPPCNDPMVCRLPVSKKTLLCSFQVLDELGRHVLLRKDCGPVDTKVPGAGEPKSAFTQGSAMISSLSQNHPDNRNETFSSVISLLNEDPLSQDLPVKMASIFKNFVITYNRTYESKEEARWRLSVFVNNMVRAQKIQALDRGTAQYGVTKFSDLTEHSSSPCPAHLCPQRRSSALST

SEQ ID NO: 93252 - protein, 184 aa, Homo sapiens [sequence omitted]

SEQ ID NO: 93253 - protein, 341 aa, Homo sapiens
  MOD_RES (1)..(1): Any amino acid
XDTLLTTMLRNGAPLTRLPSDKLKAVIPPFLPPSSFELWSSDRSRTRHNGKADPMKTALPQRASRGHPVGGGGTDTTPVRPVKFPSLPRSPASSANSGNFNHSPHSSGGSSGVGVSRHGGELLNRSGGSIDNVLSQIAAQRKKAAGLLEQKPSHRSSPVGPAPGSSPSELPASPAGGSAPVGKQKLETSKRPPSGTSTTSKSTSPTLTPSPSPKGHTAESSVSSSSSHRQSKSSGGSSSGTITDEDELTGILKKLSLEKYQPIFEEQEVDMEAFLTLTDGDLKELGIKTDGSRQQILAAISELNAGKGRERQILQETIHNFHSSFESSASNTRAPGNSPCA

SEQ ID NO: 93254 - protein, 122 aa, Homo sapiens
MAEYDLTTRIAHFLDRHLVFPLLEFLSVKEIYNEKELLQGKLDLLSDTNMVDFAMDVYKNLYSDDIPHALREKRTTVVAQLKQLQAETEPIVKMFEDPETTRQMQSTRDGRMLFDYLADKHV

SEQ ID NO: 93255 - protein, 199 aa, Homo sapiens
MEDPREIQTDSWRKRGESEEPSSPQSLCHLVAPGHERSGCETPVSVDSIPLEWDHTGDVGGSSSHEEDEEGPYYSALSGKSISDGHSWHVPDSPSCPEHHYKQMEGDRNVPPVPPASSTPYKPPYGKLLLPPGTDGGKEGPRVLNGNPQQEDGGLAGITEQQSGAFDRWEMIQAQELHNKLKIKQNLQQLNSDISAITT

SEQ ID NO: 93256 - protein, 1381 aa, Homo sapiens
MGRHVATSCHVAWLLVLISGCWGQVNRLPFFTNHFFDTYLLISEDTPVGSSVTQLLAQDMDNDPLVFGVSGEEASRFFAVEPDTGVVWLRQPLDRETKSEFTVEFSVSDHQGVITRKVNIQVGDVNDNAPTFHNQPYSVRIPENTPVGTPIFIVNATDPDLGAGGSVLYSFQPPSQFFAIDSARGIVTVIRELDYETTQAYQLTVNATDQDKTRPLSTLANLAIIITDVQDMDPIFINLPYSTNIYEHSPPGTTVRIITAIDQDKGRPRGIGYTIVSGNTNSIFALDYISGVLTLNGLLDRENPLYSHGFILTVKGTELNDDRTPSDATVTTTFNILVIDINDNAPEFNSSEYSVAITELAQVGFALPLFIQVVDKDENLGLNSMFEVYLVGNNSHHFIISPTSVQGKADIRIRVAIPLDYETVDRYDFDLFANESVPDHVGYAKVKITLINENDNRPIFSQPLYNISLYENVTVGTSVLTVLATDNDAGTFGEVSYFFSDDPDRFSLDKDTGLIMLIARLDYELIQRFTLTIIARDGGGEETTGRVRINVLDVNDNVPTFQKDAYVGALRENEPSVTQLVRLRATDEDSPPNNQITYSIVSASAFGSYFDISLYEGYGVISVSRPLDYEQISNGLIYLTVMAMDAGNPPLNSTVPVTIEVFDENDNPPTFSKPAYFVSVVENIMAGATVLFLNATDLDRSREYGQESIIYSLEGSTQFRINARSGEITTTSLLDRETKSEYILIVRAVDGGVGHNQKTGIATVNITLLDINDNHPTWKDAPYYINLVEMTPPDSDVTTVVAVDPDLGENGTLVYSIQPPNKFYSLNSTTGKIRTTHAMLDRENPDPHEAELMRKIVVSVTDCGRPPLKATSSATVFVNLLDLNDNDPTFQNLPFVAEVLEGIPAGVSIYQVVAIDLDEGLNGLVSYRMPVGMPRMDFLINSSSGVVVTTTELDRERIAEYQLRVVASDAGTPTKSSTSTLTIHVLDVNDETPTFFPAVYNVSVSEDVPREFRVVWLNCTDNDVGLNAELSYFITGGNVDGKFSVGYRDAVVRTVVGLDRETTAAYMLILEAIDNGPVGKRHTGTATVFVTVLDVNDNRPIFLQSSYEASVPEDIPEGHSILQLKATDADEGEFGRVWYRILHGNHGNNFRIHVSNGLLMRGPRPLDRERNSSHVLIVEAYNHDLGPMRSSVRVIVYVEDINDEAPVFTQQQYSRLGLRETAGIGTSVIVVQATDRDSGDGGLVNYRILSGAEGKFEIDESTGLIITVNYLDYETKTSYMMNVSATDQAPPFNQGFCSVYITLLNELDEAVQFSNASYEAAILENLALGTEIVRVQAYSIDNLNQITYRFNAYTSTQAKALFKIDAITVRGWGQGAPFLPI

SEQ ID NO: 93257 - protein, 97 aa, Homo sapiens
MNTLFNTTFETEEASHHEACVRLRPQTYDLQESNVQLKLTIVDAVGFGDQINKDESYRPIVDYIDAQFENYLQEELKIRRSLFDYHDTRIHVCLYFI

SEQ ID NO: 93258 - protein, 89 aa, Homo sapiens
MASHVECRPLGVFECELCTLTAPYSYVGQKPPNTQSMVLLEESYVMKDPFTSDKDRFLVLGSCCSLCSRLVCVGPMFLEGSPGEGTVLS

SEQ ID NO: 93259 - protein, 100 aa, Homo sapiens
  MOD_RES (1)..(1): Any amino acid
XDSGKVTTVVATLGQGPERSQEVAYTDIKVIGNGSFGVVYQARLAETRELVAIKKVLQDKRFKKDELYLNLVLEYVPETVYRVARHFTKAKLTIPILYVK

SEQ ID NO: 93260 - protein, 427 aa, Homo sapiens
MLLMVVSMACVGFFLVQRAGPHVGGQDKPFLSAWPSAVVPRGGHVTLRCHYRHRFNNFMLYKEDRIHVPIFHGRLFQESFNMSPVTTAHAGNYTCRGSHPHSPTGWSAPSNPVVIMVTGNHRKPSLLAHPGPLVKSGERVILQCWSDIMFEHFFLHKEGISKDPSSLVGQIHDGVSKANFSIGPMMLALAGTYRCYGSVTHTPYQLSAPSDPLDIVVTGPYEKPSLSAQPGPKVQAGESVTLSCSSRSSYDMYHLSREGGAHERRLPAVRKVNRTFQADFPLGPATHGGTYRCFGSFRHSPYEWSDPSDPLLVSVTGNPRHLHILIGTSVVIILFILLLFFLLHLWCSNKKNAAVMDQEPAGNRTANSEDSDEQDPEEVTYAQLDHCVFTQRKITRPSQRPKTPPTDTILYTELPNAKPRSKVVSCP

SEQ ID NO: 93261 - protein, 180 aa, Homo sapiens
MKGELMDGDQTSRSGVPAQVQSEITSANTEDDDDDDDEDDDDEEENAEDRNPGLSKERVRASLSDLSSLDDVEGMSVRQLKEILARNFVNYSGCCEKWELVEKVNRLYKENEENQKSYGERLQLQDEEDDSLCRICMDAVIDCVLLECGHMVTCTKCGKRMSECPICRQYVVRAVHVFKS

SEQ ID NO: 93262 - protein, 81 aa, Homo sapiens
MAVTLDKDAYYRRVKRLYSNWRKGEDEYANVDAIVVSVGVDEEIVYAKSTALQSSGTQAFSSSLFCHPKNIALLHVVQNGF

SEQ ID NO: 93263 - protein, 120 aa, Homo sapiens
MPRTKQIHPRNLRDKIEEAQKELNGAEVSKKEILQAGVKGTSESLKGVKRKKIVAENHLKKIPKSPLRNPLQAKHKQNTEESSFAVLHSASESHKKQNYIPVKNGKQFTKQNGETPGIIA

SEQ ID NO: 93264 - protein, 46 aa, Homo sapiens
MSSRRDTDSDTQDANDSSCKSSERSLPDCTPHPNSISIDAGPRQAP

SEQ ID NO: 93265 - protein, 698 aa, Homo sapiens
MSRKISKESKKVNISSSLESEDISLETTVPTDDISSSEEREGKVRITRQLIERKELLHNIQLLKIELSQKTMMIDNLKVDYLTKIEELEEKLNDALHQKQLLTLRLDNQLAFQQKDASKYQELMKQEMETILLRQKQLEETNLQLREKAGDVRRNLRDFELTEEQYIKLKAFPEDQLSIPEYVSVRFYELVNPLRKEICELQVKKNILAEELSTNKNQLKQLTETYEEDRKNYSEVQIRCQRLALELADTKQLIQQGDYRQENYDKVKSERDALEQEVIELRRKHEILEASHMIQTKERSELSKEVVTLEQTVTLLQKDKEYLNRQNMELSVRCAHEEDRLERLQAQLEESKKAREEMYEKYVASRDHYKTEYENKLHDELEQIRLKTNQEIDQLRNASREMYERENRNLREARDNAVAEKERAVMAEKDALEKHDQLLDRYRELQLSTESKVTEFLHQSKLKSFESERVQLLQEETARNLTQCQLECEKYQKKLEVLTKEFYSLQASSEKRITELQAQNSEHQARLDIYEKLEKELDEIIMQTAEIENEDEAERVLFSYGYGANVPTTAKRRLKQSVHLARRVLQLEKQNSLILKDLEHRKDQVTQLSQELDRANSLLNQTQQPYRYLIESVRQRDSKIDSLTESIAQLEKDVSNLNKEKSALLQTKNQMALDLEQLLNHREVFFLFCHNCNHFRLF

SEQ ID NO: 93266 - protein, 57 aa, Homo sapiens
MASDDFDIVIEAMLEAPYKKEEDEQQRKEVKKDYPSNTTSSTSNSGNETSGSSTIGE

SEQ ID NO: 93267 - protein, 95 aa, Homo sapiens
  MOD_RES (1)..(1): Any amino acid
XAERQLYSSLVKFHAHPESSERDRTLQVELEGAQVLRSRLEEVLGRSLERLNRLETLAAIGGAAAGDDTEDTSTEFTDSIEEEAAHHSHQQPSFL

SEQ ID NO: 93268 - protein, 121 aa, Homo sapiens
MKTPFGKAAAGQRSRTGAGHGSVSVTMIKRKAAHKKHRSRPTSQPRGNIVGCRIQHGWKDGDEPLTQWKGTVLDQFKFTGHGVQTTGTDWHPAEDETKKMFSFLLCFICLLLLFDATKSLL

SEQ ID NO: 93269 - protein, 102 aa, Homo sapiens
MSGDPDVLEYYKNDHSKKPLRIINLNFCEQVDAGLTFNKKELQDSFVFDIKTSERTFYLVAETEEDMNKWVQSICQICGFNQAEESTDSLRNVSSAGHGPRS

SEQ ID NO: 93270 - protein, 588 aa, Homo sapiens
MGSENSALKSYTLREPPFTLPSGLAVYPAVLQDGKFASVFVYKRENEDKVNKAAKHLKTLRHPCLLRFLSCTVEADGIHLVTERVQPLEVALETLSSAEVCAGIYDILLALIFLHDRGHLTHNNVCLSSVFVSEDGHWKLGGMETVCKVSQATPEFLRSIQSIRDPASIPPEEMSPEFTTLPECHGHARDAFSFGTLVESLLTILNEQVSADVLSSFQQTLHSTLLNPIPKCRPALCTLLSHDFFRNDFLEVVNFLKSLTLKSEEEKTEFFKFLLDRVSCLSEELIASRLVPLLLNQLVFAEPVAVKSFLPYLLGPKKDHAQGETPCLLSPALFQSRVIPVLLQLFEVHEEHVRMVLLSHIEAYVEHFTQEQLKKVILPQVLLGLRDTSDSIVAITLHSLAVLVSLLGPEVVVGGERTKIFKRTAPSFTKNTDLSLEGDPFSQPIKFPINGLSDVKNTSEDSENFPSSSKKSEEWPDWSEPEEPENQTVNIQIWPREPCDDVKSQCTTLDVEESSWDDCEPSSLDTKVNPGGGITATKPVTSGEQKPIPALLSLTEESMPWKSSLPQKISLVQRGDDADQIEPPKVSS

SEQ ID NO: 93271 - protein, 200 aa, Homo sapiens
  MOD_RES (1)..(1): Any amino acid
XDETDASSAVKVKRAVQKTSDLIVLGLPWKTTEQDLKEYFSTFGEVLMVQVKKDLKTGHSKGFGFVRFTEYETQVKVMSQRHMIDGRWCDCKLPNSKQSQDEPLRSRKVFVGRCTEDMTEDELREFFSQYGDVMDVFIPKPFRAFAFVTFADDQIAQSLCGEDLIIKGISVHISNAEPKHNSNRQLERSGRFGVQYEAFI

SEQ ID NO: 93272 - protein, 196 aa, Homo sapiens
MCGNNMSTPLPAIVPAARKATAAVIFLHGLGDTGHGWAEAFAGIRSSHIKYICPHAPVRPVTLNMNVAMPSWFDIIGLSPDSQEDESGIKQAAENIKALIDQEVKNGIPSNRIILGGFSQGPIGGANRDISILQCHGDCDPLVPLMFGSLTVEKLKTLVNPANVTFKTYEGMMHSSCQQEMMDVKQFIDKLLPPID

SEQ ID NO: 93273 - protein, 131 aa, Homo sapiens [sequence omitted]

SEQ ID NO: 93274 - protein, 160 aa, Homo sapiens
  MOD_RES (1)..(1): Any amino acid
XGKRPSGELAASAASLTDMGGSAGRELDAGRKPKLTRTQSAFSPVSFSPLFTDAFPRIAPIRAAESLHSQPPQHLQCPLYRPDSSSFAASLRELEKCGWYWGPMNWEDAEMKLKGKPDGSFLVRDSSDPRYILSLSFRSQGITHHTRMEHYRGTFSLWCH

SEQ ID NO: 93275 - protein, 309 aa, Homo sapiens
NNTNVPDFILTGLSDSEEVQMALFILFLLIYLITMLGNVGMILIIRLDLQLHTPMYFFLTHLSFIDLSYSTVITPKTLANLLTSNYISFMGCFAQMFFFVFLGAAECFLLSSMAYDRYVAICSPLRYPVIMSKRLCCALVTGPYVISFINSFVNVVWMSRLHFCDSNVVRHFFCDTSPILALSCMDTYDIEIMIHILAGSTLMVSLITISASYVSILSTILKINSTSGKQKALSTCASHLLGVTIFYGTMIFTYLKPRKSYSLGRDQVASVFYTIVIPMLNPLIYSLRNKEVKNALIRVMQRIWYVLGL

SEQ ID NO: 93276 - protein, 58 aa, Homo sapiens
METRAAGLLEFAGGPLHTLFAWVSPVEAAEQQRLLPVPASGSFVPEGHLPDASQSSPV

SEQ ID NO: 93277 - protein, 160 aa, Homo sapiens
MAQEEEDVRDYNLTEEQKAIKAKYPPVNRKYECELHAWGDTLEEAFEQCAMAMFGYMTDTGTVEPLQTVEVETQGDDLQSLLFHFLDEWLYKFSADEFFIPREVKVLSIDQRNFKLRSIGWGEEFSLSKHPQGTEVKAITYSAMQVYNEENPEVFVIIDI

SEQ ID NO: 93278 - protein, 317 aa, Homo sapiens
  MOD_RES (1)..(1): Any amino acid
XTKIEKEKKEHAKLHGMIRTEISGAEIAEEMEKERRFFQLQMCEYLLKVNEIKIKKGVDLLQNLIKYFHAQCNFFQDGLKAVESLKPSIETLSTDLHTIKQAQDEERRQLIQLRDILKSALQVEQKESRRDSQIRQSTAYSLHQPQGNKEHGTERNGSLYKKSDGIRKVWQKRKCSVKNGFLTISHGTANRPPAKLNLLTCQVKTNPEEKKCFDLISHDRTYHFQAEDEQECQIWMSVLQNSKEEALNNAFKGDDNTGENNIVQELTKEIISEVQRMTGNDVCCDCGAPDPTWLSTNLGILTCIECSGIHRELGVHY

SEQ ID NO: 93279 - protein, 174 aa, Homo sapiens
MALPTLPSYWCSQQRLNQQLARQREQEARLRQQWEQNSRYFRMSDICSSKQAEWSSKTSYQRSMHAYQREKMKEEKRRSLEARREKLRQLMQEEQDLLARELEELRLSMNLQERRIREQHGKLKSAKEEQRKLIAEQLLYEHWKKNNPKLREMELDLHQKHVVNSWEMQKEEKK

SEQ ID NO: 93280 - protein, 180 aa, Homo sapiens
MLGLWGQRLPAAWVLLLLPFLPLLLLAAPAPHRASYKPVIVVHGLFDSSYSFRHLLEYINETHPGTVVTVLDLFDGRESLRPLWEQVQGFREAVVPIMAKAPQGVHLICYSQGGLVCRALLSVMDDHNVDSFISLSSPQMGQYGDTDYLKWLFPTSMRSNLYRICYSPWGQEFSICNYWH

SEQ ID NO: 93281 - protein, 156 aa, Homo sapiens
  MOD_RES (1)..(1): Any amino acid
XEGDTVPSFLRLCIAAVDKRGLDVDGIYRVSGNLAVVQKLRFLVDRERAVTSDGRYVFPEQPGQALSESEQCLSQIQELIGSMPKPNHDTLRYLLEHLCRVIAHSDKNRMTPHNLGIVFGPTLFRPEQETSDPAAHALYPGQLVQLMLTNFTSLFP

SEQ ID NO: 93282 - protein, 51 aa, Homo sapiens
MGEVEAPGRLWLESPPGGAPPIFLPSDGQALVLGRGPLTQVTDRKCSRTQA

SEQ ID NO: 93283 - protein, 196 aa, Homo sapiens
IISGQFLSDKKVGTYVEVDMFGLPVDTRRKAFKTKTSQGNAVNPVWEEEPIVFKKVVLPTLACLRIAVYEEGGKFIGHRILPVQAIRPGYHYICLRNERNQPLTLPAVFVYIEVKDYVPDTYADVIEALSNPIRYVNLMEQRAKQLAALTLEDEEEVKKEGGFLHDEIMRLTRNTLEKLMALPLTHVVPIQSKMLS

SEQ ID NO: 93284 - protein, 156 aa, Homo sapiens
MGSQGSPVKSYDYLLKFLLVGDSDVGKGEILESLQDGAAESPYAYSNGIDYKTTTILLDGRRVKLELWDTSGQGRFCTIFRSYSRGAQGILLVYDITNRWSFDGIDRWIKEIDEHAPGVPRILVGNRLHLAFKRQVPTEQARAYAEKNCMTFFEVS

SEQ ID NO: 93285 - protein, 192 aa, Homo sapiens
  MOD_RES (1)..(1): Any amino acid
XEEKCGGIVGIQTKTVQVSATEDGNVTKDSNVVLEIPAATTIAYGVIELYVKLDGQFEFCLLRGKQGGFENKKRIDSVYLDPLVFREFAFIDMPDAAHGISSQDGPLSVLKQATLLLERNFHPFAELPEPQQTALSDIFQAVLFDDELLMVLEPVQKDILGRSSSLTLSCTNGESHTSCQPSSHPDSVSSLS

SEQ ID NO: 93286 - protein, 568 aa, Homo sapiens
MGRHCGYLALVSALACGADWVFLPESPPEEGWEEQMCVKLSENRARKKRLNIIIVAEGAIDTQNKPITSEKIKELVVTQLGYDTRVTILGHVQRGGTPSAFDRILASRMGVEAVIALLEATPDTPACVVSLNGNHAVRLPLMECVQMTQDVQKAMDERRFQDAVRLRGRSFAGNLNTYKRLAIKLPDDQIPKTNCNVAVINVGAPAAGMNAAVRSAVRVGIADGHRMLAIYDGFDGFAKGQIKEIGWTDVGGWTGQGGSILGTKRVLPGKYLEEIATQMRTHSINALLIIGGFEAYLGLLELSAAREKHEEFCVPMVMVPATVSNNVPGSDFSIGADTALNTITDTCDRIKQSASGTKRRVFIIETMGGYCGYLANMGGLAAGADAAYIFEEPFDIRDLQSNVEHLTEKMKTTIQRGLVLRNESCSENYTTDFIYQLYSEEGKGVFDCRKNVLGHMQQGGAPSPFDRNFGTKISARAMEWITAKLKEARGRGKKFTTDDSICVLGISKRNVIFQPVAELKKQTDFEHRIPKEQWWLKLRPLMKILAKYKASYDVSDSGQLEHVQPWSV

SEQ ID NO: 93287 - protein, 280 aa, Homo sapiens
  MOD_RES (1)..(1): Any amino acid
XSVNKLFGEKSASFREEYIRLCQKYYSSEPQAVDFLECAEEARKKINSWVKTQTKGKIPNLLPEGSVDGDTRMVLVNAVYFKGKWKTPFEKKLNGLYPFRVNSAQRTPVQMMYLREKLNIGYIEDLKAQILELPYAGDVSMFLLLPDEIADVSTGLELLESEITYDKLNKWTSKDKMAEDEVELKVSQLFSHNLLLQEQIANSAPVGENKVSSMDSLATSINQFALELSKKLAESAQGKNIFFSSWSISTSLTIVYLGAKGTTAAQMAQVLQFNRDQGVK

SEQ ID NO: 93288 - protein, 267 aa, Homo sapiens
MADNEKLDNQRLKNFKNKGRDLETMRRQRNEVVVELRKNKRDEHLLKRRNVPHEDICEDSDIDGDYRVQNTSLEAIVQNASSDNQGIQLSAVQAARKLLSSDRNPPIDDLIKSGILPILVHCLERDDNPSLQFEAAWALTNIASGTSEQTQAVVQSNAVPLFLRLLHSPHQNVCEQAVWALGNIIGDGPQCRDYVISLGVVKPLLSFISPSIPITFLRNVTWVMVNLCRHKDPPPPMETIQEILPALCVLIHHTDVNMAEEKATQGV

SEQ ID NO: 93289 - protein, 488 aa, Homo sapiens
MSDEVFSTTLAYTKSPKVTKRTTFQDELIRAITARSARQRSSEYSDDFDSDEIVSLGDFSDTSADENSVNKKMNDFHISDDEEKNPSKLLFLKTNKSNGNITKDEPVCAIKNEEEMAPDGCEDIVVKSFSESQNKDEEFEKDKIKMKPKPRILSIKSTSSENNSLDTDDHFKPSPRPRSMLKKKSHMEEKDGLEDKETALSEELELHSAPSSLPTPNGIQLEAEKKAFSENLDPEDSCLTSLASSSLKQILGDSFSPGSEGNASGKDPNEEITENHNSLKSDENKENSFSADHVTTAVEKSKESQVTADDLEEEKAKAELIMDDDRTVDPLLSKSQSILISTSATASSKKTIEDRNIKNKKSTNNRASSASARLMTSEFLKKSSSKRRTPSTTTSSHYLGTLKVLDQKPSQKQSIEPDRADNIRAAVYQEWLEKKNVYLHEMHRIKRIESENLRIQNEQKKAAKREEALASFEAWKAMKEKEAKKIAA

SEQ ID NO: 93290 - protein, 322 aa, Homo sapiens
  MOD_RES (1)..(1): Any amino acid
XSSLHLDMKDIQHAVVNLDNSVVDLETLQALYENRAQSDELEKIEKHGRSSKDKENAKSLDKPEQFLYELSLIPNFSERVFCILFQSTFSESICSIRRKLELLQKLCETLKNGPGVMQVLGLVLAFGNYMNGGNKTRGQADGFGLDILPKLKDVKSSDNSRSLLSYIVSYYLRNFDEDAGKEQCLFPLPEPQDLFQASQMKFEDFQKDLRKLKKDLKACEVEAGKVYQVSSKEHMQPFKENMEQFIIQAKIDQEAEENSLTETHKCFLETTAYFFMKPKLGEKEVSPNAFFSIWHEFSSDFKDFWKKENKLLLQERHQFLEK

SEQ ID NO: 93291 - protein, 258 aa, Homo sapiens
MSDTWSSIQAHKKQLDSLRERLQRRRKQDSGHLDLRNPEAALSPTFRSDSPVPTAPTSGGPKPSTASAVPELATDPELEKKLLHHLSDLALTLPTDAVSICLAISTPDAPATQDGVESLLQKFAAQELIEVKRGLLQDDAHPTLVTYADHSKLSAMMGAVAEKKGPGEVAGTVTGQKRRAEQDSTTVAAFASSLVSGLNSSASEPAKEPAKKSRKHAASDVDLEIESLLNQQSTKEQQSKKVGPKCKNSVTMEPRRSA

SEQ ID NO: 93292 - protein, 151 aa, Homo sapiens
MGPLRESKKEHRVQHHDKEISRSRIPRLILRPHMPQQQHKVSPASESPFSEEESREFNPSSSGRSARTVSSNSFCSDDTGCPSSQSVSPVKTPSDAGNSPIGFCPGSDEGFTRKKCTIGMVGEGSIQSSRYKKESKSGLVKPGSEADFSSS

SEQ ID NO: 93293 - protein, 203 aa, Homo sapiens
LEQAQAGTFAFPLHVDYSWVISTEPGSDSEEDEEEKRCLLKLPAQAHWASGRLDISNKTYETVASLGAATPQGENRSEVSSLSSEAPETPESLGSPASSSSLMSPLEPGDPSQAPPNSEEGLREPPGTSRPSLTSGTTPSEMYLPVRFSSESTRSYRRGARSPEDGPSARQPLPRRNVPVGITEGDGSRTGSLPASSVQLLQD

SEQ ID NO: 93294 - protein, 75 aa, Homo sapiens
MPSDKTIGGGDDSFNTFFSETGAGKHVPRAVFVDLEPTVIDEVRTGTYRQLFHPEQLITGKEDAANNYARGHYTI

SEQ ID NO: 93295 - protein, 268 aa, Homo sapiens
MAHAGRTGYDNREIVMKYIHYKLSQRGYEWDAGDVGAAPPGAAPAPGIFSSQPGHTPHPAASRDPVARTSPLQTPAAPGAAAGPALSPVPPVVHLTLRQAGDDFSRRYRRDFAEMSSQLHLTPFTARGRFATVVEELFRDGVNWGRIVAFFEFGGVMCVESVNREMSPLVDNIALWMTEYLNRHLHTWIQDNGGWTETQDLFNSNACSPTPAALATTILLPASMNLTTLGTSHKWTHTCDWLVTLSMMSSRFIHVLACVTASFILKAE

SEQ ID NO: 93296 - protein, 163 aa, Homo sapiens
MGSVGSQRLEEPSVAGTPDPGVVMSFTFDSHQLEEAAEAAQGQGLRARGVPAFTDTTLDEPVPDDRYHAIYFAMLLAGVGFLLPYNSFITDVDYLHHKYPGTSIVFDMSLTYILVALAAVLLNNVLVERLTLHTRITAGYLLALGPLLFISICDVWLQLFSRD

SEQ ID NO: 93297 - protein, 175 aa, Homo sapiens
RQTLVSDNIEWPNGITLDLLSQRLYWVDSKLHQLSSIDFSGGNRKTLISSTDFLSHPFGIAVFEDKVFWTDLENEAIFSANRLNGLEISILAENLNNPHDIVIFHELKQPRAPDACELSVQPNGGCEYLCLPAPQISSHSPKYTCACPDTMWLGPDMKRCYRVSGSFWNALKTSS

SEQ ID NO: 93298 - protein, 121 aa, Homo sapiens
MQFGTRTTTAEPGFMGTWQNADTNLLFRMSQQAIRCTLVNCTCECFQPGKINLRTCDQCKHGWVAHALDKLSTQHLYHPTQVEIVQSNVVFDISSLMLYGTQAVPVRLKILLDRLFSVLKQ

SEQ ID NO: 93299 - protein, 266 aa, Homo sapiens
MAPWLQLLSLLGLLPGAVAAPAQPRAASFQAWGPPSPELLAPTRFALEMFNRGRAAGTRAVLGLVRGRVRRAGQGSLYSLEATLEEPPCNDPMVCRLPVSKKTLLCSFQVLDELGRHVLLRKDCGPVDTKVPGAGEPKSAFTQGSAMISSLSQNHPDNRNETFSSVISLLNEDPLSQDLPVKMASIFKNFVITYNRTYESKEEARWRLSVFVNNMVRAQKIQALDRGTAQYGVTKFSDLTGVPHYLPEYSPEERAWQQDEASQVCG

SEQ ID NO: 93300 - protein, 402 aa, Homo sapiens
MPRYGASLRQSCPRSGREQGQDGTAGAPGLLWMGLVLALALALALALALSDSRVLWAPAEAHPLSPQGHPARLHRIVPRLRDVFGWGNLTCPICKGLFTAINLGLKKEPNVARVGSVAIKLCNLLKIAPPAVCQSIVHLFEDDMVEVWRRSVLSPSEACGLLLGSTCGHWDIFSSWNISLPTVPKPPPKPPSPPAPGAPVSRILFLTDLHWDHDYLEGTDPDCADPLCCRRGSGLPPASRPGAGYWGEYSKCDLPLRTLESLLSGLGPAGPFDMVYWTGDIPAHDVWHQTRQDQLRALTTVTALVRKFLGPVPVYPAVGNHESTPVNSFPPPFIEGNHSSRWLYEAMAKAWEPWLPAEALRTLRYLSSVETQEGKRKNWGVLCSFPIPRSPPHLSQYEFLFP

SEQ ID NO: 93301 - protein, 79 aa, Homo sapiens
MPSPRPVLLRGARAALLLLLPPRLLARPSLLLRRSLSAASCPPISLPAAASRSSMDGAGAEEVLAPLRLAVRQQAVWNQ

SEQ ID NO: 93302 - protein, 74 aa, Homo sapiens
MQFFGRLVNTFSGVTNLFSNPFRVKEVAVADYTSSDRVREEGQLILFQNTPNRTWDCVLVNPRNSQSGFRSHAQ

SEQ ID NO: 93303 - protein, 90 aa, Homo sapiens
MTQKELEQLFSQYGRIITSRILVDQVTGISRGVGFIRFDKRIEAEEAIKGLNGQKPPGATEPITVKFANNPSQKTNQAILSQLYQSPNRR

SEQ ID NO: 93304 - protein, 428 aa, Homo sapiens
MLLPVFTLKLRHKISPRMVAIGRYDGTHPCLAAATQTGKVFIHNPHTRNQHVSASRVFQSPLESDVSLLSINQAVSCLTAGVLNPELGYDALLVGTQTNLLAYDVYNNSDLFYREVADGANAIVLGTLGDISSPLAIIGGNCALQGFNHEGSDLFWTVTGDNVNSLALCDFDGDGKKELLVGSEDFDIRVFKEDEIVAEMTETEIVTSLCPMYGSRFGYALSNGTVGVYDKTSRYWRIKSKNHAMSIHAFDLNSDGVNELITGWSNGKVDARSDRTGEVIFKDNFSSAIAGVVEGDYRMDGHIQLICCSVDGEIRGYLPGTAEMRGNLMDTSAEQDLIRELSQKKQNLLLELRNYEENAKAELASPLNEADGHRGIIPANTRLHTTLSVSLGNETQTAHTELRISTSNAPSFMYLNRQDSSLDSPCMR

SEQ ID NO: 93305 - protein, 294 aa, Homo sapiens
MTNQYGILFKQEQAHDDAIWSVAWGTNKKENSETVVTGSLDDLVKVWKWRDERLDLQWSLEGHQLGVVSVDISHTLPIAASSSLDAHIRLWDLENGKQIKSIDAGPVDAWTLAFSPDSQYLATGTHVGKVNIFGVESGKKEYSLDTRGKFILSIAYSPDGKYLASGAIDGIINIFDIATGKLLHTLEGHAMPIRSLTFSPDSQLLVTASDDGYIKIYDVQHANLAGTLSGHASWVLNVAFCPDDTHFVSSSSDKSVKVWDVGTRTCVHTFFDHQDQVWGVKYNGNGSKIVSVGD

SEQ ID NO: 93306 - protein, 137 aa, Homo sapiens
MPGPGRRAAASRRMKSSVGGRREKLLGAPKAQPSRDFTCVHDGESEAELIPDDFEEKPEREKKHTNFTLCNVCNIQLNSAAQAQIHYNGKSHQKRLKQLSNGTLKNDNGHRRKNFEDICIRRYESDSDQRWTRFRKL

SEQ ID NO: 93307 - protein, 209 aa, Homo sapiens
MGCGALCPQVSELQEEGMNAINLPLSPIPFELDPEDTMLEENEVRTMVDPNSRSDPKLQELMKVLIDWINDVLVGERIIVKDLAEDLYDGQVLQKLFEKLESEKLNVAEVTQSEIAQKQKLQTVLEKINETLKLPPRSIKWNVDSVHAKSLVAILHLLVALSQYFRAPIRLPDHVSIQVVVVQKREGILQSRQIQEEITGNTEALSGRH

SEQ ID NO: 93308 - protein, 48 aa, Homo sapiens
TVWQLSDSSPIDHLNFHKPDFSELTLNGSLEERIFFTNMVTCSQVHFK

SEQ ID NO: 93309 - protein, 53 aa, Homo sapiens
  MOD_RES (1)..(1): Any amino acid
XQQRPSGYRADFWMPAVRGEDSGIYSCVYYLDSTPFAASNHSDSLEIWVTEHD

SEQ ID NO: 93310 - protein, 160 aa, Homo sapiens
MVVREKILDLVISCFKRHGAKGMDTPAFELKETLTEKYGEDSGLMYDLKDQGGELLSLRYDLTVPFARYLAMNKVKKMKRYHVGKVWRRESPTIVQGRYREFCQCDFDIAGQFDPMIPDAECLKIMCEILSGLQLGDFLIKESRYCHCFEWKGIDKHLGH

SEQ ID NO: 93311 - protein, 370 aa, Homo sapiens
MKWLGESKNMVVNGRRNGGKLSNDHQQNQSKLQHTGKDTLKAGKNAVERRSNRCNGNSGFEGQSRYVPSSGMSAKELCENDDLATSLVLDPYLGFQTHKMNTRFRPIKGRQEELKEVIERFKKDEHLEKAFKCLTSGEWARHYFLNKNKMQEKLFKEHVFIYLRMFATDSGFEILPCNRYSSEQNGAKIVATKEWKRNDKIELLVGCIAELSEIEENMLLRHGENDFSVMYSTRKNCAQLWLGPAAFINHDCRPNCKFVSTGRDTACVKALRDIEPGEEISCYYGDGFFGENNEFCECYTCERRGTGAFKSRVGLPAPAPVINSKYGLRETDKRLNRLKKLGDSSKNSDSQSVSSNTDADTTQEKNNASK

SEQ ID NO: 93312 - protein, 132 aa, Homo sapiens
SVKVKGPAHKISLELDKKIMDANYFGPITLTKALLPNMISRRTGQIVLVNNIQGKFGIPFRTTFFFRKLTYGVHPVEVAEEVMRTVRRKKQEVFMANPIPKAAVYVRTFFPEFFFAVVACGVKEKLNVPEEG

SEQ ID NO: 93313 - protein, 116 aa, Homo sapiens
MQSPAVLVTSRRLQNAHTGLDLTVPQHQEVRGKMMSGHVEYQILVVTRLAAFKSAKHRPEDVVQFLVPDPQGLQGSPAEIPLSWMAQTVRQGMMKRLSTFLRSKTKWQKRVRPSRA

SEQ ID NO: 93314 - protein, 154 aa, Homo sapiens
MVMCFCVNPCVSLQEAELAARILLDQGQTHSVETPYGSVTFTVYGTPKPKRPAILTYHDVGLNYKSCFQPLFQFEDMQEIIQNFVRVHVDAPGMEEGAPVFPLGYQYPSLDQLADMIPCVLQYLNFSTIIGVGVGAGAYILARYALNHPDTVEG

SEQ ID NO: 93315 - protein, 116 aa, Homo sapiens
MGLQVGNGSWSHVWFEGLPGAQVPSPSPPSTRSAVFWQYNLVLPSQDPALPQKEQEKMTKFQEMVTFKDVAVVFTREELGLLDLAQRKLYQDVMLENFRNLLSVGYQPFKLDVILQ

SEQ ID NO: 93316 - protein, 320 aa, Homo sapiens
MAPRGRRRPRPHRSEGARRSKNTLERTHSMKDKAGQKCKPIDVFDFPDNSDVSSIGRLGENEKDEETYETFDPPLHSTAIYADEEEFSKHCGLSLSSTPPGKEAKRSSDTSGNEASEIESVKISAKKPGRKLRPISDDSESIEESDTRRKVKSAEKISTQRHEVIRTTASSELSEKPAESVTSKKTGPLSAQPSVEKENLAIESQSKTQKKGKISHDKRKKSRSKAIGSDTSDIVHIWCPEGMKTSDIKELNIVLPEFEKTHLEHQQRIESKVCKAAIATFYVNVKEQFIKMLKESQMLTNLKRKNAKVRATAETTTNKI

SEQ ID NO: 93317 - protein, 104 aa, Homo sapiens
MDLASKAGKHLQLKETFERHSRVYTFEMQIIKAKDNFAGNYRCEVTYKDKFDSCSFDLEVHESTGTTPNIDIRSAFKRSGEGQEDAGELDFSGLLKRREVKQQE

SEQ ID NO: 93318 - protein, 256 aa, Homo sapiens
MASARKASRPMRDVFGDFSDVSLEDSTMEEIRNFQISRNLTKIAPGHSRFLKRNQTLDEKHLLLKENPVLGSGPRLASCRPPTTASRIRANAALMKLAQLETRIMNRKLQRNLSDTESDSMTADAGLPKRADRILSGGALELASQNTDKTSQNQARELPVTENNAQNAKVSRFLKKKQAPVENISPEAPAGKERTLQTPKQKEPARTFDSPDSDEEEMKVLLGSLMDSSREKNTNQGFSSANVSEEEERKLFSSLE

SEQ ID NO: 93319 - protein, 496 aa, Homo sapiens
MVPGEEPARELMAVLLTPRFRRLVSQNELPGPGLNGPSSRNRRDGFCRKRRTGCSGPFQATQLWDGIIHSLQAQVEIKRRRHHLQTYKDCFTGSDAVDVVLSHLMQNTCLSSNDISCLKGVHLCQVLMNHKVFEPVGMKKLFKKEKELEFEDSNISLYRFLGNKSSYDCCKRQKDAENEFNETLRPGYEMISNPLAQEIGEERIEELIHTINGNPALCPNITVQKPFLRLSKEDVWKEQTLLCLLQLIHLPFLDNILEPPVKTQNLQLNKEEDLVITNTCLDRELIPSLCLPEIDNWLNAAIECLEYFPDQLIVTVSQQLMQNRNEETRLNSQKKILFDVIAKYYAQERDCLLTDEYFDIHSGIIELLENEKRAEALEATQLYLRLLLLNIREELRRLLTFMAMASEPNAYKLQKQYDNKTVVLKTLAKSVLQAKSLLKVRAEQLVWFPLEYHSELFKTPVTLLDLVSKKLKKLLHGEDADAISGMAENNSYTSTA

SEQ ID NO: 93320 - protein, 48 aa, Homo sapiens
MSEEKDCGGGDALSNGIKKHRTSLPSPMFSRNDFSIWSILRKCIGMTQ

SEQ ID NO: 93321 - protein, 280 aa, Homo sapiens
MVTANKAHTGQGSCWVATLASAMIPPADSLLKYDTPVLVSRNTEKRSPKARLLKVSPQQPGPSGSAPQPPKTKLPSTPCVPDPTKQAEEILNAILPPREWVEDTQLWIQQVSSTPSTRMDVVHLQEQLDLKLQQRQARETGICPVRRELYSQCFDELIREVTINCAERGLLLLRVRDEIRMTIAAYQTLYESSVAFGMRKALQAEQGKSDMERKIAELETEKRDLERQVNEQKAKCEATEKRESERRQVEEKKHNEEIQFLKRTNQQLKAQLEGIIAPKK

SEQ ID NO: 93322 - protein, 130 aa, Homo sapiens
MRNIPTQDATTFPVDTLWGHTMLTGVTDGIFCCLLGTPPNAVGPLESVESSDGYTFVEVKPGRVLRVKHAGPAPAAAPPPPSSASSDAAQGDLSGLVRCQRRITVYRNGRLLVENLGRAPRADLLHGQNG

SEQ ID NO: 93323 - protein, 17 aa, Homo sapiens
MYASILLLATISADRFL

SEQ ID NO: 93324 - protein, 609 aa, Homo sapiens
VDSLLSESQLKEALEPNKRQHIYQRCIQLKQAIDENKNALQKLSKADESAPVANYNQRKEEEHTLLDKLTQQLQGLAVTISRENITEVGAPTEEEEESESEDSEDSGGEEEDAEEEEEEKEENESHKWSTGEEYIAVGDFTAQQVGDLTFKKGEILLVIEKKPDGWWIAKDAKGNEGLVPRTYLEPYSEEEEGQESSEEGSEEDVEAVDETADGAEVKQRTDPHWSAVQKAISEQINTVDVLTTMGAIPAGFRPSTLSQLLEEGNQFRANYFLQPELMPSQLAFRDLMWDATEGTIRSRPSRISLILTLWSCKMIPLPGMSIQVLSRHVRLCLFDGNKFVLTLLIKTYPRKGKLQKKGLLDLQFRMAEEASQSWQKVLSNIHTVRATWQPKKPKTWTFSPQVTRILPCLLDGDCFIRSNSASPDLGILFELGISYIRNSTGERGELSCGWVFLKLFDASGVPIPAKTYELFLNGGTPYEKGIEVDPSISRRAHGSVFYQIMTMRRQPQLLVKLRSLNRRSRNVLSLLPETLIGNMCSIHLLIFYRQILGDVLLKDRMSLQSTDLISHPMLATFPMLLEQPDVMDALRSSWAGKESTLKRSEKVKYESPH

SEQ ID NO: 93325 - protein, 114 aa, Homo sapiens
MFPLRALWLVWALLGVAGSCPEPCACVDKYAHQFADCAYKELREVPEGLPANVTTLSLSANKITVLRRGAFADVTQVTSLWLAHNEVRTVEPGALAVLSQLKNLDLSHNFISSF

SEQ ID NO: 93326 - protein, 183 aa, Homo sapiens
MAVQESAAQLSMTLKVQEYPTLKVPYETLNKRFRAAQKNIDRETSHVTMVVAELEKTLSGCPAVDSVVSLLDGVVEKLSVLKRKDLVNIEMFLTAKEVEESLERRETATCLAWCHDNKSRLRKMKSCLEFSLRIQEFIELIRQNKRLDAVRHARKHFSQAEGSQLDEVRQAMGMLAFPPDTHI

SEQ ID NO: 93327 - protein, 113 aa, Homo sapiens
MTPQSLLQTTLFLLSLLFLVQGAHGRGHREDFRFCSQRNQTHRSSLHYKPTPDLRISIENSEEALTVHAPFPAAHPASRSFPDPRGLYHFCLYWNRHAGRLHLLYGKRDFLLS

SEQ ID NO: 93328 - protein, 144 aa, Homo sapiens
MPAPIRLRELIRTIRTARTQAEEREMIQKECAAIRSSFREEDNTYRCRNVAKLLYMHMLGYPAHFGQLECLKLIASQKFTDKRIGYLGAMLLLDERQDVHLLMTNCIKNDLNHSTQFVQGLALCTLGCMGSSEMCRDLAGEVEK

SEQ ID NO: 93329 - protein, 40 aa, Homo sapiens
  MOD_RES (1)..(1): Any amino acid
XAEDMETKIKNYKTAPFDSRFPNQNQTRNCWQNYLGHRLG

SEQ ID NO: 93330 - protein, 818 aa, Homo sapiens
MLICSQGPRLFLEVTFGGGKSSEVFAPGWSHPGNLHATLVEVVLWQRAWRVPWCWTMWSCGRLREITWTSWTTRLLNNAFEELVAFQRALKDFVASIDATYAKQYEEFYVGLEGSFGSKHVSPRTLTSCFLSCVVCVEGIVTKCSLVRPKVVRSVHYCPATKKTIERRYSDLTTLVAFPSSSVYPTKDEENNPLETEYGLSVYKDHQTITIQEMPEKAPAGQLPRSVDVILDDDLVDKAKPGDRVQVVGTYRCLPGKKGGYTSGTFRTVLIACNVKQMSKDAQPSFSAEDIAKIKKFSKTRSKDIFDQLAKSLAPSIHGHDYVKKAILCLLLGGVERDLENGSHIRGDINILLIGDPSVAKSQLLRYVLCTAPRAIPTTGRGSSGVGLTAAVTTDQETGERRLEAGAMVLADRGVVCIDEFDKMSDMDRTAIHEVMEQGRVTIAKAGIHARLNARCSVLAAANPVYGRYDQYKTPMENIGLQDSLLSRFDLLFIMLDQMDPEQDREISDHVLRMHRYRAPGEQDGDAMPLGSAVDILATDDPNFSQEDQQDTQIYEKHDNLLHGTKKKKEKMVSAAFMKKYIHVAKIIKPVLTQESATYIAEEYSRLRSQDSMSSDTARTSPVTARTLETLIRLATAHAKARMSKTVDLQDAEEAVELVQYAYFKKVLEKEKKRKKRSEDESETEDEEEKSQEDQEQKRKRRKTRQPDAKDGDSYDPYDFSDTEEEMPQVHTPKTADSQETKESQKVELSESRLKAFKVALLDVFREAHAQSIGMNRLTESINRDSEEPFSSVEIQAALSKMQDDNQVMVSEGIIFLI

SEQ ID NO: 93331 - protein, 360 aa, Homo sapiens
MLCCIQCLCLVSPFPTLTPCQGGPHCLIPIHLCLTFSLFGRSVNNFLITGPKAYLTYTTSVALGAQSGIEECKFQFAWERWNCPENALQLSTHNRLRSATRETSFIHAISSAGVMYIITKNCSMGDFENCGCDGSNNGKTGGHGWIWGGCSDNVEFGERISKLFVDSLEKGKDARALMNLHNNRAGRLAVRATMKRTCKCHGISGSCSIQTCWLQLAEFREMGDYLKAKYDQALKIEMDKRQLRAGNSAEGHWVPAEAFLPSAEAELIFLEESPDYCTCNSSLGIYGTEGRECLQNSHNTSRWERRSCGRLCTECGLQVEERKTEVISSCNCKFQWCCTVKCDQCRHVTMSNPAVLLGIR

SEQ ID NO: 93332 - protein, 137 aa, Homo sapiens
DPLAGLPKPERGPQSLDKPMNMLSVLRAYSSDGLAAFNGLASSTANSGCIKRPDLCGHRPFQCRYCPYSASQKGNLKTHVLCVHRMPFDNSQYPDRRFKRSRVDSEASGNFEEPTAVKAGSSADLTEEGGKGQEETN

SEQ ID NO: 93333 - protein, 76 aa, Homo sapiens
  MOD_RES (1)..(1): Any amino acid
XQSDKIRTVQDALESLVARESVQGYTTKTKQENCFLQGLKIRILNATEPIGSLQWSTITATVRRAAITLQTSSRSV

SEQ ID NO: 93334 - protein, 51 aa, Homo sapiens
  MOD_RES (1)..(1): Any amino acid
XCGIVVSLRFPIPKLDMLSQLEGGEEQWVPDPQDLEERDILRVTYTGKNLE

SEQ ID NO: 93335 - protein, 17 aa, Homo sapiens
MTEFFHDCTTNERKREI

SEQ ID NO: 93336 - protein, 147 aa, Homo sapiens
MTSGIPGCGGACVLPSRAPLRRRDPQHCSPTLSEAPLLRAHTQTRLLTRGLPTPNTTRTVQVSVTVTPTWSPVRPRQDRLLWFVTSRQDGHPLQNEDLLASAAGCPSGCGASQLADVLLLLEPEEQSVLPEADHLLRPGQLLRDCVC

SEQ ID NO: 93337 - protein, 4373 aa, Homo sapiens
  MOD_RES (1)..(1): Any amino acid
XTTEDTLITGSKTAAPVTSTGSTTATLEGQSTAASSRTSNQDISASSQNHQTKSTETTSKAQTDTLTQMMTSTLFSSPSVHNVMETAPPDEMTTSFPSSVTNTLMMTSKTITMTTSTDSTLGNTEETSTAGTESSTPVTSAVSITAGQEGQSRTTSWRTSIQDTSASSQNHWTRSTQTTRESQTSTLTHRTTSTPSFSPSVHNVTGTVSQKTSPSGETATSSLCSVTNTSMMTSEKITVTTSTGSTLGNPGETSSVPVTGSLMPVTSAALVTFDPEGQSPATFSRTSTQDTTAFSKNHQTQSVETTRVSQINTLNTLTPVTTSTVLSSPSGFNPSGTVSQETFPSGETTTSSPSSVSNTFLVTSKVFRMPTSRDSTLGNTEETSLSVSGTISAITSKVSTIWWSDTLSTALSPSSLPPKISTAFHTQQSEGAETTGRPHERSSFSPGVSQEIFTLHETTTWPSSFSSKGHTTWSQTELPSTSTGAATRLVTGNPSTGTAGTIPRVPSKVSAIGEPGEPTTYSSHSTTLPKTTGAGAQTQWTQETGTTGEALLSSPSYSVTQMIKTATSPSSSPMLDRHTSQQITTAPSTNHSTIHSTSTSPQESPAVSQRGHTQAPQTTQESQTTRSVSPMTDTKTVTTPGSSFTASGHSPSEIVPQDAPTISAATTFAPAPTGDGHTTQAPTTALQAAPSSHDATLGPSGGTSLSKTGALTLANSVVSTPGGPEGQWTSASASTSPDTAAAMTHTHQAESTEASGQTQTSEPASSGSRTTSAGTATPSSSGASGTTPSGSEGISTSGETTRFSSNPSRDSHTTQSTTELLSASASHGAIPVSTGMASSIVPGTFHPTLSEASTAGRPTGQSSPTSPSASPQETAAISRMAQTQRTRTSRGSDTISLASQATDTFSTVPPTPPSITSTGLTSPQTETHTLSPSGSGKTFTTALISNATPLPVTYASSASTGHTTPLHVTDASSVSTGHATPLPVTSPSSVSTGHTTPLPVTDTSSESTGHVTPLPVTSFSSASTGDSTPLPVTDTSSASTGHVTPLPVTSLSSASTGDTTPLPVTDTSSASTGHATSLPVTDTSSVSTGHTTPLPVTDTSSASTGHATSLPVTDTSSVSTGHTTPLHVTDASSASTGQATPLPVTSLSSVSTGDTTPLPVTSPSSASTGHATPLLVTDTSSASTGHATPLPVTDASSVSTDHATSLPVTIPSAASTGHTTPLPVTDTSSASTGQATSLLVTDTSSVSTGDTTPLPVTSTSSASTGHVTPLHVTSPSSASTGHATPLPVTSLSSASTGDTMPLPVTSPSSASTGDTTPLPVTDASSVSTGHTTPLHVTDASSASTGQATPLPVTSLSSVSTGDTTPLPVTSPSSASTGHATPLLVTDTSSASTGHATPLPVTDASSVSTDHATSLPVTIPSAASTGHTTPLPVTDTSSASTGQATSLLVTDTSSVSTGDTTPLPVTSTSSASTGHVTPLHVTSPSSASTGHATPLPVTSLSSASTGDTMPLPVTSPSSASTGDTTPLPVTDASSVSTGHTTPLPVTSPSSASTGHTTPLPVTDTSSASKGDTTPLPVTSPSSASTGHTTPLPVTDTSSASTGDTTPLPVTNASSLSTGHATPLHVTSPSSASTGHATPLPVTSTSSASTGHATPLPVTGLSSATTDDTTRLPVTDVSSASTGQATPLPVTSLSSVSTGDTTPLPVTSPSSASTGHASPLLVTDASSASTGQATPLPVTDTSSVSTAHATPLPVTGLSSASTDDTTRLPVTDVSSASTGQAIPLPVTSPSSASTGDTTPLPVTDASSASTGDTTSLPVTIPSSASSGHTTSLPVTDASSVSTGHATSLLVTDASSVSTGDTTPLPVTDTNSASTGDTTPLHVTDASSVSTGHATSLPVTSLSSASTGDTTPLPVTSPSSASSGHTTPLPVTDASSVPTGHATSLPVTDASSVSTGHATPLPVTDASSVSTGHATPLPVTDTSSVSTGQATPLPVTSLSSASTGDTTPLPVTDTSSASTGQDTPLPVTSLSSVSTGDTTPLPVTNPSSASTGHATPLLVTDASSISTGHATSLLVTDASSVSTGHATALHDTDASSLSTGDTTPLPVTSPSSTSTGDTTPLPVTETSSVSTGHATSLPVTDTSSASTGHATSLPVTDTSSASTGHATPLPVTDTSSASTGQATPLPVTSPSSASTGHAIPLLVTDTSSASTGQATPLPVTSLSSASTGDTTPLPVTDASSVSTGHATSLPVTSLSSVSTGDTTPLPVTSPSSASTGHATPLHVTDASSASTGHATPLPVTSLSSASTGDTTPLPVTSPSSASTGHATPLHVTDASSVSTGDTTPLPVTSSSSASSGHTTPLPVTDASSASTGDTTPLPVTDTSSASTGHATHLPVTGLSSASTGDTTRLPVTNVSSASTGHATPLPVTSTSSASTGDTTPLPGTDTSSVSTGHTTPLLVTDASSVSTGDTTRLPVTSPSSASTGHTTPLPVTDTPSASTGDTTPLPVTNASSLSTRHATSLHVTSPSSASTGHATSLPVTDTSAASTGHATPLPVTSTSSASTGDTTPLPVTDTYSASTGQATPLPVTSLSSVSTGDTTPLPVTSPSSASTGHATPLLVTDASSASTGQATPLPVTSLSSVSTGDTTPLPVTSPSSASTGHATSLPVTDTSSASTGDTTSLPVTDTSSAYTGDTTSLPVTDTSSSSTGDTTPLLVTETSSVSTGDTTPLPVTDTSSASTGHATPLPVTNTSSVSTGHATPLHVTSPSSASTGHTTPLPVTDASSVSTGHATSLPVTDASSVFTGHATSLPVTIPSSASSGHTTPLPVTDASSVSTGHATSLPVTDASSVSTGHATPLPVTDASSVSTGHATPLPLTSLSSVSTGDTTPLPVTDTSSASTGQATPLPVTSLSSVSTGDTTPLPVTDTSSASTGHATSLPVTDTSSASTGHATPLPDTDTSSASTGHATLLPVTDTSSASIGHATSLPVTDTSSISTGHATPLHVTSPSSASTGHATPLPVTDTSSASTGHANPLHVTSPSSASTGHATPLPVTDTSSASTGHATPLPVTSLSSVSTGDTTPLPVTSPSSASTGHTTPLPVTDTSSASTGQATALPVTSTSSASTGDTTPLPVTDTSSASTGQATPLPVTSLSSVSTGDTTPLPVTSPSSASTGHATPLLVTDASSASTGQATPLPVTSLSSVSTGDTTPLPVTSPSSASTGHATSLPVTDTSSASTGDTTSLPVTDTSSAYTGDTTSLPVTDTSSSSTGDTTPLLVTETSSVSTGHATPLLVTDASSASTGHATPLHVTSPSSASTGDTTPVPVTDTSSVSTGHATPLPVTGLSSASTGDTTRLPVTDISSASTGQATPLPVTNTSSVSTGDTMPLPVTSPSSASTGHATPLPVTSTSSASTGHATPVPVTSTSSASTGHTTPLPVTDTSSASTGDTTPLPVTSPSSASTGHTTPLHVTIPSSASTGDTSTLPVTGASSASTGHATPLPVTDTSSVSTGHATPLPVTSLSSVSTGDTTPLPVTDASSASTGQATPLPVTSLSSVSTGDTTPLLVTDASSVSTGHATPLPVTDTSSASTGDTTRLPVTDTSSASTGQATPLPVTSLSSVSTGDTTPLLVTDASSVSTGHATPLPVTDTSSASTGDTTRLPVTDTSSASTGQATPLPVTIPSSSSSGHTTPLPVTSTSSVSTGHVTPLHVTSPSSASTGHVTPLPVTSTSSASTGHATPLLVTDASSVSTGHATPLPVTDASSASTGDTTPLPVTDTSSASTGQATPLPVTSLSSVSTGDTTPLPVTDASSASTGHATPLPVTIPSSVSTGDTMPLPVTSPSSASTGHATPLPVTGLSSASTGDTTPLPVTDTSSASTRHATPLPVTDTSSASTDDTTRLPVTDVSSASTGHATPLPVTSTSSASTGDTTPLPVTDTSSVSTGHATSLPVTSRSSASTGHATPLPVTDTSSVSTGHATPLPVTSTSSVSTGHATPLPVTSPSSASTGHATPVPVTSTSSASTGDTTPLPVTNASSLSTGHATPLHVTSPSSASRGDTSTLPVTDASSASTGHATPLPLTSLSSVSTGDTTPLPVTDTSSASTGQATPLPVTSLSSVSTGDTTPLPVTIPSSASSGHTTSLPVTDASSVSTGHGTPLPVTSTSSASTGDTTPLPVTDTSSASTGHATPLPVTDTSSASTGHATPLPVTSLSSVSTGHATPLAVSSATSASTVSSDSPLKMETPGMTTPSLKTDGGRRTATSPPPTTSQTIISTIPSTAMHTRSTAAPIPILPERGVSLFPYGAGAGDLEFVRRTVDFTSPLFKPATGFPLGSSLRDSLYASQAGTLWPWWLRSGTMLTSPLVGGPHFIRNTRRSMVNTAC

SEQ ID NO: 93338 - protein, 443 aa, Homo sapiens
MISAEDCEFIQRFEMKRSPEEKQEMLQTEGSQCAKTFINLMTHICKEQTVQYILTMVDDMLQENHQRVSIFFDYARCSKNTAWPYFLPMLNRQDPFTVHMAARIIAKLAAWGKELMEGSDLNYYFNWIKTQLSSQKLRGSGVAVETGTVSSSDSSQYVQCVAGCLQLMLRVNEYRFAWVEADGVNCIMGVLSNKCGFQLQYQMIFSIWLLAFSPQMCEHLRRYNIIPVLSDILQESVKEKVTRIILAAFRNFLEKSTERETRQEYALAMIQCKVLKQLENLEQQKYDDEDISEDIKFLLEKLGESVQDLSSFDEYSSELKSGRLEWSPVHKSEKFWRENAVRLNEKNYELLKILTKLLEVSDDPQVLAVAAHDVGEYVRHYPRGKRVIEQLGGKQLVMNHMHHEDQQVRYNALLAVQKLMVHNWEYLGKQLQSEQPQTAAARS

SEQ ID NO: 93339 - protein, 574 aa, Homo sapiens
MALRAKAEVCMAVPWLSLQRAQALGTRAARVPRTVLPFEAMPRRPGNRWLRLLQIWREQGYEDLHLEVHQTFQELGPIFRSRHSASFGRWGRSAARAGLWRCQGRGWCRANPSSLQRGQDSEALKYDLGGAGMVCVMLPEDVEKLQQVDSLHPHRMSLEPWVAYRQHRGHKCGVFLLNVADRGNSSPPFPGGIHGAPTHSGCRNGPEWRFNRLRLNPEVLSPNAVQRFLPMVDAVARDFSQALKKKVLQNARGSLTLDVQPSIFHYTIEASNLALFGERLGLVGHSPSSASLNFLHALEVMFKSTVQLMFMPRSLSRWTSPKVWKEHFEAWDCIFQYGDNCIQKIYQELAFSRPQQYTSIVAELLLNAELSPDAIKANSMELTAGSVDTTVFPLLMTLFELARNPNVQQALRQESLAAAASISEHPQKATTELPLLRAALKETLRLYPVGLFLERVASSDLVLQNYHIPAGTLVRVFLYSLGRNPALFPRPERYNPQRWLDIRGSGRNFYHVPFGFGMRQCLGRRLAEAEMLLLLHHVLKHLQVETLTQEDIKMVYSFILRPSMFPLLTFRAIN

SEQ ID NO: 93340 - protein, 360 aa, Homo sapiens
MSLLVVSMACVGFFLLQGAWPHEGVHRKPSLLAHPGPLVKSEETVILQCWSDVMFEHFLLHREGMFNDTLRLIGEHHDGVSKANFSISRMTQDLAGTYRCYGSVTHSPYQVSAPSDPLDIVIIGLYEKPSLSAQPGPTVLAGENVTLSCSSRSSYDMYHLSREGEAHERRLPAGPKVNGTFQADFPLGPATHGGTYRCFGSFHDSPYEWSKSSDPLLVSVTGNPSNSWPSPTEPSSKTGICRHLHVLIGTSVVIFLFILLLFFLLYRWCSNKKNAAVMDQEPAGDRTVNRQDSDEQDPQEVTYAQLDHCVFIQRKISRPSQRPKTPLTDTSVYTELPNAEPRSKVVSCPRAPQSGLEGVF

SEQ ID NO: 93341 - protein, 482 aa, Homo sapiens
MVDFPGYNLSGAVASFLFILLTMKQSEDFRVIGPAHPILAGVGEDALLTCQLLPKRTTMHVEVRWYRSEPSTPVFVHRDGVEVTEMQMEEYRGWVEWIENGIAKGNVALKIHNIQPSDNGQYWCHFQDGNYCGETSLLLKVAGLGSAPSIHMEGPGESGVQLVCTARGWFPEPQVYWEDIRGEKLLAVSEHRIQDEDGLFYAEATLVVRNASAESVSCLVHNPVLTEEKGSVISLPEKLQTELASLKVNGPSQPILVRVGEDIQLTCYLSPKANAQSMEVRWDRSHRYPAVHVYMDGDHVAGEQMAEYRGRTVLVSDAIDEGRLTLQILSARPSDDGQYRCLFEKDDVYQEASLDLKVVGLGSSPLITVEGQEDGEMQPMCSSDGWFPQPHVPWRDMEGKTIPSSSQALTQGSHGLFHVQTLLRVTNISAVDVTCSISIPFLGEEKIATFSLSESRMTFLWKTLLVWGLLLAVAVGLPRKRS

SEQ ID NO: 93342 - protein, 565 aa, Homo sapiens
MLISRNKLILLLGIVFFERGKSATLSLPKAPSCGQSLVKVQPWNYFNIFSRILGGSQVEKGSYPWQVSLKQRQKHICGGSIVSPQWVITAAHCIANRNIVSTLNVTAGEYDLSQTDPGEQTLTIETVIIHPHFSTKKPMDYDIALLKMAGAFQFGHFVGPICLPELREQFEAGFICTTAGWGRLTEGGVLSQVLQEVNLPILTWEECVAALLTLKRPISGKTFLCTGFPDGGRDACQGDSGGSLMCRNKKGAWTLAGVTSWGLGCGRGWRNNVRKSDQGSPGIFTDISKVLPWIHEHIQTGNRRKSSRAWCSEQDVIVSGAEGKLHFPESLHLYYESKQRCVWTLLVPEEMHVLLSFSHLDVESCHHSYLSMYSLEDRPIGKFCGESLPSSILIGSNSLRLKFVSDATDNAAGFNLTYKALKPNYIPDSGCSYLTVLFEEGLIQSLNYPENYSDKANCDWIFQASKHHLIKLSFQSLEIEESGDCTSDYVTVHSDVERKKEIARLCGYDVPTPVLSPSSIMLISFQSDENGTCRGFQATVSFIPKAVYPDLNISISEDESMFLET

SEQ ID NO: 93343 - protein, 26 aa, Homo sapiens
  MOD_RES (1)..(1): Any amino acid
XTRAEEAMELYHIALFLEFNMLAQGK

SEQ ID NO: 93344 - protein, 231 aa, Homo sapiens
MTSSPRAPPGEQGRGGAEMIRAAPPPLFLLLLLLLLLVSWASRGEAAPDQDEIQRLPGLAKQPSFRQYSGYLKGSGSKHLHYWFVESQKDPENSPVVLWLNGGPGCSSLDGLLTEHGPFLVQPDGVTLEYNPYSWNLIANVLYLESPAGVGFSYSDDKFYATNDTEVAQSNFEALQDFFRLFPEYKNNKLFLTGESYAGIYIPTLAVLVMQDPSMNLQVQGAGCGQWTLLL

SEQ ID NO: 93345 - protein, 163 aa, Homo sapiens
MTAGGQAEAEGAGGEPGAARLPSRVARLLSALFYGTCSFLIVLVNKALLTTYGFPSPIFLGIGQMAATIMILYVSKLNKIIHFPDFDKKIPVKLFPLPLLYVGNHISGLSSTSKLSLPMFTVLRKFTIPLTLLLETIILGKQYSLNIILSVFAIILGAFIAAG

SEQ ID NO: 93346 - protein, 117 aa, Homo sapiens
MTGRARARARGRARGQETAQLVGSTASQQPGYIQPRPQPPPAEGELFGRGRQRGTAGGTAKSQGLQISAGFQELSLAERGGRRRDFHDLGVNTRQNLDHVKESKTGSSGIIVRLSTN

SEQ ID NO: 93347 - protein, 110 aa, Homo sapiens
MRNVALRRAAGPVCAEAAERRVRRCDGRRSARWYPGGEGPGQAGGVGVLVPAPGAGSSPSCGRPAPRALPGAPASEAPRPEDLGAPSYSQGRCPGLGAGPARGAPGGALH

SEQ ID NO: 93348 - protein, 612 aa, Homo sapiens
MLGEYDWALQANIKAQKLCKNDPEGIKDLIQQHVKLQKQIEDLQGRTANKDPIKAFYENRAYTPRSLSAPIFTTSLNFVEKERDFRKINHEMANGGNQNLKVADEALKVDDCDCHPEFSPPSSQPPKHKGKQKSRNNESEKFSSSSPLTLPADLKNILEKQFSKSSRAAHQDFANIMKMLRSLIQDGYMALLEQRCRSAAQAFTELLNGLDPQKIKQLNLAMINYVLVVYGLAISLLGIGQPEELSEAENQFKRIIEHYPSEGLDCLAYCGIGKVYLKKNRFLEALNHFEKARTLIYRLPGVLTWPTSNVIIEESQPQKIKMLLEKFVEECKFPPVPDAICCYQKCHGYSKIQIYITDPDFKGFIRISCCQYCKIEFHMNCWKKLKTTTFNDKIDKDFLQGICLTPDCEGVISKIIIFSSGGEVKCEFEHKVIKEKVPPRPILKQKCSSLEKLRLKEDKKLKRKIQKKEAKKLAQERMEEDLRESNPPKNEEQKETVDNVQRCQFLDDRILQCIKQYADKIKSGIQNTAMLLKELLSWKVLSTEDYTTCFSSRNFLNEAVDYVIRHLIQENNRVKTRIFLHVLSELKEVEPKLAAWIQKLNSFGMSLYIPEQ

SEQ ID NO: 93349 - protein, 215 aa, Homo sapiens
NCTKNGIVKEAQQNGKPHFYDKLIVESFEEAPLHVMVFTYMGYGIGTLFGYLRDFLRNWGIEKCNAAVERKEQKDFVPLYQDFENFYTRNLYMRIRDNWNRPICSAPGPLFDLMERVSDDYNWTFRFTGRVIKDVINMGSYNFLGLAAKYDESMRTIKDVLEVYGTGVASTRHEMGEFTSSWQNALCVGGVLQADSVPQGPPWSWKMGRHSSLLE

SEQ ID NO: 93350 - protein, 529 aa, Homo sapiens
MGSSRAPWMGRVGGHGMMALLLAGLLLPGTLAKSIGTFSDPCKDPTRITSPNDPCLTGKGDSSGFSSYSGSSSSGSSISSARSSGGGSSGSSSGSSIAQGGSAGSFKPGTGYSQVSYSSGSGSSLQGASGSSQLGSSSSHSGSSGSHSGSSSSHSSSSSSFQFSSSSFQVGNGSALPTNDNSYRGILNPSQPGQSSSSSQTFGVSSSGQSVSSNQRPCSSDIPDSPCSGGPIVSHSGPYIPSSHSVSGGQRPVVVVVDQHGSGAPGVVQGPPCSNGGLPGKPCPPITSVDKSYGGYEVVGGSSDSYLVPGMTYSKGKIYPVGYFTKENPVKGSPGVPSFAAGPPISEGKYFSSNPIIPSQSAASSAIAFQPVGTGGVQLCGGGSTGSKGPCSPSSSRVPSSSSISSSAGSPYHPCGSASQSPCSPPGTGSFSSSSSSQSSGKIILQPCGSKSSSSGHPCMSVSSLTLTGGPDGSPHPDPSAGAKPCGSSSAGKIPCRSIRDILAQVKPLGPQLADPEVFLPQGELLDSP

SEQ ID NO: 93351 - protein, 662 aa, Homo sapiens
MIAGGNQSILLWIKKENSYVNLKRTIPTLNEGTVKRWIADVETKRWQSTKREIQEIFSSPACLTGSFLRKRRTTEMMPVYLDLNKARNIFKELTQKDWITNMITTCLKDNLLKRLPFHSPPQEALEIFFLLPECPMMHISNNWESLVVPFAKVVCKMSDQSSLVLEEYWATLQESTFSKLVQMFKTAVICQLDYWDESAEENGNVQALLEMLKKLHRVNQVKCQLPESIFQVDELLHRLNFFVEVCRRYLWKMTVDASENVQCCVIFSHFPFIFNNLSKIKLLHTDTLLKIESKKHKAYLRSAAIEEERESEFALRPTFDLTVRRNHLIEDVLNQLSQFENEDLRKELWVSFSGEIGYDLGGVKKEFFYCLFAEMIQPEYGMFMYPEGASCMWFPVKPKFEKKRYFFFGVLCGLSLFNCNVANLPFPLALFKKLLDQMPSLEDLKELSPDLGKNLQTLLDDEGDNFEEVFYIHFNVHWDRNDTNLIPNGSSITVNQTNKRDYVSKYINYIFNDSVKAVYEEFRRGFYKMCDEDIIKLFHPEELKDVIVGNTDYDWKTFEKNARYEPGYNSSHPTIVMFWKAFHKLTLEEKKKFLVFLTGTDRLQMKDLNNMKITFCCPESWNERDPIRALTCFSVLFLPKYSTMETVEEALQEAINNNRGFG

SEQ ID NO: 93352 - protein, 99 aa, Homo sapiens
MPRGSRSAASRPASRPSPRPFGPAGAHGSDGDHGRRGSRGLGCGTRHGQRPDRSLQRGELGALPACCPAGPHPRCPPAPADGALRLRDQAVPGLFHHSE

SEQ ID NO: 93353 - protein, 401 aa, Homo sapiens
MRNKRVLKTKKRRSGRGGQDPGLHPHRSEATAGRSPPTPTVTLGPDCPPPPPPPPPNNNNNNNSKHTGHKSACVPNMTERRRDELSEEINNLREKVMKQSEENNNLQSQVQKLTEENTTLREQVEPTPEDEDDDIELRGAAAAAAPPPPIEEECPEDLPEKFDGNPDMLAPFMAQCQIFMEKSTRDFSVDRVRVCFVTSMMTGRAARWASAKLERSHYLMHNYPAFMMEMKHVFEDPQRREVAKRKIRRLRQGMGSVIDYSNAFQMIAQDLDWNEPALIDQYHEGLSDHIQEELSHLEVAKSLSALIGQCIHIERRLARAAAARKPRSPPRALVLPHIASHHQVDPTEPVGGARMRLTQEEKERRRKLNLCLYCGTGGHYADNCPAKASKSSPAGNSPAPL

SEQ ID NO: 93354 - protein, 56 aa, Homo sapiens
MADNEKLDNQRLKNFKNKGRDLEDNFSVEKNTPGVRGHPGDPNSAFQRPVFYSGYS

SEQ ID NO: 93355 - protein, 53 aa, Homo sapiens
MTTRQATKDPLLRGVSPTPSKIPVRSQKRTPFPTVTSCAVDQENQDPRRLQGP

SEQ ID NO: 93356 - protein, 325 aa, Homo sapiens
MTQQPLRGVTSLRFNQDQSCFCCAMETGVRIYNVEPLMEKGHLVLIWDDAREGKDSKEKLVLEFTFTKPVLSVRMRHDKIVIVLKNRIYVYSFPDNPRKLFEFDTRDNPKGLCDLCPSLEKQLLVFPGHKCGSLQLVDLASTKPGTSSAPFTINAHQSDIACVSLNQPGTVVASASQKGTLIRLFDTQSKEKLVELRRGTDPATLYCINFSHDSSFLCASSDKGTVHIFALKDTRLNRRSALARVGKVGPMIGQYVDSQWSLASFTVPAESACICAFGRNTSKNVNSVIAICVDGTFHKYVFTPDGNCNREAFDVYLDICDDDDF

SEQ ID NO: 93357 - protein, 739 aa, Homo sapiens
MQAARCPTDELSLTNCAVVNEKDFQSGQHVIVRTSPNHRYTFTLKTHPSVVPGSIAFSLPQRKWAGLSIGQEIEVSLYTFDKAKQCIGTMTIEIDFLQKKSIDSNPYDTDKMAAEFIQQFNNQAFSVGQQLVFSFNEKLFGLLVKDIEAMDPSILKGEPATGKRQKIEVGLVVGNSQVAFEKAENSSLNLIGKAKTKENRQSIINPDWNFEKMGIGGLDKEFSDIFRRAFASRVFPPEIVEQMGCKHVKGILLYGPPGCGKTLLARQIGKMLNAREPKVVNGPEILNKYVGESEANIRKLFADAEEEQRRLGANSGLHIIIFDEIDAICKQRGSMAGSTGVHDTVVNQLLSKIDGVEQLNNILVIGMTNRPDLIDEALLRPGRLEVKMEIGLPDEKGRLQILHIHTARMRGHQLLSADVDIKELAVETKNFSGAELEGLVRAAQSTAMNRHIKASTKVEVDMEKAESLQVTRGDFLASLENDIKPAFGTNQEDYASYIMNGIIKWGDPVTRVLDDGELLVQQTKNSDRTPLVSVLLEGPPHSGKTALAAKIAEESNFPFIKICSPDKMIGFSETAKCQAMKKIFDDAYKSQLSCVVVDDIERLLDYVPIGPRFSNLVLQALLVLLKKAPPQGRKLLIIGTTSRKDVLQEMEMLNAFSTTIHVPNIATGEQLLEALELLGNFKDKERTTIAQQVKGKKVWIGIKKLLMLIEMSLQMDPEYRVRKFLALLREEGASPLDFD

SEQ ID NO: 93358 - protein, 56 aa, Homo sapiens
MAIKSIASRLRGSRRFLSGFVAGAVVGAAGAGLAALQFFRSQGAEGALTGKQPDDC

SEQ ID NO: 93359 - protein, 140 aa, Homo sapiens
MADHSFSDGVPSDSVEAAKNASNTEKLTDQVMQNPRVLAALQERLDNVPHTPSSYIETLPKAVKRRINALKQLQVRCAHIEAKFYEEVHDLERKYAALYQPLFDKRREFITGDVEPTDAESEWHSENEEEEKLAGDMKSK

SEQ ID NO: 93360 - protein, 213 aa, Homo sapiens
MSLKDDDSGDHDQNEENSTQKDGEKEKTERDKNQSSSKRKAVVPGPAEHPLQYNYTFWYSRRTPGRPTSSQSYEQNIKQIGTFASVEQFWRFYSHMVRPGDLTGHSDFHLFKEGIKPMWEDDANKNGGKWIIRLRKGLASRCWENLILAMLGEQFMVGEEICGAVVSVRFQEDIISIWNKTASDQATTARIRDTLRRVLNLPPNTIMEYKTHT

SEQ ID NO: 93361 - protein, 190 aa, Homo sapiens
MDFLKRVVPPILSGDVVLDTSTEESSPRLVKMKRLSSLSSEKTVDEQGGTNFCHSNYDKYEHQQLASAPVSKVNKYCASSNFHSTWGKKNIIMSNITIDPDVKPGEYVIKSLFAEFAVQAEKKIEVVMAEPLEKLLSRSLQRGEDLQFDQLISSMSSVAEHCLPSLLRTLFDWYRRQNGTEDESYEYRPR

SEQ ID NO: 93362 - protein, 108 aa, Homo sapiens
MNVGVAHSEVNPNTRVMNSRGMWLTYALGVGLLHIVLLSIPFFSVPVAWTLTNIIHNLGMYVFLHAVKGTPFETPDQGKARLLTHWEQLDYGVQFTSSRKFFTISPII

SEQ ID NO: 93363 - protein, 1040 aa, Homo sapiens
MPAARRFPGLELSFPLLARLRRRLYTRLGGGRMQPEEGTGWLLELLSEVQLQQYFLRLRDDLNVTRLSHFEYVKNEDLEKIGMGRPGQRRLWEAVKRRKALCKRKSWMSKVFSGKRLEAEFPPHHSQSTFRKTSPAPGGPAGEGPLQSLTCLIGEKDLRLLEKLGDGSFGVVRRGEWDAPSGKTVSVAVKCLKPDVLSQPEAMDDFIREVNAMHSLDHRNLIRLYGVVLTPPMKMVTELAPLGSLLDRLRKHQGHFLLGTLSRYAVQVAEGMGYLESKRFIHRDLAARNLLLATRDLVKIGDFGLMRALPQNDDHYVMQEHRKVPFAWCAPESLKTRTFSHASDTWMFGVTLWEMFTYGQEPWIGLNGSQILHKIDKEGERLPRPEDCPQDIYNVMVQCWAHKPEDRPTFVALRDFLLEAQPTDMRALQDFEEPDKLHIQMNDVITVIEGRAENYWWRGQNTRTLCVGPFPRNVVTSVAGLSAQDISQPLQNSFIHTGHGDSDPRHCWGFPDRIDELYLGNPMDPPDLLSVELSTSRPPQHLGGVKKPTYDPVSEDQDPLSSDFKRLGLRKPGLPRGLWLAKPSARVPGTKASRGSGAEVTLIDFGEEPVVPALRPCAPSLAQLAMDACSLLDETPPQSPTRALPRPLHPTPVVDWDARPLPPPPAYDDVAQDEDDFEICSINSTLVGAGVPAGPSQGQTNYAFVPEQARPPPPLEDNLFLPPQGGGKPPSSAQTAEIFQALQQECMRQLQAPAGSPAPSPSPGGDDKPQVPPRVPIPPRPTRPHVQLSPAPPGEEETSQWPGPASPPRVPPREPLSPQGSRTPSPLVPPGSSPLPPRLSSSPGKTMPTTQSFASDPKYATPQVIQAPGPRAGPCILPIVRDGKKVSSTHYYLLPERPSYLERYQRFLREAQSPEEPTPLPVPLLLPPPSTPAPAAPTATVRPMPQAALDPKANFSTNNSNPGARPPPPRATARLPQRGCPGDGPEAGRPADKIQMVEQLFGLGLRPRGECHKVLEMFDWNLEQAGCHLLGSWGPAHHKR

SEQ ID NO: 93364 - protein, 109 aa, Homo sapiens
MELKVWVDGVQRIVCGVTEVTTCQEVVIALAQAIGRTGRYTLIEKWRDTERHLAPHENPIISLNKWGQYASDVQLILRRTGPSLSERPTSDSVARIPERTLYRQSLPLS

SEQ ID NO: 93365 - protein, 79 aa, Homo sapiens
MAAGFGRCCRVLRSISRFHWRSQHTKANRQREPGLGFSFEFTEQQKEFQATARKFAREEIIPVAAEYDKTGEVVSSPPN

SEQ ID NO: 93366 - protein, 703 aa, Homo sapiens
MRLPDLRPWTSLLLVDAALLWLLQGPLGTLLPQGLPGLWLEGTLRLGGLWGLLKLRGLLGFVGTLLLPLCLATPLTVSLRALVAGASRAPPARVASAPWSWLLVGYGAAGLSWSLWAVLSPPGAQEKEQDQVNNKVLMWRLLKLSRPDLPLLVAAFFFLVLAVLGETLIPHYSGRVIDILGGDFDPHAFASAIFFMCLFSFGSSLSAGCRGGCFTYTMSRINLRIREQLFSSLLRQDLGFFQETKTGELNSRLSSDTTLMSNWLPLNANVLLRSLVKVVGLYGFMLSISPRLTLLSLLHMPFTIAAEKVYNTRHQEVLREIQDAVARAGQVVREAVGGLQTVRSFGAEEHEVCRYKEALEQCRQLYWRRDLERALYLLVRRVLHLGVQMLMLSCGLQQMQDGELTQGSLLSFMIYQESVGSYVQTLVYIYGDMLSNVGAAEKVFSYMDRQPNLPSPGTLAPTTLQGVVKFQDVSFAYPNRPDRPVLKGLTFTLRPGEVTALVGPNGSGKSTVAALLQNLYQPTGGQVLLDEKPISQYEHCYLHSQVVSVGQEPVLFSGSVRNNIAYGLQSCEDDKVMAAAQAAHADDFIQEMEHGIYTDVGEKGSQLAAGQKQRLAIARALVRDPRVLILDEATSALDVQCEQALQDWNSRGDRTVLVIAHRLQAVQRAHQILVLQEGKLQKLAQLQEGQDLYSRLVQQRLMD

SEQ ID NO: 93367 - protein, 328 aa, Homo sapiens
  MOD_RES (1)..(1): Any amino acid
XAKSSSESSSEESSSESSSEEEEEEDEDEEEEESESSDSEEERAHRLAELQEQLRAVHEQLAALSQGPISKPKRKREKKEKKKKRKAEKHRGRAGADEDDKGPRAPRPPQPKKSKKASGSGGGSAALGPSGFGPSGGSGTKLPKKATKTAPPALPTGYDSEEEEESRPMSYDEKRQLSLDINKLPGEKLGRVVHIIQAREPSLRDSNPEEIEIDFETLKPSTLRELERYVLSCLRKKPRKPYTIKKPVGKTKEELALEKKRELEKRLQDVSGQLNSTKKPPKKANEKTESSSAQQVAVSRLSASSSSSDSSSSSSSSSSSDTSDSDSG

SEQ ID NO: 93368 - protein, 431 aa, Homo sapiens
MSSILPFTPPVVKRLLGWKKSAGGSGGAGGGEQNGQEEKWCEKAVKSLVKKLKKTGRLDELEKAITTQNCNTKCVTIPRSLDGRLQVSHRKGLPHVIYCRLWRWPDLHSHHELKAIENCEYAFNLKKDEVCVNPYHYQRVETPVLPPVLVPRHTEILTELPPLDDYTHSIPENTNFPAGIEPQSNYIPETPPPGYISEDGETSDQQLNQSMDTGSPAELSPTTLSPVNHSLDLQPVTYSEPAFWCSIAYYELNQRVGETFHASQPSLTVDGFTDPSNSERFCLGLLSNVNRNATVEMTRRHIGRGVRLYYIGGEVFAECLSDSAIFVQSPNCNQRYGWHPATVCKIPPGCNLKIFNNQEFAALLAQSVNQGFEAVYQLTRMCTIRMSFVKGWGAEYRYEIHIWFLNFHSVIMFHCILAYSGVHLYLFSMRL

SEQ ID NO: 93369 - protein, 312 aa, Homo sapiens
MNIWGQIWPKAVYLVCNYSPKGNWWGHAPYKHGRPCSACPPSFGGGCRENLCYKEGSDRYYPPREEETNEIERQQSQVHDTHVRTRSDDSSRNEVISAQQMSQIVSCEVRLRDQCKGTTCNRYECPAGCLDSKAKVIGSVHYEMQSSICRAAIHYGIIDNDGGWVDITRQGRKHYFIKSNRNGIQTIGKYQSANSFTVSKVTVQAVTCETTVEQLCPFHKPASHCPRVYCPRNCMQANPHYARVIGTRVYSDLSSICRAAVHAGVVRNHGGYVDVMPVDKRKTYIASFQNGIFSESLQNPPGGKAFRVFAVV

SEQ ID NO: 93370 - protein, 483 aa, Homo sapiens
MENDPSRRRESISLTPVAKGLENMGADFLESLEEGQLPRSDLSPAEIRSSWSEAAPKPFSRWRNLQPALRARSFCREHMQLFRWIGTGLLCTGLSAFLLVACLLDFQRALALFVLTCVVLTFLGHRLLKRLLGPKLRRFLKPQGHPRLLLWFKRGLALAAFLGLVLWLSLDTSQRPEQLVSFAGICVFVALLFACSKHHCAVSWRAVSWGLGLQFVLGLLVIRTEPGFIAFEWLGEQIRIFLSYTKAGSSFVFGEALVKDVFAFQVLPIIVFFSCVISVLYHVGLMQWVILKIAWLMQVTMGTTATETLSVAGNIFVSQTEAPLLIRPYLADMTLSEVHVVMTGGYATIAGSLLGAYISFGVRAEVLTTFALCGFANFSSIGIMLGGLTSMVPQRKSDFSQIVLRALFTGACVSLVNACMAGILYMPRGAEVDCMSLLNTTLSSSSFEIYQCCREAFQSVNPEFSPEALDNCCRFYNHTICAQ

SEQ ID NO: 93371 - protein, 158 aa, Homo sapiens
MGKGDPKKPRGKMSSYAFFVQTCREEHKKKHPDASVNFSEFSKKCSERWKTMSAKEKGKFEDMAKADKARYEREMKTYIPPKGETKKKFKDPNAPKRPPSAFFLFCSEYRPKIKGEHPGLSIGDVAKKLGEMWNNTAADDKQPYEKKAAKLKEKYEKF

SEQ ID NO: 93372 - protein, 176 aa, Homo sapiens
MPNMVFIGGINCKKRKDLSQEFEAYINASGEHGIVVFSLGSMVSEIPEKKAMAIADALGKIPQTVLWRYTGTRPSNLANNTILVKWLPQNDLLGHPMTRAFITHAGSHGVYESICNGVPMVMMPLFGDQMDNAKRMETKGAGVTLNVLEMTSEDLENALKAVINDKRKKQQSGRQM

SEQ ID NO: 93373 - protein, 88 aa, Homo sapiens
MEAPEYLDLDEIDFSDDISYSVTSLKTIPELCRRCDTQNEDRSATPSCRQSRQNSRRKWKQSITYCGVTGTRRVSTAPHFFDGRRLPQ

SEQ ID NO: 93374 - protein, 53 aa, Homo sapiens
MDNLSSEEIQQRAHQITDESLESTRRILGLAIEVLFLLFLVCFVVLSAFPPLS

SEQ ID NO: 93375 - protein, 185 aa, Homo sapiens
MFFTCGPNEAMVVSGFCRSPPVMVAGGRVFVLPCIQQIQRISLNTLTLNVKSEKVYTRHGVPISVTGIAQVKIQGQNKEMLAAACQMFLGKTEAEIAHIALETLEGHQRAIMAHMTVEEIYKDRQKFSEQVFKVASSDLVNMGISVVSYTLKDIHDDQDYLHSLGKARTAQVQKDARIGEAEAKR

SEQ ID NO: 93376 - protein, 653 aa, Homo sapiens
MMEGLKKRTRKAFGIRKKEKDTDSTGSPDRDGIQPSPHEPPYNSKAECAREGGKKVSKKSNGAPNGFYAEIDWERYNSPELDEEGYSIRPEEPGSTKGKHFYSSSESEEEEESHKKFNIKIKPLQSKDILKNAATVDELKASIGNIALSPSPVGAIKRNLSSEEVARPRRSTPTPELISKKPPDDTTALAPLFGPPLESAFDEQKTEVLLDQPEIWGSGQPINPSMESPKLTRPFPTGTPPPLPPKNVPATPPRTGSPLTIGPGASSPARPATPLVPCRSTTPPPPPPRPPSRPKLPPGKPGVGDVSRPFSPPIHSSSPPPIAPLARAESTSSISSTNSLSAATTPTVENEQPSLVWFDRGKFYLTFEGSSRGPSPLTMGAQDTLPVAAAFTETVNAYFKGADPSKCIVKITGEMVLSFPAGITRHFANNPSPAALTFRVINFSRLEHVLPNPQLLCCDNTQNDANTKEFWVNMPNLMTHLKKVSEQKPQATYYNVDMLKYQVSAQGIQSTPLNLAVNWRCEPSSTDLRIDYKYNTDAMTTAVALNNVQFLVPIDGGVTKLQAVLPPAVWNAEQQRILWKIPDISQKSENGGVGSLLARFQLSEGPSKPSPLVVQFTSEGSTLSGCDIELVGAGYRFSLIKKRFAAGKYLADN

SEQ ID NO: 93377 - protein, 45 aa, Homo sapiens
MPVLYDRWSLALSPVLEARVQVARSWLTATSASWVEVILLPPPPE

SEQ ID NO: 93378 - protein, 122 aa, Homo sapiens
MCESSKEALAENNLNLPKMAEKDGCFQSGFNEETCLVKIITGLLEFEVYLEYLQNRFESSEEQARAVQMSTKVLIQFLQKKVGVSSFPQLGVGEDRLKDSVLDNSGMQCHFQKRRLHVNKRV

SEQ ID NO: 93379 - protein, 469 aa, Homo sapiens
MCYLSAIISISLLNKKPSMEQWDHFHNQQEDTDSCSESVKFDARSMTALLPPNPKNSPSLQEKLKSFKAALIALYLLVFAVLIPLIGIVAAQLLKWETKNCSVSSTNANDITQSLTGKGNDSEEEMRFQEVFMEHMSNMEKRIQHILDMEANLMDTEHFQNFSMTTDQRFNDILLQLSTLFSSVQGHGNAIDEISKSLISLNTTLLDLQLNIENLNGKIQENTFKQQEEISKLEERVYNVSAEIMAMKEEQVHLEQEIKGEVKVLNNITNDLRLKDWEHSQTLRNITLIQGPPGPPGEKGDRGPTGESGPRGFPGPIGPPGLKGDRGAIGFPGSRGLPGYAGRPGNSGPKGQKGEKGSGNTLTPFTKVRLVGGSGPHEGRVEILHSGQWGTICDDRWEVRVGQVVCRSLGYPGVQAVHKAAHFGQGTGPIWLNEVFCFGRESSIEECKIRQWGTRACSHSEDAGVTCTL

SEQ ID NO: 93380 - protein, 38 aa, Homo sapiens
MVSKRRLSKSEDKESLTEDASKMGISLCHPGWSAVVIS

SEQ ID NO: 93381 - protein, 143 aa, Homo sapiens
MDSALSDPHNGSAEAGGPTNSTTRPPSTPEGIALAYGSLLLMALLPIFFGALRSVRCARGKNASDMPETITSRDAARFPIIASCTLLGLYLFFKIFSQEYINLLLSMYFFVLGILALSHTIRSEGISLQHLKQLSREPVQGLG

SEQ ID NO: 93382 - protein, 1160 aa, Homo sapiens
MWAMESGHLLWALLFMQSLWPQLTDGATRVYYLGIRDVQWNYAPKGRNVITNQPLDSDIVASSFLKSDKNRIGGTYKKTIYKEYKDDSYTDEVAQPAWLGFLGPVLQAEVGDVILIHLKNFATRPYTIHPHGVFYEKDSEGSLYPDGSSGPLKADDSVPPGGSHIYNWTIPEGHAPTDADPACLTWIYHSHVDAPRDIATGLIGPLITCKRGALDGNSPPQRQDVDHDFFLLFSVVDENLSWHLNENIATYCSDPASVDKEDETFQESNRMHAINGFVFGNLPELNMCAQKRVAWHLFGMGNEIDVHTAFFHGQMLTTRGHHTDVANIFPATFVTAEMVPWEPGTWLISCQVNSHFRDGMQALYKVKSCSMAPPVDLLTGKVRQYFIEAHEIQWDYGPMGHDGSTGKNLREPGSISDKFFQKSSSRIGGTYWKVRYEAFQDETFQEKMHLEEDRHLGILGPVIRAEVGDTIQVVFYNRASQPFSMQPHGVFYEKDYEGTVYNDGSSYPGLVAKPFEKVTYRWTVPPHAGPTAQDPACLTWMYFSAADPIRDTNSGLVGPLLVCRAGALGADGKQKGVDKEFFLLFTVLDENKSWYSNANQAAAMLDFRLLSEDIEGFQDSNRMHAINGFLFSNLPRLDMCKGDTVAWHLLGLGTETDVHGVMFQGNTVQLQGMRKGAAMLFPHTFVMAIMQPDNLGTFEIYCQAGSHREAGMRAIYNVSQCPGHQATPRQRYQAARIYYIMAEEVEWDYCPDRSWEREWHNQSEKDSYGYIFLSNKDGLLGSRYKKAVFREYTDGTFRIPRPRTGPEEHLGILGPLIKGEVGDILTVVFKNNASRPYSVHAHGVLESTTVWPLAAEPGEVVTYQWNIPERSGPGPNDSACVSWIYYSAVDPIKDMYSGLVGPLAICQKGILEPHGGRSDMDREFALLFLIFDENKSWYLEENVATHGSQDPGSINLQDETFLESNKMHAINGKLYANLRGLTMYQGERVAWYMLAMGQDVDLHTIHFHAESFLYRNGENYRADVVDLFPGTFEVVEMVASNPGTWLMHCHVTDHVHAGMETLFTVFSRTEHLSPLTVITKETEKVPPRDIEEGNVKMLGMQIPIKNVEMLASVLVAISVTLLLVVLALGGVVWYQHRQRKLRRNRRSILDDSFKLLSFKQ

SEQ ID NO: 93383 - protein, 142 aa, Homo sapiens
MNPFRLENVTVSESSRQLLTMHGTFVILLPLSLILMVFGGMTGFLSFLLQAYLLLLLTGILFLFGAMVTLAGISVYIAYSAAAFREALCLLEEKALLDQVDISFGWSLALGWISFIAELLTGAAFLAAARELSLRRRQDQAI

SEQ ID NO: 93384 - protein, 66 aa, Homo sapiens
MAPVEHVVADAGAFLRHAALQDIGKNIYTIREVVTEIRDKATRRRLAVLPYELRFKEPLPEYVRLG

SEQ ID NO: 93385 - protein, 348 aa, Homo sapiens
MSLLVVSMACVGFFLLQGAWPHEGVHRKPSLLAHPGRLVKSEETVILQCWSDVMFEHFLLHREGMFNDTLRLIGEHHDGVSKANFSISRMTQDLAGTYRCYGSVTHSPYQVSAPSDPLDIVIIGLYEKPSLSAQPGPTVLAGENVTLSCSSRSSYDMYHLSREGEAHERRLPAGTKVNGTFQANFPLGPATHGGTYRCFGSFRDSPYEWSKSSDPLLVSVTGNPSNSWPSPTEPSSETGNPRHLHILIGTSVVIILFILLFFLLHCWCSNKKNAAVMDQESAGNRTANSEDSDEQDPQEVTYTQLNHCVFTQRKITRPSQRPKTPPTDIIVYTELPNAESRSKVVSCP

SEQ ID NO: 93386 - protein, 896 aa, Homo sapiens
MVPWVRTMGQKLKQRLRLDVGREICRQYPLFCFLLLCLSAASLLLNRYIHILMIFWSFVAGVVTFYCSLGPDSLLPNIFFTIKYKPKQLGLQELFPQGHSCAVCGKVKCKRHRPSLLLENYQPWLDLKISSKVDASLSEVLELVLENFVYPWYRDVTDDESFVDELRITLRFFASVLIRRIHKVDIPSIITKKLLKAAMKHIEVIVKARQKVKNTEFLQQAALEEYGPELHVALRSRRDELHYLRKLTELLFPYILPPKATDCRSLTLLIREILSGSVFLPSLDFLADPDTVNHLLIIFIDDSPPEKATEPASPLVPFLQKFAEPRNKKPSVLKLELKQIREQQDLLFRFMNFLKQEGAVHVLQFCLTVEEFNDRILRPELSNDEMLSLHEELQKIYKTYCLDESIDKIRFDPFIVEEIQRIAEGPYIDVVKLQTMRCLFEAYEHVLSLLENVFTPMFCHSDEYFRQLLRGAESPTRNSKLNRGSLSLDDFRNTQKRGESFGISRIGSKIKGVFKSTTMEGAMLPNYGVAEGEDDFIEEGIVVMEDDSPVEAVSTPNTPRNLAAWKISIPYVDFFEDPSSERKEKKERIPVFCIDVERNDRRAVGHEPEHWSVYRRYLEFYVLESKLTEFHGAFPDAQLPSKRIIGPKNYEFLKSKREEFQEYLQKLLQHPELSNSQLLADFLSPNGGETQFLDKILPDVNLGKIIKSVPGKLMKEKGQHLEPFIMNFINSCESPKPKPSRPELTILSPTSENNKKLFNDLFKNNANRAENTERKQNQNYFMEVMTVEGVYDYLMYVGRVVFQVPDWLHHLLMGTRILFKNTLEMYTDYYLQCKLEQLFQEHRLVSLITLLRDAIFCENTEPRSLQDKQKGAKQTFEEMMNYIPAFLRVCIMPCAL

SEQ ID NO: 93387 - protein, 1230 aa, Homo sapiens
MANGGGGGGGSSGGGGGGGGSSLRMSSNIHANHLSLDASSSSSSSSSSSSSSSSSSSSSSVHEPKMDALIIPVTMEVPCDSRGQRMWWAFLASSMVTFFGGLFIILLWRTLKYLWTVCCHCGGKTKEAQKINNGSSQADGTLKPVDEKEEAVAAEVGWMTSVKDWAGVMISAQTLTGRVLVVLVFALSIGALVIYFIDSSNPIESCQNFYKDFTLQIDMAFNVFFLLYFGLRFIAANDKLWFWLEVNSVVDFFTVPPVFVSVYLNRSWLGLRFLRALRLIQFSEILQFLNILKTSNSIKLVNLLSIFISTWLTAAGFIHLVENSGDPWENFQNNQALTYWECVYLLMVTMSTVGYGDVYAKTTLGRLFMVFFILGGLAMFARYVPEIAALILSRNKFGGTFNKHGGRKHIVVCGHITLESVSNFLKDFLHKDRDDVNVEIVFLHNISPNLELEALFKRHFTQVEFYQGSVLNPHDLARVKIESADACLILANKYCADPDAEDASNIMRVISIKNYHPKIRIITQMLQYHNKAHLLNIPSWNWKEGDDAICLAELKLGFIAQSCLAQGLSTMLANLFSMRSFIKIEEDTWQKYYLEGVSNEMYTEYLSSAFVGLSFPTVCELCFVKLKLLMIAIEYKSANRESRILINPGNHLKIQEGTLGFFIASDAKEVKRAFFYCKACHDDITDPKRIKKCGCKRLEDEQPSTLSPKKKQRNGGMRNSPNTSPKLMRHDPLLIPGNDQIDNMDSNVKKYDSTGMFHWCAPKEIEKVILTRSEAAMTVLSGHVVVCIFGDVSSALIGLRNLVMPLRASNFHYHELKHIVFVGSIEYLKREWETLHNFPKVSILPGTPLSRADLRAVNINLCDMCVILSANQNNIDDTSLQDKECILASLNIKSMQFDDSIGVLQANSQGFTPPGMDRSSPDNSPVHGMLRQPSITTGVNIPIITELVNDTNVQFLDQDDDDDPDTELYLTQPFACGTAFAVSVLDSLMSATYFNDNILTLIRTLVTGGATPELEALIAEENALRGGYSTPQTLANRDRCRVAQLALLDGPFADLGDGGCYGDLFCKALKTYNMLCFGIYRLRDAHLSTPSQCTKRYVITNPPYEFELVPTDLIFCLMQFDHNAGQSRASLSHSSHSSQSSSKKSSSVHSIPSTANRQNRPKSRESRDKQNATRMNRMGQEKKWFTDEPDNAYPRNIQIKPMSTHMANQINQYKSTSSLIPPIREVEDEC

SEQ ID NO: 93388 - protein, 589 aa, Homo sapiens
MHDVIKKVKKKGEWKVLVVDQLSMRMLSSCCKMTDIMTEGITIVEDINKRREPLPSLEAVYLITPSEKSVHSLISDFKDPPTAKYRAAHVFFTDSCPDALFNELVKSRAAKVIKTLTEINIAFLPYESQVYSLDSADSFQSFYSPHKAQMKNPILERLAEQIATLCATLKEYPAVRYRGEYKDNALLAQLIQDKLDAYKADDPTMGEGPDKARSQLLILDRGFDPSSPVLHELTFQAMSYDLLPIENDVYKYETSGIGEARVKEVLLDEDDDLWIALRHKHIAEVSQEVTRSLKDFSSSKRMNTGEKTTMRDLSQMLKKMPQYQKELSKYSTHLHLAEDCMKHYQGTVDKLCRVEQDLAMGTDAEGEKIKDPMRAIVPILLDANVSTYDKIRIILLYIFLKNGITEENLNKLIQHAQIPPEDSEIITNMAHLGVPIVTDSTLRRRSKPERKERISEQTYQLSRWTPIIKDIMEDTIEDKLDTKHYPYISTRSSASFSTTAVSARYGHWHKNKAPGEYRSGPRLIIFILGGVSLNEMRCAYEVTQANGKWEVLIGSTHILTPTKFLMDLRHPDFRESSRVSFEDQAPTME

SEQ ID NO: 93389 - protein, 249 aa, Homo sapiens
MPDKESMYYPRVQHYRELLDSLPMDAYTHGCILHPELTVDSMIPAYATTRIRSQIGNTESELKKLAEENPDLQEAYIAKQKRLKSKLLDHDNVKYLKKILDELEKVLDQVETELQRRNEETPEEGQQPWLCGESFTLADVSLAVTLHRLKFLGFARRNWGNGKRPNLETYYERVLKRKTFNKVLGHVNNILISAVLPTAFRVAKKRAPKVLGTTLVVGLLAGVGYFAFMLFRKRLGSMILAFRPRPNYF

SEQ ID NO: 93390 - protein, 94 aa, Homo sapiens
MFLVNSFLKGGGGGGGGGGGLGAFEAAGFHLNEHLYNMIIRRYSDESGNMDFDNFISCLVRLDAMFRAFKSLDKDGTGQIQVNIQEWLQLTMYS

SEQ ID NO: 93391 - protein, 40 aa, Homo sapiens
MIVVLWMLLIAGTMWKGYKYPPGGTPVEVSKDDPGEVMQL

SEQ ID NO: 93392 - protein, 493 aa, Homo sapiens
SEAVYLNDSTYDGHTVGGLQYGGLGQLADGVVGLDDFRKSQELRVWPGYDYVGWSNHSFSSGYVEMEFEFDRLRAFQAMQVHCNNMHTLGARLPGGVECRFRRGPAMAWEGEPMRHNLGGNLGDPRARAVSVPLGGRVARFLQCRFLFAGPWLLFSEISFISDVVNNSSPALGGTFPPAPWWPPGPPPTNFSSLELEPRGQQPVAKAEGSPTAILIGCLVAIILLLLLIIALMLWRLHWRRLLSKVLESHPRTRSPGLVGIRPTPLPVSPMALRCCSPIQPTASFWPLTPVPLEARAPPHPPGPNPPTPRGVTGGNTYAVPALPPGAVGDGPPRVDFPRSRLRFKEKLGEGQFGEVHLCEVDSPQDLVSLDFPLNVRKGHPLLVAVKILRPDATKNARNDFLKEVKIMSRLKDPNIIRLLGVCVQDDPLCMITDYMENGDLNQFLSAHQLEDKAAEGAPGDGQAAQGPTISYPMLLHVAAQIASGMRYLATLN

SEQ ID NO: 93393 - protein, 655 aa, Homo sapiens
MHCKVSLLDDTVYECVVEKHAKGQDLLKRVCEHLNLLEEDYFGLAIWDNATSKTWLDSAKEIKKQVRGVPWNFTFNVKFYPPDPAQLTEDITRYYLCLQLRQDIVAGRLPCSFATLALLGSYTIQSELGDYDPELHGVDYVSDFKLAPNQTKELEEKVMELHKSYRSMTPAQADLEFLENAKKLSMYGVDLHKAKDLEGVDIILGVCSSGLLVYKDKLRINRFPWPKVLKISYKRSSFFIKIRPGEQEQYESTIGFKLPSYRAAKKLWKVCVEHHTFFRLTSTDTIPKSKFLALGSKFRYSGRTQAQTRQASALIDRPAPHFERTASKRASRSLDGAAAVDSADRSPRPTSAPAITQGQVAEGGVLDASAKKTVVPKAQKETVKAEVKKEDEPPEQAEPEPTEAWKVEKTHIEVTVPTSNGDQTQKLAEKTEDLIRMRKKKRERLDGENIYIRHSNLMLEDLDKSQEEIKKHHASISELKKNFMESVPEPRPSEWDKRLSTHSPFRTLNINGQIPTGEGPPLVKTQTVTISDNANAVKSEIPTKDVPIVHTETKTITYEAAQTDDNSGDLDPGVLLTAQTITSETPSSTTTTQITKTVKGGISETRIEKRIVITGDADIDHDQVLVQAIKEAKEQHPDMSVTKVVVHQETEIADE

SEQ ID NO: 93394 - protein, 189 aa, Homo sapiens
MVLLAAAVCTKAGKAIVSRQFVEMTRTRIEGLLAAFPKLMNTGKQHTFVETESVRYVYQPMEKLYMVLITTKNSNILEDLETLRLFSRVIPEYCRALEENEISEHCFDLIFAFDEIVALGYRENVNLAQIRTFTEMDSHEEKVFRAVRETQEREAKAEMRRKAKELQQAQSVGITGMSHHAQLLLYFNP

SEQ ID NO: 93395 - protein, 416 aa, Homo sapiens
MGEHPSPGPAVAACAEAERIEELEPEAEERLPAAPEDHWKVLFDQFDPGNTGYISTGKFRSLLESHSSKLDPHKREVLLALADSHADGQIGYQDFVSLMSNKRSNSFRQAILQGNRRLSSKALLEEKGLSLSQRLIRHVAYETLPREIDRKWYYDSYTCCPPPWFMITVTLLEVAFFLYNGVSLGQFVLQVTHPRYLKNSLVYHPQLRAQVWRYLTYIFMHAGIEHLGLNVVLQLLVGVPLEMVHGATRIGLVYVAGVVAELVRHEVPVQAAADGCGPYLYEHGVWAGRVAPLPPVGLSPVPSPKLCGALGWRGRGHHPGRGGPEELRAEAPGPVTVVDFCGHVHRLRAVRCLLEHLCLHPAGLKAAASPLRAGGPRSGRGGKSSTHRERLRGFFSSPAQLGRADKDRRLWATVMF

SEQ ID NO: 93396 - protein, 197 aa, Homo sapiens
MFILGFAGCIGALRENTFLLKFFSVFLGIIFFLELTAGVLAFVFKDWIKDQLYFFINNNIRAYRDDIDLQNLIDFTQEYWQCCGAFGADDWNLNIYFNCTDSNASRERCGVPFSCCTKDPAEDVINTQCGYDARQKPEVDQQIVIYTKGCVPQFEKWLQDNLTIVAGIFIGIALLQIFGICLAQNLVSDIEAVRASW

SEQ ID NO: 93397 - protein, 49 aa, Homo sapiens
MEGLLHYINPAHAISLLSALNEERLKGQLCDVLLIVGDQKFRAHKNVLA

SEQ ID NO: 93398 - protein, 70 aa, Homo sapiens
MAHRKLESVGSGMLDHRVRPGPVPHSQEPESEDMELPLEGYVPEGLELAALRPESPAPEEQECHNHSPDG

SEQ ID NO: 93399 - protein, 260 aa, Homo sapiens
MPRQFQDTGFSRPGLGQPRRCDPEPRKSDQQLDCALDLMRRLPPQQIEKNLSDLIDLVPSLCEDLLSSVDQPLKIARDKVVGKDYLLCDYNRDGDSYRSPWSNKYDPPLEDGAMPSARLRKLEVEANNAFDQYRDLYFEGGVSSVYLWDLDHGFAGVILIKKAGDGSKKIKGCWDSIHVVEVQEKSSGRTAHYKLTSTVMLWLQTNKSGSGTMNLGGSLTRQMEKDETVSDCSPHIANIGRLVEVCADFCRQIKTRSSEE

SEQ ID NO: 93400 - protein, 53 aa, Homo sapiens
MHFSIPETESRSGDSGGSAYVAYNIHVNGVLHCRVRYSQLLGLHEQVGLAPLP

SEQ ID NO: 93401 - protein, 45 aa, Homo sapiens
MVQDPSQFDVLVMPNLYGDILRFMGRLQTLQARTWRIPQPSCSVP

SEQ ID NO: 93402 - protein, 97 aa, Homo sapiens
MPDTFSYGGHEDFSKMIDEAEPLGYPVVVKSTRGHRGKAVFLARDKHHLSDICHLIRHDVPYLFQKYVKESHGKDIRVVVVGGQVIGSMLRCSTDGR

SEQ ID NO: 93403 - protein, 181 aa, Homo sapiens
THSVETPYGSVTFTVYGTPKPKRPAILTYHDVGLNYKSCFQPLFQFEDMQEIIQNFVRVHVDAPGMEEGAPVFPLGYQYPSLDQLADMIPCVLQYLNFSTIIGVGVGAGAYILARYALNHPDTVEGLTSSIPEMILGHLFSQEELSGNSELIQKYRNIITHAPNLDNIELYWNSYNNRRDL

SEQ ID NO: 93404 - protein, 1149 aa, Homo sapiens
  MOD_RES (1)..(1): Any amino acid
XMTTPSLKTDGGRRTATSPPPTTSQTIISTIPSTAMHTRSTAAPIPILPERGVSLFPYGAGAGDLEFVRRTVDFTSPLFKPATGFPLGSSLRDSLYFTDNGQIIFPESDYQIFSYPNPLPTGFTGRDPVALVAPFWDDADFSTGRGTTFYQEYETFYGEHSLLVQQAESWIRKMTNNGGYKARWALKVTWVNAHAYPAQWTLGSNTYQAILSTDGSRSYALFLYQSGGMQWDVAQRSGNPVLMGFSSGDGYFENSPLMSQPVWERYRPDRFLNSNSGLQGLQFYRLHREERPNYRLECLQWLKSQPRWPSWGWNQVSCPCSWQQGRRDLRFQPVSIGRWGLGSRQLCSFTSWRGGVCCSYGPWGEFREGWHVQRPWQLAQELEPQSWCCRWNDKPYLCALYQQRRPHVGCATYRPPQPAWMFGDPHITTLDGVSYTFNGLGDFLLVGAQDGNSSFLLQGRTAQTGSAQATNFIAFAAQYRSSSLGPVTVQWLLEPHDAIRVLLDNQTVTFQPDHEDGGGQETFNATGVLLSRNGSEVSASFDGWATVSVIALSNILHASASLPPEYQNRTEGLLGVWNNNPEDDFRMPNGSTIPPGSPEEMLFHFGMTWQINGTGLLGKRNDQLPSNFTPVFYSQLQKNSSWAEHLISNCDGDSSCIYDTLALRNASIGLHTREVSKNYEQANATLNQYPPSINGGRVIEAYKGQTTLIQYTSNAEDANFTLRDSCTDLELFENGTLLWTPKSLEPFTLEILARSAKIGLASALQPRTVVCHCNAESQCLYNQTSRVGNSSLEVAGCKCDGGTFGRYCEGSEDACEEPCFPSVHCVPGKGCEACPPNLTGDGRHCAALGSSFLCQNQSCPVNYCYNQGHCYISQTLGCQPMCTCPPAFTDSRCFLAGNNFSPTVNLELPLRVIQLLLSEEENASMAEVNASVAYRLGTLDMRAFLRNSQVERIDSAAPASGSPIQHWMVISEFQYRPRGPVIDFLNNQLLAAVVEAFLYHVPRRSEEPRNDVVFQPISGEDVRDVTALNVSTLKAYFRCDGYKGYDLVYSPQSGFTCVSPCSRGYCDHGGQCQHLPSGPRCSCVSFSIYTAWGEHCEHLSMKLDAFFGIFFGALGGLLLLGVGTFVVLRFWGCSGARFSYFLNSAEALP

SEQ ID NO: 93405 - protein, 163 aa, Homo sapiens
MKIFSESHKTVFVVDHCPYMAESCRQHVEFDMLVKNRTQGIIPLAPISKSLWTCSVESSMEYCRIMYDIFPFKKLVNFIVSDSGAHVLNSWTQEDQNLQELMAALAAVGPPNPRADPECCSILHGLVAAVETLCKITEYQHEARTLLMENAERVGNRGRIICI

SEQ ID NO: 93406 - protein, 318 aa, Homo sapiens
MASGTASRSEDEESLAGQKRASSQALGTIPKRRSSSRFIKRKKFDDELVESSLAKSSTRAKGASGVEPGRCSGSEPSSSEKKKVSKAPSTPVPPSPAPAPGLTKRVKKSKQPLQVTKDLGRWKPADDLLLINAVLQTNDLTSVHLGVKFSCRFTLREVQERWYALLYDPVISKLACQAMRQLHPEAIAAIQSKALFSKAEEQLLSKVGSTSQPTLETFQDLLHRHPDAFYLARTAKALQAHWQLMKQYYLLEDQTVQPLPKGDQVLNFSDAEDLIDDSKLKDMRDEVLEHELMVADRRQKREIRQLEQELHKWQVLVD

SEQ ID NO: 93407 - protein, 473 aa, Homo sapiens
MRSLPSNGELDPDVLESMASLGCFRDRERLHRELRSEEENQEKMIYYLLLDRKERYPSCEDQDLPPRNDVDPPRKRVDSPMLSRHGKRRPERKSMEVLSITDAGGGGSPVPTRRALEMAQHSQRSRSVSGASTGLSSSPLSSPRSPVFSFSPEPGAGDEARGGGSPTSKTQTLPSRGPRGGGAGEQPPPPSARSTPLPGPPGSPRSSGGTPLHSPLHTPRASPTGTPGTTPPPSPGGGVGGAAWRSRLNSIRNSFLGSPRFHRRKMQVPTAEEMSSLTPESSPELAKRSWFGNFISLDKEEQIFLVLKDKPLSSIKADIVHAFLSIPSLSHSVLSQTSFRAEYKASGGPSVFQKPVRFQVDISSSEGPEPSPRRDGSGGGGIYSVTFTLISGPSRRFKRVVETIQAQLLSTHDQPSVQALADEKNGAQTRPAGAPPRSLQPPPGRPDPELSSSPRRGPPKDKKLLATNGTPLP

SEQ ID NO: 93408 - protein, 42 aa, Homo sapiens
MISASRAAAARLVGAAASRGPTAARHQDTHWLVTESVFSFLG

SEQ ID NO: 93409 - protein, 149 aa, Homo sapiens
  MOD_RES (1)..(1): Any amino acid
XLLRKQEEQEPTGEEPAVLGGDKESTRKRPRREAPGNGGHSAGPSWRHIRAEGLDCSYTVLFGKAEADEIFQELEKEVEYFTGALARVQVFGKWHSVPRKQATYGDAGLTYTFSGLTLSPKPWIPVLERIRDHVSGVTGQTFNFVLINR

SEQ ID NO: 93410 - protein, 313 aa, Homo sapiens
MRPLQIVPSRLISQLYCGLKPPASTRNQICLKMARPSSSMADFRKFFAKAKHIVIISGAGVSAESGVPTFRGAGGYWRKWQAQDLATPLAFAHNPSRVWEFYHYRREVMGSKEPNAGHRAIAECETRLGKQGRRVVVITQNIDELHRKAGTKNLLEIHGSLFKTRCTSCGVVAENYKSPICPALSGKGAPEPGTQDASIPVEKLPRCEEAGCGGLLRPHVVWFGENLDPAILEEVDRELAHCDLCLVVGTSSVVYPAAMFAPQVAARGVPVAEFNTETTPATNRFRYWDTLMGEGDVGGRYRHGHLNIVDLLL

SEQ ID NO: 93411 - protein, 55 aa, Homo sapiens
MPSCDPGPGPACLPTKTFRSYLPRCHRTYSCVHCRAHLAKHDELISKGQRGLRAS

SEQ ID NO: 93412 - protein, 77 aa, Homo sapiens
MDGVVTDLITVGLKRGSDELLSSGIINGPFTMNSSTPSTGVYANGNDSKKFKRDRPPCSPSRVLHLRKIPCDVTEAE

SEQ ID NO: 93413 - protein, 529 aa, Homo sapiens
MDTCMTLAFTLSGRFFMLLSQYRYAYLLQPSQFHGEPCNFSDKEVEDCVTNRPCGSQVRCEGFVCAQTGRCVNRRLLCNGDNDCGDQSDEANCRRIYKKCQHEMDQYWGIGSLASGINLFTNSFEGPVLDHRYYAGGCSPHYILNTRFRKPYNVESYTPQTQGKYEFILKEYESYSDFERNVTEKMASKSGFSFGFKIPGIFELGISSQSDRGKHYIRRTKRFSHTKSVFLHARSDLEVAHYKLKPRSLMLHYEFLQRVKRLPLEYSYGEYRDLFRDFGTHYITEAVLGGIYEYTLVMNKEAMERGDYTLNNVHACAKNDFKIGGAIEEVYVSLGVSVGKCRGILNEIKDRNKRDTMVEDLVVLVRGGASEHITTLAYQELPTADLMQEWGDAVQYNPAIIKVKVEPLYELVTATDFAYSSTVRQNMKQALEEFQKEVSSCHCAPCQGNGVPVLKGSRCDCICPVGSQGLACEVSYRKNTPIDGKWNCWSNWSSCSGRRKTRQRQCNNPPPQNGGSPCSGPASETLDCS

SEQ ID NO: 93414 - protein, 228 aa, Homo sapiens
  MOD_RES (1)..(1): Any amino acid
XDQQDAAHNMGNHLPLLPAESEEEDEMEVEDQDSKEAKKPNIINFDTSLPTSHTYLGADMEEFHGRTLHDDDSCQVIPVLPQVMMILIPGQTLPLQLFHPQEVSMVRNLIQKDRTFAVLAYSNVQEREAQFGTTAEIYAYREEQDFGIEIVKVKAIGRQRFKVLELRTQSDGIQQAKVQILPECVLPSTMSAVQLESLNKCQIFPSKPVSREDQCSYKWWQKYQKVRN

SEQ ID NO: 93415 - protein, 52 aa, Homo sapiens
MLARVTRKMLRHAKCFQRLAIFGSVRALHKDNRTATPQNFSNYESMKQDFKL

SEQ ID NO: 93416 - protein, 178 aa, Homo sapiens
KCVNHKNIISLLNVFTPQKTLEEFQDVYLVMELMDANLCQVIQMELDHERMSYLLYQMLCGIKHLHSAGIIHRDLKPSNIVVKSDCTLKILDFGLARTAGTSFMMTPYVVTRYYRAPEVILGMGYKENDDSFIHVLIHHMSFFLKYFKWKLKLMFIYKNKLLKEKLSPKYQEFQFFCL

SEQ ID NO: 93417 - protein, 337 aa, Homo sapiens
MGPRARPALLLLMLLQTAVLQGRLLRSHSLHYLFMGASEQDLGLSLFEALGYVDDQLFVFYDHESRRVEPRTPWVSSRISSQMWLQLSQSLKGWDHMFTVDFWTIMENHNHSKESHTLQVILGCEMQEDNSTEGYWKYGYDGQDHLEFCPDTLDWRAAEPRAWPTKLEWERHKIRARQNRAYLERDCPAQLQQLLELGRGVLDQQVPPLVKVTHHVTSSVTTLRCRALNYYPQNITMKWLKDKQPMDAKEFEPKDVLPNGDGTYQGWITLAVPPGEEQRYTCQVEHPGLDQPLIVIWEPSPSGTLVIGVISGIAVFVVILFIGILFIILRKRQGSSF

SEQ ID NO: 93418 - protein, 86 aa, Homo sapiens
MSQGLSWHDDLTQYVISQEMERIPRLRPPEPRPRDRSGLAPKRPGPAGELLLQDIPTGSAPAAQHRLPQPPVGKGGAGASSSLSPL

SEQ ID NO: 93419 - protein, 143 aa, Homo sapiens
MKTFDANDLYQGQNFNKVLSSLVTLNKVTADIGLGSDSVCARPSSHRIKSFDSLGSQSLHTRTSKLFQGQYRSLDMTDNSNNQLVVRAKFNFQQTNEDELSFSKGDVIHVTRVEEGGWWEGTLNGRTGWFPSNYVREVKASGK

SEQ ID NO: 93420 - protein, 48 aa, Homo sapiens
MPPTRDPFQQPTLDNDDSYLGELRASKNQDPIPWRIFNPSHSTHHFPG

SEQ ID NO: 93421 - protein, 513 aa, Homo sapiens
MIRTPLSASAHRLLLPGSRGRPPRNMQPTGREGSRALSRRYLRRLLLLLLLLLLRQPVTRAETTPGAPRALSTLGSPSLFTTPGVPSALTTPGLTTPGTPKTLDLRGRAQALMRSFPLVDGHNDLPQVLRQRYKNVLQDVNLRNFSHGQTSLDRLRDGLVGAQFWSASVSCQSQDQTAVRLALEQIDLIHRMCASYSELELVTSAEGLNSSQKLACLIGVEGGHSLDSSLSVLRSFYVLGVRYLTLTFTCSTPWAESSTKFRHHMYTNVSGLTSFGEKVVEELNRLGMMIDLSYASDTLIRRVLEVSQAPVIFSHSAARAVCDNLLNVPDDILQLLKKNGGIVMVTLSMGVLQCNLLANVSTVADHFDHIRAVIGSEFIGIGGNYDGTGRFPQGLEDVSTYPVLIEELLSRSWSEEELQGVLRGNLLRVFRQVEKVREESRAQSPVEAEFPYGQLSTSCHSHLVPQNGHQATHLEVTKQPTNRVPWRSSNASPYLVPGLVAAATIPTFTQWLC

SEQ ID NO: 93422 - protein, 101 aa, Homo sapiens
  MOD_RES (1)..(1): Any amino acid
XMSSLQERKAAFSRAVGFIQAKGYPTYTNVEVVNDGAESAAFKQLFRTWSEKRRRNQKLGGRDKSIHVKLDVGKLHTQPKLAAQLRMVDDGSGKVEGLPGI

SEQ ID NO: 93423 - protein, 32 aa, Homo sapiens
MSEQGDLNQAIAEEGGTEQETATPENGIVKSE

SEQ ID NO: 93424 - protein, 127 aa, Homo sapiens
MTHSLVCPETVSRVSSVLNRNTRQFGKKHLFDQDEETCWNSDQGPSQWVTLEFPQLIRVSQLQIQFQGGFSSRRGCLEGSQGTQALHKIVDFYPEDNNSLQISCPCFWGGWSVPLEALDSPKPEWEP

SEQ ID NO: 93425 - protein, 144 aa, Homo sapiens
MDPPDLLSVELSTSRPPQHLGGVKKPTYDPVSEDQDPLSSDFKRLGLRKPGLPRGLWLAKPSARVPGTKASRGSGAEVTLIDFGEEPVVPALRPCAPSLAQLAMDACSLLDETPPQSPTRALPRPLHPTPVVDWDARPLPPPPA

SEQ ID NO: 93426 - protein, 80 aa, Homo sapiens
MVTTAVIIRDKYVRNVSCSVNNTLLGQEKETVIFIPESFMPSASPWMVALAVILTASPWMVSMTVILAVFIIFMAVSICC

SEQ ID NO: 93427 - protein, 173 aa, Homo sapiens
MEPSSKKLTGRLMLAVGGAVLGSLQFGYNTGVINAPQKVIEEFYNQTWVHRYGESILPTTLTTLWSLSVAIFSVGGMIGSFSVGLFVNRFGRRNSMLMMNLLAFVSAVLMGFSKLGKSFEMLILGRFIIGVYCGLTTGFVPMYVGEVSPTALRGALGTLHQLGIVVGILIAQC

SEQ ID NO: 93428 - protein, 144 aa, Homo sapiens
MNLAISIALLLTVDQSLRLDCRHENTSSSPIQYEFSLTRETKKHVLFGTVGVPEHTYRSRTNFTSKYNMKVLYLSAFTSKDEGTYTCALHHSGHSPPISSQNVTVLRDKLVKCEGISLLAQNTSWLLLLLLSLSLLQATDFMSL

SEQ ID NO: 93429 - protein, 187 aa, Homo sapiens
  MOD_RES (1)..(1): Any amino acid
XIPLHSLMPTVNQTQVFKRTPPGVRKIVIATNIAETSITIDDVVYVIDGGKIKETHFDTQNNISTMSAEWVSKANAKQRKGRAGRVQPGHCYHLYNGLRASLLDDYQLPEILRTPLEELCLQIKNALDKQEELTPLGVHLARLPVEPHIGKMILFGALFCCLDPVLTIAASLSFKDPFVIPLGKEKI

SEQ ID NO: 93430 - protein, 391 aa, Homo sapiens
ASPTSPKVFPLSLDSTPQDGNVVVACLVQGFFPQEPLSVTWSESGQNVTARNFPPSQDASGDLYTTSSQLTLPATQCPDGKSVTCHVKHYTNSSQDVTVPCRVPPPPPCCHPRLSLHRPALEDLLLGSEANLTCTLTGLRDASGATFTWTPSSGKSAVQGPPERDLCGCYSVSSVLPGCAQPWNHGETFTCTAAHPELKTPLTANITKSGNTFRPEVHLLPPPSEELALNELVTLTCLARGFSPKDVLVRWLQGSQELPREKYLTWASRQEPSQGTTTYAVTSILRVAAEDWKKGETFSCMVGHEALPLAFTQKTIDRMAGSCCVADWQMPPPYVVLDLPQETLEEETPGANLWPTTITFLTLFLLSLFYSTALTVTSVRGPSGKREGPQY

SEQ ID NO: 93431 - protein, 226 aa, Homo sapiens
MARGSLRRLLRLLVLGLWLALLRSVAGEQAPGTRDSGVGEPRAGAREPDWVSGEQRRTGGTGGCGDLGSGGLQTARSRLWEVPSLSKLHSQSGPQFLPPSNWGWGGSSVPQVRSTSNGERKRCSTSCPLPAALAHPWGRSEPDLRAGAAFWLFGLETMPQEREVHHPHRGDRRRGLPSCGADPVTMCPLPAGARPLIIHSSILEPVSASQTRREPSSSNHKGGGGR

SEQ ID NO: 93432 - protein, 59 aa, Homo sapiens
MADPRVRQIKIKTGVVKRLVKEKVMYEKEAKQQEEKIEKMRAEDGENYDIKKQDILTKI

SEQ ID NO: 93433 - protein, 69 aa, Homo sapiens
  MOD_RES (1)..(1): Any amino acid
XKKDSSSVIQFMSRAKVKVDPALRVVEIAHGNPEEVTMGFFRRRYKEIIEAEKNRKENEDSWDWVQKNQ

SEQ ID NO: 93434 - protein, 113 aa, Homo sapiens
MANFQEHLSCSSSPHLPFSESKTFNGLQDELTAMGNHPSPKLLEDQQEKGMVRTELIESVHSPVTTTVLTSVSEDSRDQFENSVLQLREHDESETAVSQGNSNTVDGESTSGT

SEQ ID NO: 93435 - protein, 307 aa, Homo sapiens
MPSEGRCWETLKALRSSDKGRLCYYRDWLLRREDVLEECMSLPKLSSYSGWVVEHVLPHMQENQPLSETSPSSTSASALDQPSFVPKSPDASSAFSPASPATPNGTKGKDESQHTESMVLQSSRGIKVEGCVRMYELVHRMKGTEGLRLWQEEQERKVQALSEMASEQLKRFDEWKELKQHKEFQDLREVMEKSSREALGHQEKLKAEHRHRAKILNLKLREAEQQRVKQAEQERLRKEEGQIRLRALYALQEEMLQLSQQLDASEQHKALLKVDLAAFQTRGNQLCSLISGIIRASSELSHSRESS

SEQ ID NO: 93436 - protein, 241 aa, Homo sapiens
MYTNGSPAPGSPAQVKGQEVRKVRLIQFEKVTEEPMGITLKLNEKQSCTVARILHGGMIHRQGSLHVGDEILEINGTNVTNHSVDQLQKAMKETKGMISLKVIPNQQSRLPALQMFMRAQFDYDPKKDNLIPCKEAGLKFATGDIIQIINKDDSNWWQGRVEGSSKESAGLIPSPELQEWRVASMAQSAPSEAPSCSPFGKKKKYKDKYLAKHSSIFDQLDVVSYEEVVRLPAFKRKTLVL

SEQ ID NO: 93437 - protein, 120 aa, Homo sapiens
MAELQEVQITEEKPLLPGQTPEAAKTHSVETPYGSVTFTVYGTPKPKRPAILTYHDVGLNYKSCFQPLFQFEDMQEIIQNFVRVHVDAPGMEEGAPVFPLGYQYPSLDQLADMIPCVLQY

SEQ ID NO: 93438 - protein, 151 aa, Homo sapiens
  MOD_RES (1)..(1): Any amino acid
XSTTATIIVHLVPRRASTVATSTHRTTVPSTMTPMLVTDTEAFWQPQPWFVVVLTATGALLLLALGWLLGRLLQGLAQLLQAPSKPAQALLLNSIQGTEGSIEGFLEAPKMEMSQAPSSVMSLQHFDGRAQDSRTGRDYLFNTHTGARRWL

SEQ ID NO: 93439 - protein, 314 aa, Homo sapiens
MAAPVVAPPGVVVSRANKRSGAGPGGSGGGGARGAEEEPPPPLQAVLVADSFDRRFFPISKDQPRVLLPLANVALIDYTLEFLTATGVQETFVFCCWKAAQIKEHLLKSKWCRPTSLNVVRIITSELYRSLGDVLRDVDAKALVRSDFLLVYGDVISNINITRALEEHRLRRKLEKNVSVMTMIFKESSPSHPTRCHEDNVVVAVDSTTNRVLHFQKTQGLRRFAFPLSLFQGSSDGVEVRYDLLDCHISICSPQVAQLFTDNFDYQTRDDFVRGLLVNEEVRKVFQCLFRREEKAMIVSHADPREPDPHARNS

SEQ ID NO: 93440 - protein, 171 aa, Homo sapiens
ILQVFKQLFYMINAVTLNNLLLRKDVCSWSTGMQLRYNISQLEEWLRGRNLHQSGAVQTMEPLIQAAQLLQLKKKTQEDAEAICSLCTSLSTQQIVKILNLYTPLNEFEERVTVAFIRTIQAQLQERNDPQQLLLDAKHMFPVLFPFNPSSLTMDSIHIPACLNLEFLNEV

SEQ ID NO: 93441 - protein, 95 aa, Homo sapiens
MGKRQTFSWLSKTNFSNNNDFRALLQSLYATFKEFKMHEQIENEYIIGLLQQRSQTIYNVHSDNKLSEMLSLFEKGLKNVKNEYEQLNYAKQLKE

SEQ ID NO: 93442 - protein, 150 aa, Homo sapiens
MVRWFHRDLSGLDAETLLKGRGVHGSFLARPSRKNQGDFSLSVRVGDQVTHIRIQNSGDFYDLYGGEKFATLTELVEYYTQQQGVLQDRDGTIIHLKYPLNCSDPTSERWYHGHMSGGQAETLLQAPRSGSPTSRSCARVDATQWVVWRP

SEQ ID NO: 93443 - protein, 307 aa, Homo sapiens
MGENQTMVTEFLLLGFLLGPRIQMLLFGLFSLFYIFTLLGNGAILGLISLDSRLHTPMYFFLSHLAVVDIAYACNTVPQMLANLLHPAKPISFAGCMTQTFLCLSFGHSECLLLVLMSYDRYVAICHPLRYSVIMTWRVCITLAVTSWTCGSLLALVHVVLILRLPFCGPHEINHFFCEILSVLRLACADTWLNQVVIFAACVFFLVGPPSLVLVSYSHILAAILRIQSGEGRRKAFSTCSSHLCVVGLFFGSAIIMYMAPKSRHPEEQQKVFFLFYSFFNPTLNPLIYSLRNGEVKGALRRALGKE

SEQ ID NO: 93444 - protein, 380 aa, Homo sapiens
MSDHGDVSLPPEDRVRALSQLGSAVEVNEDIPPRRYFRSGVEIIRMASIYSEEGNIEHAFILYNKYITLFIEKLPKHRDYKSAVIPEKKDTVKKLKEIAFPKAEELKAELLKRYTKEYTEYNEEKKKEAEELARNMAIQQELEKEKQRVAQQKQQQLEQEQFHAFEEMIRNQELEKERLKIVQEFGKPSDCHTTVRPAKPPVVDRSLKPGALSNSESIPTIDGLRHVVVPGRLCPQFLQLASANTARGVETCGILCGKLMRNEFTITHVLIPKQSAGSDYCNTENEEELFLIQDQQGLITLGWIHTHPTQTAFLSSVDLHTHCSYQMMLPESVAIVCSPKFQETGFFKLTDHGLEEISSCRQKGFHPHSKDPPLFCPVLQ

SEQ ID NO: 93445 - protein, 89 aa, Homo sapiens
  MOD_RES (1)..(1): Any amino acid
XFGTYYVDHTNKKAQYRHPCAPRYDHILKWELFQLADLDTYQGMLKLLFMKELEQIVKMYEAYRQALLTELENRKQRQQWYAQQHGKNF

SEQ ID NO: 93446 - protein, 357 aa, Homo sapiens
MSVSVLSPSRRLGGVSGILQVTSLLILLLLLIKAAQLYLHRQWLLKALQQFPCPPSHWLFGHIQEFQHDQELQRIQERVKTFPSACPYWIWGGKVRVQLYDPDYMKVILGRSDPKSHGSYKFLAPRIGYGLLLLNGQTWFQHRRMLTPAFHNDILKPYVGLMADSVRVMLDKWEELLGQDSPLEVFQHVSLMTLDTIMKSAFSHQGSIQVDRPSDPTEEGSTTEGGGAGEDQEEEALGFSGHPPLGQRAPGLPRPCWCSGWNCFRNHLDQMPYTTMCIKEALRLYPPVPGIGRELSTPVTFPDGRSLPKGIMVLLSIYGLHHNPKVWPNLEVFDPSRFAPGSAQHSHAFLPFSGGSR

SEQ ID NO: 93447 - protein, 110 aa, Homo sapiens
MRCLTTPMLLRALAQAARAGPPGGRSLHSSAVAATYKYVNMQDPEMDMKSVTDRAARTLLWTELFRGLGMTLSYLFREPATINYPFEKGPLSPRFRGEHALRRYPSGEER

SEQ ID NO: 93448 - protein, 46 aa, Homo sapiens
MATTSTTGSTLLQPLSNAVQLPIDQLLLCVCSGIPHSVPSYSSLYL

SEQ ID NO: 93449 - protein, 39 aa, Homo sapiens
MADDIDIEAMLEAPYKKDENKLSSANGHEERSKKSLNAS

SEQ ID NO: 93450 - protein, 55 aa, Homo sapiens
MSGRLWSKAIFAGYKRGLRNQREHTALLKIEGVYARDETEFYLGKRCAYVYKAKK

SEQ ID NO: 93451 - protein, 358 aa, Homo sapiens
MWATLPLLCAGAWLLGVPVCGAAELCVNSLEKFHFKSWMSKHRKTYSTEEYHHRLQTFASNWRKINAHNNGNHTFKMALNQFSDMSFAEIKHKYLWSEPQNCSATKSNYLRGTGPYPPSVDWRKKGNFVSPVKNQGACGSCWTFSTTGALESAIAIATGKMLSLAEQQLVDCAQDFNNHGCQGGLPSQAFEYILYNKGIMGEDTYPYQGKDGYCKFQPGKAIGFVKDVANITIQLSASCRRGYEHVLDTACVKLRRYDEEAMVEAVALYNPVSFAFEVTQDFMMYRTGIYSSTSCHKTPDKVNHAVLAVGYGEKNGIPYWIVKNSWGPQWGMNGYFLIERGKNMCGLAACASYPIPLV

SEQ ID NO: 93452 - protein, 85 aa, Homo sapiens
  MOD_RES (1)..(1): Any amino acid
XYSNSCYYIGKERRTWEESLLACTSKNSSLLSIDNEEEMKFLASILPSSWIGVFRNSSHHPWVTINGLAFKHNTWKMLSSHESFA

SEQ ID NO: 93453 - protein, 1845 aa, Homo sapiens
MSGEVRLRQLEQFILDGPAQTNGQCFSVETLLDILICLYDECNNSPLRREKNILEYLEWAKPFTSKVKQMRLHREDFEILKVIGRGAFGEVAVVKLKNADKVFAMKILNKWEMLKRAETACFREERDVLVNGDNKWITTLHYAFQDDNNLYLVMDYYVGGDLLTLLSKFEDRLPEDMARFYLAEMVIAIDSVHQLHYVHRDIKPDNILMDMNGHIRLADFGSCLKLMEDGTVQSSVAVGTPDYISPEILQAMEDGKGRYGPECDWWSLGVCMYEMLYGETPFYAESLVETYGKIMNHKERFQFPAQVTDVSENAKDLIRRLICSREHRLGQNGIEDFKKHPFFSGIDWDNIRNCEAPYIPEVSSPTDTSNFDVDDDCLKNSETMPPPTHTAFSGHHLPFVGFTYTSSCVLSDRSCLRVTAGPTSLDLDVNVQRTLDNNLATEAYERRIKRLEQEKLELSRKLQESTQTVQALQYSTVDGPLTASKDLEIKNLKEEIEKLRKQVTESSHLEQQLEEANAVRQELDDAFRQIKAYEKQIKTLQQEREDLNKELVQASERLKNQSKELKDAHCQRKLAMQEFMEINERLTELHTQKQKLARHVRDKEEEVDLVMQKVESLRQELRRTERAKKELEVHTEALAAEASKDRKLREQSEHYSKQLENELEGLKQKQISYSPGVCSIEHQQEITKLKTDLEKKSIFYEEELSKREGIHANEIKNLKKELHDSEGQQLALNKEIMILKDKLEKTRRESQSEREEFESEFKQQYEREKVLLTEENKKLTSELDKLTTLYENLSIHNQQLEEEVKDLADKKESVAHWEAQITEIIQWVSDEKDARGYLQALASKMTEELEALRNSSLGTRATDMPWKMRRFAKLDMSARLELQSALDAEIRAKQAIQEELNKVKASNIITECKLKDSEKKNLELLSEIEQLIKDTEELRSEKGIEHQDSQHSFLAFLNTPTDALDQFEDSFSSSSSSLIDFLDDRSPSCTPASKGRRTDPVENTYVWNPSVKFHIQSRSTSPSTSSEAEPVKTVDSTPLSVHTPTLRKKGCPGSTGFPPKRKTHQFFVKSFTTPTKCHQCTSLMVGLIRQGCSCEVCGFSCHITCVNKAPTTCPVPPEQTKGPLGIDPQKGIGTAYEGHVRIPKPAGVKKGWQRALAIVCDFKLFLYDIAEGKASQPSVVISQVIDMRDEEFSVSSVLASDVIHASRKDIPCIFRVTASQLSASNNKCSILMLADTENEKNKWVGVLSELHKILKKNKFRDRSVYVPKEAYDSTLPLIKTTQAAAIIDHERIALGNEEGLFVVHVTKDEIIRVGDNKKIHQIELIPNDQLVAVISGRNRHVRLFPMSALDGRETDFYKLSETKGCQTVTSGKVRHGALTCLCVAMKRQVLCYELFQSKTRHRKFKEIQVPYNVQWMAIFSEQLCVGFQSGFLRYPLNGEGNPYSMLHSNDHTLSFIAHQPMDAICAVEISSKEYLLCFNSIGIYTDCQGRRSRQQELMWPANPSSCCYNAPYLSVYSENAVDIFDVNSMEWIQTLPLKKVRPLNNEGSLNLLGLETIRLIYFKNKMAEGDELVVPETSDNSRKQMVRNINNKRRYSFRVPEEERMQQRREMLRDPEMRNKLISNPTNFNHIAHMGPGDGIQILKDLPMPGFPYPSPHHHSGLISSPINFEHIYHMTVNSAEKFLSPDSINPEYSPSLRSVPGTPSFMTLRNPRPQESRTVFSGSVSIPSITKSRPEPGRSMSASSGLSARSSAQNGSALKREFSGGSYSAKRQPMPSPSEGSLSSGGMDQGSDAPARDFDGEDSDSPRHSTASNSSNLSSPPSPASPRKTKSLSLESTDRGSWDP

SEQ ID NO: 93454 - protein, 190 aa, Homo sapiens
MDRYSMEELIQLGQDERDRVQKKTFTKWVNKHLIKAQRHISDLYEDLRDGHNLISLLEVLSGDSLPREKGRMRFHKLQNVQIALDYLRHRQVKLVNIRNDDIADGNPKLTLGLIWTIILHFQISDIQVSGQSEDMTAKEKLLLWSQRMVEGYQGLRCDNFTSSWRDGRLFNAIIHRHKPLLIDMNKVYRQ

SEQ ID NO: 93455 - protein, 34 aa, Homo sapiens
MYLWLKLLAFGFAFLDTEVFVTGQSPTPSPTGKN

SEQ ID NO: 93456 - protein, 899 aa, Homo sapiens
MGDPDLLEVLAEEGEKVNKHIDYSFQMSEQSLSSRETSFLINEETMFQKNQQSKDSIFFRDGIRQIDFVLSYVDDVKKDAELKAERRKEFETNLRKTGLELEIEDKRDSEDGRTYFVKIHAPWEVLVTYAEVLGIKMPIKESDIPRPKHTPISYVLGPVRLPLSVKYPHPEYFTAQFSRHRQELFLIEDQATFFPSSSRNRIVYYILSRCPFGIEDGKKRFGIERLLNSNTYSSAYPLHDGQYWKPSEPPNPTNERYTLHQNWARFSYFYKEQPLDLIKNYYGEKIGIYFVFLGFYTEMLFFAAVVGLACFIYGLLSMEHNTSSTEICDPEIGGQMIMCPLCDQVCDYWRLNSTCLASKFSHLFDNESTVFFAIFMGIWVTLFLEFWKQRQARLEYEWDLVDFEEEQQQLQLRPEFEAMCKHRKLNAVTKEMEPYMPLYTRIPWYFLSGATVTLWMSLVVTSMVAVIVYRLSVFATFASFMESDASLKQVKSFLTPQITTSLTGSCLNFIVILILNFFYEKISAWITKMEIPRTYQEYESSLTLKMFLFQFVNFYSSCFYVAFFKGKFVGYPGKYTYLFNEWRSEECDPGGCLIELTTQLTIIMTGKQIFGNIKEAIYPLALNWWRRRKARTNSEKLYSRWEQDHDLESFGPLGLFYEYLETVTQFGFVTLFVASFPLAPLLALINNIVEIRVDAWKLTTQYRRTVASKAHSIGVWQDILYGMAVLSVATNAFIVAFTSDIIPRLVYYYAYSTNATQPMTGYVNNSLSVFLIADFPNHTAPSEKRDFITCRYRDYRYPPDDENKYFHNMQFWHVLAAKMTFIIVMEHVVFLVKFLLAWMIPDVPKDVVERIKREKLMTIKILHDFELNKLKENLGINSNEFAKHVMIEENKAQLAKSTL

SEQ ID NO: 93457 - protein, 135 aa, Homo sapiens
  MOD_RES (1)..(1): Any amino acid
XALSRDYRNLKPSAVAPQRKMPLDDTKLIIHQTLSVLEDIVENISGESTKSRQICYQSLQESVQVSLALFPAFIHQSGLRVQMGVPFTEQIIQTFLNMFTREQLAESILHEGSTGCRVVEKFLKILQVVVQEPGQ

SEQ ID NO: 93458 - protein, 217 aa, Homo sapiens
RRLGGGTAEGKTGRGLGGPSWDTGPRAMGSLSRPSFSDRLIALEMAKIHTIHANGSLPKPILWHKMHNYFTLVKNEINPSLSADVPKVEVLERELAWLKEHLSQLESPVVFCHNDLLCKNIIYDSIKGHVRFIDYEYAGYNYQAFDIGNHFNEFAGVNEVDYCLYPARETQLQWLHYYLQAQKGMAVTPREVQRLYVQVNKFALASHFFWALWALIQ

SEQ ID NO: 93459 - protein, 54 aa, Homo sapiens
MEPRDGSPEARSSDSESASASSSGSERDAGPEPDKAPRRLNKRRFPGLRLFGHR

SEQ ID NO: 93460 - protein, 70 aa, Homo sapiens
MIAAPEIPTDFNLLQESETHFSSDTDFEDIEGKNQKQGKGKTCKKGKKGPAEKGKGGNGGGKPPSGPNRM

SEQ ID NO: 93461 - protein, 1109 aa, Homo sapiens
MPTAESEAKVKTKVRFEELLKTHSDLMREKKKLKKKLVRSEENISPDTIRSNLHYMKETTSDDPDTIRSNLPHIKETTSDDVSAANTNNLKKSTRVTKNKLRNTQLATENPNGDASVEEDKQGKPNKKVIKTVPQLTTQDLKPETPENKVDSTHQKTHTKPQPGVDHQKSEKANEGREETDLEEDEELMQAYQCHVTEEMAKEIKRKIRKKLKEQLTYFPSDTLFHDDKLSSEKRKKKKEVPVFSKAETSTLTISGDTVEGEQKKESSVRSVSSDSHQDDEISSMEQSTEDSMQDDTKPKPKKTKKKTKAVADNNEDVDGDGVHEITSRDSPVYPKCLLDDDLVLGVYIHRTDRLKSDFMISHPMVKIHVVDEHTGQYVKKDDSGRPVSSYYEKENVDYILPIMTQPYDFKQLKSRLPEWEEQIVFNENFPYLLRGSDESPKVILFFEILDFLSVDEIKNNSEVQNQECGFRKIAWAFLKLLGANGNANINSKLRLQLYYPPTKPRSPLSVVEAFEWWSKCPRNHYPSTLYVTVRGLKVPDCIKPSYRSMMALQEEKGKPVHCERHHESSSVDTEPGLEESKEVIKWKRLPGQACRIPNKHLFSLNAGERGCFCLDFSHNGRILAAACASRDGYPIILYEIPSGRFMRELCGHLNIIYDLSWSKDDHYILTSSSDGTARIWKNEINNTNTFRVLPHPSFVYTAKFHPAVRELVVTGCYDSMIRIWKVEMREDSAILVRQFDVHKSFINSLCFDTEGHHMYSGDCTGVIVVWNTYVKINDLEHSVHHWTINKEIKETEFKGIPISYLEIHPNGKRLLIHTKDSTLRIMDLRILVARKFVGAANYREKIHSTLTPCGTFLFAGSEDGIVYVWNPETGEQVAMYSDLPFKSPIRDISYHPFENMVAFCAFGQNEPILLYIYDFHVAQQEAEMFKRYNGTFPLPGIHQSQDALCTCPKLPHQGSFQIDEFVHTESSSTKMQLVKQRLETVTEVIRSCAAKVNKNLSFTSPPAVSSQQSKLKQSNMLTAQEILHQFGFTQTGIISIERKPCNHQVDTAPTQSINKNKSQDFRLGSESMTHSEMRKEQSHEDQGHIMDTRMRKNKQAGRKVTLIE

SEQ ID NO: 93462 - protein, 133 aa, Homo sapiens
  MOD_RES (1)..(1): Any amino acid
XGRGLDRVGVSHNGEEGAALIALLHLLQDSGSGEEQALCVRNRSAFEQQHHHLLHCLEKTTCHEFTDELTFSEALGAVSPGGRTSRSTSVSSQPVGPGSLLSSCCPRRAKRRAIRLANSTASVSRGSMQELDM

SEQ ID NO: 93463 - protein, 156 aa, Homo sapiens
MDPLETPIKDGILYQQHVKFGKKCWRKVWALLYAGGPSGVARLESWEVRDGGLGAAGDRSAGPGRRGERRVIRLADCVSVLPADGESCPRDTGAFLLTTTERSHLLAAQHRQAWMGPICQLAFPGTGEASSGSTDAQSPKRGLVPMEENSIYSSWQ

SEQ ID NO: 93464 - protein, 55 aa, Homo sapiens
MASLDDPGEVREGFLCPLCLKDLQSFYQLHSHYEEEHSGEDRDVKGQIKNVISVS

SEQ ID NO: 93465 - protein, 147 aa, Homo sapiens
MTENTHFDKIPESCALKSWRHPGLHHGEAALRGEPRIQTLPVASALSSHRTGPPPISPSKRKFSMEPGDEDLDCDNDHVSKMSRIFNPHLNKTANGDCRRDPRERSRSPIERAVAPTMSLHGSHLYTSLPSLGLEQPLALTKNSLDA

SEQ ID NO: 93466 - protein, 73 aa, Homo sapiens
MPHSSDSSDSSFSRSPPPGKQDSSDDVRRVQRREKNRIAAQKSRQRQTQKSIKKDAQVPWHRARRAGNGYFSK

SEQ ID NO: 93467 - protein, 707 aa, Homo sapiens
MLGICRGRRKFLAASLSLLCIPAITWIYLFSGSFEDGKPVSLSPLESQAHSPRYTASSQRERESLEVRMREVEEENRALRRQLSLAQGRAPSHRRGNHSKTYSMEEGTGDSENLRAGIVAGNSSECGQQPVVEKCETIHVAIVCAGYNASRDVVTLVKSVLFHRRNPLHFHLIADSIAEQILATLFQTWMVPAVRVDFYNADELKSEVSWIPNKHYSGIYGLMKLVLTKTLPANLERVIVLDTDITFATDIAELWAVFHKFKGQQVLGLVENQSDWYLGNLWKNHRPWPALGRGYNTGVILLLLDKLRKMKWEQMWRLTAERELMGMLSTSLADQDIFNAVIKQNPFLVYQLPCFWNVQLSDHTRSEQCYRDVSDLKVIHWNSPKKLRVKNKHVEFFRNLYLTFLEYDGNLLRRELFGCPSEADVNSENLQKQLSELDEDDLCYEFRRERFTVHRTHLYFLHYEYEPAADSTDVTLVAQLSMDRLQMLEAICKHWEGPISLALYLSDAEAQQFLRYAQGSEVLMSRHNVGYHIVYKEGQFYPVNLLRNVAMKHISTPYMFLSDIDFLPMYGLYEYLRYHVWTKGHAPTNFAKWRTATTPYRVEWEADFEPYVVVRRDCPEYDRRFVGFGWNKVAHIMELDVQEYEFIVLPNAYMIHMPHAPSFDITKFRSNKQYRICLKTLKEEFQQDMSRRYGFAALKYLTAENNS

SEQ ID NO: 93468 - protein, 155 aa, Homo sapiens
  MOD_RES (1)..(1): Any amino acid
XWASGMSTVPGGSRHSLGIQVRGGWGVTGGEEESLTVPVADTWQAGSFKVATQERNPQRVQMRLRRQKKGVVPFLGDFLTELQRLDSAIPDDLDGNTNKRSKEVRVLQEMQLLQVAAMNYRLRPLEKFVTYFTRMEQLSDKESYKLSCQLEPENP

SEQ ID NO: 93469 - protein, 224 aa, Homo sapiens
MSWKKALRIPGDLRVATVTLMLAMLSSLLAEGRDSPEDFVFQFKGMCYFTNGTERVRLVTRYIYNREEYARFDSDVGVYRAVTPQGRPDAEYWNSQKEVLEGTRAELDTVCRHNYEVAFRGILQRRVEPTVTISPSRTEALNHHNLLVCSVTDFYPGQIKVRWFRNDQEETAGVVSTPLIRNGDWTFQILVMLEMTPQRGDVYTCHVEHPSLQSPITVEWRLLH

SEQ ID NO: 93470 - protein, 216 aa, Homo sapiens
MRLGPRTAALGLLLLCAAAAGAGKAEELHYPLGERRSDYDREALLGVQLHLKDKKRFEKANQDSGPGLSLEEFIAFEHPEEVDYMTEFVIQEALEEHDKNGDGFVSLEEFLGDYRWDPTANEDPEWILVEKDRFVNDYDKDNDGRLDPQELLPWVVPNNQGIAQEEALHLIDEMDLNGDKKLSEEEILENPDLFLTSEATDYGRQLHDDYFYHDEL

SEQ ID NO: 93471 - protein, 1301 aa, Homo sapiens [sequence omitted]

SEQ ID NO: 93472 - protein, 944 aa, Homo sapiens
MSVACVLKRKAVLWQDSFSPHLKHHPQEPANPNMPVVLTSGTGSQAQPQPAANQALAAGTHSSPVPGSIGVAGRSQDDAMVDYFFQRQHGEQLGGGGSGGGGYNNSKHRWPTGDNIHAEHQVRSMDELNHDFQALALEGRAMGELFQRPNALAVQQLTAAQQQQYALAAAHQPHIGLAPAAFVPNPYIISAAPPGTDPYTAGLAAAATLGPAVVPHQYYGVTPWGVYPASLFQQQAAAAAAATNSANQQTTPQAQQGQQQVLRGGASQRPLTPNQNQQGQQTDPLVAAAAVNSALAFGQGLAAGMPGYPVLAPAAYYDQTGALVVNAGARNGLGAPVRLVAPAPVIISSSAAQAAVAAAAASANGAAGGLAGTTNGPFRPLGTQQPQPQPQQQPNNNLASSSFYGNNSLNSNSQSSSLFSQGSAQPANTSLGFGSSSSLGATLGSALGGFGTAVANSNTGSGSRRDSLTGSSDLYKRTSSSLTPIGHSFYNGLSFSSSPGPVGMPLPSQGPGHSQTPPPSLSSHGSSSSLNLGGLTNGSGRYISAAPGAEAKYRSASSASSLFSPSSTLFSSSRLRYGMSDVMPSGRSRLLEDFRNNRYPNLQLREIAGHIMEFSQDQHGSRFIQLKLERATPAERQLVFNEILQAAYQLMVDVFGNYVIQKFFEFGSLEQKLALAERIRGHVLSLALQMYGCRVIQKALEFIPSDQQNEMVRELDGHVLKCVKDQNGNHVVQKCIECVQPQSLQFIIDAFKGQVFALSTHPYGCRVIQRILEHCLPDQTLPILEELHQHTEQLVQDQYGNYVIQHVLEHGRPEDKSKIVAEIRGNVLVLSQHKFASNVVEKCVTHASRTERAVLIDEVCTMNDGPHSALYTMMKDQYANYVVQKMIDVAEPGQRKIVMHKIRPHIATLRKYTYGKHILAKLEKYYMKNGVDLGPICGPPNGII

SEQ ID NO: 93473 - protein, 661 aa, Homo sapiens
MRALWVLGLCCVLLTFGSVRADDEVDVDGTVEEDLGKSREGSRTDDEVVQREEEAIQLDGLNASQIRELREKSEKFAFQAEVNRMMKLIINSLYKNKEIFLRELISNASDALDKIRLISLTDENALSGNEELTVKIKCDKEKNLLHVTDTGVGMTREELVKNLGTIAKSGTSEFLNKMTEAQEDGQSTSELIGQFGVGFYSAFLVADKVIVTSKHNNDTQHIWESDSNEFSVIADPRGNTLGRGTTITLVLKEEASDYLELDTIKNLVKKYSQFINFPIYVWSSKTETVEEPMEEEEAAKEEKEESDDEAAVEEEEEEKKPKTKKVEKTVWDWELMNDIKPIWQRPSKEVEEDEYKAFYKSFSKESDDPMAYIHFTAEGEVTFKSILFVPTSAPRGLFDEYGSKKSDYIKLYVRRVFITDDFHDMMPKYLNFVKGVVDSDDLPLNVSRETLQQHKLLKVIRKKLVRKTLDMIKKIADDKYNDTFWKEFGTNIKLGVIEDHSNRTRLAKLLRFQSSHHPTDITSLDQYVERMKEKQDKIYFMAGSSRKEAESSPFVERLLKKGYEVIYLTEPVDEYCIQALPEFDGKRFQNVAKEGVKFDESEKTKESREAVEKEFEPLLNWMKDKALKDKVLWKLQIVEILVSAFKRKLFCEQIKLQLVTL

SEQ ID NO: 93474 - protein, 921 aa, Homo sapiens
MIDLSISNLEGLRTKCATSNDLTQKEIRTLESKLVKYFSRQLSCKKKVALQERNAELDGFPQLRHWFRIVDVRKEVLEEISPGQLSLEDLLEMTDEQVCETVEKYGANREECARLNASLSCLRNVHMSGGNLSKQDWTIQWPTTETGKENNPVCPPEPTPWIRTHLSQSPRVPSKCVQHYCHTSPTPGAPVYTHVDRLTVDAYPGLCPPPPLESGHRSLPPSPRQRHAVRTPPRTPNIVTTVTPPGTPPMRKKNKLKPPGTPPPSSRKLIHLIPGFTALHRSKSHEFQLGHRVDEAHTPKAKKKSKPLNLKIHSSVGSCENIPSQQRSPLLSERSLRSFFVGHAPFLPSTPPVHTEANFSANTLSVPRWSPQIPRRDLGNSIKHRFSTKYWMSQTCTVCGKGMLFGLKCKNCKLKCHNKCTKEAPPCHLLIIHRGDPARLVRTESVPCDINNPLRKPPRYSDLHISQTLPKTNKINKDHIPVPYQPDSSSNPSSTTSSTPSSPAPPLPPSATPPSPLHPSPQCTRQQKNFNLPASHYYKYKQQFIFPDVVPVPETPTRAPQVILHPVTSNPILEGNPLLQIEVEPTSENEEVHDEAEESEDDFEEMNLSLLSARSFPRKASQTSIFLQEWDIPFEQLEIGELIGKGRFGQVYHGRWHGEVAIRLIDIERDNEDQLKAFKREVMAYRQTRHENVVLFMGACMSPPHLAIITSLCKGRTLYSVVRDAKIVLDVNKTRQIAQEIVKGMGYLHAKGILHKDLKSKNVFYDNGKVVITDFGLFSISGVLQAGRREDKLRIQNGWLCHLAPEIIRQLSPDTEEDKLPFSKHSDVFALGTIWYELHAREWPFKTQPAEAIIWQMGTGMKPNLSQIGMGKEISDILLFCWAFEQEERPTFTKLMDMLEKLPKRNRRLSHPGHFWKSAEL

SEQ ID NO: 93475 - protein, 3590 aa, Homo sapiens
METCDSPPISRQENGQSTSKLCGTTQLDNEVPEKVAGMEPDRENSSTDDNLKTDERKSEALLGFSVENAAATQVTSAKEIPCNECATSFPSLQKYMEHHCPNARLPVLKDDNESEISELEDSDVENLTGEIVYQPDGSAYIIEDSKESGQNAQTGANSKLFSTAMFLDSLASAGEKSDQSASAPMSFYPQIINTFHIASSLGKPFTADQAFPNTSALAGVGPVLHSFRVYDLRHKREKDYLTSDGSAKNSCVSKDVPNNVDLSKFDGCVSDGKRKPVLMCFLCKLSFGYIRSFVTHAVHDHRMTLNDEEQKLLSNKCVSAIIQGIGKDKEPLISFLEPKKSTSVYPHFSTTNLIGPDPTFRGLWSAFHVENGDSLPAGFAFLKGSASTSSSAEQPLGITQMPKAEVNLGGLSSLVVNTPITSVSLSHSSSESSKMSESKDQENNCERPKESNVLHPNGECPVKSEPTEPGDEDEEDAYSNELDDEEVLGELTDSIGNKDFPLLNQSISPLSSSVLKFIEKGTSSSSATVSDDTEKKKQTAAVRASGSVASNYGISGKDFADASASKDSATAAHPSEIARGDEDSSATPHQHGFTPSTPGTPGPGGDGSPGSGIECPKCDTVLGSSRSLGGHMTMMHSRNSCKTLKCPKCNWHYKYQQTLEAHMKEKHPEPGGSCVYCKTGQPHPRLARGESYTCGYKPFRCEVCNYSTTTKGNLSIHMQSDKHLNNVQNLQNGNGEQVFGHSAPAPNTSLSGCGTPSPSKPKQKPTWRCEVCDYETNVARNLRIHMTSEKHMHNMMLLQQNMKQIQHNLHLGLAPAEAELYQYYLAQNIGLTGMKLENPADPQLMINPFQLDPATAAALAPGLGELSPYISDPALKLFQCAVCNKFTSDSLEALSVHVSSERSLPEEEWRAVIGDIYQCKLCNYNTQLKANFQLHCKTDKHMQKYQLVAHIKEGGKSNEWRLKCIAIGNPVHLKCNACDYYTNSVDKLRLHTTNHRHEAALKLYKHLQKQEGAVNPESCYYYCAVCDYTTKVKLNLVQHVRSVKHQQTEGLRKLQLHQQGLAPEEDNLSEIFFVKDCPPNELETASLGARTCDDDLTEQQLRSTSEEQSEEAEGAIKPTAVAEDDEKDTSERDNSEGKNSNKDSGIITPEKELKVSVAGGTQPLLLAKEEDVATKRSKPTEDNKFCHEQFYQCPYCNYNSRDQSRIQMHVLSQHSVQPVICCPLCQDVLSNKMHLQLHLTHLHSVSPDCVEKLLMTVPVPDVMMPNSMLLPAAASEKSERDTPAAVTAEGSGKYSGESPMDDKSMAGLEDSKANVEVKNEEQKPTKEPLEVSEWNKNSSKDVKIPDTLQDQLNEQQKRQPLSVSDRHVYKYRCNHCSLAFKTMQKLQIHSQYHAIRAATMCNLCQRSFRTFQALKKHLEAGHPELSEAELQQLYASLPVNGELWAESETMSQDDHGLEQEMEREYEVDHEGKASPVGSDSSSIPDDMGSEPKRTLPFRKGPNFTMEKFLDPSRPYKCTVCKESFTQKNILLVHYNSVSHLHKLKKVLQEASSPVPQETNSNTDNKPYKCSICNVAYSQSSTLEIHMRSVLHQTKARAAKLEPSGHVAGGHSIAANVNSPGQGMLDSMSLAAVNSKDTHLDAKELNKKQTPDLISAQPAHHPPQSPAQIQMQLQHELQQQAAFFQPQFLNPAFLPHFPMTPEALLQFQQPQFLFPFYIPGTEFSLGPDLGLPGSATFGMPGMTGMAGSLLEDLKQQIQTQHHVGQTQLQILQQQAQQYQATQPQLQPQKQQQQPPPPQQQQQQQASKLLKQEQSNIVSADCQIMKDVPSYKEAEDISEKPEKPKQEFISEGEGLKEGKDTKKQKSLEPSIPPPRIASGARGNAAKALLENFGFELVIQYNENRQKVQKKGKSGEGENTDKLECGTCGKLFSNVLILKSHQEHVHGQFFPYAALEKFARQYREAYDKLYPISPSSPETPPPPPPPPPLPPAPPQPSSMGPVKIPNTVSTPLQAPPPTPPPPPPPPPPPPPPPPPPPPSAPPQVQLPVSLDLPLFPSIMMQPVQHPALPPQLALQLPQMDALSADLTQLCQQQLGLDPNFLRHSQFKRPRTRITDDQLKILRAYFDINNSPSEEQIQEMAEKSGLSQKVIKHWFRNTLFKERQRNKDSPYNFSNPPITVLEDIRIDPQPTSLEHYKSDASFSKRSSRTRFTDYQLRVLQDFFDTNAYPKDDEIEQLSTVLNLPTRVIVVWFQNARQKARKSYENQAETKDNEKRELTNERYIRTSNMQYQCKKCNVVFPRIFDLITHQKKQCYKDEDDDAQDESQTEDSMDATDQVVYKHCTVSGQTDAAKNAAAPAASSGSGTSTPLIPSPKPEPEKTSPKPEYPAEKPKQSDPSPPSQGTKPALPLASTSSDPPQASTAQPQPQPQPPKQPQLIGRPPSASQTPVPSSPLQISMTSLQNSLPPQLLQYQCDQCTVAFPTLELWQEHQHMHFLAAQNQFLHSPFLERPMDMPYMIFDPNNPLMTGQLLGSSLTQMPPQASSSHTTAPTTVAASLKRKLDDKEDNNCSEKEGGNSGEDQHRDKRLRTTITPEQLEILYEKYLLDSNPTRKMLDHIAREVGLKKRVVQVWFQNTRARERKGQFRAVGPAQSHKRCPFCRALFKAKSALESHIRSRHWNEGKQAGYSLPPSPLISTEDGGESPQKYIYFDYPSLPLTKIDLSSENELASTVSTPVSKTAELSPKNLLSPSSFKAECSEDVENLNAPPAEAGYDQNKTDFDETSSINTAISDATTGDEGNTEMESTTGSSGDVKPALSPKEPKTLDTLPKPATTPTTEVCDDKFLFSLTSPSIHFNDKDGDHDQSFYITDDPDDNADRSETSSIADPSSPNPFGSSNPFKSKSNDRPGHKRFRTQMSNLQLKVLKACFSDYRTPTMQECEMLGNEIGLPKRVVQVWFQNARAKEKKFKINIGKPFMINQGGTEGTKPECTLCGVKYSARLSIRDHIFSKQHISKVRETVGSQLDREKDYLAPTTVRQLMAQQELDRIKKASDVLGLTVQQPGMMDSSSLHGISLPTAYPGLPGLPPVLLPGMNGPSSLPGFPQNSNTLTPPGAGMLGFPTSATSSPALSLSSAPTKPLLQTPPPPPPPPPPPPSSSLSGQQTEQQNKESEKKQTKPNKVKKIKEEELEATKPEKHPKKEEKISSALSVLGKVVGETHVDPIQLQALQNAIAGDPASFIGGQFLPYFIPGFASYFTPQLPGTVQGGYFPPVCGMESLFPYGPTMPQTLAGLSPGALLQQYQQYQQNLQESLQKQQKQQQEQQQKPVQAKTSKVESDQPQNSNDASETKEDKSTATESTKEEPQLESKSADFSDTYVVPFVKYEFICRKCQMMFTDEDAAVNHQKSFCYFGQPLIDPQETVLRVPVSKYQCLACDVAISGNEALSQHLQSSLHKEKTIKQAMRNAKEHVRLLPHSVCSPNPNTTSTSQSAASSNNTYPHLSCFSMKSWPNILFQASARRAASPPSSPPSLSLPSTVTSSLCSTSGVQTSLPTESCSDESDSELSQKLEDLDNSLEVKAKPASGLDGNFNSIRMDMFSV

SEQ ID NO: 93476 - protein, 369 aa, Homo sapiens
  MOD_RES (1)..(1): Any amino acid
XKYYGSYLKDTKLWIIMEYLGGGSALDLLEPGPLDETQIATILREILKGLDYLHSEKKIHRDIKAANVLLSEHGEVKLADFGVAGQLTDTQIKRNTFVGTPFWMAPEVIKQSAYDSKADIWSLGITAIELARGEPPHSELHPMKVLFLIPKNNPPTLEGNYSKPLKEFVEACLNKEPSFRPTAKELLKHKFILRNAKKTSYLTELIDRYKRWKAEQSHDDSSSEDSDAETDGQASGGSDSGDWIFTIREKDPKNLENGALQPSDLDRNKMKDIPKRPFSQCLSTIISPLFAELKEKSQACGGNLGSIEELRGAIYLAEEACPGISDTMVAQLVQRLQRSIHGNQAPPDCHLAQVQAFGGSGCVLGSRSV

SEQ ID NO: 93477 - protein, 214 aa, Homo sapiens
MQAFLKGTSISTKPPLTKDRGVAASAGSSGENKKAKPVPWVEKYRPKCVDEVAFQEEVVAVLKKSLEGADLPNLLFYGPPGTGKTSTILAAARELFGPELFRLRVLELNASDERGIQVVREKVKNFAQLTVSGSRSDGKPCPPFKIVILDEADSMTSAAQAALRRTMEKESKTTRFCLICNYVSRIIEPLTSRCSKFRFKPLSDKIQQQRLLDI

SEQ ID NO: 93478 - protein, 150 aa, Homo sapiens
MARHGLPLLPLLSLLVGAWLKLGNGQATSMVQLQGGRFLMGTNSPDSRDGDGPVREATVKPFAIDIFPVTNKDFRDFVREKKYRTEAEMFGWSFVFEDFVSDELRNKATQPMKVKFTHGGTGSSQTAPTCGRESSPRETKLRMASMESPQ

SEQ ID NO: 93479 - protein, 301 aa, Homo sapiens
  MOD_RES (1)..(1): Any amino acid
XSAVSSGPRLRLLLLESVSGLLQPRTGSAVAPVHPPNRSAPHLPGLMCLLRLHGSVGGAQNLSALGALVSLSNARLSSIKTRFEGLCLLSLLVGESPTELFQQHCVSWLRSIQQVLQTQDPPATMELAVAVLRDLLRYAAQLPALFRDISMNHLPGLLTSLLGLRPECEQSALEGMKACMTYFPRACGSLKGKLASFFLSRVDALSPQLQQLASPVQNEGPGVEMLLSSEDGDAHVLLQLRQRFSGLARCLGLMLSSEFGAPVSVPVQEILDFICRTLSVSSKNISLHGDGPLRLLLLPSI

SEQ ID NO: 93480 - protein, 173 aa, Homo sapiens
MSSMNPEYDYLFKLLLIGDSGVGKSCLLLRFAWDTAGQERFRTITSSYYRGAHGIIVVYDVTDQESFNNVKQWLQEIDRYASENVNKLLVGNKCDLTTKKVVDYTTAKEFADSLGIPFLETSAKNATNVEQSFMTMAAEIKKRMGPGATAGGAEKSNVKIQSTPVKQSGGGCC

SEQ ID NO: 93481 - protein, 205 aa, Homo sapiens
MAVGKNKRLTKGGKKGAKKKVVDPFSKKDWYDVKAPAMFNIRNIGKTLVTRTQGTKIASDGLKGRVFEVSLADLQNDEVAFRKFKLITEDVQGKNCLTNFHGMDLTRDKMCSMVKKWQTMIEAHVDVKTTDGYLLRLFCVGFTKKRNNQIRKTSYAQHQQVRQIRKKMMEIMTREVQTNDLKEVVNKLQHWKRHRKGLPIYLSSP

SEQ ID NO: 93482 - protein, 65 aa, Homo sapiens
  MOD_RES (1)..(1): Any amino acid
XLSCGRLGQDNITVLHVKLTETAIRALETYQSHKNLIPFRPSIQFQGLHGMPVFFKRTLQTSHKA

SEQ ID NO: 93483 - protein, 474 aa, Homo sapiens
MAAFSEMGVMPEIAQAVEEMDWLLPTDIQAESIPLILGGGDVLMAAETGSGKTGAFSIPVIQIVYETLKDQQEGKKGKTTIKTGASVLNKWQMNPYDRGSAFAIGSDGLCCQSREVKEWHGCRATKGLMKGKHYYEVSCHDQGLCRVGWSTMQASLDLGTDKFGFGFGGTGKKSHNKQFDNYGEEFTMHDTIGCYLDIDKGHVKFSKNGKDLGLAFEIPPHMKNQALFPACVLKNAELKFNFGEEEFKFPPKDGFVALSKAPDGYIVKSQHSGNAQVTQTKFLPNAPKALIVEPSRELAEQTLNNIKQFKKYIDNPKLRELLIIGGVAARDQLSVLENGVDIVVGTPGRLDDLVSTGKLNLSQVRFLVLDEADGLLSQGYSDFINRMHNQIPQVTSDGKRLQVIVCSATLHSFDVKKLSEKIMHFPTWVDLKGEDSVPDTVHHVVVPVNPKTDRLWERLGKSHIRRCGLKLLKS

SEQ ID NO: 93484 - protein, 252 aa, Homo sapiens
  MOD_RES (1)..(1): Any amino acid
XQIPPRRPARAGAFTKLFEDQSRALSTANENDGYVDMSSFNAFESKQQSADQDAESAYTEPYKVCPISSAAPKEDLTSDEEQRSSEEEDSASRDPSVTHKDFHGAVMRALDDMDHEGRDTLAREELRQGLSELPAIHDLHQGILEELEERLSNWESQQKVADVFLAREQGFDHHATHILQFDRYLGLLSENCLHSPRLAAAVREFEQSVQGGSQTAKHRLLRVVQRLFQYQVLLTDYLNNLCPDSAEYDNTQ

SEQ ID NO: 93485 - protein, 58 aa, Homo sapiens
MAATQKLVKDIIDSKTGETASKRWKGAKNSETAAKVALMKLKMHADGDKSLPQMSNLE

SEQ ID NO: 93486 - protein, 422 aa, Homo sapiens
MMEEEELEFVEELEAVLQLTPEVQLAIEQVFPSQDPLDRADFNAVEYINTLFPTEQSLANIDEVVNKIRLKIRRLDDNIRTVVRGQTNVGQDGRQKKLESPPPSTNPFLEDEPTPEMEELATEKGDLDQPKKPKAPDNPFHGIVSKCFEPHLYVYIESQDKNLGELIDRFVADFKAQGPPKPNTDEGGAVLPSCADLFVYYKKCMVQCSQLSTGEPMIALTTIFQKYLREYAWKILSGNLPKTTTSSGGLTISSLLKEKEGSEVAKFTLEELCLICNILSTAEYCLATTQQLEEKLKEKVDVSLIERINLTGEMDTFSTVISSSIQLLVQDLDAACDPALTAMSKMQWQNVEHVGDQSPYVTSVILHIKQNVPIIRDNLASTRKYFTQFCVKFANSFIPKFITHLFKCKPISMVGAEQVRWT

SEQ ID NO: 93487 - protein, 104 aa, Homo sapiens
MVSGRFYLSCLLLGSLGSMCILFTIYWMQYWRGGFAWNGSIYMFNWHPVLMVAGMVVFYGGGHTTACPVRRSLPTAPGCWWWPLGCWCSTSFWLHLGSAQSRGS

SEQ ID NO: 93488 - protein, 629 aa, Homo sapiens
MFRLWLLLAGLCGLLASRPGFQNSLLQIVIPEKIQTNTNDSSEIEYEQISYIIPIDEKLYTVHLKQRYFLADNFMIYLYNQGSMNTYSSDIQTQCYYQGNIEGYPDSMVTLSTCSGLRGILQFENVSYGIEPLESAVEFQHVLYKLKNEDNDIAIFIDRSLKEQPMDDNIFISEKSEPAVPDLFPLYLEMHIVVDKTLYDYWGSDSMIVTNKVIEIVGLANSMFTQFKVTIVLSSLELWSDENKISTVGEADELLQKFLEWKQSYLNLRPHDIAYLLIYMDYPRYLGAVFPGTMCITRYSAGVALQCGPASCCDFRTCVLKDGAKCYKGLCCKDCQILQSGVECRPKAHPECDIAENCNGTSPECGPDITLINGLSCKNNKFICYDGDCHDLDARCESVFGKGSRNAPFACYEEIQSQSDRFGNCGRDRNNKYVFCGWRNLICGRLVCTYPTRKPFHQENGDVIYAFVRDSVCITVDYKLPRTVPDPLAVKNGSQCDIGRVCVNRECVESRIIKASAHVCSQQCSGHGVCDSRNKCHCSPGYKPPNCQIRSKGFSIFPEEDMGSIMERASGKTENTWLLGFLIALPILIVTTAIVLARKQLKKWFAKEEEFPSSESKSQDSTQTQSSSN

SEQ ID NO: 93489 - protein, 62 aa, Homo sapiens
GDILLFGTLLMNAGAVLNFKLKKKDTQGFGEESREPSTDPEHGGGAGSHLQPGEIPYYQRGT

SEQ ID NO: 93490 - protein, 201 aa, Homo sapiens
MQIIRHSEQTLKTALISKNPVLVSQYEKLNAGEQRLMNEAFQPASDLFGPITLHSPSDWITSHPEAPQDFEQFFSDPYRKTPSPNKRSIYIQSIGSLGNTRIISEEYIKWLTGYCKAYFYGLRVKLLEPVPVSVTRCSFRVNENTHNLQIHAGDILKFLKKKKPEDAFCVVGITMIDLYPRDSWNFVFGQASLTDGTGEVD

SEQ ID NO: 93491 - protein, 1715 aa, Homo sapiens
MKSPALQPLSMAGLQLMTPASSPMGPFFGLPWQQEAIHDNIYTPRKYQVELLEAALDHNTIVCLNTGSGKTFIAVLLTKELSYQIRGDFSRNGKRTVFLVNSANQVAQQVSAVRTHSDLKVGEYSNLEVNASWTKERWNQEFTKHQVLIMTCYVALNVLKNGYLSLSDINLLVFDECHLAILDHPYREIMKLCENCPSCPRILGLTASILNGKCDPEELEEKIQKLEKILKSNAETATDLVVLDRYTSQPCEIVVDCGPFTDRSGLYERLLMELEEALNFINDCNISVHSKERDSTLISKQILSDCRAVLVVLGPWCADKVAGMMVRELQKYIKHEQEELHRKFLLFTDTFLRKIHALCEEHFSPASLDLKFVTPKVIKLLEILRKYKPYERQQFESVEWYNNRNQDNYVSWSDSEDDDEDEEIEEKEKPETNFPSPFTNILCGIIFVERRYTAVVLNRLIKEAGKQDPELAYISSNFITGHGIGKNQPRNKQMEAEFRKQEEVLRKFRAHETNLLIATSIVEEGVDIPKCNLVVRFDLPTEYRSYVQSKGRARAPISNYIMLADTDKIKSFEEDLKTYKAIEKILRNKCSKSVDTGETDIDPVMDDDDVFPPYVLRPDDGGPRVTINTAIGHINRYCARLPSDPFTHLAPKCRTRELPDGTFYSTLYLPINSPLRASIVGPPMSCVRLAERVVALICCEKLHKIGELDDHLMPVGKETVKYEEELDLHDEEETSVPGRPGSTKRRQCYPKAIPECLRDSYPRPDQPCYLYVIGMVLTTPLPDELNFRRRKLYPPEDTTRCFGILTAKPIPQIPHFPVYTRSGEVTISIELKKSGFMLSLQMLELITRLHQYIFSHILRLEKPALEFKPTDADSAYCVLPLNVVNDSSTLDIDFKFMEDIEKSEARIGIPSTKYTKETPFVFKLEDYQDAVIIPRYRNFDQPHRFYVADVYTDLTPLSKFPSPEYETFAEYYKTKYNLDLTNLNQPLLDVDHTSSRLNLLTPRHLNQKGKALPLSSAEKRKAKWESLQNKQILVPELCAIHPIPASLWRKAVCLPSILYRLHCLLTAEELRAQTASDAGVGVRSLPADFRYPNLDFGWKKSIDSKSFISISNSSSAENDNYCKHSTIVPENAAHQGANRTSSLENHDQMSVNCRTLLSESPGKLHVEVSADLTAINGLSYNQNLANGSYDLANRDFCQGNQLNYYKQEIPVQPTTSYSIQNLYSYENQPQPSDECTLLSNKYLDGNANKSTSDGSPVMAVMPGTTDTIQVLKGRMDSEQSPSIGYSSRTLGPNPGLILQALTLSNASDGFNLERLEMLGDSFLKHAITTYLFCTYPDAHEGRLSYMRSKKVSNCNLYRLGKKKGLPSRMVVSIFDPPVNWLPPGYVVNQDKSNTDKWEKDEMTKDCMLANGKLDEDYEEEDEEEESLMWRAPKEEADYEDDFLEYDQEHIRFIDNMLMGSGAFVKKISLSPFSTTDSAYEWKMPKKSSLGSMPFSSDFEDFDYSSWDAMCYLDPSKAVEEDDFVVGFWNPSEENCGVDTGKQSISYDLHTEQCIADKSIADCVEALLGCYLTSCGERAAQLFLCSLGLKVLPVIKRTDREKALCPTRENFNSQQKNLSVSCAAASVASSRSSVLKDSEYGCLKIPPRCMFDHPDADKTLNHLISGFENFEKKINYRFKNKAYLLQAFTHASYHYNTITGKEPTTRLHFWENETLC

SEQ ID NO: 93492 - protein, 196 aa, Homo sapiens
MAHLLGSQACMESLRTDLTDLQGAIVDVFSRAGPVRFPSWKFPDRMACDLDMVALLEHYDHVPGDPEFTQLSHAVLLELVIDRLLLLLQSCMSYLENLGSEQMMPPAQAAGPCMSVGLTVRRFWDSLLRLGTLHQQPLPQKGANQRETPTSKPTTKGEPARSPEYLTTKLIKPSSPVLGLPQTCQEPESIPVRASL

SEQ ID NO: 93493 - protein, 10 aa, Homo sapiens
MQCILTRVDF

SEQ ID NO: 93494 - protein, 227 aa, Homo sapiens
MTSSRLWFSLLLAAAFAGRATALWPWPQNFQTSDQRYVLYPNNFQFQYDVSSAAQPGCSVLDEAFQRYRDLLFGSGSWPRPYLTGKRHTLEKNVLVVSVVTPGCNQLPTLESVENYTLTINDDQCLLLSETVWGALRGTPEQKALVIGGEACMWGEYVDNTNLVPRLWPRAGAVAERLWSNKLTSDLTFAYERLSHFRCELLRLQGRRMCLRLRGKKVVKDTEDRDV

SEQ ID NO: 93495 - protein, 462 aa, Homo sapiens
MEALLEGIQNRGHGGGFLTSCEAELQELMKQIDIMVAHKKSEWEGRTHALETCLKIREQELKSLRSQLDVTHKEVGMLHQQVEEHEKIKQEMTMEYKQELKKLHEEEFRQKSLDWEKQRLIYQQQVSSLEAQRKALAEQSEIIQAQLVNRKQKLESVELSSQSEIQHLSSKLERANDTICANELEIERLTMRVNDLVGTSMTVLQEQQQKEEKLRESEKLLEALQEEKRELKAALQSQENLIHEARIQKEKLQEKVKATNTQHAVEAISLESVSATCKQLSQELMEKYEELKRMEAHNNEYKAEIKKLKEQILQGEQSYSSALEGMKMEISHLTQELHQRDITIASTKGSSSDMEKRLRAEMQKAEDKAVEHKEILDQLESLKLENRHLSEMVMKLELGLHELQVCWSLLEVHSRRCLPGYHQRRLQNSKYCCLILPPEASSQRGTCLYEVSVGPYWEVSLC

SEQ ID NO: 93496 - protein, 53 aa, Homo sapiens
MFNGGMATTSTEIELPDVEPAAFLALLKFLYSDEVQIGPETVMTTLYTAKKYA

SEQ ID NO: 93497 - protein, 377 aa, Homo sapiens
MLQTLYDYFWWERLWLPVNLTWADLEDRDGRVYAKASDLYITLPLALLFLIVRYFFELYVATPLAALLNIKEKTRLRAPPNATLEHFYLTSGKQPKQSGLSGRQVERWFRRRRNQDRPSLLKKFREASWRFTFYLIAFIAGMAVIVDKPWFYDMKKVWEGYPIQSTIPSQYWYYMIELSFYWSLLFSIASDVKRKDFKEQIIHHVATIILISFSWFANYIRAGTLIMALHDSSDYLLESAKMFNYAGWKNTCNNIFIVFAIVFIITRLVILPFWILHCTLVYPLELYPAFFGYYFFNSMMGVLQLLHIFWAYLILRMAHKFITGKELGGVASPETSGQGSTIRKTQFLRKRQFKKGWEEGCPLKKTSSAFNGPTATE

SEQ ID NO: 93498 - protein, 128 aa, Homo sapiens
MGCAFINLCILASQHAWAQLTFWEASQLYLLFLSLTLATVNARWLEPRTTAAMWALQTVEKERGLGGEVPGSHQGPDPYRQLREKDPKYSALRQNFFRYHGLSSLCNLGCVLSNGLCLAGLALEIRSL

SEQ ID NO: 93499 - protein, 135 aa, Homo sapiens
  MOD_RES (1)..(1): Any amino acid
XKWRNKTGLDIYEGYGQTETVLICGNFKGMKIKPGSMGKPSPAFDVKIVDVNGNVLPPGQEGDIGIQVLPNRPFGLFTHYVVVKAFVVLNPDYKSHDQEQLIKEIQEHVKKTTAPYKYPRKVEFIQELPKTISGK

SEQ ID NO: 93500 - protein, 123 aa, Homo sapiens
LEHDDVSYLKKILGELAMVLDQIEAELEKRKLENEGQKCELWLCGCAFTLADVLLGATLHRLKFLGLSKKYWEDGSRPNLQSFFERVQRRFAFRKVSRWNCGDWLGSEGTLPQDKADIKTQLL

SEQ ID NO: 93501 - protein, 59 aa, Homo sapiens
MFISLWEFFYGHFFRFWMKWLLRQMTGKCELQRIFDTYVGAQRTHRIENSLTYSKNKVG

SEQ ID NO: 93502 - protein, 376 aa, Homo sapiens
MEEKGSRMVQQGNQEAAAAPDTMAQPYASAQFAPPQNGIPAEYTAPHPHPAPEYTGQTTVPEHTLNLYPPAQTHSEQSPADTSAQTVSGTATQTDDAAPTDGQPQTQPSENTENKSQPKRLHVSNIPFRFRDPDLRQMFGQFGKILDVEIIFNERGSKGFGFVTFENSADADRAREKLHGTVVEGRKIEVNNATARVMTNKKTVNPYTNGWKLNPVVGAVYSPEFYAGTVLLCQANQEGSSMYSAPSSLVYTSAMPGFPYPAATAAAAYRGAHLRGRGRTVYNTFRAAAPPPPIPAYGGVVYQDGFYGADIYGGYAAYRYAQPTPATAAAYSDRNQFVFVAADEISCNTSAVTDEFMLPTPTTTHLLQPPPTALVP

SEQ ID NO: 93503 - protein, 44 aa, Homo sapiens
MDDVPAPTPAPAPPAAAAPRVPFHCSECGKSFRYRSDLRRHFAR

SEQ ID NO: 93504 - protein, 71 aa, Homo sapiens
MLKVSAVLCVCAAAWCSQSLAAAAAVAAAGGRSDGGNFLDDKQWLTTISQYDKEVGQWNKFRDDERSRSRP

SEQ ID NO: 93505 - protein, 1508 aa, Homo sapiens
MCKASGNHLNPEPNQPAPSVDLDFLEDDILGSPATGGGGGGSGGADQPCDILQQSLQEANITEQTLEAEAELDLGPFQLPTLQPADGGAGPTGAGGAAAVAAGPQALFPGSTDLLGLQGPPTVLTHQALVPPQDVVNKALSVQPFLQPVGLGNVTLQPIPGLQGLPNGSPGGATAATLGLAPIQVVGQPVMALNTPTSQLLAKQVPVSGYLASAAGPSEPVTLASAGVSPQGAGLVIQKNLSAAVATTLNGNSVFGGAGAASAPTGTPSGQPLAVAPGLGSSPLVPAPNVILHRTPTPIQPKPAGVLPPKLYQLTPKPFAPAGATLTIQGEPGALPQQPKAPQNLTFMAAGKAGQNVVLSGFPAPALQANVFKQPPATTTGAAPPQPPGALSKPMSVHLLNQGSSIVIPAQHMLPGQNQFLLPGAPAVQLPQQLSALPANVGGQILAAAAPHTGGQLIANPILTNQNLAGPLSLGPVLAPHSGAHSAHILSAAPIQVGQPALFQMPVSLAAGSLPTQSQPAPAGPAATTVLQGVTLPPSAVAMLNTPDGLVQPATPAAATGEAAPVLTVQPAPQAPPAVSTPLPLGLQQPQAQQPPQAPTPQAAAPPQATTPQPSPGLASSPEKIVLGQPPSATPTAILTQDSLQMFLPQERSQQPLSAEGPHLSVPASVIVSAPPPAQDPAPATPVAKGAGLGPQAPDSQASPAPAPQIPAAAPLKGPGPSSSPSLPHQAPLGDSPHLPSPHPTRPPSRPPSRPQSVSRPPSEPPLHPCPPPQAPPTLPGIFVIQNQLGVPPPASNPAPTAPGPPQPPLRPQSQPPEGPLPPAPHLPPSSTSSAVASSSETSSRLPAPTPSDFQLQFPPSQGPHKSPTPPPTLHLVPEPAAPPPPPPRTFQMVTTPFPALPQPKALLERFHQVPSGIILQNKAGGAPAAPQTSTSLGPLTSPAASVLVSGQAPSGTPTAPSHAPAPAPMAATGLPPLLPAENKAFASNLPTLNVAKAASSGPGKPSGLQYESKLSGLKKPPTLQPSKEACFLEHLHKHQGSVLHPDYKTAFPSFEDALHRLLPYHVYQGALPSPSDYHKVDEEFETVSTQLLKRTQAMLNKYRLLLLEESRRVSPSAEMVMIDRMFIQEEKTTLALDKQLAKEKPDEYVSSSRSLGLPIAASSEGHRLPGHGPLSSSAPGASTQPPPHLPTKLVIRHGGAGGSPSVTWARASSSLSSSSSSSSAASSLDADEDGPMPSRNRPPIKTYEARSRIGLKLKIKQEAGLSKVVHNTALDPVHQPPPPPATLKVAEPPPRPPPPPPPTGQMNGTVDHPPPAAPERKPLGTAPHCPRLPLRKTYRENVGGPGAPEGTPAGRARGGSPAPLPAKVDEATSGLIRELAAVEDELYQRMLKGPPPEPAASAAQGTGDPDWEAPGLPPAKRRKSESPDVDQASFSSDSPQDDTLTEHLQSAIDSILNLQQAPGRTPAPSYPHAASAGTPASPPPLHRPEAYPPSSHNGGLGARTLTR

SEQ ID NO: 93506 - protein, 497 aa, Homo sapiens
MDDYMVLRMIGEGSFGRALLVQHESSNQMFAMKEIRLPKSFSNTQNSRKEAVLLAKMKHPNIVAFKESFEAEGHLYIVMEYCDGGDLMQKIKQQKGKLFPEDMILNWFTQMCLGVNHIHKKRVLHRDIKSKNIFLTQNGKVKLGDFGSARLLSNPMAFACTYVGTPYYVPPEIWENLPYNNKSDIWSLGCILYELCTLKHPFQANSWKNLILKVCQGCISPLPSHYSYELQFLVKQMFKRNPSHRPSATTLLSRGIVARLVQKCLPPEIIMEYGEEVLEEIKNSKHNTPRKKTNPSRIRIALGNEASTVQEEEQDRKGSHTDLESINENLVESALRRVNREEKASSPNLHRRQWEKNVPNTALTALENASILTSSLTAEDDRGGSVIKYSKNTTRKQWLKETPDTLLNILKNADLSLAFQTYTIYRPGSEGFLKGPLSEETEASDSVDGGHDSVILDPERLEPGLDEEDTDFEEEDDNPDWVSELKKRAGWQGLCDR

SEQ ID NO: 93507 - protein, 737 aa, Homo sapiens
  MOD_RES (1)..(1): Any amino acid
XRTVRFERAAEFLAACAGGDLDEARLMLRAADPGPGAELDPAAPPPARAVLDSTNADGISALHQACIDENLEVVRFLVEQGATVNQADNEGWTPLHVAASCGYLDIARYLLSHGANIAAVNSDGDLPLDLAESDAMEGLLKAEIARRGVDVEAAKRAEEELLLHDTRCWLNGGAMPEARHPRTGASALHVAAAKGYIEVMRLLLQAGYDPELRDGDGWTPLHAAAHWGVEDACRLLAEHGGGMDSLTHAGQRPCDLADEEVLSLLEELARKQEDLRNQKEASQSRGQEPQAPSSSKHRRSSVCRLSSREKISLQDLSKERRPGGAGGPPIQDEDEGEEGPTEPPPAEPRTLNGVSSPPHPSPKSPVLEEAPFSRRFGLLKTGSSGALGPPERRTAEGAPGAGLQRSASSSWLEGTSTQAKELRLARITPTPSPKLPEPSVLSEVTKPPPCLENSSPPSRIPEPESPAKPNVPTASTAPPADSRDRRRSYQMPVRDEESESQRKARSRLMRQSRRSTQGVTLTDLKEAEKAAGKAPESEKPAQSLDPSRRPRVPGVENSDSPAQREAPDGQGPGPQAAREHRKVGKEWRGPAEGEEAEPADRSQESSTLEGGPSARRQRWQRDLNPEPEPESEEPDGGFRTLYAELRRENERLREALTETTLRLAQLKVELERATQRQERFAERPALLELERFERRALERKAAELEEELKALSDLRADNQRLKDENAALIRVISKLSK

SEQ ID NO: 93508 - protein, 275 aa, Homo sapiens
MPKNSKVVKRELDDDVTESVKDLLSNEDAADDAFKTSELIVDGQEEKDTDVEEGSEVEDERPAWNSKLQYILAQVGFSVGLGNVWRFPYLCQKNGGGIPLFFLELSVGQRIRRGSIGVWNYISPKLGGIGFASCVVCYFVALYYNVIIGWSLFYFSQSFQQPLPWDQCPLVKNASHTFVEPECEQSSATTYYWYREALNISSSISESGGLNWKMTICLLAAWVMVCLAMIKGIQSSGKVSMLEPFLILLITISGFIPLSNSVTDFCGQITHNTSF

SEQ ID NO: 93509 - protein, 101 aa, Homo sapiens
MRLTRCQAALAAAITLNLLVLFYVSWLQHQPRNSRARGPRRASAAGPRVTVLVREFEAFDNAVPELVDSFLQQDPAQPVVVAADTLPYPPLALPRIPNVRL

SEQ ID NO: 93510 - protein, 160 aa, Homo sapiens
KTKPTNNRTKKAVKTVKKKDKGKSEDSEKKMSPEKEFKIKEDLDQVQKVARLEIENKVLQEQLKQALQEAEKAKHQLNYFLNQEKLLKSEGKTETTMQVGNSQTKVKGEDSKNIPLEKETRKSLVSDSGGQRTSDKIQEYPQMLIEFLKYFGKVSQTFRE

SEQ ID NO: 93511 - protein, 233 aa, Homo sapiens
MNRSVMPEGKLVEPVLEKRGRFADLLDAKYLRTTLQIWVIWLGISFAYYGVILASAELLERDLVCGSKSDSAVVVTGGDSGESQSPCYCHMFAPSDYRTMIISTIGEIALNPLNILGINFLGRRLSLSITMGCTALFFLLLNICTSSAGLIGFLFMLRALVAANFNTVYIYTAEVYPTTMRALGMGTSGSLCRIGAMVAPFISQRALLLVNHFILYCRCEINGELSRTQTKRN

SEQ ID NO: 93512 - protein, 464 aa, Homo sapiens
  MOD_RES (1)..(1): Any amino acid
XEGDSDVDSELEDRVDGVKSWLSKNKGPSKAASDDGSLKSSSLSKEAPGVEERPSSVVSSLSYRKRLTLKDSIGGTGDADSLFTSLSERAASPERPPRKAHVGPREEPCPGRKSEEPEECGSVRSGTGGRAGRGPQKRWGSDFSPASTVSAPVSRASSATRRGSGEDRAGSSLSFSLSGSPGSRRSTSRLDSLSRTLSPSLSRASGLGRESPDSRLSLGRSCLEEWDDGASMALSEACSQYSHPSLARSLSVPPRPRSSASAVDEPPSSSVRSVSRHSYLDPDLEAAVNEVLSYKPVPFQRSSLEPDSEEDDRKSIQSARSAQLDPPERAASIRRSASAADVSRSRSGRKSRSRRRSGRSSSSSSSSSGSEASSEHKRRKKGRSRKSKKSKSRRKRTETESESSSSSSSGSTVSSHSCSSVKKGPAAESEETGQTHRPSRKEEKKRKKEVDSLMMRYLYRPESD

SEQ ID NO: 93513 - protein, 142 aa, Homo sapiens
MQQLRVRGSYRSASQFAGWRRVFYQARQGGISGNKLKLMLQKREAPVPTKTKVAVDENKAKEFLGSLKRQKRQLWDRTRPEVQQWYQQFLYMGFDEAKFEDDITYWLNRDRNGHEYYGDYYQRHYDEDSAIGPRSPYGFRHG

SEQ ID NO: 93514 - protein, 268 aa, Homo sapiens
MALYELFSHPVERSYRAGLCSKAALFLLLAAALTYIPPLLVAFRSHGFWLKRSSYEEQPTVRFQHQVLLVALLGPESDGFLAWSTFPAFNRLQGDRLRVPLVSTREEDRNQDGKTDMLHFKLELPLQSTEHVLGVQLILTFSYRLHISVINGTSPFAYDYDLTHIVAAYQERNVTTVLNDPNPIWLVGRAADAPFVINAIIRYPVEVISYQPGFWEMVKFAWVQYVSILLIFLWVFERIKIFVFQNQVVTTIPVTVTPRGDLCKEHLS

SEQ ID NO: 93515 - protein, 302 aa, Homo sapiens
MLGLWGQRLPAAWVLLLLPFLPLLLLAAPAPHRASYKPVIVVHGLFDSSYSFRHLLEYINETHPGTVVTVLDLFDGRESLRPLWEQVQGFREAVVPIMAKAPQGVHLICYSQGGLVCRALLSVMDDHNVDSFISLSSPQMGQYGDTDYLKWLFPTSMRSNLYRICYSPWGQEFSICNYWHDPHHDDLYLNASSFLALINGERDHPNATVWRKNFLRVGHLVLIGGPDDGVITPWQSSFFGFYDANETVLEMEEQLVYLRDSFGLKTLLARGAIVRCPMAGISHTAWHSNRTLYETCIEPWLS

SEQ ID NO: 93516 - protein, 54 aa, Homo sapiens
MSAQAQMRAMLDQLMGTSRDGSMYLCLPTSICKGVSERPRIRQAQKGDTSAGTK

SEQ ID NO: 93517 - protein, 265 aa, Homo sapiens
MQLCQGASGMAAAEGPGYLVSPQAEKHRRARNWTDAEMRGLMLVWEEFFDELKQTKRNAKVYEKMASKLFEMTGERRLGEEIKIKITNMTFQYRKLKCMTDSESAPPDWPYYLAIDGILAKVPESCDGKLPDSQPPGPSTSQTEASLSPPAKSTPLYFPYNQCSYEGRFEDDRSDSSSSLLSLKFRSEERPVKKRKVQSCHLQKKQLRLLEAMVEEQRRLSRAVEETCREVRRVLDQQHILQVQSLQLQERMMSLLERIITKSSV

SEQ ID NO: 93518 - protein, 1038 aa, Homo sapiens
MSCQKAVLELNIGSQLGPKSPERTEGVTAFEDYGTGLLENQLSVGDFVKIQKAFESPQPRKIICMSREDFTQKMTEIVGWGTKEEYGELFDKVDVAQDGFINWDKLTSFILLELYEQDERAKATVVPQWKDLEFLPVKHKDTIQKVIFLKNSSHYLTISKEGLLAIWGEHLKLQETFPITSDATKLKHLWVTSLVSLENVNKIAVAFTSKEVCFYDLLSKEEFACQYKLQGLKGTPICMDYWYDPLDANESILSFGDITGKVQAIAFTAALISLFERPASACEDGEATMTINWAELLSGCHKCCHILEHKLHQGDWVRQVTYNASLDAIISSTTSNTNSVVMAWREKSKKRLNMTSFNIAQGIHAFDYHSRLNLIATAGINNKVCLWNPYVVSKPVGVLWGHSASVIAVQFFVERKQLFSFSKDKVLRLWDIQHQLSIQRIACSFPKSQDFRCLFHFDEAHGRLFISFNNQLALLAMKSEASKRVKSHEKAVTCVLYNSILKQVISSDTGSTVSFWMIDTGQKIKQFTGCHGNAEISTMALDANETRLLTGSTDGTVKIWDFNGYCHHTLNVGQDGAVDISQILILKKKILVTGWERAITVFRPQNFNQFFIQPEEWKGGIQHHDDILCAAFLPPQTLVTGSYDGEIVLWNNSTENAHHVLHPDYQRLLKSKLDTKPQKLLSAGRSQPSHPMADHSTTGVRNFEIDTEGKNAVMRLCFLKARKNTAVTGGANLVSCGGSGYVRFWDIYKKQLLAEFLAHSGVGSIIMSTDKMNRYLTTGDLDGWLKIWNIEEYCLNSSKNKITKAPTLIRSFQPHEDRISSLEMCEPGGQLLIISSSADCSICVTGVCNAPVWIFGQAKHWHIENCLFLPKRDTNLVESEIQKEISLFSKEESCLDPTEHSLLNKKNKDDSTYNVRPSEDINLDIKYKERSTCMKETQKPYYGEVIKKSFSTFRSLNIGALEELPEVNKPAFLLDPEKYFRKEPEEERPQILEAPSLFKTLKAVFDEKNLFPKEILHHERKAKQLCQEKSCEVKKNKK

SEQ ID NO: 93519 - protein, 314 aa, Homo sapiens
MRTPQLALLQVFFLVFPDGVRPQPSSSPSGAVPTSLELQRGTDGGTLQSPSEATATRPAVPGLPTVVPTLVTPSAPGNRTVDLFPVLPICVCDLTPGACDINCCCDRDCYLLHPRTVFSFCLPGSVRSSSWVCVDNSVIFRSNSPFPSRVFMDSNGIRQFCVHVNNSNLNYFQKLQKVNATNFQALAAEFGGESFTSTFQTQSPPSFYRAGDPILTYFPKWSVISLLRQPAGVGAGGLCAESNPAGFLESKSTTCTRFFKNLASSCTLDSALNAASYYNFTVLKVTYEIETNGTFGIQKVSVSLGQTNLTVEPG

SEQ ID NO: 93520 - protein, 504 aa, Homo sapiens
MAPWLQLLSLLGLLPGAVAAPAQPRAASFQAWGPPSPELLAPTRFALEMFNRGRAAGTRAVLGLVRGRVRRAGQGSLYSLEATLEEPPCNDPMVCRLPVSKKTLLCSFQVLDELGRHVLLRKDCGPVDTKVPGAGEPKSAFTQGSAMISSLSQNHPDNRNETFSSVISLLNEDPLSQDLPVKMASIFKNFVITYNRTYESKEEARWRLSVFVNNMVRAQKIQALDRGTAQYGVTKFSDLTEEEFRTIYLNTLLRKEPGNKMKQAKSVGDLAPPEWDWRSKGAVTKVKDQGMCGSCWAFSVTGNVEGQWFLNQGTLLSLSEQELLDCDKMDKACMGGLPSNAYSAIKNLGGLETEDDYSYQGHMQSCNFSAEKAKVYINDSVELSQNEQKLAAWLAKRGPISVAINAFGMQFYRHGISRPLRPLCSPWLIDHAVLLVGYGNRPVQVFEGCKVIKALPGELRTLILALCTAPQALTFPFGPSRTAGALTGVRRVTTTCIVGPGPVA

SEQ ID NO: 93521 - protein, 63 aa, Homo sapiens
MEPVETWTPGKVLTTPCRTIPLRTGSCLARTCSSSAPKASRLWLCGLWDTRSSSWAGWNSSRP

SEQ ID NO: 93522 - protein, 171 aa, Homo sapiens
MEEIPVKVAVRIRPLLCKEALHNHQVCVRVIPNSQQVIIGRDRVFTFDFVFGKNSTQDEVYNTCIKPLVLSLIEGYNATVFAYGQTGSGKTYTIGGGHIASVVEGQKGIIPRAIQEIFQSISEHPSIDFNVKVSYIEVYKEDLRDLLELETSMKDLHIREDEKGNTVCACC

SEQ ID NO: 93523 - protein, 445 aa, Homo sapiens
IWARKLLSVPWLLCGPRRYASSSFKAADLQLEMTQKPHKKPGPGEPLVFGKTFTDHMLMVEWNDKGWGQPRIQPFQNLTLHPASSSLHYSLQLFEGMKAFKGKDQQVRLFRPWLNMDRMLRSAMRLCLPSFDKLELLECIRRLIEVDKDWVPDAAGTSLYVRPVLIGNEPSLGVSQPTRALLFVILCPVGAYFPGGSVTPVSLLADPAFIRAWVGGVGNYKLGGNYGPTVLVQQEALKRGCEQVLWLYGPDHQLTEVGTMNIFVYWTHEDGVLELVTPPLNGVILPGVVRQSLLDMAQTWGEFRVVERTITMKQLLRALEEGRVREVFGSGTACQVCPVHRILYKDRNLHIPTMENGPELILRFQKELKEIQYQEQIMAFLIEALESGLSVLLCGLENPLGLNHPFLGAPGALDMSSALETPSCDPLRLLGALYGIRAHEWMFPV

SEQ ID NO: 93524 - protein, 117 aa, Homo sapiens
MLCSLLLCECLLLVAGYAHDDDWIDPTDMLNYDAASGTMRKSQAKYGISGEKDVSPDLSCADEISECYHKLDSLTYKIDECEKKKREDYESQSNPVFRRYLNKILIEAGKLGLRPPD

SEQ ID NO: 93525 - protein, 336 aa, Homo sapiens
MSPTISHKDSSRQRRPGNFSHSLDMKSGPLPPGGWDDSHLDSAGREGDREALLGDTGTGDFLKAPQSFRAELSSILLLLFLYVLQGIPLGLAGSIPLILQSKNVSYTDQAFFSFVFWPFSLKLLWAPLVDAVYVKNFGRRKSWLVPTQYILGLFMIYLSTQVDRLLGNTDDRTPDVIALTVAFFLFEFLAATQDIAVDGWALTMLSRENVGYASTCNSVGQTAGYFLGNVLFLALESADFCNKYLRFQPQPRGIVTLSDFLFFWGTVFLITTTLVALLKKENEVSVVKEETQGITDTYKLLFAIIKMPAVLTFCLLILTAKIIAWVRICPTGLVDS

SEQ ID NO: 93526 - protein, 25 aa, Homo sapiens
MISTKEKNKIPKDSMTLLPCFYFVE

SEQ ID NO: 93527 - protein, 216 aa, Homo sapiens
MAAAAAATAAAAASIRERQTVALKRMLNFNVPHIKNSTGEPVWKVLIYDRFGQDIISPLLSVKELRDMGITLHLLLHSDRDPIPDVPAVYFVMPTEENIDRMCQDLRNQLYESYYLNFISAISRSKLEDIANAALAASAVTQVAKVFDQYLNFITLEDDMFVLCNQNKELVSYRAINRPDITDTEMETVMDTIVDSLFCFFVTLGLGDTCASLLHG

SEQ ID NO: 93528 - protein, 110 aa, Homo sapiens
MITVNPDGKIMVRRCLVTLRPFRLFVLGIGFFTLCFLMTSLGGQFSARRLGDSPFTIRTEVMGGPESRGVLRKMSDLLELMVKRMDALARLENSSELHRAGGDLHFPADR

SEQ ID NO: 93529 - protein, 397 aa, Homo sapiens
MRVMAPRALLLLLSGGLALTETWACSHSMRYFDTAVSRPGRGEPRFISVGYVDDTQFVRFDSDAASPRGEPRAPWVEQEGPEYWDRETQNYKRQAQADRVSLRNLRGYYNQSEDGSHTLQRMYGCDLGPDGRLLRGYDQSAYDGKDYIALNEDLRSWTAADTAAQITQRKLEAARAAEQLRAYLEGTCVEWLRRYLENGKETLQRAEPPKTHVTHHPLSDHEATLRCWALGFYPAEITLTWQRDGEDQTQDTELVETRPAGDGTFQKWAAVVVPSGQEQRYTCHMQHEGLQEPLTLSWEPSSQPTIPIMGIVAGLAVLVVLAVLGAVVTAMMCRRKSSGREGVKSGVWAATVPRALMSLSSLVKPETAACVGLRCRISSHLSFVTSRASGISFCKGV

SEQ ID NO: 93530 - protein, 155 aa, Homo sapiens
MAAPAVSGLSRQVRCFSTSVVRPFAKLVRPPVQVYGIEGRYATALYSAASKQNKLEQVEKELLRVAQILKEPKVAASVLNPYVKRSIKVKSLNDITAKERFSPLTTNLINLLAENGRLSNTQGVVSAFSTMMSVHRGEVPCTVTSASMRKPNAGR

SEQ ID NO: 93531 - protein, 157 aa, Homo sapiens
MDMFSLDMIISDPAAEASRAGKKQLRGVQNPCPSARARPRHKSLNIKDKISEWEGKKEVPTPAPSRRADGQEDYLPSSTVERRSSDGVRTQVTEAKNGMRPGTESTEKERNKGAVNVGGQDPEPGQDLSQPEREVDPSWGRGREPRLGKLRFQNDPL

SEQ ID NO: 93532 - protein, 935 aa, Homo sapiens
MGRGKYNLLITFQTLASCPIDRKPFQAVFKFSALEGYVKVQVKKQLRETKDKKNENSFEKQVSCHENSKSCIRRKAIVREDLLSAKVCDLKWIHRNSLYSETGGKKNAAIKINKPQRSNWSTNQCFRNFFSNMFSSVSHSGESSFTYRAYCTEFIEASEISALIRQKRHELELSWFPDTLPGIGRIGFIPWNVETEVLPLISSVLPRTIFPTSTISFEHFGTSCKGYALAHTQEGEEKKQTSGTSNTRGSRRKPAMTTPTRRSTRNTRAETASQSQRSPISDNSGCDAPGNSNPSLSVPSSAESEKQTRQAPKRKSVRRGRKPPLLKKKLRSSVAAPEKSSSNDSVDEETAESDTSPVLEKEHQPDVDSSNICTVQTHVENQSANCLKSCNEQIEESEKHTANYDTEERVGSSSSESCAQDLPVLVGEEGEVKKLENTGIEANVLCLESEISENILEKGGDPLEKQDQISGLSQSEVKTDVCTVHLPNDFPTCLTSESKVYQPVSCPLSDLSENVESVVNEEKITESSLVEITEHKDFTLKTEELIESPKLESSEGEIIQTVDRQSVKSPEVQLLGHVETEDVEIIATCDTFGNEDFNNIQDSENNLLKNNLLNTKLEKSLEEKNESLTEHPRSTELPKTHIEQIQKHFSEDNNEMIPMECDSFCSDQNESEVEPSVNADLKQMNENSVTHCSENNMPSSDLADEKVETVSQPSESPKDTIDKTKKPRTRRSRFHSPSTTWSPNKDTPQEKKRPQSPSPRRETGKESRKSQSPSPKNESARGRKKSRSQSPKKDIARERRQSQSRSPKRDTTRESRRSESLSPRRETSRENKRSQPRVKDSSPGEKSRSQSRERESDRDGQRRERERRTRKWSRSRSHSRSPSRCRTKSKSSSFGRIDRDSYSPRWKGRWANDGWRCPRGNDRYRKNDPEKQNEN

SEQ ID NO: 93533 - protein, 604 aa, Homo sapiens
MNPSAPSYPMASLYVGDLHPDVTEAMLYEKFSPAGPILSIRVCRDMITRRSLGYAYVNFQQPADAERALDTMNFDVIKGKPVRIMWSQRDPSLRKSGVGNIFIKNLDKSIDNKALYDTFSAFGNILSCKVVCDENGSKGYGFVHFETQEAAERAIEKMNGMLLNDRKVFVGRFKSRKEREAELGARAKEFTNVYIKNFGEDMDDERLKDLFGKFGPALSVKVMTDESGKSKGFGFVSFERHEDAQKAVDEMNGKELNGKQIYVGRAQKKVERQTELKRKFEQMKQDRITRYQVMMEGGRSKGFGFVCFSSPEEATKAVTEMNGRIVATKPLYVALAQRKEERQAHLTNQYMQRMASVRAVPNPVINPYQPAPPSGYFMAAIPQTQNRAAYYPPSQIAQLRPSPRWTAQGARPHPFQNMPGAIRPAAPRPPFSTMRPASSQVPRVMSTQRVANTSTQTMGPRPAAAAAAATPAVRTVPQYKYAAGVRNPQQHLNAQPQVTMQQPAVHVQGQEPLTASMLASAPPQEQKQMLGERLFPLIQAMHPTLAGKITGMLLEIDNSELLHMLESPESLRSKVDEAVAVLQAHQAKEAAQKAVNSATGVPTV

SEQ ID NO: 93534 - protein, 66 aa, Homo sapiens
  MOD_RES (1)..(1): Any amino acid
XHTKENTIRTTTSPFFSEDTFRQSPFTSNSKELLPSDSVLHGRISAPGLLEKEASSEGDCKVERGW

SEQ ID NO: 93535 - protein, 519 aa, Homo sapiens
GLSKSLGLIEGYGGRGKGGLPATLSPAEEEKAKGPHEKYGYNSYLSEKISLDRSIPDYRPTKCKELKYSKDLPQISIIFIFVNEALSVILRSVHSAVNHTPTHLLKEIILVDDNSDEEELKVPLEEYVHKRYPGLVKVVRNQKREGLIRARIEGWKVATGQVTGFFDAHVEFTAGWAEPVLSRIQENRKRVILPSIDNIKQDNFEVQRYENSAHGYSWELWCMYISPPKDWWDAGDPSLPIRTPAMIGCSFVVNRKFFGEIGLLDPGMDVYGGENIELGIKVWLCGGSMEVLPCSRVAHIERKKKPYNSNIGFYTKRNALRVAEVWMDDYKSHVYIAWNLPLENPGIDIGDVSERRALRKSLKCKNFQWYLDHVYPEMRRYNNTVAYGELRNNKAKDVCLDQGPLENHTAILYPCHGWGPQLARYTKEGFLHLGALGTTTLLPDTRCLVDNSKSRLPQLLDCDKVKSSLYKRWNFIQNGAIMNKGTGRCLEVENRGLAGIDLILRSCTGQRWTIKNSIK

SEQ ID NO: 93536 - protein, 79 aa, Homo sapiens
MTEKMSSFLYIGDIVSLYAEGSVNGFISTLGLPFQGVPYEQIFCPEAILESKASQTREPHRGSLAEETTARCRTGTKTK

SEQ ID NO: 93537 - protein, 74 aa, Homo sapiens
MALSRGLPRELAEAVAGGRVLVVGAGGIGCELLKNLVLTGFSHIDLLPETMLIECAWQLMFLLLKVEQLGILDK

SEQ ID NO: 93538 - protein, 9 aa, Homo sapiens
MPYEVNAGY

SEQ ID NO: 93539 - protein, 74 aa, Homo sapiens
MVFGEFFHRPGQDEELVNLNVGGFKQSVDQSTLLRFPHTRLGKLLTCHSEEAILELCDDYSVADKEYYFDRNPS

SEQ ID NO: 93540 - protein, 123 aa, Homo sapiens
  MOD_RES (1)..(1): Any amino acid
XEELPRRREQCHHYPKDPQLEVNFYTGMDEDSDIAFQFRLHFGHPAIMNSCVFGIWRYEEKCYYLPFEDGKPFELCIYVRHKEYKVMVNGQRIYNFAHRFPPASVKMLQVFRDISLTRVLISD

SEQ ID NO: 93541 - protein, 504 aa, Homo sapiens
MSTNENANTPAARLHRFKNKGKDSTEMRRRRIEVNVELRKAKKDDQMLKRRNVSSFPDDATSPLQENRNNQGTVNWSVDDIVKGINSSNVENQLQATQAARKLLSREKQPPIDNIIRAGLIPKFVSFLGRTDCSPIQFESAWALTNIASGTSEQTKAVVDGGAIPAFISLLASPHAHISEQAVWALGNIAGDGSVFRDLVIKYGAVDPLLALLAVPDMSSLACGYLRNLTWTLSNLCRNKNPAPPIDAVEQILPTLVRLLHHDDPEVLADTCWAISYLTDGPNERIGMVVKTGVVPQLVKLLGASELPIVTPALRAIGNIVTGTDEQTQVVIDAGALAVFPSLLTNPKTNIQKEATWTMSNITAGRQDQIQQVVNHGLVPFLVSVLSKADFKTQKEAVWAVTNYTSGGTVEQIVYLVHCGIIEPLMNLLTAKDTKIILVILDAISNIFQAAEKLGETEKLSIMIEECGGLDKIEALQNHENESVYKASLSLIEKYFSVEVSNGW

SEQ ID NO: 93542 - protein, 1119 aa, Homo sapiens
MDALIIPVTMEVPCDSRGQRMWWAFLASSMVTFFGGLFIILLWRTLKYLWTVCCHCGGKTKEAQKINNGSSQADGTLKPVDEKEEAVAAEVGWMTSVKDWAGVMISAQTLTGRVLVVLVFALSIGALVIYFIDSSNPIESCQNFYKDFTLQIDMAFNVFFLLYFGLRFIAANDKLWFWLEVNSVVDFFTVPPVFVSVYLNRSWLGLRFLRALRLIQFSEILQFLNILKTSNSIKLVNLLSIFISTWLTAAGFIHLVENSGDPWENFQNNQALTYWECVYLLMVTMSTVGYGDVYAKTTLGRLFMVFFILGGLAMFASYVPEIIELIGNRKKYGGSYSAVSGRKHIVVCGHITLESVSNFLKDFLHKDRDDVNVEIVFLHNISPNLELEALFKRHFTQVEFYQGSVLNPHDLARVKIESADACLILANKYCADPDAEDASNIMRVISIKNYHPKIRIITQMLQYHNKIEEDTWQKYYLEGVSNEMYTEYLSSAFVGLSFPTVCELCFVKLKLLMIAIEYKSANRESRILINPGNHLKIQEGTLGFFIASDAKEVKRAFFYCKACHDDITDPKRIKKCGCKRPKMSIYKRMRRACCFDCGRSERDCSCMSGRVRGNVDTLERAFPLSSVSVNDCSTSFRAFEDEQPSTLSPKKKQRNGGMRNSPNTSPKLMRHDPLLIPGNDQIDNMDSNVKKYDSTGMFHWCAPKEIEKVILTRSEAAMTVLSGHVVVCIFGDVSSALIGLRNLVMPLRASNFHYHELKHIVFVGSIEYLKREWETLHNFPKVSILPGTPLSRADLRAVNINLCDMCVILSANQNNIDDTSLQDKECILASLNIKSMQFDDSIGVLQANSQGFTPPGMDRSSPDNSPVHGMLRQPSITTGVNIPIITELVNDTNVQFLDQDDDDDPDTELYLTQPFACGTAFAVSVLDSLMSATYFNDNILTLIRTLVTGGATPELEALIAEENALRGGYSTPQTLANRDRCRVAQLALLDGPFADLGDGGCYGDLFCKALKTYNMLCFGIYRLRDAHLSTPSQCTKRYVITNPPYEFELVPTDLIFCLMQFDHNAGQSRASLSHSSHSSQSSSKKSSSVHSIPSTANRQNRPKSRESRDKQNRKEMVYR

SEQ ID NO: 93543 - protein, 44 aa, Homo sapiens
PEGRRDVGAAGRGVGSSGAGRLRVQIAMGNLASAIRKMCCCPSN

SEQ ID NO: 93544 - protein, 242 aa, Homo sapiens
MGCLLFLLLWALLQAWGSAEVPQRLFPLRCLQISSFANSSWTRTDGLAWLGELQTHSWSNDSDTVRSLKPWSQGTFSDQQWETLQHIFRVYRSSFTRDVKEFAKMLRLSYPLELQVSAGCEVHPGNASNNFFHVAFQGKDILSFQGTSWEPTQEAPLWVNLAIQVLNQDKWTRETVQWLLNGTCPQFVSGLLESGKSELKKQGGSYTSMGLIALAVLACLLFLLIVGFTSRFKRQTSYQGVL

SEQ ID NO: 93545 - protein, 125 aa, Homo sapiens
MLPRLVLNSWVQVILLRWPPKVLGLQMTDMGPAKDKLVIGRIFHIVENDLYIDFGGKFHCVCRRPEVDGEKYQKGTRVRLRLLDLELTSRFLGATTDTTVLEANAVLLGIQESKDSRSKEEHHEK

SEQ ID NO: 93546 - protein, 204 aa, Homo sapiens
NRPLLIKLKTQTSTEYFLEACSREERDAWAFEITGAIHAGQPGKVQQLHSLRNSFKLPPHISLHRIVDKMHDSNTGIRSSPNMEQGSTYKKTFLGSSLVDWLISNSFTASRLEAVTLASMLMEENFLRPVGVRSMGAIRSGDLAEQFLDDSTALYTFGHKRKNWKVRRFVLRKDPAFLHYYDPSKEENRPVGGFSLRGSLVSAL

SEQ ID NO: 93547 - protein, 132 aa, Homo sapiens
MALLEVLSGRNLLHEYKSSSHRIFRLNNIAKALKFLEDSNVKLVSIDAAEIADGNPSLVLGLIWNIILFFQIKELTGNLSRNSPSSSLSPGSGGTDSDSSFPPTPTAERSVAISVKDQRKAIKALLAWVQRK

SEQ ID NO: 93548 - protein, 67 aa, Homo sapiens
MSVNMDELKHQRCCSLQRKGLWETPGLFPPPPSACLLGLPACLPCTWGYPHPLPFPLLTKEKNEFQT

SEQ ID NO: 93549 - protein, 199 aa, Homo sapiens
KQYQGSGGVAMDVERSRFPYCVVWTPIPVLTWFFPIIGHMGICTSTGVIRDFAGPYFVSEDNMAFGKPAKCHLQEAFSHPILVRSGCHNKISSIGYWKLDPAQVYASGPNAWDTAVHDASEEYKHRMHNLCCDNCHSHVALALNLMRYNNSTNWNMVTLCFFCLLYGKYVSVGAFVKTWLPFILLLGIILTVSLVFNLR

SEQ ID NO: 93550 - protein, 310 aa, Homo sapiens
MAATQELLLQLQKDNRDGRQRKQELEKLMRGLEAESESLNQRLQDLSERERSLLRRRSQAAQPLQGEAREAARERAERVRRRLEEAERHKEYLEQHSRQLQEQWEELSSQLFYYGGELQSQKSTEQQLAAQLVTLQNELELAETKCALQEEKLQQDALQTAEAWAIFQEQTVVLQVRPHSDAKEVQVKVMEAAEELDAWQSGRELCDGQLRGVQYSTESLMEEMARADRETRLFGGPRALAIRRCVLGALQVLLTLPLLFLGLSLLWTVLLDPGAVSAWLWSLTSETTLRRLRYTLSPLLELRANGLLPT

SEQ ID NO: 93551 - protein, 186 aa, Homo sapiens
  MOD_RES (1)..(1): Any amino acid
XPRDELKPPKRQEEVRQSVTPAEPVQYYFTLAQQPTAVQVQGQQQGQQTTSSTTTIQPGQIIIAQPQQGQTTPVTMQVGEGQQVQIVQAQPQGQAQQAQSGTGQTMQVMQQIITNTGEIQQIPVQLNAGQLQYIRLAQPVSGTQVVQGQIQTLAMETFFAFKRQIYSLWRVGGFIATLFSPRDPGN

SEQ ID NO: 93552 - protein, 325 aa, Homo sapiens
MVPSFLSLSFSSLGLWASGLILVLGFLKLIHLLLRRQTLAKAMDKFPGPPTHWLFGHALEIQETGSLDKVVSWAHQFPYAHPLWFGQFIGFLNIYEPDYAKAVYSRGDPKAPDVYDFFLQWIGRGLLVLEGPKWLQHRKLLTPGFHYDVLKPYVAVFTESTRIMLDKWEEKAREGKSFDIFCDVGHMALNTLMKCTFGRGDTGLGHSTIMTSSTGSPHMAAASCGPARWPMTIQTRSSGSGRQPCRMRRCGRRSRTGGTWTSWTFSWVPGMKMTSNCQMQTSGLKWTHSCLKAMTPPPVVSPGFSTAWPCTLSTSIVVERRSARS

SEQ ID NO: 93553 - protein, 126 aa, Homo sapiens
MQKAGAGGRRASDCGLAPHRPRCITKFAQYVGSFPVDDLDTQESVWLVQQQLWALKDCPRRRAVILKFSLQGLKIYSGEGEVLLMAHALRRILYSTWCPADCQFAFMARNPRSPASKLFCHLFVGS

SEQ ID NO: 93554 - protein, 254 aa, Homo sapiens
MGARVTPRDSGGLIGIENLPCELQRNFQLMRELDQRTEDKKAEIDILAAEYISTVKTLSPDQRVERLQKIQNAYSKCKEYSDDKVQLAMQTYEMVDKHIRRLDADLARFEADLKDKMEGSDFESSGGRGLKKGRGQKEKRGSRGRGRRTSEEDTPKKKKHKGGGNSVLSLPAPSCSEPEGPVPTVPFLRESGTPPGLFLTQCCFSRWQCCSCPIARRRDRLVRPALKLGSDVQGAKEAPSRGTGGWCRWADGSS

SEQ ID NO: 93555 - protein, 751 aa, Homo sapiens
MRALWVLGLCCVLLTFGSVRADDEVDVDGTVEEDLGKSREGSRTDDEVVQREEEAIQLDGLNASQIRELREKSEKFAFQAEVNRMMKLIINSLYKNKEIFLRELISNASDALDKIRLISLTDENALSGNEELTVKIKCDKEKNLLHVTDTGVGMTREELVKNLGTIAKSGTSEFLNKMTEAQEDGQSTSELIGQFGVGFYSAFLVADKVIVTSKHNNDTQHIWESDSNEFSVIADPRGNTLGRGTTITLVLKEEASDYLELDTIKNLVKKYSQFINFPIYVWSSKTETVEEPMEEEEAAKEEKEESDDEAAVEEEEEEKKPKTKKVEKTVWDWELMNDIKPIWQRPSKEVEEDEYKAFYKSFSKESDDPMAYIHFTAEGEVTFKSILFVPTSAPRGLFDEYGSKKSDYIKLYVRRVFITDDFHDMMPKYLNFVKGVVDSDDLPLNVSRETLQQHKLLKVIRKKLVRKTLDMIKKIADDKYNDTFWKEFGTNIKLGVIEDHSNRTRLAKLLRFQSSHHPTDITSLDQYVERMKEKQDKIYFMAGSSRKEAESSPFVERLLKKGYEVIYLTEPVDEYCIQALPEFDGKRFQNVAKEGVKFDESEKTKESREAVEKEFEPLLNWMKDKALKDKIEKAVVSQRLTESPCALVASQYGWSGNMERIMKAQAYQTGKDISTNYYASQKKTFEINPRHPLIRDMLRRIKVEEEPEEEPEETAEDTTEDTEQDEDEEMDVGTDEEEETAKESTAEKDEL

SEQ ID NO: 93556 - protein, 166 aa, Homo sapiens
MKEMLAKDLEESQGGKSSEVLSATELRVQLAQKEQELARAKEALQAMKADRKRLKGEKTDLVSQMQQLYATLESREEQLRDFIRNYEQHRKESEDAVKALAKEKDLLEREKWELRRQAKEATDHATALRSQLDLKDNRMKELEAELAMAKQSLATLTKDVPKRHSL

SEQ ID NO: 93557 - protein, 421 aa, Homo sapiens [sequence omitted]

SEQ ID NO: 93558 - protein, 78 aa, Homo sapiens
GRQDGSESEAVAVALAGRLRELLRDLPPENRASLQYLLRHLRRPASSRLSSSTTAWSSRRSRRRPPGARTSHPTSELR

SEQ ID NO: 93559 - protein, 1871 aa, Homo sapiens
MTTMLQKSDSNASFLRAARAGNLDKVVEYLKGGIDINTCNQNGLNALHLAAKEGHVGLVQELLGRGSSVDSATKKGNTALHIASLAGQAEVVKVLVKEGANINAQSQNGFTPLYMAAQENHIDVVKYLLENGANQSTATEDGFTPLAVALQQGHNQAVAILLENDTKGKVRLPALHIAARKDDTKSAALLLQNDHNADVQSKSGFTPLHIAAHYGNVNVATLLLNRGAAVDFTARNGITPLHVASKRGNTNMVKLLLDRGGQIDAKTRDGLTPLHCAARSGHDQVVELLLERGAPLLARTKNGLSPLHMAAQGDHVECVKHLLQHKAPVDDVTLDYLTALHVAAHCGHYRVTKLLLDKRANPNARALNGFTPLHIACKKNRIKVMELLVKYGASIQAITESGLTPIHVAAFMGHLNIVLLLLQNGASPDVTNIRGETALHMAARAGQVEVVRCLLRNGALVDARAREEQTPLHIASRLGKTEIVQLLLQHMAHPDAATTNGYTPLHISAREGQVDVASVLLEAGAAHSLATKKGFTPLHVAAKYGSLDVAKLLLQRRAAADSAGKNGLTPLHVAAHYDNQKVALLLLEKGASPHATAKNGYTPLHIAAKKNQMQIASTLLNYGAETNIVTKQGVTPLHLASQEGHTDMVTLLLDKGANIHMSTKSGLTSLHLAAQEDKVNVADILTKHGADQDAHTKLGYTPLIVACHYGNVKMVNFLLKQGANVNAKTKNGYTPLHQAAQQGHTHIINVLLQHGAKPNATTANGNTALAIAKRLGYISVVDTLKVVTEEVTTTTTTITEKHKLNVPETMTEVLDVSDEEGDDTMTGDGGEYLRPEDLKELGDDSLPSSQFLDGMNYLRYSLEGGRSDSLRSFSSDRSHTLSHASYLRDSAVMDDSVVIPSHQVSTLAKEAERNSYRLSWGTENLDNVALSSSPIHSGFLVSFMVDARGGAMRGCRHNGLRIIIPPRKCTAPTRVTCRLVKRHRLATMPPMVEGEGLASRLIEVGPSGAQFLGPVIVEIPHFAALRGKERELVVLRSENGDSWKEHFCDYTEDELNEILNGMDEVLDSPEDLEKKRICRIITRDFPQYFAVVSRIKQDSNLIGPEGGVLSSTVVPQVQAVFPEGALTKRIRVGLQAQPMHSELVKKILGNKATFSPIVTLEPRRRKFHKPITMTIPVPKASSDVMLNGFGGDAPTLRLLCSITGGTTPAQWEDITGTTPLTFVNECVSFTTNVSARFWLIDCRQIQESVTFASQVYREIICVPYMAKFVVFAKSHDPIEARLRCFCMTDDKVDKTLEQQENFAEVARSRDVEVLEGKPIYVDCFGNLVPLTKSGQHHIFSFFAFKENRLPLFVKVRDTTQEPCGRLSFMKEPKSTRGLVHQAICNLNITLPIYTKESESDQEQEEEIDMTSEKNPQDEQERIEERLAYIADHLGFSWTELARELDFTEEQIHQIRIENPNSLQDQSHALLKYWLERDGKHATDTNLVECLTKINRMDIVHLMETNTEPLQERISHSYAEIEQTITLDHSEGFSVLQEELCTAQHKQKEEQAVSKESETCDHPPIVSEEDISVGYSTFQDGVPKTEGDSSATALFPQTHKEQVQQDFSGKMQDLPEESSLEYQQEYFVTTPGTETSETQKAMIVPSSPSKTPEEVSTPAEEEKLYLQTPTSSERGGSPIIQEPEEPSEHREESSPRKTSLVIVESADNQPETCERLDEDAAFEKGDDMPEIPPETVTEEEYIDEHGHTVVKKVTRKIIRRYVSSEGTEKEEIMVQGMPQEPVNIEEGDGYSKVIKRVVLKSDTEQSEVTLCEPSILSSTSQFQAEPVEGRRVSKVVKTTVVLGERMEKHLGDSSLATDLPSAKDDFEEDNNE

SEQ ID NO: 93560 - protein, 365 aa, Homo sapiens
MDELVHDLASALEQTSEQNKLGELWEEMALSPRQQRRQLRKRRGRKRRSDFTHLAEHTCCYSEASESSLDEATKDCREVAPVTNFSDSDDTMVAKRHPALNAIVKSKQHSWHESDSFTENAPCRPLRRRRKVKRVTSEVAASLQQKLKVSDWSYERGCRFKSAKKQRLSRWKENTPWTSSGHGLCESAENRTFLSKTGRKERMECETDEQKQGSDENMSECETSSVCSSSDTGLFTNDEGRQGDDEQSDWFYEGECVPGFTVPNLLPKWAPDHCSEVERMDSGLDKFSDSTFLLPSRPAQRGYHTRLNRLPGAAARCLRKGRRRLVGKETSINTLGTERISHIISDPRQKDFWLPSAGKRERNQF

SEQ ID NO: 93561 - protein, 144 aa, Homo sapiens
MESKALFNLIPVGLRVVAIQGVKASLYVAMNGEGYLYSSDVFTPECKFKESVFENYYVIYSSTLYRQQESGRAWFLGLNKEGQIMKGNRVKKTKPSSHFVPKPIEVCMYREPSLHEIGEKQGRSRKSSGTPTMNGGKVVNQDST

SEQ ID NO: 93562 - protein, 441 aa, Homo sapiens
MFRCGGLAAGALKQKLVPLVRTVCVRSPRQRNRLPGNLFQRWHVPLELQMTRQMASSGASGGKIDNSVLVLIVGLSTVGAGAYAYKTMKEDEKRYNERISGLGLTPEQKQKKAALSEGEEVPQDKAPSHVPFLLIGGGTAAFAAARSIRARDPGARVLIVSEDPELPYMRPPLSKELWFSDDPNVTKTLRFKQWNGKERSIYFQPPSFYVSAQDLPHIENGGVAVLTGKKVVQLDVRDNMVKLNDGSQITYEKCLIATGGTPRSLSAIDRAGAEVKSRTTLFRKIGDFRSLEKISREVKSITIIGGGFLGSELACALGRKARALGTEVIQLFPEKGNMGKILPEYLSNWTMEKVRREGVKVMPNAIVQSVGVSSGKLLIKLKDGRKVETDHIVAAVGLEPNVELAKTGGLEIDSDFGGFRVNAELQARSNIWVEMLHASTI

SEQ ID NO: 93563 - protein, 48 aa, Homo sapiens
  MOD_RES (1)..(1): Any amino acid
XILKCSSYRQARWWAQEITELAQGPGRDFLQLHRHDSYAPPRPGTLAR

SEQ ID NO: 93564 - protein, 634 aa, Homo sapiens
  MOD_RES (1)..(1): Any amino acid
XSKAHASYYGRMNVREVLREDGHLSVNGEALCDDCKGKRHLDAHTAAHSQSPRLPGRAGTLWHIWACAGYFLLQILRRIGAVGQAVSRTAWSALWLAVVAPGKAASGVFWWLGIGWYQFVTLISWLNVFLLTRCLRNICKFLVLLIPLFLLLAGLSLRGQGNFFSFLPVLNWASMHRTQRVDDPQDVFKPTTSRLKQPLQGDSEAFPWHWMSGVEQQVASLSGQCHHHGENLRELTTLLQKLQARVDQMEGGAAGPSASVRDAVGQPPRETDFMAFHQEHEVRMSHLEDILGKLREKSEAIQKELEQTKQKTISAVGEQLLPTVEHLQLELDQLKSELSSWRHVKTGCETVDAVQERVDVQVREMVKLLFSEDQQGGSLEQLLQRFSSQFVSKGDLQTMLRDLQLQILRNVTHHVSVTKQLPTSEAVVSAVSEAGASGITEAQARAIVNSALKLYSQDKTGMVDFALESGGGSILSTRCSETYETKTALMSLFGIPLWYFSQSPRVVIQPDIYPGNCWAFKGSQGYLVVRLSMMIHPAAFTLEHIPKTLSPTGNISSAPKDFAVYGLENEYQEEGQLLGQFTYDQDGESLQMFQALKRPDDTAFQIVELRIFSNWGHPEYTCLYRFRVHGEPVK

SEQ ID NO: 93565 - protein, 169 aa, Homo sapiens
MFQDPVAFKDVAVNFTQEEWALLDISQRKLYREVMLETFRNLTSLGKRWKDQNIEYEHQNPRRNFRSLIEEKVNEIKDDSHCGETFTPVPDDRLNFQEKKASPEVKSCESFVCGEVGLGNSSFNMNIRGDIGHKAYEYQEYGPKPCKCQQPKKAFRYRPSFRTQERDHT

SEQ ID NO: 93566 - protein, 110 aa, Homo sapiens
MTEEVIVIAKWDYTAQQDQELDIKKNERLWLLDDSKTWWRVRNAANRTGYVPSNYVERKNSLKKGSLVKNLKDTLGLGKTRRKTSARDASPTPSTDAEYPANGSGADRIY

SEQ ID NO: 93567 - protein, 101 aa, Homo sapiens
MSEGVDLIDIYADEEFNQDPEFNNTDQIDLYDDVLTATSQPSDDRSSSTEPPPPVRQEPSPKPNNKTPAILYTYSGLRNRRAAVYVGSFSWQGHLRDEISE

SEQ ID NO: 93568 - protein, 249 aa, Homo sapiens
MAAVEACGGSPVTRGIVRSQGGSLCLATVICDLFLCAYCHNRVRQRLLLREQFGEELEPRLAPWMPSFIIHSNPIWLGALLWLRELCPGVNNQPYLCESGHCCGETGCCTYYYELWWFWLLWTVLILFSCCCAFRHRRAKLRLQQQQRQREINLLAYHGACHGAGPFPTGSLLDLRFLSTFKPPAYEDVVHRPGTPPPPYTVAPGRPLTASSEQTCCSSSSSCPAHFEGTNVEGVSSHQSAPPHQEGEP

SEQ ID NO: 93569 - protein, 126 aa, Homo sapiens
MRHVYNSELLDVYCSQCCKKINLLNDLEARLKNLKANSPNRKISSTAFGRQLMHSSNFSSSNGSTEDLFRDSIDSCDNDITEKVSFLEKKVTELENDSLTNGDLKSKLKQENTQLVHRVHELEEMV

SEQ ID NO: 93570 - protein, 44 aa, Homo sapiens
MAAVFLVTLYEYSPLFYIAVVFTCFIVTTGLVLGCWHNLDNRLP

SEQ ID NO: 93571 - protein, 52 aa, Homo sapiens
MATETVELHKLKLAELKQECLARGLETKGIKQDLIHRLQAYLEEHGRRNKAH

SEQ ID NO: 93572 - protein, 252 aa, Homo sapiens
  MOD_RES (1)..(1): Any amino acid
XAASAASASSDAPPFQLGKPRFQQTSFYGRFRHFLDIIDPRTLFVTERRLREAVQLLEDYKHGTLRPGVTNEQLWSAQKIKQAILHPDTNEKIFMPFRMSGYIPFGTPIVVGLLLPNQTLASTVFWQWLNQSHNACVNYANRNATKPSPASKFIQGYLGAVISAVSIAVGLNVLVQKANKFTPATRLLIQRFVPFPAVGPAGDGADASGPAHAHPGATPDRHVHAGEIETSQLEPEIAQATSSRTVVYNKGL

SEQ ID NO: 93573 - protein, 489 aa, Homo sapiens
MADYLISGGTSYVPDDGLTAQQLFNCGDGLTYNDFLILPGYIDFTADQVDLTSALTKKITLKTPLVSSPMDTVTEAGMAIAMAKYEQGFITDPVVLSPKDRVRDVFEAKARHGFCGIPITDTGRMGSRLVGIISSRDIDFLKEEEHDCFLEEIMTKREDLVVAPAGITLKEANEILQRSKKGKLPIVNEDDELVAIIARTDLKKNRDYPLASKDAKKQLLCGAAIGTHEDDKYRLDLLAQAGVDVVVLDSSQGNSIFQINMIKYIKDKYPNLQVIGGNVVTAAQAKNLIDAGVDALRVGMGSGSICITQEVLACGRPQATAVYKVSEYARRFGVPVIADGGIQNVGHIAKALALGASTVMMGSLLAATTEAPGEYFFSDGIRLKKYRGMGSLDAMDKHLSSQNRYFSEADKIKVAQGVSGAVQDKGSIHKFVPYLIAGIQHSCQDIGAKSLTQVRAMMYSGELKFEKRTSSAQVEGGVHSLHSYEKRLF

SEQ ID NO: 93574 - protein, 367 aa, Homo sapiens
MQNSHSGVNQLGGVFVNGRPLPDSTRQKIVELAHSGARPCDISRILQTHADAKVQVLDNQNVSNGCVSSINRVLRNLASEKQQMGADGMYDKLRMLNGQTGSWGTRPGWYPGTSVPGQPTQDGCQQQEGGGENTNSISSNGEDSDEAQMRLQLKRKLQRNRTSFTQEQIEALEKEFERTHYPDVFARERLAAKIDLPEARIQVWFSNRRAKWRREEKLRNQRRQASNTPSHIPISSSFSTSVYQPIPQPTTPVSSFTSGSMLGRTDTALTNTYSALPPMPSFTMANNLPMQPPVPSQTSSYSCMLPTSPSVNGRSYDTYTPPHMQTHMNSQPMGTSGTTSTGLISPGVSVPVQVPGSEPDMSQYWPR

SEQ ID NO: 93575 - protein, 50 aa, Homo sapiens
MDFFSSHLLADSSSPATNSSHTDAHEILVSDFLVSDENLQKMENVLDLWS

SEQ ID NO: 93576 - protein, 204 aa, Homo sapiens
MDVQATTPLDPRVLDAMLPYLINYYGNPHSRTHAYGWESEAAMERARQQVASLIGADPREIIFTSGATESNNIAIKGVARFYRSRKKHLITTQTEHKCVLDSCRSLEAEGFQVTYLPVQKSGIIDLKELEAAIQPDTSLVSVMTVNNEIGVKQPIAEIGRICSSRKVYFHTDAAQAVGKIPLDVNDMKIDLMSISGHKIYGPKV

SEQ ID NO: 93577 - protein, 102 aa, Homo sapiens
MDDDIAALVVDNGSGMCKAGFAGDDAPRAVFPSIVGRPRHQGVMVGMGQKDSYVGDEAQSKRGILTLKYPIEHGIVTNWDDMEKIWHHTFYNELRVAPEEHP

SEQ ID NO: 93578 - protein, 408 aa, Homo sapiens
MAMGLMCGRRELLRLLQSGRRVHSVAGPSQWLGKPLTTRLLFPAAPCCCRPHYLFLAASGPRSLSTSAISFAEVQVQAPPVVAATPSPTAVPEVASGETADVVQTAAEQSFAELGLGSYTPVGLIQNLLEFMHVDLGLPWWGAIAACTVFARCLIFPLIVTGQREAARIHNHLPEIQKFSSRIREAKLAGDHIEYYKASSEMALYQKKHGIKLYKPLILPVTQAPIFISFFIALREMANLPVPSLQTGGLWWFQDLTVSDPIYILPLAVTATMWAVLELGAETGVQSSDLQWMRNVIRMMPLITLPITMHFPTAVFMYWLSSNLFSLVQVSCLRIPAVRTVLKIPQRVVHDLDKLPPREGFLESFKKGPLRQTFTHNPLLQPGKDNPPNIPSSSSKPKSKYPWHDTLG

SEQ ID NO: 93579 - protein, 143 aa, Homo sapiens
  MOD_RES (1)..(1): Any amino acid
XSCSSRAAGCWSPGQAKCPGIEPVCVDLGDWEATERALGSVGPVDLLVNNAAVALLQPFLEVTKEAFDRSFEVNLRAVIQVSQIVARGLIARGVPGAIVNVSSQCSQRAVTNHSVYCSTKGALDMLTKVMALELGPHKIRVNA

SEQ ID NO: 93580 - protein, 114 aa, Homo sapiens
MAPKKLSCLRSLLLPLSLTLLLPQADTRSFVVDRGHDRFLLDGAPFRYVSGSLHYFRVPRVLWADRLLKMRWSGLNAIQFYVPWNYHEPQPGVYNFNGSRDLIAFLNEAALANL

SEQ ID NO: 93581 - protein, 99 aa, Homo sapiens
MLYLEDYLEMIEQLPMDLRDRFTEMREMDLQVQNAMDQLEQRVSEFFMNAKKNKPEWREEQMASIKKDYYKALEDADEKVQLANQIYDLVSKSNVHTVP

SEQ ID NO: 93582 - protein, 122 aa, Homo sapiens
RGAAPLPARLLWLPRGLVRLSAAPAAATASRAGGADRGHAQQVYLALGLTQAEINEFFTGPAFLAWGRMGNLHTWDGPLPPSWHIKQLYLQHRVLDQMRSFGMTPVLPAFAGHVPEAVTSGY

SEQ ID NO: 93583 - protein, 150 aa, Homo sapiens
MAARGRRAEPQGREAPGPAGGGGGGSRWAESGSGTSPESGDEEVSGAGSSPVSGGVNLFANDGSFLELFKRKMEEEQRQRQEEPPPGPQRPDQSAAAAGPGDPKRKGGPGSTLSFVLTSKGDAWAKYMAEVKKYKAHQCGDDDKTRPLVK

SEQ ID NO: 93584 - protein, 481 aa, Homo sapiens
MTPTLAALLCLGLSLGPRTHVQAGPFPKPTLWAEPGSVISWGSPVTIWCQGSLEAQEYRLDKEGSPEPWDRNNPLEPKNKARFSIPSITEHHAGRYRCHYYSSAGWSEPSDPLELVMTGAYSKPTLSALPSPVVASGGNMTLQCGSQKGYHHFVLMKEGEHQLPRTLDSQQLHSGGFQALFPVGPVNPSHRWRFTCYYYYMNTPRVWSHPSDPLEILPSGVSRKPSLLTLQGPVLAPGQSLTLQCGSDVGYDRFVLYKEGERDFLQRPGQQPQAGLSQANFTLGPVSPSHGGQYRCYGAHNLSSEWSAPSDPLNILMAGQIYDTVSLSAQPGPTVASGENVTLLCQSWWQFDTFLLTKEGAAHPPLRLRSMYGAHKYQAEFPMSPVTSAHAGTYRCYGSYSSNPHLLSFPSEPLELMVSGTLWRLQPPTHRAALHTPASHAKDYTVENLIRMGMAGLVLLFLGILLFEAQHSQRNPQDAAG

SEQ ID NO: 93585 - protein, 163 aa, Homo sapiens
MFLVNSFLKGGGGGGGGGGGLGGGLGNVLGGLISGAGGGGGGGGGGGGGGGGGGGGTAMRILGGVISAISEAAAQYNPEPPPPRTHYSNIEANESEEVRQFRRLFAQLAGDDMEVSATELMNILNKVVTRHPDLKTDGFGIDTCRSMVAVMDSDTTGKLGFEE

SEQ ID NO: 93586 - protein, 46 aa, Homo sapiens
MEDAFVELYGPSMRPLFDFSWLSLKTLLSLALVGACITLGAYLGHK

SEQ ID NO: 93587 - protein, 75 aa, Homo sapiens
MSKLGISFSEDQQKEKDQLGKAPKKEEAAALRKDISGSDKRSLEKNQINFWRNQMTKRWEPSLNWKTTVNYKGKG

SEQ ID NO: 93588 - protein, 690 aa, Homo sapiens [sequence omitted]

SEQ ID NO: 93589 - protein, 224 aa, Homo sapiens
PGISPPPEKQKRKKKKMPEILSLRGRQRAHSKLANKPVVQPVEEQEPKGPQASEERNLEPPSSEQLEPTVTFLFTLLNTSEPTEPKDPESDSEIQEYQFLDQEDWGPQRTSKEIRQLQNDCMRLRESLNTTQVHNLALGEKLQNLPTLLYKSLKEGAQAIQEEAQAIQDEVKALQEESQALPEVALLSDPNPRKAGLLFKLPDLPHDHRDQGQAWPGPRPEVGH

SEQ ID NO: 93590 - protein, 559 aa, Homo sapiens
MRAGSIVPDIAVGTKRGSDELFSTCVTNGPFIMSSNSASAANGNDSKKFKGDSRSAGVPSRVIHIRKLPIDVTEGEVISLGLPFGKVTNLLMLKGKNQAFIEMNTEEAANTMVNYYTSVTPVLRGQPIYIQFSNHKELKTDSSPNQARAQAALQAVNSVQSGNLALAASAAAVDAGMAMAGQSPVLRIIVENLFYPVTLDVLHQIFSKFGTVLKIITFTKNNQFQALLQYADPVSAQHAKLSLDGQNIYNACCTLRIDFSKLTSLNVKYNNDKSRDYTRPDLPSGDSQPSLDQTMAAAFGAPGIISASPYAGAGFPPTFAIPQAAGLSVPNVHGALAPLAIPSAAAAAAAAGRIAIPGLAGAGNSVLLVSNLNPERVTPQSLFILFGVYGDVQRVKILFNKKENALVQMADGNQAQLAMSHLNGHKLHGKPIRITLSKHQNVQLPREGQEDQGLTKDYGNSPLHRFKKPGSKNFQNIFPPSATLHLSNIPPSVSEEDLKVLFSSNGGVVKGFKFFQKDRKMALIQMGSVEEAVQALIDLHNHDLGENHHLRVSFSKSTI

SEQ ID NO: 93591 - protein, 150 aa, Homo sapiens
MKSLKAKFRKSDTNEWNKNDDRLLQAVENGDAEKVASLLGKKGASATKHDSEGKTAFHLAAAKGHVECLRVMITHGVDVTAQDTTGHSALHLAAKNSHHECIRKLLQSKCPAESVDSSGKTALHYAAAQGCLQAVQILCEHKSPINLKDL

SEQ ID NO: 93592 - protein, 134 aa, Homo sapiens
  MOD_RES (1)..(1): Any amino acid
XFSEEGGHVVLAHSVLLGPEFKLVFSIRPRSLTGILIHIGSQPGKHLCVYLEAGKVTASMDSGAGGTSTSVTPKQSLCDGQWHSVAANLTTLRIPVWKSFFGCLRNIHVNHIPVPVTEALEVQGPVSLNGCPDQ

SEQ ID NO: 93593 - protein, 204 aa, Homo sapiens
MGTLWSQESTPEERLPVEGSRPWAVARRVLTAILILGLLLCFSVLLFYNFQNCGPRPCETSVCLDLRDHYLASGNTSVAPCTDFFSFACGRAKETNNSFQELATKNKNRLRRILEVQNSWHPGSGEEKAFQFYNSCMDTLAIEAAGTGPLRQVIEELGGWRISGKWTSLNFNRTLRLLMSQYGHFPFFRAYLGPHPASPHTPVI

SEQ ID NO: 93594 - protein, 163 aa, Homo sapiens
NITKREVEDDLGLSMLIDSQNNQYILTKPRDSTIPRADHHFIKDIVTIGMLSLPCGWLCTAIGLPTMFGYIICGVLLGPSGLNSIKVWKISLQGPCYMTLLMIAFGLLWGHLLRIKPTQSVFISTCLSLSSTPLVSRFLMGSARGDKEGDIDYSTVLLGMLVT

SEQ ID NO: 93595 - protein, 160 aa, Homo sapiens
MYPESTTGSPARLSLRQTGSPGMIYSTRYGSPKRQLQFYRNLGKSGLRVSCLGLGTWVTFGGQITDEMAEQLMTLAYDNGINLFDTAEVYAAGKAEVVLGNIIKKKGWRNIRSSYKVGPPSSLPSKCHSESQCQGEPPPPPPWIPDTPSSCPIKFVFWQL

SEQ ID NO: 93596 - protein, 303 aa, Homo sapiens
LRSKMGKWCCHCFPWCRGSGKSNVGTSGDHDDSAMKTLRSKMGKWCCHCFPCCRGSGKSNVGTSGDHDDSAMKTLRSKMGKWCCHCFPCCRGSGKNKVGPWGDYDDSAFMEPRYHVRREDLDKLHRAAWWGKVPRKDLIVMLKDTDMNKKDKQKRTALHLASANGNSEVVKLLLDRRCQLNILDNKKRTALTKAVQCQEDECALMLLEHGTDPNIPDEYGNTALHYAIYNEDKLMAKALLLYGADIESKNKIESHSVSQAGVQWCDHSSLQPRPPEAQMVLQPQPQLFFSFFLFIFIFIFIFF

SEQ ID NO: 93597 - protein, 80 aa, Homo sapiens
  MOD_RES (1)..(1): Any amino acid
XLLLAYMKGNANLCRAIVRSGARLGVNNNQGVNIFNYQVATKQLLFRLLDMLSKEPPWCDGSYCYECTARFGVTTRKHHW

SEQ ID NO: 93598 - protein, 373 aa, Homo sapiens
MLLGLAAMELKVWVDGIQRVVCGVSEQTTCQEVVIALAQAIGQTGRFVLVQRLREKERQLLPQECPVGAQATCGQFASDVQFVLRRTGASLAGRPSSDSCPPPERCLIRASLPVKPRAALGCEPRKTLTPEPAPSLSRPGPAAPVTPTPGCCTDLRGLELRVQRNAEELGHEAFWEQELRREQAREREGQARLQALSAATAEHAARLQALDAQARALEAELQLAAEAPGPPSPMASATERLHQDLAVQERQSAEVQGSLALVSRALEAAERALQAQAQELEELNRELRQCNLQQFIQQTGAALPPPPRPDRGPPGTQGPLPPAREESLLGAPSESHAGAQPRPRGGPHDAELLEVAAAPAPEWCPLAAQPQAL

SEQ ID NO: 93599 - protein, 57 aa, Homo sapiens
MPREDRATWKSNYFLKIIVSAGNYWMIIRNVSLWEQTMWAPSRCSRSACPFAGRLWC

SEQ ID NO: 93600 - protein, 193 aa, Homo sapiens
MADPQSCFMTRQKPGNTFASEGSLNTAGRPGVGKRQVAPVAGVARKGRRIWGSRMIDIQTRMAGRALELLYLPENKPCYLLDIGCGTGLSGSYLSDEGHYWVGLDISPAMLDEAVDREIEGDLLLGDMGQGIPFKPGTFDGCISISAVQWLCNANKKSENPAKRLYCFFASLFSVLVRGSRAVLQLYPENSEQ

SEQ ID NO: 93601 - protein, 153 aa, Homo sapiens
MSPEVALNRISPMLSPFISSVVRNGKVGLDATNCLRITDLKSGCTSLTPGPNCDRFKLHIPYAGETLKWDIIFNAQYPELPPDFIFGEDAEFLPDPSALQNLASWNPSNPECLLLVVKELVQQYHQFQCSRLRESSRLMFEYQTLLEEPQYGE

SEQ ID NO: 93602 - protein, 76 aa, Homo sapiens
  MOD_RES (1)..(1): Any amino acid
XGRKVSRLGKCSGHSSFITHLDWAQDSSCFVTNSGDYEILYLEMGFHHLGQAGLELLTSGDPARCCGSCCLLGLQT

SEQ ID NO: 93603 - protein, 104 aa, Homo sapiens
MYRWLVRILGTIFRFCDRSVPPARALLKRRRSDSTLFSTVDTDEIPAKRPRLDCFIHQVKNSLYNAASLFGFPFQLTTKPMVTSACNGTRNVAPSGEVINLLME

SEQ ID NO: 93604 - protein, 106 aa, Homo sapiens
MSLSRSEEMHRLTENVYKTIMEQFNPSLRNFIAMGKNYEKALAGVTYAAKGYFDALVKMGELASESQGSKELGDVLFQMAEVHRQIQNQLEEMPCPASCSGSMCWS

SEQ ID NO: 93605 - protein, 455 aa, Homo sapiens
MDDQSRMLQTLAGVNLAGHSVQGGMALPPPPHGHEGADGDGRKQDIGDILHQIMTITDQSLDEAQAKKHALNCHRMKPALFSVLCEIKEKTGLSIRGAQEEDPPDPQLMRLDNMLLAEGVSGPEKGGGSAAAAAAAAASGGSSDNSIEHSDYRAKLTQIRQIYHTELEKYEQACNEFTTHVMNLLREQSRTRPISPKEIERMVGIIHRKFSSIQMQLKQSTCEAVMILRSRFLDARRKRRNFSKQATEILNEYFYSHLSNPYPSEEAKEELAKKCSITVSQSLVKDPKERGSKGSDIQPTSVVSNWFGNKRIRYKKNIGKFQEEANLYAAKTAVTAAHAVAAAVQNNQTNSPTTPNSGSSGSFNLPNSGDMFMNMQSLNGDSYQGSQVGANVQSQVDTLRHVINQTGGYSDGLGGNSLYSPHNLNANGGWQDATTPSSVTSPTEGPGSVHSDTSN

SEQ ID NO: 93606 - protein, 240 aa, Homo sapiens
  MOD_RES (1)..(1): Any amino acid
XVENTDWRLLRGDTDVRVERKDPNQVELWGLKEGTYLFQLTVTSSDHPEDTANVTVTVLSTKQTEDYCLASNKVGRCRGSFPRWYYDPTEQICKSFVYGGCLGNKNNYLREEECILACRGVQGPSMERRHPDTSGFDELQRIHFPSDKGHCVDLPDTGLCKESIPRWYYNPFSEHCARFTYGGCYGNKNNFEEEQQCLESCRGISKKDVFGLRREIPIPSTGSVEMAVAVFLVICIVVVV

SEQ ID NO: 93607 - protein, 91 aa, Homo sapiens
ITEACDGSDDIFGLSTDSLSRLRSPSVLEVREKGYERLKEELAKAQRELKLKDEECERLSKVRDQLGQELEELTASLFEVGLFTSWPTATS

SEQ ID NO: 93608 - protein, 123 aa, Homo sapiens
MRLLRRRHMPLRLAMVGCAFVLFLFLLHRDVSSREEATEKPWLKSLVSRKDHVLDLMLEAMNNLRDSMPKLQIRAPEAQQTLFSINQSCLPGFYTPAELKPFWERPPQDPNAPGADGKAFQKS

SEQ ID NO: 93609 - protein, 18 aa, Homo sapiens
MLVSFDHENKKVRLVLSG

SEQ ID NO: 93610 - protein, 573 aa, Homo sapiens
MLLESVLIFFNLLAVLSYLKFFNCQKHSPFSLSWWFWLTLTGVACSCAVGIKYMGVFTYVLVLGVAAVHAWHLLGDQTLSNVCVFCHLLARAVALLVIPVVLYLLFFYVHLILVFRSGPHDQIMSSAFQASLEGGLARITQGQPLEVAFGSQVTLRNVFGKPVPCWLHSHQDTYPMIYENGRGSSHQQQVTCYPFKDVNNWWIVKDPRRHQLVVSSPPRPVRHGDMVQLVHGMTTRSLNTHDVAAPLSPHSQEVSCYIDYNISMPAQNLWRLEIVNRGSDTDVWKTILSEVRFVHVNTSAVLKLSGAHLPDWGYRQLEIVGEKLSRGYHGSTVWNVEEHRYGASQEQRERERELHSPAQVDVSRNLSFMARFSELQWRMLALRSDDSEHKYSSSPLEWVTLDTNIAYWLHPRTSAQIHLLGNIVIWVSGSLALAIYALLSLWYLLRRRRNVHDLPQDAWLRWVLAGALCAGGWAVNYLPFFLMEKTLFLYHYLPALTFQILLLPVVLQHISDHLCRSQLQRSIFSALVVAWYSSACHVSNTLRPLTYGDKSLSPHELKALRWKDSWDILIRKH

SEQ ID NO: 93611 - protein, 189 aa, Homo sapiens
MTLMAAVYTIALRYTRTSDKELYFSTTAVCITEVIKLLLSVGILAKETGSLGRFKASLRENVLGSPKELLKLSVPSLVYAVQNNMAFLALSNLDAAVYQVTYQLKIPCTALCTVLMLNRTLSKLQWVSVFMLCAGVTLVQWKPAQATKVVEYILKKFKEFRYFSLGEKHSNVSIRDYCDISWRLLVRWS

SEQ ID NO: 93612 - protein, 207 aa, Homo sapiens
MTSKDYYFDSYAHFGIHEEMLKDEVRTLTYRNSMFHNRHLFKDKVVLDVGSGTGILCMFAAKAGARKVIGIECSSISDYAVKIVKANKLDHVVTIIKGKVEEVELPVEKVDIIISEWMGYCLFYESMLNTVLYARDKWLAPDGLIFPDRATLYVTAIEDRQYKDYKIHWWENVYGFDMSCIKDVAIKEPLVDVVDPKQLVTNACLIK

SEQ ID NO: 93613 - protein, 588 aa, Homo sapiens
MECLYYFLGFLLLAARLPLDAAKRFHDVLGNERPSAYMREHNQLNGWSSDENDWNEKLYPVWKRGDMRWKNSWKGGRVQAVLTSDSPALVGSNITFAVNLIFPRCQKEDANGNIVYEKNCRNEAGLSADPYVYNWTAWSEDSDGENGTGQSHHNVFPDGKPFPHHPGWRRWNFIYVFHTLGQYFQKLGRCSVRVSVNTANVTLGPQLMEVTVYRRHGRAYVPIAQVKDVYVVTDQIPVFVTMFQKNDRNSSDETFLKDLPIMFDVLIHDPSHFLNYSTINYKWSFGDNTGLFVSTNHTVNHTYVLNGTFSLNLTVKAAAPGPCPPPPPPPRPSKPTPSLGTWMKLETIILSKLSQGQKTKRRMFSFTGPAGDNPLELSRIPDENCQINRYGHFQATITIVEGILEVNIIQMTDVLMPVPWPESSLIDFVVTCQGSIPTEVCTIISDPTCEITQNTVCSPVDVDEMCLLTVRRTFNGSGTYCVNLTLGDDTSLALTSTLISVPDRDPASPLRMANSALISVGCLAIFVTVISLLVYKKHKEYNPIENSPGNVVRSKGLSVFLNRAKAVFFPGNQEKDPLLKNQEFKGVS

SEQ ID NO: 93614 - protein, 172 aa, Homo sapiens
MGLCKCPKRKVTNLFCFEHRVNVCEHCLCIVQSYLQWLQDSDYNPNCRLCNIPLASRETTRLVCYDLFHWACLNERAAQLPRNTAPAGYQCPSCNGPIFPPTNLAGPVASALREKLATVNWARAGLGLPLIDEVVSPEPEPLNTSDFSDWSSFNASSTPGPEEVDSASAAPA

SEQ ID NO: 93615 - protein, 51 aa, Homo sapiens
MLKALFLTMLTLALVKSQDTEETITYTQCTDGYEWDPVRQQCKDIDECDIV

SEQ ID NO: 93616 - protein, 30 aa, Homo sapiens
MVSKRIAQETFDAAVRENIEEFAMGPEEAV

SEQ ID NO: 93617 - protein, 396 aa, Homo sapiens
MVLKAFFPTCCVSTDSGLLVGRWVPEQSSAVVLAVLHFPFIPIQVKQLLAQVRQASQVGVAVLGTWCHCRQEPEESLGRFLESLGAVFPHEPWLRLCRERGGTFWSCEATHRQAPTAPGAPGEDQVMLIFYDQRQVLLSQLHLPTVLPDRQAGATTASTGGLAAVFDTVARSEVLFRSDRFDEGPVRLSHWQSEGVEASILAELARRASGPICLLLASLLSLVSAVSACRVFKLWPLSFLGSKLSTCEQLRHRLEHLTLIFSTRKAENPAQLMRKANTVASVLLDVALGLMLLSWLHGRSRIGHLADALVPVADVSGLGWSPVSRVGVGTPPGQQSLPGPEPPPHKASSTFSMLWRHGPPLNQKQELQGRWGLGRAGLAGTPPFPSEGAVCRSQPG

SEQ ID NO: 93618 - protein, 46 aa, Homo sapiens
MAFFNLYLLGYQNSFQNKKRNTTEETKTFCLSLELRIPGLHGSSRL

SEQ ID NO: 93619 - protein, 280 aa, Homo sapiens
  MOD_RES (1)..(1): Any amino acid
XSKCLPAVFLAHWVLLLVLRVFLPCDENRLIPTELRREALALQGSLEFDDAGGEGVTSHVDDEYRWAGVEDPKVMITTSRDPSSRLKMFAKELKLVFPGAQRMNRGRHEVGALVRACKANGVTDLLVVHEHRGTPVGLIVSHLPFGPTAYFTLCNVVMRHDIPDLGTMSEAKPHLITHGFSSRLGKRVSDILRYLFPVPKDDSHRVITFANQDDYISFRHHVYKKTDHRNVELTEVGPRFELKLYMIRLGTLEQEATADVEWRWHPYTNTARKRVFLSTE

SEQ ID NO: 93620 - protein, 582 aa, Homo sapiens
MLESVNVRLEDLITVITQTESHRQRLLQEAAANWHSWLIKVQKMKAVYHILNMCNIDVTQQCVIAEIWFPVADATRIKRALEQGMELSGSSMAPIMTTVQSKTAPPTFNRTNKFTAGFQNIVDAYGVGSYREINPAPYTIITFPFLFAVMFGDCGHGTVMLLAALWMILNERRLLSQKTDNEIWNTFFHGRYLILLMGIFSIYTGLIYNDCFSKSLNIFGSSWSVQPMFRNGTWNTHVMEESLYLQLDPAIPGVYFGNPYPFGIDPIWNLASNKLTFLNSYKMKMSVILGIVQMVFGVILSLFNHIYFRRTLNIILQFIPEMIFILCLFGYLVFMIIFKWCCFDVHVSQHAPSILIHFINMFLFNYSDSSNAPLYKHQQEVQSFFVVMALISVPWMLLIKPFILRASHRKSQLQASRIQEDATENIEGDSSSPSSRSGQRTSADTHGALDDHGEEFNFGDVFVHQAIHTIEYCLGCISNTASYLRLWALSLAHAQLSEVLWTMVMNSGLQTRGWGGIVGVFIIFAVFAVLTVAILLIMEGLSAFLHALRLHWVEFQNKFYVGDGYKFSPFSFKHILDGTAEE

SEQ ID NO: 93621 - protein, 458 aa, Homo sapiens
MAGAGPAPGLPGAGGPVVPGPGAGIPGKSGEERLKEMEAEMALFEQEVLGAPVPGIPTAVPAVPTVPTVPTVEAMQVPAAPVIRPIIATNTYQQVQQTLEARAAAAATVVPPMVGGPPFVGPVGFGPGDRSHLDSPEAREAMFLRRADSALSSAAAGPRPMALRPPHQALVGPPLPGPPGPPMMLPPMARAPGPPLGSMAALRPPLEEPAAPRELGLGLGLGLKEKEEAVVAAAAGLEEASAAVAVGAGGAPAGPAVIGPSLPLALAMPLPEPEPLPLPLEVVRGLLPPLRIPELLSLRPRPRPPRPEPPPGLMALEVPEPLGEDKKKGKPEKLKRCIRTAAGSSWEDPSLLEWDADDFRIFCGDLGNEVNDDILARAFSRFPSFLKAKVIRDKRTGKTKGYGFVSFKDPSDYVRAMREMNGKYVGSRPIKLRKSMWKDRNLDVVRKKQKEKKKLGLR

SEQ ID NO: 93622 - protein, 55 aa, Homo sapiens
MAWTKYQLFLAGLMLVTGSINTLSAKQWACSWENSPAWLPSTSSDAELQGNQTPA

SEQ ID NO: 93623 - protein, 61 aa, Homo sapiens
  MOD_RES (1)..(1): Any amino acid
XRAVFKSLQESRPFSVDFFRKMIQFEKEQTESLSVAQAGLLAHCNLCFPGILQYGEHKRIL

SEQ ID NO: 93624 - protein, 1499 aa, Homo sapiens
MGTALLQRGGCFLLCLSLLLLGCWAELGSGLEFPGAEGQWTRFPKWNACCESEMSFQLKTRSARGLVLYFDDEGFCDFLELILTRGGRLQLSFSIFCAEPATLLADTPVNDGAWHSVRIRRQFRNTTLFIDQVEAKWVEVKSKRRDMTVFSGLFVGGLPPELRAAALKLTLASVREREPFKGWIRDVRVNSSQVLPVDSGEVKLDDEPPNSGGGSPCEAGEEGEGGVCLNGGVCSVVDDQAVCDCSRTGFRGKDCSQEDNNVEGLAHLMMGDQGKSKGKEEYIATFKGSEYFCYDLSQNPIQSSSDEITLSFKTLQRNGLMLHTGKSADYVNLALKNGAVSLVINLGSGAFEALVEPVNGKFNDNAWHDVKVTRNLRQVTISVDGILTTTGYTQEDYTMLGSDDFFYVGGSPSTADLPGSPVSNNFMGCLKEVVYKNNDVRLELSRLAKQGDPKMKIHGVVAFKCENVATLDPITFETPESFISLPKWNAKKTGSISFDFRTTEPNGLILFSHGKPRHQKDAKHPQMIKVDFFAIEMLDGHLYLLLDMGSGTIKIKALLKKVNDGEWYHVDFQRDGRSGTISVNTLRTPYTAPGESEILDLDDELYLGGLPENKAGLVFPTEVWTALLNYGYVGCIRDLFIDGQSKDIRQMAEVQSTAGVKPSCSKETAKPCLSNPCKNNGMCRDGWNRYVCDCSGTGYLGRSCEREATVLSYDGSMFMKIQLPVVMHTEAEDVSLRFRSQRAYGILMATTSRDSADTLRLELDAGRVKLTVNLDCIRINCNSSKGPETLFAGYNLNDNEWHTVRVVRRGKSLKLTVDDQQAMTGQMAGDHTRLEFHNIETGIITERRYLSSVPSNFIGHLQSLTFNGMAYIDLCKNGDIDYCELNARFGFRNIIADPVTFKTKSSYVALATLQAYTSMHLFFQFKTTSLDGLILYNSGDGNDFIVVELVKGYLHYVFDLGNGANLIKGSSNKPLNDNQWHNVMISRDTSNLHTVKIDTKITTQITAGARNLDLKSDLYIGGVAKETYKSLPKLVHAKEGFQGCLASVDLNGRLPDLISDALFCNGQIERGCEGPSTTCQEDSCSNQGVCLQQWDGFSCDCSMTSFSGPLCNDPGTTYIFSKGGGQITYKWPPNDRPSTRADRLAIGFSTVQKEAVLVRVDSSSGLGDYLELHIHQGKIGVKFNVGTDDIAIEESNAIINDGKYHVVRFTRSGGNATLQVDSWPVIERYPAGNNDNERLAIARQRIPYRLGRVVDEWLLDKGRQLTIFNSQATIIIGGKEQGQPFQGQLSGLYYNGLKVLNMAAENDANIAIVGNVRLVGEVPSSMTTESTATAMQSEMSTSIMETTTTLATSTARRGKPPTKEPISQTTDDILVASAECPSDDEDIDPCEPSSGGLANPTRAGGREPYPGSAEVIRESSSTTGMVVGIVAAAALCILILLYAMYKYRNRDEGSYHVDESRNYISNSAQSNGAVVKEKQPSSAKSSNKNKKNKDKEYYV

SEQ ID NO: 93625 - protein, 185 aa, Homo sapiens
MPASQEARDPRHQPVLRGEGPYPAQRQPPGGGHSMAPGQPWWPGPRGREAWAGRDLGGAWFTTGNRFTQSIVHRAGLLPAQRSQVCPRGHHAACRVRHPAARDPGVPRAVRSPAAHLPVHWVLPIQWNLCQLHPITADPPNRQPRHQCSGLGRRGHHSIPALPAGGLFHSAGQHGQSEPDAGTQG

SEQ ID NO: 93626 - protein, 196 aa, Homo sapiens
MLLPRSVSSERAPGVPEPEELWEAEMERLRGSGTPVRGLPYAMMDKRLIWQLREPAGVQTLRWQRWQRRRQTVERRLREAAQRLARGLGLWEGALYEIGGRTRATRTSPCPLWSPTAQIGKRRVASSHLPSPGSPDQSAPPPSHPFRPQAPQTSGPRSTPRPLRHRNSVLLHLPPLPAATQPAEPAAHRKLRAAAP

SEQ ID NO: 93627 - protein, 144 aa, Homo sapiens
MCEEETTALVCDNGSGLCKAGFAGDDAPRAVFPSIVGRPRHQGVMVGMGQKDSYVGDEAQSKRGILTLKYPIEHGIITNWDDMEKIWHHSFYNELRVAPEEHPTLLTEAPLNPKANREKMTQVRSQEDLNTGIRMQHGCLARYF

SEQ ID NO: 93628 - protein, 114 aa, Homo sapiens
  MOD_RES (1)..(1): Any amino acid
XDAYWEKLYVDQAAGTPLLYVHALRDAPEEVPSFRLGQHLYGTYRTRLHENNWICIQEDTGLLYLNRSLDHSSWEKLSVRNVADAPTDLTSLCRPRLSPAHRLPQGLPVTHIPS

SEQ ID NO: 93629 - protein, 163 aa, Homo sapiens
MTVGKEPFPTIYVDSQKENERWNVISKSQLKNIKKMWHREQMKSESREKKEAEDSLRREKNLEEAKKITIKNDPSLPEPKCVKIGALEGYRGQRVKVFGWVHRLRRQGKNLMFLVLRDGTGYLQCVLADELCQCYNGVLLSTESSVAVYGMLNLTPKGKQAPG

SEQ ID NO: 93630 - protein, 184 aa, Homo sapiens
  MOD_RES (1)..(1): Any amino acid
XPIAAGTGPNFSLSDLESSSYYSMSPGAMRRSLPSTSSTSSTKRLKSVEDEMDSPGEEPFYTGQGRSPGSGSQSSGWHEVEPGMPSPTTLKKSEKSGFSSPSPSQTSSLGTAFTQHHRPVITGPREFKMAPSILGSPFWKVYSASPHATPSTLHFPTSPIIQQPGPYFSHPAIRYHPQETLKEF

SEQ ID NO: 93631 - protein, 35 aa, Homo sapiens
MATCWQALWAYRSYLIVFFVPILLLPLPILVPSKL

SEQ ID NO: 93632 - protein, 184 aa, Homo sapiens
MLGITSCSDQQAKEGEGLEGSSTGSSSGNHGGSGGGNGHKPGCEKPGNEARGSGESGIQNSETSPGMFNFDTFWKNFKSKLGFINWDAINKDFKQNTPFLNWKAIIEGADASSLQKRAGRDDQPGAGWQEVAAVTSKNYNYNQHAYPTAYGGKYSVKTPAKGGVSPSSSASRVQPGLLQWVKFW

SEQ ID NO: 93633 - protein, 90 aa, Homo sapiens
MFVASERKMRAHQVLTFLLLFVITSVASENASTSRGCGLDLLPQYVSLCDLDAIWGIVVEAVAGAGALITLLLMLILLVRLPFIKEKEKK

SEQ ID NO: 93634 - protein, 161 aa, Homo sapiens
MNRLRNAKIYVERAVKQKKIFTIQGCYPVIRCLLRRRGWVEKKMVHRSGPTLLPPQKDLDSSAMGDSDTTEDEDEDEDEEFQPSQLFDFDDLLKFDDLDGTHALMVDANSFFPRCYCLGAEDDKKAFIEDFWLTAARNVLKLVVKSEWKSYPIQAVEEEAS

SEQ ID NO: 93635 - protein, 137 aa, Homo sapiens
MGLLAFRDVALEFSPEEWECLDPAQRSLYRDVMLENYRNLISLGLAMSKPELIICLEARKEPWNVNTEKTARHSVLSSYLTEDILPEQGLQVSFQKVMLRRYERCCLEKLRLRNDWEIVVETGFHRVSQDGLNLLTS

SEQ ID NO: 93636 - protein, 33 aa, Homo sapiens
  MOD_RES (1)..(1): Any amino acid
XEGTCPTLAVAISPSACQRLVEERYSWTSQLSP

SEQ ID NO: 93637 - protein, 920 aa, Homo sapiens
MSAPPVLRPPSPLLPVAAAAAAAAAALVPGSGPGPAPFLAPVAAPVGGISFHLQIGLSREPVLLLQDSSGDYSLAHVREMACSIVDQKFPECGFYGMYDKILLFRHDPTSENILQLVKAASDIQEGDLIEVVLSASATFEDFQIRPHALFVHSYRAPAFCDHCGEMLWGLVRQGLKCEGCGLNYHKRCAFKIPNNCSGVRRRRLSNVSLTGVSTIRTSSAELSTSAPDEPLLSPVSPGFEQKSPSESFIGREKRSNSQSYIGRPIHLDKILMSKVKVPHTFVIHSYTRPTVCQYCKKLLKGLFRQGLQCKDCRFNCHKRCAPKVPNNCLGEVTINGDLLSPGAESDVVMEEGSDDNDSERNSGLMDDMEEAMVQDAEMAMAECQNDSGEMQDPDPDHEDANRTISPSTSNNIPLMRVVQSVKHTKRKSSTVMKEGWMVHYTSKDTLRKRHYWRLDSKCITLFQNDTGSRYYKEIPLSEILSLEPVKTSALIPNGANPHCFEITTANVVYYVGENVVNPSSPSPNNSVLTSGVGADVARMWEIAIQHALMPVIPKGSSVGTGTNLHRDISVSISVSNCQIQENVDISTVYQIFPDEVLGSGQFGIVYGGKHRKTGRDVAIKIIDKLRFPTKQESQLRNEVAILQNLHHPGVVNLECMFETPERVFVVMEKLHGDMLEMILSSEKGRLPEHITKFLITQILVALRHLHFKNIVHCDLKPENVLLASADPFPQVKLCDFGFARIIGEKSFRRSVVGTPAYLAPEVLRNKGYNRSLDMWSVGVIIYVSLSGTFPFNEDEDIHDQIQNAAFMYPPNPWKEISHEAIDLINNLLQVKMRKRYSVDKTLSHPWLQDYQTWLDLRELECKIGERYITHESDDLRWEKYAGEQGLQYPTHLINPSASHSDTPETEETEMKALGERVSIL

SEQ ID NO: 93638 - protein, 144 aa, Homo sapiens
MLGAQGRAVHQCDRGWAPVFLDREQSISLMSVGFLLEKPDEAVVWRGPKKNALIKQFVSDVAWGELDYLVVDTPPGTSDEHMATIEALRPYQPLGALVVTTPQAVSVGDVRRELTFCRKTGLRVMGIVENMSGFTCPHCTECTS

SEQ ID NO: 93639 - protein, 173 aa, Homo sapiens
  MOD_RES (1)..(1): Any amino acid
XAHLHAACAPRRKVALLLEVCRDVYAGLARGENQDPLGADAFLPALTEELIWSPDIGDTQLDVEFLMELLDPDELRGEAGYYLTTWFGALHHIAHYQPETDRAPRGLSSEARASLHQWHRRRTLHRKDHPRAQVTAHLAASRREGETWCPSDPAPTSPHRPTCPLRSHGQKRL

SEQ ID NO: 93640 - protein, 44 aa, Homo sapiens
GDPGLRRRGRWAHPWAFPKAKRNPGKVRSKRRDPPIQFQNLRRS

SEQ ID NO: 93641 - protein, 30 aa, Homo sapiens
MSSSYYVNALFSKYTAGASLFQNAEPTSCS

SEQ ID NO: 93642 - protein, 137 aa, Homo sapiens
MAMFEQMRANVGKLLKGIDRYNPENLATLERYVETQAKENAYDLEANLAVLKLYQFNPAFFQTTVTAQILLKALTNLPHTDFTLCKCMIDQAHQEERPIRQILYLGDLLETCHFQAFWVCPASWPPPSNFRCLIKMC

SEQ ID NO: 93643 - protein, 230 aa, Homo sapiens
MKIKNQYLITNCVDKYSVERDNWKRVSPLPLQLACHAVVTVNNKLYVIGGWTPQMDLPDEEPDRLSNKLLQYDPSQDQWSVRAPMKYSKYRFSTAVVNSEIYVLGGIGCVGQDKGQVRKCLDVVEIYNPDGDFWREGPPMPSPLLSLRTNSTNAGAVDGKLYVCGGFHGADRHEVISKEILELDPWENQWNVVAINVLMHDSYDVCLVARMNPRDLIPPPSDLVEEGNEH

SEQ ID NO: 93644 - protein, 463 aa, Homo sapiens
MRNYLKERGDQTVLILHAKVAQKSYGNEKRFFCPPPCVYLMGSGWKKKKEQMERDGCSEQESQPCAFIGIGNSDQEMQQLNLEGKNYCTAKTLYISDSDKRKHFMLSVKMFYGNSDDIGVFLSKRIKVISKPSKKKQSLKNADLCIASGTKVALFNRLRSQTVSTRYLHVEGGNFHASSQQWGAFFIHLLDDDESEGEEFTVRDGYIHYGQTVKLVCSVTGMALPRLIIRKVDKQTALLDADDPVSQLHKCAFYLKDTERMYLCLSQERIIQFQATPCPKEPNKEMINDGASWTIISTDKAEYTFYEGMGPVLAPVTPVPVVESLQLNGGGDVAMLELTGQNFTPNLRVWFGDVEAETMYRCGESMLCVVPDISAFREGWRWVRQPVQVPVTLVRNDGIIYSTSLTFTYTPEPGPRPHCSAAGAILRANSSQVPPNESNTNSEGSYTNASTNSTSVTSSTATV

SEQ ID NO: 93645 - protein, 99 aa, Homo sapiens
MLGITSCSDQQAKEGEGLEGSSTGSSSGNHGGSGGGNGHKPGCEKPGNEARGSGESGIQNSETSPGMFNFDTFWKNFKSKLGFINWDAINKDQRSSRIP

SEQ ID NO: 93646 - protein, 102 aa, Homo sapiens
MGRQKELVSRCGEMLHIRYRLLRQALAECLGTLILVMFGCGSVAQVVLSRGTHGGFLTINLAFGFAVTLGILIAGQVSGPLSPLPRGPPEPCRDLCHVLPGS

SEQ ID NO: 93647 - protein, 134 aa, Homo sapiens
MQGARAPRDQGRSPGRMSALGRSSVILLTYVLAATELTCLFMQFSIVPYLSRKLGLDSIAFGYLQTTFGVLQLLGGPVFGRFADQRGARAALTLSFLAALALYLLLAAASSPALPGVYLLFASRLPGALMHTLP

SEQ ID NO: 93648 - protein, 63 aa, Homo sapiens
MLEKLMGADSLQLFRSRYTLGKIYFIGFQRSILLSKSENSLNSIGDRRRKRDGNKERRMEEKA

SEQ ID NO: 93649 - protein, 856 aa, Homo sapiens
MDHNFAPAPPEMQSHGAPGPGTSFSHSHVLGRPIRPSRLPGGGSPLTPVLRKTIHLDTFPQSHIPQTSSRLGLGARTRSVPPQETGIALGASLSPLPTSSLVPRKLSSISLTLHQNSQARSLDRPLSHWEELPTPGKKAAPHEGGRVSSPGSPPVTLVPGGRVHSEGPGNPGLTKSNRMLATEKPLVSSYLALPFQSRLAQSAPVLAEPGSLGQGHLVSVTDHMPTRASPGKGKPRARGIPRPRGRLQRANTTVNLTAMDTRTDAARHLATMATNRPSLAINLATPNTSQLDTGTEFPALDIKLGTARDLSSVGTVKSGKTVNLATAGTIKPGTAMNLTTVGTTKPGMVMDLIASEPDKLGKAMATRSTAKPDMTTEGIAMDSATSDPVKPDTITATVGTSRLETAMALARVNRAKLGTAKNSLALDTSRMGTAVGSVVPVTPDPATGKTTLGSVNNLTISDVATCLLMPSRSTDLALDNTNAAMDRATEPASLDLATEYKGLPETRTDAAMSELVPEPRPKPAVPMKPMSINSNLLGYIGIDTIIEQMRKKTMKTGFDFNIMVVGQSGLGKSTLVNTLFKSQVSRKASSWNREEKIPKTVEIKAIGHVIEEGGVKMKLTVIDTPGFGDQINNENCWEPIEKYINEQYEKFLKEEVNIARKKRIPDTRVHCCLYFISPTGHSLRPLDLEFMKHLSKVVNIIPVIAKADTMTLEEKSEFKQRVRKELEVNGIEFYPQKEFDEDLEDKTENDKIRQESMPFAVVGSDKEYQVNGKRVLGRKTPWGIIEVENLNHCEFALLRDFVIRTHLQDLKEVTHNIHYETYRAKRLNDNGGLPPGEGLLGTVLPPVPATPCPTAE

SEQ ID NO: 93650 - protein, 51 aa, Homo sapiens
  MOD_RES (1)..(1): Any amino acid
XTRKRKRHAIEGNKKSSKKQFPNDMIFSAIASMFPENGVPDDMKESFSCHP

SEQ ID NO: 93651 - protein, 54 aa, Homo sapiens
MLYKSSDRPAHKVSMLLLCHALAIAVVQIVIFSESWAFAKNINFYNVRPPLDHK

SEQ ID NO: 93652 - protein, 121 aa, Homo sapiens
  MOD_RES (1)..(1): Any amino acid
XKTKVQGSCEGAHPHLLLSFPYGHLSFGFMQDLQQKVVYLSYMAVEYNVSFPHAAQWTFSAQNASLRDLQAPLGQSFSCSNSSIILSPAVHLDLLSLRLQAAQLPHTGVFGQSKTYLLLPS

SEQ ID NO: 93653 - protein, 949 aa, Homo sapiens
MLRRVTVAAVCATRRKLCEAGRELAALWGIETRGRCEDSAAARPFPILAMPGRNKAKSTCSCPDLQPNGQDLGENSRVARLGADESEEEGRRGSLSNAGDPEIVKSPSDPKQYRYIKLQNGLQALLISDLSNMEGKTGNTTDDEEEEEVEEEEEDDDEDSGAEIEDDDEEGFDDEDEFDDEHDDDLDTEDNELEELEERAEARKKTTEKQSAAALCVGVGSFADPDDLPGLAHFLEHMVFMGSLKYPDENGFDAFLKKHGGSDNASTDCERTVFQFDVQRKYFKEALDRWAQFFIHPLMIRDAIDREVEAVDSEYQLARPSDANRKEMLFGSLARPGHPMGKFFWGNAETLKHEPRKNNIDTHARLREFWMRYYSSHYMTLVVQSKETLDTLEKWVTEIFSQIPNNGLPRPNFGHLTDPFDTPAFNKLYRVVPIRKIHALTITWALPPQQQHYRVKPLHYISWLVGHEGKGSILSFLRKKCWALALFGGNGETGFEQNSTYSVFSISITLTDEGYEHFYEVAYTVFQYLKMLQKLGPEKRIFEEIRKIEDNEFHYQEQTDPVEYVENMCENMQLYPLQDILTGDQLLFEYKPEVIGEALNQLVPQKANLVLLSGANEGKCDLKEKWFGTQYSIEDIENSWAELWNSNFELNPDLHLPAENKYIATDFTLKAFDCPETEYPVKIVNTPQGCLWYKKDNKFKIPKAYIRFHLISPLIQKSAANVVLFDIFVNILTHNLAEPAYEADVAQLEYKLVAGEHGLIIRVKGFNHKLPLLFQLIIDYLAEFNSTPAVFTMITEQLKKTYFNILIKPETLAKDVRLLILEYARWSMIDKYQALMDGLSLESLLSFVKEFKSQLFVEGLVQGNVTSTESMDFLKYVVDKLNFKPLEQEMPVQFQVVELPSGHHLCKVKALNKGDANSEVTVYYQVRYQESKRIYAYGAACDAHGRTLF

SEQ ID NO: 93654 - protein, 81 aa, Homo sapiens
MGPAGVAARPGRFFGVYLLYCLNPRYRGRVYVGFTVNTARRVQQHNGGRKKGGAWRTSGRGPWEMVLVVHGFPSSVAALRL

SEQ ID NO: 93655 - protein, 37 aa, Homo sapiens
MMRWKKADQWLLQKCIGGVRGMWRFYSYLTGSAGEEL

SEQ ID NO: 93656 - protein, 15 aa, Homo sapiens
  MOD_RES (1)..(1): Any amino acid
XELEQISRTSELSEG

SEQ ID NO: 93657 - protein, 1084 aa, Homo sapiens
MENLPAVTTEEPTPMGRGPVGPSGGGSTRDQVRTVVMRPSVSWEKAGPEEAKAPVRGDEAPPARVAGPAAGTPPCQMGVYPTDLTLQLLAVRRKSRLRDPGLQQTLRGQLRLLENDSREMARVLGELSARLLSIHSDQDRIVVTFKTFEEIWKFSTYHALGFTHHCLANLLMDQAFWLLLPSEEEETAIQVHVDENALRLTHESLLIQEGPFFVLCPDHHVRVMTGPRDAGNGPQALRQASGAPQGEAAPETDSSPPSPSVSSEEVAVAAAPEPLIPFHQWALRIPQDPIDDAMGGPVMPGNPLMAVGLASALADFQGSGPEEMTFRGGDLIEILGAQVPSLPWCVGRHAASGRVGFVRSSLISMQGPVSELESAIFLNEEEKSFFSEGCFSEEDARQLLRRMSGTDVCSVYSLDSVEEAETEQPQEKEIPPPCLSLEPQETLQKVKNVLEQCKTCPGCPQEPASWGLCAASSDVSLQDPEEPSFCLEAEDDWEDPEALSSLLLFLNAPGYKASFRGLYDVALPWLSSVFRSFSDEEELTGRLAQARGAAKKAGLLMALARLCFLLGRLCSRRLKLSQARVYFEEALGALEGSFGDLFLVVAVYANLASIYRKQKNREKCAQVVPKAMALLLGTPDHICSTEAEGELLQLALRRAVGGQSLQAEARACFLLARHHVHLKQPEEALPFLERLLLLHRDSGAPEAAWLSDCYLLLADIYSRKCLPHLVLSCVKVASLRTRGSLAGSLRSVNLVLQNAPQPHSLPAQTSHYLRQALASLTPGTGQALRGPLYTSLAQLYSHHGCHGPAITFMTQAVEASAIAGVRAIVDHLVALAWLHVLHGQSPVALDILQSVRDAVVASEDQEGVIANMVAVALKRTGRTRQAAESYYRALRVARDLGQQRNQAVGLANFGALCLHAGASRLAQHYLLEAVRLFSRLPLGECGRDFTHVLLQLGHLCTRQGPAQQGKGYYEWALLVAVEMGHVESQLRAVQRLCHFYSAVMPSEAQCVIYHELQLSLACKVADKVLEGQLLETISQLYLSLGTERSSQPQQKQLHAFWAVLPTWWLLSSDLCLPRVFTPGLHLSP

SEQ ID NO: 93658 - protein, 253 aa, Homo sapiens
  MOD_RES (1)..(1): Any amino acid
XQIHMVHKPDDDTDMYNTPYTYNAGLYNPPYSAQSHPAAKTQTYRPLSKSHSDNSPNAFKDASSPVPPPHVPPPVPPLRPRDRSSTEKHDWDPPDRKVDTRKFRSEPRSIFEYEPGKSSILQHERPPPLPTTPTPVPREPGRKPLSSSRLGEVTGSPSPPPRSGAPTPSSRAPALSPTRSSIDRSLERPMSSASMASDFRKRRKSEPAVGPPRGLGDQSASRTSPGRVDLPGSSTTLTKSFTSSSPSSPSRAK

SEQ ID NO: 93659 - protein, 226 aa, Homo sapiens
  MOD_RES (1)..(1): Any amino acid
XLPAEDEVLLQKLREESRAVFLQRKSRELLDNEELQTPPMIGEEAMINYENFLKVGEKAGAKCKQFFTAKVFAKLLHTDSYGRISIMQFFNYVMRKVWLHQTRIGLSLYDVAGQGYLRESDLENYILELIPTLPQLDGLEKSFYSFYVCTAVRKFFFFLDPLRTGKIKIQDILACSFLDDLLELRDEELSKESQETNWFSAPSALRVYGQYLNLDKDHNGMLSKEE

SEQ ID NO: 93660 - protein, 133 aa, Homo sapiens
MPSSVTALGQARSSGPGMAPSACCCSPAALQRRLPILAWLPSYSLQWLKMDFVAGLSVGLTAIPQALAYAEVAGLPPQGSCWTSFPTPSLKASPLLLPSPSALDRSRTCWDYRTSPGRSSCRCTTPSSGLQRP

SEQ ID NO: 93661 - protein, 28 aa, Homo sapiens
RAVLQLPGFCLPPPFPPSQANSGEMEPL

SEQ ID NO: 93662 - protein, 107 aa, Homo sapiens
MEGKWLLCMLLVLGTAIVEAHDGHDDDVIDIEDDLDDVIEEVEDSKPDTTAPPSSPKVTYKAPVPTGEVYFADSFDRGTLSGWILSKAKKDDTDDEIAKYDGKWEVE

SEQ ID NO: 93663 - protein, 209 aa, Homo sapiens
MAAFRDIEEVSQGLLSLLGANRAEAQQRRLLGRHEQVVERLLETQDGAEKQLREILTMEKEVAQSLLNAKEQVHQGGVELQQLEAGLQEAGEEDTRLKASLLQLTRELEELKEIEADLERQEKEVDEDTTVTIPSAVYVAQLYHQVIRPPWPPKVLDSRDLPTSASKYLGLQVCAIASGWIVSRWRETQNFLERNGGVILVPPGLFLLS

SEQ ID NO: 93664 - protein, 153 aa, Homo sapiens
MSLALRSELVVDKTKRKKRRELSEEQKQEIKDAFELFDTDKDEAIDYHELKVAMRALGFDVKKADVLKILKDYDREATGKITFEDFNEVVTDWILERDPHEEILKAFKLFDDDDSVLKNILLLPIWSRCLSLNREFFSEVNQEEFIAIMTGDI

SEQ ID NO: 93665 - protein, 138 aa, Homo sapiens
METPTPLPPVPASPTCNPAPRTIQIEFPQHSSSLLESLNRHRLEGKFCDVSLLVQGRELRAHKAVLAAASPYFHDKLLLGDAPRLTLPSVIEADAFEGLLQLIYSGRLRLPLDALPAHLLVASGLQMWQVVDQCSEIL

SEQ ID NO: 93666 - protein, 55 aa, Homo sapiens
IASVLTSQKPSVLLTLRGVNTDSGSVCREASFDGISKFEVNNTILHPEIVECWEL

SEQ ID NO: 93667 - protein, 59 aa, Homo sapiens
MEEKEDKHQVTGGHMVKHWNLSSYHLTTLRAPRGVTSKNHRVHWFCQSNTARCKSLLVE

SEQ ID NO: 93668 - protein, 304 aa, Homo sapiens
MVVVTGREPDSRRQDGAMSSSDAEDDFLEPATPTATQAGHALPLLPQEFPEVVPLNIGGAHFTTRLSTLRCYEDTMLAAMFSGRHYIPTDSEGRYFIDRDGTHFGDVLNFLRSGDLPPRERVRAVYKEAQYYAIGPLLEQLENMQPLKGEKVRQAFLGLMPYYKDHLERIVEIARLRAVQRKARFAKLKVCVFKEEMPITPYECPLLNSLRFERSESDGQLFEHHCEVDVSFGPWEAVADVYDLLHCLVTDLSAQGLTVDHQCIGVCDKHLVNHYYCKRPIYEFKITWWVIFSQGWNANFRGFF

SEQ ID NO: 93669 - protein, 639 aa, Homo sapiens
MGNREMEELIPLVNRLQDAFSALGQSCLLELPQIAVVGGQSAGKSSVLENFVGRDFLPRGSGIVTRRPLVLQLVTSKAEYAEFLHCKGKKFTDFDEVRLEIEAETDRVTGMNKGISSIPINLRVYSPHVLNLTLIDLPGITKVPVGDQPPDIEYQIREMIMQFITRENCLILAVTPANTDLANSDALKLAKEVDPQGLRTIGVITKLDLMDEGTDARDVLENKLLPLRRGYVGVVNRSQKDIDGKKDIKAAMLAERKFFLSHPAYRHIADRMGTPHLQKVLNQQLTNHIRDTLPNFRNKLQGQLLSIEHEVEAYKNFKPEDPTRKTKALLQMVQQFAVDFEKRIEGSGDQVDTLELSGGAKINRIFHERFPFEIVKMEFNEKELRREISYAIKNIHGIRTGLFTPDMAFEAIVKKQIVKLKGPSLKSVDLVIQELINTVKKCTKKLANFPRLCEETERIVANHIREREGKTKDQVLLLIDIQVSYINTNHEDFIGFANAQQRSSQVHKKTTVGNQVIRKGWLTISNIGIMKGGSKGYWFVLTAESLSWYKDDEEKEKKYMLPLDNLKVRDVEKSFMSSKHIFALFNTEQRNVYKDYRFLELACDSQEDVDSWKASLLRAGVYPDKSVVSWIYLLCKNYY

SEQ ID NO: 93670 - protein, 160 aa, Homo sapiens
MYLVSGGLNNTVNIWDLKSKRVHRSLKDHKDQVTCVTYNWNDCYIASGSLSGEIILHSVTTNLSSTPFGHGSNQSVRHLKYSLFKKSLLGSVSDNGIVTLWDVNSQSPYHNFDSVHKAPASGICFSPVNELLFVTIGLDKRIILYDTSSKKLVKTLVADT

SEQ ID NO: 93671 - protein, 162 aa, Homo sapiens
KNNCVMPEDVKNFYLMTNGFHMTWSVKLDASDDQPEKPHFDSRSVIFELDSCNGSGKVCLVYKSGKPALAEDTEIWFLDRALYWHFLTDTFTAYYRLLITHLGLPQWQYAFTSYGISPQAKQWFSMYKPITYNTNLLTEETDSFVNKLDPSKVFKSKNKIVI

SEQ ID NO: 93672 - protein, 336 aa, Homo sapiens
MIQAHISVSTQPNEVGPVAVLEFWVQALISQHLWYREQPILFLMDHLCKAAFQLMQEDCIQKLLYQQHKNALGYHCDRSLLSSLVSWIVAGNITPSFVEGLATPTQVWFAWTVLNMESIFEEDSQLRRVIEGELVINSAFTPDQALKKAQTQLKLPIVPSLQRLLIYRWAHQALVTPSDHPLLPLIWQKFFLLYLHRPGPQYGLPIDGCIGRRFFQSPAHINLLKEMKRRLTEVADFHHAASKALRVPAEGSEGLPESHSGTPGYLTSPELHKELVRLFNVYILWLEDENFQKGDTYIPSLPKHYDIHRLAKVMQNQQGCSLLSIDPSTRMGFRKL

SEQ ID NO: 93673 - protein, 134 aa, Homo sapiens
MASIWVGHRGTVRDYPDFSPSVDAEAIQKAIRGIGTDEKMLISILTERSNAQRQLIVKEYQAAYGKELKDDLKGDLSGHFEHLMVALVTPPAVFDAKQLKKSMKGAGTNEDALIEILTTRTSRQMKDISQAYYT

SEQ ID NO: 93674 - protein, 458 aa, Homo sapiens
MAELQMLLEEEIPGGRRALFDSYTNLERVADYCENNYIQSADKQRALEETKAYTTQSLASVAYLINTLANNVLQMLDIQASQLRRMESSINHISQTVDIHKEKVARREIGILTTNKNTSRTHKIIAPANLERPVRYIRKPIDYTILDDIGHGVKVSTQNMKMGGLPRTTPPTQKPPSPPMSGKGTLGSSGSSGGSHPSSRSSSRENSGSGSVGVPIAVPTPSPPSVFPAPAGSAGTPPLPATSASAPAPLVPATVPSSTAPDAAAGGAQTLADGFTSPTPPVVSSTPPTGHPVQFYSMNRPASRHTPPTIGGSLPYRRPPSITSQTSLQNQMNGGPFYSQNPVSDTPPPPPPVEEPVFDESPPPPPPPEDYEEEEAAVVEYSDPYAEEDPPWAPRSYLEKVVAIYDYTKDKEDELSFQEGAIIYVIKKNDDGWYEGVMNGVTGLFPGNYVESIMHYSE

SEQ ID NO: 93675 - protein, 84 aa, Homo sapiens
  MOD_RES (1)..(1): Any amino acid
XLLFGWGETYSEGSEECQVSREPSYAVFSTVGAFYLPLCVVLFVYWKIYKAAKFRVGSRKTNSVSPISEAVEVTVILWHPPVLT

SEQ ID NO: 93676 - protein, 417 aa, Homo sapiens
  MOD_RES (1)..(1): Any amino acid
XARGSGSETVPKAEAGPESAAGGQEEEEGEDEEELSGTKVSAPYYSSWGTLEYHNAMVVGTEEAEDGSAGVRVLYLYPTHKSLKPCPFFLEGKCRFKENCRFSHGQVVSLDELRPFQDPDLSSLQAGSACLAKHQDGLWHAARITDVDNGYYTVKFDSLLLREAVVEGDGILPPLRTEATESDSDSDGTGDSSYARVVGSDAVDSGTCSSAFAGWEVHTRGIGSRLLTKMGYEFGKGLGRHAEGRVEPIHAVVLPRGKSLDQCVETLQKQTRVGKAGTNKPPRCRGRGARPGGRPAPRNVFDFLNEKLQGQAPGALEAGAAPAGRRSKDMYHASKSAKRALSLRLFQTEEKIERTQRDIRSIQEALARNAGRHSVASAQLQEKLAGAQRQLGQLRAQEAGLQQEQRKADTHKKMTEF

SEQ ID NO: 93677 - protein, 122 aa, Homo sapiens
MWRGIDSIYPYELLQKNILPAGTCCIYSRVEVFTDVNYEDFTFTIPDVEDSSQRPDQGPQRPPPEGLLPRPPGDSGNQDDGPQQRPPKPGGHHRHPPPPPFQNQQRPPRRGHRQLSLPRFPS

SEQ ID NO: 93678 - protein, 63 aa, Homo sapiens
MLQKVEVEYETLPGWKADTTGARRWEDLPPQAQNYIRFVENHVGVAVKWVGVGKSRESMIQLF

SEQ ID NO: 93679 - protein, 42 aa, Homo sapiens
  MOD_RES (1)..(1): Any amino acid
XEEIGFHASLAQRNPNAHHLDHKMEIKHSSVGGTSTFRPTNL

SEQ ID NO: 93680 - protein, 58 aa, Homo sapiens
  MOD_RES (1)..(1): Any amino acid
XAPNVVEDEIDQYLSKQDGKIYRSRDPQLCRHGPLGKCVHCVPLEGEVCCPGEHQLQD

SEQ ID NO: 93681 - protein, 70 aa, Homo sapiens
  MOD_RES (1)..(1): Any amino acid
XEAAITIRGTYFPPGKEPKEGERKIYLAIESANELAVQKAKAEITRLIKEELIRLQNSYQPTNKGRYKVL

SEQ ID NO: 93682 - protein, 661 aa, Homo sapiens
MDSSIHLSSLISRHDDEATRTSTSEGLEEGEVEGETLLIVESEDQASVDLSHDQSGDSLNSDEGDVSWMEEQLSYFCDKCQKWIPASQLREQLSYLKGDNFFRFTCSDCSADGKEQYERLKLTWQQVVMLAMYNLSLEGSGRQGYFRWKEDICAFIEKHWTFLLGNRKKTSTWWSTVAGCLSVGSPMYFRSGAQEFGEPGWWKLVHNKPPTMKPEGEKLSASTLKIKASKPTLDPIITVEGLRKRASRNPVESAMELKEKRSRTQEAKDIRRAQKEAAGFLDRSTSSTPVKFISRGRRPDVILEKGEVIDFSSLSSSDRTPLTSPSPSPSLDFSAPGTPASHSATPSLLSEADLIPDVMPPQALFHDDDEMEGDGVIDPGMEYVPPPAGSVASGPVVGVRKKVRGPEQIKQEVESEEEKPDRMDIDSEDTDSNTSLQTRAREKRKPQLEKDTKPKEPRYTPVSIYEEKLLLKRLEACPGAVAMTPEARRLKRKLIVRQAKRDRGLPLFDLDQVVNAALLLVDGIYGAKEGGISRLPAGQATYRTTCQDFRILDRYQTSLPSRKGFRHQTTKFLYRLVGSEDMAVDQSIVSPYTSRILKPYIRRDYETKPPKLQLLSQIRSHLHRSDPHWTPEPDAPLDYCYVRPNHIPTINSMCQEFFWPE

SEQ ID NO: 93683 - protein, 360 aa, Homo sapiens
MGRKLSAEASASEPQLADSLWRGNQPTGSPVVSEEPLDLLPTLDLRQEMPPPRVFKSFLSLLFQGLSVLLSLAGDVLVSMYREVCSIRFLFTAVSLLSLFLSAFWLGLLYLVSPLENEPKEMLTLSEYHERVRSQGQQLQQLQAELDKLHKEVSTVRAANSERVAKLVFQRLNEDFVRKPDYALSSVGASIDLQKTSHDYADRNTAYFWNRFSFWNYARPPTVILEPHVFPGNCWAFEGDQGQVVIQLPGRVQLSDITLQHPPPSVEHTGGANSAPRDFAVFGLQVYDETEVSLGKFTFDVEKSEIQTFHLQNDPPAAFPKVKIQILSNWGHPRFTCLYRVRAHGVRTSEGAEGSAQGPH

SEQ ID NO: 93684 - protein, 329 aa, Homo sapiens
LRYAVLPREVVCTENLTPWKKLLPCSSKAGLSVLLKADRLFHTSYHSQAVHIRPVCRNARCTSISWELRQTLSVVFDAFITGQGKKDWSLFRMFSRTLTEPCPLASESRVYVDITTYNQDNETLEVHPPPTTTYQDVILGTRKTYAIYDLLDTAMINNSRNLNIQLKWKRPPENEAPPVPFLHAQRYVSGYGLQKGELSTLLYNTHPYRAFPVLLLDTVPWYLRLYVHTLTITSKGKENKPSYIHYQPAQDRLQPHLLEMLIQLPANSVTKVSIQFERALLKWTEYTPDPNHGFYVSPSVLSALVPSMVAAKPVDWEESPLFNSLLPWT

SEQ ID NO: 93685 - protein, 106 aa, Homo sapiens
MAATKTASYDEHFRPEKLREWPEPESVSLMEVLAREDIDEAVCAILFKENSIVKRLDMYFQHVDTFKERRKEMLHKKWVENVAEPLQQRIMEKVISYKELKMKREC

SEQ ID NO: 93686 - protein, 212 aa, Homo sapiens
MQDGNFLLSALQPEAETARGTSRGQYHTLQAGFSSRSQGLSGDKTSGFRPIAKPAYSPASWSSRSAVDLSCSRRLSSAHNGGSAFGAAGYGGAQPTPPMPTRPVSFHERGGVGSRADYDTLSLRSLRLGPGGLDDRYSLVSEQLEPAATSTYRAFAYERQASSSSSRAGGLDWPEATEVSPSRTIRAPAVRTLQRFQSSHRSRGVGGAVPGA

SEQ ID NO: 93687 - protein, 80 aa, Homo sapiens
MAFPHRPDAPELPDFSMLKRLARDQLIYLLEQLPGKKDLFIEADLMSPLDRIANVSILKIVLLGQTPHQEYAIHCQSCQC

SEQ ID NO: 93688 - protein, 93 aa, Homo sapiens
MKDPSRSSTSPSIINEDVIINGHSHEDDNPFAEYMWMENEEEFNRQIEEELWEEEFIERCFQEMLEEEEEHEWFIPARDLPQTMDQIQDQFND

SEQ ID NO: 93689 - protein, 165 aa, Homo sapiens
MQEQEIGFISKYNEGLCVNTDPVSILTSILDMSLHRQMGSDRDLQSSASSVSLPSVKKAPKKRRISIGSLFRRKKDNKRKSRELNGGVDGIASIESIHSEMCTDKNSIFSTNTSSDNGLTSISKQIGDFIECPLCLLRHSKDRFPDIMTCHHRSCVDCLRQYLRI

SEQ ID NO: 93690 - protein, 150 aa, Homo sapiens
MSYPGYPPPPGGYPPAAPGGGPWGGAAYPPPPSMPPIGLDNVATYAGQFNQDYLSGMAANMSGTFGGANMPNLYPGAPGAGYPPVPPGGFGQPPSAQQPVPPYGMYPPPGGNPPSRMPSYPPYPGAPVPGQPMPPPGQQPPGAYPGQPPV

SEQ ID NO: 93691 - protein, 111 aa, Homo sapiens
MKDFLEKRDKGKLLIQRSRRLKQNLLRPMQLSVTEDGYIHYGDKVMLVNPDDPDTEADVFLRGDLSLCMTPDEIQSHLKDELEVPCGLSAVQAKTPIGRNTFIILSVHRDA

SEQ ID NO: 93692 - protein, 549 aa, Homo sapiens
MVNEARGNSSLNPCLEGSASSGSESSKDSSRCSTPGLDPERHERLREKMRRRLESGDKWFSLEFFPPRTAEGAVNLISRFDRMAAGGPLYIDVTWHPAGDPGSDKETSSMMIASTAVNYCGLETILHMTCCRQRLEEITGHLHKAKQLGLKNIMALRGDPIGDQWEEEEGGFNYAVDLVKHIRSEFGDYFDICVAGYPKGHPEAGSFEADLKHLKEKVSAGADFIITQLFFEADTFFRFVKACTDMGITCPIVPGIFPIQGYHSLRQLVKLSKLEVPQEIKDVIEPIKDNDAAIRNYGIELAVSLCQELLASGLVPGLHFYTLNREMATTEVLKRLGMWTEDPRRPLPWALSAHPKRREEDVRPIFWASRPKSYIYRTQEWDEFPNGRWGNSSSPAFGELKDYYLFYLKSKSPKEELLKMWGEELTSEESVFEVFVLYLSGEPNRNGHKVTCLPWNDEPLAAETSLLKEELLRVNRQGILTINSQPNINGKPSSDPIVGWGPSGGYVFQKAYLEFFTSRETAEALLQVLKKYELRVNYHLVNVKANHSG

SEQ ID NO: 93693 - protein, 79 aa, Homo sapiens
MSDKDDIETPLLTEAAPILEDGNCEPAKNSESVDQGAKPESKSEPVVSTRKRPETKPSSDLETSKVLPIQDNVSKDVPQ

SEQ ID NO: 93694 - protein, 99 aa, Homo sapiens
MVHLTTLLCKAYRGGHLTIRLALGGCTNRPFYRIVAAHNKCPRDGRFVEQLGSYDPLPNSHGEKLVALNLDRIRHWIGCGAHLSKPMEKLLGLKYSHVF

SEQ ID NO: 93695 - protein, 729 aa, Homo sapiens
LPTGFVAPILCVLLPSPTREAATVASATGDSASERESAAPAAAPTAEAPPPSVVTRPEPQALPSPAIRAPLPDLYPFGTMRGGGFGDRDRDRDRGGFGARGGGGLPPKKFGNPGERLRKKKWDLSELPKFEKNFYVEHPEVARLTPYEVDELRRKKEITVRGGDVCPKPVFAFHHANFPQYVMDVLMDQHFTEPTPIQCQGFPLALSGRDMVGIAQTGSGKTLAYLLPAIVHINHQPYLERGDGPICLVLAPTRELAQQVQQVADDYGKCSRLKSTCIYGGAPKGPQIRDLERGVEICIATPGRLIDFLESGKTNLRRCTYLVLDEADRMLDMGFEPQIRKIVDQIRPDRQTLMWSATWPKEVRQLAEDFLRDYTQINVGNLELSANHNILQIVDVCMESEKDHKLIQLMEEIMAEKENKTIIFVETKRRCDDLTRRMRRDGWPAMCIHGDKSQPERDWVLNEFRSGKAPILIATDVASRGLDVEDVKFVINYDYPNSSEDYVHRIGRTARSTNKGTAYTFFTPGNLKQARELIKVLEEANQAINPKLMQLVDHRGGGGGGGGRSRYRTTSSANNPNLMYQDECDRRLRGVKDGGRRDSASYRDRSETDRAGYANGSGYGSPNSAFGAQAGQYTYGQGTYGAAAYGTSSYTAQEYGAGTYGASSTTSTGRSSQSSSQQFSGIGRSGQQPQPLMSQQFAQPPGATNMIGYMGQTAYQYPPPPPPPPPSRK

SEQ ID NO: 93696 - protein, 190 aa, Homo sapiens
MRVIRVGTRKSQLARIQTDSVVATLKASYPGLQFEIIAMSTTGDKILDTALSKIGEKSLFTKELEHALEKNEVDLVVHSLKDLPTVLPPGFTIGAICKRENPHDAVVFHPKFVGKTLETLPEKSVVGTSSLRRAAQLQRKFPHLEFRSIDVTLLGPWAWKCEPRTRTSWIWWVCCTIPRLCFAASLKGPS

SEQ ID NO: 93697 - protein, 259 aa, Homo sapiens
MATVTATTKVPEIRDVTRIERIGAHSHIRGLGLDDALEPRQASQGMVGQLAARRAAGVVLEMIREGKIAGRAVLIAGQPGTGKTAIAMGMAQALGPDTPFTAIAGSEIFSLEMSKTEALTQAFRRSIGVRIKEETEIIEGEVVEIQIDRPATGTGSKVGKLTLKTTEMETIYDLGTKMIESLTKDKGRDHHRQGDGQDLQAGPLLHTRPRLRRYGLPDQVRAVPRWGAPETQGGGAHRVPARDRRHQLSHPGLPGALLR

SEQ ID NO: 93698 - protein, 63 aa, Homo sapiens
MKIAHRGPDAFRFENVNGYTNCCFGFHRLAVVDPLFGMQPIRVKKYPYLWLCYNGEIYNHKKV

SEQ ID NO: 93699 - protein, 765 aa, Homo sapiens
MGRGSGTFERLLDKATSQLLLETDWESILQICDLIRQGDTQAKYAVNSIKKKVNDKNPHVALYALEVMESVVKNCGQTVHDEVANKQTMEELKDLLKRQVEVNVRNKILYLIQAWAHAFRNEPKYKVVQDTYQIMKVEGHVFPEFKESDAMFAAERAPDWVDAEECHRCRVQFGVMTRKHHCRACGQIFCGKCSSKYSTIPKFGIEKEVRVCEPCYEQLNRKAEGKATSTTELPPEYLTSPLSQQSQLPPKRDETALQEEEELQLALALSQSEAEEKERLRQKSTYTSYPKAEPMPSASSAPPASSLYSSPVNSSAPLAEDIDPEKQEEARKSPTPSAPVPLTEPAAQPGEGHAAPTNVVENPLPETDSQPIPPSGGPFSEPQFHNGESEESHEQFLKALQNAVTTFVNRMKSNHMRGRSITNDSAVLSLFQSINGMHPQLLELLNQLDERRLYYEGLQDKLAQIRDARGALSALREEHREKLRRAAEEAERQRQIQLAQKLEIMRQKKQEYLEVQRQLAIQRLQEQEKERQMRLEQQKQTVQMRAQMPAFPLPYAQLQAMPAAGGVLYQPSGPASFPSTFSPAGSVEGSPMHGVYMSQPAPAAGPYPSMPSTAADPSMVSAYMYPAGATGAQAAPQAQAGPTASPAYSSYQPTPTAGYQNVASQAPQSLPAISQPPQSSTMGYMGSQSVSMGYQPYNMQNLMTTLPSQDASLPPQQPYIAGQQPMYQQMAPSGGPPQQQPPVAQQPQAQGPPAQGSEAQLISFD

SEQ ID NO: 93700 - protein, 266 aa, Homo sapiens
MAAGVDCGDGVGARQHVFLVSEYLKDASKKMKNGLMFVKLVNPCSGEGAIYLFNMCLQQLFEVKVFKEKHHSWFINQSVQSGGLLHFATPVDPLFLLLHYLIKADKEGKFQPLDQVVVDNVFPNCILLLKLPGLEKLLHHVTEEKGNPEIDNKKYYKYSKEKTLKWLEKKVNQTVAALKTNNVNVSSRVQSTAFFSGDQASTDKEEDYIRYAHGLISDYIPKELSDDLSKYLKLPEPSASLPNPPSKLGLPTGHFVMAAQRQKRGK

SEQ ID NO: 93701 - protein, 80 aa, Homo sapiens
MAASRWARKAVVLLCASDLLLLLLLLPPPGSCAAEGSPGTPDESTPPPRKKKKDIRDYNDADMARLLEQWEANTCPTSTH

SEQ ID NO: 93702 - protein, 888 aa, Homo sapiens
MNHLNVLAKALYDNVAESPDELSFRKGDIMTVLEQDTQGLDGWWLCSLHGRQGIVPGNRLKILVGMYDKKPAGPGPGPPATPAQPQPGLHAPAPPASQYTPMLPNTYQPQPDSVYLVPTPSKAQQGLYQVPGPSPQFQSPPAKQTSTFSKQTPHHPFPSPATDLYQVPPGPGGPAQDIYQVPPSAGMGHDIYQVPPSMDTRSWEGTKPPAKVVVPTRVGQGYVYEAAQPEQDEYDIPRHLLAPGPQDIYDVPPVRGLLPSQYGQEVYDTPPMAVKGPNGRDPLLEVYDVPPSVEKGLPPSNHHAVSKCQGNARARLRLWGVWVYDVPPSVSKDVPDGPLLREETYDVPPAFAKAKPFDPARTPLVLAAPPPDSPPAEDVYDVPPPAPDLYDVPPGLRRPGPGTLYDVPRERVLPPEVADGGVVDSGVYAVPPPAEREAPAEGKRLSASSTGSTRSSQSASSLEVAGPGREPLELEVAVEALARLQQGVSATVAHLLDLAGSAGATGSWRSPSEPQEPLVQDLQAAVAAVQSAVHELLEFARSAVGNAAHTSDRALHAKLSRQLQKMEDVHQTLVAHGQALDAGRGSSGATLEDLDRLVACSRAVPEDAKQLASFLHGNASLLFRRTKATAPGPEGGGTLHPNPTDKTSSIQSRPLPSPPKFTSQDSPDGQYENSEGGWMEDYDYVHLQGKEEFEKTQKELLEKGSITRQGKSQLELQQLKQFERLEQEVSRPIDHDLANWTPAQPLAPGRTGGLGPSDRQLLLFYLEQCEANLTTLTNAVDAFFTAVATNQPPKIFVAHSKFVILSAHKLVFIGDTLSRQAKAADVRSQVTHYSNLLCDLLRGIVATTKAAALQYPSPSAAQDMVERVKELGHSTQQFRRVLGQLAAA

SEQ ID NO: 93703 - protein, 278 aa, Homo sapiens
MADPKYADLPGIARNEPDVYETSDLPEDDQAEFDAELVRSLTFHLLFNGEELTSTSVEHIIVNPNAAYDKFKDKRVGTKGLDFSDRIGKTKRTGYESGEYEMLGEGLGVKETPQQKYQRLLHEVQELTTEVEKIKTTVKESATEEKLTPVLLAKQLAALKQQLVASHLEKLLGPDAAINLTDPDGALAKRLLLQLEATKNSKGGSGGKTTGTPPDSSLVTYELHSRPEQDKFSQAAKVAELEKRLTELETAVRCDQDAQNPLSAGLQGACLMETVELL

SEQ ID NO: 93704 - protein, 169 aa, Homo sapiens
MQVLLDQAGCCIVGQSEQLVPADGILYAARDVTATVDSLPLITASILSKKLVEGLSALVVDVKFGGAAVFPNQEQARELAKTLVGVGASLGLRVAAALTAMDKPLGRCVGHALEVEEALLCMDGAGPPDLRDLVTTLGGALLWLSGHAGTQAQGAARVAAALDDGSALG

SEQ ID NO: 93705 - protein, 513 aa, Homo sapiens
MSAAWIPALGLGVCLLLLPGPAGSEGAAPIAITCFTRGLDIRKEKADVLCPGGCPLEEFSVYGNIVYASVSSICGAAVHRGVISNSGGPVRVYSLPGRENYSSVDANGIQSQMLSRWSASFTVTKGKSSTQEATGQAVSTAHPPTGKRLKKTPEKKTGNKDCKADIAFLIDGSFNIGQRRFNLQKNFVGKVALMLGIGTEGPHVGLVQASEHPKIEFYLKNFTSAKDVLFAIKEVGFRGGNSNTDVAERMSSTTVDSEERLLRGKALKHTAQKFFTVDAGVRKGIPKVVVVFIDGWPSDDIEEAGIVAREFGVNVFIVSVAKPIPEELGMVQDVTFVDKAVCRNNGFFSYHMPNWFGTTKYVKPLVQKLCTHEQMMCSKTCYNSVNIAFLIDGSSSVGDSNFRLMLEFVSNIAKTFEISDIGAKIAAVQFTYDQRTEFSFTDYSTKENVLAVIRNIRYMSGGTATGDAISFTVRNVFGPIRESPNKNFLVIVTDGQSYDDVQGPAAAAHDAAK

SEQ ID NO: 93706 - protein, 31 aa, Homo sapiens
  MOD_RES (1)..(1): Any amino acid
XGLRLLLATVLQAVSVDHLRSCHRESRSDCS

SEQ ID NO: 93707 - protein, 623 aa, Homo sapiens
  MOD_RES (1)..(1): Any amino acid
XFPRGSGEMMTRSPVKVTLSEGPHHVALFKDSSREFDLTKEEDTISLNVKGPGLQRMVLVDLPGVINTVTSGMAPDTKETIFSISKAYMQNPNAIILCIQDGSVDAERSIVTDLVSQMDPHGRRTIFVLTKVDLAEKNVASPSRIQQIIEGKLFPMKALGYFAVVTGKGNSSESIEAIREYEEEFFQNSKLLKTSMLKAHQVTTRNLSLAVSDCFWKMVRESVEQQADSFKATRFNLETEWKNNYPRLRELDRNELFEKAKNEILDEVISLSQVTPKHWEEILQQSLWERVSTHVIENIYLPAAQTMNSGTFNTTVDIKLKQWTDKQLPNKAVEVAWETLQEEFSRFMTEPKGKEHDDIFDKLKEAVKEESIKRHKWNDFAEDSLRVIQHNALEDRSISDKQQWDAAIYFMEEALQARLKDTENAIENMVGPDWKKRWLYWKNRTQEQCVHNETKNELEKMLKCNEEHPAYLASDEITTVRKNLESRGVEVDPSLIKDTWHQVYRRHFLKTALNHCNLCRRGFYYYQRHFVDSELECNDVVLFWRIQRMLAITANTLRQQLTNTEVRRLEKNVKEVLEDFAEDGEKKIKLLTGKRVQLAEDLKKVREIQEKLDAFIEALHQEK

SEQ ID NO: 93708 - protein, 334 aa, Homo sapiens
MRPRGLPPLLVVLLGCWASVSAQTDATPAVTTEGLNSTEAALATFGTFPSTRPPGTPRAPGPSSGPRPTPVTDVAVLCVCDLSPAQCDINCCCDPDCSSVDFSVFSACSVPVVTGDSQFCSQKAVIYSLNFTANPPQRVFELVDQINPSIFCIHITNYKPALSFINPEVPDENNFDTLMKTSDGFTLNAESYVSFTTKLDIPTAAKYEYGVPLQTSDSFLRFPSSLTSSLCTDNNPAAFLVNQAVKCTRKINLEQCEEIEALSMAFYSSPEILRVYLSPSPRFSVGPSERKLQLYWGGKSLSLRRLGPEAGRPVRSLWKSPGQAMVAFQQGQVQ

SEQ ID NO: 93709 - protein, 111 aa, Homo sapiens
MNPTSYDNVLIKWFPEVTHFCRGIPMVLIGCKTDLRKDKEQLRKLRAAQLEPITYMQGLSACEQIRAALYLECSAKFRENVEDVFREAAKVALSALKKAQRQKKRRLCLLL

SEQ ID NO: 93710 - protein, 209 aa, Homo sapiens
MQQSQVQALSCFTPKAVAIRTPLRNVWPAVSVGNVGQLAMDLIISTLNMSKIGYFYTDCLVPMVGNNPYATTEGNSTELSINAEVYSLPSRKLVALQLRSIFIKYKSKPFCEKLLSWVKSSGCARVIVLSSSHSYQRNDLQLRSTPFRYLLTPSMQKSVQNKIKSLNWEEMEKSRCIPEIDDSEFCIRIPGGGITKTLYDESCSKEIQM

SEQ ID NO: 93711 - protein, 342 aa, Homo sapiens
VLSIRGAQEEEPTDPQLMRLDNMLLAEGVAGPEKGGGSAAAAAAAAASGGAGSDNSVEHSDYRAKLSQIRQIYHTELEKYEQACNEFTTHVMNLLREQSRTRPISPKEIERMVSIIHRKFSSIQMQLKQSTCEAVMILRSRFLDARRKRRNFNKQATEILNEYFYSHLSNPYPSEEAKEELAKKCGITVSQVSNWFGNKRIRYKKNIGKFQEEANIYAAKTAVTATNVSAHGSQANSPSTPNSAGSSSSFNMSNSGDLFMSVQSLNGDSYQGAQVGANVQSQVDTLRHVISQTGGYSDGLAASQMYSPQGISANGGWQDATTPSSVTSPTEGPGSVHSDTSN

SEQ ID NO: 93712 - protein, 80 aa, Homo sapiens
ATTSSEATTTPRPLLSTPVDGAEDPRCLEALKPGNCGEYVVRWYYDKQVNSCARFWFSGCNGSGNRFNSEKECQETCIQG

SEQ ID NO: 93713 - protein, 207 aa, Homo sapiens
  MOD_RES (1)..(1): Any amino acid
XALQVPVSVAMMTPQVITPQQMQQILQQQVLSPQQLQVLLQQQQALMLQQQQLQEFYKKQQEQLQLQLLQQQHAGKQPKEQQQVATQQLAFQQQLLQMQQLQQQHLLSLQRQGLLTIQPGQPALPLQPLAQGMIPTELQQLWKEVTSAHTAEETTGNNHSSLDLTTTCVSSSAPSKTSLIMNPHASTNGQLSVHTPKRERQSFHTQR

SEQ ID NO: 93714 - protein, 107 aa, Homo sapiens
MEGSRPRAPSGHLAPSPPAFDGELDLQRYSNGPAVSAGSLGMGAVSWSESRAGERRFPCPVCGKRFRFNSILALHLRAHPGAQAFQCPHCGHRAAQRALLRSHLRTH

SEQ ID NO: 93715 - protein, 590 aa, Homo sapiens
MEMYETLGKVGEGSYGTVMKCKHKNTGQIVAIKIFYERPEQSVNKIAMREIKFLKQFHHENLVNLIEVFRQKKKIHLVFEFIDHTVLDELQHYCHGLESKRLRKYLFQILRAIDYLHSNNIIHRDIKPENILVSQSGITKLCDFGFARTLAAPGDIYTDYVATRWYRAPELVLKDTSYGKPVDIWALGCMIIEMATGNPYLPSSSDLDLLHKIVLKVGNLSPHLQNIFSKSPIFAGVVLPQVQHPKNARKKYPKLNGLLADIVHACLQIDPADRISSSDLLHHEYFTRDGFIEKFMPELKAKLLQEAKVNSLIKPKESSKENELRKDERKTVYTNTLLSSSVLGKEIEKEKKPKEIKVRVIKVKGGRGDISEPKKKEYEGGLGQQDANENVHPMSPDTKLVTIEPPNPINPSTNCNGLKENPHCGGSVTMPPINLTNSNLMAANLSSNLFHPSVRLTERAKKRRTSSQSIGQVMPNSRQEDPGPIQSQMEKGIFNERTGHSDQMANENKRKLNFSRSDRKEFHFPELPVTIQSKDTKGMEVKQIKMLKRESKKTESSKIPTLLNVDQNQEKQENTGNAQTERKKNLPDVE

SEQ ID NO: 93716 - protein, 298 aa, Homo sapiens
MAAATELNRPSSGDRNLERRCRPNLSREVLYEIFRSLHTLVGQLDLRDDVVKITIDWNKLQSLSAFQPALLFSALEQHILYLQPFLAKLQSPIKEENTTAVEEIGRTEMGNKNEVNDKFSIGDLQEEEKHKESDLRDVKKTQIHFDPEVVQIKAGKAEIDRRISAFIERKQAEINENNVREFCNVIDCNQENSCARTDAIFTPYPGFKSHVKVSRVVNTYGPQTRPEGIPGSGHKPNSMLRDCGNQAVEERLQNIEAHLRLQTGGPVPRDIYQRIKKLEDKILELEGISPEYFQSVGL

SEQ ID NO: 93717 - protein, 140 aa, Homo sapiens
MSGARSKLALFLCGCYVVALGAHTGEESVADHHEAEYYVAAVYEHPSILSLNPLALISRQEALELMNQNLDIYEQQVMTAAQKDVQIIVFPEDGIHGFNFTRTSIYPFLDFMPSPQVVRWNPCLEPHRFNDTESLLGHPS

SEQ ID NO: 93718 - protein, 137 aa, Homo sapiens
MSSVQSQQEQLSQSDPSPSPNSCSSFELIDMDAGSLYEPVSPHWFYCKIIDSKETWIPFNSEDSQQLEEAYSSGKGCNGRVVPTDGGRYDVHLGERMRYAVYWDELASEVRRCTWFYKGDKDNKYVPYSESFSQVLE

SEQ ID NO: 93719 - protein, 229 aa, Homo sapiens
MISTHCNLHLPGSSDSPASATQVAGITGTHHRNRLIFALLVEMGFHSVGQASLELLTSAMDCYRTSLSSSWIYPTVILCLFGFFSMMRPSEPFLIPYLSGPDKNLTSAEITNEIFPVWTYSYLVLLLPVFVLTDYVRYKPVIILQGISFIITWLLLLFGQGVKTMQVVEFFYGMVTAAEVAYYAYIYSVVSPEHYQRVSGYCRSVTLAAYTAGSVLAQLLVSLANMSYF

SEQ ID NO: 93720 - protein, 1059 aa, Homo sapiens
MSVSFHTHTKELWTWMEDLQKEMLEDVCADSVDAVQELIKQFQQQQTATLDATLNVIKEGEDLIQQLRSAPPSLGEPSEARDSAVSNNKTPHSSSISHIESVLQQLDDAQVQMEELFHERKIKLDIFLQLRIFEQYTIEVTAELDAWNEDLLRQMNDFNTEDLTLAEQRLQRHTERKLAMNNMTFEVIQQGQDLHQYITEVQASGIELICEKDIDLAAQVQELLEFLHEKQHELELNAEQTHKRLEQCLQLRHLQAEVKQVLGWIRNGESMLNASLVNASSLSEAEQLQREHEQFQLAIESLFHATSLQKTHQSALQVQQKAEVLLQAGHYDADAIRECAEKVALHWQQLMLKMEDRLKLVNASVAFYKTSEQVCSVLESLEQEYRRDEDWCGGRDKLGPAAEIDHVIPLISKHLEQKEAFLKACTLARRNAEVFLKYIHRNNVSMPSVASHTRGPEQQVKAILSELLQRENRVLHFWTLKKRRLDQCQQYVVFERSAKQALDWIQETGEFYLSTHTSTGETTEETQELLKEYGEFRVPAKQTKEKVKLLIQLADSFVEKGHIHATEIRKWVTTVDKHYRDFSLRMGKYRYSLEKALGVNTEDNKDLELDIIPASLSDREVKLRDANHEVNEEKRKSARKKEFIMAELLQTEKAYVRDLHECLETYLWEMTSGVEEIPPGILNKEHIIFGNIQEIYDFHNNIFLKELEKYEQLPEDVGHCFVTWADKFQMYVTYCKNKPDSNQLILEHAGTFFDEIQQRHGLANSISSYLIKPVQRITKYQLLLKELLTCCEEGKGELKDGLEVMLSVPKKANDAMHVSMLEGFDENLDVQGELILQDAFQVWDPKSLIRKGRERHLFLFEISLVFSKEIKDSSGHTKYVYKNKLLTSELGVTEHVEGDPCKFALWSGRTPSSDNKTVLKASNIETKQEWIKNIREVIQERIIHLKGALKEPLQLPKTPAKQRNNSKRDGVEDIDSQGDGSSQPDTISIASRTSQNTVDSDKGYGISCRFLQSYMQITEPGPFLNRMATLFLGGTWDLEILSPLTFSAHPGTCPCSSPG

SEQ ID NO: 93721 - protein, 51 aa, Homo sapiens
MEPLVTWVVPLLFLFLLSRQGAACRTSECCFQDPPYPDADSGSASGPRDLR

SEQ ID NO: 93722 - protein, 137 aa, Homo sapiens
MRWGHHLPRASWGSGFRRALQRPDDRIPFLIHWSWPLQGERPFGPPRAFIRHHGSSVDSAPPPGRHGRLFPSASATEAIQRHRRNLAEWFSRLPREERQFGPTFALDTVHVDPVIRESTPDELLRPPAELALEHQPP

SEQ ID NO: 93723 - protein, 275 aa, Homo sapiens
MAASAKKKNKKGKTISLTDFLAEDGGTGGGSTYVSKPVSWADETDDLEGDVSTTWHSNDDDVYRAPPIDRSILPTAPRAAREPNIDRSRLPKSPPYTAFLGNLPYDVTEESIKEFFRGLNISAVRLPREPSNPERLKGFGYAEFEDLDSLLSALSLNEESLGNRRIRVDVADQAQDKDRDDRSFGRDRNRDSDKTDTDWRARPATDSFDDYPPRRGDDSFGDSYDSRIGSGRRAFGSGYRRDDDYRGGGDRYEDRYDRRDDRSWSSRDDYSRDDY

SEQ ID NO: 93724 - protein, 43 aa, Homo sapiens
MLRRILQRTPGRVGSQGSDLDSSATPINTVDVNNESSSEVEHP

SEQ ID NO: 93725 - protein, 660 aa, Homo sapiens
  MOD_RES (1)..(1): Any amino acid
XSLLAVVVLLALPVAWGQCNAPEWLPFARPTNLTDEFEFPIGTYLNYECRPGYSGRPFSIICLKNSVWTGAKDRCRRKSCRNPPDPVNGMVHVIKGIQFGSQIKYSCTKGYRLIGSSSATCIISGDTVIWDNETPICDRIPCGLPPTITNGDFISTNRENFHYGSVVTYRCNPGSGGRKVFELVGEPSIYCTSNDDQVGIWSGPAPQCIIPNKCTPPNVENGILVSDNRSLFSLNEVVEFRCQPGFVMKGPRRVKCQALNKWEPELPSCSRVCQPPPDVLHAERTQRDKDNFSPGQEVFYSCEPGYDLRGAASMRCTPQGDWSPAAPTCEVKSCDDFMGQLLNGRVLFPVNLQLGAKVDFVCDEGFQLKGSSASYCVLAGMESLWNSSVPVCEQIFCPNPPAILNGRHTGTPFGDIPYGKEISYACDTHPDRGMTFNLIGESSIRCTSDPQGNGVWSSPAPRCELSVPAACPHPPKIQNGHYIGGHVSLYLPGMTISYICDPGYLLVGKGFIFCTDQGIWSQLDHYCKEVNCSFPLFMNGISKELEMKKVYHYGDYVTLKCEDGYTLEGSPWSQCQADDRWDPPLAKCTSRTHDALIVGTLSGTIFFILLIIFLSWIILKHRKGNNAHENPKEVAIHLHSQGGSSVHPRTLQTNEENSRY

SEQ ID NO: 93726 - protein, 92 aa, Homo sapiens
MAFGKSHRDPYATSVGHLIEKATFAGVQTEDWGQFMHICDIINTTQDGPKDAVKALKKRISKNYNHKEIQLTLSSRCLLTCVCRTVVQVSSL

SEQ ID NO: 93727 - protein, 424 aa, Homo sapiens
MEENNLQCSSVVDGNFEEVPRETAIQFKPPLYRQRYQFVKNLVDQHEPKKVADLGCGDTSLLRLLKVNPCIELLVGVDINEDKLRWRGDSLAPFLGDFLKPRDLNLTITLYHGSVVERDSRLLGFDLITCIELIEHLDSGDLARFPEVVFGYLSPSMIVISTPNSEFNPLFPSVTLRDSDHKFEWTRMEFQTWALYVANRYDYSVEFTGVGEPPAGAENVGYCTQIGIFRKNGGKATESCLSEQHDQHVYKARQGLTMLPRLVLNFHPQAILLPHLPKMLRLQVFTTSYPSLQQERFFKLVLVNEVSQQVESLRVSHLPRRKEQAGERGDKPKDIGGSKAPVPCFGPVFTEVEKAKIENSPTPFCVGDKFFVPLQRLLAYPKLNRLCANEEMMRSVIADSIPLSSDGSAVVADLRNYFDEQFEF

SEQ ID NO: 93728 - protein, 103 aa, Homo sapiens
MLSSIKCVLVGDSAVGKTSLLVRFTSETFPEAYKPTVYENTGVDVFMDGIQISLGLWDTAGNDAFRSIRPLSYQQADVVLMCYSVANHNSFLNLKNKWIGEIR

SEQ ID NO: 93729 - protein, 143 aa, Homo sapiens
MKCEHCTRKECSKKTKTDDQENVSADAPSPAQENGEKGEFHKLADAKIFLSDCLACDSCMTAEEGVQLSQQNAKDFFRVLNLNKKCDTSKHKVLVVSVCPQSLPYFAAKFNLSVTDASRRLCGFLKSLGMLPFPSSLQACRFP

SEQ ID NO: 93730 - protein, 134 aa, Homo sapiens
MEPSDMPAGYHCPLDSAPWDETRDPQSTELIPRRAISRSPTCARCRNHGVTAHLKGHKRLCLFQACECHKCVLILERRRVMAAQVALRRQQEAQLKKHLMRRGEASPKAPNHFRKGTTQPQVPSGKENIAPQPQ

SEQ ID NO: 93731 - protein, 119 aa, Homo sapiens
MLTRTSWFHGFFSWFSSSICWSTLSKFLRLVKEKVMYEKEAKQQEEKIEKMRAEDGENYDIKKQAEILQESRMMIPDCQRRLEAAYLDLQRILENEKDLEEAEEYKEARLVLDSVKLEA

SEQ ID NO: 93732 - protein, 169 aa, Homo sapiens
KLVQQLWKLGAVAKRERRGQADRGTVWTPAGGRTQCCGMKLLPSWRAVLPLGPSGRAWPWAQRPRRTAQTCAPKMRAQEDLEGRTQHETTRDPSTPLPTEPKFDMLYKIEDVPPWYLCILLGFQHYLTCFSGTIAVPFLLAEALCVGHDQHMVSQLIGTIFTCVGITTL

SEQ ID NO: 93733 - protein, 59 aa, Homo sapiens
MEAPDYEVLSVREQLFHERIRECIAGFPASQPFRGFPSEWSSQGFRGYLAAVPYALPAT

SEQ ID NO: 93734 - protein, 79 aa, Homo sapiens
MEAPDYEVLSVREQLFHERIRECIISTLLFATLYILCHIFLTRFKKPAEFTTGLWNLVFLFSNLSLIFLMPFAYFFTES

SEQ ID NO: 93735 - protein, 129 aa, Homo sapiens
MAAHVGASRTPQEVMEHYVSMYIHGNLGKACIPDTIPNRVTDHTCPSGGPLSPSLTTPLPPLDISVAEQQQLGYMPLRDDYEIEYDQDAETLISGLSVNYDDDDVEIELKRAHVDMYVRKLKERQRRKN

SEQ ID NO: 93736 - protein, 167 aa, Homo sapiens
MAQLGKLLKEQKYDRQLRRSLALSPRLECSGAISAHFKLRLLGSRHSSASASELWGDHGQEALESAHVCLINATATGTEILKNLVLPGIGSFTIIDGNQVSGEDAGNNFFLQRSSIGKNRAEAAMEFLQELNSDVSGSFVEESPENLLDNDPSFFCRFTVVVATQLP

SEQ ID NO: 93737 - protein, 172 aa, Homo sapiens
MFFGGGFPSSNVHVYSNGRMRYTYQQRQDRRDNQGDGGLGVFVQLMPILILILVSALSQLMVSSPPYSLSPRPSVGHIHRRVTDHLGVVYYVGDTFSEEYTGSSLKTVERNVEDDYIANLRNNCWKEKQQKEGLLYRARYFGDTDMYHRAQKMGTPSCSRLSETMKSLENFW

SEQ ID NO: 93738 - protein, 504 aa, Homo sapiens
  MOD_RES (1)..(1): Any amino acid
XYMDKDEHGSSSESEDEALGKYHEALSRTHNSRLPLADSRQRNYAWETRQKYSPLSAEYDGYSSEASIDEGNCIQRMRRTPPLDELQPPPYQDDSGSPHLSCTPSEIGDSKCEFSHCSNSPRCSYNKCPSEGSTGHEIESFHNKGYEEDVPSDSTAVLSPEDMSAQGSSSQLPKPFDPEPEAKYGTLDVTFDYDSQEQKLLVTVTAVTDIPTYNRTGGNSWQVHLVLLPIKKQRAKTSIQRGPCPVFTETFKFNHVESEMIGNYAVRFRLYGVHRMKKEKIVGEKIFYLTKLNLQGKMSLPVILEPSYNHSGCDSQMSVSEMSCSESTSSCQSLEHGSVPEILIGLLYNATTGRLSAEVIKGSHFKNLAANRPPTFHPLLSDGLFCCLKHLIGGQVYIIRDTYVKLTLLNSMGQEMSKCKTSIRRGQPNPVYKETFVFQVALFQLSDVTLILSVYNKRSMKRKEMIGWISLGLNSSGEEELNHWTEMKESKGQQVCRWHALLES

SEQ ID NO: 93739 - protein, 379 aa, Homo sapiens
METEQPEETFPNTETNGEFGKRPAEDMEEEQAFKRSRNTDEMVELRILLQSKNAGAVIGKGGKNIKALRTDYNASVSVPDSSGPERILSISADIETIGEILKKIIPTLEEYQHYKGSDFDCELRLLIHQSLAGGIIGVKGAKIKELRENTQTTIKLFQECCPHSTDRVVLIGGKPDRVVECIKIILDLISESPIKGRAQPYDPNFYDETYDYGGFTMMFDDRRGRPVGFPMRGRGGFDRMPPGRGGRPMPPSRRDYDDMSPRRGPPPPPPGRGGRGGSRARNLPLPPPPPPRGGDLMAYDRRGRPGDRYDGMVGFSADETWDSAIDTWSPSEWQMAYEPQGGSGYDYSYAGGRGSYGDLGGPIITTQVTIPKDLAGSII

SEQ ID NO: 93740 - protein, 65 aa, Homo sapiens
MKVLGHRLELLTGLLLHDVTMAGLQELRFPEEKPLLRGQDATELESSDAFLLAADTDWKPQRPGH

SEQ ID NO: 93741 - protein, 130 aa, Homo sapiens
MASILDEYENSLSRSAVLQPGCPSVGIPHSGYVNAQLEKEVPIFTKQRIDFTPSERITSLVVSSNQLCMSLGKDTLLRDGISPCCPVWSQTPELKQSTHLGLPKCWDYRLSQCTWPVFSILCIDVYFREH

SEQ ID NO: 93742 - protein, 226 aa, Homo sapiens
  MOD_RES (1)..(1): Any amino acid
XCKPRGICSRAYFLVLMVFVHLYLGNVLALLLFVHYSNGDESSDPGPQHRAQGPGPEPTLGPLTRLEGIKVGHERKVQLVTDRDHFIRTLSLKPLLFEIPGFLTDEECRLIIHLAQMKGLQRSQILPTEEYEEAMSTMQVLAQTRLGNGWWMTPESIQEMYAAIKADPDGDGVLSLQEFSNMDLRDFHKYMRSHKAESSELVRNSHHTWLYQGEGAHHIMRAIRQR

SEQ ID NO: 93743 - protein, 145 aa, Homo sapiens
MHLNYILFNNKNESLGTWSTQGCKTVLTDASHTKCLCDRLSTFAILAQQPREIIMESSGTPSVTLIVGSGLSCLALITLAVVYAALWRYIRSERSIILINFCLSIISSNILILVGQTQTHNKSICTTTTAFLHFFFLASFCWVLT

SEQ ID NO: 93744 - protein, 226 aa, Homo sapiens
  MOD_RES (1)..(1): Any amino acid
XGQYPEDSSSDGLRQREVLRNLSSPGWENISSLAATAASGAFVPPPSAQEIPVVSAPAPAPIHNQFPAENQPANQNAAPQVVVNPGANQNLRMNAQGGPIVEEDDEINRDWLDWTYSAATFSVFLSILYFYSSLSRFLMVMGATVVMYLHHVGWFPFRPRPVQNFPNDGPPPDVVNQDPNNNLQKAPQPSQTDGVCAVAVGGFDRNGLDHLTPARLPLLDMAMMSF

SEQ ID NO: 93745 - protein, 1177 aa, Homo sapiens
MGHFEKGQHALLNEGEENEMEIFGYRTQGCRKSLCLAGSIFSFGILPLVFYWRPAWHVWAHCVPCSLQEADTVLLRTTDEFQIYSWKKVIWIYLSALNSAFGLTPDHPLMTDEEYIINRAIRKPDLKVRCIKVQKIRYVWNYLEGQFQKIGSLEDWLSSAKIHQKFGSGLTREEQEIRRLICGPNTIDVEVTPIWKLLIKEVLNPFYIFQLFSVCLWFSEDYKEYAFAIIIMSIISISLTVYDLREQSVKLHHLVESHNSITVSVCGRKAGVQELESRVLVPGDLLILTGNKVLMPCDAVLIEGSCVVDEGMLTGESIPVTKTPLPKMDSSVPWKTQSEADYKRHVLFCGTEVIQAKAACSGTVRAVVLQTGFNTAKGDLVRSILYPKPVNFQLYRDAIRFLLCLEPPEEVVRKALDVITIAVPPALPAALTTGIIYAQRRLKKRGIFCISPQRINVCGQLNLVCFDKTGTLTRDGLDLWGVVSCDRNGFQEVHSFASGQALPWGPLCAAMASCHSLILLDGTIQGDPLDLKMFEATTWEMAFSGDDFHIKGVPAHAMVVKPCRTASQVPVEGIAILHQFPFSSALQRMTVIVQEMGGDRLAFMKGAPERVASFCQPETVPTSFVSELQIYTTQGFRVIALAYKKLENDHHATTLTRETVESDLIFLGLLILENRLKEETKPVLEELISARIRTVMITGDNLQTAITVARKSGMVSESQKVILIEANETTGSSSASISWTLVEEKKHIMYGNQDNYINIRDEVSDKGREGSYHFALTGKSFHVISQHFSSLLPKILINGTIFARMSPGQKSSLVEEFQKLDYFVGMCGDGANDCGALKMAHVGISLSEQEASVASPFTSKTPNIECVPHLIKEGRAALVTSFCMFKYMALYSMIQYVGVLLLYWETNSLSNYQFLFQDLAITTLIGVTMNLNGAYPKLVPFRPAGRLISPPLLLSVIFNILLSLAMHIAGFILVQRQPWYSVEIHSACTVQNESISELTMSPTAPEKMESNSTFTSFENTTVWFLGTINCITVALVFSKGKPFRQPTYTNYIFVLVLIIQLGVCLFILFADIPELYRRLDLLCTPVLWRASIVIMLSLNFIVSLVAEEAVIENRALWMMIKRCFGYQSKSQYRIWQRDLANDPSWPPLNQTSHSDMPECGRGVSYSNPVFESNEEQL

SEQ ID NO: 93746 - protein, 159 aa, Homo sapiens
MHPAQWSPQRAHPYALAQLEAPPSQPRRGLSDISPSTSLPPLVEGQLRCFLKLTVNRVIWKIAKPPTCVLVRVRWWGETSDGTLFCPRDALQTEPKAVRTTTRYAIRCGPKQFTSYLTDMAVLVLEVITKLDGLPIGRVQINGLAQLSPTHQINGFFTI

SEQ ID NO: 93747 - protein, 62 aa, Homo sapiens
MFLRQELPVRLANIMKEISLLPDNLLRTPSVQLVQSWYIQSLQELLDFKDKSAEDAKAIYEE

SEQ ID NO: 93748 - protein, 130 aa, Homo sapiens
MAQTDKPTCIPPELPKMLKEFAKAAIRAQPQDLIQWGADYFEALSRGETPPVRERSERVALCNWAELTPELLKILHSQVAGRLIIRAEELAQMWKVVNLPTDLFNSVMNVGRFTEEIEWLKFLALACSAL

SEQ ID NO: 93749 - protein, 352 aa, Homo sapiens
MPGGACVLVIALMFLAWGEAQECSPGGHQFLRSPYRSVRFDSWHLQQSAVQDLICDHSLSPGWYRFLILDRPAEMPTKCVEMNHCGTQAPIWLSLRDSETLPSPGEIKQLTACATWQFLFSTTKDCCLFQIPVSVRNCGNFSVYLLQPTQGCMGYCAEAISDARLHPCGSDETETGGDCVRQLAASLPPPPAGRPEVLVELIESRLFCRCSFDVPATKNSVGFHIAWSRLSSQEVKEELTQETTVQAFSLLELDGINLRLGDRIFCSASVFFLENPHVQSVAIESQEFFAGFKLQPELSTISEDGKEYYLRIESTVPIICSEFSELDQECKISLKLKTIGQDLVFFWGIYPC

SEQ ID NO: 93750 - protein, 74 aa, Homo sapiens
ALSQVTLLLRVCFIILTLTSIGFLLDQRPKAAIMETLRCLMFLMLYRFGHLKPLVPSLSSAFEETPYLSSNSAI

SEQ ID NO: 93751 - protein, 220 aa, Homo sapiens
MTSIKEQAAISRLLSFLQEWDNAGKVARSHILDKFIETNQGKTAPELEQEFSQGASLFLVRLTTSLRITYMTDSCLEKLLRSIGIFLSAVSSNRYLIEFLEVGGVLTLLEILGLEKIKEEAKKESVKLLQVIANSGRTYKELICESYGVRSIAEFLAKSKSEETQEEVQVLLDSLVHGNPKYQNQVYKGLIALLPCESPKAQQLSLQTLRTAQPIIGTTH

SEQ ID NO: 93752 - protein, 13 aa, Homo sapiens
MDRGSLLPFQLWC

SEQ ID NO: 93753 - protein, 116 aa, Homo sapiens
MLTLCYLIARCIGRTRLAPGQQEFENAEGDEYAADLAQGSPATAAQNGPDVYVLPLTEVSLPMAKQPGRSVQLLKSTDVGRHSLLYLKEIGRGWFGKVFLGEVNSGISSAQVVVKE

SEQ ID NO: 93754 - protein, 14 aa, Homo sapiens
MVLSQRQRDELMKN

SEQ ID NO: 93755 - protein, 780 aa, Homo sapiens
MTWICLSCMLWPEDLEAPKTHRFKVKTFKKVKPCGICRQVITQEGCTCKVCSFSCHRKCQAKVAAPCVPPSNHELVPITTENAPKNVVDKGEGASRGGNTRKSLEDNGSTRVTPSVQPHLQPIRNMSVSRTMEDSCELDLVYVTERIIAVSFPSTANEENFRSNLREVAQMLKSKHGGNYLLFNLSERRPDITKLHAKVLEFGWPDLHTPALEKICSICKAMDTWLNADPHNVVVLHNKGNRGRIGVVIAAYMHYSNISASADQALDRFAMKRFYEDKIVPIGQPSQRRYVHYFSGLLSGSIKMNNKPLFLHHVIMHGIPNFESKGGCRPFLRIYQAMQPVYTSGIYNIPGDSQTSVCITIEPGLLLKGDILLKCYHKKFRSPARDVIFRVQFHTCAIHDLGVVFGKEDLDDAFKDDRFPEYGKVEFVFSYGPEKIQGMEHLENGPSVSVDYNTSDPLIRWDSYDNFSGHRDDGMEEVVGHTQGPLDGSLYAKVKKKDSLHGSTGAVNATRPTLSATPNHVEHTLSVSSDSGNSTASTKTDKTDEPVPGASSATAALSPQEKRELDRLLSGFGLEREKQGAMYHTQHLRSRPAGGSAVPSSGRHVVPAQVHVNGGALASERETDILDDELPNQDGHSAGSMGTLSSLDGVTNTSEGGYPEALSPLTNGLDKSYPMEPMVNGGGYPYESASRAGPAHAGHTAPMRPSYSAQEGLAGYQREGPHPAWPQPVTTSHYAHDPSGMFRSQSFSEAEPQLPPAPVRGGSSREAVQRGLNSWQQQQQ

SEQ ID NO: 93756 - protein, 151 aa, Homo sapiens
MNQPQRMAPVGTDKELSDLLDFSMMFPLPVTNGKGRPASLAGAQFGGSGLEDRPSSGSWGSGDQSSSSFDPSRTFSEGTHFTESHSSLSSSTFLGPGLGGKSGERGAYASFGRDAGVGGLTQAGFLSGELALNSPGPLSPSGMKGTSQYYP

SEQ ID NO: 93757 - protein, 135 aa, Homo sapiens
MGKGDVLEAAPTTTAYHSLMDEYGYEVGKAIGHGSYGSVYEAFYTKQKVMVAVKIISKKKASDDYLNKFLPREIQNLILQMLRQATKRATILDIIKDSWVLKFQPEQPTHEIRLLEAMCQLHNTTKQHQSLQITT

SEQ ID NO: 93758 - protein, 144 aa, Homo sapiens
MSGSMATAEASGSDGKGQEVETSVTYYRLEEVAKRNSLKELWLVIHGRVYDVTRFLNEHPGGEEVLLEQAGVDASESFEDVGHSSDAREMLKQYYIGDIHPSDLKPESGSKDPSKNDTCKRRCSLRFPVPLLHIGKQILLRRPC

SEQ ID NO: 93759 - protein, 898 aa, Homo sapiens
MDVVGENEALQQFFEAQGANGTLENPALDTSLLEEFLGNDFDLGALQRQLPDTPPYSASDSCSPPQVKGACYPTLRPTAGRTPAPFLHPTAAPAMPPMHPLQSTSGMGDSCQIHGGFHSCHSNASHLATPLDQSVSSHLGIGCSYPQQPLCHSPGASLPPTKKRKCTQALEDSGECRVWACHCRPMTSRSRSSEVQDPDSEGQNRMPTDQCSPALKWQPCHSVPWHSLLNSHYEKLPDVGYRVVTDKGFNFSPADEAFVCQKKNHFQITIHIQVWGSPKFVETEMGLKPIEMFYLKVFGTKVEATNQIIAIEQSQADRSKKIFNPVKIDLLADQVTKVTLGRLHFSETTANNMRKKGKPNPDQRYFMLVVGLYAANQDQFYLLSAHISERIIVRASNPGQFENDSDALWQRGQVPESIVCHGRVGINTDAPDEALVVCGNMKVMGTIMHPSDSRAKQNIQEVDTNEQLKRIAQMRIVEYDYKPEFASAMGINTAHQTGMIAQEVQEILPRAVREVGDVTCGNGETLENFLMVDKDQIFMENVGAVKQLCKLTNNLEERIEELEIWNRKLARLKRLSSWKSSASEASTISKSSRAVSASSPRRAVHKKNNKVYFSGKRQACPNWVFQTLVITLIAVMAFCLKDQDRRVPNLPPSNITSSQEPALLPTASSSAPNTSLVTTPASLQVPEITFCEILPCQETYCCPIRGMKEVSSSPVQRQSEEKEFHQRRWSDKSKSVLARNALSGPDWESDWIDTTISSIQIMEIQQIIDHQYCIQSLQCGSGNYNYNIPVNKHTPTNVKFSLEINTTEPLIVFQCKFTLGNICFHSKRGTKGLESHREISQEMTQGYQHIWSLPVAPFSDSMFHFRVAAPDLADCSTDPYFAGIFFTDYFFYFYRRCA

SEQ ID NO: 93760 - protein, 272 aa, Homo sapiens
MDSALSDPHNGSAEAGGPTNSTTRPPSTPEGIALAYGSLLLMALLPIFFGALRSVRCARGKNASDMPETITSRDAARFPIIASCTLLGLYLFFKIFSQEYINLLLSMYFFVLGILALSHTISPFMNKFFPASFPNRQYQLLFTQGSGENKEEIINYEFDTKDLVCLGLSSIVGVWYLLRKVFGTNVMVTVAKSFEAPIKLVFPQDLLEKGLEANNFAMLGLGDVVIPGIFIALLLRFDISLKKNTHTYFYTSFAAYIFGLGLTIFIMHIFKH

SEQ ID NO: 93761 - protein, 120 aa, Homo sapiens
  MOD_RES (1)..(1): Any amino acid
XISRLTPGGKAAQAGVAVGDWVLSIDGENAGSLTHIEAQNKIRACGERLSLGLSRAQPVQSKPQKAPHFHPGPHLTLPARPARLCLCPGLRPRRGPSAVHLCTQRLPQQDGPALWGAPAR

SEQ ID NO: 93762 - protein, 257 aa, Homo sapiens
MSRLLWRKVAGATVGPGPVPAPGRWVSSSVPASDPSDGQRRRQQQQQQQQQQQQQPQQPQVLSSEGGQLRHNPLDIQMLSRGLHEQIFGQGGEMPGEAAVRRSVEHLQKHGLWGQPAVPLPDVELRLPPLYGDNLDQHFRLLAQKQSLPYLEAANLLLQAQLPPKPPAWAWAEGWTRYGPEGEAVPVAIPEERALVFDVEVCLAEGTCPTLAVAISPSAWIKILFTTLMLSGMASKKVGSFFIPIGSYIFVKKAAKC

SEQ ID NO: 93763 - protein, 226 aa, Homo sapiens
MDVERLQEALKDFEKRGKKEVCPVLDQFLCHVAKTGETMIQWSQFKGYFIFKLEKVMDDFRTSAPEPRGPPNPNVEYIPFDEMKERILKIVTGFNGIPFTIQRLCELLTDPRRNYTGTDKFLRGVEKNVMVVSCVYPSSESNINGPGTPRPLNRPKVSLSAPMTTNGLPESTDSKEANLQQNEEKNHSDSSTSESEVSSVSPLKNKHPDEDAVEAEGHEVKRLRFD

SEQ ID NO: 93764 - protein, 77 aa, Homo sapiens
MAEEFVTLKDVGMDFTLGDWEQLGLEQGDTFWDTALDNCQDLFLLDPPRPNLTSHPDGSEDLEPLAGGSPEATSPGF

SEQ ID NO: 93765 - protein, 923 aa, Homo sapiens
MNSMNPMKPALPPAPHGDGSFAYESVPWQQSATQPAGSLSVVTTVWGVGNATQSQVLGNPMGPAGSPSGSSMMPGVAGGSSALTSPQCLGQQAFAEGGANKGYVQQGVYSRGGYPGAPGFTTGYAGGPGGLGLPSHAARPSTDFTQAAAAAAVAAAAATATATATATVAALQEKQSQELSQYGAMGAGQSFNSQFLQHGGPRGPSVPAGMNPTGIGGVMGPSGLSPLAMNPTRAAGMTPLYAGQRLPQHGYPGPPQAQPLPRQGVKRTYSEVYPGQQYLQGGQYAPSTAQFAPSPGQPPAPSPSYPGHRLPLQQGMTQSLSVPGPTGLHYKPTEQFNGQGASFNGGSVSYSQPGLSGPTRSIPGYPSSPLPGNPTPPMTPSSSVPYMSPNQEVKSPFLPDLKPNLNSLHSSPSGSGPCDELRLTFPVRDGVVLEPFRLQHNLAVSNHVFQLRDSVYKTLIMRPDLELQFKCYHHEDRQMNTNWPASVQVSVNATPLTIERGDNKTSHKPLYLKHVCARPQHHPSPSPPAAACVSCSHLFVLQLVHRPSVRSVLQGLLKKRLLPAEHCITKIKRNFSSGTIPGTPGPNGEDGVEQTAIKVSLKCPITFRRIQLPARGHDCRHIQCFDLESYLQLNCERGTWRCPVCNKTALLEGLEVDQYMLGILIYIQNSDYEEITIDPTCSWKPVPVKPDMHIKEEPDGPALKRCRTVSPAHVLMPSVMEMIAALGPGAAPFAPLQPPSVPAPSDYPGQGSSFLGPGTFPESFPPTTPSTPTLAEFTPGPPPISYQSDIPSSLLTSEKSTACLPSQMAPAGHLDPTHNPGTPGLHTSNLGAPPGPQLHHSNPPPASRQSLGQASLGPTGELAFSPATGVMGPPSMSGAGEAPEPALDLLPELTNPDELLSYLGPPDLPTNNNDDLLSLFENN

SEQ ID NO: 93766 - protein, 147 aa, Homo sapiens
YGERTELLVDRENEVRNFQLLRAHSCAPKLYCTFQNGLCYEYMQGVALEPEHIREPRLFSLSADVPKVEVLERELAWLKEHLSQLESPVVFCHNDLLCKNIIYDSIKGHVRFIDYEYAGYNYQAFDIGNHFNEFAGVNEVDYCLYPA

SEQ ID NO: 93767 - protein, 355 aa, Homo sapiens
MQCCGLVHRRRVRVSYGSADSYTSRPSDSDVSLEEDREAVRREAERQAQAQLEKAKTKPVAFAVRTNVSYSAAHEDDVPVPGMAISFEAKDFLHVKEVLQRLIKSRGKSQAKHLNVQMVAADKLAQCPPELFDVILDENQLEDACEHLADYLEAYWKATHPPSSSLPNPLLSRTLATSSLPLSPTLASNSQGSQGDQRTDRSAPIRSASQAEEEPSVEPVKKSQHRSSSSAPHHNHRSGTSRGLSRQETFDSETQESRDSAYVEPKEDYSHDHVDHYASHRDHNHRDETHGSSDHRHRESRHRSRDVDREQDHNECNKQRSRHKSKDRYCEKDGEVISKKRNEAGEWNRDVYIRQ

SEQ ID NO: 93768 - protein, 317 aa, Homo sapiens
  MOD_RES (1)..(1): Any amino acid
XPLMESELLTEKEVAMIFVNWKELIMCNIKLLKALRVRKKMSGEKMPVKMIGDILSAQLPHMQPYIRFCSRQLNGAALIQQKTDEAPDFKEFVKRLAMDPRCKGMPLSSFILKPMQRVTRYPLIIKNQLVFNSVTNCLGPRKFLHSGKLYKAKSNKELYGFLFNDFLLLTQITKPLGSSGTDKVFSPKSNLQYKMYKTPIFLNEVLVKLPTDPSGDEPIFHISHIDRVYTLRAESINERTAWVQKIKAASELYIETEKKKREKAYLVRSQRATGIGRLMVNVVEGIELKPCRSHGKSNPYCEVTMGSQCHITKTIQD

SEQ ID NO: 93769 - protein, 232 aa, Homo sapiens
ANGIKAHLEYRSAEMEKSKQELERMAAISNTVQFLEEYCKFKNTEDITFPSVYVGLKDKLSGIRKVITESTVHLIQLLENYKKKLQEFSKEEEYDIRTQVSAVVQRKYWTSKPEPSTREQFLQYAYDITFDPDTAHKYLRLQEENRKVTNTTPWEHPYPDLPSRFLHWRQVLSQQSLYLHRYYFEVEIFGAGTYVGLTCKGIDRKGEERNSCISGNNFSWSLQWNGKEFTAW

SEQ ID NO: 93770 - protein, 138 aa, Homo sapiens
  MOD_RES (1)..(1): Any amino acid
XRAMFINYEQVNMGDRFGQIMIENLRRRQCDLAGVETCKSLESQKERLLSNGWETASAVDMMELYNRLPRAEVSRAEGDNLLICRRLMPSQKPKPLALLEETCKLPERWAGLVRRSHPTLLRSLGHYSGRTCSSSCSC

SEQ ID NO: 93771 - protein, 52 aa, Homo sapiens
  MOD_RES (1)..(1): Any amino acid
XPDVRIVTEVIEVREATEVTDSSDITNCSGVTVVFENNDLIRAKQEEKELEN

SEQ ID NO: 93772 - protein, 600 aa, Homo sapiens
MNQPQRMAPVGTDKELSDLLDFSMMFPLPVTNGKGRPASLAGAQFGGSGKSGERGAYASFGRDAGVGGLTQAGFLSGELALNSPGPLSPSGMKGTSQYYPSYSGSSRRRAADGSLDTQPKKVRKVPPGLPSSVYPPSSGEDYGRDATAYPSAKTPSSTYPAPFYVADGSLHPSAELWSPPGQAGFGPMLGGGSSPLPLPPGSGPVGSSGSSSTFGGLHQHERMGYQLHGAEVNGGLPSASSFSSAPGATYGGVSSHTPPVSGADSLLGSRGTTAGSSGDALGKALASIYSPDHSSNNFSSSPSTPVGSPQGLAGTSQWPRAGAPGALSPSYDGGLHGLQSKIEDHLDEAIHVLRSHAVGTAGDMHTLLPGHGALASGFTGPMSLGGRHAGLVGGSHPEDGLAGSTSLMHNHAALPSQPGTLPDLSRPPDSYSGLGRAGATAAASEIKREEKEDEENTSAADHSEEEKKELKAPRARTSSTDEVLSLEEKDLRDRERRMANNARERVRVRDINEAFRELGRMCQMHLKSDKAQTKLLILQQAVQVILGLEQQVRERNLNPKAACLKRREEEKVSGVVGDPQMVLSAPHPGLSEAHNPAGHM

SEQ ID NO: 93773 - protein, 822 aa, Homo sapiens [sequence omitted]

SEQ ID NO: 93774 - protein, 152 aa, Homo sapiens
MAEKFDCHYCRDPLQGKKYVQKDGHHCCLKCFDKFCANTCVECRKPIGADSKEVHYKNRFWHDTCFRCAKCLHPLANETFVAKDNKILCNKCTTREDSPKCKGCFKAIVAGDQNVEYKGTVWHKDCFTCSNCKQVIGTGSFFPKGEDFYCVT

SEQ ID NO: 93775 - protein, 302 aa, Homo sapiens
  MOD_RES (1)..(1): Any amino acid
XHHFPPTSPLKDYGDPQGIKRMRSRTGVRFVQETDDMTQLHGFHQSLRDLSSEQIRLGDDFNRELSRRSRSDAETKRALEELTEKLNEAQKQEVVSDRVERRLQELEREMRTERELVERRQDQLGLMSLQLQEALKKQEAKADEHEGAIKNKLRQTETEKNQLEQELELSRRLLNQSEGSRETLLHQVEELRTQLTKAEGDRKGLQHQVSQISKQQSNYQDEQGEDWRFRRGVEREKQDLEKQMSDLRVQLNFSAMASELEEVKRCMERKDKEKAHLASQVEVTLLFLSHIRNILILSHGIA

SEQ ID NO: 93776 - protein, 140 aa, Homo sapiens
MRDGKGFLQGFLYFALVALSFSGAIGLTFLMLGCALEDYGVYWPLFVLIFHAISPIPHFIAKRVTYDSDATSSACRELAYFFTTGIVVSAFGFPVILARVAVIKWGACGLVLAGNAVIFLTIQGFFLIFGRGDDFSWEQW

SEQ ID NO: 93777 - protein, 572 aa, Homo sapiens; identical to SEQ ID NO: 55388

SEQ ID NO: 93778 - protein, 689 aa, Homo sapiens
  MOD_RES (1)..(1): Any amino acid
XGAERYSDRGIIPRTLSYIFEQLQKDSSKIYTTHISYLEIYNECGYDLLDPRHEASSLEDLPKVTILEDPDQNIHLKNLTLHQATTEEEALNLLFLGDTNRMIAETPMNQASTRSHCIFTIHLSSKEPGSATVRHAKLHLVDLAGSERVAKTGVGGHLLTEAKYINLSLHYLEQVIIALSEKHRSHIPYRNSMMTSVLRDSLGGNCMTTMIATLSLEKRNLDESISTCRFAQRVALIKNEAVLNEEINPRLVIKRLQKEIQELKDELAMVTGEQRTEALTEAELLQLEKLITSFLEDQDSDSRLEVGADMRKVHHCFHHLKKLLNDKKILENNTVSSESKDQDCQEPLKEEEYRKLRDILKQRDNEINILVNMLKKEKKKAQEALHLAGMDRREFRQSQSPPFRLGNPEEGQRMRLSSAPSQAQDFSILGKRSSLLHKKIGMREEMSLGCQEAFEIFKRDHADSVTIDDNKQILKQRFSEAKALGESINEARSKIGHLKEEITQRHIQQVALGISENMAVPLMPDQQEEKLRSQLEEEKRRYKTMFTRLKALKVEIEHLQLLMDKAKVKLQKEFEVWWAEEATNLQVNSPAVNSLDHTKPFLQTSDSQHEWSQLLSNKSDVNARKILPSPCPSPHSQKQSSTSTPLEDSIPKRPVSSIPLTGDSQTDSDIIAFIKARQSILQKQCLGSN

SEQ ID NO: 93779 - protein, 74 aa, Homo sapiens
MSGSFYFVIVGHHDNPVFEMEFLPAGKAESKDDHRHLNQFIAHAALDLVDENMWLSNNMYLKTVDKFNEWFVSA

SEQ ID NO: 93780 - protein, 93 aa, Homo sapiens
  MOD_RES (1)..(1): Any amino acid
XSEPPLQCLVLICEAIPHPGSLEPPLGRGAFLSRHSLDMKFTYCDDRNGDSGFSLLECQSWLCILSQMTSPLCATISSPILWNHNRTCLVQSF

SEQ ID NO: 93781 - protein, 1159 aa, Homo sapiens
PGSPGDAEDRRELGLHRGEVNFGGSGKKRGKFVRVPSGVAPSVLFDLLLAEWHLPAPNLVVSLVGEEQPFAMKSWLRDVLRKGLVKAAQSTGAWILTSALRVGLARHVGQAVRDHSLASTSTKVRVVAVGMASLGRVLHRRILEEAQVHEDFPVHYPEDDGGSQGPLCSLDSNLSHFILVEPGPPGKGDGLTELRLRLEKHISEQRAGYGGTGSIEIPVLCLLVNGDPNTLERISRAVEQAAPWLILVGSGGIADVLAALVNQPHLLVPKVAEKQFKEKFPSKHFSWEDIVRWTKLLQNITSHQHLLTVYDFEQEGSEELDTVILKALVKACKSHSQEPQDYLDELKLAVAWDRVDIAKSEIFNGDVEWKSCDLEEVMVDALVSNKPEFVRLFVDNGADVADFLTYGRLQELYRSVSRKSLLFDLLQRKQEEARLTLAGLGTQQAREPPAGPPAFSLHEVSRVLKDFLQDACRGFYQDGRPGDRRRAEKGPAKRPTGQKWLLDLNQKSENPWRDLFLWAVLQNRHEMATYFWAMGQEGVAAALAACKILKEMSHLETEAEAARATREAKYERLALDLFSECYSNSEARAFALLVRRNRCWSKTTCLHLATEADAKAFFAHDGVQAFLTRIWWGDMAAGTPILRLLGAFLCPALVYTNLITFSEEAPLRTGLEDLQDLDSLDTEKSPLYGLQSRVEELVEAPRAQGDRGPRAVFLLTRWRKFWGAPVTVFLGNVVMYFAFLFLFTYVLLVDFRPPPQGPSGPEVTLYFWVFTLVLEEIRQGFFTDEDTHLVKKFTLYVGDNWNKCDMVAIFLFIVGVTCRMLPSAFEAGRTVLAMDFMVFTLRLIHIFAIHKQLGPKIIVVERMMKDVFFFLFFLSVWLVAYGVTTQALLHPHDGRLEWIFRRVLYRPYLQIFGQIPLDEIDEARVNCSTHPLLLEDSPSCPSLYANWLVILLLVTFLLVTNVLLMNLLIAMFSYTFQVVQGNADMFWKFQRYNLIVEYHERPALAPPFILLSHLSLTLRRVFKKEAEHKREHLERDLPDPLDQKVVTWETVQKENFLSKMEKRRRDSEGEVLRKTAHRVDFIAKYLGGLREQEKRIKCLESQINYCSVLVSSVADVLAQGGGPRSSQHCGEGSQLVAADHRGGLDGWEQPGAGQPPSDT

SEQ ID NO: 93782 - protein, 18 aa, Homo sapiens
MEILMTVSKFASICTMEW

SEQ ID NO: 93783 - protein, 58 aa, Homo sapiens
EDLSGSIASPDVKLNLGGDFIKESTATTFLRQRGYGWLLEVEDDDPEDNKPLLWSHGL

SEQ ID NO: 93784 - protein, 122 aa, Homo sapiens
MSWIKEGELSLWERFCANIIKAGPMPKHIAFIMDGNRRYAKKCQVERQEGHSQGFNKLAETLRWCLNLGILEVTVYAFSIENFKRSKSEVDGLMDLARQKFSRLMEEKEKLQKHGVCIRVLG

SEQ ID NO: 93785 - protein, 175 aa, Homo sapiens
  MOD_RES (1)..(1): Any amino acid
XEVMEMRKIVAEYEKTIAQMIGKPEDEQREKSVSHQTVQQLVLEKEQALADLNSVEKSLADLFRRYEKMKEVLEGFRKNEEVLKRCAQEYLSRVKKEEQRYQALKVHAEEKLDRANAEIAQVRGKAQQEQAAHQASLRKEQLRVDALERTLEQKNKEIEELTKICDELIAKMGKS

SEQ ID NO: 93786 - protein, 276 aa, Homo sapiens
MEVMNLMEQPIKVTEWQQTYTYDSGIHSGANTCVPSVSSKGIMEEDEACGRQYTLKKTTTYTQGVPPSQGDLEYQMSTTARAKRVREAMCPGVSGEDSSLLLATQVEGQATNLQRLAEPSQLLKSAIVHLINYQDDAELATRALPELTKLLNDEDPVVVTKAAMIVNQLSKKEASRRALMGSPQLVAAVVRTMQNTSDLDTARCTTSILHNLSHHREGLLAIFKSGGIPALVRMLSSPVESVLFYAITTLHNLLLYQEGAKMAVRLADGLQKMVPL

SEQ ID NO: 93787 - protein, 134 aa, Homo sapiens
MPTWGARPASPDRFAVSAEAENKVREQQPHVERIFSVGVSVLPKDCPDNPHIWLQLEGPKENASRAKEYLKGLCSPELQDEIHYPPKLHCIFLGAQGFFLDCLAWSTSAHLVPRAPGSLMISGLTEAFVMAQSR

SEQ ID NO: 93788 - protein, 136 aa, Homo sapiens
MAEPGEGLPEEVLALIFRHLSLRDRAAAARVCRAWAAAATCSAVWHDTKIRRPTRSVLDTLPPSLASTPLRTLQLRGPGAGRGRARARAGPQGTCPAHTRSRTGDFSCRTKKEIEGPRGVGLEPKSPTHLTPPHPT

SEQ ID NO: 93789 - protein, 184 aa, Homo sapiens
  MOD_RES (1)..(1): Any amino acid
XQEPDEESLVPSGENLASETKTESAKTEGPSPALLEETPLEPAVGPKAACPLDSESAEGVVPPASGGGRVQNSPPVGRKTLPLTTAPEAGEVTPSDSGGQEDSPAKGLSVRLEFDYSEDKSSWDNQQENPPPTKKIGKKPVAKMPLRRPKMKKTPEKLDNTPASPPRSPAEPNDIPIAKVTHLG

SEQ ID NO: 93790 - protein, 130 aa, Homo sapiens
MNIFDRKINFDALLKFSHITPSTQQHLKKVYASFALCMFVAAAGAYVHMVTHFIQAGLLSALGSLILMIWLMATPHSHETEQKRLGLLAGFAFLTGVGLGPALEFCIAVNPSILPTAFMGTAMIFTCFTL

SEQ ID NO: 93791 - protein, 228 aa, Homo sapiens
MAATASAGVPATVSEKQEFYQLLKNLINPSCMVRRQAEEIYENIPGLCKTTFLLDAVRNRRAGYEDPHPRVRAAACTTLGQMATDFAPNFQKKFHETVIAALLRTMENQGNQRVQSHAASALIIFIEDCPKSLLVLYVDSMVKNLHSVLVIKLQELIRNGTKLALEQLVTTIASVADTIEEKFVPYYDIFMPSLKHIVELAVQKELKLLRGKTIECISHIGLAVGKEK

SEQ ID NO: 93792 - protein, 491 aa, Homo sapiens
MASRCWRWWGWSAWPRTRLPPAGSTPSFCHHFSTQEKTPQICVVGSGPAGFYTAQHLLKHPQAHVDIYEKQPVPFGLVRFGVAPDHPEVKNVINTFTQTAHSGRCAFWGNVEVGRDVTVPELQEAYHAVVLSYGAEDHRALEIPGEELPGVCSARAFVGWYNGLPENQELEPDLSCDTAVILGQGNVALDVARILLTPPEHLERTDITKAALGVLRQSRVKTVWLVGRRGPLQVAFTIKELREMIQLPGARPILDPVDFLGLQDKIKEVPRPRKRLTELLLRTATEKPGPAEAARQASASRAWGLRFFRSPQQVLPSPDGRRAAGVRLAVTRLEGVDEATRAVPTGDMEDLPCGLVLSSIGYKSRPVDPSVPFDSKLGVIPNVEGRVMDVPGLYCSGWVKRGPTGVIATTMTDSFLTGQMLLQDLKAGLLPSGPRPGYAAIQALLSSRGVRPVSFSDWEKLDAEEVARGQGTGKPREKLVDPQEMLRLLGH

SEQ ID NO: 93793 - protein, 411 aa, Homo sapiens
MNRHLWKSQLCEMVQPSGGPAADQDVLGEESPLGKPAMLHLPSEQGAPETLQRCLEENQELRDAIRQSNQILRERCEELLHFQASQREEKEFLMCKFQEARKLVERLGLEKLDLKRQKEQALREVEHLKRCQQMAEDKASVKAQVTSLLGELQESQSRLEAATKECQALEGRARAASEQARQLESEREALQQQHSVQVDQLRMQGQSVEAALRMERQAASEEKRKLAQLQVAYHQLFQEYDNHIKSSVGMQLEDLKQQLQQAEEALVAKQEVIDKLKEEAEQHKIVMETVPVLKAQADIYKADFQAERQAREKLAEKKELLQEQLEQLQREYSKLKASCQESARIEDMRKRHVEVSQAPLPPAPAYLSSPLALPSQRRSPPEEPPDFCCPKCQYQAPDMDTLQIHVMECIE

SEQ ID NO: 93794 - protein, 249 aa, Homo sapiens
RELRPGPRDEPRSNGRREEKTEKPRFMFNIADGGFTELHTLWQNEERAAISSGKLNEIWHRRHDYWLLAGIVLHGYARWQDIQNDAQFAIINEPFKTEANKGNFLEMKNKFLARRFKLLEQALVIEEQLRRAAYLNLSQEPAHPAMALHARFAEAECLAESHQHLSKESLAGNKPANAVLHKAGGVAERHEGGRDPPASHAVPNTPHRSPPSDVRAQHPQPAGQQGHGASPHTGLPAGSLRYTSGVRGG

SEQ ID NO: 93795 - protein, 80 aa, Homo sapiens
MKVFFLFAVLFCLVQTNSGDVPLGIRNTICRMQQGICRLFFCHSGEKKRDISSDPWNRCCVSNTDEEGKEKPEMDGRSGI

SEQ ID NO: 93796 - protein, 64 aa, Homo sapiens
MGCFVYFFLGTSRDVTLGPTAIMSLLVSFYTFHEPAYAVLLAFLSGCIQLAMGVLRLGFLLDFI

SEQ ID NO: 93797 - protein, 58 aa, Homo sapiens
  MOD_RES (1)..(1): Any amino acid
XLKREGANKLRYPPNSQSKVDWGKFFLLKRFNKEKLGLLLLTFLGIVAAVLVKTALVQ

SEQ ID NO: 93798 - protein, 250 aa, Homo sapiens
MEIGRPRKDTWKLANLDLNSEKQSGGASTASKGRYIPPHLRNREASKGFHDKDSSGWSCSKDKDAYSSFGSRDSRGKPGYFSERGSGSRGRFDDRGRSDYDGIGNRERPGFGRFERSGHSRWCDKSVEDDWSKPLPPSERLEQELFSGGNTGINFEKYDDIPVEATGSNCPPHIENFSDIDMGEIIMGNIELTRYTRPTPVQKHAIPIIKGKRDLMACAQTGSGKTAAFLLPILSQIYTDGPGEALKAVK

SEQ ID NO: 93799 - protein, 32 aa, Homo sapiens
  MOD_RES (1)..(1): Any amino acid
XHFYKSRSCSDLENGKGSFKLWTISPCLRWLS

SEQ ID NO: 93800 - protein, 98 aa, Homo sapiens
MSGKVTKPKEEKDASKVLDDAPPGTQEYIMLRQDSIQSAELKKKESPFRAKCHEIFCCPLKQVHHKENTEPEEPQLKGIVTKLYSRQGYHLQLQADGT

SEQ ID NO: 93801 - protein, 581 aa, Homo sapiens
NNNGTYDGIAYFECKEKHGIFAPPQKISHIPENFDDYVDINEDEDCYSDERYQCYNQEQNDTEGPKDREKDVSEYFYEKSLPSVNDIEASVNRSRSLKIETDNVQDISGVLEAHVHQQSSVDSQISSKENKDLISDATEKVSIAAEDDTLDNTFSEELEKQQQFTEEEDNLYAEASEKLCTPLLDLLTREKNQLEAQLKSSLNEEKKSKQQLEKISLLTDSLLKVFVKDTVNQLQQIKKTRDEKIQLSNQELLGDDQKKVTPQDLSQNVEEQSPSISGCFLSSELEDEKEEISSPDMCPRPESPVFGASGQEELAKRLAELELSREFLSALGDDQDWFDEDFGLSSSHKIQKNKAEETIVPLMAEPKRVTQQPCETLLAVPHTAEEVEILVHNAAEELWKWKELGHDLHSISIPTKLLGCASKGLDIESTSKRVYKQAVFDLTKEIFEEIFAEDPNLNQPVWMKPCRINSSYFRRVKNPNNLDEIKSFIASEVLKLFSLKKEPNHKTDWQKMMKFGRKKRDRVDHILVQELHEEEAQWVNYDEDELCVKMQLADGIFETLIKDTIDVLNQISEKQGRMLLV

SEQ ID NO: 93802 - protein, 104 aa, Homo sapiens
MGAQDRPQCHFDIEINREPVGRIMFQLFSDICPKTCKNFLCLCSGEKGLGKTTGKKLCYKGSTFHRVVKNFMIQGGDFSEGNGKGGESIYGGYFKENVVFCKMK

SEQ ID NO: 93803 - protein, 71 aa, Homo sapiens
  MOD_RES (1)..(1): Any amino acid
XELKKPVSTTNLQDPGVLGCPRTCLHAILNILEKGTEGRTGPVAVRESPQLAELCYQRQSFTMLSRLVSNS

SEQ ID NO: 93804 - protein, 147 aa, Homo sapiens
  MOD_RES (1)..(1): Any amino acid
XSAGTIGAVAAWLMSYKPALFGFLFLLLLLSNWLVKYEHKLTLPEPQQEEEKPKTSENDSKNSKAVNTKEVNRTHACFALQDEILQRLLFSEMKMKVLENQMFIIWNKMNHHGRSSRHRNFPMKKHRMRRHESICPTLSDCTSSSPS

SEQ ID NO: 93805 - protein, 213 aa, Homo sapiens
TSTGTSDARTGVILQDAGIGFILVIDRRRDKWTSVKASVLRIAASFPANLQLVLVLRPTGFFQRTLSDIAFKFNRDDFKMKVPVIMLSSVPDLHGYIDKSQLTEDLGGTLDYCHSRWLCQRTAIESFALMVKQTAQMLQSFGTELAETELPNDVQSTSSVLCAHTEKKDKAKVHGGCSGWKLWGAPVSQKLRGAPVGSCGGSFVPAGVCVSST

SEQ ID NO: 93806 - protein, 563 aa, Homo sapiens
MEMDVEGVSPRPEPIPRSQGAGGACQAPPQPPQPQPPPQQLAQDELPGESAGAEDSDDPETRPNGEKGESKRTSANKSSGAPSYSRWSSSQPHQSSSTVRAYQTSKSRVTMSPGFSSQWNSSQPAWNTYSFPRASLHYQSHASYTYCTGHPASYAPAPHPMAPPSPSTNSSSNNSSNNSSGEQLSKTNLYIRGLPPGTTDQDLIKLCQPYGKIVSTKAILDKNTNQCKGYGFVDFDSPAAAQKAVASLKANGVQAQMAKQQEQDPTNLYISNLPISMDEQELENMLKPFGHVISTRILRDANGVSRGVGFARMESTEKCEVVIQHFNGKYLKTPPGIPAPSEPLLCKFADGGQKKRQNQSKYTQNGRPWPREGEAGMALTYDPTAAIQNGFYSSPYSIATNRMIPQTSITPFIAASPVSTYQVQSTSWMPHPPYVMQPTGAVITPTMDHPMSMQPANMMGPLTQQMNHLSLGTTGTIQSQDRIMILHQLLCQYMTAAAPMQGTYIPQYTPVPPTAVSIEGVVADTSPQTVAPSSQDTSGQQQQIAVDTSNEHAPAYSYQQSKP

SEQ ID NO: 93807 - protein, 172 aa, Homo sapiens
MITTSRDPSSRLKMFAKELKLVFPGAQRMNRGRHEVGALVRACKANGVTDLLVVHEHRGTPVGLIVSHLPFGPTAYFTLCNVVMRHDIPDLGTMSEAKPHLITHGFSSRLGKRVSDILRYLFPVPKDDSHRVITFANQDDYISFRHHVYKKTDHRNVELTEVGPRFELKLYM

SEQ ID NO: 93808 - protein, 35 aa, Homo sapiens
MLHCFGGGILSCLLLAEPPLKFLANHTNILLASSI

SEQ ID NO: 93809 - protein, 96 aa, Homo sapiens
MGSDSWGSKIAPVLHLEEVAEGAVTILPKRMSVRGFDRYFSSRTLDNNRRNIWFAEFWEDNFHCKLSRHALKKGSHVKKCTNRERIGQDSAYEQEG

SEQ ID NO: 93810 - protein, 123 aa, Homo sapiens
MSKQDRNQRPSSMVSETSTAGTASTLEAKPGPKIIKSSSKVHSFGKRDQAIRRNPNVPVVVRGWLHKQDSSGMRLWKRRWFVLADYCLFYYKDSREEAVLGSIPLPSYVISPVAPEDRISRKY

SEQ ID NO: 93811 - protein, 598 aa, Homo sapiens
MVPRLLLRAWPRGPAVGPGAPSRPLSAGSGPGQYLQRSIVPTMHYQDSLPRLPIPKLEDTIRRYLSAQKPLLNDGQFRKTEQFCKSFENGIGKELHEQLVALDKQNKHTSYISGPWFDMYLSARDSVVLNFNPFMAFNPDPKSEYNDQLTRATNMTVSAIRFLKTLRAGLLEPEVFHLNPAKSDTITFKRLIRFVPSSLSWYGAYLVNAYPLDMSQYFRLFNSTRLPKPSRDELFTDDKARHLLVLRKGNFYIFDVLDQDGNIVSPSEIQAHLKYILSDSSPAPEFPLAYLTSENRDIWAELRQKLMSSGNEESLRKVDSAVFCLCLDDFPIKDLVHLSHNMLHGDGTNRWFDKSFNLIIAKDGSTAVHFEHSWGDGVAVLRFFNEVFKDSTQTPAVTPQSQPATTDSTVTVQKLNFELTDALKTGITAAKEKFDATMKTLTIDCVQFQRGGKEFLKKQKLSPDAVAQLAFQMAFLRQYGQTVATYESCSTAAFKHGRTETIRPASVYTKRCSEAFVREPSRHSAGELQQMMVECSKYHGQLTKEAAMGEAGVGSMPLGLVLSAWARALTDTCLLCGIWQQPKGSSCLSSTWTLHTGR

SEQ ID NO: 93812 - protein, 108 aa, Homo sapiens
EQHIASVREALGVESHYSRACASSETESEAGDIMDQQFEEMNNKLNSVTDPTGFLRMVRRNNLFNRDATRFAEAWDWAWTHVLALPTSQPVKAGDTYLHQVMQAVVIN

SEQ ID NO: 93813 - protein, 178 aa, Homo sapiens
MSGNRRQPSRRGQTREKEKMKEAKDARYTNGHLFTTISVSGMTMCYACNKSITAKEALICPTCNVTIHNRCKDTLANCTKVKQKQQKAALLKNNTALQSVSLRSKTTIRERPSSAIYPSDSFRQSLLGSRRGRSSLSLAKSVSTTNIAGHFNDESPLGLRRILSQSTDSLNMRNRTLS

SEQ ID NO: 93814 - protein, 58 aa, Homo sapiens
MSVGVSTSAPLSPTSGTSVGMSTFSIMDYVVFVLLLVLSLAIGLYHACRGWGRHTVGE

SEQ ID NO: 93815 - protein, 96 aa, Homo sapiens
MSPSGRLCLLTIVGLILPTRGQTLKDTTSSSSADSTIMDIQVPTRAPDAVYTELQPTSPTPTWPADGAYITAYGVTHFLMNMLAVSSFFCLHTAPQ

SEQ ID NO: 93816 - protein, 12 aa, Homo sapiens
MGSCCSCPDKDT

SEQ ID NO: 93817 - protein, 30 aa, Homo sapiens
MISLKVCGFIQIWSQKTGMTKLKEALIETV

SEQ ID NO: 93818 - protein, 128 aa, Homo sapiens
MLRKQAPPNTDWRFSQAQRPGTSGSQNGDDTGTWPNNQFDTEMLQAMILASASEAADGSSTLGGGAGTMGLSARYGPQFTLQHVPDYRQNVYIPGSNATLTNAAGKRDGKAPAGGNGNKKKSGKKEKK

SEQ ID NO: 93819 - protein, 158 aa, Homo sapiens
MAVQISKKRKFVADGIFKAELNEFLTRELAEDGYSGVEVRVTPTRTEIIILATRTQNVLGEKGRRIRELTAVVQKRFGFPEGSVELYAEKVATRGVLGIKVKIMLPWDPTGKIGPKKPLPDHVSIVEPKDEILPTTPISEQKGGKPEPPAMPQPVPTA

SEQ ID NO: 93820 - protein, 294 aa, Homo sapiens
MQFGTRTTTAEPGFMGTWQNADTNLLFRMSQQAIRCTLVNCTCECFQPGKINLRTCDQCKHGWVAHALDKLSTQHLYHPTQVEIVQSNVVFDISSLMLYGTQAVPVRLKILLDRLFSVLKQEEVLHILHGLGWTLRDYVRGYILQDAAGKVLDRWAIMSREEEIITLQQFLRFGETKSIVELMAIQEKEGQAVAVPSSKTDSDIRTFIESNNRTRSPSLLAHLENSNPSSIHHFENIPNSLAFLLPFQYINPVSAPLLGLPPNGLLLEQPGLRLREPSLSTQNEYNESSESEVS

SEQ ID NO: 93821 - protein, 336 aa, Homo sapiens
MQTLQTPSPLRMKPASSRVSGPQEAMLFHGISGGHIQGIMEEMERRSKTEARLAKGAQLNGRDAGMPPLSPEKPALCAGCGGKISDRYYLLAVDKQWHLRCLKCCECKLALESELTCFAKDGSIYCKEDYYRRFSVQRCARCHLGISASEMVMRARDSVYHLSCFTCSTCNKTLTTGDHFGMKDSLVYCRAHFETLLQGEYPPQLSYTELAAKSGGLALPYFNGTGTVQKGRPRKRKSPALGVDIVNYNSGCNENEADHLDRDQQPYPPSQKTKRMRTSFKHHQLRTMKSYFAINHNPDAKDLKQLAQKTGLTKRVLQGEQILGHYSQTSRRLKIP

SEQ ID NO: 93822 - protein, 33 aa, Homo sapiens
  MOD_RES (1)..(1): Any amino acid
XYADARLEVGSTQLRTAGSCSHSFKRSFLEMSI

SEQ ID NO: 93823 - protein, 505 aa, Homo sapiens
MSDVAIVKEGWLHKRGEYIKTWRPRYFLLKNDGTFIGYKERPQDVDQREAPLNNFSVAQCQLMKTERPRPNTFIIRCLQWTTVIERTFHVETPEEREEWTTAIQTVADGLKKQEEEEMDFRSGSPSDNSGAEEMEVSLAKPKHRVTMNEFEYLKLLGKGTFGKVILVKEKATGRYYAMKILKKEVIVAKDEVAHTLTENRVLQNSRHPFLTRGVGQRGAGLPSCLWGRSSSSPSLQALKYSFQTHDRLCFVMEYANGGELFFHLSRERVFSEDRARFYGAEIVSALDYLHSEKNVVYRDLKLENLMLDKDGHIKITDFGLCKEGIKDGATMKTFCGTPEYLAPEVLEDNDYGRAVDWWGLGVVMYEMMCGRLPFYNQDHEKLFELILMEEIRFPRTLGPEAKSLLSGLLKKDPKQRLGGGSEDAKEIMQHRFFAGIVWQHVYEKKLSPPFKPQVTSETDTRYFDEEFTAQMITITPPDQDDSMECVDSERRPHFPQFSYSASGTA

SEQ ID NO: 93824 - protein, 129 aa, Homo sapiens
MPHDVSHTEADDDRTLYNLIVIRNQQAKDSEEWQKLNYDIHTLRQVRREVRNRWKCILEDLGFQKEADSLLSVTKLSTISDSKNTRKAREMLLKLAEETNIFPTSWELSERYLFVVDRLIALDAAEEFF

SEQ ID NO: 93825 - protein, 157 aa, Homo sapiens
MMEGLDDGPDFLSEEDRGLKAINVDLQSDAALQVDISDALSERDKVKFTVHTKSSLPNFKQNEFSVVRQHEEFIWLHDSFVENEDYAGYIIPPAPPRPDFDASREKLQKLGEGEGSMTKEEFTKMKQELEAGWITENLGFILLLPPSSASFFFVFTE

SEQ ID NO: 93826 - protein, 148 aa, Homo sapiens
MDLNSASTVVLQVLTQATSQDTAVLKPAEEQLKQWETQPGFYSVLLNIFTNHTLDINVRWLAVLYFKHGIDRYWRRVAPHALSEEEKTTLRAGLITNFNEPINQIATQIAVLIAKVARLDCPRQWPELIPTLIESVKVQDDLRQHRAL

SEQ ID NO: 93827 - protein, 139 aa, Homo sapiens
MAKSLLKTASLSGRTKLLHQTGLSLYSTSHGFYEEEVKKTLQQFPGGSIDLQKEDNGIGILTLNNPSRMNAFSGVMMLQLLEKVIELENWTEGKGLIVRGAKNTFSSGSDLNAVKSLGTPEDGMAVCMFMQNTLTRFMR

SEQ ID NO: 93828 - protein, 105 aa, Homo sapiens
  MOD_RES (1)..(1): Any amino acid
XSKLDLVKDKIIQFIQEQLKYKSKFNFVKFDGQAVAWREQLAEVNEDNLEQAQSWIRDIKIGSSTNTLSALKTAFADKETQAIYLLTDGRPDQGTSSHLLLTAAV

SEQ ID NO: 93829 - protein, 919 aa, Homo sapiens
MVPWVRTMGQKLKQRLRLDVGREICRQYPLFCFLLLCLSAASLLLNRYIHILMIFWSFVAGVVTFYCSLGPDSLLPNIFFTIKYKPKQLGLQELFPQGHSCAVCGKVKCKRHRPSLLLENYQPWLDLKISSKVDASLSEVLELVLENFVYPWYRDVTDDESFVDELRITLRFFASVLIRRIHKVDIPSIITKKLLKAAMKHIEVIVKARQKVKNTEFLQQAALEEYGPELHVALRSRRDELHYLRKLTELLFPYILPPKATDCRSLTLLIREILSGSVFLPSLDFLADPDTVNHLLIIFIDDSPVLKLELKQIREQQDLLFRFMNFLKQEGAVHVLQFCLTVEEFNDRILRPELSNDEMLSLHEELQKIYKTYCLDESIDKIRFDPFIVEEIQRIAEGPYIDVVKLQTMRCLFEAYEHVLSLLENVFTPMFCHSDEYFRQLLRGAESPTRNSKLNRGSLSLDDFRNTQKRGESFGISRIGSKIKGVFKSTTMEGAMLPNYGVAEGEDDFIEEGIVVMEDDSPVEAVSTPNTPRNLAAWKISIPYVDFFEDPSSERKEKKERIPVFCIDVERNDRRAVGHEPEHWSVYRRYLEFYVLESKLTEFHGAFPDAQLPSKRIIGPKNYEFLKSKREEFQEYLQKLLQHPELSNSQLLADFLSPNGGETQFLDKILPDVNLGKIIKSVPGKLMKEKGQHLEPFIMNFINSCESPKPKPSRPELTILSPTSENNKKLFNDLFKNNANRAENTERKQNQNYFMEVMTVEGVYDYLMYVGRVVFQVPDWLHHLLMGTRILFKNTLEMYTDYYLQCKLEQLFQEHRLVSLITLLRDAIFCENTEPRSLQDKQKGAKQTFEEMMNYIPDLLVKCIGEETKYESIRLLFDGLQQPVLNKQLTYVLLDIVIQELFPELNKVQKEVTSVTSWM

SEQ ID NO: 93830 - protein, 127 aa, Homo sapiens
MKKFNFRKVLDGLTASSPGSGSSSGSNSGGGAGSGSVHPAGTAGVLREEIQETLTSEYFQICKTVRHGFPHQPTALAFDPVQKILAIGTRTGAIRILGRPGVDCYCQHESGAAVLQLQFLINEGALV

SEQ ID NO: 93831 - protein, 284 aa, Homo sapiens
MGVRHPPCSHRLLAVCALVSLATAALLGHILLHDFLLVPRELSGSSPVLEETHPAHQQGASRPGPRDAQAHPGRPRAVPTQCDVPPNSRFDCAPDKAITQEQCEARGCCYIPAKQGLQGAQMGQPWCFFPPSYPSYKLENLSSSEMGYTATLTRTTPTFFPKDILTLRLDVMMETENRLHFTIKDPANRRYEVPLETPHVHSRAPSPLYSVEFSEEPFGVIVRRQLDGRVLLNTTVAPLFFADQFLQLSTSLPSQYITGLAEHLSPLMLSTSWTRITLWNRDLA

SEQ ID NO: 93832 - protein, 297 aa, Homo sapiens
  MOD_RES (1)..(1): Any amino acid
XPPLASLQDSHFLTDADMVMSFVNLVEHDKEFFHPRYHHREFRFDLSKIPEGEAVTAAEFRIYKDYIRERFDNETFRISVYQVLQEHLGSTGTCCMPCLRASTRTNQTRVPALWKLTFQQRRGHGRESDLFLLDSRTLWASEEGWLVFDITATSNHWVVNPRHNLGLQLSVETLDGQSINPKLAGLIGRHGPQNKQPFMVAFFKATEVHFRSIRSTGSKQRSQNRSKTPKNQEALRMANVAENSSSDQRQACKKHELYVSFRDLGWQDWIIAPEGYAAYYCEGECAFPLNSYMNATN

SEQ ID NO: 93833 - protein, 137 aa, Homo sapiens
MSEPGVLCIVFDWRKSIPRCRRINRMLSNESLHPPAFSRSNSEASVDSASMEDFWREIESDEEEDGKALLSTLTRTQAAAVQKRYHTYTQTMRKKDKQSIRDVRDIFGVSESPPRDTCGNHTNQLDGTKEERELPRV

SEQ ID NO: 93834 - protein, 378 aa, Homo sapiens
  MOD_RES (1)..(1): Any amino acid
XDVPLFCLPMGATIECWDPETKYPLPVFSTFVLTGSSAKKVYGAAIQFYEPYSRELLSEKQLMHLGLLTPVERKMVSKSINTNKCICLLSHWPFFEAFRKFLMFIYKLSVSGPHPLPIEKHISHFMQNIPFPSPQRPRILVQLSVHDALILSQPVSTPLPLSGANFSTLLMNLGPENCATLLLFVLLESKILLHSLRPAVLTGVAEAVVAMIFPFQWQCPYIPLCPLSLAAVLSAPLPFIVGVDSRYFDLHDPPQDVVCIDLDTNMLYVSDEKKNMNWKQLPKKPCKNLLSTLKKLYPQLSSVHQKTQEGSAIDMTPIEADFSWQKKMTQLEMEIQEAFLRFMASILKGYRTYLRPITEAPSNKATAADSLFDRQVVS

SEQ ID NO: 93835 - protein, 99 aa, Homo sapiens
QQSHSSPGEITSSPQGLDNPALLRDMLLANPHELSLLKERNPPLAEALLSGDLEKFSRVLVEQQQDRARREQERIRLFSADPFDLEAQAKIEEDIRRTP

SEQ ID NO: 93836 - protein, 131 aa, Homo sapiens
  MOD_RES (1)..(1): Any amino acid
XREGRRGRRRKYSLGRASRAGGSAVQLQTVSGRALQVHMGSMSPPSAWPCVLDGPETRQDLCQPPKPCVHSHAHMEECLSAGLQCPHPHLLLVHSCFIPASGLGVPSQLPHPIWSSSPAPCGDLFVKSLGT

SEQ ID NO: 93837 - protein, 123 aa, Homo sapiens
MVDFAMDVYKNLYSDDIPHALREKRTTVVAQLKQLQAETEPIVKMFEDPETTRQMQSTRDGRMLFDYLADKHGFRQEYLDTLYRYAKFQYECGNYSGAAEYLYFFRVLMESCYVAQADLKLLA

SEQ ID NO: 93838 - protein, 96 aa, Homo sapiens
MPLVDFFCETCSKPWLVGWWDQFKRMLNRELTHLSEMSRSGNQVSEYISTTFLGSVHGPGDSRRPLRGCHPRCGSPWGLQPVPHQHQFGAGAHVQR

SEQ ID NO: 93839 - protein, 155 aa, Homo sapiens
MKGFIFLKAIGVQLRNMAQETNHSQVPMLCSTGCGFYGNPRTNGMCSVCYKEHLQRQNSSNGRISPPATSVSSLSESLPVQCTDGSVPEAQSALDSTSSSMQPSPVSNQSLLSESVASSQLDSTSVDKAVPETEDVQASVSDTAQQPSEEQSKSL

SEQ ID NO: 93840 - protein, 147 aa, Homo sapiens
  MOD_RES (1)..(1): Any amino acid
XYPLEPRTETYPDRGQCHLQFQLIHKRRATSASRSQPSYTVHLHLLQQLVSHEVTQHEAGSTSWDGSLSPQAATVLFLHATQKDLSDFHQSMAQWLAYSRLYQSLEFPSSCLLHPITSIEYQWIQGRLKAEQPGCSLFSGSWYRCAR

SEQ ID NO: 93841 - protein, 85 aa, Homo sapiens
LNVWDLSKIGEEQSAEDAEDGPPELLFIHGGHTAKISDFSWNPNEPWVICSVSEDNIMQIWQMAENIYNDEESDVTTSELEGQGS

SEQ ID NO: 93842 - protein, 110 aa, Homo sapiens
  MOD_RES (1)..(1): Any amino acid
XMSYVVTKTKAINGKYHRFLGRHFPRFYVLYTIFMKESLEPGHASHILPASSLVETSFEDSYNCDSPTGQGFGKAGDWPADCSGSKIEAELSLLLHNVVLLSTNYLGTRR

SEQ ID NO: 93843 - protein, 96 aa, Homo sapiens
MMVSLGHLAKGASLDDLIDSCIQSFDADGNLCRSNQLLQVMLTMHRIVISSAELLQKVITLYKDALAKNSPGLCLKICYFVRYWITEFWVMFKMDA

SEQ ID NO: 93844 - protein, 44 aa, Homo sapiens
MKQLPAATVRLLSSSQIITSVVSVVKELIENSLDAGATSVDVKL

SEQ ID NO: 93845 - protein, 205 aa, Homo sapiens
  MOD_RES (1)..(1): Any amino acid
XAAAAAAVAAGRARLGHPEPLASLMPTATHPTRSSQASCGPESSGSELALATPVPQMLQGLLGSDDEEQEDPKDYCKGGYHPVKIGDVFNGRYHVVRKLGWGHFSTVWLCWDIQRKRFVALKVVKSAGHYTETAVDEIKLLKCVRDSDPSDPKRETIVQLIDDFRISGVNGVHVCMVLEVLGHQLLKWIIKSNYQGLPVPCVKSI

SEQ ID NO: 93846 - protein, 74 aa, Homo sapiens
MKIIFPILSNPVFRRTVKLLLCLLWIGYSQGTTHVLRFDGVSLCRPVWSAVALCWLTTTSASWVQTILMPQLPK

SEQ ID NO: 93847 - protein, 80 aa, Homo sapiens
MARYEEVSVSGFEEFHRAVEQHNGKTIFAYFTGSKDAGGKSWCPDCVQAEPVVREGLKHISEGCVFIYCQVGEKPYLKNW

SEQ ID NO: 93848 - protein, 102 aa, Homo sapiens
RTLAFNVPGGVVAVGRLDSMVELWAWREGARLAAFPAHHGFVAAALFLHAGCQLLTAGEDGKMVIGWLLDIERMALGSTKSLQVPRGLRVRHWMWQCPPWPG

SEQ ID NO: 93849 - protein, 57 aa, Homo sapiens
MESRGPLATSRLLLLLLLLLLRHTRQGWALRPVLPTQVQERDRALSSCSLPFSPLAL

SEQ ID NO: 93850 - protein, 51 aa, Homo sapiens
TGSNLKSNHSDECTTVQPPQENQTSSIPSPATLPVSALKQPGVEVPAIGKS

SEQ ID NO: 93851 - protein, 101 aa, Homo sapiens
MSSTSSKRAPTTATQRLKQDYLRIKKDPVPYICAEPLPSNILEWFKRFSWLSLLSSWDYRHYVVRGPEMTPYEGGYYHGKLIFPREFPFKPPSIYMITPNG

SEQ ID NO: 93852 - protein, 132 aa, Homo sapiens
MALLTAAARLLGTKNASCLVLAARHASASSTNLKDILADLIPKEQARIKTFRQQHGKTVVGQITVDMGIRFRGFSIPECQKLLPKAKGGEEPLPEGLFWLLVTGHIPTEEQVSWLSKEWAKRAALPSHVVTM

SEQ ID NO: 93853 - protein, 219 aa, Homo sapiens
  MOD_RES (1)..(1): Any amino acid
XLGGGDSGDGTARAAGVLLVTQAGVQWRDLGSRQPPPPRFKRFSCLSLPSSWDYKHAPPRPASKCQMMEERANLMHMMKLSIKVLLQSALSLGRSLDADHAPLQQFFVVMEHCLKHGLKVKKSFIGQNKSFFGPLELVEKLCPEASDIATSVRNLPELKTAVGRGRAWLYLALMQKKLADYLKVLIDNKHLLSEFYEPEALMMEEEGMVIVGLLVGLNV

SEQ ID NO: 93854 - protein, 64 aa, Homo sapiens
MDCYRTSLSSSWIYPTVILCLFGFFSMMRPSEPFLIPYLSGPDKNLTSAEITNEIFPVWTYSYL

SEQ ID NO: 93855 - protein, 158 aa, Homo sapiens
MSAILDVNEQLHLLSSFLWLEMVWDNPFISWNPEECEGITKMSMAAKNLWLPDIFIIELMDVDKTPKGLTAYVSNEGRIRYKKPMKVDSICNLDIFYFPFDQQNCTLTFSSFLYTVDSMLLDMEKEVWEITDASRNILQTHGEWELLGLSKATAKLSR

SEQ ID NO: 93856 - protein, 127 aa, Homo sapiens
MKFTTLLFLAAVAGALVYAEDASSDSTGADPAQEAGTSKPNEEISGPAEPASPPETTTTAQETSAAAVQGTAKVTSSRQELNPLKQALAKAGKGMHGGVPGGKQFIENGSEFAQKLLKKFSLLKPWA

SEQ ID NO: 93857 - protein, 51 aa, Homo sapiens
MAGAGGGNDIQWCFSQVKGAVDDDVAEGKKAFNAKFGYIIFAEMFPTGGFP

SEQ ID NO: 93858 - protein, 77 aa, Homo sapiens
MAEERVATVSAEILFSCPAAGQGKLAGGFCPMQRFLERGGAGCRASQGGRGDTVPFLLSRELVAWGKSGYLAAQVLF

SEQ ID NO: 93859 - protein, 153 aa, Homo sapiens
  MOD_RES (1)..(1): Any amino acid
XIKASQILASRGAELFQATIVKAVKARIEEEKKSMDQLKRQMDRIKARQQKYKKGKERMLSLTQEPGEGQDMQKLSEEDDEREADKQKAKGKKKQWWRPWVDHASSRFSRSPYNLIDSNPYILDQNSGVPVTHVFHAWFDPCDLIGGRSVGKF

SEQ ID NO: 93860 - protein, 115 aa, Homo sapiens
MSVVGLDVGSQSCYIAVARAGGIETIANEFSDRCTPSVISFGSKNRTIGVAAKNQQITHANNTVSNFKRFHGRAFNDPFIQKEKENLSYDLVPLKNGGVGIKSPPSLQMLRGDLC

SEQ ID NO: 93861 - protein, 124 aa, Homo sapiens
MKEEAFLRRRFSLCPPSSTPQKVDPRKLTRNLLLSGDNELYPLSPGKDMEPNGPSLPRDEGPPTPSSATKVPPAEYRLCNGSDKECVSPTARVTKKETLKAQKENYRQEKKRATRQLLSALTDP

SEQ ID NO: 93862 - protein, 257 aa, Homo sapiens
MHRTTRIKITELNPHLMCALCGGYFIDATTIVECLHSFCKTCIVRYLETNKYCPMCDVQVHKTRPLLSIRSDKTLQDIVYKLVPGLFKDEMKRRRDFYAAYPLTEVPNGSNEDRGEVLEQEKGALSDDEIVSLSIEFYEGARQGPGREEGPPGEWGWGQRENRGALPAMPSSHDRHASCQVSPQQDGCAQQVQGGGSVRGRATEGILHPHGHRLHLPLAAERASPPQVPCPASLQAAHPSHGAHPLRGHQHQRGVRV

SEQ ID NO: 93863 - protein, 522 aa, Homo sapiens
MSNNGLDIQDKPPAPPMRNTSTMIGAGSKDAGTLNHGSKPLPPNPEEKKKKDRFYRSILPGDKTNKKKEKERPEISLPSDFEHTIHVGFDAVTGEFTGMPEQWARLLQTSNITKSEQKKNPQAVLDVLEFYNSKKTSNSQKYMSFTDKSAEDYNSSNALNVKAVSETPAVPPVSEDEDDDDDDATPPPVIAPRPEHTKSVYTRSVIEPLPVTPTRDVATSPISPTENNTTPPDALTRNTEKQKKKPKMSDEEILEKLRSIVSVGDPKKKYTRFEKIGQGASGTVYTAMDVATGQEVAIKQMNLQQQPKKELIINEILVMRENKNPNIVNYLDSYLVGDELWVVMEYLAGGSLTDVVTETCMDEGQIAAVCRECLQALEFLHSNQVIHRDIKSDNILLGMDGSVKLTDFGFCAQITPEQSKRSTMVGTPYWMAPEVVTRKAYGPKVDIWSLGIMAIEMIEGEPPYLNENPLRALYLIATNGTPELQNPEKLSAIFRDFLNRCLEMDVEKRGSAKELLQHSSRL

SEQ ID NO: 93864 - protein, 113 aa, Homo sapiens
MALWRAYQRALAAHPWKVQVLTAGSLMGLGDIISQQLVERRGLQEHQRGRTLTMVSLGCGFVDYPDALITNYYLWPAVQLANFYLVPLHYRLAVVQCVAVIWNSYLSWKAHRL

SEQ ID NO: 93865 - protein, 63 aa, Homo sapiens
MMWQKYAGSRRSMPLGARILFHGVFYAGGFAIVYYLIQSKYPASRLRPDLLLACSCSSIRGNT

SEQ ID NO: 93866 - protein, 702 aa, Homo sapiens
MFLGTGEPALDTGDDSLSAVTFDSDVETKAKRKAFHKPPPTSPKSPYLSKPRKVASWRSLRTAGSMPLGGRASLTPQKLWLGTAKPGSLTQALNSPLTWEHAWTGVPGGTPDCLTDTFRVKRPHLRRSASNGHVPGTPVYREKEDMYDEIIELKKSLHVQKSDVDLMRTKLRRLEEENSRKDRQIEQLLDPSRGTDFVRTLAEKRPDASWVINGLKQRILKLEQQCKEKDGTISKLQTDMKTTNLEEMRIAMETYYEEVHRLQTLLASSETTGKKPLGEKKTGAKRQKKMGSALLSLSRSVQELTEENQSLKEDLDRVLSTSPTISKTQGYVEWSKPRLLRRIVELEKKLSVMESSKSHAAEPVRSHPPACLASSSALHRQPRGDRNKDHERLRGAVRDLKEERTALQEQLLQRDLEVKQLLQAKADLEKELECAREGEEERREREEVLREEIQTLTSKLQELQEMKKEEKEDCPEVPHKAQELPAPTPSSRHCEQDWPPDSSEEGLPRPRSPCSDGRRDAAARVLQAQWKVYKHKKKKAVLDEAAVVLQAAFRGHLTRTKLLASKAHGSEPPSVPGLPDQSSPVPRVPSPIAQATGSPVQEEAIVIIQSALRAHLARARHSATGKRTTTAASTRRRSASATHGDASSPPFLAALPGNFIHLDSGTRAAGLLRSQPKSGHLQEARAVSGRKGGVSHLELPLN

SEQ ID NO: 93867 - protein, 464 aa, Homo sapiens
MLLLGLLLLPLLAGARLLWNWWKLRSLHLPPLAPGFLHLLQPDLPIYLLGLTQKFGPIYRLHLGLQDKLVSKNYPDLSLGDYSLLWKAHKKLTRSALLLGIRDSMEPVVEQLTQEFCERMRAQPGTPVAIEEEFSLLTCSIICYLTFGDKIKDDNLMPAYYKCIQEVLKTWSHWSIQIVDVIPFLRFFPNPGLRRLKQAIEKRDHIVEMQLRQHKESLVAGQWRDMMDYMLQGVAQPSMEEGSGQLLEGHVHMAAVDLLIGGTETTANTLSWAVVFLLHHPEIQQRLQEELDHELGPGASSSRVPYKDRARLPLLNATIAEVLRLRPVVPLALPHRTTRPSSISGYDIPEGTVIIPNLQGAHLDETVWERPHEFWPDRFLEPGKNSRALAFGCGARVCLGEPLARLELFVVLTRLLQAFTLLPSGDALPSLQPLPHCSVILKMQPFQVRLQPRGMGAHSPGQNQ

SEQ ID NO: 93868 - protein, 1041 aa, Homo sapiens
MAAMAPALTDAAAEAHHIRFKLAPPSSTLSPGSAENNGNANILIAANGTKRKAIAAEDPSLDFRNNPTKEDLGKLQPLVASYLCSDVTSVPSKESLKLQGVFSKQTVLKSHPLLSQSYELRAELLGRQPVLEFSLENLRTMNTSGQTALPQAPVNGLAKKLTKSSTHSDHDNSTSLNGGKRALTSSALHGGEMGGSESGDLKGGMTNCTLPHRSLDVEHTTLYSNNSTANKSSVNSMEQPALQGSSRLSPGTDSSSNLGGVKLEGKKSPLSSILFSALDSDTRITALLRRQADIESRARRLQKRLQVVQAKQVERHIQHQLGGFLEKTLSKLPNLESLRPRSQLMLTRKAEAALRKAASETTTSEGLSNFLKSNSISEELERFTASGIANLRCSEQAFDSDVTDSSSGGESDIEEEELTRADPEQRHVPLRRRSEWKWAADRAAIVSRWNWLQAHVSDLEYRIRQQTDIYKQIRANKGLIVLGEVPPPEHTTDLFLPLSSEVKTDHGTDKLIESVSQPLENHGAPIIGHISESLSTKSCGALRPVNGVINTLQPVLADHIPGDSSDAEEQLHKKQRLNLVSSSSDGTCVAARTRPVLSCKKRRLVRPNSIVPLSKKVHRNSTIRPGCDVNPSCALCGSGSINTMPPEIHYEAPLLERLSQLDSCVHPVLAFPDDVPTSLHFQSMLKSQWQNKPFDKIKPPKKLSLKHRAPMPGSLPDSARKDRHKLVSSFLTTAMLKHHTDMSSSSYLAATHHPPHSPLVRQLSTSSDSPAPASSSSQVTASTSQPVRRRRGESSFDINNIVIPMSVAATTRVEKLQYKEILTPSWREVDLQSLKGSPDEENEEIEDLSDAAFAALHAKCEEMERARWLWTTSVPPQRRGSRSYRSSDGRTTPQLGSANPSTPQPASPDVSSSHSLSEYSHGQSPRSPISPELHSAPLTPVARDTPRHLASEDTRCSTPELGLDEQSVQPWERRTFPLAHSPQAECEDQLDAQERAARCTRRTSGSKTGRETEAAPTSPPIVPLKSRHLVAAATAQRPTHR

SEQ ID NO: 93869 - protein, 250 aa, Homo sapiens
MSTAIREVGVWRQTRTLLLKNYLIKCRTKKSSVQEILFPLFFLFWLILISMMHPNKKYEEVPNIELNPMDKFTLSNLILGYTPVTNITSSIMQKVSTDHLPDVIITEEYTNEKEMLTSSLSKPSNFVGVVFKDSMSYELRFFPDMIPVSSIYMDSRAGCSKSCEAAQYWSSGFTVLQASIDAAIIQLKTNVSLWKELESTKAVIMGETAVVEIDTFPRGVILIYLVIAFSPFGYFLAIHIVAEKEKKIKE

SEQ ID NO: 93870 - protein, 181 aa, Homo sapiens
MENPQDIFSSNGGCLSDIVIEKYLVESKESVSHVQLACSMQDCAFPLDGTELCIWNTKDPSHQLLILRGHHQPITAMAFGNKVNPLLICSASLDYVIMWNLDECREKVLQGLVPRGTVMGSLLGKVLCLQLSLDDHVVAVCAGNKIFMLDIEHILFSVYSLMQKAGSWSPGVLTASFGSSV

SEQ ID NO: 93871 - protein, 291 aa, Homo sapiens
MSAEAADREAATSSRPCTPPQTCWFEFLLEESLLEKHLRKPCPDPAPVQLIVQFLEQASKPSVNEQNQVQPPPDNKRNRILKLLALKVAAHLKWDLDILEKSLSVPVLNMLLNELLCISKVPPGTKHVDMDLATLPPTTAMAVLLYNRWAIRTIVQSSFPVKQAKPGPPQLSVMNQMQQEKELTENILKVLKEQAADSILVLEAALKLNKDLYVHTMRTLDLLAMEPGMVNGETESSTAGLKVKTEEMQCQVCYDLGAAYFQQGSTNSAVYENAREKFFRTKELIAEMRSG

SEQ ID NO: 93872 - protein, 66 aa, Homo sapiens
MKTSVTTPSSSKSAGRWGAAHPRPRACYLSPSPPPLTSRTLSSPPSCPSCSLAMSRMLRTWTPCSG

SEQ ID NO: 93873 - protein, 69 aa, Homo sapiens
MMETERLVLPPPDPLDLPLRAVELGCTGHWELLNLPGAPESSIFLLFHLVSRKAWTLHQKIVQLQLLDY

SEQ ID NO: 93874 - protein, 180 aa, Homo sapiens
MWPLALVIASLTLALSGGVSQESSKVLNTNGTSGFLPGGYTCFPHSQPWQAALLVQGRLLCGGVLVHPKWVLTAAHCLKEGLKVYLGKHALGRVEAGEQVREVVHSIPHPEYRRSPTHLNHDHDIMLLELQSPVQLTGYIQTLPLSHNNRLTPGTTCRVSGWGTTTSPQGMHPHRWPEAP

SEQ ID NO: 93875 - protein, 122 aa, Homo sapiens
MAELQEVQITEEKPLLPGQTPEAAKTHSVETPYGSVTFTVYGTPKPKRPAILTYHDVGLNYKSCFQPLFQFEDMQEIIQNFVRVHVDAPGMEEGAPVFPLGYQYPSLDQLADMIPCVLQYLK

SEQ ID NO: 93876 - protein, 154 aa, Homo sapiens
MADKVRRQRPRRRVCWALVAVLLADLLALSDTLAVMSVDLGSESMKVAIVKPGVPMEIVLNKESRRKTPVIVTLKENERFFGDSAASMAIKNPKATLRYFQHLLGKQADNPHVALYQARFPEHELTFDPQRQTVHFQISSQLQFSPEEVLGMVL

SEQ ID NO: 93877 - protein, 117 aa, Homo sapiens
MALSQGLLTFRDVAIEFSQEEWKCLDPAQRTLYRDVMLENYRNLVSLGLISRDLCYLRKTPRRQRKGARDGSSSGILDFQRCGYRVLFAGVETPGPCTERFIQGCDVGELQEPGVCG

SEQ ID NO: 93878 - protein, 136 aa, Homo sapiens
MLVSSSSLTPFPPVRTADDTPPEDSIPLVFPELDQQLQPLPPCHDSEESMEVFKQHCQIAEEYHEVKKEITLLEQRKKELIAKLDQAEKEKVDAAELVREFEALTEENRTLRLAQSQCVEQLEKLRIQYQKRQGSS

SEQ ID NO: 93879 - protein, 394 aa, Homo sapiens
MKKMNHKSTDSPKAPQLRGGVFDIVFATNSTQVIKMILNSSTEDGIKRIQDDCPKAGRHNYIFVMIPTLYSIIFVVGIFGNSLVVIVIYFYMKLKTVASVFLLNLALADLCFLLTLPLWAVYTAMEYRWPFGNYLCKIASASVSFNLYASVFLLTCLSIDRYLAIVHPMKSRLRRTMLVAKVTCIIIWLLAGLASLPAIIHRNVFFIENTNITVCAFHYESQNSTLPIGLGLTKNILGFLFPFLIILTSYTLIWKALKKAYEIQKNKPRNDDIFKIIMAIVLFFFFSWIPHQIFTFLDVLIQLGIIRDCRIADIVDTAMPITICIAYFNNCLNPLFYGFLGKKFKRYFLQLLKYIPPKAKSHSNLSTKMSTLSYRPSDNVSSSTKKPAPCFEVE

SEQ ID NO: 93880 - protein, 164 aa, Homo sapiens
METRSPGLNNMKPQSLQLVLEEQVLALQQQMAENQAASWRKLKNSQEAQQRQATLVRKLQAKVLQYRSWCQELEKRLEATGGPIPQRWENVEEPNLDELLVRLEEEQQRCESLAEVNTQLRLHMEKADVVNKALREDVEKLTVDWSRARDELMRKESQWQMEQE

SEQ ID NO: 93881 - protein, 572 aa, Homo sapiens
MLKLLNQKKGPSQCPLCKNDITKRSLQESTRFSQLVEELLKIICAFQLDTGLEYANSYNFAKKENNSPEHLKDEVSIIQSMGYRNRAKRLLQSEPENPSLQETSLSVQLSNLGTVRTLRTKQRIQPQKTSVYIELGSDSSEDTVNKATYCSVGDQELLQITPQGTRDEISLDSAKKAACEFSETDVTNTEHHQPSNNDLNTTEKRAAERHPEKYQGEAASGCESETSVSEDCSGLSSQSDILTTQQRDTMQHNLIKLQQEMAELEAVLEQHGSQPSNSYPSIISDSSALEDLRNPEQSTSEKAVLTSQKSSEYPISQNPEGLSADKFEVSADSSTSKNKEPGVERSSPSKCPSLDDRWYMHSCSGSLQNRNYPSQEELIKVVDVEEQQLEESGPHDLTETSYLPRQDLEGTPYLESGISLFSDDPESDPSEDRAPESARVGNIPSSTSALKVPQLKVAESAQSPAAAHTTDTAGYNAMEESVSREKPELTASTERVNKRMSMVVSGLTPEEFMLVYKFARKHHITLTNLITEETTHVVMKTDAEFVCERTLKYFLGIAGGKWVVSYFWVTQS

SEQ ID NO: 93882 - protein, 58 aa, Homo sapiens
MPNSEPASLLELFNSIATQGELVRSLKAGNASKDEIDSAVKMLVSLKMSYKAAAGEDY

SEQ ID NO: 93883 - protein, 1356 aa, Homo sapiens
MLAVGPAMDRDYPQHEPPPAGSLLYSPPPLQSAMLHCPYWNTFSLPPYPAFSSDSRPFMSSASFLGSQPCPDTSYAPVATASSLPPKTCDFAQDSSYFEDFSNISIFSSSVDSLSDIVDTPDFLPADSLNQVSTIWDDNPAPSTHDKLFQLSRPFAGFEDFLPSHSTPLLVSYQEQSVQSQPEEEDEAEEEEAEELGHTETYADYVPSKSKIGKQHPDRVVETSTLSSVPPPDITYTLALPSDSGALSALQLEAITYACQQHEVLLPSGQRAGFLIGDGAGVGKGRTVAGVILENHLRGRKKALWFSVSNDLKYDAERDLRDIEATGIAVHALSKIKYGDTTTSEGVLFATYSALIGESQAGGQHRTRLRQILDWCGEAFEGVIVFDECHKAKNAGSTKMGKAVLDLQNKLPLARVVYASATGASEPRNMIYMSRLGIWGEGTPFRNFEEFLHAIEKRGVGAMEIVAMDMKVSGMYIARQLSFSGVTFRIEEIPLAPAFECVYNRAALLAADWIGLESRKSLWGQFWSAHQRFFKYLCIAAKVRRLVELAREELARDKCVVIGLQSTGEARTREVLGENDGHLNCFVSAAEGVFLSLIQKHFPSTKRKRDRGAGSKRKRRPRGRGAKAPRLACETAGVIRISDDSSTESDPGLDSDFNSSPESLVDDDVVIVDAVGLPSDDRGPLCLLQRDPHGPGVLERVERLKQDLLDKVRRLGRELPVNTLDELIDQLGGPQRVAEMTGRKGRVVSRPDGTVAFESRAEQGLSIDHVNLREKQRFMSGEKLVAIISEASSSGVSLQADRRVQNQRRRVHMTLELPWSADRAIQQFGRTHRSNQVSAPEYVFLISELAGERRFASIVAKRLESLGALTHGDRRATESRDLSKYNFENKYGTRALHCVLTTILSQTENKVPVPQGYPGGVPTFFRDMKQGLLSVGIGGRESRNGCLDVEKDCSITKFLNRILGLEVHKQNALFQYFSDTFDHLIEMDKREGKYDMGILDLAPGIEEIYEESQQVFLAPGHPQDGQVVFYKISVDRGLKWEDAFAKSLALTGPYDGFYLSYKVRGNKPSCLLAEQNRGQFFTVYKPNIGRQSQLEALDSLRRKFHRVTAEEAKEPWESGYALSLTHCSHSAWNRHCRLAQEGKDCLQGLRLRHHYMLCGALLRVWGRIAAVMADVSSSSYLQIVRLKTKDRKKQVGIKIPEGCVRRVLQELRLMDADVKRRQAPALGCPAPPAPRPLALPCGPGEVLDLTYSPPAEAFPPPPHFSFPAPLSLDAGPGVVPLGTPDAQADPAALAHQGCDINFKEVLEDMLRSLHAGPPSEGALGEGAGAGGAAGGGPERQSVIQFSPPFPGAQAPL

SEQ ID NO: 93884 - protein, 45 aa, Homo sapiens
MELELYGVDDKFYSKLDQEDALLGSYPVDDGCRIHKLAGRGGRCL

SEQ ID NO: 93885 - protein, 91 aa, Homo sapiens
MIVGKDREGFFTNGLTLGAKKCSVIRDSLYVDGDCTMDIRTKSQGGEPTYNVAVGRAGRVLVFVMGKEGVHGGGLNKKAYSMAKYLRDSGF

SEQ ID NO: 93886 - protein, 99 aa, Homo sapiens
METTNGTETWYESLHAVLKALNATLHSNLLCRPGPGLGPDNQTEERRASLPGRDDNSYMYILFVMFLFAVTVGSLILGYTRSRKVDKRSDPYHVYIKNR

SEQ ID NO: 93887 - protein, 959 aa, Homo sapiens
MSRRKQAKPQHLKSDEELLPPDGAPEHAAPGEGAEDADSGPESRSGGEETSVCEKCCAEFFKWADFLEHQRSCTKLPPVLIVHEDAPGLPSPLLPQTSASGVIFPNPLVSIAATANALDPLSALMKHRKGKPPNVSVFEPKASAEDPFFKHKCRFCAKVFGSDSALQIHLRSHTGERPFKCNICGNRFSTKGNLKVHFQRHKEKYPHIQMNPYPVPEYLDNVPTCSGIPYGMSLPPEKPVTTWLDSKPVLPTVPTSVGLQLPPAVPGAHGYADSPSATPASRSPQRPSPASSECASLSPGLNHVESGVSATAESPQSLLGGPPVTKAEPVSLPCTNARAGDAPVGAQASAAPTSVDGAPTSLGSPGLPAVSEQFKAQFPFGGLLDSMQTSETSKLQQLVENIDKKMTDPNQCVICHRVLSCQSALKMHYRTHTGERPFKCKICGRAFTTKGNLKTHFGVHRAKPPLRVQHSCPICQKKFTNAVVLQQHIRMHMGGQIPNTPLPEGFQDAMDSELAYDDKNAETLSSYDDDMDENSMEDDAELKDAATDPAKPLLSYAGSCPPSPPSVISSIAALENQMKMIDSVMSCQQLTGLKSVENGSGESDRLSNDSSSAVGDLESRSAGSPALSESSSSQALSPAPSNGESFRSKSPGLGAPEEPQEIPLKTERPDSPAAAPGSGGAPGRAGIKEEAPFSLLFLSRERGPSQSTPSLISSAAPTMIKMEVNGHGKAMALGEGPPLPAGVQVPAGPQTVMGPGLAPMLAPPPRRTPKQHNCQSCGKTFSSASALQIHERTHTGEKPFGCTICGRAFTTKGNLKVHMGTHMWNNAPARRGRRLSVENPMALLGGDALKFSEMFQKDLAARAMNVDPSFWNQYAAAITNGLAMKNNEISVIQNGGIPQLPVSLGGSALPPLGSMASGMDKARTGSSPPIVSLDKASSETAASRPFTRFIEDNKEIGIN

SEQ ID NO: 93888 - protein, 230 aa, Homo sapiens
MLVKHKETGNHYAMKILDKQKVVKLKQIEHTLNEKRILQAVNFPFLVKLEFSFKDNSNLYMVMEYVPGGEMFSHLRRIGRFSEPHARFYAAQIVLTFEYLHSLDLIYRDLKPENLLIDQQGYIQVTDFGFAKRVKGRTWTLCGTPEYLAPEIILSKGYNKAVDWWALGVLIYEMAAGYPPFFADQPIQIYEKIVSGKVRSGCGDTALEETDRSLLTHPIPWGALLVVRII

SEQ ID NO: 93889 - protein, 214 aa, Homo sapiens
MSDSKCDSQFYSVQVADSTFTVLKRYQQLKPIGSGAQGIVCAAFDTVLGINVAVKKLSRPFQNQTHAKRAYRELVLLKCVNHKNIISLLNVFTPQKTLEEFQDVYLVMELMDANLCQVIHMELDHERMSYLLYQMLCGIKHLHSAGIIHRDLKPSNIVVKSDCTLKILDFGLARTACTNFMMTPYVVTRYYRAPEVILGMGYKENAIKYWTLWH

SEQ ID NO: 93890 - protein, 756 aa, Homo sapiens
MWGRRRKLRRLNDVTISTCHASAKVGTRLMFDHNGKIIQKTPYPRPRGTTVSVQQLFSTLPVRHKEFQRNIKKEYAKMVQVLHAYCIISAGIRVSCTNQLGQGKRQPVVCTGGSPSIKENIGSVFGQKQLQSLIPFVQLPPSDSVCEEYGLSCSDALHNLFYISGFISQCTHGVGRSSTDRQFFFINRRPCDPAKVCRLVNEVYHMYNRHQYPFVVLNISVDSECVDINVTPDKRQILLQEEKLLLAVLKTSLIGMFDSDVNKLNVSQQPLLDVEGNLIKMHAADLEKPMVEKQDQSPSLRTGEEKKDVSISRLREAFSLRHTTENKPHSPKTPEPRRSPLGQKRGMLSSSTSGAISDKGVLRPQKEAVSSSHGPSDPTDRAEVEKDSGHGSTSVDSEGFSIPDTGSHCSSEYAASSPGDRGSQEHVDSQEKAPKTDDSFSDVDCHSNQEDTGCKFRVLPQPTNLATPNTKRFKKEEILSSSDICQKLVNTQDMSASQVDVAVKINKKVVPLDFSMSSLAKRIKQLHHEAQQSEGEQNYRKFRAKICPGENQAAEDELRKEISKTMFAEMEIIGQFNLGFIITKLNEDIFIVDQHATDEKYNFEMLQQHTVLQGQRLIAPQTLNLTAVNEAVLIENLEIFRKNGFDFVIDENAPVTERAKLISLPTSKNWTFGPQDVDELIFMLSDSPGVMCRPSRVKQMFASRACRKSVMIGTALNTSEMKKLITHMGEMDHPWNCPHGRPTMRHIANLGVISQN

SEQ ID NO: 93891 - protein, 194 aa, Homo sapiens
MDQMVSNMRNYMQKLERNFGQLSVDPNGHSFCSSSVMTYSKIGDEPPKVFQASTQTRRAPGGIKETRKAMRDSDSGLEKMAIGHHIHDRAHVIKKSKNKKTGDEEVNQEFINMNESDAHAFDEEWQSEVLKYKPGRHNLGNTRMRSVGHENPGSRELKRREKPQQSPAIEHGRRSNVLGDKLHIKGSSVKSNKK

SEQ ID NO: 93892 - protein, 197 aa, Homo sapiens
MFSEELWLENEKKCAVVRKSKQGRKRQELLAVAFGVKVGVKGGFLWPPLKLFACSQISSLVRRAALTHNDNHFNYEKTHNFKVHTFRGPHWCEYCANFMWGLIAQGVRCSDCGLNVHKQCSKHVPNDCQPDLKRIKKVYCCDLTTLVKAHNTQRPMVVDICIREIEARGLKSEGLYRVSGFTEHIEDVKMAFDRGLL

SEQ ID NO: 93893 - protein, 791 aa, Homo sapiens
MIRDRKYHLKTYRQCCVGTELVDWMMQQTPCVHSRTQAVGMWQVLLEDGVLNHVDQEHHFQDKYLFYRFLDDEHEDAPLPTEEEKKECDEELQDTMLLLSQMGPDAHMRMILRKPPGQRTVDDLEIIYEELLHIKALSHLSTTVKRELAGVLIFESHAKGGTVLFNQGEEGTSWYIILKGSVNVVIYGKGVVCTLHEGDDFGKLALVNDAPRAASIVLREDNCHFLRVDKEDFNRILRDVEANTVRLKEHDQDVLVLEKVPAGNRASNQGNSQPQQKYTVMSGTPEKILEHFLETIRLEATLNEATDSVLNDFIMMHCVFMPNTQLCPALVAHYHAQPSQGTEQEKMDYALNNKRRVIRLVLQWAAMYGDLLQEDDVSMAFLEEFYVSVSDDARMIAALKEQLPELEKIVKQISEDAKAPQKKHKVLLQQFNTGDERAQKRQPIRGSDEVLFKVYCMDHTYTTIRVPVATSVKEVISAVADKLGSGEGLIIVKMSSGGEKVVLKPNDVSVFTTLTINGRLFACPREQFDSLTPLPEQEGPTVGTVGTFELMSSKDLAYQMTIYDWELFNCVHELELIYHTFGRHNFKKTTANLDLFLRRFNEIQFWVVTEICLCSQLSKRVQLLKKFIKIAAHCKEYKNLNSFFAIVMGLSNVAVSRLALTWEKLPSKFKKFYAEFESLMDPSRNHRAYRLTVAKLEPPLIPFMPLLIKDMTFTHEGNKTFIDNLVNFEKMRMIANTARTVRYYRSQPFNPDAAQANKNHQDVRSYVRQLNVIDNQRTLSQMSHRLEPRRP

SEQ ID NO: 93894 - protein, 25 aa, Homo sapiens
MAHEMIGTQIVTERLVALLESGTEK

SEQ ID NO: 93895 - protein, 80 aa, Homo sapiens
MSVTLTSVKRVQSSPNLLAAGRDSQSPDSAWRSYNDGNQETLNGDATYSSLAAKGFRSVRPNLQDKRSPTQSQITVNGNS

SEQ ID NO: 93896 - protein, 42 aa, Homo sapiens
MALELYMDLLSAPCRAVYIFSKKHDIQFNFQFVDLLKGSLLR

SEQ ID NO: 93897 - protein, 721 aa, Homo sapiens
MAGALAGLAAGLQVPRVAPSPDSDSDTDSEDPSLRRSAGGLLRSQVIHSGHFMVSSPHSDSLPRRRDQEGSVGPSDFGPRSIDPTLTRLFECLSLAYSGKLVSPKWKNFKGLKLLCRDKIRLNNAIWRAWYIQYVKRRKSPVCGFVTPLQGPEADAHRKPEAVVLEGNYWKRRIELPPEDAYVGNADMIQPDLTPLQPSLDDFMDISDFFTNSRLPQPPMPSNFPEPPSFSPVVDSLFSSGTLGPEVPPASSAMTHLSGHSRLQARNSCPGPLDSSAFLSSDFLLPEDPKPRLPPPPVPPPLLHYPPPAKVPGLEPCPPPPFPPMAPPTALLQEEPLFSPRFPFPTVPPAPGVSPLPAPAAFPPTPQSVPSPAPTPFPIELLPLGYSEPAFGPCFSMPRGKPPAPSPRGQKASPPTLAPATASPPTTAGSNNPCLTQLLTAAKPEQALEPPLVSSTLLRSPGSPETVPEFPCTFLPPTPAPTPPRPPPGPATLAPSRPLLVPKAERLSPPAPSGSERRLSGDLSSMPGPGTLSVRVSPPQPILSRGRPDSNKTENRRITHISAEQKRRFNIKLGFDTLHGLVSTLSAQPSLKVSKATTLQKTAEYILMLQQERAGLQEEAQQLRDEIEELNAAINLCQQQLPATGVPITHQRFDQMRDMFDDYVRTRTLHNWKFWVFSILIRPLFESFNGMVSTASVHTLRQTSLAWLDQYCSLPALRPST

SEQ ID NO: 93898 - protein, 102 aa, Homo sapiens
MSDSEDSNFSEEEDSERSSDGEEAEVDEERRSAAGSEKEEEPEDEEEEEEEEEYDEEEEEEDDDRPPKKPRHGGFILDEADVDDEYEDEDQWEDGAEDILEK

SEQ ID NO: 93899 - protein, 55 aa, Homo sapiens
MREIVHIQAGQCGNQIGAKFWEVISDEHGIDPSGNYVGDSDLQLERISVYYNEAS

SEQ ID NO: 93900 - protein, 20 aa, Homo sapiens
MASALEQFVNSVRQLSAQGL

SEQ ID NO: 93901 - protein, 184 aa, Homo sapiens
MTALRLLQRMKRDWMHTGRRPSGLCGAALLVAARMHDFRRTVKEVISVVKVCESTLRKRLTEFEDTPTSQLTIDEFMKIDLEEECDPPSYTAGQRKLRMKQLEQVLSKKLEEVEGEISSYQDAIEIELENSPPSRREGRRRPESLPRPLRGKAPVPLVGGLSSGMAAPDVAEGASPCVLRRGWP

SEQ ID NO: 93902 - protein, 203 aa, Homo sapiens
MELAAGSFSEEQFWEACAELQQPALAGADWQLLVETSGISIYRLLDKKTGLYEYKVFGVLEDCSPTLLADIYMDSDYRKQWDQYVKELYEQECNGETVVYWEVKYPFPMSNRDYVYLRQRRDLDMEGRKIHVILARSTSMPQLGERSGVIRVKQYKQSLAIESDGKKGSKVFMYYFDNPGGQIPSWLINWAAKGGNCSGSLYH

SEQ ID NO: 93903 - protein, 205 aa, Homo sapiens
MTPPRLFWVWLLVAGTQGVNDGDMRLADGGATNQGRVEIFYRGQWGTVCDNLWDLTDASVVCRALGFENATQALGRAAFGQGSGPIMLDEVQCTGTEASLADCKSLGWLKSNCRHERDAGVVCTNGTSTPEGLTSPCRQSSASTSWPLPMGPGSCRATAQASLPSSSPRTPRSRCPWTCMPMQWPQGTPCWRSSAYSSWPGTSRP

SEQ ID NO: 93904 - protein, 73 aa, Homo sapiens
MAARVGAFLKNAWDKEPVLVVSFVVGGLAVILPPLSPYFKYSVMINKATPYNYPGEWGPGRDPRNRPSLPVLA

SEQ ID NO: 93905 - protein, 134 aa, Homo sapiens
MPEEIELEMAKIQRLREVLVRRESELRFMMDDIQLCKDIMDLKQELQNLVAIPEKEKTKLQKQREDELIQKIHKLVQKRDFLVDDAEVERLREQEEDKEMADFLRIKLKPLDKVTKSPASLESLEKPEAYVSEY

SEQ ID NO: 93906 - protein, 78 aa, Homo sapiens
MERLVADKLIFHNSCFCCKHCHTKLSLGSYAALHGEFYCKPHFQQLFKSKGNYDEGFGRKQHKELWAHKEVDPGTKTA

SEQ ID NO: 93907 - protein, 277 aa, Homo sapiens
MELQAQRRPWRTQLGSMGSAFERVVRRVVQELDHGGEFIPVTSLQSSTGFQPYCLVVRKPSSSWFWKPRYKCVNLSIKDILEPDAAEPDVQRGRSFHFYDAMDGQIQGSVELAAPGQAKIAGGAAVSDSSSTSMNVYSLSVDPNTWQTLLHERHLRQPEHKVLQQLRSRGDNVYVVTEVLQTQKEVEVTRTHKREGSGRFSLPGATCLQGEGQGHLSQKKTVTIPSGSTLAFRVAQLVIDSDLDVLLFPDKKQRTFQPPATGHKRSTSEGAWPQLPS

SEQ ID NO: 93908 - protein, 604 aa, Homo sapiens
MASNPERGEILLTELQGDSRSLPFSENVSAVQKLDFSDTMVQQKLDDIKDRIKREIRKELKIKEGAENLRKVTTDKKSLAYVDNILKKSNKKLEELHHKLQELNAHIVVSDPEDITDCPRTPDTPNNDPRCSTSNNRLKALQKQLDIELKVKQGAENMIQMYSNGSSKDRKLHGTAQQLLQDSKTKIEVIRMQILQAVQTNELAFDNAKPVISPLELRMEELRHHFRIEFAVAEGAKNVMKLLGSGKVTDRKALSEAQARFNESSQKLDLLKYSLEQRLNEVPKNHPKSRIIIEELSLVAASPTLSPRQSMISTQNQYSTLSKPAALTGTLEVRLMGCQDILENVPGRSKATSVALPGWSPSETRSSFMSRTSKSKSGSSRNLLKTDDLSNDVCAVLKLDNTVVGQTSWKPISNQSWDQKFTLELDRSRELEISVYWRDWRSLCAVKFLRLEDFLDNQRHGMCLYLEPQGTLFAEVTFFNPVIERRPKLQRQKKIFSKQQGKTFLRAPQMNINIATWGRLVRRAIPTVNHSGTFSPQAPVPTTVPVVDVRIPQLAPPARYVSEILSISYTKLLGHSYVLIIAGVLSLAFFPSSILKVVFCLLKK

SEQ ID NO: 93909 - protein, 2875 aa, Homo sapiens
MGNENSTSDNQRTLSAQTPRSAQPPGNSQNIKRKQQDTPGSPDHRDASSIGSVGLGGFCTASESSASLDPCLVSPEVTEPRKDPQGARGPEGSLLPSPPPSQEREHPSSSMPFAECPPEGCLASPAAAPEDGPQTQSPRREPAPNAPGDIAAAFPAERDSSTPYQEIAAVPSAGRERQPKEEGQKSSFSFSSGIDQSPGMSPVPLREPMKAPLCGEGDQPGGFESQEKEAAGGFPPAESRQGVASVQVTPEAPAAAQQGTESSAVLEKSPLKPMAPIPQDPAPRASDRERGQGEAPPQYLTDDLEFLRACHLPRSNSGAAPEAEVNAASQESCQQPVGAYLPHAELPWGLPSPALVPEAGGSGKEALDTIDVQGHPQTGMRGTKPNQVVCVAAGGQPEGGLPVSPEPSLLTPTEEAHPASSLASFPAAQIPIAVEEPGSSSRESVSKAGMPVSADAAKEVVDAGLVGLERQVSDLGSKGEHPEGDPGEVPAPSPQERGEHLNTEQSHEVQPGVPPPPLPKEQSHEVQPGAPPPPLPKAPSESARGPPGPTDGAKVHEDSTSPAVAKEGSRSPGDSPGGKEEAPEPPDGGDPGNLQGEDSQAFSSKRDPEVGKDELSKPSSDAESRDHPSSHSAQPPRKGGAGHTDGPHSQTAEADASGLPHKLGEEDPVLPPVPDGAGEPTVPEGAIWEGSGLQPKCPDTLQSREGLGRMESFLTLESEKSDFPPTPVAEVAPKAQEGESTLEIRKMGSCDGEGLLTSPDQPRGPACDASRQEFHAGVPHPPQGENLAADLGLTALILDQDQQGIPSCPGEGWIRGAASEWPLLSSEKHLQPSQAQPETSIFDVLKEQAQPPENGKETSPSHPGFKDQGADSSQIHVPVEPQEDNNLPTHGGQEQALGSELQSQLPKGTLSDTPTSSPTDMVWESSLTEESELSAPTRQKLPALGEKRPEGACGDGQSSRVSPPAADVLKDFSLAGNFSRKETCCTGQGPNKSQQALADALEEGSQHEEACQRHPGASEAADGCSPLWGLSKREMASGNTGEAPPCQPDSVALLDAVPCLPALAPASPGVTPTQDAPETEACDETQEGRQQPVPAPQQKMECWATSDAESPKLLASFPSAGEQGGEAGAAETGGSAGAGDPGKQQAPEKPGEATLSCGLLQTEHCLTSGEEASTSALRESCQAEHPMASCQDALLPARELGGIPRSTMDFSTHQAVPDPKELLLSGPPEVAAPDTPYLHVDSAAQRGAEDSGVKAVSSADPRAPGESPCPVGEPPLALENAASLKLFAGSLAPLLQPGAAGGEIPAVQASSGSPKARTTEGPVDSMPCLDRMPLLAKGKQATGEEKAATAPGAGAKASGEGMAGDAAGETEGSMERMGEPSQDPKQGTSGGVDTSSEQIATLTGFPDFREHIAKIFEKPVLGALATPGEKAGAGRSAVGKDLTRPLGPEKLLDGPPGVDVTLLPAPPARLQVEKKQQLAGEAEISHLALQDPASDKLLGPAGLTWERNLPGAGVGKEMAGVPPTLREDERPEGPGAAWPGLEGQAYSQLERSRQELASGLPSPAATQELPVERAAAFQVAPHSHGEEAVAQDRIPSGKQHQETSACDSPHGEDGPGDFAHTGVPGHVPRSTCAPSPQREVLTVPEANSEPWTLDTLGGERRPGVTAGILEMRNALGNQSTPAPPTGEVADTPLEPGKVAGAAGEAEGDITLSTAETQACASGDLPEAGTTRTFSVVAGDLVLPGSCQDPACSDKAPGMEGTAALHGDSPARPQQAKEQPGPERPIPAGDGKVCVSSPPEPDETHDPKLQHLAPEELHTDRESPRPGPSMLPSVPKKDAPRVMDKVTSDETRGAEGTERSAKDIGLWKAMMPSLDTDTLDVLERRVVLIQHEFLHKKEANGHSRFMYSSPVADDIIQPAAPADLESPTLAASSYHGDVVGQVSTDLIAQRSSDSEEAFETPESTTPVKAPPAPPPPPPEVIPEPEVSTQPPPEEPGCGSETVPVPDGPRSDSVEGSPFRPPSHSFSAVFDEDKPIASSGTYNLDFDNIELVDTFQTLEPRASDAKNQEGKVNTRRKSTDSVPISKSTLSRSLSLQASDFDGASSSGNPEAVALAPDAYSTGSSSASSTLKRTKKPRPPSLKKKQTTKKPTETPPVKETQQEPDEESLVPSGENLASETKTESAKTEGPSPALLEETPLEPAVGPKAACPLDSESAEGVVPPASGGGRVQNSPPVGRKTLPLTTAPEAGEVTPSDSGGQEDSPAKGLSVRLEFDYSEDKSSWDNQQENPPPTKKIGKKPVAKMPLRRPKMKKTPEKLDNTPASPPRSPAEPNDIPIAKGTYTFDIDKWDDPNFNPFSSTSKMQESPKLPQQSYNFDPDTCDESVDPFKTSSKTPSSPSKSPASFEIPASAMEANGVDGDGLNKPAKKKKTPLKTDTFRVKKSPKRSPLSDPPSQDPTPAATPETPPVISAVVHATDEEKLAVTNQKWTCMTVDLEADKQDYPQPSDLSTFVNETKFSSPTEELDYRNSYEIEYMEKIGSSLPQDDDAPKKQALYLMFDTSQESPVKSSPVRMSESPTPCSGSSFEETEALVNTAAKNQHPVPRGLAPNQESHLQVPEKSSQKELEAMGLGTPSEAIEIREAAHPTDVSISKTALYSRIGTAEVEKPAGLLFQQPDLDSALQIARAEIITKEREVSEWKDKYEESRREVMEMRKIVAEYEKTIAQMIEDEQREKSVSHQTVQQLVLEKEQALADLNSVEKSLADLFRRYEKMKEVLEGFRKNEEVLKRCAQEYLSRVKKEEQRYQALKVHAEEKLDRANAEIAQVRGKAQQEQAAHQASLRKEQLRVDALERTLEQKNKEIEELTKICDELIAKMGKS

SEQ ID NO: 93910 - protein, 782 aa, Homo sapiens
MLENYWNLVSLGLCHFDMNIISMLEEGKEPWTVKSCVKIARKPRTPECVKGVVTDIPPKCTIKDLLPKEKSSTEAVFHTVVLERHESPDIEDFSFKEPQKNVHDFECQWRDDTGNYKGVLMAQKEGKRDQRDRRDIENKLMNNQLGVSFHSHLPELQLFQGEGKMYECNQVEKSTNNGSSVSPLQQIPSSVQTHRSKKYHELNHFSLLTQRRKANSCGKPYKCNECGKAFTQNSNLTSHRRIHSGEKPYKCSECGKTFTVRSNLTIHQVIHTGEKPYKCHECGKVFRHNSYLATHRRIHTGEKPYKCNECGKAFRGHSNLTTHQLIHTGEKPFKCNECGKLFTQNSHLISHWRIHTGEKPYKCNECGKAFSVRSSLAIHQTIHTGEKPYKCNECGKVFRYNSYLGRHRRVHTGEKPYKCNECGKAFSMHSNLATHQVIHTGTKPFKCNECSKVFTQNSQLANHRRIHTGEKPYKCNECGKAFSVRSSLTTHQAIHSGEKPYKCIECGKSFTQKSHLRSHRGIHSGEKPYKCNECGKVFAQTSQLARHWRVHTGEKPYKCNDCGRAFSDRSSLTFHQAIHTGEKPYKCHECGKVFRHNSYLATHRRIHTGEKPYKCNECGKAFSMHSNLTTHKVIHTGEKPYKCNQCGKVFTQNSHLANHQRTHTGEKPYRCNECGKAFSVRSSLTTHQAIHTGKKPYKCNECGKVFTQNAHLANHRRIHTGEKPYRCTECGKAFRVRSSLTTHMAIHTGEKRYKCNECGKVFRQSSNLASHHRMHTGEKPYK

SEQ ID NO: 93911 - protein, 479 aa, Homo sapiens
METENAAAAAAAAFTASSQLKEAVLVKMAEEGENLEAEIVYPITCGDSRANLIWRKFVCPGINVKCVQYDEHVISPKEFVHLAGKSTLKDWKRAIRMNGIMLRKIMDSGELDFYQHDKVCSNTCRSTKIDLSGARVSLSSPTSAEYIPLTPAAADVNGSPATITIETCEDPGDWTAAIGDDTFTFWRGLKDAGLLDEVIQEFHQELVETMRGLQQRVQDPPLQLRDAVLLNNIVQNFGMLDLVKKVLASHKCQMDRSREQYARDLAALEQQCDEHRRRAKELKHKSQHLSNVLMTLTPVSLPPPVKRPRLARATSGPAAMASQVLTQSAQLALGPGVPVPQLTSVPLGKVVSTLPSTVLGKGSLQAPPASSPASPLLGGYTVLASSGSTYPSTVEIHPDASSLTVLSTAAVQDGSTVFKVVSPLQLLTLPGLGPTLQNVAQASPGSSTIVTVPAGAAPGPEEHTATIEVAAMAEDHERK

SEQ ID NO: 93912 - protein, 184 aa, Homo sapiens
MFRKGKKRHSSSSSQSSEISTKSKSVDSSLGGLSRSSTVASLDTDSTKSSGQSNNNSDTCAEFRIKYVGAIEKLKLSEGKGLEGPLDLINYIDVAQQDGKLPFVPPEEEFIMGVSKYGIKVSTSDQYDVLHRHALYLIIRMVCYDDGLGAGKSLLALKTTDASNEEYSLWVYQCNSLVRLRYFG

SEQ ID NO: 93913 - protein, 104 aa, Homo sapiens
MATVAELKAVLKDTLEKKGVLGHLKARIRAEVFNALDDDREPRPSLSHENLLINELIREYLEFNKYKYTASVLIAESGQPVVPLDRQFLIHELNAFEESKDNTI

SEQ ID NO: 93914 - protein, 77 aa, Homo sapiens
MSNNGADLTFGYISCFVAILLFGSNFVPLKKFDTGDGMFLQWVLCAAIWLVALVVNLILHCPKFWPFAMLGGCIWAT

SEQ ID NO: 93915 - protein, 47 aa, Homo sapiens
MAAASAVSVLLVAAERNRWHRLPSLLLPPRTWVWRQRTMKYTTATGR

SEQ ID NO: 93916 - protein, 63 aa, Homo sapiens
MLSVVENGLDPQAAIPTHHLRVGAPDVCQHGCGPLPGMAAAGPERWPDGVLPEAAAAGAGPLA

SEQ ID NO: 93917 - protein, 651 aa, Homo sapiens
MEERGSPDGDLARSLEQGPEGPETPIQVVLRVRPMSAAELRRGQQSVLHCSGTRTLQVSPPGGGPEVAFRFGAVLDAARTQEDVFRACGVRRLGELALRGFSCTVFTFGQTGSGKTYTLTGPPPQGEGVPVPPSLAGIMQRTFAWLLDRVQHLGAPVTLRASYLEIYNEQVRDLLSLGSPRPLPVRWNKTRGFYVEQLRVVEFGSLEALMELLQTGLSRRRNSAHTLNQASSRSHALLTLYISRQTAQQMPSVDPGEPPVGGKLCFVDLAGSEKVAATGSRGELMLEANSINRSLLALGHCISLLLDPQRKQSHIPFRDSKLTKLLADSLGGRGVTLMVACVSPSAQCLPETLSTLRYASRAQRVTTRPQAPKSPVAKQPQRLETEMLQLQEENRRLQFQLDQMDCKASGLSGARVAWAQRNLYGMLQEFMLENERLRKEKSQLQNSRDLAQNEQRILAQQVHALERRLLSACYHHQQGPGLTPPCPCLMAPAPPCHALPPLYSCPCCHICPLCRVPLAHWACLPGEHHLPQVLDPEASGGRPPSARPPPWAPPCSPGSAKCPRERSHSDWTQTRVLAEMLTEEEVVPSAPPLPVRPPKTSPGLRGGAGVPNLAQRLEALRDQIGSSLRRGRSQPPCSEGARSPGQVLPPH

SEQ ID NO: 93918 - protein, 173 aa, Homo sapiens
MDAEFVCERTLKYFLGIAGGKWVVSYFWVTQSIKERKMLNEHDFEVRGDVVNGRNHQGPKRARESQDRKIFRGLEICCYGPFTNMPTDQLEWMVQLCGASVVKELSSFTLGTGVHPIVVVQPDAWTEDNGFHAIGQMCEAPVVTREWVLDSVALYQCQELDTYLIPQIPHSHY

SEQ ID NO: 93919 - protein, 291 aa, Homo sapiens
MPGKLLPEKCALMWLHLGTRAPQRPKRESRGFPGWGCRTGQALPCRARPPAPAPSHPSSSLSLTPGPGSPRQTGPPCQTVAALYGLGAWQSHCGGGVGCHGQGRQPLGCQGWWSTLNPYLLESPGLFHTRSCGKLWDPKAVLISGVTSSHSSLGSPGTRPGVSLCKELPGCWAELCCRPRKMTKKDRAEPHLPLLGGPEGARAQQSPILHSLGSKRLPRCGWQLLTSSGGAAGGLCPMGHRREKDGGRVCTLGRTGGRHRPEQVAWAHEKGVSETGCLSQMPGVDEADEWQ

SEQ ID NO: 93920 - protein, 354 aa, Homo sapiens
MAPAAWLRSAAARALLPPMLLLLLQPPPLLARALPPDAHHLHAERRGPQPWHAALPSSPAPAPATQEAPRPASSLRPPRCGVPDPSDGLSARNRQKRILRFPWQLVQEQVRQTMAEALKVWSDVTPLTFTEVHEGRADIMIDFARYWHGDDLPFDGPGGILAHAFFPKTHREGDVHFDYDETWTIGDDQGTDLLQVAAHEFGHVLGLQHTTAAKALMSAFYTFRYPLSLSPDDCRGVQHLYGQPWPTVTSRTPALGPQAGIDTNEIAPLEPDAPPDACEASFDAVSTIRGELFFFKAGFVWRLRGGQLQPGYPALASRHWQGLPSPVDAAFEDAQGHIWFFQGTTGVSTPAPGV

SEQ ID NO: 93921 - protein, 104 aa, Homo sapiens
MKSRLTYNQINDVIKEINKAVISKYKILHQPKKSMNSVTRNLYHRFIDEETKDTKGRYFIVEADIKEFTTLKADKKFHVLLNILRHCRRLSEVRGGGLTRYVIT

SEQ ID NO: 93922 - protein, 351 aa, Homo sapiens
MRQTLPCIYFWGGLLPFGMLCASSTTKCTVSHEVADCSHLKLTQVPDDLPTNITVLNLTHNQLRRLPAANFTRYSQLTSLDVGFNTISKLEPELCQKLPMLKVLNLQHNELSQLSDKTFAFCTNLTELHLMSNSIQKIKNNPFVKQKNLITLDLSHNGLSSTKLGTQVQLENLQELLLSNNKIQALKSEELDIFANSSLKKLELSSNQIKEFSPGCFHAIGRLFGLFLNNVQLGPSLTEKLCLELANTSIRNLSLSNSQLSTTSNTTFLGLKWTNLTMLDLSYNNLNVWLKCLEHLNMEDNDIPGIKSNMFTGLINLKYLSLSNSFTSLRTLTNETFVSLAHSPLHILNLT

SEQ ID NO: 93923 - protein, 156 aa, Homo sapiens
MAAAGEGTPSSRGPRRDPPRRPPRNGHGKLLFKDGSYYEGAFVDGEITGEGRRHWAWSGDTFSGQFVLGEPQGYGVMEYKAGGCYEGEVSHGMREGHGFLVDRDGQVYQGSFHDNKRHGPGQMLFQNGDKYDGDWVRDRRQGHGVLRCADGSTYKL

SEQ ID NO: 93924 - protein, 503 aa, Homo sapiens
MDLVGVASPEPGTAAAWGPSKCPWAIPQNTISCSLADVMSEQLAKELQLEEEAAVFPEVADLMLAQMLQMEYDREYDAQLRREEKKFNGDSKVSISFENYRKVHPYEDSDSSEDEVDWQDTRDDPYRPAKPVPTPKKGFIGKGKDITTKHDEVVCGRKNTARMENFAPEFQVGDGIGMDLKLSNHVFNALKQHAYSEERRSARLHEKKEHSTAEKAVDPKTRLLMYKMVNSGMLETITGCISTGKESVVFHAYGGSMEDEKEDSKVIPTECAIKVFKTTLNEFKNRDKYIKDDFRFKDRFSKLNPRKIIRMWAEKEMHNLARMQRAGIPCPTVVLLKKHILVMSFIGHDQVPAPKLKEVKLNSEEMKEAYYQTLHLMRQLYHECTLVHADLSEYNMLWHAGKVWLIDVSQSVEPTHPHGLEFLFRDCRNVSQFFQKGGVKEALSERELFNAVSGLNITADNEADFLAEIEALEKMNEDHVQKNGRKAASFLKDDGDPPLLYDE

SEQ ID NO: 93925 - protein, 576 aa, Homo sapiens
MMTPQVITPQQMQQILQQQVLSPQQLQVLLQQQQALMLQQQLQEFYKKQQEQLQLQLLQQQHAGKQPKEQQQVATQQLAFQQQLLQMQQLQQQHLLSLQRQGLLTIQPGQPALPLQPLAQGMIPTELQQLWKEVTSAHTAEETTGNNHSSLDLTTTCVSSSAPSKTSLIMNPHASTNGQLSVHTPKRESLSHEEHPHSHPLYGHGVCKWPGCEAVCEDFQSFLKHLNSEHALDDRSTAQCRVQMQVVQQLELQLAKDKERLQAMMTHLHVKSTEPKAAPQPLNLVSSVTLSKSASEASPQSLPHTPTTPTAPLTPVTQGPSVITTTSMHTVGPIRRRYSDKYNVPISSADIAQNQEFYKNAEVRPPFTYASLIRQAILESPEKQLTLNEIYNWFTRMFAYFRRNAATWKNAVRHNLSLHKCFVRVENVKGAVWTVDEVEFQKRRPQKISGNPSLIKNMQSSHAYCTPLNAALQASMAENSIPLYTTASMGNPTLGNLASAIREELNGAMEHTNSNESDSSPGRSPMQAVHPVHVKEEPLDPEEAEGPLSLVTTANHSPDFDHDRDYEDEPVNEDME

SEQ ID NO: 93926 - protein, 42 aa, Homo sapiens
MFLGTGEPALDTSHLISLSREKWPPGGPSGRQGACLWAAERP

SEQ ID NO: 93927 - protein, 469 aa, Homo sapiens
  MOD_RES (1)..(1): Any amino acid
XNQNLYATYQLSHFQSISVLGNLEARMVDTVLYDNTQLQLKAESPWEALDWGQKLWEVVHAAVPGYMGRQNELTISPGLGHHDDYTQNHSFQKKTSGLLPPSPVLDSSKQYQNILKSGTLYRLTVQNNWKAFTFVLSRAYLMAFQPGKLDEDPLLSYNVDVCLAVQMDNLDGCDSCFQVIFPQDVLRLRAETRQRAQEWMEALKIAANVARSSEQNLQVTLRNKPKDQMGGHELRKNKRQSVTTSFLSILTTLSLERGLTAQSFKCAGCQRSIGLSNGKAKVCNYSGWYYCSSCHVDDSFLIPARIVHNWDTSKYKVSKQAKEFLEYVYEEPLIDIQQENAMLYHHAEPLAAVLRLRQRLKSLRAYLFSCRAAVAEDLRRRIFPREYLLQQIHLYSLADLQQVIEGKLAPFLGKVIKFATSHVYSCSLCSQKGFICEICNNGEILYPFEDISTSRFGDPYADLLQGYVA

SEQ ID NO: 93928 - protein, 55 aa, Homo sapiens
MADFYKEFLSKNFQKHMYYNRDWYKRNFAITFFMGKVALERIWNKLKQKQKKRSN

SEQ ID NO: 93929 - protein, 667 aa, Homo sapiens
MKQLPAATVRLLSSSQIITSVVSVVKELIENSLDAGATSVDVKLENYGFDKIEVRDNGEGIKAVDAPVMAMKYYTSKINSHEDLENLTTYGFRGEALGSICCIAEVLITTRTAADNFSTQYVLDGSGHILSQKPSHLGQGTTVTALRLFKNLPVRKQFYSTAKKCKDEIKKIQDLLMSFGILKPDLRIVFVHNKIYLSGFLPKCDADHSFTSLSTPERSFIFINSRPVHQKDILKLIRHHYNLKCLKESTRLYPVFFLKIDVPTADVDVNLTPDKSQVLLQNKESVLIALENLMTTCYGPLPSTNSYENNKTDVSAADIVLSKTAETDVLFNKVESSGKNYSNVDTSVIPFQNDMHNDESGKNTDDCLNHQISIGDFGYGHCSSEISNIDKNTKNAFQDISMSNVSWENSQTEYSKTCFISSVKHTQSENGNKDHIDESGENEEEAGLENSSEISADEWSRGNILKNSVGENIEPVKILVPEKSLPCKVSNNNYPIPEQMNLNEDSCNKKSNVIDNKSGKVTAYDLLSNRVIKKPMSASALFVQDHRPQFLIENPKTSLEDATLQIEELWKTLSEEEKLKYEEKATKDLERYNSQMKRAIEQESQMSLKDGRKKIKPTSAWNLAQKHKLKTSLSNQPKLDELLQSQIEKRRSQNIKMEFQLLKITWK

SEQ ID NO: 93930 - protein, 139 aa, Homo sapiens
MGRKKIQIQRITDERNRQVTFTKRKFGLMKKAYELSVLCDCEIALIIFNHSNKLFQYASTDMDKVLLKYTEYNEPHESRTNADIIETLRKKGFNGCDSPEPDGEDSLEQSPLLEDKYRRASEELDGLFRRYGGPCWGVT

SEQ ID NO: 93931 - protein, 42 aa, Homo sapiens
MVNLDQGEDKAKLMRAYMQEPLFVEFADCCLGIVEPSQNEES

SEQ ID NO: 93932 - protein, 95 aa, Homo sapiens
MAAPCEGQAFAVGVEKNWGAVVRSPEGTPQKIRQLIDEGIAPEEGGVDAKDTSATSQSVNGSPQAEQPSLESTSKEAFFSRVETFSYFDQSPICA

SEQ ID NO: 93933 - protein, 293 aa, Homo sapiens
MLVIPPGLSEEEEALQKKFNKLKKKKKALLALKKQSSSSTTSQGGVKRSLSEQPVMDTATATEQAKQLVKSGAISAIKAETKNSGFKRSRTLEGKLKDPEKGPVPTFQPFQRSISADDDLQESSRRPQRKSLYESFVSSSDRLRELGPDGEEAEGPGAGDGPPRSFDWGYEERSGAHSSASPPRSRSRDRSHERNRDRDRDRERDRDRDRDRDRERDRDRDRDRDRDRERDRDRERDRDRDREGPFRRSDSFPERRAPRKGNTLYVYGEDMTPTLLRGAFSPFGNIIDLSMDP

SEQ ID NO: 93934 - protein, 131 aa, Homo sapiens
KLRGEINKVVNKYIDQGIAELVPGVLFVDEVHMLDIECFTYLHRALESSIAPIVIFASNRGNCVIRGTEDITSPHGIPLDLLDRVMIIRTMLYTPQEMKQIIKIRAQTEGINISEEALNHLGEIGTKTTLR

SEQ ID NO: 93935 - protein, 304 aa, Homo sapiens
MRAISWTMKKKVGKKYIKALSEEKDEEDGENAHPYRNSDPVIGTHTEKVSLKASDSMDSLYSGQSSSSGITSCSDGTSNRDSFRLDDDGPYSGPFCGRARVHTDFTPSPYDTDSLKIKKGDIIDIICKTPMGMWTGMLNNKVGNFKFIYVDVISEEEAAPKKIKANRRSNSKKSKTLQEFLERIHLQEYTSTLLLNGYETLEDLKDIKESHLIELNIENPDDRRRLLSAAENFLEEEIIQEQENEPEPLSLSSDISLNKSQLDDCPRDSGCYISSGNSDNGKEDLESENLSDMVHKIIITEPSD

SEQ ID NO: 93936 - protein, 479 aa, Homo sapiens
MARHGCLGLGLFCCVLFAATVGPQPTPSIPGAPATTLTPVPQSEASMLSLNLGLNFKFHLRGPAAVWGSPVTETQPLSLGPGQEPGEEVASGLRTDPLWELLVGSSGNSLTEWGSTEGGSKPRASSLLPESTSRRSGPSDGPTAPYQPRRSTVTWDTALMVTALPSSAPRPHQSELELKFDMALRAGAAPTLGHRTLPLLPSLRASLAEIAGRLGPFGFFGTTLSPLRNFSGLSPPGETTSTSSASGVSGSLGFLGTTLSLPPYSLERKLSSPSPLDPAASLSFASIATTSLDPTVPISGPDDLSPPASLGNPSGQPECGPGSCSVGELPEREGQPPEAPRPLFFLTLEADWAEARARWGLAWEAHVYGVGALFGLVALLALLALALLPWRCPPGAPCLALLDLLLLSAGTTRAFPLFYDAYGHRDRLPALAWLLLQDLPLPCLAAGLGLACLLLARPRPPRCPTGLAALLLLGLGLAA

SEQ ID NO: 93937 - protein, 70 aa, Homo sapiens
MKHTTDFYFNIAGHQAMHYSRSRDQRPEFQLCLKMVLSLIFVAQDVHSTQESSSTAAIFGNTHILWPVYK

SEQ ID NO: 93938 - protein, 161 aa, Homo sapiens
MITSELPVLQDSTNETTAHSDAGSELEETEVKGKRKRGRPGRPPSTNKKPRKSPGEKSRIEAGIRGAGRGRANGHPQQNGEGEPVTLFEVVKLGKSAMQSLHVVCIHLVGRGERKRSSVYFLEAFGPSIYIPLMGTYHILSPWWMTGLNHINKTGTSHFWI

SEQ ID NO: 93939 - protein, 103 aa, Homo sapiens
MIGDILLFGTLLMNAGAVLNFKLKKKDTQGFGEESREPSTGDNIREFLLSLRYFRIFIALWNIFMMFCMIVLRKLKQIAFPSSTGAITLILLLTNCEICCKWI

SEQ ID NO: 93940 - protein, 198 aa, Homo sapiens
MAKFRRRTCIILALFILFIFSLMMGLKMLRPNTATFGAPFGLDLLPELHQRTIHLGKNFDFQKSDRINSETNTKNLKSVEITMKPSKASELNLDELPPLNNYLHVFYYSWYGNPQFDGKYIHWNHPVLEHWDPRIAKNYPQGRHNPPDDIGSSFYPELGSYSSRDPSVIETHMRQMRSASIGNYCIYIYVCLCLYICI

SEQ ID NO: 93941 - protein, 126 aa, Homo sapiens
MAAKQPPPLMKKHSQTDLVSRLKTRKILGVGGEDDDGEVHRSKISQVLGNEIKFTIREPLGLRVWQFVSAVLFSGIAIMVSPHPQPLRSGPVWLPQPFSGSPEVPPPSWPLVQGPICQALGLPPRT

SEQ ID NO: 93942 - protein, 218 aa, Homo sapiens
EFPMSPVTSAHAGTYRCYGSLNSDPYLLSHPSEPLELVVSGPSMGSSPPPTGPISTPGPEDQPLTPTGSDPQSGLGRHLGVVIGILVAVVLLLLLLLLLFLILRHRRQGKHWTSTQRKADFQHPAGAVGPEPTDRGLQWRSSPAADAQEENLYAAVKDTQPEDGVEMDTRAAASEAPQDVTYAQLHSLTLRRKATEPPPSQEREPPAEPSIYATLAIH

SEQ ID NO: 93943 - protein, 54 aa, Homo sapiens
MASNVTNKTDPRSMNSRVFIGNLNTLVVKKSDVEAIFSKYGKIVGCSVHKGFAF

SEQ ID NO: 93944 - protein, 182 aa, Homo sapiens
MTTPGKENFRLKSYKNKSLNPDEMRRRREEEGLQLRKQKREEQLFKRRNVATAEEETEEEVMSDGGFHEAQISNMEMAPGGVITSDMIEMIFSKSPEQQLSATQKFRKLLSKEPNPPIDEVISTPGVVARFVEFLKRKENCTLQVSLAFARNQSGTGKVASNRVLIQMEKGNQAYLNLEWET

SEQ ID NO: 93945 - protein, 82 aa, Homo sapiens
MLSRNDDICIYGGLGLGGLLLLAVVLLSACLCWLHRRVKRLERSWRLPVPSSEGPDLRGRDKRGTKEDPRADYACIAENKPT

SEQ ID NO: 93946 - protein, 85 aa, Homo sapiens
MDELFPLIFPAEPAQASGPYVEIIEQPKQRGMRFRYKCEGRSAGSIPGERSTDTTKTHPTIKDQGQCASPWSPRTLLTGLTPTSL

SEQ ID NO: 93947 - protein, 57 aa, Homo sapiens
MPTDCVRRWARGEWGGRGPGTAFRCLLGLQVKGLWVKNNPGPALGLPATVAAAPRCL

SEQ ID NO: 93948 - protein, 176 aa, Homo sapiens
MLQQVNGHNPGSDGQAREYLREDLQEFLGGEVLLYKLDDLTRVNPVTLETVLRCLQARYMADTFYTNAGCTLVALNPFKPVPQLYSPELMREYHAAPQPQKLKPHVFTVGEQTYRNVKSLIEPVNQSIVVSGESGAGKTWTSRCLMKFYAVVATSPASWESHKIAERIEQRILNSN

SEQ ID NO: 93949 - protein, 157 aa, Homo sapiens
MRSGKASCTLETVWEDKHKYEEAERRFYEHEATQAAASAQQLPAEGPAMNGPGQDDPEDADEAEAPDGGSRRDPRKSQDSRKPLQKKRKRSPKSGLGPADLALLGLSAERVWLDKSLFDQAESSYRQKLADVAAQAAWPPALAPWGLCTHGNQVACH

SEQ ID NO: 93950 - protein, 311 aa, Homo sapiens
MKGANLSQGMEFELLGLTTDPQLQRLLFVVFLGMYTATLLGNLVMFLLIHVSATLHTPMYSLLKSLSFLDFCYSSTVVPQTLVNFLAKRKVISYFGCMTQMFFYAGFATSECYLIAAMAYDRYAAICNPLLYSTIMSPEVCASLIVGSYSAGFLNSLIHTGCIFSLKFCGAHVVTHFFCDGPPILSLSCVDTSLCEILLFIFAGFNLLSCTLTILISYFLILNTILKMSSAQGRFKAFSTCASHLTAICLFFGTTLFMYLRPRSSYSLTQDRTVAVIYTVVIPVLNPLMYSLRNKDVKKALIKVWGRKTME

SEQ ID NO: 93951 - protein, 52 aa, Homo sapiens
MEKGKLHKPGKDASKRGRQTPVLYAMLDHSRSTKAVSEKKAKGLGESRKDKK

SEQ ID NO: 93952 - protein, 101 aa, Homo sapiens
MLWWEEVEDCYEREDVQKKTFTKWVNAQFSKATQKEIEKQKVHLKSITEVGEALKTVLGKKETLVEDKLSLLNSNWIAVTSRAEEWLNLLLEYQKHMETFD

SEQ ID NO: 93953 - protein, 185 aa, Homo sapiens
NLTDLLYLDLSENRLESLPPQMRRLVHLQTLVLNGNPLLHAQLRQLPAMTALQTLHLRSTQRTQSNLPTSLEAKLAEDILNTMFDTSYSKQVINEGEEPENFFWVGIGAQKPYDDDAEYMKHTRLFRCSNEKGYFAVTEKCSDFCQDDLADDDIMLLDNGQEVYMWVGTQTSQVEIKLSLKACQV

SEQ ID NO: 93954 - protein, 27 aa, Homo sapiens
LVRAHPPLEAPSPFWVLMMPLLVTLWS

SEQ ID NO: 93955 - protein, 1487 aa, Homo sapiens
VEAEEAQRGASPPISAIEEFSIIPEAPMRSSQVSALGLEAQEDEDPSYKWREEHRLSATQQSELRDVCDYAIETMPSFPKEGSADVEPNQESLVAEACDTPEHWEAVPQSLAGRQARTLAPPELWACPIQSEHLDMAPFSSDLGSEEEEVEFWPGLTSLTLGSGQAEEEEETSSDNSGQTRYYSPCEEHPAETNQNEGSESGTIRQGEELPPEELQESQGLLHPQEVQVLEEQGQQEAGFRGEGTLREDVCADGLLGEEQMIEQVNDEKGEQKQKQEQVQDVMLGRQGERMGLTGEPEGLNDGEWEQEDMERKAQGQGGPEQGEERKRELQVPEENRADSQDEKSQIFLGKSEEVTGKQEDHGIKEKGVPVSGQEAKEPESWDGGRLGAVGRARSREEENEHHGPSMPALIAPEDSPHCDLFPGASYLMTQIPGTQTESRAEELSPAALSPSLEPIRCSHQPISLLGSFLTEESPDKEIDQNSQQEGSRLRKGTVSSQGTEVVFASASVTPPRTPDSAPPSPAEAYPITPASVSARPPVAFPRRETSCAARAPETASAPLSMDDPSPCGTSEMCPAALYGFPSTGTSPPRPPANSTGTVQHLRSDSFPGSHRTEQTPDLVGMLLSYSHSELPQRPPKPAIYSSVTPRRDRRSGRDYSTVSASPTALSTLKQDSQESISNLERPSSPPSIQPWVSPHNPAFATESPAYGSSPSFVSMEDVRIHEPLPPPPPQRRDTHPSVVETDGHARVVVPTLKQHSHPPPLALGSGLHAPHKGPLPQASDPAVARQHRPLPSTPDSSHHAQATPRWRYNKPLPPTPDLPQPHLPPISAPGSSRIYRPLPPLPIIDPPTEPPPLPPKSRGRSRSTRGGHMNSGGHAKTRPACQDWTVPLPASAGRTSWPPATARSTESFTSTSRSKSEVSPGMAFSNMTNFLCPSSPTTPWTPELQGPTSKDEAGVSEHPEAPAREPLRRTTPQQGASGPGRSPVGQARQPEKPSHLHLEKASSWPHRRDSGRPPGDSSGQAVAPSEGANKHKGWSRQGLRRPSILPEGSSDSRGPAVEKHPGPSDTVVFREKKPKEVMGGFSRRCSKLINSSQLLYQEYSDVVLNKEIQSQQRLESLSETPGPSSPRQPRKALVSSESYLQRLSMASSGSLWQEIPVVRNSTVLLSMTHEDQKLQEVKFELIVSEASYLRSLNIAVDHFQLSTSLRATLSNQEHQWLFSRLQDVRDVSATFLSDLEENFENNIFSFQVCDVVLNHAPDFRRVYLPYVTNQTYQERTFQSLMNSNSNFREVLEKLESDPVCQRLSLKSFLILPFQRITRLKLLLQNILKRTQPGSSEEAEATKAHHALEQLIRDCNNNVQSMRRTEELIYLSQKIEFECKIFPLISQSRWLVKSGELTALEFSASPGLRRKLNTRPVHLHLFNDCLLLSRPREGSRFLVFDHAPFSSIRGEKCEMKLHGPHKNLFRLFLRQNTQGAQAEFLFRTETQ

SEQ ID NO: 93956 - protein, 115 aa, Homo sapiens
MVEDELALFDKSINEFWNKFKSTDTSCQMAGLRDTYKDSIKAFAEKLSVKLKEEERMVEMFLEYQNQISRQNKLIQEKKDNLLKLIAEVKGKKQELEVLTANIQDLKEEYSRKKE

SEQ ID NO: 93957 - protein, 176 aa, Homo sapiens
MLDRRLIAPQTKYIIPGGSADSYTSRPSDSDVSLEEDREAVRREAERQAQAQLEKAKTKPVAFAVRTNVSYSAAHEDDVPVPGMAISFEAKDFLHVKEKFNNDWWIGRLVKEGCEIGFIPSPVKLENMRLQHEQRAKQGKFYSSKSGGNSSSSLGDIVPSSRKSTPPSSDRAHSSV

SEQ ID NO: 93958 - protein, 22 aa, Homo sapiens
ASLKKYGVGTCGPRGFYGTFEN

SEQ ID NO: 93959 - protein, 66 aa, Homo sapiens
MARSLLLPLQILLLSLALETAGEEVSTPCTWAVIRWATGELRGSRPRSHSATPATPHRPMLMTSCS

SEQ ID NO: 93960 - protein, 296 aa, Homo sapiens
MLRLPTVFRQMRPVSRVLAPHLTRAYAKDVKFGADARALMLQGVDLLADAVAVTMGPKGRTVIIEQSWGSPKVTKDGVTVAKSIDLKDKYKNIGAKLVQDVANNTNEEAGDGTTTATVLARSIAKEGFEKISKGANPVEIRRGVMLAVDAVIAELKKQSKPVTTPEEIAQVATISANGDKEIGNIISDAMKKVGRKGVITVKDGKTLNDELEIIEGMKFDRGYISPYFINTSKGQKCEFQDAYVLLSEKKISSIQSIVPALEIANAHRKPLVIIAEDVDGEALSTLVLNRCLEKRD

SEQ ID NO: 93961 - protein, 58 aa, Homo sapiens
MAPTLQQAYRRRWWMACTAVLENLFFSAVLLGWGSLLIILKNEGFYSSTCPAVPGVMC

SEQ ID NO: 93962 - protein, 13 aa, Homo sapiens
  MOD_RES (1)..(1): Any amino acid
XEEDVPGQAKDEL

SEQ ID NO: 93963 - protein, 270 aa, Homo sapiens
  MOD_RES (1)..(1): Any amino acid
XINVTVGGESCQHEFRGDMVVCPLPPSLQLGQDGAPLQVCVDALPAIDGLDSTTCVHGASFSDSEDESCVPLLRKESIQLRDLDSALLAEVKDVLIPHERVVTHSDRVIGKGHFGVVYHGEYIDQAQNRIQCAIKSLSRITEMQQVEAFLREGLLMRGLNHPNVLALIGIMLPPEGLPHVLLPYMCHGDLLQFIRSPQRNPTVKDLISFGLQVARGMEYLAEQKFVHRDLAARNCMLDESFTVKVADFGLARDILDREYYSVQQHRHARL

SEQ ID NO: 93964 - protein, 111 aa, Homo sapiens
MFQLPVNNLGSLRKARKTVKKILSDIGLEYCKEHIEDFKQFEPNDFYLKNTTWEDVGLWDPSLTKNQMKLNVRFHLTMGTTVVQAALPLFATLGPLAIKGKALKSTALTGL

SEQ ID NO: 93965 - protein, 371 aa, Homo sapiens
  MOD_RES (1)..(1): Any amino acid
XAVMAPRTLVLLLSGALALTQTWAGSHSMRYFFTSVSRPGRGEPRFIAVGYVDDTQFVRFDSDAASQRMEPRAPWIEQEGPEYWDGETRKVKAHSQTHRVDLGTLRGYYNQSEAGSHTVQRMYGCDVGSDWRFLRGYHQYAYDGKDYIALKEDLRSWTAADMAAQTTKHKWEAAHVAEQLRAYLEGTCVEWLRRYLENGKETLQRTDAPKTHMTHHAVSDHEATLRCWALSFYPAEITLTWQRDGEDQTQDTELVETRPAGDGTFQKWAAVVVPSGQEQRYTCHVQHEGLPKPLTLRWEPSSQPTIPIVGIIAGLVLFGAVITGAVVAAVMWRRKSSGGEGVKDRKGGSYSQAASSDSAQGSDVSLTACKV

SEQ ID NO: 93966 - protein, 252 aa, Homo sapiens
MEVLRPQLIRIDGRNYRKNPVQEQTYQHEEDEEDFYQGSMECADEPCDAYEVEQTPQGFRSTLRAPSLLYKHIVGKRGDTRKKIEMETKTSISIPKPGQDGEIVITGQHRNGVISARTRIDVLLDTFRRKQPFTHFLAFFLNEVEVQEGFLRFQEEVLAKCSMDHGVDSSIFQNPKKLHLTIGMLVLLSEEEIQQTCEMLQQCKEEFIKLQELVDRVLERFQASGLIVKEWNSVKLHATVMNTLFRKDPNVV

SEQ ID NO: 93967 - protein, 153 aa, Homo sapiens
  MOD_RES (1)..(1): Any amino acid
XATKLNILVQQHFDLASTTITNIPMKEEQHANTSANYDVELLHHKDAHVDFLKSELHYCTGAYRISPVDVNSRPSSCLTNFLLNDPRYKIDGSLEVPLERAKDQLEKHTRYWPMIISQTTIFNMQAVVPLASVIVKESLTEEDVLNCQKTIYN

SEQ ID NO: 93968 - protein, 150 aa, Homo sapiens
MCKCCNLFSPNQSELLSHVSEKHMEEGVNVDEIIIPLRPLSTPEPPNSSKTGDEFLVMKRKRGRPKGSTKKSSTEEELAENIVSPTEDSPLAPEEGNSLPPSSLECSKCCRKFSNTRQLRKHICIIVLNLGEEEGEAGATKIVPVEAGPP

SEQ ID NO: 93969 - protein, 107 aa, Homo sapiens
MESKEPQLKGIVTRLFSQQGYFLQMHPDGTIDGTKDENSDYTLFNLIPVGLRVVAIQGVKASLYVAMNGEGYLYSSDVFTPECKFKESVFENYYVIYSSTLYRQQES

SEQ ID NO: 93970 - protein, 47 aa, Homo sapiens
VSGGIVGYVKTGSVPSLAAGLLFGSLAGLGAYQLYQDPRNVWGFLGI

SEQ ID NO: 93971 - protein, 375 aa, Homo sapiens
MFPRSGPSNDEVKSRGMKFAEEQLLKHGWTQGKGLGRKENGITQALRVTLKQDTHGVGHDPAKEFTNHWWNELFNKTAANLVVETGQDGVQIRSLSKETTRYNHPKPNLLYQKFVKMATLTSGGEKPNKDLESCSDDDNQGSKSPKILTDEMLLQACEGRTAHKAARLGITMKAKLARLEAQEQAFLARLKGQDPGAPQLQSESKPPKKKKKKRRQKEEEEATASERNDADEKHPEHAEQNIRKSKKKKRRHQEGKVSDEREGTTKGNEKEDAAGTSGLGELNSREQTNQSLRKGKKKKRWHHEEEKMGVLEEGGKGKEAAGSVRTEEVESRAYADPCSRRKKRQQQEEEDLNLEDRGEETFRWWNQGSREQSMQ

SEQ ID NO: 93972 - protein, 97 aa, Homo sapiens
MTIEDLPDFPLEGNPLFGRYPFIFSASDTPVIFSISAAPMPSDCEFSFFDPNDASCQEILFDPKTSVSELFAILRQWVPQVQQNIDIIGNEVMWKQL

SEQ ID NO: 93973 - protein, 123 aa, Homo sapiens
MAAQRLGKRVLSKLQSPSRARGPGGSPGGLQKRHARVTVKYDRRELQRRLDVEKWIDGRLEELYRGMEADMPDEINIDELLELESEEERSRKIQPPPGPGPDCSPLTLLHSPCPPDAAQLACV

SEQ ID NO: 93974 - protein, 57 aa, Homo sapiens
MANYIHVPPGSPEVPKLNVTVQDQEEHRCREGALSLLQHLRPHWDPQEVTLQKPLRK

SEQ ID NO: 93975 - protein, 85 aa, Homo sapiens
MMGVLFCCGAGFFIRRRMYPPPLIEEPAFNVSYTRQPPNPGPGAQQPGPPYYTDPGGPGMNPVGNSMAMAFQVPPNSPQGSVACP

SEQ ID NO: 93976 - protein, 28 aa, Homo sapiens
MHGRGRGVAGPMGRGRLMPNKQNLRVVE

SEQ ID NO: 93977 - protein, 145 aa, Homo sapiens
MSGVRPPIMNGPLHPRPLVALLDGRDCTVEMPILKDVATVAFCDAQSTQEIHEKVLNEAVGALMYHTITLTREDLEKFKALRIIVRIGSGFDNIDIKSAGDLGIAVCNVPAASVEETADSTLCHILNLYRRATWLHQALREGTRV

SEQ ID NO: 93978 - protein, 144 aa, Homo sapiens
MSGPGNKRAAGDGGSGPPEKKLSREEKTTTTLIEPIRLGGISSTEEMDLKVLQFKNKKLAERLEQRQACEDELRERIEKLEKRQATDDATLLIVNRYWAQLDETVEALLRCHESQGELSSAPEAPGTQEGPTCDGTPLPEPGTS

SEQ ID NO: 93979 - protein, 72 aa, Homo sapiens
MMEELHSLDPRRQELLEARFTGVGVSKGPLNSESSNQSLCSVGSLSDKEVETPEKKQNDQRNRKRKAEPYET

SEQ ID NO: 93980 - protein, 385 aa, Homo sapiens
MSNSHPLRPFTAVGEIDHVHILSEHIGALLIGEEYGDVTFVVEKKRFPAHRVILAARCQYFRALLYGGMRESQPEAEIPLQDTTAEAFTMLLKYIYTGRATLTDEKEEVLLDFLSLAHKYGFPELEDSTSEYLCTILNIQNVCMTFDVASLYSLPKLTCMCCMFMDRNAQEVLSSEGFLSLSKTALLNIVLRDSFAAPEKDIFLALLNWCKHNSKENHAEIMQAVRLPLMSLTELLNVVRPSGLLSPDAILDAIKVRSESRDMDLNYRGMLIPEENIATMKYGAQVVKGELKSALLDGDTQNYDLDHGFSRHPIDDDCRSGIEIKLGQPSIINHIRILLWDRDSRSYSYFIEVSMDELDWVRVIDHSQYLCRSWQKLYFPARVCR

SEQ ID NO: 93981 - protein, 70 aa, Homo sapiens
MVSNPVHGLPFLPGTSFKDSTKTAFHRSQTLSYRNGYAIVRRPTVGIGGDRLQFNQLSQAELDELASTEI

SEQ ID NO: 93982 - protein, 125 aa, Homo sapiens
MSVDPMTYEAQFFGFTPQTCMLRIYIAFQDYLFEVMQAVEQVILKKLDGIPDCDISPVQIRKCTEKFLCFMKGHFDNLFSKMEQLFLQLILRIPSNILLPEDKCKETPYSEEDFQHLQKEIEQLQ

SEQ ID NO: 93983 - protein, 154 aa, Homo sapiens
MSENLDKSNVNEAGKSKSNDSEEGLEDAVEGADEALQKAIKSDSSSPQRVQRPHSSPPRFVTVEELLETARGVTNMALAHEIVVNGDFQIKPVELPENRVSLCCPGWSVVALSRLTATSGQADLELLTSGELPASASKSAGITGLEEESKGDCT

SEQ ID NO: 93984 - protein, 130 aa, Homo sapiens
MGSQGSPVKSYDYLLKFLLVGDSDVGKGEILESLQDGAAESPYAYSNGIDYKTTTILLDGRRVKLELWDTSGQGRFCTIFRSYSRGAQLCPRYSRGDSLMDWPRGHLASTAARPPAARTPHLPAQETSTG

SEQ ID NO: 93985 - protein, 134 aa, Homo sapiens
MAVVIRLQGLPIVAGTMDIRHFFSGLTIPDGGVHIVGGELGEAFIVFATDEDARLGMMRTGGTIKGSKVTLLLSSKTEMQNMIELSRRRFETANLDIPPANASRSGPPPSSGMSSRVNLPTTVSNFNNPSPSVV

SEQ ID NO: 93986 - protein, 145 aa, Homo sapiens
MADEEKLPPGWEKRMSRSSGRVYYFNHITNASQWERPSGNSSSGGKNGQGEPARVRCSHLLVKHSQSRRPSSWRQEKITRTKEEALELINGYIQKIKSGEEDFESLASQFSDCSSAKARGDLGAFSRGAQGMGLTRLGDPYHPEG

SEQ ID NO: 93987 - protein, 42 aa, Homo sapiens
MWSWKCLLFWAVLVTATLCTARPSPTLPEQEMRSHFVAQADL

SEQ ID NO: 93988 - protein, 163 aa, Homo sapiens
MLLVIDQKIEGEVRERMLVSYYRYSAARSSADSNMDDICKLLRSTGYSSQPGAKRPSNYPESYFQRVPINESFISMVIGRLRSDDIYNQVSAYPLPEHRSTALANQAAMLYVILYFEPSILHTHQAKMREIVDKYFPDNWVISIYMGITVNLVDAWEPYKAAK

SEQ ID NO: 93989 - protein, 33 aa, Homo sapiens
MEQSNDSLRVNHNDGEESKTSAQVFEGFFLWTK

SEQ ID NO: 93990 - protein, 96 aa, Homo sapiens
  MOD_RES (1)..(1): Any amino acid
XHTTPELQKGPSPINAFSNFPIGLNSNLNVNMDMNSIKEPQSRLRKWTTVDSISVNTSLDQNSSKHGFVTSGLTTDVAQIGVLRLTCADEKECRSD

SEQ ID NO: 93991 - protein, 492 aa, Homo sapiens
MRSAVLKSLQPGSLPDCKAALGGSGNISTSPFWSRRHSEGQDTGTRAVLLYGAGARVCGSVTPSSFGGKSAAFGFLQWWAKDSPPRCSVESWQCPLWKTGTWCKPWEKVPMEKPDIGMPEPDAQRFFHQLMAGVVYLHGIGITHRDIKPENLLLDERDNLKISDFGLATVFRYNNRERLLNKMCGTLPYVAPELLKRREFHAEPVDVWSCGIVLTAMLAGELPWDQPSDSCQEYSDWKEKKTYLNPWKKIDSAPLALLHKILVENPSARITIPDIKKDRWYNKPLKKGAKRPRVTSGGVSESPSGFSKHIQSNLDFSPVNSASSEENVKYSSSQPEPRTGLSLWDTSPSYIDKLVQGISFSQPTCPDHMLLNSQLLGTPGSSQNPWQRLVKRMTRFFTKLDADKSYQCLKETCEKLGYQWKKSCMNQVTISTTDRRNNKLIFKVNLLEMDDKILVDFRLSKGDGLEFKRHFLKIKGKLIDIVSSQKIWLPAT

SEQ ID NO: 93992 - protein, 135 aa, Homo sapiens
  MOD_RES (1)..(1): Any amino acid
XKFNPFVTSDRSKNRKRHFNAPSHIRRKIMSSPLSKELRQKYNVRSMPIRKDDEVQVVRGHYKGQQIGKVVQVYRKKYVIYIERVQREKANGTTVHVGIHPSKAKTGQRPQKDPRTESQISPSRKGKGQIQGRNH

SEQ ID NO: 93993 - protein, 125 aa, Homo sapiens
MHCTLTMETEAIDGYITCDNELSPEREHSNMAIDLTSSTPNGQHASPSHMTSTNSVKLEMQSDEECDRKPLSREDEIRGHDEGSSLEEPLIESSEVADNRKVQELQGEGGIRLPNGERPFHCNQC

SEQ ID NO: 93994 - protein, 1674 aa, Homo sapiens
GHFKNFCIRFADGFETSWDDWKPEIHGDLVMNACVVPDGTYEVCSRTTGQAAAESSSAGTWTLNVLWKMCGIDVHMDPNIGKRLNALGNTLTTLTGEEDIDDIADLNSVNIADLSDEDEVDTMSPTIHTSSDGSSISGDGHKLTFGQRLVNHLLGLTPPNQRHSVPAEYLCDPEMWGSPQSSQSHLKACRAHSWGNEATDYRRQAASASQPGELRGRKIMKRIVDIRELNEQAKVIDDLKKLGASEGTINQEIQRYQQLESVAVNDIRRDVRKKLRRSSMRAASLKDKWGLSYKPSYSRSKSISASGRPPLKRMERASSRVGETEELPEIRVDAASPGPRVTFNIQDTLKNTVWGSTPQSSCPGEGYFQFPEETELDLLSVTIEGPSHYSSNSEGSCSVFSSPKTPGGFSPGIPFQTEEGRRDDSLSSTSEDSEKDEKDEDHERERFYIYRKPSHTSRKKATGFAAVHQLFTERWPTTPVNRSLSGTATERNIDFELDIRVEIDSGKCVLHPTTLLQEHDDISLRRSYDRSSRSLDQDSPSKKKKFQTNYASTTHLMTGKKVPSSLQTKPSDLETTVFYIPGVDVKLHYNSKTLKTESPNASRGSSLPRTLSKESKLYAKGKGSGGVKTAKLYAWVALQSLPEEMVISPCLLDFLEKALETIPITPVERNYTAVSSQDEDMGHFEIPDPMEESTTSLVSSSTSAYSSFPVDVVVYVRVQPSQIKFSCLPVSRVECMLKLPSLDLVFSSNRGELETLGTTYPAETLSPGGNATQSGTKTSASKTGIPGSSGLGSPLGRSRHSSSQSDLTSSSSSSSGLSFTACMSDFSLYVFHPYGAGKQKTAVSGLTPGSGGLGNVDEEPTSVTGRKDSLSINLEFVKVSLSRIRRSGGASFFESQSVSKSASKMDTTLINISAVCDIGSASFKYDMRRLSEILAFPRAWYRRSIARRLFLGDQTINLPTSGPGTPDSIEGVSQHLSPESSRKAYCKTWEQPSQSASFTHMPQSPNVFNEHMTNSTMSPGTVGQSLKSPASIRSRSVSDSSVPRRDSLSKTSTPFNKSNKAASQQGTPWETLVVFAINLKQLNVQMNMSNVMGNTTWTTSGLKSQGRLSVGSNRDREISMSVGLGRSQLDSKGGVVGGTIDVNALEMVAHISEHPNQQPSHKIQITMGSTEARVDYMGSSILMGIFSNADLKLQDEWKVNLYNTLDSSITDKSEIFVHGDLKWDIFQVMISRSTTPDLIKIGMKLQEFFTQQFDTSKRALSTWGPVPYLPPKTMTSNLEKSSQEQLLDAAHHRHWPGVLKVVSGCHISLFQIPLPEDGMQFGGSMSLHGNHMTLACFHGPNFRSKSWALFHLEEPNIAFWTEAQKIWEDGSSDHSTYIVQTLDFHLGHNTMVTKPCGALESPMATITKITRRRHENPPHGVASVKEWFNYVTATRNEELNLLRNVDANNTENSTTVKNSSLLSGFRGGSSYNHETETIFALPRMQLDFKSIHVQEPQEPSLQDASLKPKVECSVVTEFTDHICVTMDAELIMFLHDLVSAYLKEKEKAIFPPRILSTRPGQKSPIIIHDDNSSDKDREDSITYTTVDWRDFMCNTWHLEPTLRLISWTGRKIDPVGVDYILQKLGFHHARTTIPKWLQRGVMDPLDKVLSVLIKKLGTALQDEKEKKGKDKEEH

SEQ ID NO: 93995 - protein, 61 aa, Homo sapiens
MASARKASRPMRDVFGDFSDVSLEDSTMEEIRNFQISRNLTKIAPGHSRFLKRNQTLDEKH

SEQ ID NO: 93996 - protein, 147 aa, Homo sapiens
MMEGLKKRTRKAFGIRKKEKDTDSTGSPDRDGIKKSNGAPNGFYAEIDWERYNSPELDEEGYSIRPEEPGSTKGKHFYSSSESEEEEESHKKFNIKIKPLQSKDILKNAATVDELKASIGNIALSPSPVVSVLSSFLLITEAQPGCN

SEQ ID NO: 93997 - protein, 113 aa, Homo sapiens
MGSVTVRYFCYGCLFTSATWTVLLFVYFNFSEVTQPLKNVPVKGSGPHGPSPKKFYPRFTRGPSRVLEPQFKANKIDDVIDSRVEDPEEGHLKFSSELDVKKSSTHLTCQLLV

SEQ ID NO: 93998 - protein, 284 aa, Homo sapiens
  MOD_RES (1)..(1): Any amino acid
XNLSDACKPLKKRNRASTAASSALGFSKSSSPSASLTENEVSDSPGDEPSESPYESADETQTEVSVSSKKSERGVTAKKEYVCQLCEKPGSLLLCEGPCCGAFHLACLGLSRRPEGRFTCSECASGCSVIASNSIICTAHFTARKGKRHHAHVNVSWCFVCSKGGSLLCCESCPAAFHPDCLNIEMPDGSWFCNDCRAGKKLHFQDIIWVKLGNYRWWPAEVCHPKNVPPNIQKMKHEIGEFPVFFFGSKDYYWTHQARVFPYMEGDRGSRYQGVRGIGRVFKN

SEQ ID NO: 93999 - protein, 845 aa, Homo sapiens
DVDGDGVHEITSRDSPVYPKCLLDDDLVLGVYIHRTDRLKSDFMISHPMVKIHVVDEHTGQYVKKDDSGRPVSSYYEKENVDYILPIMTQPYDFKQLKSRLPEWEEQIVFNENFPYLLRGSDESPKVILFFEILDFLSVDEIKNNSEVQNQECGFRKIAWAFLKLLGANGNANINSKLRLQLYYPPTKPRSPLSVVEAFEWWSKCPRNHYPSTLYVTVRGLKVPDCIKPSYRSMMALQEEKGKPVHCERHHESSSVDTEPGLEESKEVIKWKRLPGQACRIPNKHLFSLNAGERGCFCLDFSHNGRILAAACASRDGYPIILYEIPSGRFMRELCGHLNIIYDLSWSKDDHYILTSSSDGTARIWKNEINNTNTFRVLPHPSFVYTAKFHPAVRELVVTGCYDSMIRIWKVEMREDSAILVRQFDVHKSFINSLCFDTEGHHMYSGDCTGVIVVWNTYVKINDLEHSVHHWTINKEIKETEFKGIPISYLEIHPNGKRLLIHTKDSTLRIMDLRILVARKFVGAANYREKIHSTLTPCGTFLFAGSEDGIVYVWNPETGEQVAMYSDLPFKSPIRDISYHPFENMVAFCAFGQNEPILLYIYDFHVAQQEAEMFKRYNGTFPLPGIHQSQDALCTCPKLPHQGSFQIDEFVHTESSSTKMQLVKQRLETVTEVIRSCAAKVNKNLSFTSPPAVSSQQSKLKQSNMLTAQEILHQFGFTQTGIISIERKPCNHQVDTAPTVVALYDYTANRSDELTIHRGDIIRVFFKDNEDWWYGSIGKGQEGYFPANHVASETLYQELPPEIKERSPPLSPEEKTKIEKSPAPQKVNVFEHTYYICTLIFTLSG

SEQ ID NO: 94000 - protein, 306 aa, Homo sapiens
MRLGTNCEHPQLPLAAPSGYYFPCQRWLAVEEDDGQLSRELLPVDESYVLPQSEEGRGGGDNNPLDNLALEQKDKSTTFSVTIKTGVKKNAGTDANVFITLFGTQDDTGMTLLKSSKTNSDKFERDSIEIFTVETLDLGDLWKVRLGHDNTGKAPGWFVDWVEVDAPSLGKCMTFPCGRWLAKNEDDGSIIRDLFHAELQTRLYTPFVPYEITLYTSDVFAAGTDANIFIIIYGCDAVCTQQKYLCTNKREQKQFFERKSASRFIVELEDVGEIIEKIRIGHNNTGMNPGWHCSHVDIRRLLPDKD

SEQ ID NO: 94001 - protein, 120 aa, Homo sapiens
MAAAAVVVPAEWIKNWEKSGRGEFLHLCRILSENKSHDSSTYRDFQQALYELSYHVIKGNLKHEQASNVLSDISEFREDMPSILADVFCILDIETNCLEEKSKRDYFTQLVLACLFQTQF

SEQ ID NO: 94002 - protein, 815 aa, Homo sapiens
MALIMEPVSKWSPSQVVDWMKGLDDCLQQYIKNFEREKISGDQLLRITHQELEDLGVSRIGHQELILEAVDLLCALNYGLETENLKTLSHKLNASAKNLQNFITGRRRSGHYDGRTSRKLPNDFLTSVVDLIGAAKSLLAWLDRSPFAAVTDYSVTRNNVIQLCLELTTIVQQDCTVYETENKILHVCKTLSGVCDHIISLSSDPLVSQSAHLEVIQLANIKPSEGLGMYIKSTYDGLHVITGTTENSPADRCKKIHAGDEVIQVNHQTVPLIPRSPTSSVATPSSTISTPTKRDSSALQDLYIPPPPAEPYIPRDEKGNLPCEDLRGHMVGKPVHKGSESPNSFLDQEYRKRFNIVEEDTVLYCYEYEKGRSSSQGRRESTPTYENSLLRYMSNEKIAQEEYMFQRNSKKDTGKKSKKKGDKSNSPTHYSLLPSLQMDALRQDIMGTPVPETTLYHTFQQSSLQHKSKKKNKGKSKRRISCKDLGRGDCEGWLWKKKDAKSYFSQKWKKYWFVLKDASLYWYINEEDEKAEGFISLPEFKIDRASECRKKYAFKACHPKIKSFYFAAEHLDDMNRWLNRINMLTAGYAERERIKQEQDYWSESDKEEADTPSTPKQDSPPPPYDTYPRPPSMSCASPYVEAKHSRLSSTETSQSQSSHEEFRQEVTGSSAVSPIRKTASQRRSWQDLIETPLTSSGLHYLQTLPLEDSVFSDSAAISPEHRRQSTLPTQKCHLQDHYGPYPLAESERMQVLNGNGGKPRSFTLPRDSGFNHCCLNAPVSACDPQDDVQPPEVEEEEEEEEEEGEAAGENIGEKS

SEQ ID NO: 94003 - protein, 68 aa, Homo sapiens
MTLKASEGESGGSMHTALSDLYLEHLLQKRSRPEAGPLVLWCKEGGQCIFAGGTRNPDSRDGWLVNSY

SEQ ID NO: 94004 - protein, 151 aa, Homo sapiens
MLPPNSFQGKVAFITGGGTGLGKGMTTLLSSLGAQCVIASRKMDVLKATAEQISSQTGNKVHAIQCDVRDPDMVQNTVSELIKVAGHPNIVINNAAGNFISPTERLSPNAWKTITDIVLNGTAFVTLEIGKQLIKAQKGAAFLSITTIYAE

SEQ ID NO: 94005 - protein, 427 aa, Homo sapiens
MSLMVVSMACVGLFLVQRAGPHMGGQDKPFLSAWPSAVLPRGGHVTLRCHYRHRFNNFMLYKEDRIHIPIFHGRIFQESFNMSPVTTAHAGNYTCRGSHPHSPTGWSAPSNPVVIMVTGNHRKPSLLAHPGPLVKSGERVILQCWSDIMFEHFFLHKEGISKDPSRLVGQIHDGVSKANFSIGPMMLALAGTYRCYGSVTHTTYQLSAPSDPLDIVVTGPYEKPSLSAQPGPKVQAGESVTLSCSSRSSYDMYHLSREGGAHERRLPAVRKVNRTFQADFPLGPATHGGTYRCFGSFRHSPYELSDPSDPLLVSVTGNPRHLHILIGTSVVIILFILLLFFLLHLWCSNKKNAAVMDQEPAGNRTANSEDSDEQDPEEVTYAQLDHCVFTQRKITRPSQRPKTPPTDTILYTELPNAKPRSKVVSCP

SEQ ID NO: 94006 - protein, 169 aa, Homo sapiens
  MOD_RES (1)..(1): Any amino acid
XGVPICGACRRPIEGRVVNALGKQWHVEVSQAGGHVASGWGVPQLRVMHFVCAKCEKPFLGHRHYEKKGLAYCETHYNQLFGDVCYNCSHVIEGDVVSALNKAWCVSCFSCSTCNSKLTLKNKFVEFDMKPVCKRCYEKFPLELKKRLKKLSELTSRKAQPKATDLNSA

SEQ ID NO: 94007 - protein, 77 aa, Homo sapiens
  MOD_RES (1)..(1): Any amino acid
XISEDCRMGAGIAVLFKKKFGGVQELLNQQKKSGEVAVLKRDGRYIYYLVLFQVLGIWQKNKANENPCCDDLWSLRN

SEQ ID NO: 94008 - protein, 72 aa, Homo sapiens
MRLTRCQAALAAAITLNLLVLFYVSWLQHQPRNSRARGPRRASAAGPRVTVLVREFEAFDNAVPELVDSFLQ

SEQ ID NO: 94009 - protein, 139 aa, Homo sapiens
MNSLLIGELSPEQPSFEPTKNKELTDEFRELRATVERMGLMKANHVFFLLYLLHILLLDGAAWLTLWVFGTSFLPFLLCAVLLSAVQAQAGWLQHDFGHLSVFSTSKWNHLLHHFVIGHLKGAPASWWNHMHFQHHAKP

SEQ ID NO: 94010 - protein, 194 aa, Homo sapiens
MEAFQELRKPSARLECDHCSFRGTDYENVQIHMGTIHPEFCDEMDAGGLGKMIFYQKSAKLFHCHKCFFTSKMYSNVYYHITSKHASPDKWNDKPKNQLNKETDPVKSPPLPEHQKIPCNSAEPKSIPALSMETQKLGSVLSPESPKPTPLTPLEPQKPGSVVSPELQTPLPSPEPSKPASVSSPEPPKSVPVC

SEQ ID NO: 94011 - protein, 149 aa, Homo sapiens
MSDPEMGWVPEPPTMTLGASRVELRVSCHGLLDRDTLTKPHPCVLLKLYSDEQWVEVERTEVLRSCSSPVFSRVLALEYFFEEKQPLQFHVFDAEDGATSPRNDTFLGSTECTLGQIVSQTKVTKPLLLKNGKTAGKSTITIVAEEVSG

SEQ ID NO: 94012 - protein, 540 aa, Homo sapiens
MREPEELMPDSGAVFTFGKSKFAENNPGKFWFKNDVPVHLSCGDEHSAVVTGNNKLYMFGSNNWGQLGLGSKSAISKPTCVKALKPEKVKLAACGRNHTLVSTEGGNVYATGGNNEGQLGLGDTEERNTFHVISFFTSEHKIKQLSAGSNTSAALTEDGRLFMWGDNSEGQIGLKNVSNVCVPQQVTIGKPVSWISCGYYHSAFVTTDGELYVFGEPENGKLGLPNQLLGNHRTPQLVSEIPEKVIQVACGGEHTVVLTENAVYTFGLGQFGQLGLGTFLFETSEPKVIENIRDQTISYISCGENHTALITDIGLMYTFGDGRHGKLGLGLENFTNHFIPTLCSNFLRFIVKLVACGGCHMVVFAAPHRGVAKEIEFDEINDTCLSVATFLPYSSLTSGNVLQRTLSARMRRRERERSPDSFSMRRTLPPIEGTLGLSACFLPNSVFPRCSERNLQESVLSEQDLMQPEEPDYLLDEMTKEAEIDNSSTVESLGETTDILNMTHIMSLNSNEKSLKLSPVQKQKRSQRRRKEQRIQKEME

SEQ ID NO: 94013 - protein, 50 aa, Homo sapiens
MVEKEEAGGGISEEEAAQYDRQIRLWGLEAQKRSGPARLEAARVWRGRLF

SEQ ID NO: 94014 - protein, 117 aa, Homo sapiens
  MOD_RES (1)..(1): Any amino acid
XYPMGLPPYDPIRMEFENKEDLSGTQAGLNVIKEAEAQLWWAAKELRRTKKLSDYVGKNEKTKIIAKIQQRGQGAPAREPIISSEEQKQLMLYYHRRQEELKVAGDRWAFCSAGAHT

SEQ ID NO: 94015 - protein, 111 aa, Homo sapiens
MSTADALDDENTFKILVATDIHLGFMEKDAVRGNDTFVTLDEILRLAQENEVDFILLGGDLFHENKPSRKTLHTCLELLRKYCMGDRPVQFEILSDQSVNFGFSKFPWVNY

SEQ ID NO: 94016 - protein, 237 aa, Homo sapiens
MLPLTAAFEAVAQMFSTNSFNEQEAKRTLVGLVRDLRGIAFAFNAKTSFMMLFEWIYPSYMPILQRAIELWYHDPACTTPVLKLMAELVHNRSQRLQFDVSSPNGILLFRETSKMITMYGNRILTLGEVPKDQVYALKLKGISICFSMLKAALSGSYVNFGVFRLYGDDALDNALQTFIKLLLSIPHSDLLDYPKLSQSYYSLLEVLTQDHMNFIASLEPHVIMYILSSISEGLTAL

SEQ ID NO: 94017 - protein, 323 aa, Homo sapiens
MSSRPLESPPPYRPDEFKPNHYAPSNDIYGGEMHVRPMLSQPAYSFYPEDEILHFYKWTSPPGVIRILSMLIIVMCIAIFACVASTLAWDRGYGTSLLGGSVGYPYGGSGFGSYGSGYGYGYGYGYGYGGYTDPRAAKGFMLAMAAFCFIAALVIFVTSVIRSEMSRTRRYYLSVIIVSAILGIMVFIATIVYIMGVNPTAQSSGSLYGSQIYALCNQFYTPAATGLYVDQYLYHYCVVDPQEAIAIVLGFMIIVAFALIIFFAVKTRRKMDRYDKSNILWDKEHIYDEQPPNVEEWTVSLCCQAGVRWHDLSSLQPPASRFK

SEQ ID NO: 94018 - protein, 247 aa, Homo sapiens
MRSLLLLSAFCLLEAALAAEVKKPAAAAAPGTAEKLSPKAATLAERSAGLAFSLYQAMAKDQAVENILVSPVVVASSLGLVSLGGKATTASQAKAVLSAEQLRDEEVHAGLGELLRSLSNSTARNVTWKLGSRLYGPSSVSFADDFVRSSKQHYNCEHSKINFRDKRSALQSINEWAAQTTDGKLPEVTKDVERTDGALLVNAMFFKPHWDEKFHHKMVDNRGFMVTRSYTVGVMMMHRTGLYNYYD

SEQ ID NO: 94019 - protein, 341 aa, Homo sapiens
MPKNSKVVKRELDDDVTESVKDLLSNEDAADDAFKTSELIVDGQEEKDTDVEEGSEVEDERPAWNSKLQYILAQVGFSVGLGNVWRFPYLCQKNGGGAYLLPYLILLMVIGIPLFFLELSVGQRIRRGSIGVWNYISPKLGGIGFASCVVCYFVALYYNVIIGWSLFYFSQSFQQPLPWDQCPLVKNASHTFVEPECEQSSATTYYWYREALNISSSISESGGLNWKMTICLLAAWVMVCLAMIKGIQSSGKIIYFSSLFPYVVLICFLIRAFLLNGSIDGIRHMFTPKVWDLVVSLPFQATTRETTTATLMLSWCPSSIFSLLSWQHWWCLQFWASKQMS

SEQ ID NO: 94020 - protein, 85 aa, Homo sapiens
IIDVVQDHYVDWEQDMERYPYVGILHVRDSLIPPQSRRMKRVWDRAVEFLASNESRIQTESHRVAGEDMLVWRWTKPSSFSDSER

SEQ ID NO: 94021 - protein, 71 aa, Homo sapiens
MAAASVSAASGSHLSNSFAEPSRSNGSMVRHSSSPYVVYPSDKPFLNSDLRRSPSKPTLAYPESNSRESSR

SEQ ID NO: 94022 - protein, 371 aa, Homo sapiens
  MOD_RES (1)..(1): Any amino acid
XEKAHKEKPNQPAPRPPRQGPTNEAQMAAAAALARLEQKQSRAWGPTSQDTIRNQVRKELQAEATVSGSPEAPGTNVHFSTDPVAASIMKIYTFNKDQDRVKLGVDTIAKYLDNIHLHPEEEKYRKIKLQNKVFQERINCLEGTHEFFEAIGFQKVLLPAQDQEDPEEFYVLSETTLAQPQSLERHKEQLLAAEPVRAKLDRQRRVFQPSPLASQFELPGDFFNLTAEEIKREQRLRSEAVERLSVLRTKAMREKEEQRGLRKYNYTLLRVRLPDGCLLQGTFYARERLGAVYGFVREALQSDWLPFELLASGGQKLSEDENLALNECGLVPSALLTFSWDMAVLEDIKAAGAEPDSILKPELLSAIEKLL

SEQ ID NO: 94023 - protein, 122 aa, Homo sapiens
  MOD_RES (1)..(1): Any amino acid
XDDIRCKRYTLRKVMVNGDIPPRLKKSAHEIILDFIRSRPPLNPVSARKLKPTPPRPRSLHERILEEIKAERKLRPVSPEEIRRSRLGGILLPSGMPRSYCGRSDAYSPGPGEGRAGKIPTV

SEQ ID NO: 94024 - protein, 121 aa, Homo sapiens
MSKTLGSGACGEVKLAFERKTCKKVAIKIISKRKFAIGSAREADPALNVETEIEILKKLNHPCIIKIKNFFDAEDYYIVLELMEGGELFDKVVGNKRLKEATCKLYFYQMLLAVQYLHENG

SEQ ID NO: 94025 - protein, 1024 aa, Homo sapiens
MNGRLHLGHTFSLSKCEFAVGYQRLKGKCCLFPFGLHCTGMPIKACADKLKREIELYGCPPDFPDEEEEEEETSVKTEDIIIKDKAKGKKSKAAAKAGSSKYQWGIMKSLGLSDEEIVKFSEAEHWLDYFPPLAIQDLKRMGLKVDWRRSFITTDVNPYYDSFVRWQFLTLRERNKIKFGKRYTIYSPKDGQPCMDHDRQTGEEILGASLSAPLTSYKVIYVLPMLTIKEDKGTGVVTSVPSDSPDDIAALRDLKKKQALRAKYGIRDDMVLPFEPVPVIEIPGFGNLSAVTICDELKIQSQNDREKLAEAKEKIYLKGFYEGIMLVDGFKGQKVQDVKKTIQKKMIDAGDALIYMEPEKQVMSRSSDECVVALCDQWYLDYGEENWKKQTSQCLKNLETFCEETRRNFEATLGWLQEHACSRTYGLGTHLPWDEQWLIESLSDSTIYMAFYTVAHLLQGGNLHGQAESPLGIRPQQMTKEVWDYVFFKEAPFPKTQIAKEKLDQLKQEFEFWYPVDLRVSGKDLVPNHLSYYLYNHVAMWPEQSDKWPTAVRANGHLLLNSEKMSKSTGNFLTLTQAIDKFSADGMRLALADAGDTVEDANFVEAMADAGILRLYTWVEWVKEMVANWDSLRSGPASTFNDRVFASELNAGIIKTDQNYEKMMFKEALKTGFFEFQAAKDKYRELAVEGMHRELVFRFIEVQTLLLAPFCPHLCEHIWTLLGKPDSIMNASWPVAGPVNEVLIHSSQYLMEVTHDLRLRLKNYMMPAKGKKTDKQPLQKPSHCTIYVAKNYPPWQHTTLSVLRKHFEANNGKLPDNKVIASELGSMPELKKYMKKVMPFVAMIKENLEKMGPRILDLQLEFDEKAVLMENIVYLTNSLELEHIEVKFASEAEDKIREDCCPGKPLNVFRIEPGVSVSLVNPQPSNGHFSTKIEIRQGDNCDSIIRRLMKMNRGIKDLSKVKLMRFDDPLLGPRRVPVLGKEYTEKTPISEHAVFNVDLMSKKIHLTENGIRVDIGDTIIYLVH

SEQ ID NO: 94026 - protein, 427 aa, Homo sapiens
MEYTIDVFFRQKWKDERLKFKGPMNILRLNNLMASKIWTPDTFFHNGKKSVAHNMTMPNKLLRIQDDGTLLYTMRLTVQAECPMHLEDFPMDAHSCPLKFGSYAYTTSEVTYIWTYNASDSVQVAPDGSRLNQYDLLGQSIGKETIKSSTGEYTVMTAHFHLKRKIGYFVIQTYLPCIMTVILSQVSFWLNRESVPARTVFGVTTVLTMTTLSISARNSLPKVAYATAMDWFIAVCYAFVFSALIEFATVNYFTKRGWAWDGKSVVNDKSPSIKAEGITLTYNSVKAILQGAKLIWSKYIAFSWPSLFQEKTLEYLEKWMDCLTFKQSSKKEKASVMIQNNAYAVAVANYAPNLSKDPVLSTISKSATTPEPNKKPENKPAEAKKTFNSVSKIDRMSRIVFPVLFGTFNLVYWATYLNREPVLGVSP

SEQ ID NO: 94027 - protein, 137 aa, Homo sapiens
VAGEFDQGSDEENIQVLKIAKVFKNPKFSILTVNNDITLLKLATPARFSQTVSAVCLPSADDDFPAGTLCATTGWGKTKYNANKTPDKLQQAALPLLSNAECKKSWGRRITDVMICAGASGVSSCMVRLALPRPWPG

SEQ ID NO: 94028 - protein, 261 aa, Homo sapiens
MRVQDTSGTYYWHIPTGTTQWEPPGRASPSQGSSPQEESQLTWTGFAHGEGFEDGEFWKDEPSDEAPMELGLKEPEEGTLTFPAQSLSPEPLPQEEEKLPPRNTNPGIKCFAVRSLGWVEMTEEELAPGRSSVAVNNCIRQLSYHKNNLHDPMSGGWGEGKDLLLQLEDETLKLVEPQSQALLHAQPIISIRVWGVGRDSGRDFAYVARDKLTQMLKCHVFRCEAPAKNIATSLHEICSKIMAERRNARCLVNGLSLDHSK

SEQ ID NO: 94029 - protein, 87 aa, Homo sapiens
MADRLTQLQDAVNSVRNFIRLASVFLFLEVKQGRKGAQEAKLESGERTERQGFGIKRSLGRRHRELGGLRPAAGRCLKVREGADSFA

SEQ ID NO: 94030 - protein, 199 aa, Homo sapiens
MIQDKEVTLEYVSSLDFWYCKRCKANIGGHRSSCSFCKNPREVTEAKQELITYPQPQKTSIPAPLEKQPNQPLRPADKEPEPRKREEGQESRLGHQKREAERYLPPSRREGPTFRRDRERESWSGETRQDGESKTIMLKRIYRSTPPEVIVEVLEPYVRLTTANVRIIKNRTGPMGHTYGFIDLDSHACVWFYRKLFVW

SEQ ID NO: 94031 - protein, 1920 aa, Homo sapiens
MASGLGSPSPCSAGSEEEDMDALLNNSLPPPHPENEEDPEEDLSETETPKLKKKKKPKKPRDPKIPKSKRQKKELGDSSGEGPEFVEEEEEVALRSDSEGSDYTPGKKKKKKLGPKKEKKSKSKRKEEEEEEDDDDDSKEPKSSAQLLEDWGMEDIDHVFSEEDYRTLTNYKAFSQFVRPLIAAKNPKIAVSKMMMVLGAKWREFSTNNPFKGSSGASVAAAAAAAVAVVESMVTATEVAPPPPPVEVPIRKAKTKEGKGPNARRKPKGSPRVPDAKKPKPKKVAPLKIKLGGFGSKRKRSSSEDDDLDVESDFDDASINSYSVSDGSTSRSSRSRKKLRTTKKKKKDHQDYCEVCQQGGEIILCDTCPRAYHMVCLDPDMEKAPEGKWSCPHCEKEGIQWEAKEDNSEGEEILEEVGGDLEEEDDHHMEFCRVCKDGGELLCCDTCPSSYHIHCLNPPLPEIPNGEWLCPRCTCPALKGKVQKILIWKWGQPPSPTPVPRPPDADPNTPSPKPLEGRPERQFFVKWQGMSYWHCSWVSELQLELHCQVMFRNYQRKNDMDEPPSGDFGGDEEKSRKRKNKDPKFAEMEERFYRYGIKPEWMMIHRILNHSVDKKGHVHYLIKWRDLPYDQASWESEDVEIQDYDLFKQSYWNHRELMRGEEGRPGKKLKKVKLRKLERPPETPTVDPTVKYERQPEYLDATGGTLHPYQMEGLNWLRFSWAQGTDTILADEMGLGKTVQTAVFLYSLYKEGHSKGPFLVSAPLSTIINWEREFEMWAPDMYVVTYVGDKDSRAIIRENEFSFEDNAIRGGKKASRMKKEASVKFHVLLTSYELITIDMAILGSIDWACLIVDEAHRLKNNQSKFFRVLNGYSLQHKLLLTGTPLQNNLEELFHLLNFLTPERFHNLEGFLEEFADIAKEDQIKKLHDMLGPHMLRRLKADVFKNMPSKTELIVRVELSPMQKKYYKYILTRNFEALNARGGGNQVSLLNVVMDLKKCCNHPYLFPVAAMEAPKMPNGMYDGSALIRASGKLLLLQKMLKNLKEGGHRVLIFSQMTKMLDLLEDFLEHEGYKYERIDGGITGNMRQEAIDRFNAPGAQQFCFLLSTRAGGLGINLATADTVIIYDSDWNPHNDIQAFSRAHRIGQNKKVMIYRFVTRASVEERITQVAKKKMMLTHLVVRPGLGSKTGSMSKQELDDILKFGTEELFKDEATDGGGDNKEGEDSSVIHYDDKAIERLLDRNQDETEDTELQGMNEYLSSFKVAQYVVREEEMGEEEEVEREIIKQEESVDPDYWEKLLRHHYEQQQEDLARNLGKGKRIRKQVNYNDGSQEDRGVCGRPRPPPMGRSTRAVGPAHLPSLPPDWQDDQSDNQSDYSVASEEGDEDFDERSEAPRRPSRKGLRNDKDKPLPPLLARVGGNIEVLGFNARQRKAFLNAIMRYGMPPQDAFTTQWLVRDLRGKSEKEFKAYVSLFMRHLCEPGADGAETFADGVPREGLSRQHVLTRIGVMSLIRKKVQEFEHVNGRWSMPELAEVEENKKMSQPGSPSPKTPTPSTPGDTQPNTPAPVPPAEDGIKIEENSLKEEESIEGEKEVKSTAPETAIECTQAPAPASEDEKVVVEPPEGEEKVEKAEVKERTEEPMETEPKGAADVEKVEEKSAIDLTPIVVEDKEEKKEEEEKKEVMLQNGETPKDLNDEKQKKNIKQRFMFNIADGGFTELHSLWQNEERAATVTKKTYEIWHRRHDYWLLAGIINHGYARWQDIQNDPRYAILNEPFKGEMNRGNFLEIKNKFLARRFKLLEQALVIEEQLRRAAYLNMSEDPSHPSMALNTRFAEVECLAESHQHLSKESMAGNKPANAVLHKVLKQLEELLSDMKADVTRLPATIARIPPVAVRLQMSERNILSRLANRAPEPTPQQVAQQQ

SEQ ID NO: 94032 - protein, 93 aa, Homo sapiens
MASNIFGTPEENQASWAKSAGAKSSGGREDLESSGLQRRNSSEASSGDFLDLKGEGDIHENVDTDLPGSLGQSEEKPVPAAPVPSPVAPAPVP

SEQ ID NO: 94033 - protein, 130 aa, Homo sapiens
MTSLNLDLQSQNIYHHGREGSRMNGSRTLTHSISDGQLQGGQSNSELFQQEPQTAPAQVPQGFNVFGMSSSSGASNSAPHLGFHLGSKGTSSLSQQTPRFNPIMVTLAPNIQTGRNTPTSLHIHGVPPPV

SEQ ID NO: 94034 - protein, 276 aa, Homo sapiens
MESALPAAGFLYWVGAGTVAYLALRISYSLFTALRVWGVGNEAGVGPGLGEWAVVTGSTDGIGKSYAEELAKHGMKVVLISRSKDKLDQVSSEIMNNVGMSYEYPEYFLDVPDLDNVIKKMININILSVCKMTQLVLPGMVERSKGAILNISSGSGMLPVPLLTIYSATKTFVDFFSQCLHEEYRSKGVFVQSVLPYFVATKLAKIRKPTLDKPSPETFVKSAIKTVGLQSRTNGYLIHALMGSIISNLPSWIYLKIVMNMNKSTRAHYLKKTKKN

SEQ ID NO: 94035 - protein, 45 aa, Homo sapiens
MDHTSPTYMLANLTHLHSEQLLQGLNLLRQHHELCDIILRVGDVK

SEQ ID NO: 94036 - protein, 128 aa, Homo sapiens
METAGAATGQPASGLEAPGSTNDRLFLVKGGIFLGTVAAAGMLAGFITTLSLAKKKSPEWFNKGSMATAALPESGSSLALRALGWGSLYAWCGVGVISFAVWKALGVHSVSNYCLVPGIYMFILLTVF

SEQ ID NO: 94037 - protein, 187 aa, Homo sapiens
MGAFLDKPKMEKHNAQGQGNGLRYGLSSMQGWRVEMEDAHTAVIGLPSGLESWSFFAVYDGHAGSQVAKYCCEHLLDHITNNQDFKGSAGAPSVENVKNGIRTGFLEIDEHMRVMSEKKHGADRSGSTAVGVLISPQHTYFINCGDSRGLLCRNRKVHFFTQDHKPSNPLEKERIQNAGGSVMIQRV

SEQ ID NO: 94038 - protein, 55 aa, Homo sapiens
  MOD_RES (1)..(1): Any amino acid
XPPGEPDFESSLCQTCLGEHAFQRGVLPQENESCSWETQSGCEILCKTSGQLTSP

SEQ ID NO: 94039 - protein, 71 aa, Homo sapiens
DVTIVKEGWVQKRGEYIKNWRPRYFLLKTDGSFIGYKEKPQDVDLPYPLNNFSVASSVMFRYLQNLTLNQV

SEQ ID NO: 94040 - protein, 86 aa, Homo sapiens
MDTASHSLVLLQQLNMQREFGFLCDCTVAIGDVYFKAHRAVLAAFSNYFKMIFIHQTRQQITHLEVIKELEAAGCLCCSLDGLSQG

SEQ ID NO: 94041 - protein, 70 aa, Homo sapiens
MVENERLRQEMRRCEAELQELRTKPAGPCPGCEHSQESAQLRDKLSQLQLEMAESKGMLSELNLEVQQKT

SEQ ID NO: 94042 - protein, 70 aa, Homo sapiens
MSSAPRRPAKGADSFCTPEPESLGPGTPGFPEQEEDELHRTLGVERFEEILQEAGSRGGEEPGRSYGEED

SEQ ID NO: 94043 - protein, 534 aa, Homo sapiens
MEPNQNNWLRTNWISKGNAQRIFVELKFTLRDCNSLPGVLGTCKETFNLYYYETDYDTGRNIRENLYVKIDTIAADESFTQGDLGERKMKLNTEVREIGPLSKKGFYLAFQDVGACIALVSVKVYYKKCWSIIENLAIFPDTVTGSEFSSLVEVRGTCVSSAEEEAENAPRMHCSAEGEWLVPIGKCICKAGYQQKGDTCEPCGRGFYKSSSQDLQCSRCPTHSFSDKEGSSRCECEDGYYRAPSDPPYVACTRPPSAPQNLIFNINQTTVSLEWSPPADNGGRNDVTYRILCKRCSWEQGECVPCGSNIGYMPQQTGLEDNYVTVMDLLAHANYTFEVEAVNGVSDLSRSQRLFAAVSITTGQAAPSQVSGVMKERVLQRSVELSWQEPEHPNGVITEYEIKYYEKDQRERTYSTVKTKSTSASINNLKPGTVYVFQIRAFTAAGYGNYSPRLDVATLEEATGKMFEATAVSSEQNPVIIIAVVAVAGTIILVFMVFGFIIGRRHCGYSKADQEGDEELYFHSLVTNEHLSVL

SEQ ID NO: 94044 - protein, 80 aa, Homo sapiens
VQNMAFQYGKHMAMSHKINSDVQPFIKEKTSDSMTFNLNSAPVVLHQEFLGRDLWIKQIGESSSTEVQLSNFQQMLLSTL

SEQ ID NO: 94045 - protein, 160 aa, Homo sapiens
MSVCYRPPGNETLLSWKTSRATGTAFLLLAALLGLPGNGFVVWSLAGWRPARGRPLAATLVLHLALADGAVLLLTPLFVAFLTRQAWPLGQAGCKAVYYVCALSMYASVLLTGLLSLQRCLAVTRPFLAPRLRSPALARRLLLAVWLAALLLAVPAAVYR

SEQ ID NO: 94046 - protein, 323 aa, Homo sapiens
MGTLRDLQYALQEKIEELRQRDALIDELELELDQKDELIQKLQNELDKYRSVIRPATQQAQKQSASTLQGEPRTKRQAISAEPTAFDIQDLSHVTLPFYPKSPQSKDLIKEAILDNDFMKNLELSQIQEIVDCMYPVEYGKDSCIIKEGDVGSLVYVMEDGKVEVTKEGVKLCTMGPGKVFGELAILYNCTRTATVKTLVNVKLWAIDRQCFQTIMMRTGLIKHTEYMEFLKSVPTFQSLPEEILSKLADVLEETHYENGEYIIRQGARGDTFFIISKGTVNVTREDSPSEDPVFLRTLGKGDWFGEKALQGWTWNLFEYVVE

SEQ ID NO: 94047 - protein, 133 aa, Homo sapiens
MAASRLELNLVRLLSRCEAMAAEKRDPDEWRLEKYVGALEDMLQALKVHASKPASEVINEYSWKVDFLKGMLQAEKLTSSSEKALANQFLAPGRVPTTARERVPATKTVHLQSRARYTSEMRSELLGTVGLLP

SEQ ID NO: 94048 - protein, 2212 aa, Homo sapiens
MVANFFKSLILPYIHKLCKGMFTKKLGNTNKNKEYRQQKKDQDFPTAGQTKSPKFSYTFKSTVKKIAKCSSTHNLSTEEDEASKEFSLSPTFSYRVAIANGLQKNAKVTNSDNEDLLQELSSIESSYSESLNELRSSTENQAQSTHTMPVRRNRKSSSSLAPSEGSSDGERTLHGLKLGALRKLRKWKKSQECVSSDSELSTMKKSWGIRSKSLDRTVRNPKTNALEPGFSSSGCISQTHDVMEMIFKELQGISQIETELSELRGHVNALKHSIDEISSSVEVVQSEIEQLRTGFVQSRRETRDIHDYIKHLGHMGSKASLRFLNVTEERFEYVESVVYQILIDKMGFSDAPNAIKIEFAQRIGHQRDCPNAKPRPILVYFETPQQRDSVLKKSYKLKGTGIGISTDILTHDIRERKEKGIPSSQTYESMAIKLSTPEPKIKKNNWQSPDDSDEDLESDLNRNSYAVLSKSELLTKGSTSKPSSKSHSARSKNKTANSSRISNKSDYDKISSQLPESDILEKQTTTHYADATPLWHSQSDFFTAKLSRSESDFSKLCQSYSEDFSENQFFTRTNGSSLLSSSDRELWQRKQEGTATLYDSPKDQHLNGGVQGIQGQTETENTETVDSGMSNGMVCASGDRSHYSDSQLSLHEDLSPWKEWNQGADLGLDSSTQEGFDYETNSLFDQQLDVYNKDLEYLGKCHSDLQDDSESYDLTQDDNSSPCPGLDNEPQGQWVGQYDSYQGANSNELYQNQNQLSMMYRSQSELQSDDSEDAPPKSWHSRLSIDLSDKTFSFPKFGSTLQRAKSALEVVWNKSTQSLSGYEDSGSSLMGRFRTLSQSTANESSTTLDSDVYTEPYYYKAEDEEDYTEPVADNETDYVEVMEQVLAKLENRTSITETDEQMQAYDHLSYETPYETPQDEGYDGPADDMVSEEGLEPLNETSAEMEIREDENQNIPEQPVEITKPKRIRPSFKEAALRAYKKQMAELEEKILAGDSSSVDEKARIVSGNDLDASKFSALQVCGGAGGGLYGIDSMPDLRRKKTLPIVRDVTLAARKSGLSLAMVIRTSLNNEELKMHVFKKTLQALIYPMSSTIPHNFEVWTATTPTYCYECEGLLWGIARQGMKCLECGVKCHEKCQDLLNADCLQRAAEKSSKHGAEDKTQTIITAMKERMKIREKNRPEVFEVIQEMFQISKEDFVQFTKAAKQSVLDGTSKWSAKITITVVSAQGLQAKDKTGSSDPYVTVQVGKNKRRTKTIFGNLNPVWDEKFYFECHNSTDRIKVRVWDEDDDIKSRVKQHFKKESDDFLGQTIVEVRTLSGEMDVWYNLEKRTDKSAVSGAIRLKINVEIKGEEKVAPYHIQYTCLHENLFHYLTEVKSNGGVKIPEVKGDEAWKVFFDDASQEIVDEFAMRYGIESIYQAMTHFSCLSSKYMCPGVPAVMSTLLANINAFYAHTTVSTNIQVSASDRFAATNFGREKFIKLLDQLHNSLRIDLSKYRENFPASNTERLQDLKSTVDLLTSITFFRMKVLELQSPPKASMVVKDCVRACLDSTYKYIFDNCHELYSQLTDPSKKQDIPREDQGPTTKNLDFWPQLITLMVTIIDEDKTAYTPVLNQFPQELNMGKISAEIMWTLFALDMKYALEEHENQRLCKSTDYMNLHFKVKWFYNEYVRELPAFKDAVPEYSLWFEPFVMQWLDENEDVSMEFLHGALGRDKKDGFQQTSEHALFSCSVVDVFAQLNQSFEIIKKLECPNPEALSHLMRRFAKTINKVLLQYAAIVSSDFSSHCDKENVPCILMNNIQQLRVQLEKMFESMGGKELDSEASTILKELQVKLSGVLDELSVTYGESFQVIIEECIKQMSFELNQMRANGNTTSNKNSAAMDAEIVLRSLMDFLDKTLSLSAKICEKTVLKRVLKELWKLVLNKIEKQIVLPPLTDQTGPQMIFIAAKDLGQLSKLKEHMIREDARGLTPRQCAIMEVVLATIKQYFHAGGNGLKKNFLEKSPDLQSLRYALSLYTQTTDALIKKFIDTQTSQSRSSKDAVGQISVHVDITATPGTGDHKVTVKVIAINDLNWQTTAMFRPFVEVCILGPNLGDKKRKQGTKTKSNTWSPKYNETFQFILGKENRPGAYELHLSVKDYCFAREDRIIGMTVIQLQNIAEKGSYGAWYPLLKNISMDETGLTILRILSQRTSDDVAKEFVRLKSETRSTEESA

SEQ ID NO: 94049 - protein, 35 aa, Homo sapiens
MSRVLQKDAEQESQMRAEIQDMKQELSTVNMMDEF

SEQ ID NO: 94050 - protein, 485 aa, Homo sapiens
MQLPRWWELGDPCAWTGQGRGTRRMSPATTGTFLLTVYSIFSKVHSDRNVYPSAGVLFVHVLEREYFKGEFPPYPKPGEISNDPITFNTNLMGYPDRPGWLRYIQRTPYSDGVLYGSPTAENVGKPTIIEITAYNRRTFETARHNLIINIMSAEDFPLPYQAEFFIKNMNVEEMLASEVLGDFLGAVKNVWQPERLNAINITSALDRGGRVPLPINDLKEGVYVMVGADVPFSSCLREVENPQNQLRCSQEMEPVITCDKKFRTQFYIDWCKISLVDKTKQVSTYQEVIRGEGILPDGGEYKPPSDSLKSRDYYTDFLITLAVPSAVALVLFLILAYIMCCRREGVEKRNMQTPDIQLVHHSAIQKSTKELRDMSKNREIAWPLSTLPVFHPVTGEIIPPLHTDNYDSTNMPLMQTQQWSFAPVAQAGVQWSDLGSLQPPPPRNLPHQTQIPQQQTTGDFRLTTFQRFEVNGIPEERKLTEAMNL

SEQ ID NO: 94051 - protein, 308 aa, Homo sapiens
MAVSRSSLDPPASWPYDGPQPHGLDPPASWPGVGPGTSRPSVLSRRVLLPLLFLLPLSSGYKEDTTNPVCGEPWWSEDLEMTRHWPWEVSLRMENEHVCGGALIDPSWVVTAAHCIQGTKEYSVVLGTSKLQPMNFSRALWVPVRDIIMHPKYWGRAFIMGDVALVHLQTPVTFSSTANSMLTPELQEAEVFIMDNKRCDRHYKKSFFPPVVPLVLGDMICATNYGENLCYGDSGGPLACEVEGRWILAGVLSWEKACVKAQNPGVYTRITKYTKWIKKQMSNGAFSGPCASACLLFLCWLLQPQMGS

SEQ ID NO: 94052 - protein, 885 aa, Homo sapiens
MASNQNSPIRTFGLNLSSDSSALGAVASDSEQSKTEEERESRSLFPGSLKPKLGKRDYLEKAGELIKLALKKEEEDDYEAASDFYRKGVDLLLEGVQGESSPTRREAVKRRTAEYLMRAESISSLYGKPQLDDVSQPPGSLSSRPLWNLRSPAEELKAFRVLGVIDKVLLVMDTRTEQTFILKGLRKSSEYSRNRKTIIPRCVPNMVCLHKYIISEESVFLVLQHAEGGKLWSYISKFLNRSPEESFDIKEVKKPTLAKVHLQQPTSSPQDSSSFESRGSDGGSMLKALPLKSSLTPSSQDDSNQEDDGQDSSPKWPDSGSSSEEECTTSYLTLCNEYGQEKIEPGSLNEEPFMKTEGNGVDTKAIKSFPAHLAADSDSPSTQLRAHELKFFPNDDPEAVSSPRTSDSLSRSKNSPMEFFRIDSKDSASELLGLDFGEKLYSLKSEPLKPFFTLPDGDSASRSFNTSESKVEFKAQDTISRGSDDSVPVISFKDAAFDDVSGTDEGRPDLLVNLPGELESTREAAAMGPTKFTQTNIGIIENKLLEAPDVLCLRLSTEQCQAHEEKGIEELSDPSGPKSYSITEKHYAQEDPRMLFVAAVDHSSSGDMSLLPSSDPKFQGLGVVESAVTANNTEESLFRICSPLSGANEYIASTDTLKTEEVLLFTDQTDDLAKEEPTSLFQRDSETKGESGLVLEGDKEIHQIFEDLDKKLALASRFYIPEGCIQRWAAEMVVALDALHREGIVCRDLNPNNILLNDRGHIQLTYFSRWSEVEDSCDSDAIERMYCAPEVGAITEETEACDWWSLGAVLFELLTGKTLVECHPAGINTHTTLNMPECVSEEARSLIQQLLQFNPLERLGAGVAGVEDIKSHPFFTPVDWAELMR

SEQ ID NO: 94053 - protein, 253 aa, Homo sapiens
MVLGPEQKMSDDSVSGDHGESASLGNINPAYSNPSLSQSPGDSEEYFATYFNEKISIPEEEYSCFSFRKLWAFTGPGFLMSIAYLDPGNIESDLQSGAVAGFKLLWILLLATLVGLLLQRLAARLGVVTGLHLAEVCHRQYPKVPRVILWLMVELAIIGSDMQEVIGSAIAINLLSVGRIPLWGGVLITIADTFVFLFLDKYGLRKLEAFFGFLITIMALTFGYEAVALHRLNRLWASWELSSCHTTCTCILP

SEQ ID NO: 94054 - protein, 123 aa, Homo sapiens
MAALTTLFKYIDENQDRYIKKLAKWVAIQSVSAWPEKRGEIRRMMEVAAADVKQLGGSVELVDIGKQKLPDGSEIPLPPILLGRLGSDPQKKTVCIYGHLDVQPAALEDGWDSEPFTLVERDG

SEQ ID NO: 94055 - protein, 200 aa, Homo sapiens
GTTVLLWSLLRSSPGVERVCFRARIQPWHGGLLQPLPCSFEMGLPRRRFSSEAASYLLKSILAESGSPETKKPTFMDEEVQSILTKMTGLNLQKTFKPAIQELKPPTYKLMTQAQLEEATRQAVEAAKVRLKMPPVLEERVPINDVLAEDKILEGTETTKYVFTDISYSIPHRERFIVVREPSGTLRKASWEERDRMIQV

SEQ ID NO: 94056 - protein, 713 aa, Homo sapiens
MDISIQRNGSIVAGYEVVGSSSASELLSAIEHVAEKAKTALHKLFPLEDGSFRVFGKAQCNDIVFGFGSKDDEYTLPCSSGYRGNITAKCESSGWQVIRETCVLSLLEELNKNFSMIVGNATEAAVSSFVQNLSVIIRQNPSTTVGNLASVVSILSNISSLSLASHFRVSNSTMEDVISIADNILNSASVTNWTVLLREEKYASSRLLETLENISTLVPPTALPLNFSRKFIDWKGIPVNKSQLKRGYSYQIKMCPQNTSIPIRGRVLIGSDQFQRSLPETIISMASLTLGNILPVSKNGNAQVNGPVISTVIQNYSINEVFLFFSKIESNLSQPHCVFWDFSHLQWNDAGCHLVNETQDIVTCQCTHLTSFSILMSPFVPSTIFPVVKWITYVGLGISIGSLILCLIIEALFWKQIKKSQTSHTRRICMVNIALSLLIADVWFIVGATVDTTVNPSGVCTAAVFFTHFFYLSLFFWMLMLGILLAYRIILVFHHMAQHLMMAVGFCLGYGCPLIISVITIAVTQPSNTYKRKDVCWLNWSNGSKPLLAFVVPALAIVAVNFVVVLLVLTKLWRPTVGERLSRDDKATIIRVGKSLLILTPLLGLTWGFGIGTIVDSQNLAWHVIFALLNAFQGFFILCFGILLDSKLRQLLFNKLSALSSWKQTEKQNSSDLSAKPKFSKPFNPLQNKGHYAFSHTGDSSDNIMLTQFVSNE

SEQ ID NO: 94057 - protein, 143 aa, Homo sapiens
MIGVNSIHSSAGRLRSRSLCSVRYGRTHRGAETLCYGWPQRSRSLKPVLYTDLVVSRLQSRKKKKAALYSSIKNEKLQWAIDEEELRRSLSELADPNPKVIKRISGGSGSGSSPFLDLTPEPGAAVYKHGALVRKVHADPDCR

SEQ ID NO: 94058 - protein, 650 aa, Homo sapiens
MNTSIPYQQNPYNPRGSSNVIQCYRCGDTCKGEVVRVHNNHFHIRCFTCQVCGCGLAQSGFFFKNQEYICTQDYQQLYGTRCDSCRDFITGEVISALGRTYHPKCFVCSLCRKPFPIGDKVTFSGKECVCQTCSQSMASSKPIKIRGPSHCAGCKEEIKHGQSLLALDKQWHVSCFKCQTCSVILTGEYISKDGVPYCESDYHAQFGIKCETCDRYISGRVLEAGGKHYHPTCARCVRCHQMFTEGEEMYLTGSEVWHPICKQAARAEKKLKHRRTSETSISPPGSSIGSPNRVICAKVDNEILNYKDLAALPKVKSIYEVQRPDLISYEPHSRYMSDEMLERCGYGESLGTLSPYSQDIYENLDLRQRRASSPGYIDSPTYSRQGMSPTFSRSPHHYYRSAGDSNIYRKPPIYKRHGDLSTATKSKTSEDISQTSKYSPIYSPDPYYASESEYWTYHGSPKVPRARRFSSGGEEDDFDRSMHKLQSGIGRLILKEEMKARSSSYADPWTPPRSSTSSREALHTAGYEMSLNGSPRSHYLADSDPLISKSASLPAYRRNGLHRTPSADLFHYDSMNAVNWGMREYKIYPYELLLVTTRGRNRLPKDVDRTRLERHLSQEEFYQVFGMTISEFDRLALWKRNELKKQARLF

SEQ ID NO: 94059 - protein, 79 aa, Homo sapiens
  MOD_RES (1)..(1): Any amino acid
XPSPLRLENIRIQQEQKRGRFHGGKSSGNSSSSLGEMVSGTFRATPTSTDGAHSSLRCCTVNASGGVSGAVTERLRGFQ

SEQ ID NO: 94060 - protein, 250 aa, Homo sapiens [sequence omitted]

SEQ ID NO: 94061 - protein, 154 aa, Homo sapiens
MATLGPEEEAEKAQADFVKSAVRDVRYGPESLSEFTQWRVRMISEELVAASRTQVQKANSPEKPPEAGAAHKPRARLAALKRPDDVPLSLSPSKRACASPSAQVEGSPVAGSDGSQPAVKLEPLHFLQCHSKNNSPQDLETQLWACAFEPAWEE

SEQ ID NO: 94062 - protein, 412 aa, Homo sapiens
MSSAFQASLEGGLARITQGQPLEVAFGSQVTLRNVFGKPVPCWLHSHQDTYPMIYENGRGSSHQQQVTCYPFKDVNNWWIVKDPRRHQLVVSSPPRPVRHGDMVQLVHGMTTRSLNTHDVAAPLSPHSQEVSCYIDYNISMPAQNLWRLEIVNRGSDTDVWKTILSEVRFVHVNTSAVLKLSGAHLPDWGYRQLEIVGEKLSRGYHGSTVWNVEEHRYGASQEQRERERELHSPAQVDVSRNLSFMARFSELQAQIHLLGNIVIWVSGSLALAIYALLSLWYLLRRRRNVHDLPQDAWLRWVLAGALCAGGWAVNYLPFFLMEKTLFLYHYLPALTFQILLLPVVLQHISDHLCRSQLQRSIFSALVVAWYSSACHVSNTLRPLTYGDKSLSPHELKALRWKDSWDILIRKH

SEQ ID NO: 94063 - protein, 124 aa, Homo sapiens
MKWKTVSTIFLVVVLYLIIGATVFKALEQPHEISQRTTIVIQKQTFISQHSCVNSTELDELIQQIVAAINAGIIPLGNTSNQISHWDLGSSFFFAGTVITTIGFGNISPRTEGGKIFCIIYALL

SEQ ID NO: 94064 - protein, 702 aa, Homo sapiens
MKSAKPQVNHSQHGESQRALSPLQSTLSSAASPSQAYETYIENGLICLKHKIRNIEKKKLKLEDYKDRLKSGEHLNPDQLEAVEKYEEVLHNLEFAKELQKTFSGLSLDLLKAQKKAQRREHMLKLEAEKKKLRTILQVQYVLQNLTQEHVQKDFKGGLNGAVYLPSKELDYLIKFSKLTCPERNESLSVEDQMEQSSLYFWDLLEGSEKAVVGTTYKHLKDLLSKLLNSGYFESIPVPKNAKEKEVPLEEEMLIQSEKKTQLSKTESVKESESLMEFAQPEIQPQEFLNRRYMTEVDYSNKQGEEQPWEADYARKPNLPKRWDMLTEPDGQEKKQESFKSWEASGKHQEVSKPAVSLEQRKQDTSKLRSTLPEEQKKQEISKSKPSPSQWKQDTPKSKAGYVQEEQKKQETPKLWPVQLQKEQDPKKQTPKSWTPSMQSEQNTTKSWTTPMCEEQDSKQPETPKSWENNVESQKHSLTSQSQISPKSWGVATASLIPNDQLLPRKLNTEPKDVPKPVHQPVGSSSTLPKDPVLRKEKLQDLMTQIQGTCNFMQESVLDFDKPSSAIPTSQPPSATPGSPVASKEQNLSSQSDFLQEPLQATSSPVTCSSNACLVTTDQASSGSETEFMTSETPEAAIPPGKQPSSLASPNPPMAKGSEQGFQSPPASSSSVTINTAPFQAMQTVFNVNAPLPPRKEQEIKE

SEQ ID NO: 94065 - protein, 273 aa, Homo sapiens
MANNDAVLKRLEQKGAEADQIIEYLKQQVSLLKEKAILQATLREEKKLRVENAKLKKEIEELKQELIQAEIQNGVKQIPFPSGTPLHANSMVSENVIQSTAVTTVSSGTKEQIKGGTGDEKKAKEKIEKKGEKKEKKQQSIAGSADSKPIDVSRLDLRIGCIITARKHPDADSLYVEEVDVGEIAPRTVVSGLVNHVPLEQMQNRMVILLCNLKPAKMRGVLSQAMVMCASSPEKIEILAPPNGSVPGDRITFDAFPASAVCLEKLQTFNSSL

SEQ ID NO: 94066 - protein, 138 aa, Homo sapiens
MAEISRIQYEMEYTEGISQRMRVPEKLKVAPPNADLEQGFQEGVPNASVIMQVPERIVVAGNNEDVSFSRPADLDLIQSTPFKPLALKTPPRVLTLSERPLDFLDLERPPTTPQNEEIRAVGRLKRERSMSENAVRQN

SEQ ID NO: 94067 - protein, 127 aa, Homo sapiens
MEESHFNSNPYFWPSIPTVSGQIENTMFINKMKDQLLPEKGCGLAPPHYPTLLTVPASVSLPSGISMDTESKSDQLTPHSQASVTQNITVVPVPSTGLMTAGVSCSQRWRREGSQSRGPGLVITSPS

SEQ ID NO: 94068 - protein, 73 aa, Homo sapiens
MSLLRNRLQALPALCLCVLVLACIGACQPEAQEGTLSPPPKLKMSRWSLVRGRMKELLETVVNRTRDGWQWFW

SEQ ID NO: 94069 - protein, 700 aa, Homo sapiens
MEIYSPDMSEVAAERSSSPSTQLSADPSLDGLPAAEDMPEPQTEDGRTPGLVGLAVPCCACLEAERLRGCLNSEKICIVPILACLVSLCLCIAGLKWVFVDKIFEYDSPTHLDPGGLGQDPIISLDATAASAVWVSSEAYTSPVSRAQSESEVQVTVQGDKAVVSFEPSAAPTPKNRIFAFSFLPSTAPSFPSPTRNPEVRTPKSATQPQTTETNLQTAPKLSTSTSTTGTSHLVKCAEKEKTFCVNGGECFMVKDLSNPSRYLCKCPNEFTGDRCQNYVMASFYKHLGIEFMEAEELYQKRVLTITGICIALLVVGIMCVVAYCKTKKQRKKLHDRLRQSLRSERNNMMNIANGPHHPNPPPENVQLVNQYVSKNVISSEHIVEREAETSFSTSHYTSTAHHSTTVTQTPSHSWSNGHTESILSESHSVIVMSSVENSRHSSPTGGPRGRLNGTGGPRECNSFLRHARETPDSYRDSPHSERYVSAMTTPARMSPVDFHTPSSPKSPPSEMSPPVSSMTVSMPSMAVSPFMEEERPLLLVTPPRLREKKFDHHPQQFSSFHHNPAHDSNSLPASPLRIVEDEEYETTQEYEPAQEPVKKLANSRRAKRTKPNGHIANRLEVDSNTSSQSSNSESETEDERVGEDTPFLGIQNPLAASLEATPAFRLADSRTNPAGRFSTQEEIQARLSSVIANQDPIAV

SEQ ID NO: 94070 - protein, 245 aa, Homo sapiens
YFNRNDAKEPKAVMKIEHLNATFQPAKIGHPHGLQVTYLKDNSTRNIFIYHEDGKTCLSYKIRIFIKIAPSERKASWPRPQQHQGHREIVDWFNALRAARFHYLQVAFPGAGDADLVPKLSRNYLKEGYMEKTGPKQTEGFRKRWFTMDDRRLMYFKDPLDAFARGEVFIGSKESGYTVLHGFPPSTQGHHWPHGITIVTPDRKFLFACETESDQREWVAAFQKAVDRPMLPQEYAVEAHFKHKP

SEQ ID NO: 94071 - protein, 186 aa, Homo sapiens
  MOD_RES (1)..(1): Any amino acid
XLATDLRAQLQILANMDSQLKELQSQHTHCAQDLAMKDELLCQLTQSNEEQAAQWQKEEMALKHMQAELQQQQAVLAKEVRDLKETLEFADQENQVAHLELGQVECQLKTTLEVLRERSLQCENLKDTVENLTAKLASTIADNQEQDLEKTRQYSQKLGLLTEQLQSLTLFLQTKLKEKLFFLLCP

SEQ ID NO: 94072 - protein, 130 aa, Homo sapiens
DLAVEMHEPYTFLNGLTVADMEDLLEDIQVYMELEQGKNADFWRDMTTITEDEISKLRKLEASGKGPGHRGQNPRWWPQPGHGLLGEPPAAASCPHGTGPVSTRLRERHQDVLRQKLYKLKQEQGVESEP

SEQ ID NO: 94073 - protein, 200 aa, Homo sapiens
MGRRPARCYRYCKNKPYPKSRFCRGVPDAKIRIFDLGRKKAKVDEFPLCGHMVSDEYEQLSSEALEAARICANKYMVKSCGKDGFHIRVRLHPFHVIRINKMLSCAGADRLQTGMRGAFGKPQGTVARVHIGQVIMSIRTKLQNKEHVIEALRRAKFKFPGRQKIHISKKWGFTKFNADEFEDMVAEKRLIPDGCGVKYI

SEQ ID NO: 94074 - protein, 904 aa, Homo sapiens
MGVQGLWKLLECSGRQVSPEALEGKILAVDISIWLNQALKGVRDRHGNSIENPHLLTLFHRLCKLLFFRIRPIFVFDGDAPLLKKQTLVKRRQRKDLASSDSRKTTEKLLKTFLKRQAIKTAFRSKRDEALPSLTQVRRENDLYVLPPLQEEEKHSSEEEDEKEWQERMNQKQALQEEFFHNPQAIDIESEDFSSLPPEVKHEILTDMKEFTKRRRTLFEAMPEESDDFSQYQLKGLLKKNYLNQHIEHVQKEMNQQHSGHIRRQYEDEGGFLKEVESRRVVSEDTSHYILIKGIQAKTVAEVDSESLPSSSKMHGMSFDVKSSPCEKLKTEKEPDATPPSPRTLLAMQAALLGSSSEEELESENRRQARGRNAPAAVDEGSISPRTLSAIKRALDDDEDVKVCAGDDVQTGGPGAEEMRINSSTENSDEGLKVRDGKGIPFTATLASSSVNSAEEHVASTNEGREPTDSVPKEQMSLVHVGTEAFPISDESMIKDRKDRLPLESAVVRHSDAPGLPNGRELTPASPTCTNSVSKNETHAEVLEQQNELCPYESKFDSSLLSSDDETKCKPNSASEVIGPVSLQETSSIVSVPSEAVDNVENVVSFNAKEHENFLETIQEQQTTESAGQDLISIPKAVEPMEIDSEESESDGSFIEVQSVISDEELQAEFPETSKPPSEQGEEELVGTREGEAPAESESLLRDNSERDDVDGEPQEAEKDAEDSLHEWQDINLEELETLESNLLAQQNSLKAQKQQQERIAATVTGQMFLESQELLRLFGIPYIQAPMEAEAQCAILDLTDQTSGTITDDSDIWLFGARHVYRNFFNKNKFVEYYQYVDFHNQLGLDRNKLINLAYLLGSDYTEGIPTVGCVTAMEILNEFPGHGLEPLLKFSCCRGLPQTRGG

SEQ ID NO: 94075 - protein, 111 aa, Homo sapiens
  MOD_RES (1)..(1): Any amino acid
XRLYSKDDEPAVKLQLLPHKHDIITLLGVGGHWVTTEENLQLDPPDSHCLFLKGATLAFLNDEVWNLSNVQQGKYLCILKDVMEKLSTGVFRPQSDEHIPVFEARIFFGNC

SEQ ID NO: 94076 - protein, 165 aa, Homo sapiens
MEEPQSDPSVEPPLSQETFSDLWKLLPENNVLSPLPSQAMDDLMLSPDDIEQWFTEDPGPDEAPRMPEAAPPVAPAPAAPTPAAPAPAPSWPLSSSVPSQKTYQGSYGFRLGFLHSGTAKSVTCTYSPALNKMFCQLAKTCPVQLWVDSTPPPGTRVRAMAIYKQ

SEQ ID NO: 94077 - protein, 878 aa, Homo sapiens
MPVRKQDTQRALHLLEEYRSKLSQTEDRQLRSSIERVINIFQSNLFQALIDIQEFYEVTLLDNPKCIDRSKPSEPIQPVNTWEISSLPSSTVTSETLPSSLSPSVEKYRYQDEDTPPQEHISPQITNEVIGPELVHVSEKNLSEIENVHGFVSHSHISPIKANPPPVLVNTDSLETPTYVNGTDADYEYEEITLERGNSGLGFSIAGGTDNPHIGDDSSIFITKIITGGAAAQDGRLRVNDCILRVNEVDVRDVTHSKAVEALKEAGSIVRLYVKRRKPVSEKIMEIKLIKGPKGLGFSIAGGVGNQHIPGDNSIYVTKIIEGGAAHKDGKLQIGDKLLAVNNVCLEEVTHEEAVTALKNTSDFVYLKVAKPTSMYMNDGYAPPDITNSSSQPVDNHVSPSSFLGQTPASPARYSPVSKAVLGDDEITREPRKVVLHRGSTGLGFNIVGGEDGEGIFISFILAGGPADLSGELRKGDRIISVNSVDLRAASHEQAAAALKNAGQAVTIVAQYRPEEYSRFEAKIHDLREQMMNSSISSGSGSLRTSQKRSLYVRALFDYDKTKDSGLPSQGLNFKFGDILHVINASDDEWWQARQVTPDGESDEVGVIPSKRRVEKKERARLKTVKFNSKTRDKGEIPDDMGSKGLKHVTSNASDSESSYHEYGCSKGGQEEYVLSYEPVNQQEVNYTRPVIILGPMKDRINDDLISEFPDKFGSCVPHTTRPKRDYEVDGRDYHFVTSREQMEKDIQEHKFIEAGQYNNHLYGTSVQSVREVAEKGKHCILDVSGNAIKRLQIAQLYPISIFIKPKSMENIMEMNKRLTEEQARKTFERAMKLEQEFTEHFTAIVQGDTLEDIYNQVKQIIEEQSGSYIWVPAKEKL

SEQ ID NO: 94078 - protein, 73 aa, Homo sapiens
MLLNGDCPESLKKEAAAAEPPRENGLDEAGPGDETTGQEVIVIQDTGFSVKILAPGIEPFSLQVSPQEMVQEI

SEQ ID NO: 94079 - protein, 699 aa, Homo sapiens
MNPIALGSRWLAYAENKLIRCHQSRGGACGDNIQSYTATVISAAKTLKSGLTMVGKVVTQLTGTLPSGVTEDDVAIHSNSRRSPLVPGIITVIDTETVGEGQVLVSEDSDSDGIVAHFPAHEKPVCCMAFNTSGMLLVTTDTLGHDFHVFQILTHPWSSSQCAVHHLYTLHRGETEAKVQDICFSHDCRWVVVSTLRGTSHVFPINPYGGQPCVRTHMSPRVVNRMSRFQKSAGLEEIEQELTSKQGGRCSPVPGLSSSPSGSPLHGKLNSQDSYNNFTNNNPGNPRLSPLPSLMVVMPLAQIKQPMTLGTITKRTGPYLFGAGCFSIKAPCKVKPPPQISPSKSMGGEFCVAAIFGTSRSWFANNAGLKREKDQSKQVVVESLYIISCYGTLVEHMMEPRPLSTAPKISDDTPLEMMTSPRASWTLVRTPQWNELQPPFNANHPLLLAADAVQYYQFLLAGLVPPGSPGPITRHGSYDSLASDHSGQEDEEWLSQVEIVTHTGPHRRLWMGPQFQFKTIHPSGQTTVISSSSSVLQSHGPSDTPQPLLDFDTDDLDLNSLRIQPVRSDPVSMPGSSRPVSDRRGVSTVIDAASGTFDRSVTLLEVCGSWPEGFGLRHMSSMEHTEEGLRERLADAMAESPSRDVVGSGTELQREGSIETLSNSSGSTSGSIPRNFDGYRSPLPTNESQPLSLFPTGFP

SEQ ID NO: 94080 - protein, 187 aa, Homo sapiens
MPGPRVWGKYLWRSPHSKGCPGAMWWLLLWGVLQACPTRGSVLLAQELPQQLTSPGYPEPYGKGQESSTDIKAPEGFAVRLVFQDFDLEPSQDCAGDSVTISFVGSDPSQFCGQQGSPLGRPPGQREFVSSGRSLRLTFRTQPSSENKTAHLHKGFLALYQTVGECPSWGCREGASVPSHDPGIFKP

SEQ ID NO: 94081 - protein, 23 aa, Homo sapiens
MEREGIWHSTLGETWEPNNWLEG

SEQ ID NO: 94082 - protein, 451 aa, Homo sapiens
MAASCLVLLALCLLLPLLLLGGWKRWRRGRAARHVVAVVLGDVGRSPRMQYHALSLAMHGFSVTLLGFCNSKPHDELLQNNRIQIVGLTELQSLAVGPRVFQYGVKVVLQAMYLLWKLMWREPGAYIFLQNPPGLPSIAVCWFVGCLCGSKLVIDWHNYGYSIMGLVHGPNHPLVLLAKWYEKFFGRLSHLNLCVTNAMREDLADNWHIRAVTVYDKPASFFKETPLDLQHRLFMKLGSMHSPFRARSEPEDPVTERSAFTERDAGSGLVTRLRERPALLVSSTSWTEFEQLTLDGHNLPSLVCVITGKGPLREYYSRLIHQKHFQHIQVCTPWLEAEDYPLLLGSADLGVCLHTSSSGLDLPMKVVDMFGCCLPVCAVNFKCLHELVKHEENGLVFEDSEELAAQLQMLFSNFPDPAGKLNQFRKNLRESQQLRWDESWVQTVLPLVMDT

SEQ ID NO: 94083 - protein, 168 aa, Homo sapiens
MAASPHTLSSRLLTGCVGGSVWYLERRTIQDSPHKFLHLLRNVNKQWITFQHFSFLKRMYVTQLNRSHNQQVRPKPEPVASPFLEKTSSGQAKAEIYEMRPLSPPSLSLSRKPNEKELIELEPDSVIEDSIDVGKETKEEKRWKEMKLQVYDLPGILARLSKIKLTVF

SEQ ID NO: 94084 - protein, 644 aa, Homo sapiens
MTELYDYPKYSCHFKKGKRYFYFYNTGLQNQRVLYVQDSLEGEARVFLDPNILSDDGTVALRGYAFSEDGEYFAYGLSASGSDWVTIKFMKVDGAKELPDVLERVKFSCMAWTHDGKGMFYNSYPQQDGKSDGTETSTNLHQKLYYHVLGTDQSEDILCAEFPDEPKWMGGAELSDDGRYVLLSIREGCDPVNRLWYCDLQQESSGIAGILKWVKLIDNFEGEYDYVTNEGTVFTFKTNRQSPNYRVINIDFRDPEESKWKVLVPEHEKDVLEWIACVRSNFLVLCYLHDVKNILQLHDLTTGALLKTFPLDVGSIVGYSGQKKDTEIFYQFTSFLSPGIIYHCDLTKEELEPRVFREVTVKGIDASDYQTVQIFYPSKDGTKIPMFIVHKKGIKLDGSHPAFLYGYGGFNISITPNYSVSRLIFVRHMGGILAVANIRGGGEYGETWHKGGILANKQNCFDDFQCAAEYLIKEGYTSPKRLTINGGSNGGLLVAACANQRPDLFGCVIAQVGVMDMLKFHKYTIGHAWTTDYGCSDSKQHFEWLVKYSPLHNVKLPEADDIQYPSMLLLTADHDDRVVPLHSLKFIATLQYIVGRSRKQSNPLLIHVDTKAGHGAGKPTAKVIEEVSDMFAFIARCLNVDWIP

SEQ ID NO: 94085 - protein, 137 aa, Homo sapiens
MCGNTMSVPLLTDAATVSGAERETAAVIFLHGLGDTGHSWADALSTIRLPHVKYICPHAPRIPVTLNMKMVMPSWFDLMGLSPDAPEDEAGIKKAAENRRGPVPLHGPHLPPPSGWHRGVELLAASAPGLPPGECPH

SEQ ID NO: 94086 - protein, 188 aa, Homo sapiens
MAAEEMHWPVPMKAIGAQNLLTMPGGVAKAGYLHKKGGTQLQLLKWPLRFVIIHKRCVYYFKSSTSASPQGAFSLSGYNRVMRAAEETTSNNVFPFKIIHISKKHRTWFFSASSEEERKSWMALLRREIGHFHEKKDLPLDTSDSSSDTDSFYGAVERPVDISLSPYPTDNEDYEHDDEDDSYLEPDS

SEQ ID NO: 94087 - protein, 1751 aa, Homo sapiens
MEGFSGASWSTMAKPTSKDSGLKEKFKILLGLGTPRPNPRSAEGKQTEFIITAEILRELSMECGLNNRIRMIGQICEVAKTKKFEEHAVEALWKAVADLLQPERPLEARHAVLALLKAIVQGQGERLGVLRALFFKVIKDYPSNEDLHERLEVFKALTDNGRHITYLEEELADFVLQWMDVGLSSEFLLVLVNLVKFNSCYLDEYIARMVQMICLLCVRTASSVDIEVSLQVLDAVVCYNCLPAESLPLFIVTLCRTINVKELCEPCWKLMRNLLGTHLGHSAIYNMCHLMEDRAYMEDAPLLRGAVFFVGMALWGAHRLYSLRNSPTSVLPSFYQAMACPNEVVSYEIVLSITRLIKKYRKELQVVAWDILLNIIERLLQQLQTLDSPELRTIVHDLLTTVEELCDQNEFHGSQERYFELVERCADQRPESSLLNLISYRAQSIHPAKDGWIQNLQALMERFFRSESRGAVRIKVLDVLSFVLLINRQFYEEELINSVVISQLSHIPEDKDHQVRKLATQLLVDLAEGCHTHHFNSLLDIIEKVMARSLSPPPELEERDVAAYSASLEDVKTAVLGLLVILQTKLYTLPASHATRVYEMLVSHIQLHYKHSYTLPIASSIRLQAFDFLLLLRADSLHRLGLPNKDGVVRFSPYCVCDYMEPERGSEKKTSGPLSPPTGPPGPAPAGPAVRLGSVPYSLLFRVLLQCLKQESDWKVLKLVLGRLPESLRYKVLIFTSPCSVDQLCSALCSMLSGPKTLERLRGAPEGFSRTDLHLAVVPVLTALISYHNYLDKTKQREMVYCLEQGLIHRCASQCVVALSICSVEMPDIIIKALPVLVVKLTHISATASMAVPLLEFLSTLARLPHLYRNFAAEQYASVFAISLPYTNPSKFNQYIVCLAHHVIAMWFIRCRLPFRKDFVPFITKGLRSNVLLSFDDTPEKDSFRARSTSLNERPKRIQTSLTSASLGSADENSVAQADDSLKNLHLELTETCLDMMARYVFSNFTAVPKRSPVGEFLLAGGRTKTWLVGNKLVTVTTSVGTGTRSLLGLDSGELQSGPESSSSPGVHVRQTKEAPAKLESQAGQQVSRGARDRVRSMSGGHGLRVGALDVPASQFLGSATSPGPRTAPAAKPEKASAGTRVPVQEKTNLAAYVPLLTQGWAEILVRRPTGNTSWLMSLENPLSPFSSDINNMPLQELSNALMAAERFKEHRDTALYKSLSVPAASTAKPPPLPRSNTDSAVVMEEGSPGEVPVLVEPPGLEDVEAALGMDRRTDAYSRSSSVSSQEEKSLHAEELVGRGIPIERVVSSEGGRPSVDLSFQPSQPLSKSSSSPELQTLQDILGDPGDKADVGRLSPEVKARSQSGTLDGESAAWSASGEDSRGQPEGPLPSSSPRSPSGLRPRGYTISDSAPSRRGKRVERDALKSRATASNAEKVPGINPSFVFLQLYHSPFFGDESNKPILLPNESQSFERSVQLLDQIPSYDTHKIAVLYVGEGQSNSELAILSNEHGSYRYTEFLTGLGRLIELKDCQPDKVYLGGLDVCGEDGQFTYCWHDDIMQAVFHIATLMPTKDVDKHRCDKKRHLGNDFVSIVYNDSGEDFKLGTIKGQFNFVHVIVTPLDYECNLVSLQCRKDMEGLVDTSVAKIVSDRNLPFVARQMALHANMASQVHHSRSNPTDIYPSKWIARLRHIKRLRQRICEEAAYSNPSLPLVHPPSHSKAPAQTPAEPTPGYEVGQRKRLISSVEDFTEFV

SEQ ID NO: 94088 - protein, 46 aa, Homo sapiens
MAEKVNNFPPLPKFIPLKPCFYQDFEADIPPQHVSMTKRLYYLWMC

SEQ ID NO: 94089 - protein, 81 aa, Homo sapiens
MLQHISLLVKQVQELELKLSGQNAMGSQDSLLEITFRSGALPVLCDPTTPKPEDLHSPPLGAGLADFAHPAGSPLGRRDCL

SEQ ID NO: 94090 - protein, 59 aa, Homo sapiens
  MOD_RES (1)..(1): Any amino acid
XQERAVSRLHIDESPSRRTLAGACTCVSVSMCAWARLHAYVCVDTCPGAQRARVRQLPG

SEQ ID NO: 94091 - protein, 80 aa, Homo sapiens
MATLARLQARSSTVGNQYYFRNSVVDPFRKKENDAAVKIQSWFRGCQVRAYIRHLNRIVTIIQKWWRSFLGRKQYQLTVQ

SEQ ID NO: 94092 - protein, 187 aa, Homo sapiens
  MOD_RES (1)..(1): Any amino acid
XRTTSAGTITPKISKSPEPTWTTPAPGKTQFISLKPKIPLSPEVTHTKPVPTTDIEPVTVRTEATVTTLAPKTSQRTRTRRPRPKHKTTPRPETLQTKLDFGPITPGTSSAPTTTTKRTRRPHPKPKTTPHPEVPQTKLAPKVPQRTHRPHPKPKTTLSPEELQTELVPATIFEPVSPIKEAPGTTF

SEQ ID NO: 94093 - protein, 654 aa, Homo sapiens
MELQPPEASIAVVSIPRQLPGSHSEAGVQGLSAGDDSGTGSRAKLGRRSPLVGPFRESMSGQLGSHCVAQTGLELLASGDPLPSASQNAEMIETGSDCVTQAGLQLLASSDPPALASKNAEVTGTMSQDTEVDMKEVELNELEPEKQPMNAASGAAMSLAGAEKNGLVKIKVAEDEAEAAAAAKFTGLSKEELLKVAGSPGWVRTRWALLLLFWLGWLGMLAGAVVIIVRAPRCRELPAQKWWHTGALYRIGDLQAFQGHGAGNLAGLKGRLDYLSSLKVKGLVLGPIHKNQKDDVAQTDLLQIDPNFGSKEDFDSLLQSAKKKSIRVILDLTPNYRGENSWFSTQVDTVATKVKDALEFWLQAGVDGFQVRDIENLKDASSFLAEWQNITKGFSEDRLLIAGTNSSDLQQILSLLESNKDLLLTSSYLSDSGSTGEHTKSLVTQYLNATGNRWCSWSLSQARLLTSFLPAQLLRLYQLMLFTLPGTPVFSYGDEIGLDAAALPGQPMEAPVMLWDESSFPDIPGAVSANMTVKGQSEDPGSLLSLFRRLSDQRSKERSLLHGDFHAFSAGPGLFSYIRHWDQNERFLVVLNFGDVGLSAGLQASDLPASASLPAKADLLLSTQPGREEGSPLELERLKLEPHEGLLLRFPYAA

SEQ ID NO: 94094 - protein, 177 aa, Homo sapiens
MWPGNAWRAALFWVPRGRRAQSALAQLRGILEGELEGIRGAGTWKSERVITSRQGPHIRVDGVSGGPGTVIFPGLPLPHLSCCIHLLSFTSGILNFCANNYLGLSSHPEVIQAGLQALEEFGAGLSSVRFICGTQSIHKNLEAKIARFHQREDAILYPSCYDANAGLFESRALVQPG

SEQ ID NO: 94095 - protein, 134 aa, Homo sapiens
MGSKERFHWQSHNVKQSGVDDMVLLPQITEDAIAANLRKRFMDDYIFVPWAKAGGGQQMPYFTDREIDLYQGAAQYENPPHIYALTDNMYRNMLIDCENQCVIISGESGAGKTVAAKYIMGYISKVSGGGEKVQ

SEQ ID NO: 94096 - protein, 252 aa, Homo sapiens
  MOD_RES (1)..(1): Any amino acid
XFRCSCAPGYRAPSGRPGPCADVNECLEGDFCFPHGECLNTDGSFACTCAPGYRPGPRGASCLDVDECSEEDLCQSGICTNTDGSFECICPPGHRAGPDLASCLDVDECRERGPALCGSQRCENSPGSYRCVRDCDPGYHAGPEGTCDDVDECRNRSFCGAHAVCQNLPGSFQCLCDQGYEGARDGRHCVDVNECETLQGVCGAALCENVEGSFLCVCPNSPEEFDPMTGRCVPPRTSAGTFPGSQPQAPAS

SEQ ID NO: 94097 - protein, 355 aa, Homo sapiens
MEDDLSWRSWSLLCMEILSPMAKGLFHKAIMESGVAIIPYLEAHDYEKSEDLQVVAHFCGNNASDSEALLRCLRTKPSKELLTLSQKTKSFTRVVDGAFFPNEPLDLLSQKAFKAIPSIIGVNNHECGFLLPMEAPEILSGSNKSLALHLIQNILHIPPQYLHLVANEYFHDKHSLTEIRDSLLDLLGDVFFVVPALITARYHRDAGAPVYFYEFRHRPQCFEDTKPAFVKADHADEVRFVFGGAFLKGDIVMFEGATEEEKLLSRKMMKYWATFARTGNPNGNDLSLWPAYNLTEQYLQLDLNMSLGQRLKEPRVDFWTSTIPLILSASDMLHSPLSSLTFLSLLQPFFFFCAP

SEQ ID NO: 94098 - protein, 1145 aa, Homo sapiens
ATYHANTEREQKKENERIEKERMRRLMAEDEEGYRKLIDQKKDKRLAYLLQQTDEYVANLTELVRQHKAAQVAKEKKKKKKKKAENAEGQTPAIGPDGEPLDETSQMSDLPVKVIHVESGKILTGTDAPKAGQLEAWLEMNPGYEVAPRSDSEESGSEEEEEEEEEEQPQAAQPPTLPVEEKKKIPDPDSDDVSEVDARHIIENAKQDVDDEYGVSQALARGLQSYYAVAHAVTERVDKQSALMVNGVLKQYQIKGLEWLVSLYNNNLNGILADEMGLGKTIQTIALITYLMEHKRINGPFLIIVPLSTLSNWAYEFDKWAPSVVKVSYKGSPAARRAFVPQLRSGKFNVLLTTYEYIIKDKHILAKIRWKYMIVDEGHRMKNHHCKLTQVLNTHYVAPRRLLLTGTPLQNKLPELWALLNFLLPTIFKSCSTFEQWFNAPFAMTGEKVDLNEEETILIIRRLHKVLRPFLLRRLKKEVEAQLPEKVEYVIKCDMSALQRVLYRHMQAKGVLLTDGSEKDKKGKGGTKTLMNTIMQLRKICNHPYMFQHIEESFSEHLGFTGGIVQGLDLYRASGKFELLDRILPKLRATNHKVLLFCQMTSLMTIMEDYFAYRGFKYLRLDGTTKAEDRGMLLKTFNEPGSEYFIFLLSTRAGGLGLNLQSADTVIIFDSDWNPHQDLQAQDRAHRIGQQNEVRVLRLCTVNSVEEKILAAAKYKLNVDQKVIQAGMFDQKSSSHERRAFLQAILEHEEQDESRHCSTGSGSASFAHTAPPPAGVNPDLEEPPLKEEDEVPDDETVNQMIARHEEEFDLFMRMDLDRRREEARNPKRKPRLMEEDELPSWIIKDDAEVERLTCEEEEEKMFGRGSRHRKEVDYSDSLTEKQWLKTLKAIEEGTLEEIEEEVRQKKSSRKRKRDSDAGSSTPTTSTRSRDKDDESKKQKKRGRPPAEKLSPNPPNLTKKMKKIVDAVIKYKDSSSGRQLSEVFIQLPSRKELPEYYELIRKPVDFKKIKERIRNHKYRSLNDLEKDVMLLCQNAQTFNLEGSLIYEDSIVLQSVFTSVRQKIEKEDDSEGEESEEEEEGEEEGSESESRSVKVKIKLGRKEKAQDRLKGGRRRPSRGSRAKPVVSDDDSEEEQEEDRSGSGSEED

SEQ ID NO: 94099 - protein, 297 aa, Homo sapiens
MSMNNSKQLVSPAAALLSNTTCQTENRLSVFFSVIFMTVGILSNSLAIAILMKAYQRFRQKSKASFLLLASGLVITDFFGHLINGAIAVFVYASDKEWIRFDQSNVLCSIFGICMVFSGLCPLLLGSVMAIERCIGVTKPIFHSTKITSKHVKMMLSGVCLFAVFIALLPILGHRDYKIQASRTWCFYNTEDIKDWEDRFYLLLFSFLGLLALGVSLLCNAITGITLLRVKFKSQQHRQGRSHHLEMVIQLLAIMCVSCICWSPFLGYRIILNGKEKYKVYEEQSDFLHSDKTLNEK

SEQ ID NO: 94100 - protein, 445 aa, Homo sapiens
MSWSLHPRNLILYFYALLFLSSTCVAYVATRDNCCILDERFGSYCPTTCGIADFLSTYQTKVDKDLQSLEDILHQVENKTSEVKQLIKAIQLTYNPDESSKPNMIDAATLKSRKMLEEIMKYEASILTHDSSIRYLQEIYNSNNQKIVNLKEKVAQLEAQCQEPCKDTVQIHDITGKVKVDSPSLDCQDIANKGAKQSGLYFIKPLKANQQFLVYCEIDGSGNGWTVFQKRLDGSVDFKKNWIQYKEGFGHLSPTGTTEFWLGNEKIHLISTQSAIPYALRVELEDWNGRTSTADYAMFKVGPEADKYRLTYAYFAGGDAGDAFDGFDFGDDPSDKFFTSHNGMQFSTWDNDNDKFEGNCAEQDGSGWWMNKCHAGHLNGVYYQGGTYSKASTPNGYDNGIIWATWKTRWYSMKKTTMKIIPFNRLTIGEGQQHHLGGAKQAGDV

SEQ ID NO: 94101 - protein, 53 aa, Homo sapiens
VMRDPNTKRSRGFGFVTYATVEEVDAAMNARPHKVDGRVVEPKRAVSREALLI

SEQ ID NO: 94102 - protein, 118 aa, Homo sapiens
MAPHHGQDLELIFLVAAATGKVQLGQSEAEVKKPGASVKVSCKASGYTFTYCSLHWLQQAPGQGLERMRWITLYNGNTNYAKKFQGRVTITRDMSLRTAYIELSSLRSEDSAVYYWAR

SEQ ID NO: 94103 - protein, 724 aa, Homo sapiens
MQSTSNHLWLLSDILGQGATANVFRGRHKKTGDLFAIKVFNNISFLRPVDVQMREFEVLKKLNHKNIVKLFAIEEETTTRHKVLIMEFCPCGSLYTVLEEPSNAYGLPESEFLIVLRDVVGGMNHLRENGIVHRDIKPGNIMRVIGEDGQSVYKLTDFGAARELEDDEQFVSLYGTEEYLHPDMYERAVLRKDHQKKYGATVDLWSIGVTFYHAATGSLPFRPFEGPRRNKEVMYKIITGKPSGAISGVQKAENGPIDWSGDMPVSCSLSRGLQVLLTPVLANILEADQEKCWGFDQFFAETSDILHRMVIHVFSLQQMTAHKIYIHSYNTATIFHELVYKQTKIISSNQELIYEGRRLVLEPGRLAQHFPKTTEENPIFVVSREPLNTIGLIYEKISLPKVHPRYDLDGDASMAKAITGVVCYACRIASTLLLYQELMRKGIRWLIELIKDDYNETVHKKTEVVITLDFCIRNIEKTVKVYEKLMKINLEAAELGEISDIHTKLLRGTIETSLQDIDSRLSPGGSLADAWAHQEGTHPKDRNVEKLQVLLNCMTEIYYQFKKDKAERRLAYNEEQIHKFDKQKLYYHATKAMTHFTDECVKKYEAFLNKSEEWIRKMLHLRKQLLSLTNQCFDIEEEVSKYQEYTNELQETLPQKMFTASSGIKHTMTPIYPSSNTLVEMTLGMKKLKEEMEGVVKELAENNHILERFGSLTMDGGLRNVDCL

SEQ ID NO: 94104 - protein, 153 aa, Homo sapiens
MFEIKKICCIGAGYVGGPTCSVIAHMCPEIRVTVVDVNESRINAWNSPTLPIYEPGLKEVVESCRGKNLFFSTNIDDAIKEADLVFISVNTPTKTYGMGKGRAADLKYIEACARRIVQNSNGYKIVTEKSTVPVRAAESIRRIFDANTKPNLN

SEQ ID NO: 94105 - protein, 389 aa, Homo sapiens
MVKLAKAGKNQGDPKKMAPPPKEVEEDSEDEEMSEDEEDDSSGEEVVIPQKKGKKAAATSAKKVVVSPTKKVAVATPAKKAAVTPGKKAAATPAKKTVTPAKAVTTPGKKGATPGKALVATPGKKGAAIPAKGAKNGKNAKKEDSDEEEDDDSEEDEEDDEDEDEDEDEIEPAAMKAAAAAPASEDEDDEDDEDDEDDDDDEEDDSEEEAMETTPAKGKKAAKVVPVKAKNVAEDEDEEEDDEDEDDDDDEDDEDDDDEDDEEEEEEEEEEPVKEAPGKRKKEMAKQKAAPEAKKQKVEGTEPTTAFNLFVGNLNFNKSAPELKTGISDVFAKNDLAVVDVRIGMTRKFGYVDFESAEDLEKALELTGLKVFGNEIKLEKPKGKDSKKG

SEQ ID NO: 94106 - protein, 114 aa, Homo sapiens
MSRQAKDDFLRHYTVSDPRTHPKGYTEYKVTAQFISKKDPEDVKEVRLLGGRGTVLQFQIWKLSRGSWWWSGSGTATSASCMETWPTPTATSSAASRSSLLSPGPRCLAGLKPQ

SEQ ID NO: 94107 - protein, 20 aa, Homo sapiens
MSVLEENRPFAQQLSNVYFT

SEQ ID NO: 94108 - protein, 115 aa, Homo sapiens
  MOD_RES (1)..(1): Any amino acid
XIQNELYLSQEDFFINGNIKVFPDPPPSIRPPPVEKEEDGTLTIEQLDSLRDQFLDMAPKECSENCFQRPSPSTCDAFSNRRQEVASWITGSPPELSQGISCNCSATALSRQRQK

SEQ ID NO: 94109 - protein, 144 aa, Homo sapiens
MGSRGQGSHSKKTRSMPVILSPQRTGSGATGGPAARAYSVAEAVKQFRAGPAGTGAGCSLQGCWAAPRPFEHRTNKLRELSTLAHCSRELQTQVPDASAHSLAVTLSELHSCRDLQDECLDSRCKFAEGPRRLLPPYHSLINNF

SEQ ID NO: 94110 - protein, 99 aa, Homo sapiens
MDSSQHLVTFEDVAVDFTQEEWTLLDQAQRDLYRDVMLENYKNLIILAGSELFKRSLMSGLEQMEELRTGVTGVLQELDLQLKTKGSPLLQDISAERSP

SEQ ID NO: 94111 - protein, 440 aa, Homo sapiens
LALLCLDGVFLSSAENDFVHRIQEELDRFLLQKQLSKVLLFPPLSSRLRYLIHRTAENFDLLSSFSVGEGWKRRTVICHQDIRVPSSDGLSGPCRAPASCPSRYHGPRPISNQGAAAVPRGARAGRWYRGRKPDQPLYVPRVLRRQEEWGLTSTSVLKREAPAGRDPEEPGDVGAGDPNSDQGLPVLMTQGTEDLKGPGQRCENEPLLDPVGPEPLGPESQSGKGDMVEMATRFGSTLQLDLEKGKESLLEKRLVAEEEEDEEEVEEDGPSSCSEDDYSELLQEITDNLTKKEIQIEKIHLDTSSFVEELPGEKDLAHVVEIYDFEPALKTEDLLATFSEFQEKGFRIQWVDDTHALGIFPCLASAAEALTREFSVLKIRPLTQGTKQSKLKALQRPKLLRLVKERPQTNATVARRLVARALGLQHKKKERPAVRGPLPP

SEQ ID NO: 94112 - protein, 56 aa, Homo sapiens
MNGAPSPEDGASPSSPPLPPPPPPSWREFCESHARAAALDFARRFRLYLASHPQYA

SEQ ID NO: 94113 - protein, 175 aa, Homo sapiens
MEYLVKWKGWSQKYSTWEPEENILDARLLAAFEEREREMELYGPKKRGPKPKTFLLKAQAKAKAKTYEFRSDSARGIRIPYPGRSPQDLASTSRAREGLRNMGLSPPASSTSTSSTCRAEAPRDRDRDRDRDRERDRERERERERERERERERERGTSRVDDKPSSPGDSSKKRG

SEQ ID NO: 94114 - protein, 77 aa, Homo sapiens
MDHPSREKDERQRTTKPMAQRSAHCSRPSGSSSSSGVLMVGPNFRVGKKIGCGNFGELRLGTNKITCSTASFRVQIL

SEQ ID NO: 94115 - protein, 225 aa, Homo sapiens
MQKGKGRTSRIRRRKLCGSSESRGVNESHKSEFIELRKWLKARKFQDSNLAPACFPGTGRGLMSQTSLQEGQMIISLPESCLLTTDTVIRSYLGAYITKWKPPPSPLLALCTFLVSEKHAGHRSLWKPYLEILPKAYTCPVCLEPEVVNLLPKSLKAKAEEQRAHVQEFFASSRDFFSSLQPLFAEAVDSIFSYSALLWAWCTVNTRAVYLRPRQRECLSAEPDT

SEQ ID NO: 94116 - protein, 135 aa, Homo sapiens
MLDERLQRHRTSGGDHAPDSPSGENSPAPQGRLAEVQDSSMPVPAQPKAGGSGSYWPARHSGARVILLVLYREHLNPNGHHFLTKEELLQRCAQKSPRVAPGSARPWPALRSLLHRNLVLRTHQPARYSLTPEGL

SEQ ID NO: 94117 - protein, 157 aa, Homo sapiens
MPDYMVHEEFNPDQANGSYASRRGPFDFDMKTVWQREAEELEKEKKKLRLPAIDSKYLSKAGTPLGPKNPAGSRLSFPPVNGYKDEWLQQQQRADSDKRTPKTSRASVLSQSPRDLEGPQDAARLQDAEASEGPEDTPESSQSPEESVSASTPAELK

SEQ ID NO: 94118 - protein, 45 aa, Homo sapiens
MKVLSEGQLKLCVVQPVHLTSWLLIFFILKSISCLKPARLPIYQR

SEQ ID NO: 94119 - protein, 262 aa, Homo sapiens
MAAPTPARPVLTHLLVALFGMGSWAAVNGIWVELPVVVKELPEGELGSGLQVGAPGAEEEVEESSPLQEPPSQAAGTTPGPDPKAYQLLSARSACLLGLLAATNALTNGVLPAVQSFSCLPYGRLAYHLAVVLGSAANPLACFLAMGVLCRSLAGLGGLSLLGVFCGGYLMALAVLSPCPPLVGTSAGVVLVVLSWVLCLGVFSYVKVAASSLLHGGGRPALLAAGVAIQVGSLLGAVAMFPPTSIYHVFHSRKDCADPCDS

SEQ ID NO: 94120 - protein, 136 aa, Homo sapiens
MQTIKCVVVGDGAVGKTCLLISYTTNKFPSEYVPTVFDNYAVTVMIGGEPYTLGLFDTAGQEDYDRLRPLSYPQTDVFLVCFSVVSPSSFENVKEKWVPEITHHCPKTPFLLVGTQIDLRDDPSTIEKLAKNKQKP

SEQ ID NO: 94121 - protein, 1135 aa, Homo sapiens
MASAGTQHYSIGLRQKNSFKQSGPSGTVPATPPEKPSEGRVWPQAHQQVKPIWKLEKKQVETLSAGLGPGLLGVPPQPAYFFCPSTLCSSGTTAVIAGHSSSCYLHSLPDLFNSTLLYRRSSYRQKPYQQLESFCLRSSPSEKSPFSLPQKSLPVSLTANKATSSMVFSMAQPMASSSTEPYLCLAAAGENPSGKSLASAISGKIPSPLSSSYKPMLNNNSFMWPNSTPVPLLQTTQGLKPVSPPKIQPVSWHHSGGTGDCAPQPVDHKVPKSIGTVPADASAHIALSTASSHDTSTTSVASSWYNRNNLAMRAEPLSCALDDSSDSQDPTKEIRFTEAVRKLTARGFEKMPRQGCQLEQSSFLNPSFQWNVLNRSRRWKPPAVNQQFPQEDAGSVRRVLPGASDTLGLDNTVFCTKRISIHLLASHASGLNHNPACESVIDSSAFGEGKAPGPPFPQTLGIANVATRLSSIQLGQSEKERPEEARELDSSDRDISSATDLQPDQAETEDTEEELVDGLEDCCSRDENEEEEGDSECSSLSAVSPSESVAMISRSCMEILTKPLSNHEKVVRPALIYSLFPNVPPTIYFGTRDERVEKLPWEQRKLLRWKMSTVTPNIVKQTIGRSHFKISKRNDDWLGCWGHHMKSPSFRSIREHQKPASARGIGIQVIHKWSQLPKRRPLLVQRYLHKPYLISGSKFDLRIYVYVTSYDPLRIYLFSDGLVRFASCKYSPSMKSLGNKFMHLTNYSVNKKNAEYQANADEMACQGHKWALKALWNYLSQKGVNSDAIWEKIKDVVVKTIISSEPYVTSLLKMYVRRPYSCHELFGFDIMLDENLKPWVLEVNISPSLHSSSPLDISIKGQMIRDLLNLAGFVLPNAEDIISSPSSCSSSTTSLPTSPGDKCRMAPEHVTAQKMKKAYYLTQKIPDQDFYASVLDVLTPDDVRILVEMEDEFSRRGQFERIFPSHISSRYLRFFEQPRYFNILTTQWEQKYHGNKLKGVDLLRSWCYKGFHMGVVSDSAPVWSLPTSLLTISKDDVILNAFSKSETSKLGKQSSCEVSLLLSEDGTTPKSKKTQAGLSPYPQKPSSSKDSEDTSKEPSLSTQTLPVIKCSGQTSRLSASSTFQSISDSLLAVSP

SEQ ID NO: 94122 - protein, 358 aa, Homo sapiens
  MOD_RES (1)..(1): Any amino acid
XKQKNKEKDKSKGKAPEEDEEERRRRERDDQMYRERLRTLLVIAVVMSLLNALSTSGGSISWNDFVHEMLAKGEVQRVQVVPESDVVEVYLHPGAVVFGRPRLALMYRMQVANIDKFEEKLRAAEDELNIEAKDRIPVSYKRTGFFGNALYSVGMTAVGLAILWYVFRLAGMTGREGGFSAFNQLKMARFTIVDGKMGKGVSFKDVAGMHEAKLEVREFVDYLKSPERFLQLGAKVPKGALLLGPPGCGKTLLAKAVATEAQVPFLAMAGPEFVEVIGGLGAARVRSLFKEARARAPCIVYIDEIDAVGKKRSTTMSGFSNTEEEQTLNQLLVEMDVFYAEIEELKLVYPYHGVLHSD

SEQ ID NO: 94123 - protein, 248 aa, Homo sapiens
MDPGAGSETSLTVNEQVIVMSGHETIRVLEVGVDAQLPAEEESKGLEGVAAEGSQSGDPAEASQAAGEAGPDNLGSSAEATVKSPPGIPPSPATAIATFSQAPSQPQASQTLTPLAVQAAPQYCRSSGWSAGAGRVDNSYSNCGCPPRTDRCFSYGGSVQATFSRSPSSCCAEHRSSGTGTSCRTSTGLLDGPTPATSPAPDAVPDPAAAADHTCHPPAAHCCHRCCPYPQASGHPPTDHRPACRLRI

SEQ ID NO: 94124 - protein, 101 aa, Homo sapiens
MEEESGEELGLDRSTPKDFHFYHMDLYDSEDRLHLFPEENTRMRKVVQAEMANESRGAGDGKAQRDLQEEVDELVHLYGLEDDHELGDEFVDENIPRTGVS

SEQ ID NO: 94125 - protein, 1227 aa, Homo sapiens
MTTHVTLEDALSNVDLLEELPLPDQQPCIEPPPSSIMYQANFDTNFEDRNAFVTGIARYIEQATVHSSMVKCNEQPNRVEIYEKTVEVLEPEVTKLMKFMYFQRKAIERFCSEVKRLCHAERRKDFVSEAYLLTLGKFINMFAVLDELKNMKCSVKNDHSAYKRAAQFLRKMADPQSIQESQNLSMFLANHNRITQCLHQQLEVIPGYEELLADIVNICVDYYENKMYLTPSEKHMLLKVMGFGLYLMDGNVSNIYKLDAKKRINLSKIDKFFKQLQVVPLFGDMQIELARYIKTSAHYEENKSKWTCTQSSISPQYNICEQMVQIRDDHIRFISELARYSNSEVVTGSGLDSQKSDEEYRELFDLALRGLQLLSKWSAHVMEVYSWKLVHPTDKFCNKDCPGTAEEYERATRYNYTSEEKFAFVEVIAMIKGLQVLMGRMESVFNQAIRNTIYAALQDFAQVTLREPLRQAVRKKKNVLISVLQAIRKTICDWEGGREPPNDPCLRGEKDPKGGFDIKVPRRAVGPSSTQLYMVRTMLESLIADKSGSKKTLRSSLDGPIVLAIEDFHKQSFFFTHLLNISEALQQCCDLSQLWFREFFLELTMGRRIQFPIEMSMPWILTDHILETKEPSMMEYVLYPLDLYNDSAYYALTKFKKQFLYDEIEAEVNLCFDQFVYKLADQIFAYYKAMAGSVLLDKRFRAECKNYGVIIPYPPSNRYETLLKQRHVQLLGRSIDLNRLITQRISAAMYKSLDQAISRFESEDLTSIVELEWLLEINRLTHRLLCKHMTLDSFDAMFREANHNVSAPYGRITLHVFWELNFDFLPNYCYNGSTNRFVRTAIPFTQEPQRDKPANVQPYYLYGSKPLNIAYSHIYSSYRNFVGPPHFKTICRLLGYQGIAVVMEELLKIVKSLLQGTILQYVKTLIEVMPKICRLPRHEYGSPGILEFFHHQLKDIIEYAELKTDVFQSLREVGNAILFCLLIEQALSQEEVCDLLHAAPFQNILPRVYIKEGERLEVRMKRLEAKYAPLHLVPLIERLGTPQQIAIAREGDLLTKERLCCGLSMFEVILTRIRSYLQDPIWRGPPPTNGVMHVDECVEFHRLWSAMQFVYCIPVGTNEFTAEQCFGDGLNWAGCSIIVLLGQQRRFDLFDFCYHLLKVQRQDGKDEIIKNVPLKKMADRIRKYQILNNEVFAILNKYMKSVETDSSTVEHVRCFQPPIHQSLATTC

SEQ ID NO: 94126 - protein, 56 aa, Homo sapiens
MPYTLKVHYKYTVVMKTQPGLPYSQVRDMVSKKLELRLEHTKLSYRPRDSNELVPL

SEQ ID NO: 94127 - protein, 156 aa, Homo sapiens
MAGLELLSDQGYRVDGRRAGELRKIQARMGVFAQADGSAYIEQGNTKALAVVYGPHEIRGSRARALPDRALVNCQYSSATFSTGATGRWWDLCSLCECSHAGSAGCRDTHERLCVCVLSWLRGRHSPGGPQPCGGSSWWPPAGPGPAASLRTDCAA

SEQ ID NO: 94128 - protein, 135 aa, Homo sapiens
MTELPAPLSYFQNAQMSEDNHLSNTNDNRERQEHNDRRSLGHPEPLSNGRPQGNSRQVVEQDEEEDEELTLKYGAKHVIMLFVPVTLCMVVVVATIKSVSFYTRKDGQLIYTPFTEDTETVGQRALHSILNAAIM

SEQ ID NO: 94129 - protein, 52 aa, Homo sapiens
MLCSMANSGCLLLSNSGSMLPHSVPCPPAFLYLQQSDQDATAPPEAMAQPYP

SEQ ID NO: 94130 - protein, 101 aa, Homo sapiens
MQIDVDPQEDPQNAPDVNYVVENPSLDLEQYAASYSGLMRIERLQFIADHCPTLRVEALKMALSFVQRTFNVDMYEEIHRKLSEATRSSLRELQNAPDAIP

SEQ ID NO: 94131 - protein, 212 aa, Homo sapiens
VIPANAGLGTWRTEAVFSEEALIQVPSDIPLQSAATLGVNPCTAYRMLMDFEQLQPGDSVIQNASNSGVGQAVIQIAAALGLRTINVVRDRPDIQKLSDRLKSLGAEHVITEEELRRPEMKNFFKDMPQPRLALNCVGGKSSTELLRQLARGGTMVTYGGMAKQPVVASVVSWVQREACLEPGQTPQPGHIPWHDSCLSLGNAPFLEGSLYP

SEQ ID NO: 94132 - protein, 72 aa, Homo sapiens
MQNSHSGVNQLGGVFVNGRPLPDSTRQKIVELAHSGARPCDISRILQTHADAKVQVLDNQNVSNGCVSKILG

SEQ ID NO: 94133 - protein, 187 aa, Homo sapiens
GLRCIKYLLLGFNLLFWLAGSAVIAFGLWFRFGGAIKELSSEDKSPEYFYVGLYVLVGAGALMMAVGFFGCCGAMRESQCVLGSFFTCLLVIFAAEVTTGVFAFIGKGVAIRHVQTMYEEAYNDYLKDRGKGNGTLITFHSTFQCCGKESSEQVQPTCPKELLGHKIFGMIFSMVLCCAIRNSRDVI

SEQ ID NO: 94134 - protein, 141 aa, Homo sapiens
MHKDEFHLKFFMCVIQSRQLVRTPQRTAGEASTSSMLIPKPPPKTDILKSLDTMDDPDTVGSIPVFKTEWIMTHEEHHAAKTLGIGKAIAVLTSGGDAQGMNAAVRAVVRVGIFTGARVFFVHEGYQGLVDGGDHIKEATW

SEQ ID NO: 94135 - protein, 185 aa, Homo sapiens
  MOD_RES (1)..(1): Any amino acid
XPPPPPPLPPPALGLHQSTSAVDLIKERREKRANAGKTLVKNNPKKPEMPNMLEILKEMNSVKLRSVKRSEQDVKPKPVDATDPAALIAEALKKKFAYRYRSDSQDEVEKGIPKSESEATSERVLKRLVKVRTCWTRRPMANPTEDKFISLKRIRTMTKTIQTTIIHGRKYCGIYIIKWLRSFFC

SEQ ID NO: 94136 - protein, 143 aa, Homo sapiens
  MOD_RES (1)..(1): Any amino acid
XVEEQNLKDLRVWTSQLKSTIQTAEALRLPYEQWKALNEIDASYQDLVQRLEPVIMELERQENVLVICHQAVLRCLLAYFLDKSAEEMPYLKCPLHTVLKLTPVAYGCRVESIYLNVESVCTHRERSENMKGSRSSADSSRKH

SEQ ID NO: 94137 - protein, 98 aa, Homo sapiens
MGENEDEKQAQAGQVFENFVQASTCKGTLQAFNILTRHLDLDPLDHRNFYSKLKSKVTTWKAKALWYKLDKRGSHKEYKRGKSCTNTKCLIVGGGPCG

SEQ ID NO: 94138 - protein, 76 aa, Homo sapiens
MRAGPGPTVTLALVLAVSWAMELKPTAPPIFTGRPFVVAWDVPTQDCGPRLKVPLDLNAFDVQASPNEGFVNQNIT

SEQ ID NO: 94139 - protein, 209 aa, Homo sapiens
  MOD_RES (1)..(1): Any amino acid
XYVVKQEWFWGSIQMDARAGETMYLYEKANTPELKKSVSMLSLNTPNSNRKRRRLKETLAQLSRETDVSPFPPHTPKSCTKSSKSSTPVPSKQSARWQVAKELYQTESNYVNILATIIQLFQVPLEEEGQRGGPILAPEEIKTIFGSIPDIFDVHTKIKDDLEDLIVNWDESKSIGDIFLKYSKDLVKTYPPFVNFFEMSKETIIKCEK

SEQ ID NO: 94140 - protein, 169 aa, Homo sapiens
  MOD_RES (1)..(1): Any amino acid
XRAQTEKHVVLCVSSLKIDLLMDFLNEFYAHPRLQDYYVVILCPTEMDVQVRRVLQIPMWSQRVIYLQGSALKDQDLLRAKMDDAEACFILSSRCEVDRTSSDHQTILRAWAVKDFAPNCPLYVQILKPENKFHIKFAVLKAGNPRSRCQHDPVLRRPAIARTMAEDVR

SEQ ID NO: 94141 - protein, 302 aa, Homo sapiens
MLSFYYYREEGNSLPVVAEHSLVLMQRGLFSDGDTSKKKKNVTMRSIKTTRDRVPTYQYNMNFEKLGKCIIINNKNFDKVTGMGVRNGTDKDAEALFKCFRSLGFDVIVYNDCSCAKMQDLLKKASEEDHTNAACFACILLSHGEENVIYGKDGVTPIKDLTAHFRGDRCKTLLEKPKLFFIQACRGTELDDGIQADSGPINDTDANPRYKIPVEADFLFAYSTVPGYYSWRSPGRGSWFVQALCSILEEHGKDLEIMQILTRVNDRVARHFESQSDDPHFHEKKQIPCVVSMLTKELYFSQ

SEQ ID NO: 94142 - protein, 72 aa, Homo sapiens
MDAKSLTAWSRTLVTFKDVFVDFTREEWKLLDTAQQIVYRNVMLENYKNLVSLGYQLTKPDVILRLEKGEEP

SEQ ID NO: 94143 - protein, 227 aa, Homo sapiens
MAEEVSTLMKATVLMRQPGRVQEIVGALRKGGGDRLQVISDFDMTLSRFAYNGKRCPSSYNILDNSKIISEECRKELTALLHHYYPIEIDPHRTVKEKLPHMVEWEGYKTFFNTLYHNNIPLFIFSAGIGDILEEIIRQMKVFHPNIHIVSNYMDFNEDGFLQGFKGQLIHTYNKNSSACENSGYFQQLEGKTNVILLGDSIGDLTMADGVPGVQNILKIGFLNDKV

SEQ ID NO: 94144 - protein, 171 aa, Homo sapiens
MNSRRREPITLQDPEAKYPLPLIEKEKISHNTRRFRFGLPSPDHVLGLPVGNYVQLLAKIDNELVVRAYTPVSSDDDRGFVDLIIKIYFKNVHPQYPEGGKMTQYLENMKIGETIFFRGPRGRLFYHGPGNLGIRPDQTSEPKKTLADHLGMIAGGTGITPMLQLIRHITK

SEQ ID NO: 94145 - protein, 624 aa, Homo sapiens
  MOD_RES (1)..(1): Any amino acid
XVGRSPSATPAERPPRGCAELAQRQQHEPDPRIGRAPVESRLLREAGPTPARAAGQLEYETQIKKMLCSKDSLGLKEELTDEDREKVAVHEGINSGTAMSRGLYQPATIFMGRQMSAILSMRDFSTEHKSPQPTKNFSIPDPHSHRQTAQSSNVTDSCVVQTSNDTQCLNKSDNIDGKASLQIGEKMPVTASVLSEEEQTHCLEIGSNTRHGKSNLSEGKKSAELNSPLRERLSPENRTTDLKCDSSSGSEGEILTREHIEVEEKRASPPVSPIPVSEYCESENKWSQEKHSPWEGVSDHLAHREPKSQKPFRKMQEEEEESWSTSSDLTISISEDDLILESPEPQPNPGGKMEGEDGIEALKLIHAEQERVALSTEKNCILQTLSSPDSEKESSTNAPTREPGQTPDSDVPRAQVGQHVATLKEHDNSVKEEATALLRKALTEECGRRSAIHSSESSCSLPSILNDNSGIKEAKPAVWLNSVPTREQEVSSGCGDKSKKENVAADIPITETEAYQLLKKATLQDNTNQTENRFQKTDASVSHLSGLNIGSGAFETKTANKIASEASFSSSEGSPLSRHENKKKPVINLKSNALWDESDDSNSEIEAALRPRNHNTDDSDDFYD

SEQ ID NO: 94146 - protein, 152 aa, Homo sapiens
MVVCKHWLRGLCKKGDHCKFLHQYDLTRMPECYFYSKFGDCSNKECSFLHVKPAFKSQDCPWYDQGFCKDAGPLCKYRHVPRIMCLNYLVGFCPEGPKCQFAHCSLPAGPGIQHLLFLLWKLGNPHPQQSACSPAWGSGVKGRACATGPLCQ

SEQ ID NO: 94147 - protein, 239 aa, Homo sapiens
MHFSTVTRDMEAFTASSLSSLGAAGGFPGAASPGADPYGPREPPPPPPRYDPCAAAAPGAPGPPPPPHAYPFAPAAGAATSAAAEPEGPGASCAAAAKAPVKKNAKVAGVSVQLEMKALWDEFNQLGTEMIVTKAGRRMFPTFQVKLFGMDPMADYMLLMDFVPVDDKRYRYAFHSSSWLVAGKADPATPGRVHYHPDSPAKGAQWMKQIVSFDKLKLTNNLLDDNGHIILNSMHRYQP

SEQ ID NO: 94148 - protein, 166 aa, Homo sapiens
MFKIGRGALDLFSELLSFGGIVLAACQALENSTSPLSADPPVAAAVVSHFNDCPDSHTQFCFHGTCRFLVQEDKPACVCHSGYVGARCEHADLLAVVAASQKKQAITALVVVSIVALAVLIITCVLIHCCQVRKHCEWCRALICRHEKPSALLKGRTACCHSETVV

SEQ ID NO: 94149 - protein, 63 aa, Homo sapiens
MEGQDEVSAREQHFHSQVRESTICFLLFAILYVVSYFIITRYKRKSDEQEDEDAIVNRISYVF

SEQ ID NO: 94150 - protein, 169 aa, Homo sapiens; identical to SEQ ID NO: 60738

SEQ ID NO: 94151 - protein, 21 aa, Homo sapiens
  MOD_RES (1)..(1): Any amino acid
XYTGANSKLTFGKGITLSVRP

SEQ ID NO: 94152 - protein, 139 aa, Homo sapiens
MWLPPHHLRAQFTLWVSLYFGILGLCSVITGGCIIFLHWRKNLRREEHAQQWVEVMRAATFTYSPLLYWINKRRRYGMNAAINTGPAPAVTKTETEVQNPDVLWDLDIPEGRSHADQDSNPKAEAPAPLQPALQLAPQQ

SEQ ID NO: 94153 - protein, 295 aa, Homo sapiens
MSSNTMLQKTLLILISFSVVTWMIFIISQNFTKLWSALNLSISVHYWNNSAKSLFPKTSLIPLKPLTETELRIKEIIEKLDQQIPPRPFTHVNTTTSATHSTATILNPRDTYCRGDQLDILLEVRDHLGQRKQYGGDFLRARMSSPALTAGASGKVMDFNNGTYLVSFTLFWEGQVSLSLLLIHPSEGASALWRARNQGYDKIIFKGKFVNGTSHVFTECGLTLNSNAELCEYLDDRDQEAFYCMKPQHMPCEALTYMTTRNREVSYLTDKENSLFHRMAPGETSIAGNQVQSGS

SEQ ID NO: 94154 - protein, 28 aa, Homo sapiens
  MOD_RES (1)..(1): Any amino acid
XKAPEGLGELTAKQTVGPTDCRTLSLMD

SEQ ID NO: 94155 - protein, 50 aa, Homo sapiens
MKLLWQVTVHHHTWNAILLPFVYLTAQVWILCAAIAAAASAGPQNCPSVC

SEQ ID NO: 94156 - protein, 54 aa, Homo sapiens
MAVLDTDLDHILPSSVLPPFWAKLVVGSVAIVCFARSYDGDFVFDDSEAIVNNK

SEQ ID NO: 94157 - protein, 98 aa, Homo sapiens
MGEEGPPSLEYIQAKDLFPPKELVKEEENLQVPFTVLQGEGVEFLGRAADALIAISNYRLHIKFKDSVINVPLRMIDSVESRDMFQLHISCKDSKVVR

SEQ ID NO: 94158 - protein, 166 aa, Homo sapiens
MMEEEELEFVEELEAVLQLTPEVQLAIEQVFPSQDPLDRADFNAVEYINTLFPTEQSLANIDEVVNKIRLKIRRLDDNIRTVVRGQTNVGQDGRQMESRSVTRLECDGTISAHCNLRLPGSSDSPASASRVAGITGMRHHTQLIFVFLVEMGFHHVGQDGLDLLTS

SEQ ID NO: 94159 - protein, 31 aa, Homo sapiens
  MOD_RES (1)..(1): Any amino acid
XINIYLSDRISLHRRLPERWNPLAPEGALGQ

SEQ ID NO: 94160 - protein, 422 aa, Homo sapiens
MRKWRHREVNLPEVTQQDAVCPAPIPSPGLSAQTGLQKIWGTIHCQVCPGAPAWPGSPWHEEMGLLLLVPLLLLPGSYGLPFYNGFYYSNSANDQNLGNGHGKDLLNGVKLVVETPEETLFTYQGASVILPCRYRYEPALVSPRRVRVKWWKLSENGAPEKDVLVAIGLRHRSFGDYQGRVHLRQDKEHDVSLEIQDLRLEDYGRYRCEVIDGLEDESGLVELELRGVVFPYQSPNGRYQFNFHEGQQVCAEQAAVVASFEQLFRAWEEGLDWCNAGWLQDATVQYPIMLPRQPCGGPGLAPGVRSYGPRHRRLHRYDVFCFATALKGRVYYLEHPEKLTLTEAREACQEDDATIAKVGQLFAAWKFHGLDRCDAGWLADGSVRYPVVHPHPNCGPPEPGVRSFGFPDPQSRLYGVYCYRQH

SEQ ID NO: 94161 - protein, 139 aa, Homo sapiens
MGDQNVYPGPIDNSGLLKDGDAQSLKEHLIDELDYILLPTEGWNKLVSWYTLMEGQEPIARKVVEQGMFVKHCKVEVYLTELKLCENGNMNNVVTRRFSKADTIDTIEKEIRKIFSIPDEKETRLWNKYMSNTFEPLNK

SEQ ID NO: 94162 - protein, 608 aa, Homo sapiens
MTKTYNDIDAVTRLLEEKERDLELAARIGQSLLKKNKTLTERNELLEEQVEHIREEVSQLRHELSMKDELLQFYTSAAEESEPESVCSTPLKRNESSSSVQNYFHLDSLQKKLKDLEEENVVLRSEASQLKTETITYEEKEQQLVNDCVKELRDANVQIASISEELAKKTEDAARQQEEITHLLSQIVDLQKKAKACAVENEELVQHLGAAKDAQRQLTAELRELEDKYAECMEMLHEAQEELKNLRNKTMPNTTSRRYHSLGLFPMDSLAAEIEGTMRKELQLEEAESPDITHQKRVFETVRNINQVVKQRSLTPSPMNIPGSNQSSAMNSLLSSCVSTPRSSFYGSDIGNVVLDNKTNSIILETEAADLGNDERSKKPGTPGTPGSHDLETALRRLSLRRENYLSERRFFEEEQERKLQELAEKGELRSGSLTPTESIMSLGTHSRFSEFTGFSGMSFSSRSYLPEKLQIVKPLEGSATLHHWQQLAQPHLGGILDPRPGVVTKGFRTLDVDLDEVYCLNDFEEDDTGDHISLPRLATSTPVQHPETSAHHPGKCMSQTNSTFTFTTCRILHPSDELTRVTPRSCEEDDEAAICPVELRGDIGQRV

SEQ ID NO: 94163 - protein, 108 aa, Homo sapiens
MENPSPAAALGKALCALLLATLGAAGQPLGGESICSARALAKYSITFTGKWSQTAFPKQYPLFRPPAQWSSLLGAAHSSDYSMWRKNQYVSNGLRDFAERGEAWALMK

SEQ ID NO: 94164 - protein, 86 aa, Homo sapiens
MFGQNLEVQLSSARTENTTVVWKSFHDSITLIVLSSEVGISELRLERLLQMVFGAMVLLVGLEELTNIRNVERLKKDLRAGPFFLS

SEQ ID NO: 94165 - protein, 168 aa, Homo sapiens
MSQDTEVDMKEVELNELEPEKQPMNAASGAAMSLAGAEKNGLVKIKVAEDEAEAAAAAKFTGLSKEELLKVAGSPGWVRTRWALLLLFWLGWLGMLAGAVVIIVRAPRCRELPAQKWWHTGALYRIGDLQAFQGHGAGNLAGEWASRLPELSEGEGPCAGSNSQEPEG

SEQ ID NO: 94166 - protein, 87 aa, Homo sapiens
  MOD_RES (1)..(1): Any amino acid
XDTKEMKKKLETKRLERIQGMTKVTTDKMAQERLKREINNSHIQEVVQVIKQMTENLERHQEKLEEKQAACLEQIREMEKQPDPAHP

SEQ ID NO: 94167 - protein, 262 aa, Homo sapiens
MASNVTNKTDPRSMNSRVFIGNLNTLVVKKSDVEAIFSKYGKIVGCSVHKGFAFVQYVNERNARAAVAGEDGRMIAGQVLDINLAAEPKVNRGKAGVKRSAAEMYGSSFDLDYDFQRDYYDRMYSYPARVPPPPPIARAVVPSKRQRVSGNTSRRGKSGFNSKSGQRGSSKSGKLKGDDLQAIKKELTQIKQKVDSLLENLEKIEKEQSKQAVEMKNDKSEEEQSSSSVKKDETNVKMESEGGADDSAEEGDLLDDDDNEDR

SEQ ID NO: 94168 - protein, 33 aa, Homo sapiens
MTFVNCHGAGGSVAVRKTRVRPRRRLGFGKMSV

SEQ ID NO: 94169 - protein, 44 aa, Homo sapiens
MIRKEAYVHKSVMEELKRIIDDSEITKEDDALWPPPDRVGRQNK

SEQ ID NO: 94170 - protein, 38 aa, Homo sapiens
  MOD_RES (1)..(1): Any amino acid
XADRGDGWLTDPYVLTEGNFMDEERPTTKALSWLGSML

SEQ ID NO: 94171 - protein, 973 aa, Homo sapiens
MEVTCLLLLALIPFHCRGQGVYAPAQAQIVHAGQACVVKEDNISERVYTIREGDTLMLQCLVTGHPRPQVRWTKTAGSASDKFQETSVFNETLRIERIARTQGGRYYCKAENGVGVPAIKSIRVDVQYLDEPMLTVHQTVSDVRGNFYQEKTVFLRCTVNSNPPARFIWKRGSDTLSHSQDNGVDIYEPLYTQGETKVLKLKNLRPQDYASYTCQVSVRNVCGIPDKAITFRLTNTTAPPALKLSVNETLVVNPGENVTVQCLLTGGDPLPQLQWSHGPGPLPLGALAQGGTLSIPSVQARDSGYYNCTATNNVGNPAKKTVNLLVRSMKNATFQITPDVIKESENIQLGQDLKLSCHVDAVPQEKVTYQWFKNGKPARMSKRLLVTRNDPELPAVTSSLELIDLHFSDYGTYLCMASFPGAPVPDLSVEVNISSETVPPTISVPKGRAVVTVREGSPAELQCEVRGKPRPPVLWSRVDKEAALLPSGLPLEETPDGKLRLERVSRDMSGTYRCQTARYNGFNVRPREAQVQLNVQFPPEVEPSSQDVRQALGRPVLLRCSLLRGSPQRIASAVWRFKGQLLPPPPVVPAAAEAPDHAELRLDAVTRDSSGSYECSVSNDVGSAACLFQVSAKAYSPEFYFDTPNPTRSHKLSKNYSYVLQWTQREPDAVDPVLNYRLSIRQLNQHNAVVKAIPVRRVEKGQLLEYILTDLRVPHSYEVRLTPYTTFGAGDMASRIIHYTEPINSPNLSDNTCHFEDEKICGYTQDLTDNFDWTRQNALTQNPKRSPNTGPPTDISGTPEGYYMFIETSRPRELGDRARLVSPLYNASAKFYCVSFFYHMYGKHIGSLNLLVRSRNKGALDTHAWSLSGNKGNVWQQAHVPISPSGPFQIIFEGVRGPGYLGDIAIDDVTLKKGECPRKQTDPNKGILLCGLDSEDLHPGLLPVNLCAFVHSANTNQTLPLWKPLFNGRDGQM

SEQ ID NO: 94172 - protein, 413 aa, Homo sapiens
MFSRSDFSVWTILKKCVGLELSKITMPIAFNEPLSFLQRITEYMEHVYLIHRASCQPQPLERMQSVAAFAVSAVASQWERTGKPFNPLLGETYELIREDLGFRFISEQVSHHPPISAFHSEGLNHDFLFHGSIYPKLKFWGKSVEAEPRGTITLELLKHNEAYTWTNPTCCVHNVIIGKLWIEQYGTVEILNHRTGHKCVLHFKPCGLFGKELHKVEGHIQDKNKKKLFMIYGKWTECLWGIDPVSYESFKKQERRGDHLRKAKLDEDSGKADSDVADDVPVAQETVQVIPGSKLLWRINTRPPNSAQMYNFTSFTVSLNELETGMEKTLPPTDCRLRPDIRGMENGNMDLASQEKERLEEKQREARRERAKEEAEWQTRWFYPGNNPYTGTPDWLYAGDYFERNFSDCPDIY

SEQ ID NO: 94173 - protein, 74 aa, Homo sapiens
MWRAGSMSAELGVGCALRAVNERVQQAVARRPRDLPAIQPRLVAVSKTKPADMVIEAYGHGQRTFGENYVRALS

SEQ ID NO: 94174 - protein, 1177 aa, Homo sapiens
MVWRLVLLALWVWPSTQAGHQDKDTTFDLFSISNINRKTIGAKQFRGPDPGVPAYRFVRFDYIPPVNADDLSKITKIMRQKEGFFLTAQLKQDGKSRGTLLALEGPGLSQRQFEIVSNGPADTLDLTYWIDGTRHVVSLEDVGLADSQWKNVTVQVAGETYSLHVGCDLIDSFALDEPFYEHLQAEKSRMYVAKGSARESHFRGLLQNVHLVFENSVEDILSKKGCQQGQGAEINAISENTETLRLGPHVTTEYVGPSSERRPEVCERSCEELGNMVQELSGLHVLVNQLSENLKRVSNDNQFLWELIGGPPKTRNMSACWQDGRFFAENETWVVDSCTTCTCKKFKTICHQITCPPATCASPSFVEGECCPSCLHSVDGEEGWSPWAEWTQCSVTCGSGTQQRGRSCDVTSNTCLGPSIQTRACSLSKCDTRSECRAVRQDGGWSHWSPWSSCSVTCGVGNITRIRLCNSPVPQMGGKNCKGSGRETKACQGAPCPIDGRWSPWSPWSACTVTCAGGIRERTRVCNSPEPQYGGKACVGDVQERQMCNKRSCPVDGCLSNPCFPGAQCSSFPDGSWSCGSCPVGFLGNGTHCEDLDECALVPDICFSTSKVPRCVNTQPGFHCLPCPPRYRGNQPVGVGLEAAKTEKQVCEPENPCKDKTHNCHKHAECIYLGHFSDPMYKCECQTGYAGDGLICGEDSDLDGWPNLNLVCATNATYHCIKDNCPHLPNSGQEDFDKDGIGDACDDDDDNDGVTDEKDNCQLLFNPRQADYDKDEVGDRCDNCPYVHNPAQIDTDNNGEGDACSVDIDGDDVFNERDNCPYVYNTDQRDTDGDGVGDHCDNCPLVHNPDQTDVDNDLVGDQCDNNEDIDDDGHQNNQDNCPYISNANQADHDRDGQGDACDPDDDNDGVPDDRDNCRLVFNPDQEDLDGDGRGDICKDDFDNDNIPDIDDVCPENNAISETDFRNFQMVPLDPKGTTQIDPNWVIRHQGKELVQTANSDPGIAVGFDEFGSVDFSGTFYVNTDRDDDYAGFVFGYQSSSRFYVVMWKQVTQTYWEDQPTRAYGYSGVSLKVVNSTTGTGEHLRNALWHTGNTPGQVRTLWHDPRNIGWKDYTAYRWHLTHRPKTGYIRVLVHEGKQVMADSGPIYDQTYAGGRLGLFVFSQEMVYFSDLKYECRDI

SEQ ID NO: 94175 - protein, 666 aa, Homo sapiens
  MOD_RES (1)..(1): Any amino acid
XGEVLQIAANQCCPECVLRTPGSCHHEKKIHEHGTEWASSPCSVCSCNHGEVRCTPQPCPPLSCGHQELAFIPEGSCCPVCVGLGKPCSYEGHVFQDGEDWRLSRCAKCLCRNGVAQCFTAQCQPLFCNQDETVVRVPGKCCPQCSARSCSAAGQVYEHGEQWSENACTTCICDRGEVRCHKQACLPLRCGKGQSRARRHGQCCEECVSPAGSCSYDGVVRYQDEMWKGSACEFCMCDHGQVTCQTGECAKVECARDEELIHLDGKCCPECISRNGYCVYEETGEFMSSNASEVKRIPEGEKWEDGPCKVCECRGAQVTCYEPSCPPCPVGTLALEVKGQCCPDCTSVHCHPDCLTCSQSPDHCDLCQDPTKLLQNGWCVHSCGLGFYQAGSLCLACQPQCSTCTSGLECSSCQPPLLMRHGQCVPTCGDGFYQDRHSCAVCHESCAGCWGPTEKHCLACRDPLHVLRDGGCESSCGKGFYNRQGTCSACDQSCDSCGPSSPRCLTCTEKTVLHDGKCMSECPGGYYADATGRCKVCHNSCASCSGPTPSHCTACSPPKALRQGHCLPRCGEGFYSDHGVCKACHSSCLACMGPAPSHCTGCKKPEEGLQVEQLSDVGIPSGECLAQCRAHFYLESTGICEGQNLDFCQNLEVISAVCLGISSTEN

SEQ ID NO: 94176 - protein, 475 aa, Homo sapiens
MDDSGLIRRRRLQKDLPLPRKSSSCRTSNRKSLILTSTSPTLPRPHSPLPGHLGSSPLDSPRNFSPNTPAHFSFASSRRADGRRWSLASLPSSGYGTNTPSSTVSSSCSSQERLHQLPYQPTVDELHFLSKHFGSTESITDEDGGRRSPAVRPRSRSLSPGRSPSSYDNEIVMMNHVYKERFPKATAQMEEKLRDFTRAYEPDSVLPLADGVLSFIHHQIIELARDCLTKSRDGLITTVYFYELQENLEKLLQDAYERSESLEVAFVTQLVKKLLIIISRPARLLECLEFNPEEFYHLLEAAEGHAKEGHLVKTDIPRYIIRQLGLTRDPFPDVVHLEEQDSGGSNTPEQDDLSEGRSSKAKKPPGENDFDTIKLISNGAYGAVYLVRHRDTRQRFAMKKINKQNLILRNQIQQAFVERDILTFAENPFVVGMFCSFETRRHLCMVMEYVEGVAACGAAGKMGPCSLVRAAGWPA

SEQ ID NO: 94177 - protein, 64 aa, Homo sapiens
HHCRACGQIFCGKCSSKYSTIPKFGIEKEVRVCEPCYEQLNRFGKLRSEAMPSSGHPIQASHVR

SEQ ID NO: 94178 - protein, 157 aa, Homo sapiens
MWSPEREAEAPAGGDPAGLLPPEWEEDEERMSFLFSAFKRSREVNSTDWDSKMGFWAPLVLSHSRRQGVVRLRLRDLQEAFQRKGSVPLGLATVLQDLLRRGELQRESDFMASVDSSWISWGVGVFLLKPLKWTLSNMLGDNKVPAEEVLVAVELLK

SEQ ID NO: 94179 - protein, 30 aa, Homo sapiens
MGCMKSKQTFPFPTIYEGEKQHESEEPFMP

SEQ ID NO: 94180 - protein, 131 aa, Homo sapiens
  MOD_RES (1)..(1): Any amino acid
XPPVAAAVVSHFNDCPDSHTQFCFHGTCRFLVQEDKPACVCHSGYVGARCEHADLLAVVAASQKKQAITALVVVSIVALAVLIITCVLIHCCQVRKHCEWCRALICRHEKPSALLKGRTACCHSETGCRLY

SEQ ID NO: 94181 - protein, 267 aa, Homo sapiens
MASGRARCTRKLRNWVVEQVESGQFPGVCWDDTAKTMFRIPWKHAGKQDFREDQDAAFFKAWAIFKGKYKEGDTGGPAVWKTRLRCALNKSSEFKEVPERGRMDVAEPYKVYQLLPPGIVSGQPGTQKVPSKRQHSSVSSERKEEEDAMQNCTLSPSVLQDSLNNEEEGASGGAVHSDIGSSSSSSSPEPQEVTDTTEAPFQGDQRSLEFLLPPEPAPGRAVLSPDYSLLLTFIYNGRVVGEAQVQSLDCRLVAEPSGSESSMEQVL

SEQ ID NO: 94182 - protein, 183 aa, Homo sapiens
  MOD_RES (1)..(1): Any amino acid
XLLCPLWVGATCVMMPEFSPQQVWEKFLSSETPRINVFMAVPTIYTKLMEYYDRHFTQPHAQDFLRAVCEEKIRLMVSGSAALPLPVLEKWKNITGHTLLERYGMTEIGMALSGPLTTAVRLPGSVGTPLPGVQVRIVSENPQREACSYTIHAEGDERGTKGPSPCCCPDMPLLGFLPLPCWY

SEQ ID NO: 94183 - protein, 48 aa, Homo sapiens
MQKIMHISVLLSPVLWGLIFGVSSNSIQIGGLFPRGADQEYSAFRVGM

SEQ ID NO: 94184 - protein, 111 aa, Homo sapiens
MSLTSWFLVSSGGTRHRLPREMIFVGRDDCELMLQSRSVDKQHAVINYDASTDEHLVKDLGSLNGTFVNDVRIPEQTYITLKLEDKLRFGYDTNLFTVVQGEMRVPEEALK

SEQ ID NO: 94185 - protein, 22 aa, Homo sapiens
MESRVLLRTFCLIFGLGAVWGL

SEQ ID NO: 94186 - protein, 32 aa, Homo sapiens
MVGSRMFADDLHNLNKRIRYLYKHFNRHGKFR

SEQ ID NO: 94187 - protein, 79 aa, Homo sapiens
PDLPVVVVANKQVLPYRFSVVPGMSDVGATGKERHRGSVISRTVPAEAHGHPEPQPPHHSIRGAAFRRAFRFRRFRLTL

SEQ ID NO: 94188 - protein, 113 aa, Homo sapiens
  MOD_RES (1)..(1): Any amino acid
XIYILDRRFRSLDDSCSQLTSFLYSFCQQSRRQRIIQRNRTERLSDLLDWKYLGRVGPPLSYPLLANQQLLARGLWCRVQGLILLVTVAVPLSNEPGRSRWWLMVVIPALWEA

SEQ ID NO: 94189 - protein, 103 aa, Homo sapiens
MAATRAGPRAREIFTSLEYGPVPESHACALAGRGDPEAPAAAVDPGIPGDWAGCSRGSRRGRPAGPAAAPLPCNPGIHPGGGTGRLGAHGSNWPHPATHILLP

SEQ ID NO: 94190 - protein, 145 aa, Homo sapiens
NPLPTNYTWYHNGKEMQGRTEEKVHIPKILPWHAGTYSCVAENILGTGQRGPGAELDVQYPPKKVTTVIQNPMPIREGDTVTLSCNYNSSNPSVTRYEWKPHGAWEEPSLGVLKIQNVGWDNTTIACAACNSWCSWASPVALNVQ

SEQ ID NO: 94191 - protein, 216 aa, Homo sapiens
MVTSSFPISVAVFALITLQVGTQDSFIAAVYEHAVILPNKTETPVSQEDALNLMNENIDILETAIKQAAEQGARIIVTPEDALYGWKFTRETVFPYLEDIPDPQVNWIPCQDPHRFGHTPVQARLSCLAKDNSIYVLANLGDKKPCNSRDSTCPPNGYFQYNTNVVYNTEGKLVARYHKYHLYSEPQFNVPEKPELVTFNTAFGSLDERFAPFDSY

SEQ ID NO: 94192 - protein, 118 aa, Homo sapiens
MYEGKKTKNMFLTRALEKILADKEVKKAHHSQLRKACEVALEEIKAETEKQSPPHGEAKAGSSTLPPVKSKTNFIEADKYFLPFELACQSKCPRIVSTSLDCLQKLIAYGHLTGNAPD

SEQ ID NO: 94193 - protein, 63 aa, Homo sapiens
MIHFILLFSRQGKLRLQKWYITLPDKERKKITREIVQIILSRGHRTSSFVDWKELKLVYKRCL

SEQ ID NO: 94194 - protein, 509 aa, Homo sapiens
MDSQKEALQRIISTLANKNDEIQNFIDTLHHTLKGVQENSSNILSELDEEFDSLYSILDEVKESMINCIKQEQARKSQELQSQISQCNNALENSEELLEFATRSLDIKEPEEFSKAARQIKDRVTMASAFRLSLKPKVSDNMTHLMVDFSQERQMLQTLKFLPVPKAPEIDPVECLVADNSVTVAWRMPEEDNKIDHFILEHRKTNFDGLPRVKDERCWEIIDNIKGTEYTLSGLKFDSKYMNFRVRACNKAVAGEYSDPVTLETKALNFNLDNSSSHLNLKVEDTCVEWDPTGGKGQESKIKGKENKGSVHVTSLKKHTRSGTPSPKRTSVGSRPPAVRGSRDRFTGESYTVLGDTAIESGQHYWEVKAQKDCKSYSVGVAYKTLGKFDQLGKTNTSWCIHVNNWLQNTFAAKHNNKVKALDVTVPEKIGVFCDFDGGQLSFYDANSKQLLYSFKTKFTQPVLPGFMVWCGGLSLSTGMQVPSAVRTLQKSENGMTGSASSLNNVVTQ

SEQ ID NO: 94195 - protein, 94 aa, Homo sapiens
MSEHVRTRSQSSERGNDQESSQPVGSVIVQEPTEEKRQEEEPPTDNQGPDMEAFQQELALLKIEDEPGDGPDVREGIMPTFDLTKVLEAGDAQP

SEQ ID NO: 94196 - protein, 67 aa, Homo sapiens
MEHQLLCCEVETIRRAYPDANLLNDRVLRAMLKAEETCAPSVSYFKCVQKEVLPSMRKIVATWMLEM

SEQ ID NO: 94197 - protein, 187 aa, Homo sapiens
MFELVTSEASYYKSLNLLVSHFMENERIRKILHPSEAHILFSNVLDVLAVSERFLLELEHRMEENIVISDVCDIVYRYAADHFSVYITYVSNQTYQERTYKQLLQEKAAFRELIAQLELDPKCRGLPFSSFLILPFQRITRLKLLVQNILKRVEERSERECTALDAHKELEMVVKACNEGVRKMSRT

SEQ ID NO: 94198 - protein, 113 aa, Homo sapiens
MVLILGRRLNREDLGVRDSPATKRKVFEMDPKSLTGHEFFDFSSGSSHAENILQIFNEFRDSRLFTDVIICVEGKEFPCHRAVLSACSSYFRAMFCNDHRESREMLVEINGIL

SEQ ID NO: 94199 - protein, 935 aa, Homo sapiens
MVPWVRTMGQKLKQRLRLDVGREICRQYPLFCFLLLCLSAASLLLNRYIHILMIFWSFVAGVVTFYCSLGPDSLLPNIFFTIKYKPKQLGLQELFPQGHSCAVCGKVKCKRHRPSLLLENYQPWLDLKISSKVDASLSEVLELVLENFVYPWYRDVTDDESFVDELRITLRFFASVLIRRIHKVDIPSIITKKLLKAAMKHIEVIVKARQKVKNTEFLQQAALEEYGPELHVALRSRRDELHYLRKLTELLFPYILPPKATDCRSLTLLIREILSGSVFLPSLDFLADPDTVNHLLIIFIDDSPPEKATEPASPLVPFLQKFAEPRNKKPSVLKLELKQIREQQDLLFRFMNFLKQEGAVHVLQFCLTVEEFNDRILRPELSNDEMLSLHEELQKIYKTYCLDESIDKIRFDPFIVEEIQRIAEGPYIDVVKLQTMRCLFEAYEHVLSLLENVFTPMFCHSDEYFRQLLRGAESPTRNSKLNRGSLSLDDFRNTQKRGESFGISRIGSKIKGVFKSTTMEGAMLPNYGVAEGEDDFIEEGIVVMEDDSPVEAVSTPNTPRNLAAWKISIPYVDFFEDPSSERKEKKERIPVFCIDVERNDRRAVGHEPEHWSVYRRYLEFYVLESKLTEFHGAFPDAQLPSKRIIGPKNYEFLKSKREEFQEYLQKLLQHPELSNSQLLADFLSPNGGETQFLDKILPDVNLGKIIKSVPGKLMKEKGQHLEPFIMNFINSCESPKPKPSRPELTILSPTSENNKKLFNDLFKNNANRAENTERKQNQNYFMEVMTVEGVYDYLMYVGRVVFQVPDWLHHLLMGTRILFKNTLEMYTDYYLQCKLEQLFQEHRLVSLITLLRDAIFCENTEPRSLQDKQKGAKQTFEEMMNYIPDLLVKCIGEETKYESIRLLFDGLQQPVLNKQELFPELNKVQKEVTSVTSWM

SEQ ID NO: 94200 - protein, 98 aa, Homo sapiens
MEEEDESRGKTEESGEDRGDGPPDRDPTLSPSAFILRAIQQAVGSSLQGDLPNDKDGSRCHGLRWRRCRSPRSEPRSQESGGTDTATVLDMATDSFLA

SEQ ID NO: 94201 - protein, 101 aa, Homo sapiens
MATESPATRRVQVAEHPRLLKLKEMFNSKFGSIPKFYVRAPGRVNIIGEHIDYCGYSVLPMAVEQDVLIAVEPVKTYALQLANTNPLYPSSGLQGSLRQRL

SEQ ID NO: 94202 - protein, 77 aa, Homo sapiens
MTEVVPSSALSEVSLRLLCHDDIDTVKHLCGDWFPIEYPDSWYRDITSNKKFFSLAATYRGAIVGMIVAEIKNRTKI

SEQ ID NO: 94203 - protein, 247 aa, Homo sapiens
MGEVEAPGRLWLESPPGGAPPIFLPSDGQALVLGRGPLTQVTDRKCSRTQVELVADPETRTVAVKQLGVNPSTTGTQELKPGLEGSLGVGDTLYLVNGLHPLTLRWEETRTPESQPDTPPGTPLVSQDEKRDAELPKKRMRKSNPGWENLEKLLVFTAAGVKPQGKVAGFDLDGTLITTRSGKVFPTGPSDWRILYPEIPRKLRELEAEGYKLVIFTNQMSIGRGKLPAEEFKAKVEAVVEKLGVPF

SEQ ID NO: 94204 - protein, 73 aa, Homo sapiens
  MOD_RES (1)..(1): Any amino acid
XLRELLEFTHMYLQSDDEMELEETEPPLEPEDALSDAEFEGEGDYEEGMYADWWQEPDAKGDEAEAEPEPELA

SEQ ID NO: 94205 - protein, 102 aa, Homo sapiens
MAAVGAGGSTAAPGPGAVSAGALEPGTASAGNVKHLVLFLHEAVLVQYVDTLKLAVPSLIYTLQNNLQYVAISNLPAATFQVSPKPSMAPEELTGLGTGVWE

SEQ ID NO: 94206 - protein, 159 aa, Homo sapiens
MTTQLGPALVLGVALCLGCGQPLPQVPERPFSVLWNVPSAHCEARFGVHLPLNALGIIANRGQHFHGQNMTIFYKNQLGLYPYFGPRGTAHNGGIPQALPLDRHLALAAYQIHHSLRPGFAGPAVLDWEEWCPLWAGNWGRRRAYQAASWAWAQQVFPD

SEQ ID NO: 94207 - protein, 124 aa, Homo sapiens
  MOD_RES (1)..(1): Any amino acid
XLRAAPAGGFQNIACLRSNAMKHLPNFFYKGQRTKHKWRIISPTLLAEYAYVLRVGGLVYTITDVLELHDWMCTHFEEHPLFERVPLEDLSEDPVVGHLGTSTEEGKKVLRNGGKNFPAIFRRI

SEQ ID NO: 94208 - protein, 123 aa, Homo sapiens
MEAREPGRPTPTYHLVPNTSQSQVEEDVSSPPQRSSETMQLKKEISLLNGVSLVVGNMIGSGIFVSPKGVLVHTASYGMSLIVWAIGGLFSVVGALCYAELGTTITKSGASYAYILEAFGGFI

SEQ ID NO: 94209 - protein, 174 aa, Homo sapiens
  MOD_RES (1)..(1): Any amino acid
XCPSSPNFILNFPPPPSASSVSMVQLFSSPFGYQSPSGHSEEEREGNMKSAKPQVNHSQHGESQRALSPLQSTLSSAASPSQAYETYIENGLICLKHKIRNIEKKKLKLEDYKDRLKSGEHLNPDQLEAVEKYEEVLHNLEFAKELQKTFSGLSLDVTTKSAKEGPEKGAHAKT

SEQ ID NO: 94210 - protein, 27 aa, Homo sapiens
MIISTPQRLTSSGSVLIGSPYTPAPAM

SEQ ID NO: 94211 - protein, 455 aa, Homo sapiens
MPEQWARLLQTSNITKSEQKKNPQAVLDVLEFYNSKKTSNSQKYMSFTDKSAEDYNSSNALNVKAVSETPAVPPVSEDEDDDDDDATPPPVIAPRPEHTKSVYTRSVIEPLPVTPTRDVATSPISPTENNTTPPDALTRNTEKQKKKPKMSDEEILEKLRSIVSVGDPKKKYTRFEKIGQGASGTVYTAMDVATGQEVAIKQMNLQQQPKKELIINEILVMRENKNPNIVNYLDSYLVGDELWVVMEYLAGGSLTDVVTETCMDEGQIAAVCRECLQALEFLHSNQVIHRDIKSDNILLGMDGSVKLTDFGFCAQITPEQSKRSTMVGTPYWMAPEVVTRKAYGPKVDIWSLGIMAIEMIEGEPPYLNENPLRALYLIATNGTPELQNPEKLSAIFRDFLNRCLEMDVEKRGSAKELLQVRKLRFQVFSNFSMIAASIPEDCQAPLQPHSTDCCS

SEQ ID NO: 94212 - protein, 148 aa, Homo sapiens
MLPAATEVQKDHAGSCGEGNLKGKKLEEGRLDTKHRAMLRLQGQKDMVWKWMPLLLLLVCVATMCSAQDRTDLLNVCMDAKHHKTKPGPEDKLHDQCSPWKKNACCTASTSQELHKDTSRLYNFNWDHCGKMEPACKRHFIQDTCLYE

SEQ ID NO: 94213 - protein, 382 aa, Homo sapiens
  MOD_RES (1)..(1): Any amino acid
XDIHQEMDREELELEEVDLYRMNSQDKLGLTVCYRTDDEDDIGIYISEIDPNSIAAKDGRIREGDRIIQINGIEVQNREEAVALLTSEENKNFSLLIARPELQLDEGWMDDDRNDFLDDLHMDMLEEQHHQAMQFTASVLQQKKHDEDGGTTDTATILSNQHEKDSGVGRTDESTRNDESSEQENNGDDATASSNPLAGQRKLTCSQDTLGSGDLPFSNESFISADCTDADYLGIPWKVKIRSDGTRYITKRPVRDRLLRERALKIREERSGMTTDDDAVSEMKMGRYWSKEERKQHLVKAKEQRRRREFMMQSRLDCLKEQQAADDRKEMNILELSHKKMMKKRNKKIFDNWMTIQELLTHGTKSPDGTRVYNSFLSVTTV

SEQ ID NO: 94214 - protein, 408 aa, Homo sapiens
MAAALLARASGPARRALCPRAWRQLHTIYQSVELPETHQMLLQTCRDFAEKELFPIAAQVDKEHLFPAAQVKKMGGLGLLAMDVPEELGGAGLDYLAYAIAMEEISRGCASTGVIMSVNNSLYLGPILKFGSKEQKQAWVTPFTSGDKIGCFALSEPGPSLLGPTGPIFALGQVGCPCPSSAATEACTFPRSRQRVSRPELLREGISAFLVPMPTPGLTLGKKEDKLGIRGSSTANLIFEDCRIPKDSILGEPGMGFKIAMQTLDMGRIGIASQALGIAQTALDCAVNYAENRMAFGAPLTKLQVIQFKLADMALALESARLLTWRAAMLKDNKKPFIKEAAMAKLAASEAATAISHQAIQILGGMGYVTEMPAERHYRDARITEIYEGTSEIQRLVIAGHLLRSYRS

SEQ ID NO: 94215 - protein, 84 aa, Homo sapiens
MIPDLSEYKWIVPDIVWEIDEYIDFEKIRKALPSSEDLVKLAPDFDKIVESLSLLKDFFTSGSPEETAFRATDRGSESDKHFRK

SEQ ID NO: 94216 - protein, 236 aa, Homo sapiens
MASQKRPSQRHGSKYLATASTMDHARHGFLPRHRDTGILDSIGRFFGGDRGAPKRGSGKDSHHPARTAHYGSLPQKSHGRTQDENPVVHFFKNIVTPRTPPPSQGKGRGLSLSRFSWVGDERTSIGFLFRPSPHSPATFVFCSVSVASWPPFLSSRDLSAHSWDRAALSSTGEMKRGLPFRKGAEGQRPGFGYGGRASDYKSAHKGFKGVDAQGTLSKIFKLGGRDSRSGSPMARR

SEQ ID NO: 94217 - protein, 83 aa, Homo sapiens
MGHFEKGQHALLNEGEENEMEIFGYRTQGCRKSLCLAGSIFSFGILPLVFYWRPAWHVWAHCVPCSLQEADTVLLRTTMRSIS

SEQ ID NO: 94218 - protein, 69 aa, Homo sapiens
MSAALLRRGLELLAASEAPRDPPGQAKPRGAPVKRPRKTKAIQAQKLRNSAKGKVPKSALDGVSPCWPR

SEQ ID NO: 94219 - protein, 103 aa, Homo sapiens
MAVRERAAAAMAALERRVPSLDDFAGQSWSSWVERADLPAADETEVQGQPLPKGPLRRGGTCIADQGDFEDAQGPKTAVSLLCDHPISAGPEKLGVTLTMLWG

SEQ ID NO: 94220 - protein, 114 aa, Homo sapiens
MAAVQVVGSWPSVQPREAPREAIPERGNGFRLLSARLCALRPDDSSSARTEIHLLFDQLISENYSEGSGVAPEDVSALLVQACRLVPLNQNHLVSKVSQLIHHLLNRLQLPMSG

SEQ ID NO: 94221 - protein, 122 aa, Homo sapiens
  MOD_RES (1)..(1): Any amino acid
XSSGHGSGENGSQRPVTVDSSKARTSLDALKISIRQLKWKEFPFGRRLPCDIYWHGVSFHDNDIFSGQVNKFPGMTEMVRKITLSRAVRTMQNLFPEESTSANLSLSTSSSLIFVCMSYSSP

SEQ ID NO: 94222 - protein, 94 aa, Homo sapiens
MPSETLWEIAKAEVEKRGINGSEGDGAEIAEKFVFFIGSKNGSLALSPRFECSGVISAHCSLCLLGSHHSPASASQVAGTAGAHDHAWERLLLF

SEQ ID NO: 94223 - protein, 93 aa, Homo sapiens
METTPLAENQDEDPLEVTSQYVAQADLKLPDLSNSLVSASQSVGVTDPHLHLNIEESNQEFMVKSEELYDSLMNCHWQPLDTVHSEIPDETPK

SEQ ID NO: 94224 - protein, 199 aa, Homo sapiens
MKSLLLLVLISICWADHLSDNYTLDHDRAIHIQAENGPHLLVEAEQAKVFSHRGGNVTLPCKFYRDPTAFGSGIHKIRIKWTKLTSDYLKEVDVFVSMGYHKKTYGGYQGRVFLKGGSDSDASLVITDLTLEDYGRYKCEVIEGLEDDTVVVALDLQGVVFPYFPRLGRYNLNFHEAQQACLDQDAVIASFDQLYDAWR

SEQ ID NO: 94225 - protein, 376 aa, Homo sapiens
MPYVDRQNRICGFLDIEEHENSGKFLRRYFILDTQANCLLWYMDNPQNLAMGAGAVGALQLTYISKVPKGGGLPMTTEVLKSLAAPPALEKKPQVAYKTEIIGGVVVHTPISQNGGDGQEGSEPGSHTILRRSQSYIPTSGCRASTGPPLIKSGYCVKQGNVRKSWKRRFFALDDFTICYFKCEQDREPLRTIFLKDVLKTHECLVKSGDLLMRDNLFEIITSSRTFYVQADSPEDMHSWIKEIGAAVQALKCHPRETSFSRSISLTRPGSSSLSSGPNSILCRGRPPLEEKKALCKAPSVASSWQPWTPVPQAGEKLLPPGDTSEDSLFTPRPGEGSAPGVLPSSRIRHRSEPQHPKEKPFMFNLDDENIRTSDV

SEQ ID NO: 94226 - protein, 71 aa, Homo sapiens
MKKQSDSVKGKRRDDGLSAAARKQSAITSSRNFLYPAYVYFPSSVPSPPRKYTQTYYAAVPAGWWGSGGGP

SEQ ID NO: 94227 - protein, 208 aa, Homo sapiens
MKGALMEIIQLASLDSDPWVLMVADILKSFPDTGSLNLELEEQNPNVQDILGELREKVGECEASAMLPLECQYLNKNALTTLAGPLTPPVKHFQLKRKPKSATLRAELLQKSTETAQQLKRSAGVPFHAKGRGLLRKMDTTTPLKGIPKQAPFRSPTAPSVFSPTGNRTPIPPSRTLLRKERGVKLLDISELDMVGAGREAKRRRKTL

SEQ ID NO: 94228 - protein, 42 aa, Homo sapiens
MAAEFDTFLASGLRWFCHVDDDNYVNPRALLQLLRAFPLARD

SEQ ID NO: 94229 - protein, 120 aa, Homo sapiens
MRLAVGALLVCAVLGLCLAVPDKTVRWCAVSEHEATKCQSFRDHMKSVIPSDGPSVACVKKASYLDCIRAIAANEADAVTLDAGLVYDAYLAPNNLKPVVAEFYGSKEDFLLCCCCGEEG

SEQ ID NO: 94230 - protein, 259 aa, Homo sapiens
MDDLCEANGTFAISLFKILGEEDNSRNVFFSPMSISSALAMVFMGAKGSTAAQMSQALCLYKDGDIHRGFQSLLSEVNRTGTQYLLRTANRLFGEKTCDFLPDFKEYCQKFYQAELEELSFAEDTEECRKHINDWVAEKTEGKISEVLDAGTVDPLTKLVLVNAIYFKGKWNEQFDRKYTRGMLFKTNEEKKTVQMMFKEAKFKMGYADEVHTQVLELPYVEEELSMVILLPDDNTDLAVDTLRSTSFFCDILANIIST

SEQ ID NO: 94231 - protein, 938 aa, Homo sapiens
MGRAGAAANGTPQNVQGITSYQQRITAQHPLPNQSECRKIYRYDGIYCESTYQNLQALRKEKSRDAARSRRGKENFEFYELAKLLPLPAAITSQLDKASIIRLTISYLKMRDFANQGDPPWNLRMEGPPPNTSVKGAQRRRSPSALAIEVFEAHLGSHILQSLDGFVFALNQEGKFLYISETVSIYLGLSQVELTGSSVFDYVHPGDHVEMAEQLGMKLPPGRGLLSQGTAEDGASSASSSSQSETPEPVESTSPSLLTTDNTLERSFFIRMKSTLTKRGVHIKSSGYKVIHITGRLRLRVSLSHGRTVPSQIMGLVVVAHALPPPTINEVRIDCHMFVTRVNMDLNIIYCENRISDYMDLTPVDIVGKRCYHFIHAEDVEGIRHSHLDLLNKGQCVTKYYRWMQKNGGYIWIQSSATIAINAKNANEKNIIWVNYLLSNPEYKDTPMDIAQLPHLPEKTSESSETSDSESDSKDTSGITEDNENSKSDEKGNQSENSEDPEPDRKKSGNACDNDMNCNDDGHSSSNPDSRDSDDSFEHSDFENPKAGEDGFGALGAMQIKVERYVESESDLRLQNCESLTSDSAKDSDSAGEAGAQASSKHQKRKKRRKRQKGGSASRRRLSSASSPGGLDAGLVEPPRLLSSPNSASVLKIKTEISEPINFDNDSSIWNYPPNREISRNESPYSMTKPPSSEHFPSPQGGGGGGGGGGGLHVAIPDSVLTPPGADGAAARKTQFGASATAALAPVASDPLSPPLSASPRDKHPGNGGGGGGGGGGAGGGGPSASNSLLYTGDLEALQRLQAGNVVLPLVHRVTGTLAATSTAAQRVYTTGTIRYAPAEVTLAMQSNLLPNAHAVNFVDVNSPGFGLDPKTPMEMLYHHVHRLNMSGPFGGAVSAASLTQMPAGNVFTTAEGLFSTLPFPVYSNGIHAAQTLERKED

SEQ ID NO: 94232 - protein, 218 aa, Homo sapiens
GDLQSLSWLTAVDVPRLQQMASGRVDLGGPCVPHPHPGALAGVADLHVGATPSPLLHGPAGMAPRGMPGLGPITGHRDSQMSQFPVGGQPSSGLQDPPHLYSPATQPQFPLPPGAQQLSDRHGPEEQQDRQPACERDLQLHEGALPLLQDGPRRVEELGAAQPVSEQVLREGGEQDERLLPQGLPVGSEPGPHRQDGGGDAQVEEEGPGCHPPEYGQP

SEQ ID NO: 94233 - protein, 78 aa, Homo sapiens
MAVVSAVRWLGLRSRLGQPLTGRRAGLCEQARSCSSPQERETTPSDTAETFVLPFNASPPFPDFILVVQPSQRLKELM

SEQ ID NO: 94234 - protein, 1155 aa, Homo sapiens
MWLKPEEVLLKNALKLWVTQKSSCYFILQRRRGHGEGGGRLTGRLVGALDAVLDSNARVAPFRILLQVPGSQVYSPIACGELLNGSDVYWAIATGATLEEINQHWDWLEQNLLHTLSVFDNKDDIASFVKGKVKALIAEETSSRLAEQEEEPEKFREALVKFEARFNFPEAEKLVTYYSCCCWKGRVPRQGWLYLSINHLCFYSFFLGKELKLVVPWVDIQKLERTSNVFLTDTIRITTQNKERDFSMFLNLDEVFKVMEQLADVTLRRLLDNEVFDLDPDLQEPSQITKRDLEARAQNEFFRAFFRLPRKEKLHAVVDCSLWTPFSRCHTTGRMFASDSYICFASREDGCCKIILPLREVVSIEKMEDTSLLPHPIIVSIRSKVAFQFIELRDRDSLVEALLARLKQVHANHPVHYDTSADDDMASLVFHSTSMCSDHRFGDLEMMSSQNSEESEKEKSPLMHPDALVTAFQQSGSQSPDSRMSREQIKISLWNDHFVEYGRTVCMFRTEKIRKLVAMGIPESLRGRLWLLFSDAVTDLASHPGYYGNLVEESLGKCCLVTEEIERDLHRSLPEHPAFQNETGIAALRRVLTAYAHRNPKIGYCQSMNILTSVLLLYTKEEEAFWLLVAVCERMLPDYFNHRVIGAQVDQSVFEELIKGHLPELAEHMNDLSALASVSLSWFLTLFLSIMPLESAVNVVDCFFYDGIKAIFQLGLAVLEANAEDLCSSKDDGQALMILSRFLDHIKNEDSPGPPVGSHHAFFSDDQEPYPVTDISDLIRDSYEKFGDQSVEQIEHLRYKHRIRVLQGHEDTTKQNVLRVVIPEVSILPEDLEELYDLFKREHMMSCYWEQPRPMASRHDPSRPYAEQYRIDARQFAHLFQLVSPWTCGAHTEILAERTFRLLDDNMDQLIEFKAFVSCLDIMYNGEMNEKIKLLYRLHIPPALTENDRDSQSPLRNPLLSTSRPLVFGKPNGDAVDYQKQLKQMIKDLAKEKDKTEKELPKMSQREFIQFCKTLYSMFHEDPEENDLYQAIATVTTLLLQIGEVGQRGSSSGSCSQECGEELRASAPSPEDSVFADTGKTPQDSQAFPEAAERDWTVSLEHILASLLTEQSLVNFFEKPLDMKSKLENAKINQYNLKTFEMSHQSQSELKLSNL

SEQ ID NO: 94235 - protein, 101 aa, Homo sapiens
ISGDIKDRLKKKEDCLKLLLFLSTELQASQILQNKKHKNSQLDKNSEVYQEVQAMFDTLGIPKSTTSDIPHMLNQVESKVKDILSKIHMEEVVVVVVVVVE

SEQ ID NO: 94236 - protein, 126 aa, Homo sapiens
MSARTPLPTVNERDTENHTSVDGYTEPHIQPTKSSSRQNIPRCRNSITSATDEQPHIGNYRLQKTIGKGNFAKVKLARHVLTGREVAVKIIDKTQLNPTSLQKKYIYLFSLTVISRSTNNEDTESS

SEQ ID NO: 94237 - protein, 101 aa, Homo sapiens
MESPASSQPASMPQSKGNSLSANPWPSAQREQSSQLARVRRRPGQRRLPAAGGCRGQSIYHPGLRGAWSPPIQPICASALDREAGHIHGDHLWATTGPHLR

SEQ ID NO: 94238 - protein, 9 aa, Homo sapiens
MAGCGEIDH

SEQ ID NO: 94239 - protein, 750 aa, Homo sapiens
MGRSNSRSHSSRSKSRSQSSSRSRSRSHSRKKRYRSRSRTYSRSRSRDRMYSRDYRRDYRNNRGMRRPYGYRGRGRGYYQGGGGRYHRGGYRPVWNRRHSRSPRRGRSRSRSPKRRSVSSQRSRSRSRRSYRSSRSPRSSSSRSSSPYSKSPVSKRRGSQEKQTKKAEGEPQEESPLKSKSQEEPKDTFEHDPSESIDEFNKSSATSGDIWPGLSAYDNSPRSPHSPSPIATPPSQSSSCSDAPMLSTVHSAKNTPSQHSHSIQHSPERSGSGSVGNGSSRYSPSQNSPIHHIPSRRSPAKTIAPQNAPRDESRGRSSFYPDGGDQETAKTGKFLKRFTDEESRVFLLDRGNTRDKEASKEKGSEKGRAEGEWEDQEALDYFSDKESGKQKFNDSEGDDTEETEDYRQFRKSVLADQGKSFATASHRNTEEEGLKYKSKVSLKGNRESDGFREEKNYKLKETGYVVERPSTTKDKHKEEDKNSERITVKKETQSPEQVKSEKLKDLFDYSPPLHKNLDAREKSTFREESPLRIKMIASDSHRPEVKLKMAPVPLDDSNRPASLTKDRLLASTLVHSVKKEQEFRSIFDHIKLPQASKSTSESFIQHIVSLVHHVKEQYFKSAAMTLNERFTSYQKATEEHSTRQKSPEIHRRIDISPSTLRKHTRLAGEERVFKEENQKGDKKLRCDSADLRHDIDRRRKERSKERGDSKGSRESSGSRKQEKTPKDYKEYKSYKDDSKNVFVFYTAYGG

SEQ ID NO: 94240 - protein, 115 aa, Homo sapiens
MAYQKVHADQRAPGHSQYLDNDDLQATALDLEWDMEKELEESGFDQFQLDGAENQNLGHSETIDLNLDSIQPATSPKGRFQRLQEESDYITHYTRSAPKSNRCNFCHVLKILCTA

SEQ ID NO: 94241 - protein, 47 aa, Homo sapiens
MFAMKVYGAYLLSSEADFSSSSSTGSISAPEVHMSTAGSKRSSSSRK

SEQ ID NO: 94242 - protein, 56 aa, Homo sapiens
MACAAVMIPGLLRCSVGAIRIEAASLRLTLSTLRHLTLTRLCQQLRCVELPVSHRQ

SEQ ID NO: 94243 - protein, 123 aa, Homo sapiens
MDVAIEFSQEEWKCLDPAQRTLYRDVMLENYRNLVSLGICLPDLSVTSMLEQKRDPWTLQSEEKIANDPDGRECIKGVNTVPLLQQNLLCSRPQSPMFGGHLSDILGVPLLGHQLPPAQTLGD

SEQ ID NO: 94244 - protein, 1727 aa, Homo sapiens
MNGGKECDGGDKEGGLPAIQVPVGWQRRVDQNGVLYVSPSGSLLSCLEQVKTYLLTDGTCKCGLECPLILPKVFNFDPGAAVKQRTAEDVKADEDVTKLCIHKRKIIAVATLHKSMEAPHPSLVLTSPGGGTNATPVVPSRAATPRSVRNKSHEGITNSVMPECKNPFKLMIGSSNAMGRLYVQELPGSQQQELHPVYPRQRLGSSEHGQKSPFRGSHGGLPSPASSGSQIYGDGSISPRTDPLGSPDVFTRSNPGFHGAPNSSPIHLNRTPLSPPSVMLHGSPVQSSCAMAGRTNIPLSPTLTTKSPVMKKPMCNFSTNMEIPRAMFHHKPPQGPPPPPPPSCALQKKPLTSEKDPLGILDPIPSKPVNQNPVIINPTSFHSNVHSQVPMMNVSMPPAVVPLPSNLPLPTVKPGHMNHGSHVQRVQHSASTSLSPSPVTSPVHMMGTGIGRIEASPQRSRSSSTSSDHGNFMMPPVGPQATSSGIKVPPRSPRSTIGSPRPSMPSSPSTKSDGHHQYKDIPNPLIAGISNVLNTPSSAAFPTASAGSSSVKSQPGLLGMPLNQILNQHNAASFPASSLLSAAAKAQLANQNKLAGNNSSSSSNSGAVAGSGNTEGHSTLNTMFPPTANMLLPTGEGQSGRAALRDKLMSQQKDALRKRKQPPTTVLSLLRQSQMDSSAVPKPGPDLLRKQGQGSFPISSMSQLLQSMSCQSSHLSSNSTPGCGASNTALPCSANQLHFTDPSMNSSVLQNIPLRGEAVHCHNANTNFVHSNSPVPNHHLAGLINQIQASGNCGMLSQSGMALGNSLHPNPPQSRISTSSTPVIPNSIVSSYNQTSSEAGGSGPSSSIAIAGTNHPAITKTTSVLQDGVIVTTAAGNPLQSQLPIGSDFPFVGQEHALHFPSNSTSNNHLPHPLNPSLLSSLPISLPVNQQHLLNQNLLNILQPSAGEGKSEINLHPLGFLNPNVNAALAFLSSDMDGQVLQPVHFQLLAALLQNQAQAAAMLPLPSFNLTISDLLQQQNTPLPSLTQMTAPPDHLPSNQSDNSRAETLLTSPLGNPLPSFAGSDTTFNPLFLPAVNGASGLMTLNPQLLGGVLNSASANTANHPEVSIATSSQATTTTTTTSSAVAALTVSTLGGTAVVSMAETLLNISNNAGNTPGPAKLNSNSVVPQLLNPLLGTGLLGDMSSINNTLSNHQLTHLQSLLNNNQMFPPNQQQQQLLQGYQNLQAFQGQSTIPCPANNNPMACLFQNFQVRMQEDAALLNKRISTQPGLTALPENPNTTLPPFQDTPCELQPRIDPSLGQQVKDGLVVGGPGDASVDAIYKAVVDAASKGMQVVITTAVNSTTQISPIPALSAMSAFTASIGDPLNLSSAVSAVIHGRNMGGVDHDGRLRNSRGARLPKNLDHGKNVNEGDGFEYFKSASCHTSKKQWDGEQSPRGERNRWKYEEFLDHPGHIHSSPCHERPNNVSTLPFLPGEQHPILLPPRNCPGDKILEENFRYNNYKRTMMSFKERLENTVERCAHINGNRPRQSRGFGELLSTAKQDLVLEEQSPSSSNSLENSLVKDYIHYNGDFNAKSVNGCVPSPSDAKSISSEDDLRNPDSPSSNELIHYRPRTFNVGDLVWGQIKGLTSWPGKLVREDDVHNSCQQSPEEGKVEPEKLKTLTEGLEAYSRVRKRNRKSGKLNNHLEAAIHEAMSELDKMSGTVHQIPQGDRQMRPPKPKRRKISR

SEQ ID NO: 94245 - protein, 586 aa, Homo sapiens
MEDPRGINGQSVQTSQASSDVAVSSSCRSMEMQDLTSPHSRLSGSSESPSGPKLGNSHINSNSMTPNGTEVKTEPMSSSETASTTADGSLNNFSGSAIGSSSFSPRPTHQFSPPQIYPSNRPYPHILPTPSSQTMAAYGQTQFTTGMQQATAYATYPQPGQPYGISSYGIKTEGGLSQSQSPGQTGFLSYGTSFSTPQPGQAPYSYQMQGSSFTTSSGIYTGNNSLTNSSGFNSSQQDYPSYPSFGQGQYAQYYNSSPYPAHYMTSSNTSPTTPSTNATYQLQEPPSGITSQAVTDPTAEYSTIHSPSTPIKDSDSDRLRRGSDGKSRGRGRRNNNPSPPPDSDLERVFIWDLDETIIVFHSLLTGSYANRYGRECDQVHIDDVSSDDNGQDLSTYNFGTDGFPAAATSANLCLATGVRGGVDWMRKLAFRYRRVKEIYNTYKNNVGGLLGPAKREAWLQLRAEIEALTDSWLTLALKALSLIHSRTNCVNILVTTTQLIPALAKVLLYGLGIVFPIENIYSATKIGKESCFERIIQRFGRKVVYVVIGDGVEEEQGAKKHAMPFWRISSHSDLMALHHALELEYL

SEQ ID NO: 94246 - protein, 90 aa, Homo sapiens
MASLFHQLQILVWKNWLGVKRQPLWTLVLILWPVIIFIILAITRTKFPPTAKPTWDSSTWNTCDGWMAQIFFFSCINEETDSRYRVMIAQ

SEQ ID NO: 94247 - protein, 79 aa, Homo sapiens
MLKFQEAAKCVSGSTAISTYPKTLIARRYVLQQKLGSGSFGTVYLVSDKKAKRGEELAEIWTIKFRNINKLEKSFQKIK

SEQ ID NO: 94248 - protein, 47 aa, Homo sapiens
MDAANFEQFLQERIKVNGKAGNLGGGVVTIERSKSKITVTSEVPFSK

SEQ ID NO: 94249 - protein, 234 aa, Homo sapiens
MQRLGATLLCLLLAAAVPTAPAPAPTATSAPVKPGPALSYPQEEATLNEMFREVEELMEDTQHKLRSAVEEMEAEEAAAKASSEVNLANLPPSYHNETNTDTKVGNNTIHVHREIHKITNNQTGQMVFSETVITSVGDEEGRRSHECIIDEDCGPSMYCQFASFQYTCQPCRGQRMLCTRDSECCGDQLCVWGHCTKMATRGSNGTICDNQRDCQPGLCCAFQRGLLFPVCTPL

SEQ ID NO: 94250 - protein, 1033 aa, Homo sapiens
MPGEQMDPTGSQLDSDFSQQDTPCLIIEDSQPESQVLEDDSGSHFSMLSRHLPNLQTHKENPVLDVVSNPEQTAGEERGDGNSGFNEHLKENKVADPVDSSNLDTCGSISQVIEQLPQPNRTSSVLGMSVESAPAVEEEKGEELEQKEKEKEEDTSGNTTHSLGAEDTASSQLGFGVLELSQSQDVEENTVPYEVDKEQLQSVTTNSGYTRLSDVDANTAIKHEEQSNEDIPIAEQSSKDIPVTAQPSKDVHVVKEQNPPPARSEDMPFSPKASVAAMEAKEQLSAQELMESGLQIQKSPEPEVLSTQEDLFDQSNKTVSSDGCSTPSREEGGCSLASTPATTLHLLQLSGQRSLVQDSLSTNSSDLVAPSPDAFRSTPFIVPSSPTEQEGRQDKPMDTSVLSEEGGEPFQKKLQSGEPVELENPPLLPESTVSPQASTPISQSTPVFPPGSLPIPSQPQFSHDIFIPSPSLEEQSNDGKKDGDMHSSSLTVECSKTSEIEPKNSPEDLGLSLTGDSCKLMLSTSEYSQSPKMESLSSHRIDEDGENTQIEDTEPMSPVLNSKFVPAENDSILMNPAQDGEVQLSQNDDKTKGDDTDTRDDISILATGCKGREETVAEDVCIDLTCDSGSQAVPSPATRSEALSSVLDQEEAMEIKEHHPEEGSSGSEVEEIPETPCESQGEELKEENMESVPLHLSLTETQSQGLCLQKEMPKKECSEAMEVETSVISIDSPQKLAILDQELEHKEQEAWEEATSEDSSVVIVDVKEPSPRVDVSCEPLEGVEKCSDSQSWEDIAPEIEPCAENRLDTKEEKSVEYEGDLKSGTAETEPVEQDSSQPSLPLVRADDPLRLDQELQQPQTQEKTSNSLTEDSKMANAKQLSSDAEAQKLGKPSAHASQSFCESSSGISNYPESTIATSDVMSESMVETHDPILGSGKGDSGAAPDVDDKLCLRMKLVSPETEASEESLQFNLEKPATGERKNGSTAVAESVASPQKTMSVLSCICEARQENEARSEDPPTTPIRGNLLHFPSS

SEQ ID NO: 94251 - protein, 127 aa, Homo sapiens
MDICESILERKRHDSERSTCSILEQTDMEAVEALVCMSSWGQRSQKGDLLRIRPLTPVSDSGDVTTTVHMDAATPELPKDFHSLSTLCITPPQSPDLVEPSTRTPVSPQVTDSKACTATDVLQSSAV

SEQ ID NO: 94252 - protein, 1146 aa, Homo sapiens
MDALIIPVTMEVPCDSRGQRMWWAFLASSMVTFFGGLFIILLWRTLKYLWTVCCHCGGKTKEAQKINNGSSQADGTLKPVDEKEEAVAAEVGWMTSVKDWAGVMISAQTLTGRVLVVLVFALSIGALVIYFIDSSNPIESCQNFYKDFTLQIDMAFNVFFLLYFGLRFIAANDKLWFWLEVNSVVDFFTVPPVFVSVYLNRSWLGLRFLRALRLIQFSEILQFLNILKTSNSIKLVNLLSIFISTWLTAAGFIHLVENSGDPWENFQNNQALTYWECVYLLMVTMSTVGYGDVYAKTTLGRLFMVFFILGGLAMFASYVPEIIELIGNRKKYGGSYSAVSGRKHIVVCGHITLESVSNFLKDFLHKDRDDVNVEIVFLHNISPNLELEALFKRHFTQVEFYQGSVLNPHDLARVKIESADACLILANKYCADPDAEDASNIMRVISIKNYHPKIRIITQMLQYHNKAHLLNIPSWNWKEGDDAICLAELKLGFIAQSCLAQGLSTMLANLFSMRSFIKIEEDTWQKYYLEGVSNEMYTEYLSSAFVGLSFPTVCELCFVKLKLLMIAIEYKSANRESRSRKRILINPGNHLKIQEGTLGFFIASDAKEVKRAFFYCKACHDDITDPKRIKKCGCKRLKVAARSRYSKDPFEFKKETPNSRLVTEPVEDEQPSTLSPKKKQRNGGMRNSPNTSPKLMRHDPLLIPGNDQIDNMDSNVKKYDSTGMFHWCAPKEIEKVILTRSEAAMTVLSGHVVVCIFGDVSSALIGLRNLVMPLRASNFHYHELKHIVFVGSIEYLKREWETLHNFPKVSILPGTPLSRADLRAVNINLCDMCVILSANQNNIDDTSLQDKECILASLNIKSMQFDDSIGVLQANSQGFTPPGMDRSSPDNSPVHGMLRQPSITTGVNIPIITELVNDTNVQFLDQDDDDDPDTELYLTQPFACGTAFAVSVLDSLMSATYFNDNILTLIRTLVTGGATPELEALIAEENALRGGYSTPQTLANRDRCRVAQLALLDGPFADLGDGGCYGDLFCKALKTYNMLCFGIYRLRDAHLSTPSQCTKRYVITNPPYEFELVPTDLIFCLMQFDHNAGQSRASLSHSSHSSQSSSKKSSSVHSIPSTANRQNRPKSRESRDKQKYVQEERL

SEQ ID NO: 94253 - protein, 135 aa, Homo sapiens
MEANGLGPQGFPELKNDTFLRAAWGEETDYTPVWCMRQAGRYLPEFRETRAAQDFFSTCRSPEACCELTLQPLRRFPLDAAIIFSDILVVPQMFSPPPGTGHGGDHGTWQRTQLPRAIKRRAGPRTPTGSRSGSL

SEQ ID NO: 94254 - protein, 115 aa, Homo sapiens
MLDDNRLSNPSCFASLAGLRRLKKLSLDENRIIRIPYLQQVQLYDESVDWNGGRGSPHKEPQFMLQSKPRMLEDSDEQLDYTVLPMKKDVDRTDRKRGCCPTSSSLPISLRVRLS

SEQ ID NO: 94255 - protein, 252 aa, Homo sapiens
MTSEFFAAQLRAQISDDTTHPISYYKPEFYTPDDGGTAHLSVVAEDGSAVSATSTINLYFGSKVRSPVSGILFNNEMDDFSSPSITNEFGVPPSPANFIQPGKQPLSSMCPTIMVGQDGQVRMVVGAAGGTQITTATALVCVTPFLPGRAHPAQPPSHADHTPMPQAIIYNLWFGYDVKRAVEEPRLHNQLLPNVTTVERNIDQAVTAALETRHHHTQIASTFIAVVQAIVRTAGGWAAASDSRKGGEPAGY

SEQ ID NO: 94256 - protein, 602 aa, Homo sapiens
MAERRAFAQKISRTVAAEVRKQISGQYSGSPQLLKNLNIVGNISHHTTVPLTEAVDPVDLEDYLITHPLAVDSGPLRDLIEFPPDDIEVVYSPRDCRTLVSAVPEESEMDPHVRDCIRSYTEDWAIVIRKYHKLGTGFNPNTLDKQKERQKGLPKQVFESDEAPDGNSYQDDQDDLKRRSMSIDDTPRGSWACSIFDLKNSLPDALLPNLLDRTPNEEIDRQNDDQRKSNRHKELFALHPSPDEEEPIERLSVPDIPKEHFGQRLLVKCLSLKFEIEIEPIFASLALYDVKEKKKISENFYFDLNSEQMKGLLRPHVPPAAITTLARSAIFSITYPSQDVFLVIKLEKVLQQGDIGECAEPYMIFKEADATKNKEKLEKLKSQADQFCQRLGKYRMPFAWTAIHLMNIVSSAGSLERDSTEVEISTGERKGSWSERRNSSIVGRRSLERTTSGDDACNLTSFRPATLTVTNFFKQEGDRLSDEDLYKFLADMRRPSSVLRRLRPITAQLKIDISPAPENPHYCLTPELLQVKLYPDSRVRPTREILEFPARDVYVPNTTYRNLLYIYPQSLNFANRQGSARNITVKVQFMYGEDPSNAMPVS

SEQ ID NO: 94257 - protein, 29 aa, Homo sapiens
MARALYDNVPECAEELAFRKGDILTVIEQ

SEQ ID NO: 94258 - protein, 1352 aa, Homo sapiens
MHSSNPKVRSSPSGNTQSSPKSKQEVMVRPPTVMSPSGNPQLDSKFSNQECNSADHIKSQDSQHTPHSMTPSNATAPRSSTPSHGQTTATEPTPAQKTPAKVVYVFSTEMANKAAEAVLKGQVETIVSFHIQNISNNKTERSTAPLNTQISALRNDPKPLPQQPPAPANQDQNSSQNTRLQPTPPIPAPAPKPAAPPRPLDRESPGVENKLIPSVGSPASSTPLPPDGTGPNSTPNNRAVTPVSQGSNSSSADPKAPPPPPVSSGEPPTLGENPDGLSQEQLEHRERSLQTLRDIQRMLFPDEKEFTGAQSGGPQQNPGVLDGPQKKPEGPIQAMMAQSQSLGKGPGPRTDVGAPFGPQGHRDVPFSPDEMVPPSMNSQSGTIGPDHLDHMTPEQIAWLKLQQEFYEEKRRKQEQVVVQQCSLQDMMVHQHGPRGVVRGPPPPYQMTPSEGWAPGGTEPFSDGINMPHSLPPRGMAPHPNMPGSQMRLPGFAGMINSEMEGPNVPNPASRPGLSGVSWPDDVPKIPDGRNFPPGQGIFSGPGRGERFPNPQGLSEEMFQQQLAEKQLGLPPGMAMEGIRPSMEMNRMIPGSQRHMEPGNNPIFPRIPVEGPLSPSRGDFPKGIPPQMGPGRELEFGMVPSGMKGDVNLNVNMGSNSQMIPQKMREAGAGPEEMLKLRPGGSDMLPAQQKMVPLPFGEHPQQEYGMGPRPFLPMSQGPGSNSGLRNLREPIGPDQRTNSRLSHMPPLPLNPSSNPTSLNTAPPVQRGLGRKPLDISVAGSQVHSPGINPLKSPTMHQVQSPMLGSPSGNLKSPQTPSQLAGMLAGPAAAASIKSPPVLGSAAASPVHLKSPSLPAPSPGWTSSPKPPLQSPGIPPNHKAPLTMASPAMLGNVESGGPPPPTASQPASVNIPGSLPSSTPYTMPPEPTLSQNPLSIMMSRMSKFAMPSSTPLYHDAIKTVASSDDDSPPARSPNLPSMNNMPGMGINTQNPRISGPNPVVPMPTLSPMGMTQPLSHSNQMPSPNAVGPNIPPHGVPMGPGLMSHNPIMGHGSQEPPMVPQGRMGFPQGFPPVQSPPQQVPFPHNGPSGGQGSFPGGMGFPGEGPLGRPSNLPQSSADAALCKPGGPGGPDSFTVLGNSMPSVFTDPDLQEVIRPGATGIPEFDLSRIIPSEKPSQTLQYFPRGEVPGRKQPQGPGPGFSHMQGMMGEQAPRMGLALPGMGGPGPVGTPDIPLGTAPSMPGHNPMRPPAFLQQGMMGPHHRMMSPAQSTMPGQPTLMSNPAAAVGMIPGKDRGPAGLYTHPGPVGSPGMMMSMQGMMGPQQNIMIPPQMRPRGMAADVGMGGFSQGPGNPGNMMF

SEQ ID NO: 94259 - protein, 49 aa, Homo sapiens
MALTLFDTDEYRPPVWKSYYLEVKPETSGSTTMASTLLGRNALSPSTIW

SEQ ID NO: 94260 - protein, 230 aa, Homo sapiens
MLGEKGDFITSPEISQIFGELLGIWFISEWMATGKSTAFQLVELGPGRGTLVGDILRVFTQLGSVLKNCDISVHLVEVSQKLSEIQALTLTKEKVPLERNAGSPVYMKGVTKSGIPISWYRDLHDVPKGYSFYLAHEFFDVLPVHKFQKTPQGWREVFVDIDPQVSDKLRFVLAPSATPAEAFIQHDETRDHVEVCPDAGVIIEELSQRIALTGGAALVADYGHDGTKTD

SEQ ID NO: 94261 - protein, 54 aa, Homo sapiens
  MOD_RES (1)..(1): Any amino acid
XLKRLLVPILLPEKCYDQLFVQWDLLHVPCLKILLSKGLGLGIVAGSLLAAPGV

SEQ ID NO: 94262 - protein, 523 aa, Homo sapiens
MYLWLKLLAFGFAFLDTEVFVTGQSPTPSPTGLTTAKMPSVPLSSDPLPTHTTAFSPASTFERENDFSETTTSLSPDNTSTQVSPDSLDNASAFNTTGVSSVQTPHLPTHADSQTPSAGTDTQTFSGSAANAKLNPTPGSNAISDAYLNASETTTLSPSGSAVISTTTIATTPSKPTCDEKYANITVDYLYNKETKLFTAKLNVNENVECGNNTCTNNEVHNLTECKNASVSISHNSCTAPDKTLILDVPPGVEKFQLHDCTQVEKADTTICLKWKNIETFTCDTQNITYRFQCGNMIFDNKEIKLENLEPEHEYKCDSEILYNNHKFTNASKIIKTDFGSPGEPQIIFCRSEAAHQGVITWNPPQRSFHNFTLCYIKETEKDCLNLDKNLIKYDLQNLKPYTKYVLSLHAYIIAKVQRNGSAAMCHFTTKSAPPSQVWNMTVSMTSDNSMHVKCRPPRDRNGPHERYHLEVEAGNTLVRNESHKNCDFRVKDLQYSTDYTFKAYFHNGDYPGEPFILHHSTS

SEQ ID NO: 94263 - protein, 106 aa, Homo sapiens
  MOD_RES (1)..(1): Any amino acid
XSWNPRLKQNQSRNWSQNRTQSPSPTSRKGTSPKVFLKARALTGGAPPMLDRTWDAAGAESDATKARSSPVPLEVNKLRRVGRDLGSLHDSGCLPRNLGWVPLSPR

SEQ ID NO: 94264 - protein, 406 aa, Homo sapiens
FVEELQFLQSHHLQHLERCPHVPIAVAGQKAVIFRNVRDIGRFHSSFLQELQQCDTDDDVAMCFIKNQAAFEQYLEFLVGRVQAESVVVSTAIQEFYKKYAEEALLAGDPSQPPPPPLQHYLEQPVERVQRYQALLKELIRNKARNRQNCALLEQAYAVVSALPQRAENKLHVSLMENYPGTLQALGEPIRQGHFIVWEGAPGARMPWKGHNRHVFLFRNHLVICKPRRDSRTDTVSYVFRNMMKLSSIDLNDQVEGDDRAFEVWQEREDSVRKYLLQARTAIIKSSWVKEICGIQQRLALPVWRPPDFEEELADCTAELGETVKLACRVTGTPKPVISWYKDGKAVQVDPHHILIEDPDGSCALILDSLTGVDSGQYMCFAASAAGNCSTLGKILVQGGTRTGPC

SEQ ID NO: 94265 - protein, 58 aa, Homo sapiens
MEAGPHPRPGHCCKPGGRLDMNHGFVHHIRRNQIARYRPALRRRRHHSWPGLARPDSP

SEQ ID NO: 94266 - protein, 130 aa, Homo sapiens
MKTPFGKAAAGQRSRTGAGHGSVSVTMIKRKAAHKKHRSRPTSQPRGNIVGCRIQHGWKDGDEPLTQWKGTVLDQINSTPEVLKELHPVKRKTAKAAAAEGTPYLGRHLCEIYMAEMRKTRNWERQNFGL

SEQ ID NO: 94267 - protein, 236 aa, Homo sapiens
  MOD_RES (1)..(1): Any amino acid
XQEHSKESPARSTPHRTPIITPNTKAIQERLFKQDVSNDFEINIEVYSLVQKKDPSGLDKKKKTSKSKAITPKRLLTSITTKSNIHSSVMASPGGLSAVRTSNFALVGSYTLSLSSVGNTKFVLDKVPFLSSLEGHIYLKIKCQVNSSVEERGFLTIFEDVSGFGAWHRRWCVLSGNCISYWTYPDDEKRKNPIGRINLANCTSRQIEPANREFCARRNTFELITVRPQREDDRET

SEQ ID NO: 94268 - protein, 117 aa, Homo sapiens
MKHLWFFLLLVAAPRWVLSQVQLQESGPGLVKPSETLSLTCVVSGGSISSSNWWSWVRQPPGKGLEWIGEIYHSGSPNYNPSLKSRVTISVDKSKNQFSLKLSSVTAADTAVYYCAR

SEQ ID NO: 94269 - protein, 38 aa, Homo sapiens
VLNEVVIDRGPSSYLSNVDVYLDGHLITTVQGDDHAVT

SEQ ID NO: 94270 - protein, 263 aa, Homo sapiens
MFVARSIAADHKDLIHDVSFDFHGRRMATCSSDQSVKVWDKSESGDWHCTASWKTHSGSVWRVTWAHPEFGQVLASCSFDRTAAVWEEIVGESNDKLRGQSHWVKRTTLVDSRTSVTDVKFAPKHMGLMLATCSADGIVRIYEAPDVMNLSQWSLQHEISCKLSCSCISWNPSRISKLIEKMNRAHLYNFHIPSSRAHSPMIAVGSDDSSPNAMAKVQIFEYNENTRKYAKAETLMTVTDPVHDIAFAPNLGRSFHILAIATK

SEQ ID NO: 94271 - protein, 155 aa, Homo sapiens
MAMLAQQMQLANAMMPGAPLQPVPMFSVAPSLATNASAAAFNPYLGPVSPSLVPAEILPTAPMLVTGNPGVPVPAAAAAAAQKLMRTDRLEVCREYQRGNCNRGENDCRFAHPADSTMIDTNDNTVTVCMDYIKGRCSREKCKYFHPPAHLQAKI

SEQ ID NO: 94272 - protein, 220 aa, Homo sapiens
MDAPKAGYAFEYLIETLNDSSHKKFFDVSKLGTKYDVLPYSIRVLLEAAVRNCDGFLMKKEDVMNILDWKTKQSNVEVPFFPARVLLQDFTGIPAMVDFAAMREAVKTLGGDPEKVHPACPTDLTVDHSLQIDFSKCAIQNAPNPGGGDLQKAGKLSPLKVQPKKLPCRGQTTCRGSCDSGELGRNSGTFSSQIENTPILCPFHLQPVPDGVQEFLRMWQ

SEQ ID NO: 94273 - protein, 94 aa, Homo sapiens
MFSINPLENLKVYISSRPPLVVFMISVSAMAIAFLTLGYFFKIKEIKSPEMAEDWNTFLLRFNDLDLCVSENETLKHLTNDTTTPESTMTSGQA

SEQ ID NO: 94274 - protein, 155 aa, Homo sapiens
MLPKRRRARVGSPSGDAASSTPPSTRFPGVAIYLVEPRMGRSRRAFLTGLARSKGFRVLDACSSEATHVVMEETSAEEAVSWQERRMAAAPPGCTPPALLDISWLTESLGAGQPVPVECRHRLEELLEHGVCEEVERVRRSERYQTMKGSSTTRT

SEQ ID NO: 94275 - protein, 182 aa, Homo sapiens
  MOD_RES (1)..(1): Any amino acid
XLLKMAQGHRVETEHYEEIEDYDYNNPNDTSNFCPGLQTAQQNGDTPEAQGLDITTYGESNLVAEPQKVNKIEIHYAKTAKKMDMKKLKQSMWSLLTALSGKEADAEANHREAGKEAALAEVADEKMLSGLTKDLQRSLPPVMAQNLSIPLAFACLLHLANEKNLKLEGTEDLSDVLVRQGD

SEQ ID NO: 94276 - protein, 971 aa, Homo sapiens
MDLYSTPAAALDRFVARRLQPRKEFVEKARRALGALAAALRERGGRLGAAAPRVLKTVKGGSSGRGTALKGGCDSELVIFLDCFKSYVDQRARRAEILSEMRASLESWWQNPVPGLRLTFPEQSVPGALQFRLTSVDLEDWMDVSLVPAFNVLGQAGSGVKPKPQVYSTLLNSGCQGGEHAACFTELRRNFVNIRPAKLKNLILLVKHWYHQVCLQGLWKETLPPVYALELLTIFAWEQGCKKDAFSLAEGLRTVLGLIQQHQHLCVFWTVNYGFEDPAVGQFLQRQLKRPRPVILDPADPTWDLGNGAAWHWDLLAQEAASCYDHPCFLRGMGDPVQSWKGPGLPRAGCSGLGHPIQLDPNQKTPENSKSLNAVYPRAGSKPPSCPAPGPTGAASIVPSVPGMALDLSQIPTKELDRFIQDHLKPSPQFQEQVKKAIDIILRCLHENCVHKASRVSKGGSFGRGTDLRDGCDVELIIFLNCFTDYKDQGPRRAEILDEMRAQLESWWQDQVPSLSLQFPEQNVPEALQFQLVSTALKSWTDVSLLPAFDAVGQLSSGTKPNPQVYSRLLTSGCQEGEHKACFAELRRNFMNIRPVKLKNLILLVKHWYRQVAAQNKGKGPAPASLPPAYALELLTIFAWEQGCRQDCFNMAQGFRTVLGLVQQHQQLCVYWTVNYSTEDPAMRMHLLGQLRKPRPLVLDPADPTWNVGHGSWELLAQEAAALGMQACFLSRDGTSVQPWDVMPALLYQTPAGDLDKFISEFLQPNRQFLAQVNKAVDTICSFLKENCFRNSPIKVIKVVKGGSSAKGTALRGRSDADLVVFLSCFSQFTEQGNKRAEIISEIRAQLEACQQERQFEVKFEVSKWENPRVLSFSLTSQTMLDQSVDFDVLPAFDALGQLVSGSRPSSQVYVDLIHSYSNAGEYSTCFTELQRDFIISRPTKLKSLIRLVKHCVPRSPRGEAPYPHSTGWNS

SEQ ID NO: 94277 - protein, 45 aa, Homo sapiens
LYMYQLFRSLAYIHSFGICHRDIKPQNLLLDPDTAVLKLCDFGRC

SEQ ID NO: 94278 - protein, 192 aa, Homo sapiens
  MOD_RES (1)..(1): Any amino acid
XITEIPSLSQDAMTTLQQIELIKNLNLKPDVIINIKCPDYDLCQRISGQRQHNNTGYIYSRDQWDPEVIENHRKKKKEAQKDGKGEEEEEEEEQEEEEAFIAEMQMVAEILHHLVQRPEDYLENVENIVKLYKETILQTLEEVMAEHNPQYLIELNGNKPAEELFMDELFRTLASYKLIAPRYRWQRSKWGR

SEQ ID NO: 94279 - protein, 63 aa, Homo sapiens
MAAWKSWTALRLCATVVVLDMVVCKGFVEDLDESFKENRNDDIWLVDALLQSLEFEVIQQLSY

SEQ ID NO: 94280 - protein, 1359 aa, Homo sapiens
  MOD_RES (1)..(1): Any amino acid
XMERFFRSESRGAVRIKVLDVLSFVLLINRQFYEEELINSVVISQLSHIPEDKDHQVRKLATQLLVDLAEGCHTHHFNSLLDIIEKVMARSLSPPPELEERDVAAYSASLEDVKTAVLGLLVILQTKLYTLPASHATRVYEMLVSHIQLHYKHSYTLPIASSIRLQAFDFLLLLRADSLHRLGLPNKDGVVRFSPYCVCDYMEPERGSEKKTSGPLSPPTGPPGPAPAGPAVRLGSVPYSLLFRVLLQCLKQESDWKVLKLVLGRLPESLRYKVLIFTSPCSVDQLCSALCSMLSGPKTLERLRGAPEGFSRTDLHLAVVPVLTALISYHNYLDKTKQREMVYCLEQGLIHRCASQCVVALSICSVEMPDIIIKALPVLVVKLTHISATASMAVPLLEFLSTLARLPHLYRNFAAEQYASVFAISLPYTNPSKFNQYIVCLAHHVIAMWFIRCRLPFRKDFVPFITKGLRSNVLLSFDDTPEKDSFRARSTSLNERPKSLRIARPPKQGLNNSPPVKEFKESSAAEAFRCRSISVSEHVVRRIQTSLTSASLGSADENSVAQADDSLKNLHLELTETCLDMMARYVFSNFTAVPKRSPVGEFLLAGGRTKTWLVGNKLVTVTTSVGTGTRSLLGLDSGELQSGPESSSSPGVHVRQTKEAPAKLESQAGQQVSRGARDRVRSMSGGHGLRVGALDVPASQFLGSATSPGPRTAPAAKPEKASAGTRVPVQEKTNLAAYVPLLTQGWAEILVRRPTGNTSWLMSLENPLSPFSSDINNMPLQELSNALMAAERFKEHRDTALYKSLSVPAASTAKPPPLPRSNTVASFSSLYQSSCQGQLHRSVSWADSAVVMEEGSPGEVPVLVEPPGLEDVEAALGMDRRTDAYSRSSSVSSQEEKSLHAEELVGRGIPIERVVSSEGGRPSVDLSFQPSQPLSKSSSSPELQTLQDILGDPGDKADVGRLSPEVKARSQSGTLDGESAAWSASGEDSRGQPEGPLPSSSPRSPSGLRPRGYTISDSAPSRRGKRVERDALKSRATASNAEKVPGINPSFVFLQLYHSPFFGDESNKPILLPNESQSFERSVQLLDQIPSYDTHKIAVLYVGEGQSNSELAILSNEHGSYRYTEFLTGLGRLIELKDCQPDKVYLGGLDVCGEDGQFTYCWHDDIMQAVFHIATLMPTKDVDKHRCDKKRHLGNDFVSIVYNDSGEDFKLGTIKGQFNFVHVIVTPLDYECNLVSLQCRKDMEGLVDTSVAKIVSDRNLPFVARQMALHANMASQVHHSRSNPTDIYPSKWIARLRHIKRLRQRICEEAAYSNPSLPLVHPPSHSKAPAQTPAEPTPGYEVGQRKRLISSVEDFTEFV

SEQ ID NO: 94281 - protein, 163 aa, Homo sapiens
  MOD_RES (1)..(1): Any amino acid
XDAYEHTQMKLFRSQRNLYISGFSLFFWLVLRRLVTLITQLAKELSNKGVLKTQAENTNKAAKKFMEENEKLKRILKSHGKDEECVLEAENKKLVEDQEKLKTELRKTSDALSKAQNDVMEMKMQSERLSKEYDQLLKEHSELQKSHSQPGAAAFLVKEVESF

SEQ ID NO: 94282 - protein, 86 aa, Homo sapiens
MRLLSFVVLALFAVTQAEEGARLLASKSLLNRYAVEGRDLTLQYNIYNVGSRLALPVHLDREESWLSGSLTGDSPLIFWTGQPLGS

SEQ ID NO: 94283 - protein, 193 aa, Homo sapiens
  MOD_RES (1)..(1): Any amino acid
XNHISGLSSTSKLSLPMFTVLRKFTIPLTLLLETIILGKQYSLNIILSVFAIILGAFIAAGSDLAFNLEGYIFVFLNDIFTAANGVYTKQKMDPKELGKYGVLFYNACFMIIPTLIISVSTGDLQQATEFNQWKNVVFILQFLLSCFLGFLLMYSTVLCSYYNSALTTAVVGAIKHGRGLEIFLFNTEQPVKT

SEQ ID NO: 94284 - protein, 64 aa, Homo sapiens
MKAFLDELKAENIKKFLYNFTQIPHLAGTEQNFQLAKQIQSQWKEFGLDSVELAHYDVLLSYPN

SEQ ID NO: 94285 - protein, 47 aa, Homo sapiens
MEEMRDSYLEEDVYQLQELRRELDRANKNCRILQYRLRKAEQKSLKV

SEQ ID NO: 94286 - protein, 366 aa, Homo sapiens
MGSFQLEDFAAGWIGGAASVIVGHPLDTVKTRLQAGVGYGNTLSCIRVVYRRESMFGFFKGMSFPLASIAVYNSVVFGVFSNTQRFLSQHRCGEPEASPPRTLSDLLLASMVAGVVSVGLGGPVDLIKIRLQMQTQPFRDANLGLKSRAVAPAEQPAYQGPVHCITTIVRNEGLAGLYRGASAMLLRDVPGYCLYFIPYVFLSEWITPEACTGPSPCAVWLAGGMAGAISWGTATPMDVVKSRLQADGVYLNKYKGVLDCISQSYQKEGLKRHHCERGAGLPHECGHVPWVRAVAAGYPRGPRSDEPISARSLLRLSPLPDILFSLLSYLSLASPALCHPGCRSLLLQDAGLLSQLGKTDFQGKKT

SEQ ID NO: 94287 - protein, 478 aa, Homo sapiens
MEEKRRKYSISSDNSDTTDSHATSTSASRCSKLPSSTKSGWPRQNEKKPSEVFRTDLITAMKIPDSYQLSPDDYYILADPWRQEWEKGVQVPAGAEAIPEPVVRILPPLEGPPAQASPSSTMLGEGSQPDWPGGSRYDLDEIDAYWLELINSELKEMERPELDELTLERVLEELETLCHQNMARAIETQEGLGIEYDEDVVCDVCRSPEGEDGNEMVFCDKCNVCVHQACYGILKVPTGSWLCRTCALGVQPKCLLCPKRGGALKPTRSGTKWVHVSCALWIPEVSIGCPEKMEPITKISHIPASRWALSCSLCKECTGTCIQCSMPSCVTAFHVTCAFDHGLEMRTILADNDEVKFKSFCQEHSDGGPRNEPTSEPTEPSQAGEDLEKVTLRKQRLQQLEEDFYELVEPAEVAERLDLAEALVDFIYQYWKLKRKANANQPLLTPKTDEVDNLAQQEQDVLYRRLKLFTHLRQDLER

SEQ ID NO: 94288 - protein, 110 aa, Homo sapiens
MREIVHLQAGQCGNQIGAKFWEVISDEHGIDPTGTYHGDSDLQLERINVYYNEATGGNYVPRAVLVDLEPGTMDSVRSGPFGQIFRPDNFVFVETGFHRVSQDGLDLLTS

SEQ ID NO: 94289 - protein, 86 aa, Homo sapiens
TPGTQHHEPQLHLHGHQHGSPGSSPKVLSQPSDLDLQDVEEVEIGRDTFWPGPGAAPASGLNPARSGRRASRLGPSLAPSRGAPGA

SEQ ID NO: 94290 - protein, 530 aa, Homo sapiens
MATGGGPFEDGMNDQDLPNWSNENVDDRLNNMDWGAQQKKANRSSEKNKKKFGVESDKRVTNDISPESSPGVGRRRTKTPHTFPHSRYMSQMSVPEQAELEKLKQRINFSDLDQRSIGSDSQGRATAANNKRQLSENRKPFNFLPMQINTNKSKDASTNPPNRETIGSAQCKELFASALSNDLLQNCQVSEEDGRGEPAMESSQIVSRLVQIRDYITKASSMREDLVEKNERSANVERLTHLIDHLKEQEKSYMKFLKKILARENEEEDVRTIDSAVGSGSVAESTSLNIDVQSEASDTTARDPQQEPMEEIENLKKQHDLLKRMLQQQEQLRALQGRQAALLALQHKAEQAIAVMDDSVVAETAGSLSGVSITSELNEELNDLIQRFHNQLRDSQPPAVPDNRRQAESLSLTREVSQSRKPSASERLPDEKVELFSKMRVLQEKKQKMDKLLGELHTLRDQHLNNSSSSPQRSVDQRSTSAPSASVGLAPVVNGESNSLTSSVPYPTASLVSQNESENEGHLNPSEKLQ

SEQ ID NO: 94291 - protein, 273 aa, Homo sapiens
  MOD_RES (1)..(1): Any amino acid
XEPDAPRLLPSPVTCTPKEGETPPAPAALSSPLAVPALSASSLSSRAPPPAEVRVQPQLSRTPQAAQQTEALARKAAKRELMPCDFPGCGRIFSNRQYLNHHKKYQHIHQKSFSCPEPACGKSFNFKKHLKEHMKLHSDTRDYICEFCARSFRTSSNLVIHRRIHTGEKPLQCEICGFTCRQKASLNWHQRKHAETVAALRFPCEFCGKRFEKPDSVAAHRSKSHPALLLAPQESPSGPLEPCPSISAPGPLGSSEGSRPSASPQAPTLLPQQ

SEQ ID NO: 94292 - protein, 111 aa, Homo sapiens
MLFLALGSPWAVELPLCGRRTALCAAAALRGPRASVSRASSSSGPSGPVAGWSTGPSGAARLLRRPGRAQIPVYWEGYVRFLNTPSDKSEDGRLIYTGNMARAVFGWSAVA

SEQ ID NO: 94293 - protein, 183 aa, Homo sapiens
MAGGVLPLRGLRALCRVLLFLSQFCILSGGESTEIPPYVMKCPSNGLCSRLPADCIDCTTNFSCTYGKPVTFDCAVKPSVTCVDQDFKSQKNFIINMTCRFCWQLPETDYECTNSTSCMTVSCPRQRYPANCTVRDHVHCLGNRTFPKMLYCNWTGGYKWSTALALSLQAQVGLHVQLTVGLH

SEQ ID NO: 94294 - protein, 113 aa, Homo sapiens
MNLSFSSFSWVELPAEEGKTLWELVIEQFEDLLVRILLLAACISFVLAWFEEGEETITAFVEPFVILLILIANAIVGVWQERNAENAIEALKEYEPEMGKVYRADRKSVQRIK

SEQ ID NO: 94295 - protein, 45 aa, Homo sapiens
MLGFPPGRPQLPVQLRPQTRMATALRDPASGRGSHRELAQTRDTI

SEQ ID NO: 94296 - protein, 230 aa, Homo sapiens
MDEMTAVVKIEKGVGGNNGGNGNGGGAFSQARSSSTGSSSSTGGGGQESQPSPLALLAATCSRIESPNENSNNSQGPSQSGGTGELDLTATQLSQGANGWQIISSSSGATPTSKEQSGSSTNGSNGSESSKNRTVSGGQYVVAAAPNLQNQQVLTGLPGVMPNIQYQVIPQFQTVDGQQLQFAATGAQVQQDGSGQIQIIPGANQQIITNRGSGGNIIAAMPNLLQQAVP

SEQ ID NO: 94297 - protein, 175 aa, Homo sapiens
MASNVTNKTDPRSMNSRVFIGNLNTLVVKKSDVEAIFSKYGKIVGCSVHKGFAFVQYVNERNARAAVAGEDGRMIAGQVLDINLAAEPKVNRGKAGVKRSAAEMYGSVTEHPSPSPLLSSSFDLDYDFQRDYYDRMYSYPARVPPPPPIARAVVPSKRQRVSGNTSRRGKSGFNS

SEQ ID NO: 94298 - protein, 52 aa, Homo sapiens
MNSQLVTTEKRFLKDSLYNEGILIVWDPSVYHSDIPKWYQNPDYNFFNNYKT

SEQ ID NO: 94299 - protein, 45 aa, Homo sapiens
MGMCSRQERIQKDIDVVIQKSRAEKDCLFAVYPTQYMYLKITQLL

SEQ ID NO: 94300 - protein, 163 aa, Homo sapiens
MAVSTVFSTSSLMLALSRHSLLSPLLSVTSFRRFYRGDSPTDSQKDMIEIPLPPWQERTDESIETKRARLLYESRKRGMLENCILLSLFAKEHLQHMTEKQLNLYDRLINEPSNDWDIYYWATGTGEKVLYKKMAHSEVELNRPPGALPHSIMMGKLPLGVVS

SEQ ID NO: 94301 - protein, 120 aa, Homo sapiens
MGIQGGSVLFGLLLVLAVFCHSGHSLQCYNCPNPTADCKTAVNCSSDFDACLITKAGLQVYNKCWKFEHCNFNDVTTRLRENELTYYCCKKDLCNFNEQLENGGTSLSEKTVLLLVTPFL

SEQ ID NO: 94302 - protein, 55 aa, Homo sapiens
  MOD_RES (1)..(1): Any amino acid
XLGLQTLRSLKCIINLDKHRLIMGKTDKEEIPFVETVSLNEDKSREASELSKFIY

SEQ ID NO: 94303 - protein, 217 aa, Homo sapiens
MASADELTFHEFEEATNLLADTPDAATTSRSDQLTPQGHVAVAVGSGGSYGAEDEVEEESDKAALLQEQQQQQQPGFWTFSYYQSFFDVDTSQVLDRIKGSLLPRPGHNFVRHHLRNRPDLYGPFWICATLAFVLAVTGNLTLVLAQRRDPSIHYSPQFHKVTVAGISIYCYAWLVPLALWGFLRWRKGVQERMGPYTFLETVCIYGYSLFVFIPMV

SEQ ID NO: 94304 - protein, 197 aa, Homo sapiens
METGRQRGASAEMFAMPQGLKGSNKDGIPEDLDGNLEEPRDQESELRSQDVMDLTEGDNEASASAPPAAKRQKTDTKGKKERKPTVDAEEAQMTTLLYAMSEEQLSRYEVCRRSAFPKARIAALMQSITGRSVSENTAIAMAGIAKVLVGEVVEEALDVCEMWGETPPLQPKHLREAVRRLKPKGLFPNSNYKKIMF

SEQ ID NO: 94305 - protein, 16 aa, Homo sapiens
MGLFCLMVAFLILFAM

SEQ ID NO: 94306 - protein, 148 aa, Homo sapiens
MAPEEDAGGEALGGSFWEAGNYRRTVQRVEDGHRLCGDLVSCFQERARIEKAYAQQLADWARKWRGTVEKGPQYGTLEKAWHAFFTAAERLSALHLEVREKLQGQDSERVRAWQRGAFHRPVLGGFRESRAAEDGFRKAQKPWLKRLK

SEQ ID NO: 94307 - protein, 95 aa, Homo sapiens
  MOD_RES (1)..(1): Any amino acid
XGNAVSRELIEIGCEDKTLAFKMNGYISNANYSVKKCIFLLFINHRLVESTSLRKAIETVYAAYLPKNTHPFLYLRLCYQDLLAPLGRWLNPQQV

SEQ ID NO: 94308 - protein, 43 aa, Homo sapiens
MGFSGNGVTICEDDNECGNLTQSCGENANCTNTEGSYYCMCVP

SEQ ID NO: 94309 - protein, 96 aa, Homo sapiens
MSCKKQRSRKHSVNEKCNMKIEHYFSPVSKEQQNNCSTSLMRMESRGDPRATTNTQAQRFHSPKKNPEDQTMPQNRTIYVTLKVNHRRNQDMKLKL

SEQ ID NO: 94310 - protein, 42 aa, Homo sapiens
MEVKDANSALLSNYEMESRSVTQAGVQWHHPGSLQPLPPGFK

SEQ ID NO: 94311 - protein, 54 aa, Homo sapiens
  MOD_RES (1)..(1): Any amino acid
XSLCWKLRFRIIHETSLAMNFLHSIKPPLLHLDLKPGNILLDSNMHVKVKKLRL

SEQ ID NO: 94312 - protein, 253 aa, Homo sapiens
VIQNPFSNGGSPAAEAVSGEARFAYFPASSVGDTTAVSVQTTDQSLQAGGQFYVMMTPQDVLQTGTQRTIAPRTHPYSPKIDGTRTPRDERRRAQHNEVERRRRDKINNWIVQLSKIIPDCNADNSKTGAVSTPDPQCLRWSRPPTLACRKSNSHGARESSLGWRPVGGACPKAPGPLAPQSKGGILSKACDYIRELRQTNQRMQETFKEAERLQMDNELLRQQIEELKNENALLRAQLQQHNLEMVGEGTRQ

SEQ ID NO: 94313 - protein, 152 aa, Homo sapiens
GSLRCITCAVVGNGGILNNSHMGQEIDSHDYVFRLSGALIKGYEQDVGTRTSFYGFTAFSLTQSLLILGNRGFKNVPLGKDVRYLHFLEGTRDYEWLEALLMNQTVMSKNLFWFRHRPQEAFREALHMDRFLRSKTLDGAHWRIYRPTTGAL

SEQ ID NO: 94314 - protein, 49 aa, Homo sapiens
ERIINHAAGSHGVSGIFMKYDLSSLMVTVTEEHMPFWQFFACYMELENL

SEQ ID NO: 94315 - protein, 113 aa, Homo sapiens
MEREGSGGSGGSAGLLQQILSLKVVPRVGNGTLCPNSTSLCSFPEMWYGVFLWALVSSLFFHVPAGLLALFTLRHHKYGRFMSVSILLMGIVGPITAGILTSMLDIKIPVKNV

SEQ ID NO: 94316 - protein, 1113 aa, Homo sapiens
MFRRSLNRFCAGEEKRVGTRTVFVGNHPVSETEAYIAQRFCDNRIVSSKYTLWNFLPKNLFEQFRRIANFYFLIIFLVQVTVDTPTSPVTSGLPLFFVITVTAIKQGYEDCLRHRADNEVNKSTVYIIENAKRVRKESEKIKVGDVVEVQADETFPCDLILLSSCTTDGTCYVTTASLDGESNCKTHYAVRDTIALCTAESIDTLRAAIECEQPQPDLYKFVGRINIYSNSLEAVARSLGPENLLLKGATLKNTEKIYGVAVYTGMETKMALNYQGKSQKRSAVEKSINAFLIVYLFILLTKAAVCTTLKYVWQSTPYNDEPWYNQKTQKERETLKVLKMFTDFLSFMVLFNFIIPVSMYVTVEMQKFLGSFFISWDKDFYDEEINEGALVNTSDLNEELGQVDYVFTDKTGTLTENSMEFIECCIDGHKYKGVTQEVDGLSQTDGTLTYFDKVDKNREELFLRALCLCHTVEIKTNDAVDGATESAELTYISSSPDEIALVKGAKRYGFTFLGNRNGYMRVENQRKEIEEYELLHTLNFDAVRRRMSVIVKTQEGDILLFCKGADSAVFPRVQNHEIELTKVHVERNAMDGYRTLCVAFKEIAPDDYERINRQLIEAKMALQDREEKMEKVFDDIETNMNLIGATAVEDKLQDQAAETIEALHAAGLKVWVLTGDKMETAKSTCYACRLFQTNTELLELTTKTIEESERKEDRLHELLIEYRKKLLHEFPKSTRSFKKAWTEHQEYGLIIDGSTLSLILNSSQDSSSNNYKSIFLQICMKCTAVLCCRMAPLQKAQIVRMVKNLKGSPITLSIGDGANDVSMILESHVGIGKEGRQAARNSDYSVPKFKHLKKLLLAHGHLYYVRIAHLVQYFFYKNLCFILPQFLYQFFCGFSQQPLYDAAYLTMYNICFTSLPILAYSLLEQHINIDTLTSDPRLYMKISGNAMLQLGPFLYWTFLAAFEGTVFFFGTYFLFQTASLEENGKVYGNWTFGTIVFTVLVFTVTLKLALDTRFWTWINHFVIWGSLAFYVFFSFFWGGIIWPFLKQQRMYFVFAQMLSSVSTWLAIILLIFISLFPEILLIVLKNVRRRSARNPNLELPMLLSYKHTDSGYS

SEQ ID NO: 94317 - protein, 65 aa, Homo sapiens
MIKFTTKIYHPNVDENGQICLPIISSENWKPCTKTCQVLEALNVLVNRPNIREPLRMDLADLLTQ

SEQ ID NO: 94318 - protein, 166 aa, Homo sapiens
AAAPEAPVYANLSSYAGGAGGAGGAATVAFAAEPVPFPPPPPPGALGPPRLAALKDEPQTVPDVPSFGESPPLSPIDMDTQERIKAERKRLRNRIAASKCRKRKLERISRLEEKVKTLKSQNTELASTASLLREQVAQLKQKVLSHVNSGCQLLPQHQREEQSVRF

SEQ ID NO: 94319 - protein, 349 aa, Homo sapiens
MTQESFGSGGGGISPKGSGPSVASDEVSSFASALPDRKTASFSSLEPQDQEDLEPVKKKMRGDGDLDLNGQLLVAQPRRNAQTVHEDVRAAAGKPDKMEETLTCIICQDLLHDCVSLQPCMHTFCAACYSGWMERSSLCPTCRCPVERICKNHILNNLVEAYLIQHPDKSRSEEDVQSMDARNKITQDMLQPKVRRSFSDEEGSSEDLLELSDVDSESSDISQPYVVCRQCPEYRRQAAQPPHCPAPEGEPGAPQALGDAPSTSVSLTTAVQDYVCPLQGSHALCTCCFQPMPDRRAEREQDPRVAPQQCAVCLQPFCHLYWGCTRTGCYGCLAPFCVSGRQCFPATSL

SEQ ID NO: 94320 - protein, 765 aa, Homo sapiens
MQRAGSKTAGPPCQWSRMASEGTNIPSPVVRQIDKQFLICSICLERYKNPKVLPCLHTFCERCLQNYIPAHSLTLSCPVCRQTSILPEKGVAALQNNFFITNLMDVLQRTPGSNAEESSILETVTAVAAGKPLSCPNHDGNVMEFYCQSCETAMCRECTEGEHAEHPTVPLKDVVEQHKASLQVQLDAVNKRLPEIDSALQFISEIIHQLTNQKASIVDDIHSTFDELQKTLNVRKSVLLMELEVNYGLKHKVLQSQLDTLLQGQESIKSCSNFTAQALNHGTETEVLLVKKQMSEKLNELADQDFPLHPRENDQLDFIVETEGLKKSIHNLGTILTTNAVASETVATGEGLRQTIIGQPMSVTITTKDKDGELCKTGNAYLTAELSTPDGSVADGEILDNKNGTYEFLYTVQKEGDFTLSLRLYDQHIRGSPFKLKVIRSADVSPTTEGVKRRVKSPGSGHVKQKAVKRPASMYSTGKRKENPIEDDLIFRVGTKGRNKGEFTNLQGVAASTNGKILIADSNNQCVQIFSNDGQFKSRFGIRGRSPGQLQRPTGVAVHPSGDIIIADYDNKWVSIFSSDGKFKTKIGSGKLMGPKGVSVDRNGHIIVVDNKACCVFIFQPNGKIVTRFGSRGNGDRQFAGTLDGPHFAAVNSNNEIIITDFHNHSVKVFNQEGEFMLKFGSNGEGNGQFNAPTGVAVDSNGNIIVADWGNSRIQVFDGSGSFLSYINTSADPLYGPQGLALTSDGHVVVADSGNHCFKVYRYLQ

SEQ ID NO: 94321 - protein, 390 aa, Homo sapiens
MYRDDLERFKEFKAQGVAIKFGKFSVKENKQLEKNVEDFLALTGIESADKLLYTDRYPEEKSVITNLKRRYSFRLHIGRNIARPWKLIYYRAKKMFDVNNYKGRYSEGDTEKLKMYHSLLGNDWKTIGEMVARSSLSVALKFSQISSQRNRGAWSKSETRKLIKAVEEVILKKMSPQELKEVDSKLQENPESCLSIVREKLYKGISWVEVEAKVQTRNWMQCKSKWTEILTKRMTNGRRIYYGMNALRAKVSLIERLYEINVEDTNEIDWEDLASAIGDVPPSYVQTKFSRLKAVYVPFWQKKTFPEIIDYLYETTLPLLKEKLEKMMEKKGTKIQTPAAPKQVFPFRDIFYYEDDSEGEDIEKESEGQAPCMAHACNSSTLGGQGRWII

SEQ ID NO: 94322 - protein, 55 aa, Homo sapiens
MGYYNCSVPQTILRNLLENSGWITQYTPYQPEVSQGRLESLLNYQTMVCDITGLD

SEQ ID NO: 94323 - protein, 233 aa, Homo sapiens
MAWNTNLRWRLPLTCLLLQVIMVILFGVFVRYDFEADAHWWSERTHKNLSDMENEFYYRYPSFQDVHVMVFVGFGFLMTFLQRYGFSAVGFNFLLAAFGIQWALLMQGWFHFLQDRYIVVGVENLINADFCVASVCVAFGAVLGKVSPIQLLIMTFFQAPSSCGCTGPASTQPYPTMGTASTEPPSTPTAPWQPACLPRWQYPVPCTRRASWTWCTSRMPRSQEGWPWVPLLR

SEQ ID NO: 94324 - protein, 449 aa, Homo sapiens
MGLLVFVRNLLLALCLFLVLGFLYYSAWKLHLLQWEEDSSKYSHSSSPQEKPVADSVVLSFDSAGQTLGSEYDRLGFLLNLDSKLPAELATKYANFSEGACKPGYASALMTAIFPRFSKPAPMFLDDSFRKWARIREFVPPFGIKGQDNLIKAILSVTKEYRLTPALDSLRCRRCIIVGNGGVLANKSLGSRIDDYDIVVRLNSAPVKGFEKDVGSKTTLRITYPEGAMQRPEQYERDSLFVLAGFKWQDFKWLKYIVYKERVSASDGFWKSVATRVPKEPPEIRILNPYFIQEAAFTLIGLPFNNGLMGRGNIPTLGSVAVTMALHGCDEVAVAGFGYDMSTPNAPLHYYETVRMAAIKEPRPHVENLNPSELRLPHFCFDHQPSTDPSLKPGNLGPVLQQLLCCYIWVMGGCWREPPICADSCFFLDAQYPARERVSAEAGESSRHH

SEQ ID NO: 94325 - protein, 100 aa, Homo sapiens
MKRIFSLLEKTWLGAPIQFAWQKTSGNYLAVTGADYIVKIFDRHGQKRSEINLPGNCVAMDWDKDGDVLAVIAEKSSCIYLWDANTNKTSQLDNGMRKTY

SEQ ID NO: 94326 - protein, 308 aa, Homo sapiens
MVLGALVALSSCPLGLRTSCLTGREAASAGWARPCGPGLHLNILLILAAAFSGQPQAVIMTSGPLKREGMLASTVSQSNVVIAPAAIARAPGVPEFHSSILVTDLGHGTSSPPAPVSRLFPSTAQDPLGKGEQVPLHGGSPQVTVTGPSRDCPNSGQASPCASEQSPSPQSPQNNCSGKSDPKNVAALKNRQMKHISAEQKRRFNIKMCFDMLNSLISNNSKLTSHAITLQKTVEYITKLQQERGQMQEEARRLREEIEELNATIISCQQLLPATGVPVTRRQFDHMKDMFDEYVKTRTLQNWKFWIV

SEQ ID NO: 94327 - protein, 219 aa, Homo sapiens
EDDDDDEAPKRQTRRRAAKNVSYKEDDDFETDSDDLIEMTGEGVDEQQDNSETIEKVLDSRLGKKGATGASTTVYAIEANGDPSGDFDTEKDEGEIQYLIKWKGWSYIHSTWESEESLQQQKVKGLKKLENFKKKEDEIKQWLGKVSPEDVEYFNCQQELASELNKQYQIVERVIAVKTSKSTLGQTDFPAHSRKPAPSNEPEYLWRRYTDKEDWTHMC

SEQ ID NO: 94328 - protein, 88 aa, Homo sapiens
MSNRNNNKLPSNLPQLQNLIKRDPPAYIEEFLQQYNHYKSNVEIFKLQPNKPSKELAELVMFMAQERKRATSEEPLLCYRLVTATQST

SEQ ID NO: 94329 - protein, 209 aa, Homo sapiens
MEPFSCDTFVALPPATVDNRIIFGKNSDRLYDEVQEVVYFPAVVHDNLGERLKCTYIEIDQVPETYAVVLSRPAWLWGAEMGANEHGVCIGNEAVWGREEVCDEEALLGMDLVRLGLERADTAEKALNVIVDLLEKYGQGGNCTEGRMVFSYHNSFLIADRNEAWILETAGKYWAAEKVQEGVRNISNQLSITTKIAREHPDMRNYAKR

SEQ ID NO: 94330 - protein, 302 aa, Homo sapiens
AAAASAASSSSASSSSSSSSSASSGPALLRVGPGFDAALQVSAAIGTNLRRFRAVFGESGGGGGSGEDEQFLGFGSDEEVRVRSPTRSPSGSMLAQADKLPMTDKRVASLLKKAKAQLCKIEKSKSLKQTDQPKAQGQESDSSETSVRGPRIKHVCRRAAVALGRKRAVFPDDMPTLSALPWEEREKILSSMGNDDKSSIAGSEDAEPLAPPIKPIKPVTRNKAPQEPPVKKGRRSRRCGQCPGCQVPEDCGVCTNCLDKPKFGGRNIKKQCCKMRKCQNLQWMPSKAYLQKQAKAVKKKEK

SEQ ID NO: 94331 - protein, 146 aa, Homo sapiens
AQSCQPSFYDGTVIVKKLPYLPRILGRNIGSHRVRVEHFMNHSITTLAKDMPLEEVVKVVTSTDVAKYPLVESTESQILVGIVRRAQLVQALKAEPPSWAPGHQCLQDILAAGCPTEPVTLKLSPETSLHEAQMPSGVVWFPVRGS

SEQ ID NO: 94332 - protein, 483 aa, Homo sapiens
MALASGPARRALAGSGQLGLGGFGAPRRGAYEWGVRSTRKSEPPPLDRVYEIPGLEPITFAGKMHFVPWLARPIFPPWDRGYKDPRFYRSPPLHEHPLYKDQACYIFHHRCRLLEGVKQALWLTKTKLIEGLPEKVLSLVDDPRNHIENQDECVLNVISHARLWQTTEEIPKRETYCPVIVDNLIQLCKSQILKHPSLARRICVQNSTFSATWNRESLLLQVRGSGGARLSTKDPLPTIASREEIEATKNHVLETFYPISPIIDLHECNIYDVKNDTGFQEGYPYPYPHTLYLLDKANLRPHRLQPDQLRAKMILFAFGSALAQARLLYGNDAKVLEQPVVVQSVGTDGRVFHFLVFQLNTTDLDCNEGVKNLAWVDSDQLLYQHFWCLPVIKKRVVVKNKRHSSGPKCVCKTRNGKWLLDGPQIFKVRWIPSLPTHLPPRPSRLHKNTEFAGPGKEGRRLKHKTSCYAPGTKTVPKKSPCIL

SEQ ID NO: 94333 - protein, 748 aa, Homo sapiens
MEDRGTPINKPPVLGYKDLNLFKLFRLVYHQGGCDNIDSGAVWKQIYMDLGIPILNSAASYNVKTAYRKYLYGFEEYCRSANIQFRTVHHHEPKVKEEKKDLEESMEEALKLDQEMPLTEVKSEPEENIDSNSESEREEIELKSPRGRRRIARDVNSIKKEIEEEKTEDKLKDNDTENKDVDDDYETAEKKENELLLGRKNTPKQKEKKIKKQEDSDKDSDEEEEKSQEREETESKCDSEGEEDEEDMEPCLTGTKVKVKYGRGKTQKIYEASIKSTEIDDGEVLYLVHYYGWNVRYDEWVKADRIIWPLDKGGPKKKQKKKAKNKEDSEKDEKRDEERQKSKRGRPPLKSTLSSNMPYGLSKTANSEGKSDSCSSDSETEDALEKNLINEELSLKDELEKNENLNDDKLDEENPKISAHILKENDRTQMQPLETLKLEVGENEQIVQIFGNKMEKTEEVKKEAEKSPKGKGRRSKTKDLSLEIIKISSFGQNEAGSEPHIEAHSLELSSLDNKNFSSATEDEIDQCVKEKKLKRKILGQSSPEKKIRIENGMEMTNTVSQERTSDCIGSEGMKNLNFEQHFERENEGMPSLIAESNQCIQQLTSERFDSPAEETVNIPLKEDEDAMPLIGPETLVCHEVDLDDLDEKDKTSIEDVAVESSESNSLVSIPPALPPVVQHNFSVASPLTLSQDESRSVKSESDITIEVDSIAEESQEGLCERESANGFETNVASGTCSIIVQERESREK

SEQ ID NO: 94334 - protein, 793 aa, Homo sapiens
  MOD_RES (1)..(1): Any amino acid
XSQKIATFTDIGNSLAHVEHLLRDLASFEEKSGVAVERARALSLDGEQLIGNKHYAVDSIRPKCQELRHLCDQFSAEIARRRGLLSKSLELHRRLETSMKWCDEGIYLLASQPVDKCQSQDGAEAALQEIEKFLETGAENKIQELNAIYKEYESILNQDLMEHVRKVFQKQASMEEVFHRRQASLKKLAARQTRPVQPVAPRPEALAKSPCPSPGIRRGSENSSSEGGALRRGPYRRAKSEMSESRQGRGSAGEEEESLAILRRHVMSELLDTERAYVEELLCVLEGYAAEMDNPLMAHLLSTGLHNKKDVLFGNMEEIYHFHNRIFLRELENYTDCPELVGRCFLERMEDFQIYEKYCQNKPRSESLWRQCSDCPFFQECQRKLDHKLSLDSYLLKPVQRITKYQLLLKEMLKYSRNCEGAEDLQEALSSILGILKAVNDSMHLIAITGYDGNLGDLGKLLMQGSFSVWTDHKRGHTKVKELARFKPMQRHLFLHEKAVLFCKKREENGEGYEKAPSYSYKQSLNMAAVGITENVKGDAKKFEIWYNAREEVYIVQAPTPEIKAAWVNEIRKVLTSQLQACREASQHRALEQSQSLPLPAPTSTSPSRGNSRNIKKLEERKTDPLSLEGYVSSAPLTKPPEKGKASPTSPDKKAKRHEVKSDPTPFGVRGWSKTSHSLEAPEDDGGWSSAEEQINSSDAEEDGGLGPKKLVPGKYTVVADHEKGGPDALRVRSGDVVELVQEGDEGLWYVRDPTTGKEGWVPASSLSVRLGPSGSAQCLSSSGKAHVPRAHP

SEQ ID NO: 94335 - protein, 149 aa, Homo sapiens
MTILTYPFKNLPTASKWALRFSIRPLSCSSQLRAAPAVQTKTKKTLAKPNIRNVVVVDGVRTPFLLSGTSYKDLMPHDLARAALTGLLHRTSVPKEVVDYIIFGTVIQEVKTSNVAREAALGAGFSDKTPAHTVTMACISANQAMTTGV

SEQ ID NO: 94336 - protein, 1094 aa, Homo sapiens
  MOD_RES (1)..(1): Any amino acid
XLLQQTDEYVANLTELVRQHKAAQVAKEKKKKKKKKKAENAEGQTPAIGPDGEPLDETSQMSDLPVKVIHVESGKILTGTDAPKAGQLEAWLEMNPGYEVAPRSDSEESGSEEEEEEEEEEQPQAAQPPTLPVEEKKKIPDPDSDDVSEVDARHIIENAKQDVDDEYGVSQALARGLQSYYAVAHAVTERVDKQSALMVNGVLKQYQIKGLEWLVSLYNNNLNGILADEMGLGKTIQTIALITYLMEHKRINGPFLIIVPLSTLSNWAYEFDKWAPSVVKVSYKGSPAARRAFVPQLRSGKFNVLLTTYEYIIKDKHILAKIRWKYMIVDEGHRMKNHHCKLTQVLNTHYVAPRRLLLTGTPLQNKLPELWALLNFLLPTIFKSCSTFEQWFNAPFAMTGEKVDLNEEETILIIRRLHKVLRPFLLRRLKKEVEAQLPEKVEYVIKCDMSALQRVLYRHMQAKGVLLTDGSEKDKKGKGGTKTLMNTIMQLRKICNHPYMFQHIEESFSEHLGFTGGIVQGLDLYRASGKFELLDRILPKLRATNHKVLLFCQMTSLMTIMEDYFAYRGFKYLRLDGTTKAEDRGMLLKTFNEPGSEYFIFLLSTRAGGLGLNLQSADTVIIFDSDWNPHQDLQAQDRAHRIGQQNEVRVLRLCTVNSVEEKILAAAKYKLNVDQKVIQAGMFDQKSSSHERRAFLQAILEHEEQDEEEDEVPDDETVNQMIARHEEEFDLFMRMDLDRRREEARNPKRKPRLMEEDELPSWIIKDDAEVERLTCEEEEEKMFGRGSRHRKEVDYSDSLTEKQWLKKITGKDIHDTASSVARGLQFQRGLQFCTRASKAIEEGTLEEIEEEVRQKKSSRKRKRDSDAGSSTPTTSTRSRDKDDESKKQKKRGRPPAEKLSPNPPNLTKKMKKIVDAVIKYKDSSGRQLSEVFIQLPSRKELPEYYELIRKPVDFKKIKERIRNHKYRSLNDLEKDVMLLCQNAQTFNLEGSLIYEDSIVLQSVFTSVRQKIEKEDDSEGEESEEEEEGEEEGSESESRSVKVKIKLGRKEKAQDRLKGGRRRPSRGSRAKPVVSDDDSEEEQEEDRSGSGSEED

SEQ ID NO: 94337 - protein, 918 aa, Homo sapiens
  MOD_RES (1)..(1): Any amino acid
XRTNSRFVKVVLMSATISCKEFADYFAVPVQNKMNPAYIFEVEGKPHSVEEYYLNDLEHIHHSKLSPHLLEEPVITKDIYEVAVSLIQMFDDLDMKESGNKAWSGAQFVLERSSVLVFLPGLGEINYMHELLTSLVHKRLQVYPLHSSVALEEQNNVFLSPVPGYRKIILSTNIAESSVTVPDVKYVIDFCLTRTLVCDEDTNYQSLRLSWASKTSCNQRKGRAGRVSRGYCYRLVHKDFWDNSIPDHVVPEMLRCPLGSTILKVKLLDMGEPRALLATALSPPGLSDIERTILLLKEVGALAVSGQREDENPHDGELTFLGRVLAQLPVNQQLGKLIVLGHVFGCLDECLIIAAALSLKNFFAMPFRQHLDGYRNKVNFSGSSKSDCIALVEAFKTWKACRQTGELRYPKDELNWGRLNYIQIKRIREVAELYEELKTRISQFNMHVDSRRPVMDQEYIYKQRFILQVVLAGAFYPNYFTFGQPDEEMAVRELAGKDPKTTVVLKHIPPYGFLYYKQLQSLFRQCGQVKSIVFDGAKAFVEFSRNPTERFKTLPAVYMAIKMSQLKVSLELSVHSAEEIEGKVQGMNVSKLRNTRVNVDFQKQTVDPMQVSFNTSDRSQTVTDLLLTIDVTEVVEVGHFWGYRIDENNSEILKKLTAEINQLTLVPLPTHPHPDLVCLAPFADFDKQRYFRAQVLYVSGNSAEVFFVDYGNKSHVDLHLLMEIPCQFLELPFQALEFKICKMRPSAKSLVCGKHWSDGASQWFASLVSGCTLLVKVFSVVHSVLHVDVYQYSGVQDAINIRDVLIQQGYAELTEESYESKVNILRAAINKLVCDGPNGCKCLGPERVAQLQDIARQKLLGLFCQSKPREKIVPKWHEKPYEWNQVDPKLVMEQADRESSRGKNTFLYQLHKLVVLGT

SEQ ID NO: 94338 - protein, 171 aa, Homo sapiens
  MOD_RES (1)..(1): Any amino acid
XQRTMIRYFTSNPASTNMYVLWSFSSSIVNILGQEQFMAVYLSAGVISNFVSYVGKVATGRYGPSLGASGAIMTVLAAVCTKIPEGRLAIIFLPMFTFTAGNALKAIIAMDTAGMILGWKFFDHAAHLGGALFGIWYVTYGHELIWKNREPLVKIWHEIRTNGPKKGGGSK

SEQ ID NO: 94339 - protein, 322 aa, Homo sapiens
MLRLPTVFRQMRPVSRVLAPHLTRAYAKDVKFGADARALMLQGVDLLADAVAVTMGPKGRTVIIEQSWGSPKVTKDGVTVAKSIDLKDKYKNIGAKLVQDVANNTNEEAGDGTTTATVLARSIAKEGFEKISKGANPVEIRRGVMLAVDAVIAELKKQSKPVTTPEEIAQVATISANGDKEIGNIISDAMKKVGRKGVITVKDGKTLNDELEIIEGMKFDRGYISPYFINTSKGQKCEFQDAYVLLSEKKISSIQSIVPALEIANAHRKPLVIIAEDVDGEALSTLVLNSRDRVSPSWPGWSRTPDLVIHLPGPCKVPGLQA

SEQ ID NO: 94340 - protein, 150 aa, Homo sapiens
DKRKERKSSPSKENESSDSEEEVSRPRKSRKRVDSDSDSDSEDDINSVMKCLPENSAPLIEFANVSQGILLLLMLKQHLKNLCGFSDSSNFSWNIWTLMKKKKKGRFQLAQMLGTKQLPHCLEEAALKIIQQQRQKMMKVMGRIEEEALQ

SEQ ID NO: 94341 - protein, 53 aa, Homo sapiens
MMDLKEEKPRARELRISRGFDLASFNPHGISTFIDNDDTVYLFVVNHPEFKNT

SEQ ID NO: 94342 - protein, 253 aa, Homo sapiens
  MOD_RES (1)..(1): Any amino acid
XEKGNLPCEDLRGHMVGKPVHKGSESPNSFLDQEYRKRFNIVEEDTVLYCYEYEKGRSSSQGRRESTPTYGKLRPISMPVEYNWVGDYEDPNKMKRDSRRENSLLRYMSNEKIAQEEYMFQRNSKKDTGKKSKKKGDKSNSPTHYSLLPSLQMDALRQDIMGTPVPETTLYHTFQQSSLQHKSKKKNKGPIAGKSKRRISCKDLGRGDCEGWLWKKKDAKSYFSQKWKKYWFVLKDASLYWYINEECIQSLSS

SEQ ID NO: 94343 - protein, 159 aa, Homo sapiens
RGLEESGPRPTATPCGCVKPALETGNLLTEPVGYLESCFSAKNGTPRQPSICSYSRACLRIRKRIFNNPEHSLMGLEQFSHVWILFVFHKNGHLSCKAKVQPPRLNGAKTGVFSTRSPHRPNAIGLTLAKLEKVEALGKWTDIMAAVLMSTVLCGRSLG

SEQ ID NO: 94344 - protein, 68 aa, Homo sapiens
GNSGLKPKDNEFTSKPWHWPINYQRARVEFASLRFVSRLPVCGRAYASQGSMTQISESICLATRWFGG

SEQ ID NO: 94345 - protein, 156 aa, Homo sapiens
  MOD_RES (1)..(1): Any amino acid
XVFIFSGTFRKNLDPYEQWSDQEIWKVADEVGLRSVIEQFPGKLDFVLVDGGCVLSHGHKQLMCLARSVLSKAKILLLDEPSAHLDPVTYQIIRRTLKQAFADCTVILCEHRIEAMLECQQFLIMMVAGPLFNGGIASLLAMKEKVISTNPGNSYL

SEQ ID NO: 94346 - protein, 110 aa, Homo sapiens
VSSTFGELKTVRLPKKMTGTGTHRGFGFVDFLTKQDAKRAFNALCHSTHLYGRRLVLEWADSEVTLQALRRKTAAHFHEPPKKKRSVVLDEILEQLEGSDSDSEEQTLQL

SEQ ID NO: 94347 - protein, 40 aa, Homo sapiens
  MOD_RES (1)..(1): Any amino acid
XMVSYYERNHRIAVGARHGSVALYDIRTGKCQALYQAKER

SEQ ID NO: 94348 - protein, 197 aa, Homo sapiens
MAPSVPAAEPEYPKGIRAVLLGPPGAGKGTQVSDEMVVELIEKNLETPLCKNGFLLDGFPRTVRQAEMLDDLMEKRKEKLDSVIEFSIPDSLLIRRITGRLIHPKSGRSYHEEFNPPKEPMKDDITGEPLIRRSDDNEKALKIRLQAYHTQTTPLIEYYRKRGIHSAIDASQTPDVVFASILAAFSKATCKDLVMFI

SEQ ID NO: 94349 - protein, 80 aa, Homo sapiens
MSGRGAGGFPLPPLSPGGGAVAAALGAPPPPAGPGMLPGPALRGPGPAGGVGGPGAAAFRPMGPAGPAAQYQVKEEEDGR

SEQ ID NO: 94350 - protein, 21 aa, Homo sapiens
MNSQLVTTEKRFLKDSLYNEG

SEQ ID NO: 94351 - protein, 111 aa, Homo sapiens
MAALGDIQESPSVPSPVSLSSPGTPGTQHHEPQLHLHGHQHGSPGSSPKVLSQPSDLDLQDVEEVEIGRDTFWPDGLPSAWLELCPGPLHLPLEKLPGFPLGDVSDMAGFN

SEQ ID NO: 94352 - protein, 45 aa, Homo sapiens
RAFHPQTGLPLLSSPVPQRKTQSGCFDLDSSLLHLKSFSSRRNLS

SEQ ID NO: 94353 - protein, 168 aa, Homo sapiens
MVFAFWKVFLILSCLAGQVSVVQVTIPDGFVNVTVGSNVTLICIYTTTVASREQLSIQWSFFHKKEMEPISHSSCLSTEGMEEKAVSQCLKMTHARDARGRCSWTSEIYFSQGGQAVAIGQFKDRITGSNDPGNASITISHMQPADSGIYICDVNNPPDFLGQNQGIL

SEQ ID NO: 94354 - protein, 215 aa, Homo sapiens
MPAKTPIYLKAANNKKGKKFKLRDILSPDMISPPLGDFRHTIHIGKEGQHDVFGDISFLQGNYELLPGNQEKAHLGQFPGHNEFFRANSTSDSVFTETPSPVLKNAISLPTIGGSQALMLPLLSPVTFNSKQESFGPAKLPRLSCEPVMEEKAQEKSSLLENGTVHQGDTSWGSSGSASQSSQGRDSHSSSLSEQYPDWPAEDMFDHPTPCELIK

SEQ ID NO: 94355 - protein, 1223 aa, Homo sapiens
  MOD_RES (1)..(1): Any amino acid
XGGGGGSSLRMSSNIHANHLSLDASSSSSSSSSSSSSSSSSSSSSSVHEPKMDALIIPVTMEVPCDSRGQRMWWAFLASSMVTFFGGLFIILLWRTLKYLWTVCCHCGGKTKEAQKINNGSSQADGTLKPVDEKEEAVAAEVGWMTSVKDWAGVMISAQTLTGRVLVVLVFALSIGALVIYFIDSSNPIESCQNFYKDFTLQIDMAFNVFFLLYFGLRFIAANDKLWFWLEVNSVVDFFTVPPVFVSVYLNRSWLGLRFLRALRLIQFSEILQFLNILKTSNSIKLVNLLSIFISTWLTAAGFIHLVENSGDPWENFQNNQALTYWECVYLLMVTMSTVGYGDVYAKTTLGRLFMVFFILGGLAMFARYVPEIAALILSRNKFGGTFNKHGGRKHIVVCGHITLESVSNFLKDFLHKDRDDVNVEIVFLHNISPNLELEALFKRHFTQVEFYQGSVLNPHDLARVKIESADACLILANKYCADPDAEDASNIMRVISIKNYHPKIRIITQMLQYHNKAHLLNIPSWNWKEGDDAICLAELKLGFIAQSCLAQGLSTMLANLFSMRSFIKIEEDTWQKYYLEGVSNEMYTEYLSSAFVGLSFPTVCELCFVKLKLLMIAIEYKSANRESRSRKRILINPGNHLKIQEGTLGFFIASDAKEVKRAFFYCKACHDDITDPKRIKKCGCKRLIYFEDEQPSTLSPKKKQRNGGMRNSPNTSPKLMRHDPLLIPGNDQIDNMDSNVKKYDSTGMFHWCAPKEIEKVILTRSEAAMTVLSGHVVVCIFGDVSSALIGLRNLVMPLRASNFHYHELKHIVFVGSIEYLKREWETLHNFPKVSILPGTPLSRADLRAVNINLCDMCVILSANQNNIDDTSLQDKECILASLNIKSMQFDDSIGVLQANSQGFTPPGMDRSSPDNSPVHGMLRQPSITTGVNIPIITELVNDTNVQFLDQDDDDDPDTELYLTQPFACGTAFAVSVLDSLMSATYFNDNILTLIRTLVTGGATPELEALIAEENALRGGYSTPQTLANRDRCRVAQLALLDGPFADLGDGGCYGDLFCKALKTYNMLCFGIYRLRDAHLSTPSQCTKRYVITNPPYEFELVPTDLIFCLMQFDHNAGQSRASLSHSSHSSQSSSKKSSSVHSIPSTANRQNRPKSRESRDKQNATRMNRMGQEKKWFTDEPDNAYPRNIQIKPMSTHMANQINQYKSTSSLIPPIREVEDEC

SEQ ID NO: 94356 - protein, 143 aa, Homo sapiens
MAKFVIRPATAADCSDILRLIKELAKYEYMEEQVILTEKGHSIVGFAMYYFTYDPWIGKLLYLEDFFVMSDYRGFGIGSEILKNLSQVAMRCRCSSMHFLVAEWNEPSINFYKRRGASDLSSEEGWRLFKIDKEYLLKMATEE

SEQ ID NO: 94357 - protein, 874 aa, Homo sapiens
MASAVRGSRPWPRLGLQLQFAALLLGTLSPQVHTLRPENLLLVSTLDGSLHALSKQTGDLKWTLRDDPVIEGPMYVTEMAFLSDPADGSLYILGTQKQQGLMKLPFTIPELVHASPCRSSDGVFYTGRKQDAWFVVDPESGETQMTLTTEGPSTPRLYIGRTQYTVTMHDPRAPALRWNTTYRRYSAPPMDGSPGKYMSHLASCGMGLLLTVDPGSGTVLWTQDLGVPVMGVYTWHQDGLRQLPHLTLARDTLHFLALRWGHIRLPASGPRDTATLFSTLDTQLLMTLYVGKDETGFYVSKALVHTGVALVPRGLTLAPADGPTTDEVTLQVSGEREGSPSTAVRYPSGSVALPSQWLLIGHHELPPVLHTTMLRVHPTLGSGTAETRPPENTQAPAFFLEQQPQVVEKQQETPLAPADFAHISQDAQSLHSGASRRSQKRLQSPSKQAQPLDDPEAEQLTVVGKISFNPKDVLGRGAGGTFVFRGQFEGRAVAVKRLLRECFGLVRREVQLLQESDRHPNVLRYFCTERGPQFHYIALELCRASLQEYVENPDLDRGGLEPEVVLQQLMSGLAHLHSLHIVHRDLKPGNILITGPDSQGLGRVVLSDFGLCKKLPAGRCSFSLHSGIPGTEGWMAPELLQLLPPDSPTSAVDIFSAGCVFYYVLSGGSHPFGDSLYRQANILTGAPCLAHLEEEVHDKVVARDLVGAMLSPLPQPRPSAPQVLAHPFFWSRAKQLQFFQDVSDWLEKESEQEPLVRALEAGGCAVVRDNWHEHISMPLQTDLRKFRSYKGTSVRDLLRAVRNKKHHYRELPVEVRQALGQVPDGFVQYFTNRFPRLLLHTHRAMRSCASESLFLPYYPPDSEARRPCPGATGR

SEQ ID NO: 94358 - protein, 36 aa, Homo sapiens
SAAQPVPESTEHSPNCRRITLRCSQNCRRSMGRLKR

SEQ ID NO: 94359 - protein, 163 aa, Homo sapiens
VPVCRASPGFQPARSSQHWLQKEGGDGVYQKGMDFILEKLNHGDWVHIFPEGKVNMSSEFLRFKWGIGRLIAECHLNPIILPLWHVGMNDVLPNSPPYFPRFGQKITVLIGKPFSALPVLERLRAENKSAVEMRKALTDFIQEEFQHLKTQAEQLHNHLQPGR

SEQ ID NO: 94360 - protein, 156 aa, Homo sapiens
MTLKASEGESGGSMHTALSDLYLEHLLQKRSRPEKETKGMISLKVIPNQQSRLPALQMFMRAQFDYDPKKDNLIPCKEAGLKFATGDIIQIINKDDSNWWQGRVEGSSKESAGLIPSPELQEWRVASMAQSAPSEAPSCSPFGKKKKYKDKYLAKH

SEQ ID NO: 94361 - protein, 271 aa, Homo sapiens
MARGCLCCLKYMMFLFNLIFWLCGCGLLGVGIWLSVSQGNFATFSPSFPSLSAANLVIAIGTIVMVTGFLGCLGAIKENKCLLLSFFIVLLVILLAELILLILFFVYMDKVNENAKKDLKEGLLLYHTENNVGLKNAWNIIQAEMRCCGVTDYTDWYPVLGENTVPDRCCMENSQGCGRNATTPLWRTGCYEKVKMWFDDNKHVLGTVGMCILIMQVRGASPAASPTLLASASEGRKHREVKAVLVHGGGSGIHHSYSSLAAVPATVSAEL

SEQ ID NO: 94362 - protein, 126 aa, Homo sapiens
MDKEKLDVKIEYCNYAMDSSVENMYVNKVWVQCENENCLKWRLLSSEDSAKVDHDEPWYCFMNTDSRYNNCSISEEDFPEESQLHQCGFKIVYSQLPLGSLVLVKLQNWPSWPGILCPDRFKGKYV

SEQ ID NO: 94363 - protein, 160 aa, Homo sapiens
MSKKPPNRPGITFEIGARLEALDYLQKWYPSRIEKIDYEEGKMLVHFERWSHRYDEWIYWDSNRLRPLERPALRKEGLKDEEDFFDFKAGEEVLARWTDCRYYPAKIEAINKEGTFTVQFYDGVIRCLKRMHIKAMPEDAKGQVRVFSIPSYPKGYLLER

SEQ ID NO: 94364 - protein, 185 aa, Homo sapiens
MVPEAWRSGLVYLTTDSRRSDPLLKKPGAASPLASRQNTLRSCDPVFYRQVLGAESAPPGQQAPPNTDWRFSQAQRPGTSGSQNGDDTGTWPNNQFDTEMLQAMILASASEAADGSSTLGGGAGTMGLSARYGPQFTLQHVPDYRQNVYIPGSNATLTNAAGKRDGKAPAGGNGNKKKSGKKEKK

SEQ ID NO: 94365 - protein, 36 aa, Homo sapiens
MERGKKKRISNKLQQTFHHSKEPTFLINQAGLLSSD

SEQ ID NO: 94366 - protein, 203 aa, Homo sapiens
MAAEGWIWRWGWGRRCLGRPGLLGPGPGPTTPLFLLLLLGSVTADITDGNSEHLKREHSLIKPYQGVGSSSMPLWDFQGSTMLTSQYVRLTPDERSKEGSIWNHQPCFLKDWEMHVHFKVHGTGKKNLHGDGIALWYTRDRLVPGPVFGSKDNFHGLAIFLDTYPNDETTEHRLDQDRAQRQLPQVAQRQRGRPHGELPQRAP

SEQ ID NO: 94367 - protein, 125 aa, Homo sapiens
MSHGPKQPGAAAAPAGGKAPGQHGGFVVTVKQERGEGPRAGEKGSHEEEPGSAAGEETRLAQGQEAEEDSAEWAQGTGHGLRALPERAARADPHAPPGSALSRDHQDAGRRVEQAAANGKAAVPG

SEQ ID NO: 94368 - protein, 118 aa, Homo sapiens
MHPPKTPSGALHRKRKMAAWPFSRLWKVSDPILFQMTLIAALLPAVLGNCGPPPTLSFAAPMDITLTETRFKTGTTLKYTCLPGYVRSHSTQTLTCNSDGEWVYNTFCILDTGFHHIG

SEQ ID NO: 94369 - protein, 252 aa, Homo sapiens
MKHCPQQETSTIGGKKKHPEGGDPENSHIYRSLPPVPASLLNFWNPPTTAQVTIEAQPPKVSEGKDVLLLVHNLPQNLAGYIWYKGQMTYLYHYITSYVVDGQRIIYGPAYSGRERVYSNASLLIQNVTQEDAGSYTLHIIKRRDGTGGVTGHFTFTLHLETPKPSISSSNLNPREAMEAVILTCDPATPAASYQWWMNGQSLPMTHRLQLSKTNRTLFIFGVTKYIAGPYECEIRNPVSASRSDPVTLNLL

SEQ ID NO: 94370 - protein, 169 aa, Homo sapiens
MGIQGLLQFIKEASEPIHVRKYKGQVVAVDTYCWLHKGAIACAEKLAKGEPTDRRRQANLLKGKQLLREGKVSEARECFTRSINITHAMAHKVIKAARSQGVDCLVAPYEADAQLAYLNKAGIVQAIITEDSDLLAFGCKKVILKMDQFGNGLEIDQARLGMCRQLGDV

SEQ ID NO: 94371 - protein, 349 aa, Homo sapiens
MLLMVVSMACVGFFLVQRAGPHVGNHRKPSLLAHPGPLVKSGERVILQCWSDIMFEHFFLHKEGISKDPSSLVGQIHDGVSKANFSIGPMMLALAGTYRCYGSVTHTPYQLSAPSDPLDIVVTGPYEKPSLSAQPGPKVQAGESVTLSCSSRSSYDMYHLSREGGAHERRLPAVRKVNRTFQADFPLGPATHGGTYRCFGSFRHSPYEWSDPSDPLLVSVTGNPSSSWPSPTEPSSKSGNPRHLHILIGTSVVIILFILLLFFLLHLWCSNKKNAAVMDQEPAGNRTANSEDSDEQDPQEVTYAQLDHCVFTQRKITRPSQRPKTPPTDTILYTELPNAKPRSKVVSCP

SEQ ID NO: 94372 - protein, 102 aa, Homo sapiens
MARHGLPLLPLLSLLVGAWLKLGNGQATSMVQLQGGRFLMGTNSPDSRDGDGPVREATVKPFAIDIFPVTNKDFRSSLPMGELVPAKPHQPVAGKVPQGRQS

SEQ ID NO: 94373 - protein, 40 aa, Homo sapiens
LTTPMLLRALAQAARAGPPGGRSLHSSAVAATYSEYLGGL

SEQ ID NO: 94374 - protein, 46 aa, Homo sapiens
MPVRFKGLSEYQRNFLWKKSYLSESCNSSVGRKYPWAGLRSDQLVG

SEQ ID NO: 94375 - protein, 84 aa, Homo sapiens
FLVLQNLIQSTLALSDSQMKSYQSFQTFRLYREYKDHVLVKAFMECQKRSLVNRRRVNHTLGPKKNRALPFVPMSYQLSQTYYR

SEQ ID NO: 94376 - protein, 522 aa, Homo sapiens
MWPQPRLPPHPAMSEKTQQGKLAAAKKKLKAYWQRKSPGIPAGANRKKKVNGSSPDTATSGGYHSPGDSATGVYGEGRASSTTLQDLESQYQELAVALDSSSAIISQLTENINSLVRTSKEEKKHEIHLVQKLGRSLFKLKNQTAEPLAPEPPAGPSKVEQLQDETNHLRKELESVGRQLQAEVENNQMLSLLNRRQEERLREQEERLHEQEERLHEQEERLCEQEERLREQEERLCEQEERLREQEERLCEQEERLREQEERLCEQEERLREQEERLCEQEERLREQEERLCEQEERLREQEERLCEQEERLCEQEERLCEQEKLPGQERLLEEVEKLLEQERRQEEQERLLERERLLDEVEELLEQERLRQQDERLWQQETLRELERLRELERLRELERMLELGWEALYEQRAEPRSGFEELNNENKSTLQLEQQVKELEKSGGAEEPRGSESAAAARPVPGAPVPQGAWMCGQAGWTPQEHPGLSGEAVGTGEAAGGAEEAACHSFRAAENRELNITII

SEQ ID NO: 94377 - protein, 223 aa, Homo sapiens
MERKVLPCFLCLFQGVLSDLTKVTRMHGIDPVVLVLMVGVVMFTLGFAGCVGALRENICLLNFFCGTIVLIFFLELAVAVLAFLFQDWVRDRFREFFESNIKSYRDDIDLQNLIDSLQKANQCCGAYGPEDWDLNVYFNCSGASYSREKCGVPFSCCVPDPAQKVVNTQCGYDVRIQLKSKWDESIFTKGCIQALESWLPRNIYIVAGVFIAISLLQIFGIFL

SEQ ID NO: 94378 - protein, 137 aa, Homo sapiens
MHLLGPWLLLLEYLAFSDSSKWVFEHPETLYAWEGACVWIPCTYRALDGDLESFILFHNPEYNKNTSKFDGTRLYESTKDGKVPSEQKRVQFLGDKNKNCTLSIHPVHLNDSGQLGLRMESKTEKWMERIHLNVSER

SEQ ID NO: 94379 - protein, 125 aa, Homo sapiens
MLPGLSRGHRRRGWIHAVYTPVDSLVFGGNILHSFNVPMQLRIYEIEDRTRVQPKFRYPFYYEMCWYVLERYVYCVTQRSHLTQEYQRESMLIDAPRKPSIDGFSSDSWLEMEEEACDQQPQEEE

SEQ ID NO: 94380 - protein, 180 aa, Homo sapiens
MERYAGALEEVADGARQQERHYQLLSALQSLVKELPSSFQQRLSYTTLSDLALALLDGTVFEIVQGLLEIQHLTEKSLYNQRLRLQNEHRVLRQALRQKHQEAQQACRPHNLPVLQAAQQRELEAVEHRIREEQRAMDQKIVLELDRKVADQQSTLEKAGVAGFYVTTNPQGEGTLERGH

SEQ ID NO: 94381 - protein, 357 aa, Homo sapiens
  MOD_RES (1)..(1): Any amino acid
XFILVQADTPSSPSIDQVEPYSSTAQVQFDEPEATGGVPILKYKAEWRAVGEEVWHSKWYDAKEASMEGIVTIVGLKPETTYAVRLAALNGKGLGEISAASEFKTQPVREPSAPKLEGQMGEDGNSIKVNLIKQDDGGSPIRHYLVRYRALSSEWKPEIRLPSGSDHVMLKSLDWNAEYEVYVVAENQQGKSKAAHFVFRTSAQPTAIPANGSPTSGLSTGAIVGILIVIFVLLLVVVDITCYFLNKCGLFMCIAVNLCGKAGPGAKGKDMEEGKAAFSKDESKEPIVEVRTEEERTPNHDGGKHTEPNETTPLTEPEKGPVEAKPECQETETKPAPAEVKTVPNDATQTKENESKA

SEQ ID NO: 94382 - protein, 38 aa, Homo sapiens
MASDEGKLFVGGLSFDTNEQSLEQVFSKYGQISEVVVV

SEQ ID NO: 94383 - protein, 126 aa, Homo sapiens
MADPWQECMDYAVTLARQAGEVVCEAIKNEMNVMLKSSPVDLVTATDQKVEKMLISSIKEKYPSHSFIGEESVAAGEKSILTDNPTWIIDPIDGTTNFVHRFPFVAVSIGFAVNKKVWNRRFFPRL

SEQ ID NO: 94384 - protein, 68 aa, Homo sapiens
MRILQLILLALATGLVGGETRIIKGFECKPHSQPWQAALFEKTRLLCGATLIAPRWLLTAAHCLKPRY

SEQ ID NO: 94385 - protein, 109 aa, Homo sapiens
MAAPGERGRFHGGNLFFLPGGARSEMMDDLATDARGRGAGRRDAAASASTPAQAPTSDSPVAEDASRRRPCRACVDFKTWMRTQQKAVQEPPRHPHPGMLHTVAVPPAQ

SEQ ID NO: 94386 - protein, 209 aa, Homo sapiens
MAPLLLQLAVLGAALAAAALVLISIVAFTTATKMPALHRHEEEKFFLNAKGQKETLPSIWDSPTKQLSVVVPSYNEEKRLPVMMDEALSYLEKRQKRDPAFTYEVIVVDDGSKDQTSKVAFKYCQKYGSDKVRVITLVKNRGKGGAIRMGIFSSRGEKILMADADGATKFPDVEKLEKGLNDLQPWPNQMAIACGSRAHLEKESIAQGI

SEQ ID NO: 94387 - protein, 96 aa, Homo sapiens
MVGLKPSDVPPTMAVKFLGAGTAACFADLVTFPLDTAKVRLQIQGENQAVQTARLVQYRGVLGTILTMVRTEGPCSPYNGLVAGLQRQMSFASIRI

SEQ ID NO: 94388 - protein, 181 aa, Homo sapiens
ENQELRDAIRQSNQILRERCEELLHFQASQREEKEFLMCKFQEARKLVERLGLEKLDLKRQKEQALREVEHLKRCQQERTQVTVSEGSGRTGRAPGETRRELQRLLAQGSCADGTCFFRQQCGTASTESQPGSSPQPWRPGFSRGVGRVGTERLRGQPWSLGCSHQRSSCVAQGSPHKSCH

SEQ ID NO: 94389 - protein, 634 aa, Homo sapiens
MLFPLQVAAVTSSVRDDPLEHCVSPRTRARSPEICKMADNLDEFIEEQKARLAEDKAELESDPPYMEMKGKLSAKLSENSKILISMAKENIPPNSQQTRGSLGIDYGLSLPLGEDYERKKHKLKEELRQDYRRYLTQERLKLERNKEYNQFLRGKEESSEKFRQVEKSTEPKSQRNKKPIGQVKPDLTSQIQTSCENSEGPRKDVLTPSEAYEELLNQRRLEEDRYRQLDDEIELRNRRIIKKANEEVGISNLKHQRFASKAGIPDRRFHRFNEDRVFDRRYHRPDQDPEVSEEMDERFRYESDFDRRLSRVYTNDSAPDNETSKSANQDTCSPFAGMLFGGEDRELIQRRKEKYRLELLEQMAEQQRNKRREKDLELRVAASGAQDPEKSWNELLTSLQLSKEEPDRLKQFSVAPRHFEEMIPPERPRIAFQTPLPPLSAPSVPPIPSVHPVPSQNEDLRSGLSSALGEMVSPRIAPLPPPPLLPPLATNYRTPYDDAYYFYGSRNTFDPSLAYYGSGMMGVQPAAYVSAPVTHQLAQPVVNTVGQNELKITSDQVINSGLIFEDKPKPSKQSLQSYQEALQQQIREREERRKKEREEKEEYEAKLEAEMRTYNPWGKGGGGAPLRDAKGNLI

SEQ ID NO: 94390 - protein, 424 aa, Homo sapiens
MWVLLFCLVMASCQYSLLKSVQPDPASPIHGHNQIITYSRPIYFCVLCGLILLLDTGAKARHPPSYVVYGLKLFSPVFLQSARDYLIVFLYCFPAISLLGLFPQINTFCTYLLEQIDMLFFGGSAVSGITSAVYSVARSVLAAALLHAVCFSAVKEPWSMQHIPALFSAFCGLLVALSYHLSRQSSDPSVLMSFIQCRLFPKFLHQNLAESAADPLPKKMKDSVTDVLKWDLIVCAVVAVLSFAVSASTVFLSLRPFLSIVLFALAGAVGFVTHYVLPQLRKHHPWMWISHPILKNKEYHQREVRDVAHLMWFERLYVWLQCFEKYILYPALILNALTIDAFLISNHRRLGTHWDIFLMIIAGMKLLRTSFCNPVYQFINLSFTVIFFHFDYKDISESFLLDFFMVSILFSKASELAIFFILTF

SEQ ID NO: 94391 - protein, 484 aa, Homo sapiens
MYIKMATLANGQADNASLSTNGLGSSPGSAGHMNGLSHSPGNPSTIPMKDHDAIKLFIGQIPRNLDEKDLKPLFEEFGKIYELTVLKDRFTGMHKGCAFLTYCERESALKAQSALHEQKTLPGMNRPIQVKPADSESRGGSSCLRQPPSHRKLFVGMLNKQQSEDDVRRLFEAFGNIEECTILRGPDGNSKGCAFVKYSSHAEAQAAINALHGSQTMPGASSSLVVKFADTDKERTMRRMQQMAGQMGMFNPMAIPFGAYGAYAQLMQQQAALMASVAQGGYLNPMAAFAAAQMQQMAALNMNGLAAAPMTPTSGGSTPPGITAPAVPSIPSPIGVNGFTGLPPQANGQPAAEAVFANGIHPYPAQSPTAADPLQQAYAGVQQYAGPAAYPAAYGQISQAFPQPPPMIPQQQREGPEGCNLFIYHLPQEFGDAELMQMFLPFGFVSFDNPASAQTAIQAMNGFQIGMKRLKVQLKRPKDANRPY

SEQ ID NO: 94392 - protein, 84 aa, Homo sapiens
MKRVRTEQIQMAVSCYLKRRQYVDSDGPLKQGLRLSQTAEEMAANLTGNGGGSSGGVSLEQENSRQYPCGITSPLLKTVPERAD

SEQ ID NO: 94393 - protein, 138 aa, Homo sapiens
MSSLGASFVQIKFDDLQFFENCGGGSFGSVYRAKWISQDKEVAVKKLLKIEKEAEILSVLSHRNIIQFYGVILEPPNYGIVTEYASLGSLYDYINSNRSEEMDMDHIMTWATDVAKGMHYLHMEAPVKVIHRDLKSRN

SEQ ID NO: 94394 - protein, 903 aa, Homo sapiens
MEHGTLLAQPGLWTRDTSWALLYFLCYILPQTAPQVLRIGGIFETVENEPVNVEELAFKFAVTSINRNRTLMPNTTLTYDIQRINLFDSFEASRRACDQLALGVAALFGPSHSSSVSAVQSICNALEVPHIQTRWKHPSVDNKDLFYINLYPDYAAISRAILDLVLYYNWKTVTVVYEDSTGLIRLQELIKAPSRYNIKIKIRQLPSGNKDAKPLLKEMKKGKEFYVIFDCSHETAAEILKQILFMGMMTEYYHYFFTTLDLFALDLELYRYSGVNMTGFRLLNIDNPHVSSIIEKWSMERLQAPPRPETGLLDGMMTTEAALMYDAVYMVAIASHRASQLTVSSLQCHRHKPWRLGPRFMNLIKEARWDGLTGHITFNKTNGLRKDFDLDIISLKEEGTEKIGIWNSNSGLNMTDSNKDKSSNITDSLANRTLIVTTILEEPYVMYRKSDKPLYGNDRFEGYCLDLLKELSNILGFIYDVKLVPDGKYGAQNDKGEWNGMVKELIDHRADLAVAPLTITYVREKVIDFSKPFMTLGISILYRKPNGTNPGVFSFLNPLSPDIWMYVLLACLGVSCVLFVIARFTPYEWYNPHPCNPDSDVVENNFTLLNSFWFGVGALMQQGSELMPKALSTRIVGGIWWFFTLIIISSYTANLAAFLTVERMESPIDSADDLAKQTKIEYGAVRDGSTMTFFKKSKISTYEKMWAFMSSRQQTALVRNSDEGIQRVLTTDYALLMESTSIEYVTQRNCNLTQIGGLIDSKGYGVGTPIGSPYRDKITIAILQLQEEGKLHMMKEKWWRGNGCPEEDNKEASALGVENIGGIFIVLAAGLVLSVFVAIGEFIYKSRKNNDIEQAFCFFYGLQCKQTHPTNSTSGTTLSTDLECGKLIREERGIRKQSSVHTV

SEQ ID NO: 94395 - protein, 54 aa, Homo sapiens
MSGGLLKALRSDSYVELSQYRDQHFRVREAGPRDGKALGKNAEKRVTMKNKKNY

SEQ ID NO: 94396 - protein, 324 aa, Homo sapiens
PCSQECIILQPLNKCSPDNKPSLQIKEENAVFKIPLRPRESLETENVLDDIKSAGSHEPIKIQTRSDHGGCELASVLQLNPCRTGKIKSLQNNQDVSFENIQWSIDPGADLSQYKMDVTVIDTKDGSQSKLGGETVDMDCTLVSETVLLKMKKQEQKGEKSSNEERKMNDSLEDMFDRTTHEEYESCLADSFSQAADEEEELSTATKKLHKRLACKIFLILRWFGKKRREENCLGTRVRNVKFIMQICQQKKEKRNWLPAQDTDSATFHPTHQRIFGKLVFLPLRLVWKEVILRKILILVLVQKDVSLTTQYFLQKARSRRHRR

SEQ ID NO: 94397 - protein, 247 aa, Homo sapiens
MKGEIQQSLGAWVLLTCLGLYCGKTLLFKNGSTEIYGECGVCPRGQRTNAQKYCQPCTESPELYDWLYLGFMAMLPLVLHWFFIEWYSGKKSSSALFQHITALFECSMAAIITLLVSDPVGVLYIRSCRVLMLSDWYTMLYNPSPDYVTTVHCTHEAVYPLYTIVFIYYAFCLVLMMLLRPLLVKKIACGLGKSDRFKSIYAALYFFPILTVLQAVGGGLLYYAFPYIILVLSLVTLAVYMSASEIE

SEQ ID NO: 94398 - protein, 54 aa, Homo sapiens
RQVEVNVRNKILYLIQAWAHAFRNEPKYKVVQDTYQIMKVEEFKESDAMFAAER

SEQ ID NO: 94399 - protein, 90 aa, Homo sapiens
MLSLARPPLPPTGLRTRTRYIQTELGSRERLLVAVLTSRATLSTLAVAVNRTVAHHFPRLLYFTGQRGARAPAGMQVVSHGDERPAWLMS

SEQ ID NO: 94400 - protein, 400 aa, Homo sapiens
  MOD_RES (1)..(1): Any amino acid
XGKPWWAPAVGRKMGHPPVSPSAPAPAGTTAIPGLIPDLVAGTPWPRWALIAGALAAGVLLVSCLLCAACCCCRRHRKKPRDKESVGLGSARGTTTTHLVQPDVDGLESSPGDAQQWGCLQLSLEFDFGSQEIRVGLRQAADLRPGGTVDPYARVSVSTQAGHRHETKVHRGTLCPVFDETCCFHIPQAELPGATLQVQLFNFKRFSGHEPLGELRLPLGTVDLQHVLEHWYLLGPPAATQPEQVGELCFSLRYVPSSGRLTVVVLEARGLRPGLAEPYVKVQLMLNQRKWKKRKTATKKGTAAPYFNEAFTFLVPFSQVQNVDLVLAVWDRSLPLRTEPVGKVHLGARASGQPLQHWADMLAHARRPIAQRHPLRPAREVDRMLALQPRLRLRLPLPHS

SEQ ID NO: 94401 - protein, 228 aa, Homo sapiens
MSRERGSRSEEPGAGNRESGSREPGLAAAAMSTVDLARVGACILKHAVTGEAVELRSLWREHACVVAGLRRFGCVVCRWIAQDLSSLAGLLDQHGVRLVGVGPEALGLQEFLDGDYFAGELYLDESKQLYKELGFKRYNSLSILPAALGKPVRDVAAKAKAVGIQGNLSGDLLQSGGLLVVSKGGDKVLLHFVQKSPGDYVPKEHILQVLGISAEVCASDPPQCDREV

SEQ ID NO: 94402 - protein, 88 aa, Homo sapiens
MRPKVMWHLLRRYMASRLHSLRMGGYLFSGSQAPQLSPALLRALGQKCPNLKRLCLHVADLSMVPITSLPSTLRTLELHSCEISMAWL

SEQ ID NO: 94403 - protein, 65 aa, Homo sapiens
MAFIRKKQQEQQLQLYSKERFSLLLLNLEEYYFEQHRANHILHKGSHHERPRNNSVAISTKNLVS

SEQ ID NO: 94404 - protein, 112 aa, Homo sapiens
QKGWMPRESVLPHLQVQHLTGGLIDPKRTGRIPIQQALLSGMISEELAQLLQDESSYEKDLTDPISKERLSYKEAMGRCRKDPLSGLLLLPAALEGYRCYRSASPTVPRSLR

SEQ ID NO: 94405 - protein, 42 aa, Homo sapiens
MEIVWEVLFLLQANFIVCISGDLRRAVRRLWWQSGLEMQVTC

SEQ ID NO: 94406 - protein, 33 aa, Homo sapiens
MRAEEKYEISLLKKEKMNLLKLIDKKNEEKISL

SEQ ID NO: 94407 - protein, 62 aa, Homo sapiens
MADDIDIEAMLEAPYKKGEMCDRGGIKLLQSQPSNGNGRRSQEWHRSQEIDSGWLLAWPLGA

SEQ ID NO: 94408 - protein, 144 aa, Homo sapiens
MLKEVAQVTNSMFGASRKKFVEGVDSDYHDENMYYSQSSMFPHRSEKDMLASPSTSGQLSQFGASLYGQQNGSENVTGLDLSDFPALADRNRREGSGNPTPLINPLAGRAPYVGMVTKPANEQSQDFSIHNEDFPALPGSSYKD

SEQ ID NO: 94409 - protein, 602 aa, Homo sapiens
MIEKMQGSRMDEQRCSFPPPLKTEEDYIPYPSVHEVLGREGPFPLILLPQFGGYWIEGTNHEITSIPETEPLQSPTTKVKLECNPTARIYRKHFLGKEHFNYYSLDAALGHLVFSLKYDVIGDQEHLRLLLRTKCRTYHDVIPISCLTEFPNVVQMAKLVCEDVNVDRFYPVLYPKASRLIVTFDEHVISNNFKFGVIYQKLGQTSEEELFSTNEESPAFVEFLEFLGQKVKLQDFKGFRGGLDVTHGQTGTESVYCNFRNKEIMFHVSTKLPYTEGDAQQLQRKRHIGNDIVAVVFQDENTPFVPDMIASNFLHAYVVVQAEGGGPDGPLYKVSVTARDDVPFFGPPLPDPAVFRKGPEFQEFLLTKLINAEYACYKAEKFAKLEERTRAALLETLYEELHIHSQSMMGLGGDEDKMENGSGGGGFFESFKRVIRSRSQSMDAMGLSNKKPNTVSTSHSGSFAPNNPDLAKAAGISLIVPGKSPTRKKSGPFGSRRSSAIGIENIQEVQEKRESPPAGQKTPDSGHVSQEPKSENSSTQSSPEMPTTKNRAETAAQRAEALKDFSRSSSSASSFASVVEETEGVDGEDTGLHVAGGQCQHH

SEQ ID NO: 94410 - protein, 213 aa, Homo sapiens
GSALGNTEVIREYIFGLWRRAVANAKSIGHLIFARLLRLQESSQGEHPPPEDEGGEPEHTWLTEMLENWTRTSLEKQEQPHEDPERKGSLSNLMDFVKKTGICASKWEWGTTHNFLYKHGGIRDKIMSSRKHLHLVDAGLAINTPFPLVLPPTREVHLILSFDFSAGDPFETIRATTDYCRRHKIPFPQVEEAELDLWSKAPASCYILKGETG

SEQ ID NO: 94411 - protein, 325 aa, Homo sapiens
MESKMGELPLDINIQEPRWDQSTFLGRARHFFTVTDPRNLLLSGAQLEASRNIVQNYRAGVVTPGITEDQLWRAKYVYDSAFHPDTGEKVVLIGRMSAQVPMNMTITGCMLTFYRKTPTVVFWQWVNQSFNAIVNYSNRSGDTPITVRQLGTAYVSATTGAVATALGLKSLTKHLPPLVGRFVPFAAVAAANCINIPLMRQRELQVGIPVADEAGQRLGYSVTAAKQGIFQVVISRICMAIPAMAIPPLIMDTLEKKDFLKRRPWLGAPLQVGLVGFCLVFATPLCCALFPQKSSIHISNLEPELRAQIHEQNPSVEVVYYNKGL

SEQ ID NO: 94412 - protein, 154 aa, Homo sapiens
MAALTIATGTGNWFSALALGVTLLKCLLIPTYHSTDFEVHRNWLAITHSLPISQWYYEATSEWTLDYPPFFAWFEYILSHVAKYFDQEMLNVHNLNYSSSRTLLFQRFSVIFMDVLFVYAVRAVNALMEKKWVKNLQKSQNLFCRYYFCGTSGY

SEQ ID NO: 94413 - protein, 180 aa, Homo sapiens
MGPLSAPPCTQRITWKGVLLTVETPKPSISSSNLNPREAMEAVILTCDPATPAASYQWWMNGQSLPMTHRLQLSKTNRTLFIFGVTKYIAGPYECEIRNPVSASRSDPVTLNLLHGPDLPSIYPSFTYYRSGENLYLSCFAESNPRAQYSWTINGKFQLSGQKLSIPQITTKHSGLYACS

SEQ ID NO: 94414 - protein, 344 aa, Homo sapiens
  MOD_RES (1)..(1): Any amino acid
XKEKNTKTVQDYLEKFYQLPSNQYQSTRKNGTNVIVEKLKEMQRFFGLNVTGKPNEETLDMMKKPRCGVPDSGGFMLTPGNPKWERTNLTYRIRNYTPQLSEAEVERAIKDAFELWSVASPLIFTRISQGEADINIAFYQRDHGDNSPFDGPNGILAHAFQPGQGIGGDAHFDAEETWTNTSANYNLFLVAAHEFGHSLGLAHSSDPGALMYPNYAFRETSNYSLPQDDIDGIQAIYGLSSNPIQPTGPSTPKPCDPSLTFDAITTLRGEILFFKDRYFWRRHPQLQRVEMNFISLFWPSLPTGIQAAYEDFDRDLIFLFKDMITKDNSWSQVIPKAYQVPFQE

SEQ ID NO: 94415 - protein, 142 aa, Homo sapiens
MQNSEGGADSPASVALRPSAAAPPVPASPQRVLVQAASSNPKGAQMQPISLPRVQQVPQQVQPVQHVYPAQVQYVEGGDAVYTNGAIRTAYTYNPEPQMYAPSSTASYFEAPGGAQVTVAASSPPAVPSHSMVGITMDVGGS

SEQ ID NO: 94416 - protein, 163 aa, Homo sapiens
MAKEEPQSISRDLQELQKKLSLLIDSFQNNSKLPQHSRISLDSDDGVSRLGSAGSKVVAFMKSPVGQYLDSHPFLAFTLLVFIVMSAVPVGFFLLIVVLTTLAALLGVIILEGLVISVGGFSLLCILCGLGFVSLAMSGMMIASYVVVSSLISCWFSPRSHEI

SEQ ID NO: 94417 - protein, 131 aa, Homo sapiens
MEKEETTRELLLPNWQGSGSHGLTIAQRDDGVFVQEVTQNSPAARTGVVKEGDQIVGATIYFDNLQSGEVTQLLNTMGHHTVGLKLHRKGDRSPEPGQTWTREVFSSCSSEVVLDCRSGQEENHPLLRLFL

SEQ ID NO: 94418 - protein, 56 aa, Homo sapiens
MPEIRVTPLGAGQDVGRSCILVSIAGKNVMLDCGMHMGFNDDPGVLVPPAGWECPA

SEQ ID NO: 94419 - protein, 641 aa, Homo sapiens
MAVLLLLLRALRRGPGPGPRPLWGPGPAWSPGFPARPGRGRPYMASRPPGDLAEAGGRALQSLQLRLLTPTFEGINGLLLKQHLVQNPVRLWQLLGGTFYFNTSRLKQKNKEKDKSKGKAPEEDEEERRRRERDDQMYRERLRTLLVIAVVMSLLNALSTSGGSISWNDFVHEMLAKGEVQRVQVVPESDVVEVYLHPGAVVFGRPRLALMYRMQVANIDKFEEKLRAAEDELNIEAKDRIPVSYKRTGFFGNALYSVGMTAVGLAILWYVFRLAGMTGREGGFSAFNQLKMARFTIVDGKMGKGVSFKDVAGMHEAKLEVREFVDYLKERREIFEQHLKSLKLTQSSTFYSQRLAELTPGFSGADIANICNEAALHAAREGHTSVHTLNFEYAVERVLAGTAKKSKILSKEEQKVVAFHESGHALVGWMLEHTEAVMKVSITPRTNAALGFAQMLPRDQHLFTKEQLFERMCMALGGRASEALSFNEVTSGAQDDLRKVTRIAYSMVKQFGMAPGIGPISFPEAQEGLMGIGRRPFSQGLQQMMDHEARLLVAKAYRHTEKVLQDNLDKLQALANALLEKEVINYEDIEALIGPPPHGPKKMIAPQRWIDAQREKQDLGEEETEETQQPPLGGEEPTWPK

SEQ ID NO: 94420 - protein, 108 aa, Homo sapiens
MASQKRPSQRHGSKYLATASTMDHARHGFLPRHRDTGILDSIGRFFGGDRGAPKRGSGKDSHHPARTAHYGSLPQKSHGRTQDENPVVHFFKNIDRSGEAGHPGASGS

SEQ ID NO: 94421 - protein, 198 aa, Homo sapiens
MSSKGSVVLAYSGGLDTSCILVWLKEQGYDVIAYLANIGQKEDFEEARKKALKLGAKKVFIEDVSREFVEEFIWPAIQSSALYEDRYLLGTSLARPCIARKQVEIAQREGAKYVSHGATGKGNDQVRFELSCYSLAPQIKVIAPWRMPEFYNRFKGRNDLMEYAKQHGIPIPVTPKNPWSMDENLMHISYEAGILENP

SEQ ID NO: 94422 - protein, 288 aa, Homo sapiens
MSRELAPLLLLLLSIHSALAMRICSFNVRSFGESKQEDKNAMDVIVKVIKRCDIILVMEIKDSNNRICPILMEKLNRNSRRGITYNYVISSRLGRNTYKEQYAFLYKEKLVSVKRSYHYHDYQDGDADVFSREPFVVWFQSPHTAVKDFVIIPLHTTPETSVKEIDELVEVYTDVKHRWKAENFIFMGDFNAGCSYVPKKAWKNIRLRTDPRFVWLIGDQEDTTVKKSTNCAYDRIVLRGQEIVSSVVPKSNSVFDFQKAYKLTEEEVRLPSCLSMPLSWKDELAWAT

SEQ ID NO: 94423 - protein, 101 aa, Homo sapiens
MDEVEQDQHEARLKELFDSFDTTGTGSLGQEELTDLCHMLSLEEVAPVLQQTLLQDNLLGRVHFDQFKEALILILSRTLSNEEHFQEPDCSLEAQPKYVRG

SEQ ID NO: 94424 - protein, 41 aa, Homo sapiens
MVQASGHRRGLLAPWIALSAPHPPICKVASLVCHFYWSSPN

SEQ ID NO: 94425 - protein, 77 aa, Homo sapiens
MPKKKTGARKKAENRREREKQLRASRSTIDLAKHPCNASMECDKCQRENKVHDEVFRLCHKACWCIQYWPCNGGCNM

SEQ ID NO: 94426 - protein, 154 aa, Homo sapiens
MPAPGALILLAAVSASGCLASPAHPDGFALGRAPLAPPYAVVLISCSGLLAFIFLLLTCLCCKRGDVGFKEFENPEGEDCSGEYTPPAEETSSSQSLPDVYILPLAEVSLPMPAPQPSHSDMTTPLGLSRQHLSYLQEIGSGWFGKSAPPSSLH

SEQ ID NO: 94427 - protein, 159 aa, Homo sapiens
MAPLPGAELVRRPLQLYRYLLRCCQQLPTKGIQQHYKHAVRQSFRVHSDEDNPERIQQIIKRAIEDADWIMNKNSPAASIIRRGQECGLLGGQGQEEGSRAGPGSRRRLANLQEGASPGPCRQALWGGYQKLTVCPGLKAVCCVTLPHSEEHLSSNPDK

SEQ ID NO: 94428 - protein, 67 aa, Homo sapiens
MSQQGYVATPPYSQPQPGIGLSPPHYGHYGDPSHTASPTGRKLRSLKISFLPRFIQLISNQWGLELL

SEQ ID NO: 94429 - protein, 226 aa, Homo sapiens
MEQPEDMASLSEFDSLAGSIPATKVEITVSCRNLLDKDMFSKSDPLCVMYTQGMENKQWREFGRTEVIDNTLNPDFVRKFIVDYFFEEKQNLRFDLYDVDSKSPDLSKHDFLGQAFCTLGEIVGSPGSRLEKPLTIGAFSLNSRTGKPMPAVSNGGLWMESLRTTGLEASGGVPGKKCGTIILSAEELSNCRDVATMQFCANKLDKKDFFGKSDPFLVFYRSNEDG

SEQ ID NO: 94430 - protein, 1430 aa, Homo sapiens
MAALLRSARWLLRAGAAPRLPLSLRLLPGGPGRLHAASYLPAARAGPVAGGLLSPARLYAIAAKEKDIQEESTFSSRKISNQFDWALMRLDLSVRRTGRIPKKLLQKVFNDTCRSGGLGGSHALLLLRSCGSLLPELKLEERTEFAHRIWDTLQKLGAVYDVSHYNALLKVYLQNEYKFSPTDFLAKMEEANIQPNRVTYQRLIASYCNVGDIEGASKILGFMKTKDLPVTEAVFSALVTGHARAGDMENAENILTVMRDAGIEPGPDTYLALLNAYAEKGDIDHVKQTLEKVEKSELHLMDRDLLQIIFSFSKAGYPQYVSEILEKVTCERRYIPDAMNLILLLVTEKLEDVALQILLACPVSKEDGPSVFGSFFLQHCVTMNTPVEKLTDYCKKLKEVQMHSFPLQFTLHCALLANKTDLAKALMKAVKEEGFPIRPHYFWPLLVGRRKEKNVQGIIEILKGMQELGVHPDQETYTDYVIPCFDSVNSARAILQENGCLSDSDMFSQAGLRSEAANGNLDFVLSFLKSNTLPISLQSIRSSLLLGFRRSMNINLWSEITELLYKDGRYCQEPRGPTEAVGYFLYNLIDSMSDSEVQAKEEHLRQYFHQLEKMNVKIPENIYRGIRNLLESYHVPELIKDAHLLVESKNLDFQKTVQLTSSELESTLETLKAENQPIRDVLKQLILVLCSEENMQKALELKAKYESDMVTGGYAALINLCCRHDKVEDALNLKEEFDRLDSSAVLDTGKYVGLVRVLAKHGKLQDAINILKEMKEKDVLIKDTTALSFFHMLNGAALRGEIETVKQLHEAIVTLGLAEPSTNISFPLVTVHLEKGDLSTALEVAIDCYEKYKVLPRIHDVLCKLVEKGETDLIQKAMDFVSQEQGEMVMLYDLFFAFLQTGNYKEAKKIIETPGIRARSARLQWFCDRCVANNQVETLEKLVELTQKLFECDRDQMYYNLLKLYRSPRLEYSGAIRAHCSLNLLGSRNPPTSASQVVGSTEINGDWQRADAVWNKIQEENVIPREKTLRLLAEILREGNQEVPFDVPELWYEDEKHSLNSSSASTTEPDFQKDILIACRLNQKKGAYDIFLNAKEQNIVFNAETYSNLIKLLMSEDYFTQAMEVKAFAETHIKGFTLNDAANSRLIITQVRRDYLKEAVTTLKTVLDQQQTPSRLAVTRVIQALAMKGDVENIEVVQKMLNGLEDSIGLSKMVFINNIALAQIKNNNIDAAIENIENMLTSENKVIEPQYFGLAYLFRKVIEEQLEPAVEKISIMAERLANQFAIYKPVTDFFLQLVDAGKVDDARALLQRCGAIAEQTPILLLFLLRNSRKQGKASTVKSVLELIPELNEKEEAYNSLMKSYVSEKDVTSAKALYEHLTAKNTKLDDLFLKRYASLLKYAGEPVPFIEPPESFEFYAQQLRKLRENSS

SEQ ID NO: 94431 - protein, 162 aa, Homo sapiens
MPNWGGGAKCGACEKTVYHAEEIQCNGRSFHKTCFHCMACRKALDSTTVAAHESEIYCKVCYGRRYGPKGIGYGQGAGCLSTDTGEHLGLQFQHLGTRPVSAVPSVGRVWSPQMSLTKMGNFIAKFAMPKILAPRVLGLEALHNKWKRKNEEVRRFSDFLRA

SEQ ID NO: 94432 - protein, 196 aa, Homo sapiens
  MOD_RES (1)..(1): Any amino acid
XQEQGSGIDWCLSPADVEAQTTNDQKGSASLTVVQLSILINNIPDESQVEKLNVFLSPPDVINYLALTEATGRICVSQWEGPPRLGCIFCHGDHLLAVNDLKPQSLEEVSLFLTRSIQKEDSFRILSYQVAFGEGTELRDRAPGFRTSDRHDVAKRACMESDWCRDSKTAPSTNLCLSFLFCKIMTNDGAGCWIIK

SEQ ID NO: 94433 - protein, 224 aa, Homo sapiens
  MOD_RES (1)..(1): Any amino acid
XRHRGTDFGGSPWLLIITVFLRSYKFAISLCTSYLCVSFLKTIFPSQNGHDGSTDVQQRARRSNCRRQEGIKIVLEDIFTLWRQVETKVRAKIRKMKVTTKVNRHDKINGKRKTAKEHLRKLSMKEREHGEKERQVSEAEENGKLDMKEIHTYMEMFQRAQALRRRAEDYYRCKITPSARKPLCNRVSLLVFLAFGHSLPGQDMDTFFSLRLCAQALQREMAER

SEQ ID NO: 94434 - protein, 217 aa, Homo sapiens
MAAPDLLDPKSAAQNSKPRLSFSTKPTVLASRVESDTTINVMKWKTVSTIFLVVVLYLIIGATVFKALEQPHEISQRTTIVIQKQTFISQHSCVNSTELDELIQQIVAAINAGIIPLGNTSNQISHWDLGSSFFFAGTVITTIGFGNISPRTEGGKIFCIIYALLGIPLFGFLLAGVGDQLGTIFGKGIAKVEDTFIVDPILNIWTSISLSCGSGSL

SEQ ID NO: 94435 - protein, 146 aa, Homo sapiens
MLSSRAEAAMTAADRAIQRFLRTGAAVRYKVMKNWGVIGGIAAALAAGIYVIWGPITERKKRRKALSCQEVTDDEVLDASCLLDVLRMYRWQISSFEEQDAHELFHVITSSLEDERDRQPRVTHLFDVHSLEQQSEITPKQITCRT

SEQ ID NO: 94436 - protein, 117 aa, Homo sapiens
MLFRFSAASSDNTENLIKVIEILISTEWNERQPAPALPPKPPKPTTVANNGMNNNMSLQDAEWYWGDISREEVNEKLRDTADGTFLVRDASTKMHGDYTLTLRKGGNNKLIKIFHRD

SEQ ID NO: 94437 - protein, 442 aa, Homo sapiens
NEVYNLTQEFFRHDKPVNAESQNSVGVFTREEVRNRIRNDPDDPEATKRLKLAMIQQYLKVESCESSSHSMDEVSLSAFGEWTEIPGAHHIIPSGFMRVVELLAEGIPAHVIQLGKPVRCIHWDQASARPRGPEIEPRGEGDHNHDTGEGGQGGEEPRGGRWDEDEQWSVVVECEDCELIPADHVIVTVSLGVLKRQYTSFFRPGLPTEKVAAIHRLGIGTTDKIFLEFEEPFWGPECNSLQFVWEDEAESHTLTYPPELWYRKICGFDVLYPPERYGHVLSGWICGEEALVMEKCDDEAVAEICTEMLRQFTGNPNIPKPRRILRSAWGSNPYFRGSYSYTQVGSSGADVEKLAKPLPYTESSKTAHGSSTKQQPGHLFSSKCPEQPLDANRGAVKPMQVLFSGEATHRKYYSTTHGALLSGQREAARLIEMYRDLFQQGT

SEQ ID NO: 94438 - protein, 114 aa, Homo sapiens
MKTFTWTLGVLFFLLVDTGHCRGGQFKIKKINQRRYPRATDGKEEAKKCAYTFLVPEQRITGPICVNTKGQDASTIKDMITRMDLENLKDVLSRQKREIDVLQLVVDVDGNIVN

SEQ ID NO: 94439 - protein, 26 aa, Homo sapiens
MPAGGGPRSLWPVKFWLVQSLQATFG

SEQ ID NO: 94440 - protein, 122 aa, Homo sapiens
  MOD_RES (1)..(1): Any amino acid
XKGGFTGGDEYQKHFLPRDYLATYYSFDGSPSPEAEMLKFNLECLHKTFGPGGLQGDTLIDIGSGPTIYQVLAACDSFQDITLSDFTDRNREELEKWLKKEPGAYDWTPAVKFACELEGNRA

SEQ ID NO: 94441 - protein, 250 aa, Homo sapiens
MVGEDADLPCHLFPTMSAETMELRWVSSSLRQVVNVYADGKEVEDRQSAPYRGRTSILRDGITAGKAALRIHNVTASDSGKYLCYFQDGDFYEKALVELKVAALGSDLHIEVKGYEDGGIHLECRSTGWYPQPQIKWSDTKGENIPAVEAPVVADGVGLYAVAASVIMRGSSGGGVSCIIRNSLLGLEKTASISIADPFFRSAQPWIAALAGTLPISLLLLAGASYFLWRQQKEKIALSRETEREREMKE

SEQ ID NO: 94442 - protein, 38 aa, Homo sapiens
YIMCCRREGVEKRNMQTPENLPHQTQIPQQQTTGKWYP

SEQ ID NO: 94443 - protein, 531 aa, Homo sapiens
MDRVLLRWISLFWLTAMVEGLQVTVPDKKKVAMLFQPTVLRCHFSTSSHQPAVVQWKFKSYCQDRMGESLGMSSTRAQSLSKRNLEWDPYLDCLDSRRTVRVVASKQGSTVTLGDFYRGREITIVHDADLQIGKLMWGDSGLYYCIITTPDDLEGKNEDSVELLVLGRTGLLADLLPSFAVEIMPVRKGYRIQADKERDSMKVLYYVEKELAQFDPARRMRGRYNNTISELSSLHEEDSNFRQSFHQMRSKQFPVSGDLESNPDYWSGVMGGSSGASRGPSAMEYNKEDRESFRHSQPRSKSEMLSRKNFATGVPAVSMDELAAFADSYGQRPRRADGNSHEARGGSRFERSESRAHSGFYQDDSLEEYYGQRSRSREPLTDADRGWAFSPARRRPAEDAHLPRLVSRTPGTAPKYDHSYLGSARERQARPEGASRGGSLETPSKRSAQLGPRSASYYAWSPPGTYKAGSSQDDQEDASDDALPPYSELELTRGPSYRGRDLPYHSNSEKKRKKEPAKKTNDFPTRMSLVV

SEQ ID NO: 94444 - protein, 97 aa, Homo sapiens
MCPLPLAAAAVAAPRAPLRLLNRGLAAAMSTAQSLKSVDYEVFGRVQGVCFRMYTEDEARKIGVVGWVKNTSKGTVTGQVQGPEDKVNSMLECSGLI

SEQ ID NO: 94445 - protein, 96 aa, Homo sapiens
MLDTMEAPGHSRQLLLQLNNQRTKGFLCDVIIVVQNALFRAHKNVLAASSAYLKSLVVHDNLLNLDHDMVSPAVFRLVLDFIYTGRLADGAEAAAA

SEQ ID NO: 94446 - protein, 45 aa, Homo sapiens
  MOD_RES (1)..(1): Any amino acid
XMWVLLFCLVMASCQYSLLKSVQPDPASPIHGPKPGTLPVTLCMA

SEQ ID NO: 94447 - protein, 184 aa, Homo sapiens
MARGAALALLLFGLLGVLVAAPDGGFDLSDALPDNENKKPTAIPKKPSAGDDFDLGDAVVDGENDDPRPPNPPKPMPNPNPNHPSSSGSFSDADLADGVSGGEGKGGSDGGGSHRKEGEEADAPGVIPGIVGAVVVAVAGAISSFIAYQKKKLCFKENEQGEVDMESHRNANAEPAVQRTLLEK

SEQ ID NO: 94448 - protein, 142 aa, Homo sapiens
  MOD_RES (1)..(1): Any amino acid
XLLLWDLENVEFPETLLMDRIRLQELAFQLHQLTVLASVLLVARSFSGEVLFRSPEFVDRLKCTTKALTEEFISRPEETMLSVSEQVSQEVHQGLKDMGLTTLSSENTASLLGQLQNITKKENCIRSIVGVSATLSWRPHSH

SEQ ID NO: 94449 - protein, 104 aa, Homo sapiens
MRVVTIVILLCFCKAAELRKASPGSVRSRVNHGRAGGGRRGSNPVKRYAPGLPCDVYTYLHEKYLDCQERKLVYVLPGWPQDLLHMLLARNKIRTLKNNMFSKF

SEQ ID NO: 94450 - protein, 1880 aa, Homo sapiens
MASEDNRVPSPPPTGDDGGGGGREETPTEGGALSLKPGLPIRGIRMKFAVLTGLVEVGEVSNRDIVETVFNLLVGGQFDLEMNFIIQEGESINCMVDLLEKCDITCQAEVWSMFTAILKKSIRNLQVCTEVGLVEKVLGKIEKVDNMIADLLVDMLGVLASYNLTVRELKLFFSKLQGDKGRWPPHAGKLLSVLKHMPQKYGPDAFFNFPGKSAAAIALPPIAKWPYQNGFTFHTWLRMDPVNNINVDKDKPYLYCFRTSKGLGYSAHFVGGCLIVTSIKSKGKGFQHCVKFDFKPQKWYMVTIVHIYNRWKNSELRCYVNGELASYGEITWFVNTSDTFDKCFLGSSETADANRVFCGQMTAVYLFSEALNAAQIFAIYQLGLGYKGTFKFKAESDLFLAEHHKLLLYDGKLSSAIAFTYNPRATDAQLCLESSPKDNPSIFVHSPHALMLQDVKAVLTHSIQSAMHSIGGVQVLFPLFAQLDYRQYLSDEIDLTICSTLLAFIMELLKNSIAMQEQMLACKGFLVIGYSLEKSSKSHVSRAVLELCLAFSKYLSNLQNGMPLLKQLCDHVLLNPAIWIHTPAKVQLMLYTYLSTEFIGTVNIYNTIRRVGTVLLIMHTLKYYYWAVNPQDRSGITPKGLDGPRPNQKEMLSLRAFLLMFIKQLVMKDSGVKEDELQAILNYLLTMHEDDNLMDVLQLLVALMSEHPNSMIPAFDQRNGLRVIYKLLASKSEGIRVQALKAMGYFLKHLAPKRKAEVMLGHGLFSLLAERLMLQTNLITMTTYNVLFEILIEQIGTQVIHKQHPDPDSSVKIQNPQILKVIATLLRNSPQCPESMEVRRAFLSDMIKLFNNSRENRRSLLQCSVWQEWMLSLCYFNPKNSDEQKITEMVYAIFRILLYHAVKYEWGGWRVWVDTLSITHSKVTFEIHKENLANIFREQQGKVDEEIGLCSSTSVQAASGIRRDINVSVGSQQPDTKDSPVCPHFTTNGNENSSIEKTSSLESASNIELQTTNTSYEEMKAEQENQELPDEGTLEETLTNETRNADDLEVSSDIIEAVAISSNSFITTGKDSMTVSEVTASISSPSEEDASEMPEFLDKSIVEEEEDDDYVELKVEGSPTEEANLPTELQDNSLSPAASEAGEKLDMFGNDDKLIFQEGKPVTEKQTDTETQDSKDSGIQTMTASGSSAMSPETTVSQIAVESDLGQMLEEGKKATNLTRETKLINDCHGSVSEASSEQKIAKLDVSNVATDTERLELKASPNVEAPQPHRHVLEISRQHEQPGQGIAPDAVNGQRRDSRSTVFRIPEFNWSQMHQRLLTDLLFSIETDIQMWRSHSTKTVMDFVNSSDNVIFVHNTIHLISQVMDNMVMACGGILPLLSAATSATHELENIEPTQGLSIEASVTFLQRLISLVDVLIFASSLGFTEIEAEKSMSSGGILRQCLRLVCAVAVRNCLECQQHSQLKTRGDKALKPMHSLIPLGKSAAKSPVDIVTGGISPVRDLDRLLQDMDINRLRAVVFRDIEDSKQAQFLALAVVYFISVLMVSKYRDILEPQNERHSQSCTETGSENENVSLSEITPAAFSTLTTASVEESESTSSARRRDSGIGEETATGLGSHVEVTPHTAPPGVSAGPDAISEVLSTLSLEVNKSPETKNDRGNDLDTKATPSVSVSKNVNVKDILRSLVNIPADGVTVDPALLPPACLGALGDLSVEQPVQFRSFDRSVIVAAKKSAVSPSTFNTSIPTNAVSVVSSVDSAQASDMGGESPGSRSSNAKLPSVPTVDSVSQDPVSNMSITERLEHALEKAAPLLREIFVDFAPFLSRTLLGSHGQELLIEGTSLVCMKSSSSVVELVMLLCSQVRVAKFYSEECRPCFYRTCQ

SEQ ID NO: 94451 - protein, 922 aa, Homo sapiens
MAPAEILNGKEISAQIRARLKNQVTQLKEQVPGFTPRLAILQVGNRDDSNLYINVKLKAAEEIGIKATHIKLPRTTTESEVMKYITSLNEDSTVHGFLVQLPLDSENSINTEEVINAIAPEKDVDGLTSINAGKLARGDLNDCFIPCTPKGCLELIKETGVPIAGRHAVVVGRSKIVGAPMHDLLLWNNATVTTCHSKTAHLDEEVNKGDILVVATGQPEMVKGEWIKPGAIVIDCGINYVPDDKKPNGRKVVGDVAYDEAKERASFITPVPGGVGPMTVAMLMQSTVESAKRFLEKFKPGKWMIQYNNLNLKTPVPSDIDISRSCKPKPIGKLAREIGLLSEEVELYGETKAKVLLSALERLKHRPDGKYVVVTGITPTPLGEGKSTTTIGLVQALGAHLYQNVFACVRQPSQGPTFGIKGGAAGGGYSQVIPMEEFNLHLTGDIHAITAANNLVAAAIDARIFHELTQTDKALFNRLVPSVNGVRRFSDIQIRRLKRLGIEKTDPTTLTDEEINRFARLDIDPETITWQRVLDTNDRFLRKITIGQAPTEKGHTRTAQFDISVASEIMAVLALTTSLEDMRERLGKMVVASSKKGEPVSAEDLGVSGALTVLMKDAIKPNLMQTLEGTPVFVHAGPFANIAHGNSSIIADRIALKLVGPEGFVVTEAGFGADIGMEKFFNIKCRYSGLCPHVVVLVATVRALKMHGGGPTVTAGLPLPKAYIQENLELVEKGFSNLKKQIENARMFGIPVVVAVNAFKTDTESELDLISRLSREHGAFDAVKCTHWAEGGKGALALAQAVQRAAQAPSSFQLLYDLKLPVEDKIRIIAQKIYGADDIELLPEAQHKAEVYTKQGFGNLPICMAKTHLSLSHNPEQKGVPTGFILPIRDIRASVGAGFLYPLVGTVSACCKGVVGASALLV

SEQ ID NO: 94452 - protein, 197 aa, Homo sapiens
MNTNSKEVLSLGVQVPEAWEELLTMKVEAKSHLQWQESRLKRSNPLAREIFRRHFRQLCYQETPGPREALTRLQELCYQWLRPHVSTKEQILDLLVLEQFLSILPKELQGWVREHCPESGEEAVILLEDLERELDEPQHEMVAHRHRQEVLCKEMVPLAEQTPLTLQSQPKEPQLTCDSAQKCHSIGETDEVTKTED

SEQ ID NO: 94453 - protein, 813 aa, Homo sapiens
MDNNAAAIKALELYKINAKLCDPHPSKKGASSAYLENSKGAPNNSCSEIKMNKKGARIDFKDVTYLTEEKVYEILELCREREDYSPLIRVIGRVFSSAEALVQSFRKVKQHTKEELKSLQAKDEDKDEDEKEKAACSAAAMEEDSEASSSRIGDSSQGDNNLQKLGPDDVSVDIDAIRRVYTRLLSNEKIETAFLNALVYLSPNVECDLTYHNVYSRDPNYLNLFIIVMENRNLHSPEYLEMALPLFCKAMSKLPLAAQGKLIRLWSKYNADQIRRMMETFQQLITYKVISNEFNSRNLVNDDDAIVAASKCLKMVYYANVVGGEVDTNHNEEDDEEPIPESSELTLQELLGEERRNKKGPRVDPLETELGVKTLDCRKPLIPFEEFINEPLNEVLEMDKDYTFFKVETENKFSFMTCPFILNAVTKNLGLYYDNRIRMYSERRITVLYSLVQGQQLNPYLRLKVRRDHIIDDALVRLEMIAMENPADLKKQLYVEFEGEQGVDEGGVSKEFFQLVVEEIFNPDIGMFTYDESTKLFWFNPSSFETEGQFTLIGIVLGLAIYNNCILDVHFPMVVYRKLMGKKGTFRDLGDSHPVLYQSLKDLLEYEGNVEDDMMITFQISQTDLFGNPMMYDLKENGDKIPITNENRKEFVNLYSDYILNKSVEKQFKAFRRGFHMVTNESPLKYLFRPEEIELLICGSRNLDFQALEETTEYDGGYTRDSVLIREFWEIVHSFTDEQKRLFLQFTTGTDRAPVGGLGKLKMIIAKNGPDTERLPTSHTCFNVLLLPEYSSKEKLKERLLKAITYAKGFGML

SEQ ID NO: 94454 - protein, 226 aa, Homo sapiens
MDSSQIHSKDPRYGASPLHWAKNAEMARMLLKRGCNVNSTSSAGNTALHVAVMRNRFDCAIVLLTHGANADARGEHGNTPLHLAMSKDNVEMIKALIVFGAEVDTPNDFGETPTFLASKIGRLVTRKAILTLLRTVGAEYCFPPIHGVPAEQGSAAPHHPFSLERAQPPPISLNNLGSHPSQAGWWAWGAASDGTTGSHAHLTGPEASVHPGLHEGREADMQNLSP

SEQ ID NO: 94455 - protein, 58 aa, Homo sapiens
MAVRERAAAAMAALERRVPSLDDFAGQSWSSWVERADLPAADGLLPCLLALCSYSHLL

SEQ ID NO: 94456 - protein, 115 aa, Homo sapiens
MAPKKPEPKKEAAKPAPAPAPAPAPAPAPAPEAPKEPAFDPKSVKIDFTADQIEEFKEAFSLFDRTPTGEMKITYGQCGDVLRALGQNPTNAEVLRVLGKPKPEAHFPQQGAGHL

SEQ ID NO: 94457 - protein, 34 aa, Homo sapiens
MTPEFDEEVVFEAAEPLLEASGMLLNFPACRTMS

SEQ ID NO: 94458 - protein, 141 aa, Homo sapiens
MAANVAHGLQQNVLYVDSNGGLTASRLLQLLQAKTQDEEEQAEALRRIQVVHAFDIFQMLDVLQELRGTVAQQVTGSSGTVKVVVVDSVTAVVSPLLGGQQREGLALMMQLARELKTLARDLGMAVVVTNHITRDRDSGRL

SEQ ID NO: 94459 - protein, 612 aa, Homo sapiens
MKQPIMADGPRCKRRKQANPRRKNVVNYDNVVDTGSETDEEDKLHIAEDDGIANPLDQETSPASVPNHESSPHVSQALLPREEEEDEIREGGVEHPWHNNEILQASVDGPEEMKEDYDTMGPEATIQTAINNGTVKNANCTSDFEEYFAKRKLEERDGHAVSIEEYLQRSDTAIIYPEAPEELSRLGTPEANGQEENDLPPGTPDAFAQLLTCPYCDRGYKRLTSLKEHIKYRHEKNEENFSCPLCSYTFAYRTQLERHMVTHKPGTDQHQMLTQGAGNRKFKCTECGKAFKYKHHLKEHLRIHSGEKPYECPNCKKRFSHSGSYSSHISSKKCIGLISVNGRMRNNIKTGSSPNSVSSSPTNSAITQLRNKLENGKPLSMSEQTGLLKIKTEPLDFNDYKVLMATHGFSGTSPFMNGGLGATSPLGVHPSAQSPMQHLGVGMEAPLLGFPTMNSNLSEVQKVLQIVDNTVSRQKMDCKAEEISKLKGYHMKDPCSQPEEQGVTSPNIPPVGLPVVSHNGATKSIIDYTLEKVNEAKACLQSLTTDSRRQISNIKKEKLRTLIDLVTDDKMIENHNISTPFSCQFCKESFPGPIPLHQHERYLCKMNEEIKA

SEQ ID NO: 94460 - protein, 57 aa, Homo sapiens
MGAVSWSESRAGERRFPCPVCGKRFRFNSILALHLRAHPGAQAFQCPHCGHRAAQRA

SEQ ID NO: 94461 - protein, 109 aa, Homo sapiens
MGLCKCPKRKVTNLFCFEHRVNVCEHCLVANHAKCIVQSYLQWLQDSDYNPNCRLCNIPLASRETTRLVCYGEALAPRGDQASLRGQLGDWFPGPPQAAGQSLSLGLPQ

SEQ ID NO: 94462 - protein, 58 aa, Homo sapiens
MVSESHHEALAAPPVTTVATVLPSNATEPASPGEGKEDAFSKLKEKFMNELHKIPLPP

SEQ ID NO: 94463 - protein, 244 aa, Homo sapiens
MNLFNLDRFRFEKRNKIEEAPEATPQPSQPGPSSPISLSAEEENAEGEVSRANTPDSDITEKTEDSSVPETPDNERKASISYFKNQRGIQYIDLSSDSEDVVSPNCSNTVQEKTFNKDTVIIVSEPSEDEESQGLPTMARRNDDISELEDLSELEDLKDAKLQTLKELFPQRSDNDLLKLIESTSTMDGAIAAALLMFGDAGGGPRKRKLSSSSEPYEEDEFNDDQSIKKTRLDHCAWAVKVAV

SEQ ID NO: 94464 - protein, 188 aa, Homo sapiens
SHPDEAPGTEDRSRSAPWVNKPQRAGRKGLLARQRTLEDEEEQERERRRRHRNLSSTTDDEAPRLSQNGDRQASASERLPSVEEAEVPKPLPPASKDEDEDIQSILRTRQERRQRRQVVEAAQAPIQERLEAEEGRNSLSPVQATQKPLVSKKELEIPPRRRLSREQRGPWALEEESLVGREPEERKK

SEQ ID NO: 94465 - protein, 118 aa, Homo sapiens
MDMGNPGTLSPTKPGSQYYQYSSNNPRRRPLHSSAMEVQTKKVRKVPPGLPSSVYAPSASTADYNRDSPGYPSSKPATSTFPSSFFMQDGHHSSDPWSSSSGMNQPGYAGMLGNSSHI

SEQ ID NO: 94466 - protein, 114 aa, Homo sapiens
MRLFVSDGVPGCLPVLAAAGRARGRAEVLISTVGPEDCVVPFLTRPKVPVLQLDSGNYLFSTSAICRGAECPAQLVPDTEYPGTMSASCRDCTETARCPGSPALPPKAAPAQPR

SEQ ID NO: 94467 - protein, 195 aa, Homo sapiens
MHARGPHGQLSPALPLASSVLMLLMSTLWLVGAGPGLVLAPELLLDPWQVHRLLTHALGHTALPGLLLSLLLLPTVGWQQECHLGTLRFLHASALLALASGLLAVLLAGLGLSSAAGSCGYMPVHLAMLAGEGHRPRRPRGALPPWLSPWLLLALTPLLSSEPPFLQLLCGLLAGLAYAAGAFRWLEPSERRLQV

SEQ ID NO: 94468 - protein, 307 aa, Homo sapiens
MAGLNVSLSFFFATFALCEAARRASKALLPVGAYEVFAREAVGAVQLGPCCLEMRTLVELGPWAGDFGPDLLLTLLFLLFLAHGVTLDGASANPTVSLQEFLMAEQSLPGTLLKLAAQGLGMQAACTLMRLCWAWELSDLHLLQSLMAQSCSSALRTSVPHGALVEAACAFCFHLTLLHLRHSPPAYSGPAVALLVTVTAYTAGPFTSAFFNPALAASVTFACSGHTLLEYVQVYWLGPLTGMVLAVLLHQGRLPHLFQRNLFYGQKNKYRAPRGKPAPASGDTQTPAKGSSVREPGRSGVEGPHSS

SEQ ID NO: 94469 - protein, 491 aa, Homo sapiens
MAAGERSWCLCKLLRFFYSLFFPGLIVCGTLCVCLVIVLWGIRLLLQRKKKLVSTSKNGKNQMVIAFFHPYCNAGGGGERVLWCALRALQKKYPEAVYVVYTGDVNVNGQQILEGAFRRFNIRLIHPVQFVFLRKRYLVEDSLYPHFTLLGQSLGSIFLGWEALMQCVPDVYIDSMGYAFTLPLFKYIGGCQVGSYVHYPTISTDMLSVVKNQNIGFNNAAFITRNPFLSKVKLIYYYLFAFIYGLVGSCSDVVMVNSSWTLNHILSLWKVGNCTNIVYPPCDVQTFLDIPLHEKKMTPGHLLVSVGQFRPEKNHPLQIRAFAKLLNKKMVESPPSLKLVLIGGCRNKDDELRVNQLRRLSEDLGVQEYVEFKINIPFDELKNYLSEATIGLHTMWNEHFGIVVECMAAGTIILAHNSGGPKLDIVVPHEGDITGFLAESEEDYAETIAHILSMSAEKRLQIRKSARASVSRFSDQEFEVTFLSSVEKLFK

SEQ ID NO: 94470 - protein, 93 aa, Homo sapiens
MAGLQRLASHLPVGVMLPHNTTEAPGPHSAKQDSYEQGDSSQQSLKGHLRNNFQKQLLSNKELILDKVYTHPKWNTQTKARSYSYPHCTGISQ

SEQ ID NO: 94471 - protein, 686 aa, Homo sapiens
MFLGTGEPALDTKAKRKAFHKPPPTSPKSPYLSKPRKVASWRSLRTAGSMPLGGRASLTPQKLWLGTAKPGSLTQALNSPLTWEHAWTGVPGGTPDCLTDTFRVKRPHLRRSASNGHVPGTPVYREKEDMYDEIIELKKSLHVQKSDVDLMRTKLRRLEEENSRKDRQIEQLLDPSRGTDFVRTLAEKRPDASWVINGLKQRILKLEQQCKEKDGTISKLQTDMKTTNLEEMRIAMETYYEEVHRLQTLLASSETTGKKPLGEKKTGAKRQKKMGSALLSLSRSVQELTEENQSLKEDLDRVLSTSPTISKTQGYVEWSKPRLLRRIVELEKKLSVMESSKSHAAEPVRSHPPACLASSSALHRQPRGDRNKDHERLRGAVRDLKEERTALQEQLLQRDLEVKQLLQAKADLEKELECAREGEEERREREEVLREEIQTLTSKLQELQEMKKEEKEDCPEVPHKAQELPAPTPSSRHCEQDWPPDSSEEGLPRPRSPCSDGRRDAAARVLQAQWKVYKHKKKKAVLDEAAVVLQAAFRGHLTRTKLLASKAHGSEPPSVPGLPDQSSPVPRVPSPIAQATGSPVQEEAIVIIQSALRAHLARARHSATGKRTTTAASTRRRSASATHGDASSPPFLAALPGNFIHLDSGTRAAGLLRSQPKSGHLQEARAVSGRKGGVSHLELPLN

SEQ ID NO: 94472 - protein, 1847 aa, Homo sapiens
SSISGSRFLITSTGALYIKDVQNEDGLYNYRCITRHRYTGETRQSNSARLFVSDPANSAPSILDGFDHRKAMAGQRVELPCKALGHPEPDYRWLKDNMPLELSGRFQKTVTGLLIENIRPSDSGSYVCEVSNRYGTAKVIGRLYVKQPLKATISPRKVKSSVGSQVSLSCSVTGTEDQELSWYRNGEILNPGKNVRITGINHENLIMDHMVKSDGGAYQCFVRKDKLSAQDYVQVVLEDGTPKIISAFSEKVVSPAEPVSLMCNVKGTPLPTITWTLDDDPILKGGSHRISQMITSEGNVVSYLNISSSQVRDGGVYRCTANNSAGVVLYQARINVRGPASIRPMKNITAIAGRDTYIHCRVIGYPYYSIKWYKNSNLLPFNHRQVAFENNGTLKLSDVQKEVDEGEYTCNVLVQPQLSTSQSVHVTVKVPPFIQPFEFPRFSIGQRVFIPCVVVSGDLPITITWQKDGRPIPGSLGVTIDNIDFTSSLRISNLSLMHNGNYTCIARNEAAAVEHQSQLIVRVPPKFVVQPRDQDGIYGKAVILNCSAEGYPVPTIVWKFSKGAGVPQFQPIALNGRIQVLSNGSLLIKHVVEEDSGYYLCKVSNDVGADVSKSMYLTVKIPAMITSYPNTTLATQGQKKEMSCTAHGEKPIIVRWEKEDRIINPEMARYLVSTKEVGEEVISTLQILPTVREDSGFFSCHAINSYGEDRGIIQLTVQEPPDPPEIEIKDVKARTITLRWTMGFDGNSPITGYDIECKNKSDSWDSAQRTKDVSPQLNSATIIDIHPSSTYSIRMYAKNRIGKSEPSNELTITADEAAPDGPPQEVHLEPISSQSIRVTWKAPKKHLQNGIIRGYQIGYREYSTGGNFQFNIISVDTSGDSEVYTLDNLNKFTQYGLVVQACNRAGTGPSSQEIITTTLEDVPSYPPENVQAIATSPESISISWSTLSKEALNGILQGFRVIYWANLMDGELGEIKNITTTQPSLELDGLEKYTNYSIQVLAFTRAGDGVRSEQIFTRTKEDVPGPPAGVKAAAASASMVFVSWLPPLKLNGIIRKYTVFCSHPYPTVISEFEASPDSFSYRIPNLSRNRQYSVWVVAVTSAGRGNSSEIITVEPLAKAPARILTFSGTVTTPWMKDIVLPCKAVGDPSPAVKWMKDSNGTPSLVTIDGRRSIFSNGSFIIRTVKAEDSGYYSCIANNNWGSDEIILNLQVQVPPDQPRLTVSKTTSSSITLSWLPGDNGGSSIRGYILQYSEDNSEQWGSFPISPSERSYRLENLKCGTWYKFTLTAQNGVGPGRISEIIEAKTLGKEPQFSKEQELFASINTTRVRLNLIGWNDGGCPITSFTLEYRPFGTTVWTTAQRTSLSKSYILYDLQEATWYELQMRVCNSAGCAEKQANFATLNYDGSTIPPLIKSVVQNEEGLTTNEGLKMLVTISCILVGVLLLFVLLLVVRRRRREQRLKRLRDAKSLAEMLMSKNTRTSDTLSKQQQTLRMHIDIPRAQLLIEERDTMETIDDRSTVLLTDADFGEAAKQKSLTVTHTVHYQSVSQATGPLVDVSDARPGTNPTTRRNAKAGPTARNRYASQWTLNRPHPTISAHTLTTDWRLPTPRAAGSVDKESDSYSVSPSQDTDRARSSMVSTESASSTYEELARAYEHAKMEEQLRHAKFTITECFISDTSSEQLTAGTNEYTDSLTSSTPSESGICRFTASPPKPQDGGRVMNMAVPKAHRPGDLIHLPPYLRMDFLLNRGGPGTSRDLSLGQACLEPQKSRTLKRPTVLEPIPMEAASSASSTREGQSWQPGAVATLPQREGAELGQAAKMSSSQESLLDSRGHLKGNNPYAKSYTLV

SEQ ID NO: 94473 - protein, 340 aa, Homo sapiens
MNYPSTSPGSLVKHICAICGDRSSGKHYGVYSCEGCKGFFKRTIRKDLIYTCRDNKDCLIDKRQRNRCQYCRYQKCLVMGMKREAVQEERQRSRERAESEAECATSGHEDMPVERILEAELAVEPKTESYGDMNMENSTNDPVTNICHAADKQLFTLVEWAKRIPHFSDLTLEDQVILLRAGWNELLIASFSHRSVSVQDGILLATGLHVHRSSAHSAGVGSIFDRVLTELVSKMKDMQMDKSELGCLRAIVLFNPDAKGLSNPSEVETLREKVYATLEAYTKQKYPEQPGRFAKLLLRLPALRSIGLKCLEHLFFFKLIGDTPIDTFLMEMLETPLQIT

SEQ ID NO: 94474 - protein, 102 aa, Homo sapiens
MENEIFTPLLEQFMTSPLVTWVKTFGPLAAGNGTNLDEYVALVDGVFLNQVMLQMTESHSVAQATGVQWPDLGSLQPPPPGFKQFSCLSILSCWDYSACHHS

SEQ ID NO: 94475 - protein, 132 aa, Homo sapiens
YKFPKNVNWEYKTDTDLYEFAKCKAYPTSVCFSPDGKKIATIGSDRKVRIFRFVTGKLMRVFDESLSMFTELQQMRQQLPDMEFGRRMAVERELEKVDAVRLINIVFDETGHFVLYGTMLGIKVINVETNRG

SEQ ID NO: 94476 - protein, 88 aa, Homo sapiens
AASAFKGATGPSQAVPPVEHHLRNHVQWLQVAGSGPTDSLQGIILTGWQRYDHYSVLCELLPAGVPSLAACLQLLLRVSLAHGPIRHP

SEQ ID NO: 94477 - protein, 185 aa, Homo sapiens
MATPASAPDTRALVADFVGYKLRQKGYVCGAGPGEGPAADPLHQAMRAAGDEFETRFRRTFSDLAAQLHVTPGSAQQRFTQVSDELFQGGPNWGRLVAFFVFGAALCAESVNKEMEPLVGQVQEWMVAYLETQLADWIHSSGGWVWSTLFTLPSTTGHISLLAFPGTFSQEELQGPWPGYQNALL

SEQ ID NO: 94478 - protein, 169 aa, Homo sapiens
  MOD_RES (1)..(1): Any amino acid
XIAQEKERNIFDQRAIENELLARNIHVIRRTFEDISEKGSLDQDRRLFVDGQEIAVVYFRDGYMPRQYSLQNWEARLLLERSHAAKCPDIATQLAGTKKVQQELSRPGMLEMLLPGQPEAVARLRATFAGLYSLDVGEEGDQAIAEALAAPSRFVLKPQREGGGRKRHS

SEQ ID NO: 94479 - protein, 55 aa, Homo sapiens
VIGGGHAGTEAATAAARCGSRTLLLTHRVDTIGEERGCCGTWRRTQAASFPPPPV

SEQ ID NO: 94480 - protein, 79 aa, Homo sapiens
MNRLYIGSSKTFTSSEKSLTPLQWCRHVLDNPTPEMEAARRSLCFRLEQGYTSRGSPLSPQSSIDSELSTSELEDDSIS

SEQ ID NO: 94481 - protein, 264 aa, Homo sapiens
MLVAGLLLWASLLTGAWPSFPTQDHLPATPRVRLSFKELKATGTAHFFNFLLNTTDYRILLKDEDHDRMYVGSKDYVLSLDLHDINREPLIIHWAASPQRIEECVLSGKDVNGECGNFVRLIQPWNRTHLYVCGTGAYNPMCTYVNRGRRAQDYIFYLEPERLESGKGKCPYDPKLDTASALINEELYAGVYIDFMGTDAAIFRTLGKQTAMRTDQYNSRWLNDPSFIHAELIPDSAERNDDKLYFFFRERSAEAPQSPAVYAR

SEQ ID NO: 94482 - protein, 371 aa, Homo sapiens
MSDSKEPRVQQLGLLEEDPTTSGIRLFPRDFQFQQIHGHKSSTVSKVPSSLSQEQSEQDAIYQNLTQLKAAVGELSEKSKLQEIYQELTQLKAAVGELPEKSKLQEIYQELTRLKAAVGELPEKSKLQEIYQELTRLKAAVGELPEKSKLQEIYQELTRLKAAVGELPEKSKLQEIYQELTELKAAVGELPEKSKLQEIYQELTQLKAAVGELPDQSKQQQIYQELTDLKTAFERLCRHCPKDWTFFQGNCYFMSNSQRNWHDSVTACQEVRAQLVVIKTAEEQNFLQLQTSRSNRFSWMGLSDLNQEGTWQWVDGSPLSPSFQRYWNSGEPNNSGNEDCAEFSGSGWNDNRCDVDNYWICKKPAACFRDE

SEQ ID NO: 94483 - protein, 716 aa, Homo sapiens
MVAQAWRTSMRKQREEACFRFLIVLGCLILAVLTTFKEYETVSGDWLLLLETFAIFIFGAEFALRIWAAGCCCRYKGWRGRLKFARKPLCMLDIFVLIASVPVVAVGNQGNVLATSLRSLRFLQILRMLRMDRRGGTWKLLGSAICAHSKELITAWYIGFLTLILSSFLVYLVEKDVPEVDAQGEEMKEEFETYADALWWGLITLATIGYGDKTPKTWEGRLIAATFSLIGVSFFALPAGILGSGLALKVQEQHRQKHFEKRRKPAAELIQAAWRYYATNPNRIDLVATWRFYESVVSFPFFRKEQLEAASSQKLGLLDRVRLSNPRGSNTKGKLFTPLNVDAIEESPSKEPKPVGLNNKERFRTAFRMKAYAFWQSSEDAGTGDPMAEDRGYGNDFPIEDMIPTLKAAIRAVRILQFRLYKKKFKETLRPYDVKDVIEQYSAGHLDMLSRIKYLQTRIDMIFTPGPPSTPKHKKSQKGSAFTFPSQQSPRNEPYVARPSTSEIEDQSMMGKFVKVERQVQDMGKKLDFLVDMHMQHMERLQVQVTEYYPTKGTSSPAEAEKKEDNRYSDLKTIICNYSETGPPEPPYSFHQVTIDKVSPYGFFAHDPVNLPRGGPSSGKVQATPPSSATTYVERPTVLPILTLLDSRVSCHSQADLQGPYSDRISPRQRRSITRDSDTPLSLMSVNHEELERSPSGFSISQDRDDYVFGPNGGSS

SEQ ID NO: 94484 - protein, 64 aa, Homo sapiens
MLLSLKPSEAPELDEDEGFGDWSQRPEQRQQHEGAQGALDSGEPPQCRSPEGEQEDRPGLHAYE

SEQ ID NO: 94485 - protein, 221 aa, Homo sapiens
MADGSSDAAREPRPAPAPIRRRSSNYRAYATEPHAKKKSKISASRKLQLKTLLLQIAKQELEREAEERRGEKGRALSTRCQPLELAGLGFAELQDLCRQLHARVDKVDEERYDIEAKVTKNITEVGRMGSSGTFGIADLTQKIFDLRGKFKRPTLRRVRISADAMMQALLGARAKESLDLRAHLKQVKKEDTEKENREVGDWRKNIDALSGMEGRKKKFES

SEQ ID NO: 94486 - protein, 137 aa, Homo sapiens
MAPWPPKGLVPAMLWGLSLFLNLPGPIWLQPSPPPQSSPPPQPHPCHTCRGLVDSFNKGLERTIRDNFGGGNTAWEEENLSKYKDSETRLVEVLEGVCSKSDFECHRLLELSEELVESWWFHNRRPRTSSSGCAQIP

SEQ ID NO: 94487 - protein, 107 aa, Homo sapiens
MARRGPGWRPLLLLVLLAGAAQGGLYFRRGQTCYRPLRGDGLAPLGRRWAPAGRQPWGDGRPIARARRALCLLGALRRQQALEGQIQPLRFGGRSFSSTSRHIPPAS

SEQ ID NO: 94488 - protein, 213 aa, Homo sapiens
MPLPVALQTRLAKRGILKHLEPEPEEEIIAEDYDDDPVDYEATRLEGLPPSWYKVFDPSCGLPYYWNADTDLVSWLSPHDPNSVVTKSAKKLRSSNADAEEKLDRSHDKSDRGHDKSDRSHEKLDRGHDKSDRGHDKSDRDRERGYDKVDRERERDRERDRDRGYDKADREEGKERRHHRREELAPYPKSKKAVSRKDEELDPMDPSSYSDAP

SEQ ID NO: 94489 - protein, 10 aa, Homo sapiens
MERPYTFKDF

SEQ ID NO: 94490 - protein, 93 aa, Homo sapiens
MAGASLGARFYRQIKRHPGIIPMIGLICLGMGSAALYLLRLALRSPDVCWDRKNNPEPWNRLSPNDQYKVPLDGSRVAPHPLISWSWHPQLPY

SEQ ID NO: 94491 - protein, 653 aa, Homo sapiens
MSSTVNNGAASMQSTPDAANGFPQPSSSSGTWPRAEEELRAAEPGLVKRAHREILDHERKRRVELKCMELQEMMEEQGYSEEEIRQKVGTFRQMLMEKEGVLTREDRPGGHIVAETPRLTEGAEPGLEYAPFDDDDGPVDCDCPASCYRGHRGYRTKHWSSSSASPPPKKKKKKKGGHRRSRKKRRLESECSCGSSSPLRKKKKSVKKHRRDRSDSGSRRKRRHRSRSSKCKRKEKNKEKKRPHTESPGRRSHRHSSGSSHSPSLSSHYSDSRSPSRLSPKHRDEGRKTGSQRSSGSRSPSPSGGSGWGSPQRNGGSGQRSGAHGGRPGSAHSPPDKPSSPSPRVRDKAAAAAPTPPARGKESPSPRSAPSSQGRGGRAAGGAGRRRRRRRRRRRSRSSASAPRRRGRRRPRPAPPRGSSRSLSRARSSSDSGSGRGAPGPGPEPGSERGHGGHGKRAKERPPRARPASTSPSPGAHGRRGGPEGKSSSRSPGPHPRSWSSSRSPSKSRSRSAEKRPHSPSRSPSPKKPLSRDKDGEGRARHSEAEATRARRRSRSYSPIRKRRRDSPSFMEPRRITSARKRPIPYYRPSPSSSSSCLSSDYSTRSHSRSPSPGHSHGSYSSRSHGTRSRTRSPSRTPSPSYHSRSSSESGGF

SEQ ID NO: 94492 - protein, 85 aa, Homo sapiens
MSASVVSVISRFLEEYLSSTPQRLKLLDAYLLYILLTGALQFVCLRIQINPQNKADFQGISPERAFADFLFASTILHLVVMNFVG

SEQ ID NO: 94493 - protein, 257 aa, Homo sapiens
  MOD_RES (1)..(1): Any amino acid
XKAKNVNKTAEKVRIIKYLLGELKALVAEQEDSEIQRLITEMEACISVLPTVSGNTDIQVEIALAMQPLRSENAQLRRQLRILNQQLREQQKTQKPSGAVDCNLELFSLQSLNMSLQNQLEESLKSQELLQSKNEELLKVIENQKDENKKFSSIFKDKDQTILENKQQYDIEITRIKIELEEALVNVKSSQFKLETAEKENQILGITLRQRDAEVTRLRELTRLFKTVDLNVLQSLTQKPNTVHELRKSRTALNKEE

SEQ ID NO: 94494 - protein, 78 aa, Homo sapiens
MSFRFGQHLIKPSVVFLKTELSFALVNRKPVVPGHVLVCPLRPVERFHDLRPDEVADLFQTTQRVGTVVEKHFHGTSL

SEQ ID NO: 94495 - protein, 219 aa, Homo sapiens
MADSAQAQKLVYLVTGGCGFLGEHVVRMLLQREPRLGELRVFDQHLGPWLEELKTGSCWGSLWWRGCGRFPNPSQAGIPTPAVEQMMLVSVHMDGSRPVRVTAIQGDVTQAHEVAAAVAGAHVVIHTAGLVDVFGRASPKTIHEVNVQGTRNVIEACVQTGTRFLVYTSSMEVVGPNTKGHPFYRGNEDTPYEAVHRHPYPCSKALAEWLVLEANGRKV

SEQ ID NO: 94496 - protein, 134 aa, Homo sapiens
MVRHPDSHQLFIGNLPHEVDKSELKDFFQSYGNVVELRINSGGKLPNFGFVVFDDSEPVQKVLSNRPIMFRGEVRLNVEEKKTRAAREGDRRDNRLRGPGGPRGGLGGGMRGPPRGGMVQKPGFGVGRGLAPRQ

SEQ ID NO: 94497 - protein, 14 aa, Homo sapiens
MALTQGPLKFMDVA

SEQ ID NO: 94498 - protein, 535 aa, Homo sapiens
SMHKFLTIPRLEELYNTKQGPTNPMLFHLVRDVKQGNLPPGYKITLIDIGLVIEYLMGGTYRCTYTRKRFRLIYNSLGGNNRRSGRNTSSSTPQLRKSHESFGNRADKKEKMRHNHFIKTAQPYRPKIDTVMEEGKKKRTKDEIVDIDDPETKRFPYPLNELLIWACLMKRQVMARFLWQHGEESMAKALVACKIYRSMAYEAKQSDLVDDTSEELKQYSNDFGQLAVELLEQSFRQDETMAMKLLTYELKNWSNSTCLKLAVSSRLRPFVAHTCTQMLLSDMWMGRLNMRKNSWYKVILSILVPPAILLLEYKTKAEMSHIPQSQDAHQMTMDDSENNFQNITEEIPMEVFKEVRILDSNEGKNEMEIQMKSKKLPITRKFYAFYHAPIVKFWFNTLAYLGFLMLYTFVVLVQMEQLPSVQEWIVIAYIFTYAIEKVREIFMSEAGKVNQKIKVWFSDYFNISDTIAIISFFIGFGLRFGAKWNFANAYDNHVFVAGRLIYCLNIIFWYVRLLDFLAVNQQAGPYVMMIGKMVS

SEQ ID NO: 94499 - protein, 635 aa, Homo sapiens
MAQKGQLSDDEKFLFVDKNFINSPVAQADWAAKRLVWVPSEKQGFEAASIKEEKGDEVVVELVENGKKVTVGKDDIQKMNPPKFSKVEDMAELTCLNEASVLHNLRERYFSGLIYTYSGLFCVVVNPYKHLPIYSEKIVDMYKGKKRHEMPPHIYAIADTAYRSMLQDREDQSILCTGESGAGKTENTKKVIQYLAVVASSHKGKKDTSITGELEKQLLQANPILEAFGNAKTVKNDNSSRFGKFIRINFDVTGYIVGANIETYLLEKSRAIRQARDERTFHIFYYMIAGAKEKMRSDLLLEGFNNYTFLSNGFVPIPAAQDDEMFQETVEAMAIMGFSEEEQLSILKVVSSVLQLGNIVFKKERNTDQASMPDNTAAQKVCHLMGINVTDFTRSILTPRIKVGRDVVQKAQTKEQADFAVEALAKATYERLFRWILTRVNKALDKTHRQGASFLGILDIAGFEIFEVNSFEQLCINYTNEKLQQLFNHTMFILEQEEYQREGIEWNFIDFGLDLQPCIELIERPNNPPGVLALLDEECWFPKATDKSFVEKLCTEQGSHPKFQKPKQLKDKTEFSIIHYAGKVDYNASAWLTKNMDPLNDNVTSLLNASSDKFVADLWKDGALRISPIDNTWKP

SEQ ID NO: 94500 - protein, 307 aa, Homo sapiens [sequence omitted]

SEQ ID NO: 94501 - protein, 857 aa, Homo sapiens
DHYQLQVQELTDLLKSKNEEDDPIMVAVNAKVEEWKLILSSKDDEIIEYQQMLHNLREKLKNAQLDADKSNVMALQQGIQERDSQIKMLTEQVEQYTKEMEKNTCIIEDLKNELQRNKGASTLSQQTHMKIQSTLDILKEKTKEAERTAELAEADAREKDKELVEALKRLKDYESGVYGLEDAVVEIKNCKNQIKIRDREIEILTKEINKLELKISDFLDENEALRERVGLEPKTMIDLTEFRNSKHLKQQQYRAENQILLKEIESLEEERLDLKKKIRQMAQERGKRSATSGLTTEDLNLTENISQGDRISERKLDLLSLKNMSEAQSKNEIIAQEFLIKEAECRNADIELEHHRSQAEQNEFLSRELIEKERDLERSRTVIAKFQNKLKELVEENKQLEEGMKEILQAIKEMQKDPDVKGGETSLIIPSLERLVNAIESKNAEGIFDASLHLKAQVDQLTGRNEELRQELRESRKEAINYSQQLAKANLKIDHLEKETSLLRQSEGSNVVFKGIDLPDGIAPSSASIINSQNEYLIHLLQELENKEKKLKNLEDSLEDYNRKFAVIRHQQSLLYKEYLSEKETWKTESKTIKEEKRKLEDQVQQDAIKVKEYNNLLNALQMDSDEMKKILAENSRKITVLQVNEKSLIRQYTTLVELERQLRKENEKQKNELLSMEAEVCEKIGCLQRFKEMAIFKIAALQKVVDNSVSLSELELANKQYNELTAKYRDILQKDNMLVQRTSNLEHLECENISLKEQVESINKELEITKEKLHTIEQAWEQETKLGNESSMDKAKKSITNSDIVSISKKITMLEMKELNERQRAEHCQKMYEHLRTSLKQMEERNFELETKFAEV

SEQ ID NO: 94502 - protein, 51 aa, Homo sapiens
MASGLGSPSPCSAGSEEEDMDALLNNSLPPPHPENEEDPEEDLSETETPKL

SEQ ID NO: 94503 - protein, 264 aa, Homo sapiens
  MOD_RES (1)..(1): Any amino acid
XSLLLQVRGSGGARLSTKDPLPTIASREEIEATKNHVLETFYPISPIIDLHECNIYDVKNDTGFQEGYPYPYPHTLYLLDKANLRPHRLQPDQLRAKMILFAFGSALAQARLLYGNDAKVLEQPVVVQSVGTDGRVFHFLVFQLNTTDLDCNEGVKNLAWVDSDQLLYQHFWCLPVIKKRVVVTGPCFSKSQMSTSFVLTPSFNAGEEVMQRNLRASASLPPSTGSPASELVKEQEHAAGRVLRRVMLDSETPREELPAADFWK

SEQ ID NO: 94504 - protein, 200 aa, Homo sapiens
  MOD_RES (1)..(1): Any amino acid
XDQDGPVTVNTSDFLVLDAQNYPWLTNHTVQLQLRSLAHNLSVVATNDVGVTSASLPAPGLLATRVEVPLLGIVVAAGLALGTLVGFSTLVACLVCRKEKKTKGPSRHPSLISSDSNNLKLNNVRLPRENMSLPSNLQLNDLTPDSRVKPADRQMAQNNSRPELLDPEPGGLLTSQGFIRLPVLGYIYRVSSVSSDEIWL

SEQ ID NO: 94505 - protein, 78 aa, Homo sapiens
MSSEQKSQHCKPEEGVEAQEEALGLVGAQAPTTEEQEAAVSSSSPLVPGTLEEVPAAESAGPPQSPQGASALPTTISF

SEQ ID NO: 94506 - protein, 2270 aa, Homo sapiens
MPVTEKDLAEDAPWKKIQQNTFTRWCNEHLKCVNKRIGNLQTDLSDGLRLIALLEVLSQKRMYRKYHQRPTFRQMQLENVSVALEFLDRESIKLVSIDSKAIVDGNLKLILGLVWTLILHYSISMPVWEDEGDDDAKKQTPKQRLLGWIQNKIPYLPITNFNQNWQDGKALGALVDSCAPGLCPDWESWDPQKPVDNAREAMQQADDWLGVPQVITPEEIIHPDVDEHSVMTYLSQFPKAKLKPGAPLKPKLNPKKARAYGRGIEPTGNMVKQPAKFTVDTISAGQGDVMVFVEDPEGNKEEAQVTPDSDKNKTYSVEYLPKVTGLHKVTVLFAGQHISKSPFEVSVDKAQGDASKVTAKGPGLEAVGNIANKPTYFDIYTAGAGVGDIGVEVEDPQGKNTVELLVEDKGNQVYRCVYKPMQPGPHVVKIFFAGDTIPKSPFVVQVGEACNPNACRASGRGLQPKGVRIRETTDFKVDTKAAGSGELGVTMKGPKGLEELVKQKDFLDGVYAFEYYPSTPGRYSIAITWGGHHIPKSPFEVQVGPEAGMQKVRAWGPGLHGGIVGRSADFVVESIGSEVGSLGFAIEGPSQAKIEYNDQNDGSCDVKYWPKEPGEYAVHIMCDDEDIKDSPYMAFIHPATGGYNPDLVRAYGPGLEKSGCIVNNLAEFTVDPKDAGKAPLKIFAQDGEGQRIDIQMKNRMDGTYACSYTPVKAIKHTIAVVWGGVNIPHSPYRVNIGQGSHPQKVKVFGPGVERSGLKANEPTHFTVDCTEAGEGDVSVGIKCDARVLSEDEEDVDFDIIHNANDTFTVKYVPPAAGRYTIKVLFASQEIPASPFRVKVDPSHDASKVKAEGPGLSKAGVENGKPTHFTVYTKGAGKAPLNVQFNSPLPGDAVKDLDIIDNYDYSHTVKYTPTQQGNMQVLVTYGGDPIPKSPFTVGVAAPLDLSKIKLNGLENRVEVGKDQEFTVDTRGAGGQGKLDVTILSPSRKVVPCLVTPVTGRENSTAKFIPREEGLYAVDVTYDGHPVPGSPYTVEASLPPDPSKVKAHGPGLEGGLVGKPAEFTIDTKGAGTGGLGLTVEGPCEAKIECSDNGDGTCSVSYLPTKPGEYFVNILFEEVHIPGSPFKADIEMPFDPSKVVASGPGLEHGKVGEAGLLSVDCSEAGPGALGLEAVSDSGTKAEVSIQNNKDGTYAVTYVPLTAGMYTLTMKYGGELVPHFPARVKVEPAVDTSRIKVFGPGIEGKDVFREATTDFTVDSRPLTQVGGDHIKAHIANPSGASTECFVTDNADGTYQVEYTPFEKGLHVVEVTYDDVPIPNSPFKVAVTEGCQPSRVQAQGPGLKEAFTNKPNVFTVVTRGAGIGGLGITVEGPSESKINCRDNKDGSCSAEYIPFAPGDYDVNITYGGAHIPGSPFRVPVKDVVDPSKVKIAGPGLGSGVRARVLQSFTVDSSKAGLAPLEVRVLGPRADDTDSQSWRSPLKALSEFFKGDPKGDFNKTGLVEPVNVVDNGDGTHTVTYTPSQEGPYMVSVKYADEEIPRSPFKVKVLPTYDASKVTASGPGLSSYGVPASLPVDFAIDARDAGEGLLAVQITDQEGKPKRAIVHDNKDGTYAVTYIPDKTGRYMIGVTYGGDDIPLSPYRIRATQTGDASKCLATGPGIASTVKTGEEVGFVVDAKTAGKGKVTCTVLTPDGTEAEADVIENEDGTYDIFYTAAKPGTYVIYVRFGGVDIPNSPFTVMVTEEAYVPVSDMNGLGFKPFDLVIPFAVRKGEITGEVHMPSGKTATPEIVDNKDGTVTVRYAPTEVGLHEMHIKYMGSHIPESPLQFYVNYPNSGSVSAYGPGLVYGVANKTATFTIVTEDAGEGGLDLAIEGPSKAEISCIDNKDGTCTVTYLPTLPGDYSILVKYNDKHIPGSPFTAKITDDSRRCSQVKLGSAADFLLDISETDLSSLTASIKAPSGRDEPCLLKRLPNNHIGISFIPREVGEHLVSIKKNGNHVANSPVSIMVVQSEIGDARRAKVYGRGLSEGRTFEMSDFIVDTRDAGYGGISLAVEGPSKVDIQTEDLEDGTCKVSYFPTVPGVYIVSTKFADEHVPGSPFTVKISGEGRVKESITRTSRAPSVATVGSICDLNLKIPEINSSDMSAHVTSPSGRVTEAEIVPMGKNSHCVRFVPQEMGVHTVSVKYRGQHVTGSPFQFTVGPLGEGGAHKVRAGGPGLERGEAGVPAEFSIWTREAGAGGLSIAVEGPSKAEITFDDHKNGSCGVSYIAQEPGIGIKS

SEQ ID NO: 94507 - protein, 146 aa, Homo sapiens
MRETLEALSSLGFSVGQPEMAPQSEPREGSHNAQEQMSSSREERALGVCSGHEAPTPEEGAHTEQAEAPCRGQACSAQKAQPVGTCPVSRGPCHETAWGEQGDLGCCPKVWPPRDTCFLPAVSASAQHTQLGPPRTETQRTLAGNR

SEQ ID NO: 94508 - protein, 3820 aa, Homo sapiens
MTTMLQKSDSNASFLRAARAGNLDKVVEYLKGGIDINTCNQNGLNALHLAAKEGHVGLVQELLGRGSSVDSATKKGNTALHIASLAGQAEVVKVLVKEGANINAQSQNGFTPLYMAAQENHIDVVKYLLENGANQSTATEDGFTPLAVALQQGHNQAVAILLENDTKGKVRLPALHIAARKDDTKSAALLLQNDHNADVQSKMMVNRTTESGFTPLHIAAHYGNVNVATLLLNRGAAVDFTARNGITPLHVASKRGNTNMVKLLLDRGGQIDAKTRDGLTPLHCAARSGHDQVVELLLERGAPLLARTKNGLSPLHMAAQGDHVECVKHLLQHKAPVDDVTLDYLTALHVAAHCGHYRVTKLLLDKRANPNARALNGFTPLHIACKKNRIKVMELLVKYGASIQAITESGLTPIHVAAFMGHLNIVLLLLQNGASPDVTNIRGETALHMAARAGQVEVVRCLLRNGALVDARAREEQTPLHIASRLGKTEIVQLLLQHMAHPDAATTNGYTPLHISAREGQVDVASVLLEAGAAHSLATKKGFTPLHVAAKYGSLDVAKLLLQRRAAADSAGKNGLTPLHVAAHYDNQKVALLLLEKGASPHATAKNGYTPLHIAAKKNQMQIASTLLNYGAETNIVTKQGVTPLHLASQEGHTDMVTLLLDKGANIHMSTKSGLTSLHLAAQEDKVNVADILTKHGADQDAHTKLGYTPLIVACHYGNVKMVNFLLKQGANVNAKTKNGYTPLHQAAQQGHTHIINVLLQHGAKPNATTANGNTALAIAKRLGYISVVDTLKVVTEEVTTTTTTITEKHKLNVPETMTEVLDVSDEEGDDTMTGDGGEYLRPEDLKELGDDSLPSSQFLDGMNYLRYSLEGGRSDSLRSFSSDRSHTLSHASYLRDSAVMDDSVVIPSHQVSTLAKEAERNSYRLSWGTENLDNVALSSSPIHSGFLVSFMVDARGGAMRGCRHNGLRIIIPPRKCTAPTRVTCRLVKRHRLATMPPMVEGEGLASRLIEVGPSGAQFLGPVIVEIPHFAALRGKERELVVLRSENGDSWKEHFCDYTEDELNEILNGMDEVLDSPEDLEKKRICRIITRDFPQYFAVVSRIKQDSNLIGPEGGVLSSTVVPQVQAVFPEGALTKRIRVGLQAQPMHSELVKKILGNKATFSPIVTLEPRRRKFHKPITMTIPVPKASSDVMLNGFGGDAPTLRLLCSITGGTTPAQWEDITGTTPLTFVNECVSFTTNVSARFWLIDCRQIQESVTFASQVYREIICVPYMAKFVVFAKSHDPIEARLRCFCMTDDKVDKTLEQQENFAEVARSRDVEVLEGKPIYVDCFGNLVPLTKSGQHHIFSFFAFKENRLPLFVKVRDTTQEPCGRLSFMKEPKSTRGLVHQAICNLNITLPIYTKESESDQEQEEEIDMTSEKNDETESTETSVLKSHLVNEVPVLASPDLLSEVSEMKQDLIKMTAILTTDVSDKAGSIKVKELVKAAEEEPGEPFEIVERVKEDLEKVNEILRSGTCTRDESSVQSSRSERGLVEEEWVIVSDEEIEEARQKAPLEITEYPCVEVRIDKEIKGKVEKDSTGLVNYLTDDLNTCVPLPKEQLQTVQDKAGKKCEALAVGRSSEKEGKDIPPDETQSTQKQHKPSLGIKKPVRRKLKEKQKQKEEGLQASAEKAELKKGSSEESLGEDPGLAPEPLPTVKATSPLIEETPIGSIKDKVKALQKRVEDEQKGRSKLPIRVKGKEDVPKKTTHRPHPAASPSLKSERHAPGSPSPKTERHSTLSSSAKTERHPPVSPSSKTEKHSPVSPSAKTERHSPASSSSKTEKHSPVSPSTKTERHSPVSSTKTERHPPVSPSGKTDKRPPVSPSGRTEKHPPVSPGRTEKRLPVSPSGRTDKHQPVSTAGKTEKHLPVSPSGKTEKQPPVSPTSKTERIEETMSVRELMKAFQSGQDPSKHKTGLFEHKSAKQKQPQEKGKVRVEKEKGPILTQREAQKTENQTIKRGQRLPVTGTAESKRGVRVSSIGVKKEDAAGGKEKVLSHKIPEPVQSVPEEESHRESEVPKEKMADEQGDMDLQISPDRKTSTDFSEVIKQELEDNDKYQQFRLSEETEKAQLHLDQVLTSPFNTTFPLDYMKDEFLPALSLQSGALDGSSESLKNEGVAGSPCGSLMEGTPQISSEESYKHEGLAETPETSPESLSFSPKKSEEQTGETKESTKTETTTEIRSEKEHPTTKDITGGSEERGATVTEDSETSTESFQKEATLGSPKDTSPKRQDDCTGSCSVALAKETPTGLTEEAACDEGQRTFGSSAHKTQTDSEVQESTATSDETKALPLPEASVKTDTGTESKPQGVIRSPQGLELALPSRDSEVLSAVADDSLAVSHKDSLEASPVLEDNSSHKTPDSLEPSPLKESPCRDSLESSPVEPKMKAGIFPSHFPLPAAVAKTELLTEVASVRSRLLRDPDGSAEDDSLEQTSLMESSGKSPLSPDTPSSEEVSYEVTPKTTDVSTPKPAVIHECAEEDDSENGEKKRFTPEEEMFKMVTKIKMFDELEQEAKQKRDYKKEPKQEESSSSSDPDADCSVDVDEPKHTGSGEDESGVPVLVTSESRKVSSSSESEPELAQLKKGADSGLLPEPVIRVQPPSPLPSSMDSNSSPEEVQFQPVVSKQYTFKMNEDTQEEPGKSEEEKDSESHLAEDRHAVSTEAEDRSYDKLNRDTDQPKICDGHGCEAMSPSSSAAPVSSGLQSPTGDDVDEQPVIYKESLALQGTHEKDTEGEELDVSRAESPQADCPSESFSSSSSLPHCLVSEGKELDEDISATSSIQKTEVTKTDETFENLPKDCPSQDSSITTQTDRFSMDVPVSDLAENDEIYDPQITSPYENVPSQSFFSSEESKTQTDANHTTSFHSSEVYSVTITSPVEDVVVASSSSGTVLSKESNFEGQDIKMESQQESTLWEMQSDSVSSSFEPTMSATTTVVGEQISKVIITKTDVDSDSWSEIREDDEAFEARVKEEEQKIFGLMVDRQSQGTTPDTTPARTPTEEGTPTSEQNPFLFQEGKLFEMTRSGAIDMTKRSYADESFHFFQIGQESREETLSEDVKEGATGADPLPLETSAESLALSESKETVDDEADLLPDDVSEEVEEIPASDAQLNSQMGISASTETPTKEAVSVGTKDLPTVQTGDIPPLSGVKQISCPDSSEPAVQVQLDFSTLTRSVYSDRGDDSPDSSPEEQKSVIEIPTAPMENVPFTESKSKIPVRTMPTSTPAPPSAEYESSVSEDFLSSVDEENKADEAKPKSKLPVKVPLQRVEQQLSDLDTSVQKTVAPQGQDMASIAPDNRSKSESDASSLDSKTKCPVKTRSYTETETESRERAEELELESEEGATRPKILTSRLPVKSRSTTSSCRGGTSPTKESKEHFFDLYRNSIEFFEEISDEASKLVDRLTQSEREQEIVSDDESSSALEVSVIENLPPVETEHSVPEDIFDTRPIWDESIETLIERIPDENGHDHAEDPQDEQERIEERLAYIADHLGFSWTELARELDFTEEQIHQIRIENPNSLQDQSHALLKYWLERDGKHATDTNLVECLTKINRMDIVHLMETNTEPLQERISHSYAEIEQTITLDHSEGFSVLQEELCTAQHKQKEEQAVSKESETCDHPPIVSEEDISVGYSTFQDGVPKTEGDSSATALFPQTHKEQVQQDFSGKMQDLPEESSLEYQQEYFVTTPGTETSETQKAMIVPSSPSKTPEEVSTPAEEEKLYLQTPTSSERGGSPIIQEPEEPSEHREESSPRKTSLVIVESADNQPETCERLDEDAAFEKDNNE

SEQ ID NO: 94509 - protein, 71 aa, Homo sapiens
  MOD_RES (1)..(1): Any amino acid
XAANNFYVCKQKHCKSGFSKRKVLKDSVCLVTGILSRIFCSFILHLSFSVTLLQARKVSTMTNREDFFLIL

SEQ ID NO: 94510 - protein, 851 aa, Homo sapiens
MIQVLQIVKELVTPSRQKAATVKEDSDQDVALKLAQERAEIVAKYDRGREGAEIEPWEDADYLVYKVTDRFGFLHEEELPDHNVAVERQKHLEIERTTKWLKMLKGWEKYKNTEKFHRRIYKGIPLQLRGEVWALLLEIPKMKEETRDLYSKLKHRARGCSPDIRQIDLDVNRTFRDHIMFRDRYGVKQQSLFHVLAAYSIYNTEVGYCQGMSQITALLLMYMNEEDAFWALVKLFSGPKHAMHGFFVQGFPKLLRFQEHHEKILNKFLSKLKQHLDSQEIYTSFYTMKWFFQCFLDRTPFTLNLRIWDIYIFEGERVLTAMSYTILKLHKKHLMKLSMEELVEFFQETLAKDFFFEDDFVIEQLQISMTELKRAKLDLPEPGKEDEYPKKPLGQLPPELQSWGVHHLSNGQRSVGRPSPLASGRRESGAPHRRHEHSPHPQSRTGTPERAQPPRRKSVEEESKKLKDEADFQRKLPSGPQDSSRQYNHAAANQNSNATSNIRKEFVPKWNKPSDVSATERTAKYTMEGKGRAAHPALAVTVPGPAEVRVSNVRPKMKALDAEDGKRGSTASQYDNVPGPELDSGASVEEALERAYSQSPRHALYPPSPRKHAEPSSSPSKVSNKFTFKVQPPSHARYPSQLDGEARGLAHPPSYSNPPVYHGNSPKHFPTANSSFASPQFSPGTQLNPSRRPHGSTLSVSASPEKSYSRPSPLVLPSSRIEVLPVDTGAGGYSGNSGSPKNGKLIIPPVDYLPDNRTWSEVSYTYRPETQGQSWTRDASRGNLPKYSAFQLAPFQDHGLPAVSVDSPVRYKASPAAEDASPSGYPYSGPPPPAYHYRNRDGLSIQESVLL

SEQ ID NO: 94511 - protein, 748 aa, Homo sapiens
MVARSTDSLDGPGEGSVQPLPTAGGPSVKGKPGKRLSAPRGPFPRLADCAHFHYENVDFGHIQLLLSPDREGPSLSGENELVFGVQVTCQGRSWPVLRSYDDFRSLDAHLHRCIFDRRFSCLPELPPPPEGARAAQMLVPLLLQYLETLSGLVDSNLNCGPVLTWMELDNHGRRLLLSEEASLNIPAVAAAHVIKRYTAQAPDELSFEVGDIVSVIDMPPTEDRSWWRGKRGFQVGFFPSECVELFTERPGPGLKADADGPPCGIPAPQGISSLTSAVPRPRGKLAGLLRTFMRSRPSRQRLRQRGILRQRVFGCDLGEHLSNSGQDVPQVLRCCSEFIEAHGVVDGIYRLSGVSSNIQRLRHEFDSERIPELSGPAFLQDIHSVSSLCKLYFRELPNPLLTYQLYGKFSEAMSVPGEEERLVRVHDVIQQLPPPHYRTLEYLLRHLARMARHSANTSMHARNLAIVWAPNLLRSMELESVGMGGAAAFREVRVQSVVVEFLLTHVDVLFSDTFTSAGLDPAGRCLLPRPKSLAGSCPSTRLLTLEEAQARTQGRLGTPTEPTTPKAPASPAERRKGERGEKQRKPGGSSWKTFFALGRGPSVPRKKPLPWLGGTRAPPQPSGSRPDTVTLRSAKSEESLSSQASGAGLQRLHRLRRPHSSSDAFPVGPAPAGSCESLSSSSSSESSSSESSSSSSESSAAGLGALSGSPSHRTSAWLDDGDELDFSPPRYPTPSWSLHSEGQTRSYC

SEQ ID NO: 94512 - protein, 219 aa, Homo sapiens [sequence omitted]

SEQ ID NO: 94513 - protein, 367 aa, Homo sapiens
MAALRYAGLDDTDSEDELPPGWEERTTKDGWVYYANHTEEKTQWEHPKTGKRKRVAGDLPYGWEQETDENGQVFFVDHINKRTTYLDPRLAFTVDDNPTKPTTRQRYDGSTTAMEILQGRDFTGKVVVVTGANSGIGFETAKSFALHGAHVILACRNMARASEAVSRILEEWHKAKVEAMTLDLALLRSVQHFAEAFKAKNVPLHVLVCNAATFALPWSLTKDGLETTFQVNHLGHFYLVQLLQDVLCRSAPARVIVVSSESHRFTDINDSLGKLDFSRLSPTKNDYWAMLAYNRSKLCNILFSNELHRRLSPRGVTSNAVHPGNMMYSNIHRSWWVYTLLFTLARPFTKSMEKPAAMLGGYSSIPV

SEQ ID NO: 94514 - protein, 196 aa, Homo sapiens
  MOD_RES (1)..(1): Any amino acid
XKKIRSDHNEEDEKACVLQVVWNGLEELNNAIKYTKNVEVLHLGKVWIPDDLRKRLNIEMHAVVRITPVEVTPKIPRSLKLQPRENLPKDISEEDIKTVFYSWLQQSTTTMLPLVISEEEFIKLETKDGLKEFSLSIVHSWEKEKDKNIFLLSPNLLQKTTIQRSEFLRRILLGAHHSQPPGTPFVSAADVSCCRT

SEQ ID NO: 94515 - protein, 44 aa, Homo sapiens
MLRPALPWLYLGLCSLLVGEAEAPSPVDPLERSRPYAVLRGQNL

SEQ ID NO: 94516 - protein, 63 aa, Homo sapiens
  MOD_RES (1)..(1): Any amino acid
XGYESVLCVKPDVHVYRIPPRATNRGYRAAEWQLDQPSWSGRLRITAKGQMAYIKLEDRTSGG

SEQ ID NO: 94517 - protein, 242 aa, Homo sapiens
MSSTVSYWILNSTRNSIATLQGGRRLYSRYVSNRNKLKWRLFSRVPPTLNSSPCGGFTLCKAYRHTSTEEDDFHLQLSPEQINEVLRAGETTHKILDLESRVPNSVLRFESNQLAANSPVEDRRGVASCLQTNGLMFGIFDGHGGHACAQAVSERLFYYVAVSLMSHQTLEHMEGAMESMKPLLPILHWLKHPGDSIYKDVTSVHLDHLRVYWQELLDLHMEMGLSIEEALMYSFQRLDSDI

SEQ ID NO: 94518 - protein, 154 aa, Homo sapiens
MQQRAGSKTAGPPCQWSRMASEGTNIPSPVVRQIDKQFLICSICLERYKNPKVLPCLHTFCERCLQNYIPAHSLTLSCPVCRQTSILPEKGVAALQNNFFITNLMDVLQRTPGSNAEESSILETVTAVAAGKPLSCPNHDGNVSGWDGRYCPGA

SEQ ID NO: 94519 - protein, 48 aa, Homo sapiens
  MOD_RES (1)..(1): Any amino acid
XLAGIMQRTFAWLLDRVQHLGAPVTLRASYLEIYNEQVSAVEGTQPTP

SEQ ID NO: 94520 - protein, 967 aa, Homo sapiens
  MOD_RES (1)..(1): Any amino acid
XKTPHPVLTPVAANQAKQGSLINSLKPSGPTPASGQLSSGDKASGTAKIETAVTSTPSASGQFSKPFSFSPSGTGFNFGIITPTPSSNFTAAQGATPSTKESSQPDAFSSGGGSKPSYEAIPESSPPSGITSASNTTPGEPAASSSRPVAPSGTALSTTSSKLETPPSKLGELLFPSSLAGETLGSFSGLRVGQADDSTKPTNKASSTSLTSTQPTKTSGVPSGFNFTAPPVLGKHTEPPVTSSATTTSVAPPAATSTSSTAVFGSLPVTSAGSSGVISFGGTSLSAGKTSFSFGSQQTNSTVPPSAPPPTTAATPLPTSFPTLSFGSLLSSATTPSLPMSAGRSTEEATSSALPEKPGDSEVSASAASLLEEQQSAQLPQAPPQTSDSVKKEPVLAQPAVSNSGTAASSTSLVALSAEATPATTGVPDARTEAVPPASSFSVPGQTAVTAAAISSAGPVAVETSSTPIASSTTSIVAPGPSAEAAAFGTVTSGSSVFAQPPAASSSSAFNQLTNNTATAPSATPVFGQVAASTAPSLFGQQTGSTASTAAATPQVSSSGFSSPAFGTTAPGVFGQTTFGQASVFGQSASSAASVFSFSQPGFSSVPAFGQPASSTPTSTSGSVFGAASSTSSSSSFSFGQSSPNTGGGLFGQSNAPAFGQSPGFGQGGSVFGGTSAATTTAATSGFSFCQASGFGSSNTGSVFGQAASTGGIVFGQQSSSSSGSVFGSGNTGRGGGFFSGLGGKPSQDAANKNPFSSASGGFGSTATSNTSNLFGNSGAKTFGGFASSSFGEQKPTGTFSSGGGSVASQGFGFSSPNKTGGFGAAPVFGSPPTFGGSPGFGGVPAFGSAPAFTSPLGSTGGKVFGEGTAAASAGGFGSLAMSLSPTLKGRLLLMRPKAGGGREQAAPGRKSNESRSLGHLCMERALTSPLKVWEQQQHHILRHARESECPHFRITVPTDFWFWDPE

SEQ ID NO: 94521 - protein, 81 aa, Homo sapiens
MTVRPPQPCGTGAAEDPQTTLALNFGSTLMKKKSDPEGPALLFPESELSIRIGRAGLLSGKLFAADTELSQAIWTWGLVVG

SEQ ID NO: 94522 - protein, 97 aa, Homo sapiens
MFLNTLTPKFYVALTGTSSLISGLILIFEWWYFRKYGTSFIEQVSVSHLRPLLGGVDNNSSNNSNSSNGDSDSNRQSVSECKVWRNPLNLFRGAEYN

SEQ ID NO: 94523 - protein, 63 aa, Homo sapiens
  MOD_RES (1)..(1): Any amino acid
XVPSTCCFTFSSKKISLQRLKSYVITTSSFRTKLGKEICADPKEKWVQNYMKHLGRKAHTLKT

SEQ ID NO: 94524 - protein, 1191 aa, Homo sapiens
AQALHRMWIQAVKKLRRWKGRAPGMEELIWEQYTVTLQKDSKRGFGIAVSGGRDNPHFENGETSIVISDVLPGGPADGLLQENDRVVMVNGTPMEDVLHSFAVQQLRKSGKVAAIVVKRPRKVQVAALQASPPLDQDDRAFEVMDEFDGRSFRSGYSERSRLNSHGGRSRSWEDSPERGRPHERARSRERDLSRDRSRGRSLERGLDQDHARTRDRSRGRSLERGLDHDFGPSRDRDRDRSRGRSIDQDYERAYHRAYDPDYERAYSPEYRRGARHDARSRGPRSRSREHPHSRSPSPEPRGRPGPIGVLLMKSRANEEYGLRLGSQIFVKEMTRTGLATKDGNLHEGDIILKINGTVTENMSLTDARKLIEKSRGKLQLVVLRDSQQTLINIPSLNDSDSEIEDISEIESNRSFSPEERRHQYSDYDYHSSSEKLKERPSSREDTPSRLSRMGATPTPFKSTGDIAGTVVPETNKEPRYQEDPPAPQPKAAPRTFLRPSPEDEAIYGPNTKMVRFKKGDSVGLRLAGGNDVGIFVAGIQEGTSAEQEGLQEGDQILKVNTQDFRGLVREDAVLYLLEIPKGEMVTILAQSRADVYRDILACGRGDSFFIRSHFECEKETPQSLAFTRGEVFRVVDTLYDGKLGNWLAVRIGNELEKGLIPNKSRAEQMASVQNAQRDNAGDRADFWRMRGQRSGVKKNLRKSREDLTAVVSVSTKFPAYERVLLREAGFKRPVVLFGPIADIAMEKLANELPDWFQTAKTEPKDAGSEKSTGVVRLNTVRQIIEQDKHALLDVTPKAVDLLNYTQWFPIVIFFNPDSRQGVKTMRQRLNPTSNKSSRKLFDQANKLKKTCAHLFTATINLNSANDSWFGSLKDTIQHQQGEAVWVSEGKMEGMDDDPEDRMSYLTAMGADYLSCDSRLISDFEDTDGEGGAYTDNELDEPAEEPLVSSITRSSEPVQHEESIRKPSPEPRAQMRRAASSDQLRDNSPPPAFKPEPPKAKTQNKEESYDFSKSYEYKSNPSAVAGNETPGASTKGYPPPVAAKPTFGRSILKPSTPIPPQEGEEVGESSEEQDNAPKSVLGKVKIFEKMDHKARLQRMQELQEAQNARIEIAQKHPDIYAVPIKTHKPDPGTPQHTSSRPPEPQKAPSRPYQDTRGSYGSDAEEEEYRQQLSEHSKRGYYGQSARYRDTEL

SEQ ID NO: 94525 - protein, 34 aa, Homo sapiens
MLEQGKEPFTLESQVQIAGNPDGWEWIKAVITAS

SEQ ID NO: 94526 - protein, 652 aa, Homo sapiens
MPNQGEDCYFFFYSTCTKGDSCPFRHCEAAIGNETVCTLWQEGRCFRQVCRFRHMEIDKKRSEIPCYWENQPTGCQKLNCAFHHNRGRYVDGLFLPPSKTVLPTVPESPEEEVKASQLSVQQNKLSVQSNPSPQLRSVMKVESSENVPSPTHPPVVINAADDDEDDDDQFSEEGDETKTPTLQPTPEVHNGLRVTSVRKPAVNIKQGECLNFGIKTLEEIKSKKMKEKSKKQGEGSSGVSSLLLHPEPVPGPEKENVRTVVRTVTLSTKQGEEPLVRLSLTERLGKRKFSAGGDSDPPLKRSLAQRLGKKVEAPETNIDKTPKKAQVSKSLKERLGMSADPDNEDATDKVNKVGEIHVKTLEEILLERASQKRGELQTKLKTEGPSKTDDSTSGARSSSTIRIKTFSEVLAEKKHRQQEAERQKSKKDTTCIKLKIDSEIKKTVVLPPIVASRGQSEEPAGKTKSMQEVHIKTLEEIKLEKALRVQQSSESSTSSPSQHEATPGARRLLRITKRTGMKEEKNLQEGNEVDSQSSIRTEAKEASGETTGVDITKIQVKRCETMREKHMQKQQEREKSVLTPLRGDVASCNTQVAEKPVLTAVPGITRHLTKRLPTKSSQKVEVETSGIGDSLLNVKCAAQTLEKRGKDIFCPL

SEQ ID NO: 94527 - protein, 246 aa, Homo sapiens
MAAKVFESIGKFGLALAVAGGVVNSALYNVDAGHRAVIFDRFRGVQDIVVGEGTHFLIPWVQKPIIFDCRSRPRNVPVITGSKDLQNVNITLRILFRPVASQLPRIFTSIGEDYDERVLPSITTEILKSVVARFDAGELITQRELVSRQVSDDLTERAATFGLILDDVSLTHLTFGKEFTEAVEAKQVAQQEAERARFVVEKAEQQKKAAIISAEGDSKAAELIANSLATAGDGLIELRKLEAAED

SEQ ID NO: 94528 - protein, 245 aa, Homo sapiens
MASPGCLLCVLGLLLCGAASLELSRPHGDTAKKPIIGILMQKCRNKVMKNYGRYYIAASYVKYLESAGARVVPVRLDLTEKDYEILFKSINGILFPGGSVDLRRSDYAKVAKIFYNLSIQSFDDGDYFPVWGTCLGFEELSLLISGECLLTATDTVDVAMPLNFTGGQLHSRMFQNFPTELLLSLAVEPLTANFHKWSLSVKMARLSLFQQWKDISIQYMVSSGIQRKHLMSGRIWMAFPMHLML

SEQ ID NO: 94529 - protein, 571 aa, Homo sapiens
MVSNHYFLLCVNLPLREIHTPGPSPSCLGDSLAETTLSEDTTDSVGSASPHGSSEKSSSFSLSSTEVHMVRPGYSHRVSLPTSPGILATSPYPETDSAFFEPSHLTSAADEGAVQVSRRTISSNSFSPEVFVLPVDVEKENAHFYVADMIISAMEKMKCNILSQQQTESWSKEVSGLLGSDQPDSEMTFDTNIKQESGSSTSSYSGYEGCAVLQVSPVTETRTYHDVKEICKCDVDEFVILELGDFNDITETCSCSCSSSKSVTYEPDFNSAELLAKELYRVFQKCWILSVVNSQLAGSLSAAGSIVVNEECVRKDFESSMNVVQEIKFKSRIRGTEDWAPPRFQIIFNIHPPLKRDLVVAAQNFFCAGCGTPVEPKSCIPARILMMWDFKKYYVSNFSKQLLDSIWHQPIFNLLSIGQSLYAKAKELDRVKEIQEQLFHIKKLLKTCRFANSALKEFEQVPGHLTDELHLFSLEDLVRIKKGLLAPLLKDILKASLAHVAGCELCQGKGFICEFCQNTTVIFPFQTATCRRCSACRACFHKQCFQSSECPRCARITARRKLLESVASAAT

SEQ ID NO: 94530 - protein, 58 aa, Homo sapiens
  MOD_RES (1)..(1): Any amino acid
XAQELRASLLETQAHADKQSHILWALTGHVQRQRREMVAQQHRLRQIQERLHTAALPA

SEQ ID NO: 94531 - protein, 1197 aa, Homo sapiens [sequence omitted]

SEQ ID NO: 94532 - protein, 753 aa, Homo sapiens
  MOD_RES (1)..(1): Any amino acid
XDALFMDLPTGPRGQQAQPQRAEKNGMLPASYGPGEQNGTGGYQRAFPPRTNPEKHSQRKSNLAQVEHWARAQKGDSRSLPLDQTLPRQGPGQSLSFPENYQTLPKSTRHPSGGSSPPPRNLPSDYKYAQDRASHLKMSSEERRAHRDGTVWQLYEWQQRQQFRHGSPTAPICLGSPEFTDQGRSRSMLEVPRSISVPPSPSDIPPPGPPRVFPPRRPHTPAERVTVKPPDQRRSVDISLGDSPRRARGHAVKNSSHVDRRSMPSMGYMTHTVSAPSLHGKSADDTYLQLKKDLEYLDLKMTGRDLLKDRSLKPVKIAESDTDVKLSIFCEQDRVLQDLEDKIRALKENKDQLESVLEVLHRQMEQYRDQPQHLEKIAYQQKLLQEDLVHIRAELSRESTEMENAWNEYLKLENDVEQLKQTLQEQHRRAFFFQEKSQIQKDLWRIEDVTAGLSANKENFRILVESVKNPERKTVPLFPHPPVPSLSTSESKPPPQPSPPTSPVRTPLEVRLFPQLQTYVPYRPHPPQLRKVTSPLQSPTKAKPKVQEDEAPPRPPLPELYSPEDQPPAVPPLPREATIIRHTSVRGLKRQSDERKRDRELGQCVNGDSRVELRSYVSEPELATLSGDMAQPSLGLVGPESRYQTLPGRGLSGSTSRLQQSSTIAPYVTLRRGLNAESSKATFPRPKSALERLYSGDHQRGKMSAEEQLERMKRHQKALVRERKRTLGQGERTGLPSSRYLSRPLPGDLGSVC

SEQ ID NO: 94533 - protein, 1092 aa, Homo sapiens
MVLAGPLAVSLLLPSLTLLVSHLSSSQDVSSEPSSEQQLCALSKHPTVAFEDLQPWVSNFTYPGARDFSQLALDPSGNQLIVGARNYLFRLSLANVSLLQATEWASSEDTRRSCQSKGKTEEECQNYVRVLIVAGRKVFMCGTNAFSPMCTSRQVGNLSRTIEKINGVARCPYDPRHNSTAVISSQGELYAATVIDFSGRDPAIYRSLGSGPPLRTAQYNSKWLNEPNFVAAYDIGLFAYFFLRENAVEHDCGRTVYSRVARVCKNDVGGRFLLEDTWTTFMKARLNCSRPGEVPFYYNELQSAFHLPEQDLIYGVFTTNVNSIAASAVCAFNLSAISQAFNGPFRYQENPRAAWLPIANPIPNFQCGTLPETGPNENLTERSLQDAQRLFLMSEAVQPVTPEPCVTQDSVRFSHLVVDLVQAKDTLYHVLYIGTESGTILKALSTASRSLHGCYLEELHVLPPGRREPLRSLRILHSARALFVGLRDGVLRVPLERCAAYRSQGACLGARDPYCGWDGKQQRCSTLEDSSNMSLWTQNITACPVRNVTRDGGFGPWSPWQPCEHLDGDNSGSCLCRARSCDSPRPRCGGLDCLGPAIHIANCSRNGAWTPWSSWALCSTSCGIGFQVRQRSCSNPAPRHGGRICVGKSREERFCNENTPCPVPIFWASWGSWSKCSSNCGGGMQSRRRACENGNSCLGCGEFKTCNPEGCPEVRRNTPWTPWLPVNVTQGGARQEQRFRFTCRAPLADPHGLQFGRRRTETRTCPADGSGSCDTDALVEVLLRSGSTSPHTVSGGWAAWGPWSSCSRDCELGFRVRKRTCTNPEPRNGGLPCVGDAAEYQDCNPQACPVRGAWSCWTSWSPCSASCGGGHYQRTRSCTSPAPSPGEDICLGLHTEEALCATQACPEGWSPWSEWSKCTDDGAQSRSRHCEELLPGSSACAGNSSQSRPCPYSEIPVILPASSMEEATDCAGFNLIHLVATGISCFLGSGLLTLAVYLSCQHCQRQSQESTLVHPATPNHLHYKGGGTPKNEKYTPMEFKTLNKNNLIPDDRANFYPLQQTNVYTTTYYPSPLNKHSFRPEASPGQRCFPNS

SEQ ID NO: 94534 - protein, 50 aa, Homo sapiens
MGRLVAVGLLGIALALLGERLLALRNRLKASREVESVDLPHCHLIKGIVW

SEQ ID NO: 94535 - protein, 80 aa, Homo sapiens
MKLERSLKRNFSLRRQQARCPRARSLSTPGAWCGASTMMTSVKASCCSRSCCPKGARRNSGITSSTWPWGTTGSRNTRRP

SEQ ID NO: 94536 - protein, 161 aa, Homo sapiens
MSKLPRELTRDLERSLPAVASLGSSLSHSQSLSSHLLPPPEKRRAISDVRRTFCLFVTFDLLFISLLWIIELNTNTGIRKNLEQEIIQYNFKTSFFDIFVLAFFRFSGLLLGYAVLRLRHWWVIAVTTLVSSAFLIVKVILSELLSKGAFGYLLPIVSFVL

SEQ ID NO: 94537 - protein, 301 aa, Homo sapiens
  MOD_RES (1)..(1): Any amino acid
XPIILAVNKCDKAEADPEKVKKELLAYDVVCEDYGGDVQAVPVSALTGDNLMALAEATVALAEMLELKADPNGPVEGTVIESFTDKGRGLVTTAIIQRGTLRKGSVLVAGKCWAKPRAREVVDWRKYEQEQEKGQEDLKIIEEKRKEHKEAHQKAREKYGHLLWKKRSILRFLERKEQIPLKPKEKRERDSNVLSVIIKGDVDGSVEAILNIIDTYDASHECELELVHFGVGDVSANDVNLAETFDGVIYGFNVNAGNVIQQSAAKKGVKIKLHKIIYRLVEDLQEELSSRLPCAVEEHPV

SEQ ID NO: 94538 - protein, 58 aa, Homo sapiens
  MOD_RES (1)..(1): Any amino acid
XSNPAPPESQEKKPLKPCCACPETKKARDACIIEKGEEHCGHLIEAHKECMRALGFKI

SEQ ID NO: 94539 - protein, 987 aa, Homo sapiens
MRCRNMFFSFKASLCGCGAATAPSLTAISCTLNCSCQSFKPGKINHRQCDQCKHGWVAHALSKLRIPPMYPTSQVEIVQSNVVFDISSLMLYGTQAIPVRLKILLDRLFSVLKQDEVLQILHALDWTLQDYIRGYVLQDASGKVLDHWSIMTSEEEVATLQQFLRFGETKSIVELMAIQEKEEQSIIIPPSTANVDIRAFIESCSHRSSSLPTPVDKGNPSSIHPFENLISNMTFMLPFQFFNPLPPALIGSLPEQYMLEQGHDQSQDPKQEVHGPFPDSSFLTSSSTPFQVEKDQCLNCPDAITKKEDSTHLSDSSSYNIVTKFERTQLSPEAKVKPERNSLGTKKGRVFCTACEKTFYDKGTLKIHYNAVHLKIKHKCTIEGCNMVFSSLRSRNRHSANPNPRLHMPMNRNNRDKDLRNSLNLASSENYKCPGFTVTSPDCRPPPSYPGSGEDSKGQPAFPNIGQNGVLFPNLKTVQPVLPFYRSPATPAEVANTPGILPSLPLLSSSIPEQLISNEMPFDALPKKKSRKSSMPIKIEKEAVEIANEKRHNLSSDEDMPLQVVSEDEQEACSPQSHRVSEEQHVQSGGLGKPFPEGERPCHRESVIESSGAISQTPEQATHNSERETEQTPALIMVPREVEDGGHEHYFTPGMEPQVPFSDYMELQQRLLAGGLFSALSNRGMAFPCLEDSKELEHVGQHALARQIEENRFQCDICKKTFKNACSVKIHHKNMHVKEMHTCTVEGCNATFPSRRSRDRHSSNLNLHQKALSQEALESSEDHFRAAYLLKDVAKEAYQDVAFTQQASQTSVIFKGTSRMGSLVYPITQVHSASLESYNSGPLSEGTILDLSTTSSMKSESSSHSSWDSDGVSEEGTVLMEDSDGNCEGSSLVPGEDEYPICVLMEKADQSLASLPSGLPITCHLCQKTYSNKGTFRAHYKTVHLRQLHKCKVPGCNTMFSSVRSRNRHSQNPNLHKSLASSPSHLQ

SEQ ID NO: 94540 - protein, 78 aa, Homo sapiens
MEEEDEEARALLAGGPDEADRGAPAAPGALPALCDPSRLAHRLLVLLLMCFLGFGSYFCYDNPAALQTQVKRFYFLFI

SEQ ID NO: 94541 - protein, 199 aa, Homo sapiens
MTEDSQRNFRSVYYEKVGFRGVEEKKSLEILLKDDRLGILPPHHESHAKVMMYRKEQYLDVLHALKVVRFVSDATPQAEVYLRMYQLESGKLPRSPSFPLEPDDEVFLAIAKAMEEMVEDSVDCYWITRRFVNQLNTKYRDSLPQLPKAFEQYLNLEDGRLLTHLRMCSAAPKLPYDLWFKRCFAGCLPESSLQRQGLG

SEQ ID NO: 94542 - protein, 158 aa, Homo sapiens
MSSRKLSGPKGRRLSIHVVTWNVASAAPPLDLSDLLQLNNRNLNLDIYVIGLQELNSGIISLLSDAAFNDSWSSFLMDVLSPLSFIKVSHVRMQGILLLVFAKYQHLPYIQILSTKSTPTGLFGYWLSIAKKHDPLLREFQEGRLLFPPTYKFDRNSN

SEQ ID NO: 94543 - protein, 60 aa, Homo sapiens
MSAEVKVTGQNQEQFLLLAKSAKGAALATLIHQVLEAPGVYVFGELLDMPNVRERHMANC

SEQ ID NO: 94544 - protein, 200 aa, Homo sapiens
MGIPSVRREVHSYLTDTLHSLISELSPQEKEDSVIVVLIAETDSQYTSAVTENIKALFPTEIHSGLLEVISPSPHFYPDFSRLRESFGDPKERVRWRTKQNLDYCFLMMYAQSKGIYYVQLEDDIVAKPNYLSTMKNFALQQPSEDWMILEFSQLGFIGKMFKSLDLSLIVEFILMFYRDKPIDWLLDHILWVKVCNPEK

SEQ ID NO: 94545 - protein, 239 aa, Homo sapiens
MSDLLLLGLIGGLTLLLLLTLLAFAGYSGLLAGVEVSAGSPPIRNVTVAYKFHMGLYGETGRLFTESCSISPKLRSIAVYYDNPHMERKLCAYPRLEIYQEDQIHFMCPLARQGDFYVPEMKETEWKWRGLVEAIDTQVDGTGADTMSDTSSVSLEVSPGSRETSAATLSPGASSRGWDDGDTRSEHSYSESGASGSSFEELDLEGEGPLGESRLDPGTEPLGTTKWLWEPTAPEKGKE

SEQ ID NO: 94546 - protein, 213 aa, Homo sapiens
MASLSRPSLPSCLCSFLLLLLLQVSSSYAGQFRVIGPRHPIRALVGDEVELPCRISPGKNATGMEVGWYRPPFSRVVHLYRNGKDQDGDQAPEYRGRTELLKDAIGEGKVTLRIRNVRFSDEGGFTCFFRDHSYQEEAAMELKVEDPFYWVSPGVLVLLAVLPVLLLQITLGLVFLCLQYRLRGKLRAEIENLHRTFGQFLEELLFHLEALSG

SEQ ID NO: 94547 - protein, 537 aa, Homo sapiens
MAPWPPKGLVPAMLWGLSLFLNLPGPIWLQPSPPPQSSPPPQPHPCHTCRGLVDSFNKGLERTIRDNFGGGNTAWEEENLSKYKDSETRLVEVLEGVCSKSDFECHRLLELSEELVESWWFHKQQEAPDLFQWLCSDSLKLCCPAGTFGPSCLPCPGGTERPCGGYGQCEGEGTRGGSGHCDCQAGYGGEACGQCGLGYFEAERNASHLVCSACFGPCARCSGPEESNCLQCKKGWALHHLKCVDIDECGTEGANCGADQFCVNTEGSYECRDCAKACLGCMGAGPGRCKKCSPGYQQVGSKCLDVDECETEVCPGENKQCENTEGGYRCICAEGYKQMEGICVKEQIPGAFPILTDLTPETTRRWKLGSHPHSTYVKMKMQRDEATFPGLYGKQVAKLGSQSRQSDRGTRLIHVINALPPTCPPHGLGKSNPFTSLSLTFPFSETGMVTAPCRVVLSSKCSVPGLLGRPGGHDDQVCGSSGETPRTTRNRDTSARLHLLLLCRVSRLLLRDDRRRVGGAAADVLWHHHLCTGHAGC

SEQ ID NO: 94548 - protein, 119 aa, Homo sapiens
MLKALFLTMLTLALVKSQDTEETITYTQCTDGYEWDPVRQQCKDIDECDIVPDACKGGMKCVNHYGGYLCLPKTAQIIVNNEQPQQETQPAEGTSGATTGVVAASSMATSGVLPGGGFV

SEQ ID NO: 94549 - protein, 189 aa, Homo sapiens
MEAARRPRLGLSRRRPRPAGGSPGAARSPLKSSLSDPRPFPGHPFRRTCGARAVPTGCFTGQEGTWNPPPGPCPSARHLIPAGPPGWSSSRLWRVPRPCAAAPCARRSSPPGTSTPAPTCVPLAPKLPPYVWVASEMWGRRHSRKKGIRGASTSSEHFIPQDATRSLSWRSRSVHRVLFPWKMCTLETA

SEQ ID NO: 94550 - protein, 75 aa, Homo sapiens
  MOD_RES (1)..(1): Any amino acid
XDMPPPGGYGPIDYKRNLPRRGLSGYSMLAIGIGTLIYGHWSIMKWNRERRRLQIEDFEARIALLPLLQAETDRR

SEQ ID NO: 94551 - protein, 92 aa, Homo sapiens
VAVCGGLGRKKLTHLVTAAVSLTHPGTHTVLWRRGCSQQVSSNEDLPISMENPYKEPLKKCILCGKHVDYKNVQVFVGRNRKKSQKQLRELK

SEQ ID NO: 94552 - protein, 99 aa, Homo sapiens
MDRLWRPSKVLSLQDLCCRAVVSCTPVHLVDKLPLPIALRSHLKSFSMANGLNARMMHGGSYSLTTSSTHKRSSLRKVKLVRPPQSPPKNCTRNSCKIS

SEQ ID NO: 94553 - protein, 248 aa, Homo sapiens
MAERAALEELVKLQGERVRGLKQQKASAELIEEEVAKLLKLKAQLGPDESKQKFVLKTPKGTRDYSPRQMAVREKVFDVIIRCFKRHGAEVIDTPVFELKETLMGKYGEDSKLIYDLKDQGGELLSLRYDLTVPFARYLAMNKLTNIKRYHIAKVYRRDNPAMTRGRYREFYQCDFDIAGNFDPMIPDAECLKIMCEILSSLQIGDFLVKVNDRRILDGMFAICGVSDSKFRTICSSVDKLDKLPRGP

SEQ ID NO: 94554 - protein, 1158 aa, Homo sapiens
MSLKPQQQQQQQQQQQQQQQQQQQQQQQPPPAAANVRKPGGSGLLASPAAAPSPSSSSVSSSSATAPSSVVAATSGGGRPGLGRGRNSNKGLPQSTISFDGIYANMRMVHILTSVVGSKCEVQVKNGGIYEGVFKTYSPKCDLVLDAAHEKSTESSSGPKREEIMESILFKCSDFVVVQFKDMDSSYAKRDAFTDSAISAKVNGEHKEKDLEPWDAGELTANEELEALENDVSNGWDPNDMFRYNEENYGVVSTYDSSLSSYTVPLERDNSEEFLKREARANQLAEEIESSAQYKARVALENDDRSEEEKYTAVQRNSSEREGHSINTRENKYIPPGQRNREVISWGSGRQNSPRMGQPGSGSMPSRSTSHTSDFNPNSGSDQRVVNGGVPWPSPCPSPSSRPPSRYQSGPNSLPPRAATPTRPPSRPPSRPSRPPSHPSAHGSPAPVSTMPKRMSSEGPPRMSPKAQRHPRNHRVSAGRGSISSGLEFVSHNPPSEAATPPVARTSPSGGTWSSVVSGVPRLSPKTHRPRSPRQNSIGNTPSGPVLASPQAGIIPTEAVAMPIPAASPTPASPASNRAVTPSSEAKDSRLQDQRQNSPAGNKENIKPNETSPSFSKAENKGISPVVSEHRKQIDDLKKFKNDFRLQPSSTSESMDQLLNKNREGEKSRDLIKDKIEPSAKDSFIENSSSNCTSGSSKPNSPSISPSILSNTEHKRGPEVTSQGVQTSSPACKQEKDDKEEKKDAAEQVRKSTLNPNAKEFNPRSFSQPKPSTTPTSPRPQAQPSPSMVGHQQPTPVYTQPVCFAPNMMYPVPVSPGVQPLYPIPMTPMPVNQAKTYRAGKVPNMPQQRQDQHHQSAMMHPASAAGPPIAATPPAYSTQYVAYSPQQFPNQPLVQHVPHYQSQHPHVYSPVIQGNARMMAPPTHAQPGLVSSSATQYGAHEQTHAMYACPKLPYNKETSPSFYFAISTGSLAQQYAHPNATLHPHTPHPQPSATPTGQQQSQHGGSHPAPSPVQHHQHQAAQALHLASPQQQSAIYHAGLAPTPPSMTPASNTQSPQNSFPAAQQTVFTIHPSHVQPAYTNPPHMAHVPQAHVQSGMVPSHPTAHAPMMLMTTQPPGGPQAALAQSALQPIPVSTTAHFPYMTHPSVLVQGISRKRQD

SEQ ID NO: 94555 - protein, 191 aa, Homo sapiens
KKHSTQVYLGPSKKTSVSNAGQWLYEEKPHKMDLLHENGPRPGLHENVCKAVSDFCKWVTTFGISDIDEEFILKQFDIDYETKPSHDALHTMKLNQVPLELKRSVGLSKLQETEFFQKLGYERKLQKPQVCWSLLEVHSRPYLPGYHQWRLQNSKDCCLLLLLEASSWRGPSLMPARALLYESIFKKAMDI

SEQ ID NO: 94556 - protein, 86 aa, Homo sapiens
TTTRHKVLIMEFCPCGSLYTVLEEPSNAYGLPESEFLIVLRDVDMTPKAQIPEIHKLDFISIKHFWASEDISGWNESSTREWYSAP

SEQ ID NO: 94557 - protein, 445 aa, Homo sapiens
MFLATLYFALPLLDLLLSAEVSGGDRLDCVKASDQCLKEQSCSTKYRTLRQCVAGKETNFSLASGLEAKDECRSAMEALKQKSLYNCRCKRGMKKEKNCLRIYWSMYQSLQGNDLLEDSPYEPVNSRLSDIFRVVPFISDVFQQVEHIPKGNNCLDAAKACNLDDICKKYRSAYITPCTTSVSNDVCNRRKCHKALRQFFDKVPAKHSYGMLFCSCRDIACTERRRQTIVPVCSYEEREKPNCLNLQDSCKTNYICRSRLADFFTNCQPESRSVSSCLKENYADCLLAYSGLIGTVMTPNYIDSSSLSVAPWCDCSNSGNDLEECLKFLNFFKDNTCLKNAIQAFGNGSDVTVWQPAFPVQTTTATTTTALRVKNKPLGPAGSENEIPTHVLPPCANLQYLLRSKVHLFQMGPDQTRNDFKTLLCGGTEAEIQCVGQYTPLYFQW

SEQ ID NO: 94558 - protein, 36 aa, Homo sapiens
  MOD_RES (1)..(1): Any amino acid
XMPSEILLKIFSYLDAVSLLCTGCVSRRFYHLANDK

SEQ ID NO: 94559 - protein, 172 aa, Homo sapiens
  MOD_RES (1)..(1): Any amino acid
XGLVVLNLVTSARSQKTEPLSGSGDQPLFRGADRYDFAIMIPPGGTECFWQFAHQTGYFYFSYEVQRTVGMSHDRHVAATAHNPQGFLIDTSQGVRGQINFSTQETGFYQLCLSNQHNHFGSVQVYLNFGVFYEGPETDHKQKERKQLNDTLDAIEELCEGSRGDQLQPPDE

SEQ ID NO: 94560 - protein, 5063 aa, Homo sapiens
MAATLGAGTPPRPQARSIAGVYVEASGQAQSVYAAMEQGLLPAGLGQALLEAQAATGGLVDLARGQLLPVSKALQQGLVGLELKEKLLAAERATTGYPDPYGGEKLALFQAIGKEVVDRALGQSWLEVQLATGGLVDPAQGVLVAPEPACHQGLLDRETWHKLSELEPGTGDLRFLDPNTLERLTYHQLLERCVRAPGSGLALLPLKITFRSMGGAVSAAELLEVGILDEQAVQGLREGRLAAVDVSARAEVRRYLEGTGSVAGVVLLPEGHKKSFFQAATEHLLPMGTALPLLEAQAATHTLVDPITGQRLWVDEAVRAGLVSPELHEQLLVAEQAVTGHHDPFSGSQIPLFQAMKKGLVDRPLALRLLDAQLATGGLVCPARRLRLPLEAALRCGCLDEDTQRQLSQAGSFSDGTHGGLRYEQLLALCVTDPETGLAFLPLSGGPRGGEPQGPPFIKYSTRQALSTATATVSVGKFRGRPVSLWELLFSEAISSEQRAMLAQQYQEGTLSVEKLAAKLSATLEQAAATARVTFSGLRDTVTPGELLKAEIIDQDLYERLEHGQATAKDVGSLASVQRYLQGTGCIAGLLLPGSQERLSIYEARCKGLLRPGTALILLEAQAATGFIIDPKANKGHSVEEALRAAVIGPDVFAKLLSAERAVTGYTDPYTGQQISLFQAMQKGLIVREHGIRLLEAQIATGGVIDPVHSHRVPVDVAYRRGYFDQMLNLILLDPSDDTKGFFDPNTHENLTYLQLLERCVRDPETGLYLLPLSSTQSPLVDSATQQAFQNLLLSVKYGRFQGQRVSAWELINSEYFSEGRRRQLLRRYRQREVTLGQVAKLLEAETQRQADIMLPALRSRVTVHQLLEAGIIDQQLLDQVLAGTISPEALLLMDGVRRYLCGLGAVGGVRLLPSGQRLSLYQAMRQKLLGPRVALALLEAQAATGTIMDPHSPESLSVDEAVRRGVVGPELYGRLKRAEGAIAGFRDPFSGKQVSVFQAMKKGLIPWEQAARLLEAQVATGGIIDPTSHHHLPMPVAIQRGYVDQEMETALSSSSETFPTPDGQGRTSYAQLLEECPRDETSGLHLLPLPESAPALPTEEQVQRSLQAVPGAKDGTSLWDLLSSCHFTEEQRRGLLEDVQEGRTTVPQLLASVQRWVQETKLLAQARVMVPGPRGEVPAVWLLDAGIITQETLEALAQGTQSPAQVAEQPAVKACLWGTGCVAGVLLQPSGAKASIAQAVRDGLLPTGLGQRLLEAQVASGFLVDPLNNQRLSVEDAVKVGLVGRELSEQLGQAERAAAGYPDPYSRASLSLWQAMEKGLVPQNEGLPLLQVQLATGGVVDPVHGVHLPQAAACRLGLLDTQTSQVLTAVDKDNKFFFDPSARDQVTYQQLRERCVCDSETGLLLLPLPSDTVLEVDDHTAVALRAMKVPVSTGRFKGCSVSLWDLLLSEYVGADKRRELVALCRSGRAAALRQVVSAVTTLVEAAERQPLQATFRGLRKQVSARDLFRAQLISRKTLDELSQGTTTVKEVAEMDSVKRSLEGGNFIAGVLIQGTQERMSIPEALRRHILRPGTALVLLEAQAATGFIIDPVENRKLTVEEAFKAGMFGKETYVKLLSAERAVTGYTDPYTGQQISLFQAMQKDLIVREHGIRLLEAQIATGGIIDPVHSHRVPVDVAYRCGYFDEEMNRILADPSDDTKGFFDPNTHENLTYLQLLERCVEDPETGLYLLQIIKKGENYVYINEATRHVLQSRTAKMRVGRFADQVVSFWDLLSSPYFTEDRKRELIQEYGAQSGGLEKLLEIITTTIEETETQNQGIKVAAIRGEVTAADLFNSRVIDQKTLHTLRVGRTGGQALSTLECVKPYLEGSGCIAGVTVPSTREVMSLHEASRKELIPAAFATWLLEAQAATGFLLDPCTRQKLSVDEAVDVGLVNEELRERLLKAERAATGYRDPATGDTIPLFQAMQKQLIEKAEALRLLEVQVATGGVIDPQHHHRLPLETAYRRGCLHKDIYALISDQKHMRKRFVDPNTQEKVSYRELQERCRPQEDTGWLLFPVNKAARDSEHIDDETRRALEAEQVEITVGRFRGQKPTLWALLNSEYVTEEKKLQLVRMYRTHTRRALQTVAQLILELIEKQETSNKHLWFQGIRRQITASELLSSAIITEEMLQDLETGRSTTQELMEDDRVKRYLEGTSCIAGVLVPAKDQPGRQEKMSIYQAMWKGVLRPGTALVLLEAQAATGFVIDPVRNLRLSVEEAVAAGVVGGEIQEKLLSAERAVTGYTDPYTGQQISLFQAMQKDLIVREHGIRLLEAQIATGGVIDPVHSHRVPVDVAYRRGYFDEEMNRVLADPSDDTKGFFDPNTHENLTYVQLLRRCVPDPDTGLYMLQLAGRGSAVHQLSEELRCALRDARVTPGSGALQGQSVSVWELLFYREVSEDRRQDLLSRYRAGTLTVEELGATLTSLLAQAQAQARAEAEAGSPRPDPREALRAATMEVKVGRLRGRAVPVWDVLASGYVSRAAREELLAEFGSGTLDLPALTRRLTAIIEEAEEAPGARPQLQDAWRGPREPGPAGRGDGDSGRSQREGQGEGETQEAAAAAAAAAARRQEQTLRDATMEVQRGQFQGRPVSVWDVLFSSYLSEARRDELLAQHAAGALGLPDLVAVLTRVIEETEERLSKVSFRGLRRQVSASELHTSGILGPETLRDLAQGTKTLQEVTEMDSVKRYLEGTSCIAGVLVPAKDQPGRQEKMSIYQAMWKGVLRPGTALVLLEAQAATGFVIDPVRNLRLSVEEAVAAGVVGGEIQEKLLSAERAVTGYTDPYTGQQISLFQAMQKDLIVREHGIRLLEAQIATGGVIDPVHSHRVPVDVAYQRGYFDEEMNRVLADPSDDTKGFFDPNTHENLTYVQLLRRCVPDPDTGLYMLQLAGRGSAVHQLSEELRCALRDARVTPGSGALQGQSVSVWELLFYREVSEDRRQDLLSRYRAGTLTVEELGATLTSLLAQAQAQARAEAEAGSPRPDPREALRAATMEVKVGRLRGRAVPVWDVLASGYVSRAAREELLAEFGSGTLDLPALTRRLTAIIEEAEEAPGARPQLQDAWRGPREPGPAGRGDGDSGRSQREGQGEGETQEAAAAARRQEQTLRDATMEVQRGQFQGRPVSVWDVLFSSYLSEARRDELLAQHAAGALGLPDLVAVLTRVIEETEERLSKVSFRGLRCQVSASELHTSGILGPETLRDLAQGTKTLQEVTEMDSVKRYLEGTSCIAGVLVPAKDQPGRQEKMSIYQAMWKGVLRPGTALVLLEAQAATGFVIDPVRNLRLSVEEAVAAGVVGGEIQEKLLSAERAVTGYTDPYTGQQISLFQAMQKDLIVREHGIRLLEAQIATGGVIDPVHSHRVPVDVAYRRGYFDEEMNRVLADPSDDTKGFFDPNTHENLTYVQLLRRCVPDPDTGLYMLQLAGRGSAVHQLSEELRCALRDARVTPGSGALQGQSVSVWELLFYREVSEDRRQDLLSRYRAGTLTVEELGATLTSLLAQAQAQARAEAEAGSPRPDPREALRAATMEVKVGRLRGRAVPVWDVLASGYVSRAAREELLAEFGSGTLDLPALTRRLTAIIEEAEEAPGARPQLQDAWRGPREPGPAGRGDGDSGRSQREGQGEGETQEAAAATAAARRQEQTLRDATMEVQRGQFQGRPVSVWDVLFSSYLSEARRDELLAQHAAGALGLPDLVAVLTRVIEETEERLSKVSFRGLRRQVSASELHTSGILGPETLRDLAQGTKTLQEVTEMDSVKRYLEGTSCIAGVLVPAKDQPGRQEKMSIYQAMWKGVLRPGTALVLLEAQAATGFVIDPVRNLRLSVEEAVAAGVVGGEIQEKLLSAERAVTGYTDPYTGQQISLFQAMQKDLIVREHGIRLLEAQIATGGVIDPVHSHRVPVDVAYRRGYFDEEMNRVLADPSDDTKGFFDPNTHENLTYVQLLRRCVPDPDTGLYMLQLAGRGSAVHQLSEELRCALRDARVTPGSGALQGQSVSVWELLFYREVSEDRRQDLLSRYRAGTLTVEELGATLTSLLAQAQAQARAEAEAGSPRPDPREALRAATMEVKVGRLRGRAVPVWDVLASGYVSRAAREELLAEFGSGTLDLPALTRRLTAIIEEAEEAPGARPQLQDAWRGPREPGPAGRGDGDSGRSQREGQGEGETQEAAAATAAARRQEQTLRDATMEVQRGQFQGRPVSVWDVLFSSYLSEARRDELLAQHAAGALGLPDLVAVLTRVIEETEERLSKVSFRGLRRQVSASELHTSGILGPETLRDLAQGTKTLQEVTEMDSVKRYLEGTSCIAGVLVPAKDQPGHQEKMSIYQAMWKGVLRPGTALVLLEAQAATGFVIDPVRNLRLSVEEAVAAGVVGGEIQEKLLSAERAVTGYTDPYTGQQISLFQAMQKDLIVREHGIRLLEAQIATGGVIDPVHSHRVPVDVAYRRGYFDEEMNRVLAHPSDDTKGFFDPNTHENLTYVQLLRRCVPDPDTGLYMLQLAGRGSAVHQLSEELRCALRDARVMPGSGALQGQSVSVWELLFYREVSEDRRQDLLSRYRAGTLTVEELGATLTSLLAQAQAQARAEAEAEAGSPRPDPREALRAATMEVKVGRLRGRAVPVWDVLASGYVSGAAREELLAEFGSGTLDLPALTRRLTAIIEEAEEAPGARPQLQDAWRGPREPGPAGRGDGDSGRSQREGQGEGETQEAAAAARRQEQTLRDATMEVQRGQFQGRPVSVWDVLFSSYLSEAHRDELLAQHAAGALGLPDLVAVLTRVIEETEERLSKVSFRGLRRQVSASELHTSGILGPETLRDLAQGTKTLQEVTEMDSVKRYLEGTSCIAGVLVPAKDQPGRQEKMSIYQAMWKGVLRPGTALVLLEAQAATGFVIDPVRNLRLSVEEAVAAGVVGGEIQEKLLSAERAVTGYTDPYTGQQISLFQAMQKDLIVREHGIRLLEAQIATGGVIDPVHSHRVPVDVAYRRGYFDEEMNRVLADPSDDTKGFFDPNTHENLTYLQLLQRATLDPETGLLFLSLSLQ

SEQ ID NO: 94561 - protein, 460 aa, Homo sapiens
MELFQAKDHYILQQGERALWCSRRDGGLQLRPATDLLLAWNPICLGLVEGVIGKIQLHSDLPWWLILIRQKALVGKLPGDHEVCKVTKIAVLSLSEMEPQDLELELCKKHHFGINKPEKIIPSPDDSKFLLKTFTHIKSNVSAPNKKKVKESKEKEKLERRLLEELLKMFMDSESFYYSLTYDLTNSVQRQSTGERDGRPLWQKVDDRFFWNKYMIQDLTEIGTPDVDFWIIPMIQGFVQIEELVVNYTESSDDEKSSPETPPQESTCVDDIHPRFLVALISRRSRHRAGMRYKRRGVDKNGNVANYVETEQLIHVHNHTLSFVQTRGSVPVFWSQVGYRYNPRPRLDRSEKETVAYFCAHFEEQLNIYKKQVIINLVDQAGREKIIGDAYLKQVLLFNNSHLTYVSFDFHEHCRGMKFENVQTLTDAIYDIILDMKWCCTHFLLWFPGPYTVNPPMCSF

SEQ ID NO: 94562 - protein, 1129 aa, Homo sapiens
MKSCGVSLATAAAAAAAFGDEEKKMAAGKASGESEEASPSLTAEEREALGGLDSRLFGFVRFHEDGARTKALLGKAVRCYESLILKAEGKVESDFFCQLGHFNLLLEDYPKALSAYQRYYSLQSDYWKNAAFLYGLGLVYFHYNAFQWAIKAFQEVLYVDPSFCRAKEIHLRLGLMFKVNTDYESSLKHFQLALVDCNPCTLSNAEIQFHIAHLYETQRKYHSAKEAYEQLLQTENLSAQVKATVLQQLGWMHHTVDLLGDKATKESYAIQYLQKSLEADPNSGQSWYFLGRCYSSIGKVQDAFISYRQSIDKSEASADTWCSIGVLYQQQNQPMDALQAYICAVQLDHGHAAAWMDLGTLYESCNQPQDAIKCYLNATRSKSCSNTSALAARIKYLQAQLCNLPQGSLQNKTKLLPSIEEAWSLPIPAELTSRQGAMNTAQQNTSDNWSGGHAVSHPPVQQQAHSWCLTPQKLQHLEQLRANRNNLNPAQKLMLEQLESQFVLMQQHQMRPTGVAQVRSTGIPNGPTADSSLPTNSVSGQQPQLALTRVPSVSQPGVRPACPGQPLANGPFSAGHVPCSTSRTLGSTDTILIGNNHITGSGSNGNVPYLQRNALTLPHNRTNLTSSAEEPWKNQLSNSTQGLHKGQSSHSAGPNGERPLSSTGPSQHLQAAGSGIQNQNGHPTLPSNSVTQGAALNHLSSHTATSGGQQGITLTKESKPSGNILTVPETSRHTGETPNSTASVEGLPNHVHQMTADAVCSPSHGDSKSPGLLSSDNPQLSALLMGKANNNVGTGTCDKVNNIHPAVHTKTDNSVASSPSSAISTATPSPKSTEQTTTNSVTSLNSPHSGLHTINGEGMEESQSPMKTDLLLVNHKPSPQIIPSMSVSIYPSSAEVLKACRNLGKNGLSNSSILLDKCPPPRPPSSPYPPLPKDKLNPPTPSIYLENKRDAFFPPLHQFCTNPNNPVTVIRGLAGALKLDLGLFSTKTLVEANNEHMVEVRTQLLQPADENWDPTGTKKIWHCESNRSHTTIAKYAQYQASSFQESLREENEKRSHHKDHSDSESTSSDNSGRRRKGPFKTIKFGTNIDLSDDKNRKSSKPCWSYHIGHEHSSTIHESSREQNTRSSGK

SEQ ID NO: 94563 - protein, 74 aa, Homo sapiens
MWPVFWTVVRTYAPYVTFPVAFVVGAVGYHLEWFIRGKDPQPVEEEKSISERREDRKLDELLGKDHTQVAGMRL

SEQ ID NO: 94564 - protein, 69 aa, Homo sapiens
  MOD_RES (1)..(1): Any amino acid
XTSVRISPGEEAAGQDVLAVRVLVTSEDSSVASLCLHFLICKMATIIVPISEGVSAVLITCIRSTWSGY

SEQ ID NO: 94565 - protein, 197 aa, Homo sapiens
MEERPAETNANVDNSASPSVAQLAGRFREQAAAAKETPASKPTRRKPPCSLPLFPPKVDLGQNGEEANLTFDPAALLPGASPKSPGLKAMVSPFHSPPSTPSSPGVRSRPSEAEEVPVSFDQPPEGSHLPCYNKVRTRGSIKRRPPSRRFRRSQSDCGELGDFRAVESSQQNGAKEEDGDEVLPSKSKAPGSPLSSE

SEQ ID NO: 94566 - protein, 72 aa, Homo sapiens
  MOD_RES (1)..(1): Any amino acid
XAIPVSIHVNVILFSAILIVLTMVGTAFFMYNAFGKPFETLHGPLGLYLLSFISGRAGTTSGSPWNLQVPGV

SEQ ID NO: 94567 - protein, 16 aa, Homo sapiens
  MOD_RES (1)..(1): Any amino acid
XEVCLALKHRNGGEGG

SEQ ID NO: 94568 - protein, 72 aa, Homo sapiens
  MOD_RES (1)..(1): Any amino acid
XNLFDSSVFDTEISSDQFNEHYSARNLNPLSSEQEIEKTKCFRNEGKKGHHELENLGRIHRRGKIELGLYSL

SEQ ID NO: 94569 - protein, 174 aa, Homo sapiens
MSDSDLGEDEGLLSLAGKRKRRGNLPKESVKILRDWLYLHRYNAYPSEQEKLSLSGQTNLSVLQICNWFINARRRLLPDMLRKDGKDPNQFTISRRGGKASDVALPRGSSPSVLAVSVPAPTNVLSLSVCSMPLHSGQGEKPAAPFPRGELESPKPLVTPGSTLTLLTRAEAGS

SEQ ID NO: 94570 - protein, 213 aa, Homo sapiens
MESLLLLPRFGRISDLTVDLSTPEGSFPSDEGWPFAKYLGACGRMVAVNYVGEELWSYFNAPWEKRVDLAWQLMEIAEQLTNNDFEFALYLLDVSFDNFAVGPRDGKVIIVDAENVLVADKRLIRQNKPENWDVWYESKFDDCDKEACLSFSKEILCARATVDHNYYAVCQNLLSRHATWRGTSGGLLHDPPSEIAKDGRLEALLDECANPKK

SEQ ID NO: 94571 - protein, 120 aa, Homo sapiens
MILQQPLQRGPQGGAQRLPRAALGVTWGLDASSPLRGAVPMSTKRRLEEEQEPLRKQFLSEENMATHFSQLSLHNDHPYCSPPMTFSPALPPLRSPCSELLLWRYPGSLIPEALRLLRLG

SEQ ID NO: 94572 - protein, 165 aa, Homo sapiens
  MOD_RES (1)..(1): Any amino acid
XILEDATPTATKHGTGRGLPLKDALEYVIPELNIHCLRLALNTPKVTEQLLKLDEQGLCRKHKVGILYCKAGQSSEEEMYNNEEAGPAFEEFLSLIGEKVCLKGFTKYAAQLDVKIETGFHHVGQAGLELLTSDDPPASASQSAGIIGVNHQAWPVYLIFKSRLK

SEQ ID NO: 94573 - protein, 77 aa, Homo sapiens
MNAGPGCEPCTKRPRWGAATTSPAASDARSFPSRQRRVLDPKDAHVQFRVPPSSPACVPGRAGQHRGSATSLDVKNP

SEQ ID NO: 94574 - protein, 201 aa, Homo sapiens
  MOD_RES (1)..(1): Any amino acid
XLERPVRYIRKPIDYTILDDIGHGVKVSTQNMKMGGLPRTTPPTQKPPSPPMSGKGTLGRHSPYRTLEPVRPPVVPNDYVPSPTRNMAPSQQSPVRTASVNQRNRTYSSGSSGGSHPSSRSSSRENSGSGSVGVPIAVPTPSPPSVFPGHPVQFYSMNRPASRHTPPTIGGSLPYRRPPSITSQTSLQNQMNGGPFYSQNP

SEQ ID NO: 94575 - protein, 285 aa, Homo sapiens
MRGGRNRDRLTSLVRRATLKENEQIPKYEKIHNFKVHTFRGPHWCEYCANFMWGLIAQGVKCADCGLNVHKQCSKMVPNDCKPDLKHVKKVYSCDLTTLVKAHTTKRPMVVDMCIREIESRGLNSEGLYRVSGFSDLIEDVKMAFDRDGEKADISVNMYEDINIITGALKLYFRDLPIPLITYDAYPKFIESAKIMDPDEQLETLHEALKLLPPAHCETLRYLMAHLKRVTLHEKENLMNAENLGIVFGPTLMRSPELDAMAALNDIRYQRLVVELLIKNEDILF

SEQ ID NO: 94576 - protein, 1224 aa, Homo sapiens
MPVVWPTLLDLSRDECKRILRKLELEAYAGVISALRAQGDLTKEKKDLLGELSKVLSISTERHRAEVRRAVNDERLTTIAHNMSGPNSSSEWSIEGRRLVPLMPRLVPQTAFTVTANAVANAAIQHNASLPVPAETGSKEVVVCYSYTSTTSTPTSTPVPSGSIATVKSPRPASPASNVVVLPSGSTVYVKSVSCSDEDEKPRKRRRTNSSSSSPVVLKEVPKAVVPVSKTITVPVSGSPKMSNIMQSIANSLPPHMSPVKITFTKPSTQTTNTTTQKVIIVTTSPSSTFVPNILSKSHNYAAVTKLVPTSVIASTTQKPPVVITASQSSLVSNSSSGSSSSTPSPIPNTVAVTAVVSSTPSVVMSTVAQGVKIITQQVQPSKILPKPVTATLPTSSNSPIMVVSSNGAIMTTKLVTTPTGTQATYTRPTVSPSIGRMAATPGAATYVKTTSGSIITVVPKSLATLGGKIISSNIVSGTTTKITTIPMTSKPNVIVVQKTTGKGTTIQGLPGKNVVTTLLNAGGEKTIQTVPTGAKPAILTATRPITKMIVTQPKGIGSTVQPAAKIIPTKIVYGQQGKTQVLIKPKPVTFQATVVSEQTRQLVTETLQQASRVAEAGNSSIQEGKEEPQNYTDSSSSSTESSQSSQDSQPVVHVIASRRQDWSEHEIAMETSPTIIYQDVSSESQSATSTIKALLELQQTTVKEKLESKPRQPTIDLSQMAVPIQMTQEKRHSPESPSIAVVESELVAEYITTVSHRSQPQQPSQPQRTLLQHVAQSQTATQTSVVVKSIPASSPGAITHIMQQALSSHTAFTKHSEELGTEEGEVEEMDTLDPQTGLFYRSALTQSQSAKQQKLSQPPLEQTQLQVKTLQCFQTKQKQTIHLQADQLQHKLPQMPQLSIRHQKLTPLQQEQAQPKPDVQHTQHPMVAKDRQLPTLMAQPPQTVVQVLAVKTTQQLPKLQQAPNQPKIYVQPQTPQSQMSLPASSEKQTASQVEQPIITQGSSVTKITFEGRQPPTVTKITGGSSVPKLTSPVTSISPIQASEKTAVSDILKMSLMEAQIDTNVEHMIVDPPKKALATSMLTGEAGSLPSTHMVVAGMANSTPQQQKCRESCSSPSTVGSSLTTRKIDPPAVPATGQFMRIQNVGQKKAEESPAEIIIQAIPQYAIPCHSSSNVVVEPSGLLELNNFTSQQLDDEETAMEQDIDSSTEDGTEPSPSQSSAERS

SEQ ID NO: 94577 - protein, 76 aa, Homo sapiens
EVEEDDPVPEIRRDHFEEAMRFARRSVSDNDIRKYEMFAQTLQQSRGFGSFREPGWSWPQSGQWRRHRWQCIHRRQ

SEQ ID NO: 94578 - protein, 239 aa, Homo sapiens
KEKDIDWGKRCVDKFDIIGIIGEGTYGQVYKARDKDTGEMVALKKVRLDNEKEGFPITAIREIKILRQLTHQSIINMKEIVTDKEDALDFKKDKGAFYLVFEYMDHDLMGLLESGLVHFNENHIKSFMRQLMEGLDYCHKKNFLHRDIKCSNILLNNRGQIKLADFGLARLYSSEESRPYTNKVITLWYRPPELLLGEERYTPAIDVWSCGCILGELFTKKPIFQANQELAQLELIRFI

SEQ ID NO: 94579 - protein, 232 aa, Homo sapiens
  MOD_RES (1)..(1): Any amino acid
XVRELLTMQLVDWHQLQADSFIQDERLRIFALLAGKPVWQLSEKKQINVCSQLDWKRSLAIHLWYLLPPTASISRALSMYEEAFQNTSDSDRYACSPLPSYLEGSGCVIAEEQNSQTPLRDVCFHLLKLYSDRHYDLNQLLEPRSITADPLDYRLSWHLWEVLRALNYTHLSAQCEAYVRRLFESCLPGTASCWRPLNLGLKRLSLPRSSVYLPNGSTRPKLCEHTWNLTST

SEQ ID NO: 94580 - protein, 20 aa, Homo sapiens
  MOD_RES (1)..(1): Any amino acid
XRHKLKESTTEEIELEDVEC

SEQ ID NO: 94581 - protein, 120 aa, Homo sapiens
  MOD_RES (1)..(1): Any amino acid
XLAPGQLILILKKNTSGWWQGELQARGKKRQKGWFPASHVKLLGPSSERATPAFHPVCQVIAMYDYAANNEDELSFSKGQLINVMNKDDPDWWQGEINGVTGLFPSNYVKMTTDSDPSQQ

SEQ ID NO: 94582 - protein, 1356 aa, Homo sapiens
MKSCGVSLATAAAAAAAFGDEEKKMAAGKASGESEEASPSLTAEEREALGGLDSRLFGFVRFHEDGARTKALLGKAVRCYESLILKAEGKVESDFFCQLGHFNLLLEDYPKALSAYQRYYSLQSDYWKNAAFLYGLGLVYFHYNAFQWAIKAFQEVLYVDPSFCRAKEIHLRLGLMFKVNTDYESSLKHFQLALVDCNPCTLSNAEIQFHIAHLYETQRKYHSAKEAYEQLLQTENLSAQVKATVLQQLGWMHHTVDLLGDKATKESYAIQYLQKSLEADPNSGQSWYFLGRCYSSIGKVQDAFISYRQSIDKSEASADTWCSIGVLYQQQNQPMDALQAYICAVQLDHGHAAAWMDLGTLYESCNQPQDAIKCYLNATRSKSCSNTSALAARIKYLQNTSDNWSGGHAVSHPPVQQQAHSWCLTPQKLQHLEQLRANRNNLNPAQKLMLEQLESQFVLMQQHQMRPTGVAQVRSTGIPNGPTADSSLPTNSVSGQQPQLALTRVPSVSQPGVRPACPGQPLANGPFSAGHVPCSTSRTLGSTDTILIGNNHITGSGSNGNVPYLQRNALTLPHNRTNLTSSAEEPWKNQLSNSTQGLHKGQSSHSAGPNGERPLSSTGPSQHLQAAGSGIQNQNGHPTLPSNSVTQGAALNHLSSHTATSGGQQGITLTKESKPSGNILTVPETSRHTGETPNSTASVEGLPNHVHQMTADAVCSPSHGDSKSPGLLSSDNPQLSALLMGKANNNVGTGTCDKVNNIHPAVHTKTDNSVASSPSSAISTATPSPKSTEQTTTNSVTSLNSPHSGLHTINGEGMEESQSPMKTDLLLVNHKPSPQIIPSMSVSIYPSSAEVLKACRNLGKNGLSNSSILLDKCPPPRPPSSPYPPLPKDKLNPPTPSIYLENKRDAFFPPLHQFCTNPNNPVTVIRGLAGALKLDLGLFSTKTLVEANNEHMVEVRTQLLQPADENWDPTGTKKIWHCESNRSHTTIAKYAQYQASSFQESLREENEKRSHHKDHSDSESTSSDNSGRRRKGPFKTIKFGTNIDLSDDKKWKLQLHELTKLPAFVRVVSAGNLLSHVGHTILGMNTVQLYMKVPGSRTPGHQENNNFCSVNINIGPGDCEWFVVPEGYWGVLNDFCEKNNLNFLMGSWWPNLEDLYEANVPVYRFIQRPGDLVWINAGTVHWVQAIGWCNNIAWNVGPLTACQYKLAVERYEWNKLQSVKSIVPMVHLSWNMARNIKVSDPKLFEMIKYCLLRTLKQCQTLREALIAAGKEIIWHGRTKEEPAHYCSICEVEVFDLLFVTNESNSRKTYIVHCQDCARKTSGNLENFVVLEQYKMEDLMQVYDQFTLAPPLPSASS

SEQ ID NO: 94583 - protein, 41 aa, Homo sapiens
MPKYCRAPNCSNTAGRLGADNRPVPTEGWSPAAGLAAAHGL

SEQ ID NO: 94584 - protein, 87 aa, Homo sapiens
  MOD_RES (1)..(1): Any amino acid
XHKLSKNYSYVLQWTQREPDAVDPVLNYRLSIRQLNQHNAVVKAIPVRRVEKGQLLEYILTDLRVPHSYETTPATLRMRRSVAIPRT

SEQ ID NO: 94585 - protein, 359 aa, Homo sapiens
MYFKRAPRAFPVLLTGAGKTTLLNYILTEQHSKRVAVILNESGEGSALEKSLAVSQGGELYEEWLELRNGCLCCSVKDNGLRAIENLMQKKGKFDDILLETTGLADPGAVASMFWVDAELGSDIYLDGIITIVDSKYGLKHLTEEKPDGLINEATRQVALADIILINKTDLVPEEDVKKLRTTLRSINGLGQILETQRSRVDLSNVLDLHAFDSLSGISLQKKLQHVPGTQPHLDQSIVTITFDVPGNAKEEHLNMFIQNLLWEKNVRNKDNHCMEVIRLKGLVSIKDKSQQVIVQGVHELCDLEETPVSWKDDTERTNRLVLIGRNLDKDILKQLFIATVTETEKQWTTHFKEDQVCT

SEQ ID NO: 94586 - protein, 74 aa, Homo sapiens
MAAVLESLLREEVSVAAVVRWIARSTQGSEQDEAFSQDQPNSGERRAVTLQAQDLLHLTPNQLCPQFPTLSPGH

SEQ ID NO: 94587 - protein, 229 aa, Homo sapiens
MRLPRRAALGLLPLLLLLPPAPEAAKKPTPCHRCRGLVDKFNQGMVDTAKKNFGGGNTAWEEKTLSKYESSEIRLLEILEGLCESSDFECNQMLEAQEEHLEAWWLQLKSEYPDLFEWFCVKTLKVCCSPGTYGPDCLACQGGSQRPCSGNGHCSGDGSRQGDGSCRCHMGYQGPLCTDCMDGYFSSLRNETHSICTACDESCKTCSGLTNRDCGECEVGWVLDEGACV

SEQ ID NO: 94588 - protein, 42 aa, Homo sapiens
MKTVLMVAEKPSLAQSIAKILSRGSLSSHKGLNGACSVHEYT

SEQ ID NO: 94589 - protein, 151 aa, Homo sapiens
  MOD_RES (1)..(1): Any amino acid
XGYQWAPILANFLHIMAVILGIFGTVQYRSRYLILDRDFIMTFNTSLHRSWWMENGPGCLVTPVLNSRLALEDHHVISVTGCLLDYPYIEALSSALQIFLALFGFVFACYVSKVFLEEEDSFDFIGGFDSYGYQAPQKTSHLQLQPLYTSG

SEQ ID NO: 94590 - protein, 254 aa, Homo sapiens
MDEADRRLLRRCRLRLVEELQVDQLWDALLSRELFRPHMIEDIQRAGSGSRRDQARQLIIDLETRGSQALPLFISCLEDTGQDMLASFLRTNRQAAKLSKPTLENLTPVVLRPEIRKPEVLRPETPRPVDIGSGGFGDVGALESLRGNADLAYILSMEPCGHCLIINNVNFCRESGLRTRTGSNIDCEKLRRRFSSLHFMVEVKGDLTAKASHLQFPGAVYGTDGCPVSVEKIVNIFNGTSCPSLGGKPKLFFI

SEQ ID NO: 94591 - protein, 216 aa, Homo sapiens
MMEEEELEFVEELEAVLQLTPEVQLAIEQVFPSQDPLDRADFNAVEYINTLFPTEQSLANIDEVVNKIRLKIRRLDDNIRTVVRGQTNVGQDGRQALEEAQKAIQQLFGKIKDIKDKAEKSEQMVKEITRDIKQLDHAKRHLTTSITTLNHLHMLAGGVDSLEAMTRRRQYGEVANLLQGVMNVLEHFHKYMGIPQIRQLSERKPKTLQLHGLNWT

SEQ ID NO: 94592 - protein, 1431 aa, Homo sapiens
MASLAALALSLLLRLQLPPLPGARAQSAAGGCSFDEHYSNCGYSVALGTNGFTWEQINTWEKPMLDQAVPTGSFMMVNSSGRASGQKAHLLLPTLKENDTHCIDFHYYFSSRDRSSPGALNVYVKVNGGPQGNPVWNVSGVVTEGWVKAELAISTFWPHFYQVIFESVSLKGHPGYIAVDEVRVLAHPCRKAPHFLRLQNVEVNVGQNATFQCIAGGKWSQHDKLWLQQWNGRDTALMVTRVVNHRRFSATVSVADTAQRSVSKYRCVIRSDGGSGVSNYAELIVKEPPTPIAPPELLAVGATYLWIKPNANSIIGDGPIILKEVEYRTTTGTWAETHIVDSPNYKLWHLDPDVEYEIRVLLTRPGEGGTGPPGPPLTTRTKCADPVHGPQNVEIVDIRARQLTLQWEPFGYAVTRCHSYNLTVQYQYVFNQQQYEAEEVIQTSSHYTLRGLRPFMTIRLRLLLSNPEGRMESEELVVQTEEDVPGAVPLESIQGGPFEEKIYIQWKPPNETNGVITLYEINYKAVGSLDPSADLSSQRGKVFKLRNETHHLFVGLYPGTTYSFTIKASTAKGFGPPVTTRIATKISAPSMPEYDTDTPLNETDTTITVMLKPAQSRGAPVSVYQLVVKEERLQKSRRAADIIECFSVPVSYRNASSLDSLHYFAAELKPANLPVTQPFTVGDNKTYNGYWNPPLSPLKSYSIYFQALSKANGETKINCVRLATKGASTQNSNTVEPEKQVDNTVKMAGVIAGLLMFIIILLGVMLTIKRRKLAKKQKETQSGAQREMGPVASADKPTTKLSASRNDEGFSSSSQDVNGFTDGSRGELSQPTLTIQTHPYRTCDPVEMSYPRDQFQPAIRVADLLQHITQMKRGQGYGFKEEYEALPEGQTASWDTAKEDENRNKNRYGNIISYDHSRVRLLVLDGDPHSDYINANYIDGYHRPRHYIATQGPMQETVKDFWRMIWQENSASIVMVTNLVEVGRVKCVRYWPDDTEVYGDIKVTLIETEPLAEYVIRTFTVQKKGYHEIRELRLFHFTSWPDHGVPCYATGLLGFVRQVKFLNPPEAGPIVVHCSAGAGRTGCFIAIDTMLDMAENEGVVDIFNCVRELRAQRVNLVQTEEQYVFVHDAILEACLCGNTAIPVCEFRSLYYNISRLDPQTNSSQIKDEFQTLNIVTPRVRPEDCSIGLLPRNHDKNRSMDVLPLDRCLPFLISVDGESSNYINAALMDSHKQPAAFVVTQHPLPNTVADFWRLVFDYNCSSVVMLNEMDTAQFCMQYWPEKTSGCYGPIQVEFVSADIDEDIIHRIFRICNMARPQDGYRIVQHLQYIGWPAYRDTPPSKRSLLKVVRRLEKWQEQYDGREGRTVVHCLNGGGRSGTFCAICSVCEMIQQQNIIDVFHIVKTLRNNKSNMVETLEQYKFVYEVALEYLSSF

SEQ ID NO: 94593 - protein, 444 aa, Homo sapiens
MASDGAAPRAGLAWSPCSRRQLLSLLSAGRARCVWDPPRPQPGSAGHPPDAQPGLYYSANEQCRVAFGPKAVACTFAREHLDMCQALSCHTDPLDQSSCSRLLVPLLDGTECGVEKWCSKGRCRSLVELTPIAAVHGRWSSWGPRSPCSRSCGGGVVTRRRQCNNPRPAFGGRACVGADLQAEMCNTQACEKTQLEFMSQQCARTDGQPLRSSPGGASFYHWGAAVPHSQGDALCRHMCRAIGESFIMKRGDSFLDGTRCMPSGPREDGTLSLCVSGSCRTFGCDGRMDSQQVWDRCQVCGGDNSTCSPRKGSFTAGRAREYVTFLTVTPNLTSVYIANHRPLFTHLAVRIGGRYVVAGKMSISPNTTYPSLLEDGRVEYRVALTEDRLPRLEEIRIWGPLQEDADIQVGGVRAQLMHISWWSRPGLGERDLCARGRWPGGSSD

SEQ ID NO: 94594 - protein, 218 aa, Homo sapiens
  MOD_RES (1)..(1): Any amino acid
XLEYNLDYTELGLQKLKESGKQHGFASFSDYYYKWSSADSCNMSGLITIVVLLGIAFVVYKLFLSDGQYSPPPYSEYPPFSHRYQRFTNSAGPPPPGFKSEFTGPQNTGHGATSGFGSAFTGQQGYENSGPGFWTGLGTGGILGYLFGSNRAATPFSDSWYYPSYPPSYPGTWNRAYSPLHGGSGSYSVCSNSDTKTRTASGKSKKYKFLLPRSKVQK

SEQ ID NO: 94595 - protein, 88 aa, Homo sapiens
MAATVNLELDPIFLKALGFLHSKSKDSAEKLKALLDESLARGIDSSYRPSQKDVEPPKISSTKNISIKQEPKISSSLPSGNNNGKVLT

SEQ ID NO: 94596 - protein, 287 aa, Homo sapiens
RGPGSVGPGLGWKLRSGGGVRTLTLLVETRFSFCRTEHPYKSKKAVWHKLLSKQRRRAVVACFRMTPLYNLPTHRACNMFLESYKAAWILTEDHSFEDRMIDDLSKAGEQEEEEEEVEEKKPDPLHQLVLHFSRTALTEKSKLDEDYLYMAYADIMAKSCHLEEGGENGEAEEEVEVSFEEKQMEKQRLLYQQARLHTRGAAEMVLQMISACKGETGAMVSSTLKLGISILNGGNAEVQQKMLDYLKDKKEVGFFQSIQALMQTCSVLDLNAFERQNKAEGLGMVNE

SEQ ID NO: 94597 - protein, 61 aa, Homo sapiens
MYSSSCETTRNTTGIEESTDGMILGPEDLSYQIYDVSGESNSAVSTEDLKECLKKQLEFCF

SEQ ID NO: 94598 - protein, 129 aa, Homo sapiens
MGVGRQQRGPFQGVRVKNSVKELLLHIRSHKQKASGQAVDDFKTQGVNIEQFRELKNTVSYSGKRKGPDSLSDGPACKRPALLHSQFLTPPQTPTPGESMEDVHLNEPKQESSADLLQNIINIKNECSP

SEQ ID NO: 94599 - protein, 99 aa, Homo sapiens
MSNNGLDIQDKPPAPPMRNTSTMIGAGSKDAGTLNHGSKPLPPNPEEKKKKDRFYRSILPGDKTNKKKEKERPEISLPSDFEHTIHVGFDAVTGEFTGM

SEQ ID NO: 94600 - protein, 111 aa, Homo sapiens
AAAWLLLGAATGLTRGPAAAFTAARSDAGIRAMCSEIILRQEVLKDGFHRDLLIKVKFGESIEDLHTCRLLIKQDIPAGLYVDPYELASLRERNITEEKTSWRRLWLPSDN

SEQ ID NO: 94601 - protein, 45 aa, Homo sapiens
VITALYYESQVNGISIKFILMRSVYIIVTGDQNPIHTTLSKELHS

SEQ ID NO: 94602 - protein, 101 aa, Homo sapiens
MTKMDIRGAVDAAVPTNIIAAKAAEVRANKVNWQSYLQGQMISAEDCEFIQRFEMKRSPEEKQEMLQTEGSQCAKTFINLMTHICKEQTVQYILTMVDDML

SEQ ID NO: 94603 - protein, 283 aa, Homo sapiens
MAEFLDDQETRLCDNCKKEIPVFNFTIHEIHCQRNIGMCPTCKEPFPKSDMETHMAAEHCQVTCKCNKKLEKRLLKKHEETECPLRLAVCQHCDLELSILKLKEHEDYCGARTELCGNCGRNVLVKDLKTHPEVCGREGEEKRNEVAIPPNAYDESWGQDGIWIASQLLRQIEALDPPMRLPRRPLRAFESDVFHNRTTNQRNITAQVSIQNNLFEEQERQERNRGQQPPKEGGEESANLDFMLALSLQNEGQASSVAEQDFWRAVCEADQSHGGPRSLSDIK

SEQ ID NO: 94604 - protein, 833 aa, Homo sapiens
MSSMWSEYTIGGVKIYFPYKAYPSQLAMMNSILRGLNSKQHCLLESPTGSGKSLALLCSALAWQQSLSGKPADEGVSEKAEVQLSCCCACHSKDFTNNDMNQGTSRHFNYPSTPPSERNGTSSTCQDSPEKTTLAAKLSAKKQASIYRDENDDFQVEKKRIRPLETTQQIRKRHCFGTEVHNLDAKVDSGKTVKLNSPLEKINSFSPQKPPGHCSRCCCSTKQGNSQESSNTIKKDHTGKSKIPKIYFGTRTHKQIAQITRELRRTAYSGVPMTILSSRDHTCVHPEVVGNFNRNEKCMELLDGKNGKSCYFYHGVHKISDQHTLQTFQGMCKAWDIEELVSLGKKLKACPYYTARELIQDADIIFCPYNYLLDAQIRESMDLNLKEQVVILDEAHNIEDCARESASYSVTEVQLRFARDELDSMVNNNIRKKDHEPLRAVCCSLINWLEANAEYLVERDYESACKIWSGNEMLLTLHKMGITTATFPILQGHFSAVLQKEEKISPIYGKEEAREVPVISASTQIMLKGLFMVLDYLFRQNSRFADDYKIAIQQTYSWTNQIDISDKNGLLVLPKNKKRSRQKTAVHVLNFWCLNPAVAFSDINGKVQTIVLTSGTLSPMKSFSSELGVTFTIQLEANHIIKNSQVWVGTIGSGPKGRNLCATFQNTETFEFQDEVGALLLSVCQTVSQGILCFLPSYKLLEKLKERWLSTGLWHNLELVKTVIVEPQGGEKTNFDELLQVYYDAIKYKGEKDGALLVAVCRGKVSEGLDFSDDNARAVITIGIPFPNVKDLQVELKRQYNDHHSKLRGLLPGRQWYEIQAYRALNQALGRTF

SEQ ID NO: 94605 - protein, 129 aa, Homo sapiens
MLLGGWLLLAFNAIFLLSWAVAPKGLCPRRSSVPMPGVQAVAATAMIVGLLIFPIGLASPFIKEVCEASSMYYGGKCRLGWGYMTAILNAVLASLLPIISWPHTTKVQGRTIIFSSATERIIFVPEMNK

SEQ ID NO: 94606 - protein, 241 aa, Homo sapiens
  MOD_RES (1)..(1): Any amino acid
XWIKATFVGHYSITLKTGVQWHNLASLQHLPPRFKQFSYLSLPSSWELQPEKCKNKKKWYKSALQEACLLYGYSHEQRLEMCCLSKLQDKSETHDKVAALVKKRKQTSKNNIEKKKPKFRKRKRKAILKCSFENVYSDDALSKENRVVCETEVLLKELEQMLQQALQPTATPDESEEGHGEEINMGEKLSKCSPEAPAGSLFENHYEEDYLVIDGIKLKAGECIEDITNKFKEIDALMSEF

SEQ ID NO: 94607 - protein, 363 aa, Homo sapiens
  MOD_RES (1)..(1): Any amino acid
XAKSSSESSSEESSSESSSEEEEEEDEDEEEEESESSDSEEERAHRLAELQEQLRAVHEQLAALSQGPISKPKRKREKKEKKKKRKAEKHRGRAGADEDDKGPRAPRPPQPKKSKKASGSGGGSAALGPSGFGPSGGSGTKLQAGVQWRDLGLLQPPLLGFKRFSCLSLPSSQDYRLPKKATKTAPPALPTGYDSEEEEESRPMSYDEKRQLSLDINKLPGEKLGRVVHIIQAREPSLRDSNPEEIEIDFETLKPSTLRELERYVLSCLRKKPRKPYTIKKPVGKTKEELALEKKRELEKRLQDVSGQLNSTKKPPKKANEKTESSSAQQVAVSRLSASSSSSDSSSSSSSSSSSDTSDSDSG

SEQ ID NO: 94608 - protein, 117 aa, Homo sapiens
MCVPGFRSSSNQDRFITNDGTVCIENVNANCHLDNVCIAANINKTLTKIRSIKEPVALLQEVYRNSVTDLSPTDIITYIEILAESSSLLGYKNNTISAKDTLSNSTLTEFVKTVNNF

SEQ ID NO: 94609 - protein, 54 aa, Homo sapiens
  MOD_RES (1)..(1): Any amino acid
XAQSDSELPSYHQNDVSLDRGYTSDSEVYTDHGRPGKIHRSATDADVVNSGWEG

SEQ ID NO: 94610 - protein, 155 aa, Homo sapiens
MSALPQEPTENLAPFLKELDSAGELPLGPEPFLAAHQDLNDKRTPEERLPEVVPLLNRDQNQALVQLPRLKWVQTTDLDRAAGHQADEILVPLDSKVSRPTKFVVSPKNLKKDLAERWSLPEIVGIPHQLSKPQRQKQTLPDDYLSMDTLYPGSL

SEQ ID NO: 94611 - protein, 232 aa, Homo sapiens
  MOD_RES (1)..(1): Any amino acid
XKERYEKEKTFKRKEEEMKKEKDTLRDKGKKAESTESIGSSEKTEKKEEVVKRDRIRNKDRPAMQLYQPGARSRNRLCPPDDSTKSGDSAAERKQGRPGMQSYHPGVQSHYQHYFPDDSTNYRYSPVEEKQDCPWMQCYHRGARGRGRLWHPDDKSGDSAVERKQNHPGMQRYHPGARSQGRLSHPDDITKSGDSAVERKQDHPGMKLYHPGARSPGRFWWQDGSTNLEIQQ

SEQ ID NO: 94612 - protein, 233 aa, Homo sapiens
MDTFSTVISSSIQLLVQDLDAACDPALTAMSKMQWQNVEHVGDQSPYVTSVILHIKQNVPIIRDNLASTRKYFTQFCVKFANSFIPKFITHLFKCKPISMVGAEQLLLDTHSLKMVLLDLPSISSQVVRKAPASYTKIVVKGMTRAEMILKVVMAPHEPLVVFVDNYIKLLTDCNTETFQKILDMKSKPDSEKPLEEDGPGHVHFRILTGPACPAETTCTGRMGQGQGDEDRG

SEQ ID NO: 94613 - protein, 44 aa, Homo sapiens
MSKRDIVLTNVTVVQLLRQPCPDLDASVAWSCAPAWRRVLRWWL

SEQ ID NO: 94614 - protein, 69 aa, Homo sapiens
MPGAFSQNSSKRDKISVAQAVLELLGSSSPPTSAFRVAGTIRHTPPRPTNTRLSTRSLWTNCTRCSRRL

SEQ ID NO: 94615 - protein, 115 aa, Homo sapiens
MPAIMTMLADHAARQLLDFSQKLDINLLDNVVNCLYHGEGAQQRMAQEVLTHLKEHPDAWTRVDTILEFSQNMNTKYYGLQILENVIKTRWKILPRNQCEACAMNSHRYFNCVSL

SEQ ID NO: 94616 - protein, 76 aa, Homo sapiens
MDFDKKGGKGETEEGRRMSKAGGGRSSHGIRSSGTSSGVLMVGPNFRVGKKIGCGNFGELRLGKNLYTNEYVAIKL

SEQ ID NO: 94617 - protein, 151 aa, Homo sapiens
MWNPNAGQPGPNPYPPNIGCPGGSNPAHPPPINPPFPPGPCPPPPGAPHGNPAFPPGGPPHPVPQPGYPGCQPLGPYPPPYPPPAPGIPPVNPLAPGMVGPAVIVDKKMQKKMKKAHKKMHKHQKHHKYHKHGKVSTLWRLAREGVPPQRD

SEQ ID NO: 94618 - protein, 74 aa, Homo sapiens
MAALKEDRSYGLSCGRVSDGSKVSVFHVKLTDSALRAFESYRARQDSVSLRPSIRFQGSQGPESSAQLDVGIWT

SEQ ID NO: 94619 - protein, 6516 aa, Homo sapiens
MKGARWRRVPWVSLSCLCLCLLPHVVPGTTEDTLITGSKTPAPVTSTGSTTATLEGQSTAASSRTSNQDISASSQNHQTKSTETTSKAQTDTLTQMMTSTLFSSPSVHNVMETVTQETAPPDEMTTSFPSSVTNTLMMTSKTITMTTSTDSTLGNTEETSTAGTESSTPVTSAVSITAGQEGQSRTTSWRTSIQDTSASSQNHWTRSTQTTRESQTSTLTHRTTSTPSFSPSVHNVTGTVSQKTSPSGETATSSLCSVTNTSMMTSEKITVTTSTGSTLGNPGETSSVPVTGSLMPVTSAALVTVDPEGQSPVTFSRTSTQDTTAFSKNHQTQSVETTRVSQINTLNTLTPVTTSTVLSSPSGFNPSGTVSQETFPSGETTISSPSSVSNTFLVTSKVFRMPISRDSTLGNTEETSLSVSGTISAITSKVSTIWWSDTLSTALSPSSLPPKISTAFHTQQSEGAETTGRPHERSSFSPGVSQEIFTLHETTTWPSSFSSKGHTTWSQTELPSTSTGAATRLVTGNPSTGAAGTIPRVPSKVSAIGEPGEPTTYSSHSTTLPKTTGAGAQTQWTQETGTTGEALLSSPSYSVTQMIKTATSPSSSPMLDRHTSQQITTAPSTNHSTIHSTSTSPQESPAVSQRGHTQAPQTTQESQTTRSVSPMTDTKTVTTPGSSFTASGHSPSEIVPQDAPTISAATTFAPAPTGDGHTTQAPTTALQAAPSSHDATLGPSGGTSLSKTGALTLANSVVSTPGGPEGQWTSASASTSPDTAAAMTHTHQAESTEASGQTQTSEPASSGSRTTSAGTATPSSSGASGTTPSGSEGISTSGETTRFSSNPSRDSHTTQSTTELLSASASHGAIPVSTGMASSIVPGTFHPTLSEASTAGRPTGQSSPTSPSASPQETAAISRMAQTQRTRTSRGSDTISLASQATDTFSTVPPTPPSITSSGLTSPQTQTHTLSPSGSGKTFTTALISNATPLPVTYASSASTGHTTPLHVTDASSVSTGHATPLPVTDTSSESTGHATPLPVTSPSSVSTGHTTPLPVTDTSSESTGHVTPLPVTSLSSASTGDSTPLPVTDTSSASTGHVTPLPVTSLSSASTGDTTPLPVTDTSSASTGHATSLPVTDTSSVSTGHTTPLPVTDTSSASTGHATSLPVTDTSSVSTAHATPLPVTGLSSASTDDTTRLPVTDVSSASTGQAIPLPVTSPSSASTGDTTPLPVTDASSASTGDTTSLPVTIPSSASSGHTTSLPVTDASSVSTGHATSLLVTDASSVSTGDTTPLPVTDTNSASTGDTTPLHVTDASSVSTGHATSLPVTSLSSASTGDTTPLPVTSPSSASSGHTTPLPVTDASSVPTGHATSLPVTDASSVSTGHATPLPVTDASSVSTGHATPLPVTDTSSVSTGQATPLPVTSLSSASTGDTTPLPVTDTSSASTGQDTPLPVTSLSSVSTGDTTPLPVTSPSSASTGHATPLLVTDASSVSTGHATSLLVTDASSVSTGHATALHVTDASSLSTGDTTPLPVTSPSSASTGDTTPLPVTDTSSASTGHATSLPVTDTSSASTGHATPLPVTDTSSASTGQATPLPVTGPSSASTGHAIPLLVTDTSSASTGQATPLPVTSLSSASTGDTTPLPVTDASSVSTGHATSLPVTSLSSVSTGDTTPLPVTSPSSASSGHTTPLPVTDASSVSTGDTTPLPVTSPSSASSGHTTPLPVTSPSSASSGHTTPLPVTDASSASTGDTTPLPVTDTSSASTGHATHLPVTGLSSASTGDTTRLPVTNVSSASTGHATPLPVTSTSSASTGDTTPLPGTDTSSVSTGHTTPLLVTDASSVSTGDTTRLPVTSPSSASTGHTTPLPVTDTPSASTGDTTPLPVTNASSLSTRHTTSLHVTSPSSASTGHATSLPVTDTSSVSTGHATPLHVTSPSSASTGDTTPLPVTDTYSASTGQATPLPVTDTSSASTGDTTPLPVTDTSSASTGHATPLPVTNTSSVSTGHATPLHVTSPSSASTGHTTPLPVTDASSVSTGHATSLPVTDASSVFTGHATSLPVTIPSSASSGHTTPLPVTDASSVSTGHATSLPVTDASSVSTGHATPLPVTDASSVSTGHATPLPVTDTSSVSTGHATPLPLTSLSSVSTGDTTPLPVTDTSSASTGQATPLPVTSLSSVSTGDTTPLPVTDTSSASTGHATSLPVTDTSSASTGHATPLPDTDTSSASTGHATPLPVTDTSSASTGHATLLPVTDTSSASIGHATPLPVTDTSSISTGHATPLHVTSPSSASTGHATPLPVTDTSSASTGHANPLHVTSPSSASTGHATPLPVTDTSSASTGHATPLPVTSLSSVSTGDTTPLPVTSPSSASTGHTTPLPVTDTSSASTGQATALPVTSTSSASTGDTTPLPVTDTSSASTGQATPLPVTSLSSVSTGDTTPLPVTSPSSASTGHATPLLVTDASSASTGQATPLPVTDTSSAYTGDTTSLPVTDTSSSSTGDTTPLLVTETSSASTGHATPLHVTSPSSASTGDTTPVPVTDTSSVSTGHATPLPVTGLSSASTGDTTRLPVTDISSASTGQATPLPVTNTSSASTGHATPLPVTGLSSASTGDTTRLPVTDISSASTGQATPLPVTNTSSVSTGDTMPLPVTSPSSASTGHATPLPVTSTSSASTGHATPVPVTSTSSASTGHTTPLPVTDTSSASTGDTTPLPVTSPSSASTGHTTPLHVTIPSSASTGDTSTLPVTGASSASTGHATPLPVTDTSSVSTGHATPLPVTSFSSVSTGDTTPLPVTDTSSVSTGHATPLPVTSFSSVSTGDTTPLPVTDASSASTGHATPLPVTDTSSVSTGHATPLPLTSLSSVSTGDTTTLPVTDTSSVSTGHATPLPVTSFSSVSTGDTTPLPVTDASSASTGHATPLPVTDTSSVSTGHATPLPVTSLSSVSTGDTTPLPVTDASSASTGQATPLPVTSLSSVSTGDTTPLPVTIPSSASSGHTTSLPVTDTSSASTGQATPLPVTSLSSVSTGDTTPLLVTDASSVSTGHATPLPVTDTSSASTGDTTRLPVTDTSSASTGQATPLPVTSLSSVSTGDTTPLLVTNTSSVSRGHATSLPVTIPSSSSSGHTTPLPVTSTSSVSTGHVTPLPVTSTSSASTGHATSLPVTDTSSVSTGHATSLPVTDTSSVSTGHATPLPVTDASSVSTGHATPLPVTDASSASTGDTTPLPVTNTSSASTGQATPLPVTSLSSVSTGDTMPLPVTSPSSASTGHATPLPVTGLSSASTGDTTPLPVTDTSSASTGHVTPLPVTSLSSASTGDSTPLPVTDTSSASTGHVTPLPVTSLSSASTGDTTPLPVTDTSSASTGHATPLHVTDASSASTGQATLLPVTSLSSVSTGDTTPLPVTSPSSASTGHATPLLVTDTSSASTGHATPLPVTDASSVSTGHATSLPVTIRSSGSTGHTTPLPVTDTSSASTGQATSLLVTDTSSVSTGDTTPLPVTSTSSASTGHVTPLHVTSPSSASTGHATPLPVTSLSSASTGDTMPLPVTSPSSASTGDTTPLPVTDASSVSTGHTTPLPVTSPSSASTGHTTPLPVTDTTSASKGDTTPLPVTSPSSASTGHTTPLPVTDTSSASTGDTTPLPVTSPSSASTGHATPLPVTNASSLSTGHATPLHVTSPSSASTGHATPLPVTSTSSASTGHATSLPVTSTSSASTGHATPLPVTDNSSVSTGHATPLPVTGLSSATTDDTTRLPVTDVSSASTGQATPLPVTSLSSVSTGDTTPLPVTSPSSASTGHASPLLVTDASSASTGQATPLPVTDTSSVSTAHATPLPVTGLSSASTDDTTRLPVTDVSSASTGQAIPLPVTSPSSASTGDTTPLPVTDASSASTGDTTSLPVTIPSSASSGHTTSLPVTDASSVSTGHATSLLVTDASSVSTGDTTPLPVTDTNSASTGDTTPLHVTDASSVSTGHATSLPVTSLSSASTGDTTPLPVTSPSSASSGDTTPLPVTDTSSASTGHATHLPVTGLSSASTGDTTRLPVTNVSSASTGHATPLPVTSTSSASTGDTTPLPGTDTSSVSTGHTTPLLVTDASSVSTGDTTRLPVTSPSSASTGHTTPLHVTDASSVSTGHTTPLPVTDTSSASTGQATSLLVTDTSSVSTGDTTPLPVTSTSSASTGHVTPLHVTSPSSASTGHATPLPVTSLSSASTGDTTPLPVTDTSSVSTGHTTPLPVTSPSSASTGHTTPLPVTDTSSASKGDTTPLPVTSPSSASTGHTTPLPVTDTSSASTGDTTPLPVTNASSLSTGHATPLHVTSPSSASTGHATPLPVTSTSSASTGHATPLPVTSTSSASTGHATPLPVTDNSSVSTGHATPLPVTGLSSATTDDTTRLPVTDVSSASTGQATPLPVTSLSSVSTGDTTPLPVTSPSSASTGHASPLLVTDASSASTGQATPLPVTDTSSVSTAHATPLPVTGLSSASTDDTTRLPVTDVSSASTGQAIPLPVTSPSSASTGDTTPLPVTDASSASTGDTTSLPVTIPSSASSGHTTSLPVTDASSVSTGHATSLLVTDASSVSTGDTTPLPVTDTNSASTGDTTPLHVTDASSVSTGHATSLPVTSLSSASTGDTTPLPVTSPSSASSGHTTSLPVTDASSVSTGHATSLPVTIPSSASSGHTTPLPVTDASSVPTGHATSLPVTDASSVSTGHATPLPVTDASSVSTGHATPLPVTDTSSVSTGQATPLPVTSLSSASSTGDTTPLPVTDTSSASTGQDTPLPVTSLFSVSTGDTTPLPVTSPSSASTGHATHLLVTDASSVSTGHATSLLVTDASSVSTGHATALHVTDASSLSTGDTTPLPVTSPSSASTGDTTPLPVTDTSSVSTGHATSLPVTDTSSASTGHATSLPVTDTSSASTGQATPLPVTSPSSASTGHAIPLLVTDTSSASTGQATPLPVTSLSSASTGDTTPLPVTDASSVSTGHATSLPVTSLSSVSTGDTTPLPVTSPSSASTGHATPLHVTSPSSASTGHATPLPVTSLSSASTGDTTPLPVTSPSSASTGHATPLHVTDASSVSTGDTTPLPVTSPSSASSGHTTPLPVTDASSASTGDTTPLPVTDTSSASTGHATHLPVTGLSSASTGDTTRLPVTDVSSASTGHATPLPVTSTSSASTGDTTPLPGTDTSSVSTGHTTPLLVTDASSVSTGDTTRLPVTSPSSASTGHTTPLPVTDTPSASTGDTTPLPVTNASSLSTRHATSLHVTSPSSASTGHATPLPVTDTSAASTGHATPLPVTSTSSASTGDTTPLPVTDTSSASTGHATPLPVTNTSSVSTGHATPLHVTSPSSASTGHTTPLPVTDASSVSTGHATSLPVTDASSVSTGHATPLPVTDASSVSTGHATPLPLTSLSSVSTGDTTPLPVTDTSSASTGQATPLPVTSLSSVSTGDTTPLPVTDTSSASTGHATSLPVTDTSSASTGHATPLPVTDTSSISTGHATPLHVTSPSSASTGHATPLPVTDTSSASTGHATPLPVTSLSSVSTGDTTPLPVTSPSSASTGHATPLLVTDASSASTGQATPLPVTSLSSVSTGDTTPLPVTSPSSASTGHATSLPVTDTSSASTGDTTSLPVTDTSSAYTGDTTSLPVTDTSSSSTGDTTPLLVTETSSASTGDTTPVPVTDTSSVSTGHATPLPVTGLSSASTGDTTRLPVTDISSASTGQATPLPVTNTSSVSTGDTMPLPVTSPSSASTGHATPLPVTSTSSASTGHATPVPVTSTSLASTGHTTPLPVTSPSSASTGHTTPLPVTDTSSASTGDTTPLPVTNASSLSTGHTTPLHVTIPSSASTGDTSTLPVTGASSASTGHATPLPVTDTSSVSTGHATPLPVTSFSSVSTGDTTPLPVTDASSASTGHATPLPVTDTSSASTGDTTPLPVTDASSASTGQATPLPVTSLSSVSTGDTTPLPVTIPSSASSGHTTSLPVSDTSSASTGQATPLPVTSLSSVSTGDTTPLLVTDASSVSTGHATPLPVTDTSSASTGDTTRLPVTDTSSASTGQATPLPVTSLSSVSTGDTTPLLVTNTSSVSTGHATSLPVTIPSSSSSGHTTPLPVTSTSSVSTGHVTPLHVTSPSSSSTGQATPLPVTSTSSVSTGHVTPLHVTSPSSASTGHATPLPVTSTSSASTGHATPLPVTDASSVSTGHATPLPVTDTSSASTGDTTPLPVTDTSSASTGQATPLPVTSLSSVSTGHATPLAVSSATSASTVSSDSPLKMETSGMTTPSLKTDGGRRTATSPPPTTSQTIISTIPSTAMHTRSTAAPIPILPERGVSLFPYGADAGDLEFVRRTVDFTSPLFKPATGFPLGSSLRDSLYFTDNGQIIFPESDYQIFSYPNPLPTGFTGRDPVALVAPFWDDADFSTGRGTTFYQEYETFYGEHSLLVQQAESWIRKMTNNGGYKARWALKVTWVNAHAYPAQWTLGSNTYQAILSTDGSRSYALFLYQSGGMQWDVAQRSVEMAISKTAH

SEQ ID NO: 94620 - protein, 233 aa, Homo sapiens
MTVLQEPVQAAIWQALNHYAYRDAVFLAERLYAEVHSEEALFLLATCYYRSGKAYKAYRLLKGHSCTTPQCKYLLAKCCVDLSKLAEGEQILSGGVFNKQKSHDDIVTEFGDSACFTLSLLGHVYCKTDRLAKGSECYQKSLSLNPFLWSPFESLCEIGEKPDPDQTFKFTSLQNFSNCLPNSCTTQVPNHSLSHRQPETVLTETPQDTIVQNKPKTGRSLLGGPAALSPLTP

SEQ ID NO: 94621 - protein, 164 aa, Homo sapiens
MQGGNSGVRKREEEGDGAGAVAAPPAIDFPAEGPDPEYDESDVPAEIQVLKEPLQQPTFPFAVANQLLLVSLLEHLSHVHEPNPLRSRQVFKLLCQTFIKMGLLSSFTCSDEFSSLRLHHNRAITHLMRSAKERVRQDPCEDISRIQKIRDEKFHFSPSFPNQH

SEQ ID NO: 94622 - protein, 2545 aa, Homo sapiens
MNHPFGKEEAASQKQLFGFFCECLRRGEWELAQACVPQLQEGQGDIPKRVEDILQALVVCPNLLRCGQDINPQRVAWVWLLVLEKWLAREKKLLPVVFRRKLEFLLLSEDLQGDIPENILEELYETLTQGAVGHVPDGNPRRESWTPRLSSEAVSVLWDLLRQSPQPAQALLELLLEEDDGTGLCHWPLQNALVDLIRKALRALQGPDSVPPGVVDAIYGALRTLRCPAEPLGVELHLLCEELLEACRTEGSPLREERLLSCLLHKASRGLLSLYGHTYAEKVTEKPPRATASGKVSPDHLDPERAMLALFSNPNPAEAWKVAYFYCLSNNKHFLEQILVTALTLLKEEDFPNLGCLLDREFRPLSCLLVLLGWTHCQSLESAKRLLQTLHRTQGPGCDELLRDACDGLWAHLEVLEWCIQQSSNPIPKRDLLYHLHGGDSHSVLYTLHHLTNLPALREEDVLKLLQKVPAKDPQQEPDAVDAPVPEHLSQCQNLTLYQGFCAMKYAIYALCVNSHQHSQCQDCKDSLSEDLASATEPANDSLSSPGAANLFSTYLARCQQYLCSIPDSLCLELLENIFSLLLITSADLHPEPHLPEDYAEDDDIEGKSPSGLRSPSESPQHIAHPERKSERGSLGVPKTLAYTMPSHVKAEPKDSYPGPHRHSFLDLKHFTSGISGFLADEFAIGAFLRLLQEQLDEISSRSPPEKPKQESQSCSGSRDGLQSRLHRLSKVVSEAQWRHKVVTSNHRSEEQPSRRYQPATRHPSLRRGRRTRRSQADGRDRGSNPSLESTSSELSTSTSEGSLSAMSGRNELHSRLHPHPQSSLIPMMFSPPESLLASCILRGNFAEAHQVLFTFNLKSSPSSGELMFMERYQEVIQELAQVEHKIENQNSDAGSSTIRRTGSGRSTLQAIGSAAAAGMVFYSISDVTDKLLNTSGDPIPMLQEDFWISTALVEPTAPLREVLEDLSPPAMAAFDLACSQCQLWKTCKQLLETAERRLNSSLERRGRRIDHVLLNADGIRGFPVVLQQISKSLNYLLMSASQTKSESVEEKGGGPPRCSITELLQMCWPSLSEDCVASHTTLSQQLDQVLQSLREALELPEPRTPPLSSLVEQAAQKAPEAEAHPVQIQTQLLQKNLGKQTPSGSRQMDYLGTFFSYCSTLAAVLLQSLSSEPDHVEVKVGNPFVLLQQSSSQLVSHLLFERQVPPERLAALLAQENLSLSVPQVIVSCCCEPLALCSSRQSQQTSSLLTRLGTLAQLHASHCLDDLPLSTPSSPRTTENPTLERKPYSSPRDSSLPALTSSALAFLKSRSKLLATVACLGASPRLKVSKPSLSWKELRGRREVPLAAEQVARECERLLEQFPLFEAFLLAAWEPLRGSLQQGQSLAVNLCGWASLSTVLLGLHSPIALDVLSEAFEESLVARDWSRALQLTEVYGRDVDDLSSIKDAVLSCAVACDKEGWQYLFPVKDASLRSRLALQFVDRWPLESCLEILAYCISDTAVQEGLKCELQRKLAELQVYQKILGLQSPPVWCDWQTLRSCCVEDPSTVMNMILEAQEYELCEEWGCLYPIPREHLISLHQKHLLHLLERRDHDKALQLLRRIPDPTMCLEVTEQSLDQHTSLATSHFLANYLTTHFYGQLTAVRHREIQALYVGSKILLTLPEQHRASYSHLSSNPLFMLEQLLMNMKVDWATVAVQTLQQLLVGQEIGFTMDEVDSLLSRYAEKALDFPYPQREKRSAFSLSTDSVIHLQEIVHQAADPETLPRSPSAEFSPAAPPGISSIHSPSLRERSFPPTQPSQEFVPPATPPARHQWVPDETESICMVCCREHFTMFNRRHHCRRCGRLVCSSCSTKKMVVEGCRENPARVCDQCYSYCNKDVPEEPSEKPEALDSSKNESPPYSFVVRVPKADEVEWILDLKEEENELVRSEFYYEQAPSASLCIAILNLHRDSIACGHQLIEHCCRLSKGLTNPEVDAGLLTDIMKQLLFSAKMMFVKAGQSQDLALCDSYISKVDVLNILVAAAYRHVPSLDQILQPAAVTRLRNQLLEAEYYQLGVEVSTKTGLDTTGAWHAWGMACLKAGNLTAAREKFSRCLKPPFDLNQLNHGSRLVQDVVEYLESTVRPFVSLQDDDYFATLRELEATLRTQSLSLAVIPEGKIMNNTYYQECLFYLHNYSTNLAIISFYVRHSCLREALLHLLNKESPPEVFIEGIFQPSYKSGKLHTLENLLESIDPTLESWGKYLIAACQHLQKKNYYHILYELQQFMKDQVRAAMTCIRFFSHKAKSYTELGEKLSWLLKAKDHLKIYLQETSRSSGRKKTTFFRKKMTAADVSRHMNTLQLQMEVTRFLHRCESAGTSQITTLPLPTLFGNNHMKMDVACKVMLGGKNVEDGFGIAFRVLQDFQLDAAMTYCRAARQLVEKEKYSEIQQLLKCVSESGMAAKSDGDTILLNCLEAFKRIPPQELEGLIQAIHNDDNKVRAYLICCKLRSAYLIAVKQEHSRATALVQQVQQAAKSSGDAVVQDICAQWLLTSHPRGAHGPGSRK

SEQ ID NO: 94623 - protein, 159 aa, Homo sapiens
MAVARAGVLGVQWLQRASRNVMPLGARTASHMTKDMFPGPYPRTPEERAAAAKKYNMRVEDYEPYPDDGMGYGDYPKLPDRSQHERDPWYSWDQPGLRLNWGEPMHWHLDMYNRNRVDTSPTPVSWHVMCMQLFGFLAFMIFMCWVGDVYPVYQPVDRP

SEQ ID NO: 94624 - protein, 19 aa, Homo sapiens
MLRGGPLPGPYRLRQFHLH

SEQ ID NO: 94625 - protein, 70 aa, Homo sapiens
MGAAAAEADRTLFVGNLETKVTEELLFELFHQEVVMPHKMSVCHIPNIMLEIQALPPHLLAAGTKGLWIT

SEQ ID NO: 94626 - protein, 291 aa, Homo sapiens
  MOD_RES (1)..(1): Any amino acid
XETELLRRNVADLEEQNKRITAELNKYKYKSGGHDSARHHDNAKTEALQEELKAARLQINELSGKVMQLQYENRVLMSNMQRYDLASHLGIRGSPRDSDAESDAGKKESDDDSRPPHRKREGPIGGESDSEEVRNIRCLTPTRSFYPAPGPWPKSFSDRQQMKDIRSEAERLGKTIDRLIADTSTIITEARIYVANGDLFGLMDEEDDGSRIREHELLYRINAQMKAFRKELQTFIDRLEVPKSADDRGAEEPISMFQPIILLILILVLFSSLSYTTIFKLVFLFTLFFVL

SEQ ID NO: 94627 - protein, 85 aa, Homo sapiens
MKIDAFHYVQLGTAYRGLQPVPDEEGPSIKQFMDIFSLPEMALLSCVVDYFLGHSLEFDQAHLYKDVTDAIRDVHVKGLMYQWIE

SEQ ID NO: 94628 - protein, 142 aa, Homo sapiens
MTDSSKTDTLNSSSSGTTASSLEKIKVQANAPLIKPPAHPSAILTVLRKPNPPPPPPRLTPVKCEDPKRVVPTANPVKTNGTLLRNGGLPGGPNKIPNGDICCIPNSNLDKAPVQLLMHRPEKDRCPQAGPRERVRFNEKVQ

SEQ ID NO: 94629 - protein, 265 aa, Homo sapiens
MPQGEGSHAARGGVLGLGAGRGTGTGGTSELVPVEGGARRRGAELGGSGDGAWLLKEELEEVKGGASGSEAEGDGAEALGAGLQPVSGVATAPEKGSSSVEGGAAGPGAVPRPPKGGAKEPSEEPGPSNGPGRPRGGGLRGGRAWGRRRPRTPPGEVVWVERARRPADTGPVWVPRRPPRAQSWGGAPGGSTGPGWGVSPEDPGSSEPPSGDVWVPRGRPPAAAAEVLVCWTGGSWVWREWGRPVGATAVQPDRVWTLRKGTGGN

SEQ ID NO: 94630 - protein, 68 aa, Homo sapiens
MAAALSGLAVRLSRSAAARSYGVFCKGLTRTLLIFFDLAWRLRINFPYLYIVASMMLNVRLQVHIEIH

SEQ ID NO: 94631 - protein, 96 aa, Homo sapiens
  MOD_RES (1)..(1): Any amino acid
XEWQKGAPREKYAKDDMNIRDQPFGIQVRNVRCIKCHKWGHVNTDRECPLFGLSGINASSVPTDGSGRAQWLTPVIPALWEAKAGGSFEVRSSRPA

SEQ ID NO: 94632 - protein, 1004 aa, Homo sapiens
MHPDATDSGGAGPSPARAAGAGGRPVSGFRGERRPESPGDAEAAAAAAPGAPGGRSWWKPVAVAALAAVALSFLGPGSGEAAGAAGLSSVLFRLSLYLSCAAAAFLLGILFALVCRSPRAQPPDFAAAWSRLAATSAARRPPGSPVYGNSHESAQSRRVVISHNMDKALKEVFDYSYRDYILSWYGNLSRDEGQLYHLLLEDFWEIARQLHHRLSHVDVVKVVCNDVVRTLLTHFCDLKAANARHEEQPRPFVLHACLRNSDDEVRFLQTCSRVLVFCLLPSKDVQSLSLRIMLAEILTTKVLKPVVELLSNPDYINQMLLAQLAYREQMNEHHKRAYTYAPSYEDFIKLINSNSDVEFLKQLRYQIVVEIIQATTISSFPQLKRHKGKETAAMKADLLRARNMKRYINQLTVAKKQCEKRIRILGGPAYDQQEDGALDEGEGPQSQKILQFEDILANTFYREHFGMYMERMDKRALISFWESVEHLKNANKNEIPQLVGEIYQNFFVESKEISVEKSLYKEIQQCLVGNKGIEVFYKIQEDVYETLKDRYYPSFIVSDLYEKLLIKEEEKHASQMISNKDEMGPRDEAGEEAVDDGTNQINEQASFAVNKLRELNEKLEYKRQALNSIQNAPKPDKKIVSKLKDEIILIEKERTDLQLHMARTDWWCENLGMWKASITSGEVTEENGEQLPCYFVMVSLQEVGGVETKNWTVPRRLSEFQNLHRKLSECVPSLKKVQLPSLSKLPFKSIDQKFMEKSKNQLNKFLQNLLSDERLCQSEALYAFLSPSPDYLKVIDVQGKKNSFSLSSFLERLPRDFFSHQEEETEEDSDLSDYGDDVDGRKDALAEPCFMLIGEIFELRGMFKWVRRTLIALVQVTFGRTINKQIRDTVSWIFSEQMLVYYINIFRDAFWPNGKLAPPTTIRSKEQSQETKQRAQQKLLENIPDMLQSLVGQQNARHGIIKIFNALQETRANKHLLYALMELLLIELCPELRVHLDQLKAGQV

SEQ ID NO: 94633 - protein, 142 aa, Homo sapiens
MAEASSANLGSGCEEKRHEGSSSESVPPGTTISRVKLLDTMVDTFLQKLVAAGRRPSGIPEKDLHSVMAPYFLQQRDTLRRHVQKQEAENQQLADAVLAGRRQVEELQLQVQAQQQAWQVRSPAVQSPAKVQPLCPSRRAAR

SEQ ID NO: 94634 - protein, 119 aa, Homo sapiens
MKTFVDQYGQRDDGKIGIVELAHVLPTEENFLLLFRCQQLKSCEEFMKTWRKYDTDHSGFIETEELKNFLKDLLEKANKTVDDTKLAEYTDLMLKLFDSNNDGKLELTEMARLLPVQEN

SEQ ID NO: 94635 - protein, 181 aa, Homo sapiens
MKGLYFQQSSTDEEITFVFQEKEDLPVTEDNFVKLQVKACALSQINTKLLAEMKMKKDLFPVGREIAGIVLDVGSKVSFFQPDDEVVGILPLDSEDPGLCEVVRVHEHYLVHKPEKVTWTEAAGSIRDGVRAYTALHYLSHLSPGKSVLIMDGASAFGTIAIQLAHHRGAKVISTACSLED

SEQ ID NO: 94636 - protein, 162 aa, Homo sapiens
MLSSCVRPVPTTVRFVDSLICNSSRSFMDLKALLSSLNDFASLSFAESWDNVGLLVEPSPPHTVNTLFLTNDLTEEVMEEVLQKKADLILSYHPPIFRPMKRITWNTWKERLVIRALENRVGIYSPHTAYDAAPQGVNNWLAKGLGACTSRPIHPSKAPNYP

SEQ ID NO: 94637 - protein, 1067 aa, Homo sapiens
MSRQSTLYSFFPKSPALSDANKASARASREGGRARCPRGLSFPRRGCGLERGWAWARPLARSASPPKAKNLNGGLRRSVAPAAPTSCDFSPGDLVWAKMEGYPWWPCLVYNHPFDGTFIREKGKSVRVHVQFFDDSPTRGWVSKRLLKPYTGSKSKEAQKGGHFYSAKPEILRAMQRADEALNKDKIKRLELAVCDEPSEPEEEEEMEVGTTYVTDKSEEDNEIESEEEVQPKTQGSRRSSRQIKKRRVISDSESDIGGSDVEFKPDTKEEGSSDEISSGVGDSESEGLNSPVKVARKRKRMVTGNGSLKRKSSRKETPSATKQATSISSETKNTLRAFSAPQNSESQAHVSGGGDDSSRPTVWYHETLEWLKEEKRRDEHRRRPDHPDFDASTLYVPEDFLNSCTPGMRKWWQIKSQNFDLVICYKVGKFYELYHMDALIGVSELGLVFMKGNWAHSGFPEIAFGRYSDSLVQKGYKVARVEQTETPEMMEARCRKMAHISKYDRVVRREICRIITKGTQTYSVLEGDPSENYSKYLLSLKEKEEDSSGHTRAYGVCFVDTSLGKFFIGQFSDDRHCSRFRTLVAHYPPVQVLFEKGNLSKETKTILKSSLSCSLQEGLIPGSQFWDASKTLRTLLEEEYFREKLSDGIGVMLPQVLKGMTSESDSIGLTPGEKSELALSALGGCVFYLKKCLIDQELLSMANFEEYIPLDSDTVSTTRSGAIFTKAYQRMVLDAVTLNNLEIFLNGTNGSTEGTLLERVDTCHTPFGKRLLKQWLCAPLCNHYAINDRLDAIEDLMVVPDKISEVVELLKKLPDLERLLSKIHNVGSPLKSQNHPDSRAIMYEETTYSKKKIIDFLSALEGFKVMCKIIGIMEEVADGFKSKILKQVISLQTKNPEGRFPDLTVELNRWDTAFDHEKARKTGLITPKAGFDSDYDQALADIRENEQSLLEYLEKQRNRIGCRTIVYWGIGRNRYQLEIPENFTTRNLPEEYELKSTKKGCKRYWTKTIEKKLANLINAEERRDVSLKDCMRRLFYNFDKNYKDWQSAVECIAVLGKTLNKLVLRL

SEQ ID NO: 94638 - protein, 35 aa, Homo sapiens
MDSSCHNATTKMLATAPARGNMMSTSKPLAFSIER

SEQ ID NO: 94639 - protein, 141 aa, Homo sapiens
MAEKFDCHYCRDPLQGKKYVQKDGHHCCLKCFDKFCANTCVECRKPIGADSKEVHYKNRFWHDTCFRCAKCLHPLANETFVAKDNKILCNKCTTREDSPKCKGCFKAIVAGDQNVEYKGTVWHKDCFTCSNCKQVIGTGSF

SEQ ID NO: 94640 - protein, 112 aa, Homo sapiens
MGKQNSKLRPEVMQDLLESTDFTEHEIQEWYKGFLRDCPSGHLSMEEFKKIYGNFFPYGDASKFAEHVFRTFDANGDGTIDFREFIIALSVTSRGKLEQKLKWAFSMYDLDG

SEQ ID NO: 94641 - protein, 276 aa, Homo sapiens
  MOD_RES (1)..(1): Any amino acid
XTTHQDEEVFKQIFIPILQGLALAAKECSLDSDYFKYPLMALGELCETKFGKTHPVCNLVKVVEKYFSGPAITLENTRVVSQSLQHYLELGRQELFKILHSILLNGETREAALSYMAAVVNANMKKAQMQTDDRLVSTDGFMLNFLWVLQQLSTKIKLETVDPTYIFHPRCRITLPNDETRVNATMEDVNDWLTELYGDQPPFSEPKFPTECFFLTLHAHHLSILPSCRRYIRRLRAIRELNRTVEDLKNNESQWKDSPLATRHREMLKRCKTQLK

SEQ ID NO: 94642 - protein, 87 aa, Homo sapiens
MGTENTPGGKASPDPQDVRPSVFHNIKLFVLCHSLLQLAQLMISGYLKSSISTVEKRFGLSSQTSGLLASFNEVGNTALIVFVSYFG

SEQ ID NO: 94643 - protein, 114 aa, Homo sapiens
MADGETISLPGNREGFLWKRGRDNSQFLRRKFVLLAREGLLKYFTKEQGKSPKAVISIKDLNATFQTEKIGHPHGLQITYRRDGHTRNLFVYHESGKEIVDWFNALRAARLQYL

SEQ ID NO: 94644 - protein, 366 aa, Homo sapiens
MVPSSPRALFLLLLILACPEPRASQNCLSKQQLLSAIRQLQQLLKGQETRFAEGIRHMKSRLAALQNSVGRVGPDALPVSCPALNTPADGRKFGSKYLVDHEVHFTCNPGFRLVGPSSVVCLPNGTWTGEQPHCRGISECSSQPCQNGGTCVEGVNQYRCICPPGRTGNRCQHQAQTAAPEGSVAGDSAFSRAPRCAQVERAQHCSCEAGFHLSGAAGDSVCQDVNECELYGQEGRPRLCMHACVNTPGSYRCTCPGGYRTLADGKSCEDVDECVGLQPVCPQGTTCINTGGSFQCVSPECPEGSGNVSYVKTSPLTWRGLRRWRWTSTCRNTWTAPSRPTTCPRSPSLYPPMTSEGTQGHWGVES

SEQ ID NO: 94645 - protein, 35 aa, Homo sapiens
MGEEGGSASHDEEERASVLLGHSPGKRSRHCPVPA

SEQ ID NO: 94646 - protein, 215 aa, Homo sapiens
PRWPGEPGQGCVGGAGERLQGPRACRGRLEQIVATNLPPEDQDGSGDDSDNFSGSGAGALQDITLSQQTPSTWKDTQLLTAIPTSPEPTGLEATAASTSTLPAGEGPKEGEAVVLPEVEPGLTAREQEATPRPRETTQLPTTHLASTTTATTAQEPATSHPHRDMQPGHHETSTPAGPSQADLHTPHTEDGGPSATERAAEDGASSQLPAAEGSG

SEQ ID NO: 94647 - protein, 232 aa, Homo sapiens
  MOD_RES (1)..(1): Any amino acid
XEKEQLQEEKQELLEYMRKLEARLEKVADEKWNEDATTEDEEAAVGLSCPAALTDSEDESPEDMRLPPYGLCERGDPGSSPAGPREASPLVVISQPAPISPHLSGPAEDSSSDSEAEDEKSVLMAAVQSGGEEANLLLPELGSAFYDMASTIFCRAQIALLPLSPASTPSPTTSGFTVGTLSETSTGGPATPTWKECPICKERFPAESDKDALEDHMDGHFFFSTQDPFTFE

SEQ ID NO: 94648 - protein, 121 aa, Homo sapiens
MATELEYESVLCVKPDVSVYRIPPRASNRGYRASDWKLDQPDWTGRLRITSKGKTAYIKLEDKVSGELFAQAPVEQYPGIAVETVTDSSRYFVIRIQDGTGKRTGILSGTKLGKQVGKAGI

SEQ ID NO: 94649 - protein, 188 aa, Homo sapiens
  MOD_RES (1)..(1): Any amino acid
XKNASGIYAEIDGAKSELQVKLSNLSNLSHDLVQEAIDHAQDLQQEANELSRKLHSSDMNGLVQKALDASNVYENIVNYVSEANETAEFALNTTDRIYDAVSGIDTQIIYHKDESENLLNQARELQAKAESSSDEAVADTSRRVGGALARKSALKTRLSDAVKQLQAAERGKHQRELKSHLLIHWSVR

SEQ ID NO: 94650 - protein, 89 aa, Homo sapiens
YSEEEEESFSSEQEGSDDPLHGQDLFYEDEDLRKVKKTRRKLTSTSAITRCRASLGTKPLRAEMPTPSGMKRRPDHSPITMRCHWTSAT

SEQ ID NO: 94651 - protein, 253 aa, Homo sapiens
MAGSQKEEIMPPQQGVPFQESGCWGSMGAQSRERSGRDHSGTWICAGGSQETFHLGAPVETTCLAGMSGPRPVVLSGPSGAGKSTLLKRLLQEHSGIFGFSVSHTTRNPRPGEENGKDYYFVTREVMQRDIAAGDFIEHAEFSGNLYGTSKVAVQAVQAMNRICVLDVDLQGVRNIKATDLRPIYISVQPPSLHVLEQRLRQRNTETEESLVKRLAAAQADMESSKEPGLFDVVIINDSLDQAYAELKEALSE

SEQ ID NO: 94652 - protein, 38 aa, Homo sapiens
SAEMEPEDSGGIHSQKQKISFLENNLEQLTKVHKQGYG

SEQ ID NO: 94653 - protein, 80 aa, Homo sapiens
RQKSTYTSYPKAEPMPSASSAPPASSLYSSPVLARYLNRNYWEKKQEEARKSPTPSAPVPLTEPAAQPGEGHAAPTNVVE

SEQ ID NO: 94654 - protein, 59 aa, Homo sapiens
MVLLRVLILLLSWAAGMGAPARWRIPKSSPPPRPAAQTRGKLCCLQLGSCIVLYPARRS

SEQ ID NO: 94655 - protein, 53 aa, Homo sapiens
MEKPLFPFRYICYFCWCYGNEILLLWKIHACRFNCRCQFADGRQSWSSYVDDI

SEQ ID NO: 94656 - protein, 287 aa, Homo sapiens
MSPHPTALLGLVLCLAQTIHTQEEDLPRPSISAEPGTVIPLGSHVTFVCRGPVGVQTFRLERESRSTYNDTEDVSQASPSESEARFRIDSVSEGNAGPYRCIYYKPPKWSEQSDYLELLVKETSGGRDSPDTEPGSSAGPTQRPSDNSHNEHAPASQGLKAEHLYILIGVSVVFLFCLLLLVLFCLHRQNQIKQGPPRSKDEEQKPQQRPDLAVDVLERTADKATVNGLPEKDRETDTSALAAGSSQEVTYAQLDHWALTQRTARAVSPQSTKPMAESITYAAVARH

SEQ ID NO: 94657 - protein, 80 aa, Homo sapiens
MYCAYTIPGMGGNSLMYYYNGKAVYAPSASTADYNRDSPGYPSSKPATSTFPSSFFMQELSITLLSRHQFQSSSDVHFPS

SEQ ID NO: 94658 - protein, 796 aa, Homo sapiens
MQHSGIPTKTHPQGYAARYTETAVHRTFQIKTFSTELKNHVMVMDFVKSNWFPSQRRAKVCIIHMCQGLKTAEQTASRYEIHSRLFSSPKDHSAWERNESLSNAGLRDSYHSRRDQIALKNLQSDVTEAKSDFTKETLASQNTKMISSIVISQMIDENKSRENRASLPLPCAIAQSRAHHAKQSLANRSGVNIHRAFALLPGRLGIPAPSDERGPEAELPPKEERPCGGPRRGFASITITARRVGPPARALVWGTAGDSLCPKCRAEDTLFQAPPALANGAHPGRHQRSFACTEFSRNSSVVRLKVPEAHTGLCERRKYWVTHADDKETSFSPDTPLSGKSPLVFSSCVHLRVSQQCPDSIYYVDKSLSVPIEPPQIASPKMHRSVLSLNLNCSSHRLTADGVDGLVNREPISEALKQELLEGDQDLVGQRWNPGLQESHLKETPSLRRVHLGTGACPWSGSFPLENTELANVGANQVTVRKGEKDHTTHCHASDHANQLSIHIPGWSYRAVHTKVFSGSSKRQQGEVCMTVSAPPVEQKPTRHFLPIGDSSPSDDCLSRDLSEPTERRHQSFLKPRILFPGFLCPLQDVCASLQEDNGVQIESKFPKGDYTCCDLVVKIKECKKSEDPTTPEPSPAAPSPAPRDGAGSPGLSEDCSESQQTPARSLTLQEALEVRKPQFISRSQERLKKLEHMVQQRKAQRKEDLRQKQSLLPIRTSKKQFTIPHPLSDNLFKPKERCISEKEMHMRSKRIYDNLPEVKKKKEEQRKRVILQSNRLRAEVFKKQLLDQLLQRNAV

SEQ ID NO: 94659 - protein, 86 aa, Homo sapiens; identical to SEQ ID NO: 80698

SEQ ID NO: 94660 - protein, 543 aa, Homo sapiens
MSRQLNIKSSGDKGNFSVHSAVVPRKAVGSLASYCAAGRGAGAGFGSRSLYSLGGNRRISFNVAGGGVRAGGYGFRPGSGYGGGRASGFAGSMFGSVALGPACLSVCPPGGIHQVTVNKSLLAPLNVELDPEIQKVRAQEREQIKVLNDKFASFIDKVRFLEQQNQVLETKWELLQQLDLNNCKKNLEPILEGYISNLRKQLETLSGDRVRLDSELRSMRDLVEDYKKRYEVEINRRTTAENEFVVLKKDADAAYAVKVELQAKVDSLDKEIKFLKCLYDAEIAQIQTHASETSVILSMDNNRDLDLDSIIAEVRMHYEEIALKSKAEAEALYQTKIQELQLAASRHGDDLKHTRSEMVELNRLIQRIRCEIGNVKKQIFSVSNEPAPCPLWRASLETAIADAEQRGDNALKDAQAKLDELEGALHQAKEELARMLREYQELMSLKLALDMEIATYRKLLEGEECRMSGENPSSVSISVISSSSYSYHHPSSAGVDLGASAVAGSSGSTQSGQTKTTEARGGDLKDTQGKSTPASIPARKATR

SEQ ID NO: 94661 - protein, 72 aa, Homo sapiens
MVTLRKRTLKVLTFLVLFIFLTSFFLNYSHTMVATTWFPKQMVLELSENLKRLIKHRPCTCTHCIGQRKLSA

SEQ ID NO: 94662 - protein, 376 aa, Homo sapiens
MSLRRHIGNPEYLMKRIPQNPRYQHIKSRLDTGNSMTKYTEKLEEIKKNYRYKKDELFKRLKVTTFAQLIIQVASLSDQTLEVTAEEIQRLEDNDSAASDPDAETTARTNGKGNPGEQSPSPEQFINNAGAGDSSRSTLQSVISGVGELDLDKGPVKKAEPHTKDKPYPDCPFLLLDVRDRDSYQQCHIVGAYSYPIATLSRTMNPYSNDILEYKNAHGKIIILYDDDERLASQAATTMCERGFENLFMLSGGEQGLKVLAQKFPEGLITGSLPASCQQALPPGSARKRSSPKGPPLPAENKWRFTPEDLKKIEYYLEEEQGPADHPSRLNQANSSGRESKVPGARSAQNLPGGGPASHSNPRSLSSGHLQGKPWK

SEQ ID NO: 94663 - protein, 90 aa, Homo sapiens
MKKIFSKKGESPLGSFARRQRSSAGGGGEPGEGAYSQPGYHVRDRDLGKIHKAASAGNVAKVQQILLLRKNGLNDRDKMNRMTSHHFYLQ

SEQ ID NO: 94664 - protein, 278 aa, Homo sapiens
MDKGRERMAAAAAAAAAAAAAAQCRSPRCAAERRGFRRELDSWRHRLMHCVGFESILEGLYGPRLRRDLSLFEDCEPEELTDWSMDEKCSFCNLQREAVSDCIPSLDSSQSTPTEELSSQGQSNTDKIECQAENYLNALFRKKDLPQNCDPNIPLVAQELMKKMIRQFAIEYISKSGKTQENRNGSIGPSIVCKSIQMNQAENSLQEEQEGPLDLTVNRMQEQNTQQELSAGAPVFSPSKPFSEEYLPVHKTHSQCSAPLTYHMRYISSVNCLHNLYF

SEQ ID NO: 94665 - protein, 37 aa, Homo sapiens
GSVPNKFYVHNDMFRYEDEVFGDSEPELDEGEVTLKI

SEQ ID NO: 94666 - protein, 20 aa, Homo sapiens
  MOD_RES (1)..(1): Any amino acid
XALNKLLKYEDCKVHQREAI

SEQ ID NO: 94667 - protein, 52 aa, Homo sapiens
DSSENIFTSAKVTHKNEADDYHLRNKTIFLRTSSQCLEEQICCCFQEKWSRM

SEQ ID NO: 94668 - protein, 4393 aa, Homo sapiens
  MOD_RES (1)..(1): Any amino acid
XTTEDTLITGSKTAAPVTSTGSTTATLEGQSTAASSRTSNQDISASSQNHQTKSTETTSKAQTDTLTQMMTSTLFSSPSVHNVMETAPPDEMTTSFPSSVTNTLMMTSKTITMTTSTDSTLGNTEETSTAGTESSTPVTSAVSITAGQEGQSRTTSWRTSIQDTSASSQNHWTRSTQTTRESQTSTLTHRTTSTPSFSPSVHNVTGTVSQKTSPSGETATSSLCSVTNTSMMTSEKITVTTSTGSTLGNPGETSSVPVTGSLMPVTSAALVTFDPEGQSPATFSRTSTQDTTAFSKNHQTQSVETTRVSQINTLNTLTPVTTSTVLSSPSGFNPSGTVSQETFPSGETTTSSPSSVSNTFLVTSKVFRMPTSRDSTLGNTEETSLSVSGTISAITSKVSTIWWSDTLSTALSPSSLPPKISTAFHTQQSEGAETTGRPHERSSFSPGVSQEIFTLHETTTWPSSFSSKGHTTWSQTELPSTSTGAATRLVTGNPSTGTAGTIPRVPSKVSAIGEPGEPTTYSSHSTTLPKTTGAGAQTQWTQETGTTGEALLSSPSYSVTQMIKTATSPSSSPMLDRHTSQQITTAPSTNHSTIHSTSTSPQESPAVSQRGHTQAPQTTQESQTTRSVSPMTDTKTVTTPGSSFTASGHSPSEIVPQDAPTISAATTFAPAPTGDGHTTQAPTTALQAAPSSHDATLGPSGGTSLSKTGALTLANSVVSTPGGPEGQWTSASASTSPDTAAAMTHTHQAESTEASGQTQTSEPASSGSRTTSAGTATPSSSGASGTTPSGSEGISTSGETTRFSSNPSRDSHTTQSTTELLSASASHGAIPVSTGMASSIVPGTFHPTLSEASTAGRPTGQSSPTSPSASPQETAAISRMAQTQRTRTSRGSDTISLASQATDTFSTVPPTPPSITSTGLTSPQTETHTLSPSGSGKTFTTALISNATPLPVTYASSASTGHTTPLHVTDASSVSTGHATPLPVTSPSSVSTGHTTPLPVTDTSSESTGHVTPLPVTSFSSASTGDSTPLPVTDTSSASTGHVTPLPVTSLSSASTGDTTPLPVTDTSSASTGHATSLPVTDTSSVSTGHTTPLPVTDTSSASTGHATSLPVTDTSSVSTGHTTPLHVTDASSASTGQATPLPVTSLSSVSTGDTTPLPVTSPSSASTGHATPLLVTDTSSASTGHATPLPVTDASSVSTDHATSLPVTIPSAASTGHTTPLPVTDTSSASTGQATSLLVTDTSSVSTGDTTPLPVTSTSSASTGHVTPLHVTSPSSASTGHATPLPVTSLSSASTGDTMPLPVTSPSSASTGDTTPLPVTDASSVSTGHTTPLHVTDASSASTGQATPLPVTSLSSVSTGDTTPLPVTSPSSASTGHATPLLVTDTSSASTGHATPLPVTDASSVSTDHATSLPVTIPSAASTGHTTPLPVTDTSSASTGQATSLLVTDTSSVSTGDTTPLPVTSTSSASTGHVTPLHVTSPSSASTGHATPLPVTSLSSASTGDTMPLPVTSPSSASTGDTTPLPVTDASSVSTGHTTPLPVTSPSSASTGHTTPLPVTDTSSASKGDTTPLPVTSPSSASTGHTTPLPVTDTSSASTGDTTPLPVTNASSLSTGHATPLHVTSPSSASTGHATPLPVTSTSSASTGHATPLPVTGLSSATTDDTTRLPVTDVSSASTGQATPLPVTSLSSVSTGDTTPLPVTSPSSASTGHASPLLVTDASSASTGQATPLPVTDTSSVSTAHATPLPVTGLSSASTDDTTRLPVTDVSSASTGQAIPLPVTSPSSASTGDTTPLPVTDASSASTGDTTSLPVTIPSSASSGHTTSLPVTDASSVSTGHATSLLVTDASSVSTGDTTPLPVTDTNSASTGDTTPLHVTDASSVSTGHATSLPVTSLSSASTGDTTPLPVTSPSSASSGHTTPLPVTDASSVPTGHATSLPVTDASSVSTGHATPLPVTDASSVSTGHATPLPVTDTSSVSTGQATPLPVTSLSSASTGDTTPLPVTDTSSASTGQDTPLPVTSLSSVSTGDTTPLPVTNPSSASTGHATPLLVTDASSISTGHATSLLVTDASSVSTGHATALHDTDASSLSTGDTTPLPVTSPSSTSTGDTTPLPVTETSSVSTGHATSLPVTDTSSASTGHATSLPVTDTSSASTGHATPLPVTDTSSASTGQATPLPVTSPSSASTGHAIPLLVTDTSSASTGQATPLPVTSLSSASTGDTTPLPVTDASSVSTGHATSLPVTSLSSVSTGDTTPLPVTSPSSASTGHATPLHVTDASSASTGHATPLPVTSLSSASTGDTTPLPVTSPSSASTGHATPLHVTDASSVSTGDTTPLPVTSSSSASSGHTTPLPVTDASSASTGDTTPLPVTDTSSASTGHATHLPVTGLSSASTGDTTRLPVTNVSSASTGHATPLPVTSTSSASTGDTTPLPGTDTSSVSTGHTTPLLVTDASSVSTGDTTRLPVTSPSSASTGHTTPLPVTDTPSASTGDTTPLPVTNASSLSTRHATSLHVTSPSSASTGHATSLPVTDTSAASTGHATPLPVTSTSSASTGDTTPLPVTDTYSASTGQATPLPVTSLSSVSTGDTTPLPVTSPSSASTGHATPLLVTDASSASTGQATPLPVTSLSSVSTGDTTPLPVTSPSSASTGHATSLPVTDTSSASTGDTTSLPVTDTSSAYTGDTTSLPVTDTSSSSTGDTTPLLVTETSSVSTGDTTPLPVTDTSSASTGHATPLPVTNTSSVSTGHATPLHVTSPSSASTGHTTPLPVTDASSVSTGHATSLPVTDASSVFTGHATSLPVTIPSSASSGHTTPLPVTDASSVSTGHATSLPVTDASSVSTGHATPLPVTDASSVSTGHATPLPLTSLSSVSTGDTTPLPVTDTSSASTGQATPLPVTSLSSVSTGDTTPLPVTDTSSASTGHATSLPVTDTSSASTGHATPLPDTDTSSASTGHATLLPVTDTSSASIGHATSLPVTDTSSISTGHATPLHVTSPSSASTGHATPLPVTDTSSASTGHANPLHVTSPSSASTGHATPLPVTDTSSASTGHATPLPVTSLSSVSTGDTTPLPVTSPSSASTGHTTPLPVTDTSSASTGQATALPVTSTSSASTGDTTPLPVTDTSSASTGQATPLPVTSLSSVSTGDTTPLPVTSPSSASTGHATPLLVTDASSASTGQATPLPVTSLSSVSTGDTTPLPVTSPSSASTGHATSLPVTDTSSASTGDTTSLPVTDTSSAYTGDTTSLPVTDTSSSSTGDTTPLLVTETSSVSTGHATPLLVTDASSASTGHATPLHVTSPSSASTGDTTPVPVTDTSSVSTGHATPLPVTGLSSASTGDTTRLPVTDISSASTGQATPLPVTNTSSVSTGDTMPLPVTSPSSASTGHATPLPVTSTSSASTGHATPVPVTSTSSASTGHTTPLPVTDTSSASTGDTTPLPVTSPSSASTGHTTPLHVTIPSSASTGDTSTLPVTGASSASTGHATPLPVTDTSSVSTGHATPLPVTSLSSVSTGDTTPLPVTDASSASTGQATPLPVTSLSSVSTGDTTPLLVTDASSVSTGHATPLPVTDTSSASTGDTTRLPVTDTSSASTGQATPLPVTSLSSVSTGDTTPLLVTDASSVSTGHATPLPVTDTSSASTGDTTRLPVTDTSSASTGQATPLPVTIPSSSSSGHTTPLPVTSTSSVSTGHVTPLHVTSPSSASTGHVTPLPVTSTSSASTGHATPLLVTDASSVSTGHATPLPVTDASSASTGDTTPLPVTDTSSASTGQATPLPVTSLSSVSTGDTTPLPVTDASSASTGHATPLPVTIPSSVSTGDTMPLPVTSPSSASTGHATPLPVTGLSSASTGDTTPLPVTDTSSASTRHATPLPVTDTSSASTDDTTRLPVTDVSSASTGHATPLPVTSTSSASTGDTTPLPVTDTSSVSTGHATSLPVTSRSSASTGHATPLPVTDTSSVSTGHATPLPVTSTSSVSTGHATPLPVTSPSSASTGHATPVPVTSTSSASTGDTTPLPVTNASSLSTGHATPLHVTSPSSASRGDTSTLPVTDASSASTGHATPLPLTSLSSVSTGDTTPLPVTDTSSASTGQATPLPVTSLSSVSTGDTTPLPVTIPSSASSGHTTSLPVTDASSVSTGHGTPLPVTSTSSASTGDTTPLPVTDTSSASTGHATPLPVTDTSSASTGHATPLPVTSLSSVSTGHATPLAVSSATSASTVSSDSPLKMETPGMTTPSLKTDGGRRTATSPPPTTSQTIISTIPSTAMHTRSTAAPIPILPERGEAIQEFPSSPMGQAPGTWSSSGGPWTSPPHSSSRRLASPLAPLSVIPSTSQTMARSSSQSQTTRFSPTPTHSQQASQAGTLWPWWLRSGTMLTSPLVGGPHFIRL

SEQ ID NO: 94669 - protein, 356 aa, Homo sapiens
  MOD_RES (1)..(1): Any amino acid
XKSKEAEIKRINKELANIRSKFKGDKALDGYSKKKYVCKLLFIFLLGHDIDFGHMEAVNLLSSNRYTEKQIGYLFISVLVNSNSELIRLINNAIKNDLASRNPTFMGLALHCIASVGSREMAEAFAGEIPKVLVAGDTMDSVKQSAALCLLRLYRTSPDLVPMGDWTSRVVHLLNDQHLGVVTAATSLITTLAQKNPEEFKTSVSLAVSRLSRIVTSASTDLQDYTYYFVPAPWLSVKLLRLLQCYPPPDPAVRGRLTECLETILNKAQEPPKSKKVQHSNAKNAVLFEAISLIIHHDRCVGCLCTGSRCAQVRKPFLRDYVNCSQRSFSPEDGRPGSCVLCCLRLCRLSSWLSCR

SEQ ID NO: 94670 - protein, 71 aa, Homo sapiens
  MOD_RES (1)..(1): Any amino acid
XSAVHKMIVDRQYMGVSKRKCIVWGVAFLSDGTIISVDSAGKVQFWDSATGTLVKSHLIANADVQSIAVAD

SEQ ID NO: 94671 - protein, 40 aa, Homo sapiens
MPTAAAPIISSVQKLVLYETRALIWVKQRWEPSSGKFAQL

SEQ ID NO: 94672 - protein, 41 aa, Homo sapiens
LENSGGKKNRRIFTYTDSDRYTNLEESCGLITLAGHGGMYL

SEQ ID NO: 94673 - protein, 48 aa, Homo sapiens
  MOD_RES (1)..(1): Any amino acid
XPGPVSCKIESNICPQVASLTLAMETNSRASPDKTRNRSSTHPETKHI

SEQ ID NO: 94674 - protein, 117 aa, Homo sapiens
NVASQAPQSLPAISQPPQSSTMGYMGSQSVSMGYQPYNMQGYSLTSDVFSQQNLMTTLPSQDASLPPQQPYIAGQQPMYQQMAPSGGPPQQQPPVAQQPQAQGPPAQGSEAQLISFD

SEQ ID NO: 94675 - protein, 43 aa, Homo sapiens
  MOD_RES (1)..(1): Any amino acid
XAKQLVRGEPNVSYICSRYYRAPELIFGATDYTSSIGMRGSLN

SEQ ID NO: 94676 - protein, 191 aa, Homo sapiens
MTPALTALLCLGLSLGPRTRVQAGPFPKPTLWAEPGSVISWGSPVTIWCQGSLEAQEYQLDKEGSPEPLDRNNPLEPKNKARFSIPSMTQHHAGRYRCHYYSSAGWSEPSDPLELVMTGFYNKPTLSALPSPVVASGGNMTLRCGSQKGYHHFVLMKEGEHQLPRTLDSQQLHSGGFQALFPVGPVTPSHS

SEQ ID NO: 94677 - protein, 118 aa, Homo sapiens
MDKGRAAKMGKLRLTQGQTARKWESWDLNPVPRYVTTPTASSCTAGGPSTSARPVTASSTAPCIMMGMSASTFPHKALCWPGTCPPGHARRAPAPQWTWRRRRRRALWMAKGTGRAQA

SEQ ID NO: 94678 - protein, 97 aa, Homo sapiens
  MOD_RES (1)..(1): Any amino acid
XDQLLSARVFFENFKYEDALRLLQCAEPYKVSFCLKRTVPTGDLALRPGTVSGYEIKGPRAKVAKLVGLFLSTPSLPLSHRLLPLSSLPRTSRVCPL

SEQ ID NO: 94679 - protein, 149 aa, Homo sapiens
  MOD_RES (1)..(1): Any amino acid
XGCSVLVNTSCRLVNLTAHLRQKAGLPPDATIALLAEDGNLVSLEEDLKEGASRAQTMGNSLLKERAIYVLVRIISKRERTWPPPAMSPYWRTWMTITQSWQRNCAGCQASPLWATTGGSVWALGEAAMSKAPLQGPERALIKGMDCTL

SEQ ID NO: 94680 - protein, 253 aa, Homo sapiens
MVSQSTVRQDSPVEPWEGISDHSGIIDGSPRLLNTDHPPCQLDIRLMRHKAVWINPQDVQQQPQDLQSQVPAAGNSGTHFVTDAASPSGPSPSCLGDSLAETTLSEDTTDSVGSASPHGSSEKSSSFSLSSTEVHMVRPGYSHRVSLPTSPGILATSPYPETDSAFFEPSHLTSAADEGESIGSTLKSVWRLEVFPDSHGVCISHQYLVGGEVTSLVIFTCIESDRKMVLFKSVEEPFLRIPSHQRYLCCLLM

SEQ ID NO: 94681 - protein, 511 aa, Homo sapiens
  MOD_RES (1)..(1): Any amino acid
XERELCSLRFSLNQEEEKRRNADTLYEKIREQLRRKEEQYRKEVEVKQQLELSLQTLEMELRTVKSNLNQVVQERNDAQRQLSREQNARMLQDGILTNHLSKQKEIEMAQKKMNSENSHSHEEEKDLSHKNSMLQEEIAMLRLEIDTIKNQNQEKEKKCFEDLKIVKEKNEDLQKTIKQNEETLTQTISQYNGRLSVLTAENAMLNSKLENEKQSKERLEAEVESYHSRLAAAIHDRDQSETSKRELELAFQRARDECSRLQDKMNFDVSNLKDNNEILSQQLFKTESKLNSLEIEFHHTRDALREKTLGLERVQKDLSQTQCQMKEMEQKYQNEQVKVNKYIGKQESVEERLSQLQSENMLLRQQLDDAHNKADNKEKTVINIQDQFHAIVQKLQAESEKQSLLLEERNKELISECNHLKERQYQYENEKAEREVVVRQLQQELADTLKKQSMSEASLEVTSRYRINLEDETQDLKKKLGQIRNQPELGSVDSYRFPTQRAPAFLLHRTT

SEQ ID NO: 94682 - protein, 227 aa, Homo sapiens
MMMMALSKTFGQKPVKFQLEDDGEFYMIGSEVGNYLRMFRGSLYKRYPSLWRRLATVEERKKIVASSHGKKTKPNTKDHGYTTLATSVTLLKASEVEEILDGNDEKYKAVSISTEPPTYLREQKAKRNSQWVPTLPNSSHHLDAVPCSTTINRNRMGRDKKRTFPLWCGCIAALTLRADSALVLHFDDHDPAVIHENASQPEVLVPIRLDMEIDGQKLRDAFTWNMN

SEQ ID NO: 94683 - protein, 44 aa, Homo sapiens
  MOD_RES (1)..(1): Any amino acid
XPSMNVASQAPQSLPAISQPPQSSTMGYMGSQSVSMGYQPYNMQ

SEQ ID NO: 94684 - protein, 63 aa, Homo sapiens
LPPKRDETALQEEEELQLALALSQSEAEEKERLKSTYTSYPKAEPMPSASSAPPASSLYSSPV

SEQ ID NO: 94685 - protein, 21 aa, Homo sapiens
  MOD_RES (1)..(1): Any amino acid
XTACLQAVSQKRTWQNSMLRS

SEQ ID NO: 94686 - protein, 93 aa, Homo sapiens
MAMSNGNNDFVVLSNSSIATSAANPSPLTPCDGDHAAQQLTPKEATRTKTIQTFQVAKKLCSPDSRLAGGGLGHVHHVHRSLCLGWSISARAP

SEQ ID NO: 94687 - protein, 94 aa, Homo sapiens
MALRLLKLAATSASARVVAAGAQRVASSTFLKRGFIIQTVPQEMGSPSPPTIMATVVWRNFTMIREAMMATVTACSPGCTAVACCSTQMPWSTC

SEQ ID NO: 94688 - protein, 187 aa, Homo sapiens
MLATRLSRPLSRLPGKTLSACDRENGARRPLLLGSTSFIPIGRRTYASAAEPVGSKAVLVTGCDSGFGFSLAKHLHSKGFLVFAGCLMKDKGHDGVKELDSLNSDRLRTVQLNVCSSEEVEKVVEIVRSSLKDPEKGMWGLVNNAGISTFGEVEFTSLETYKQVAEVNLWGTVRMTKSFLPLIRRAK

SEQ ID NO: 94689 - protein, 87 aa, Homo sapiens
MEEAPLFPGESIKAIVKDVMYICPFMGAVSGTLTVTDFKLYFKNVERDPHFILDVPLGVISRVEKIGAQSHGDNSCGIEIVCKDMRN

SEQ ID NO: 94690 - protein, 384 aa, Homo sapiens
MLTCNKAGSRMVVDAANSNGPFQPVVLLHIRDVPPADQEKLFIQKLRQCCVLFDFVSDPLSDLKWKEVKRAALSEMVEYITHNRNVITEPIYPEVVHMFAVNMFRTLPPSSNPTGAEFDPEEDEPTLEAAWPHLQLVYEFFLRFLESPDFQPNIAKKYIDQKFVLQLLELFDSEDPRERDFLKTTLHRIYGKFLGLRAYIRKQINNIFYRFIYETEHHNGIAELLEILGSIINGFALPLKEEHKIFLLKVLLPLHKVKSLSVYHPQLAYCVVQFLEKDSTLTEPVVMALLKYWPKTHSPKEVMFLNELEEILDVIEPSEFVKIMEPLFRQLAKCVSSPHFQVAERALYYWNNEYIMSLISDNAAKILPIMFPSLYRNSKTHWNK

SEQ ID NO: 94691 - protein, 167 aa, Homo sapiens
MTPQSLLQTTLFLLSLLFLVQGAHGRGHREDFRFCSQRNQTHRSSLHYKPTPDLRISIENSEEALTVHAPFPAAHPASRSFPDPRGLYHFCLYWNRHAGRLHLLYGKRDFLLSDKASSLLCFQHQEESLAQGPPLLATSVTSWWSPQNISLPSAASFTFSFHSPPHT

SEQ ID NO: 94692 - protein, 92 aa, Homo sapiens
MATPMHRLIARRQAEANKQHVRCQKCLEFGHWTYECTGKRKYLHRPSRTAELKKALKEKENRLLLQQRSFFPPRVYQHWRNQCRKKGQEKKV

SEQ ID NO: 94693 - protein, 260 aa, Homo sapiens
MGVPRTPSRTVLFERERTGLTYRVPSLLPVPPGPTLLAFVEQRLSPDDSHAHRLVLRRGTLAGGSVRWGALHVLGTAALAEHRSMNPCPVHDAGTGTVFLFFIAVLGHTPEAVQIATGRNAARLCCVASRDAGLSWGSARDLTEEAIGGAVQDWATFAVGPGHGVQLPSGRLLVPAYTYRVDRRECFGKICRTSPHSFAFYSDDHGRTWRCGGLVPNLRSGECQLAAVDGGQAGSFLYCNARSPLGSRVQALSTDEGTSF

SEQ ID NO: 94694 - protein, 292 aa, Homo sapiens
MFVWSYWMTIFTSPASPSKEFYLSNSEKERYEKEFSQERQQEILRRAARALPIYTTSASKTIRYCEKCQLIKPDRAHHCSACDSCILKMDHHCPWVNNCVGFSNYKFFLLFLLYSLLYCLFVAATVLEYFIKFWTNELTDTRAKFHVLFLFFVSAMFFISVLSLFSYHCWLVGKNRTTIESFRAPTFSYGPDGNGFSLGCSKNWRQVFGDEKKYWLLPIFSSLGDGCSFPTRLVGMDPEQASVTNQNEYARSSGSNQPFPIKPLSESKNRLLDSESQWLENGAEEGIVKSGV

SEQ ID NO: 94695 - protein, 231 aa, Homo sapiens
MRPADLLQLVLLLDLPRDLGGMGCSSPPCECHQEEDFRVTCKDIQRIPSLPPSTQTLKLIETHLRTIPSHAFSNLPNISRIYVSIDVTLQQLESHSFYNLSKVTHIEIRNTRNLTYIDPDALKELPLLKFLGIFNTGLKMFPDLTKVYSTDIFFILEITDNPYMTSIPVNAFQGLCNETLTLKLYNNGFTSVQGYAFNGTKLDAVYLNKNKYLTVIDKDAFGGVYSGPSLL

SEQ ID NO: 94696 - protein, 88 aa, Homo sapiens
MSMDVTFLGTGAAYPSPTRGASAVVLRCEGECWLFDCGEGTQTQLMKSQLKAEFPHLGFQSWKRNAQVNSMHRNLKTLVFHQVLPMGS

SEQ ID NO: 94697 - protein, 986 aa, Homo sapiens
MAKSNSVGQDSCQDSEGDMIFPAESSCALPQEGSAGPGSPGSAPPSRKRSWSSEEESNQATGTSRWDGVSKKAPRHHLSVPCTRPREARQEAEDSTSRLSAESGETDQDAGDVGPDPIPDSYYGLLGTLPCQEALSHICSLPSEVLRHVFAFLPVEDLYWNLSLVCHLWREIISDPLFIPWKKLYHRYLMNEEQAVSKVDGILSNCGIEKESDLCVLNLIRYTATTKCSPSVDPERVLWSLRDHPLLPEAEACVRQHLPDLYAAAGGVNIWALVAAVVLLSSSVNDIQRLLFCLRRPSSTVTMPDVTETLYCIAVLLYAMREKGINISNRIHYNIFYCLYLQENSCTQATKVKEEPSVWPGKKTIQLTHEQQLILNHKMEPLQVVKIMAFAGTGKTSTLVKYAEKWSQSRFLYVTFNKSIAKQAERVFPSNVICKTFHSMAYGHIGRKYQSKKKLNLFKLTPFMVNSVLAEGKGGFIRAKLVCKTLENFFASADEELTIDHVPIWCKNSQGQRVMVEQSEKLNGVLEASRLWDNMRKLGECTEEAHQMTHDGYLKLWQLSKPSLASFDAIFVDEAQDCTPAIMNIVLSQPCGKIFVGDPHQQIYTFRGAVNALFTVPHTHVFYLTQSFRFGVEIAYVGATILDVCKRVRKKTLVGGNHQSGIRGDAKGQVALLSRTNANVFDEAVRVTEGEFPSRIHLIGGIKSFGLDRIIDIWILLQPEEERRKQNLVIKDKFIRRWVHKEGFSGFKRYVTAAEDKELEAKIAVVEKYNIRIPELVQRIEKCHIEDLDFAEMESHHVGQAGLELPTSEYILGTVHKAKGLEFDTVHVLDDFVKVPCARHNLPQLPHFRVESFSEDEWNLLYVAVTRAKKRLIMTKSLENILTLAGEYFLQAELTSNVLKTGVVRCCVGQCNNAIPVDTVLTMKKLPITYSNRKENKGGYLCHSCAEQRIGPLAFLTASPEQVRAMERTVENIVLPRHEALLFLVF

SEQ ID NO: 94698 - protein, 132 aa, Homo sapiens
MKGRAVSFDPLACQGLNASPGSLTSPLRRIRSLTGREVLTPFPGLGTAAAPAQGGAHLKQCDLLKLSRRQKQLCRREPGLAETLRDAAHLGLLECQFQFRHERWNCSLEGRMGLLKRGFKETAFLYAVSSAA

SEQ ID NO: 94699 - protein, 31 aa, Homo sapiens
MDNKISPEAQVAELELDAVIGFNGRHHFVGL

SEQ ID NO: 94700 - protein, 244 aa, Homo sapiens
MQAVVPLNKMTAISPEPQTLASTEQNEVPRVVTSGEQEAILRGNAADAESFRQRFRWFCYSEVAGPRKALSQLWELCNQWLRPDIHTKEQILELLVFEQFLTILPGEIRIWVKSQHPESSEEVVTLIEDLTQMLEEKDPVSQDSTVSQEENSKEDKMVTVCPNTESCESITLKDVAVNFSRGEWKKLEPFQKELYKEVLLENLRNLEFLDFPVSKLELISQLKWVELPWLLEEVSKSSRLGSVI

SEQ ID NO: 94701 - protein, 76 aa, Homo sapiens
MECGIPPTLVCVGRGGGLHTVGVFHVLSQLISLCTIPEVFKEKPKIRRHIPQSDPSTSNPAETRTLHTVSMMASAL

SEQ ID NO: 94702 - protein, 81 aa, Homo sapiens
MAVASDFYLRYYVGHKGKFGHEFLEFEFRPDGRMKSTKQEGRGKVPQEGVRKIFLEDGTLEMSLEMRDLAFERKKQTSRAV

SEQ ID NO: 94703 - protein, 389 aa, Homo sapiens
MVLLHVKRGDESQFLLQAPGSTELEELTVQVARVYNGRLKVQRLCSEMEELAEHGIFLPPNMQGLTDDQIEELKLKDEWGEKCVPSGGAVFKKDDIGRRNGQAPNEKMKQVLKKTIEEAKAIISKKQVEAGVCVTMEMVKDALDQLRGAVMIVYPMGLPPYDPIRMEFENKEDLSGTQAGLNVIKEAEAQLWWAAKELRRTKKLSDYVGKNEKTKIIAKIQQPLQQQIIRLHQELGRQKSLWADVHGKLRSHIDALREQNMELREKLRALQLQRWKARKKSAASPHAGQESHTLALEPAFGKISPLSADEETIPKYAGHKNQSATLLGQRSSSNNSAPPKPMSLKIERISSWKTPPQENRDKNLSRRRQDRRATPTGRPTPCAERRGGV

SEQ ID NO: 94704 - protein, 59 aa, Homo sapiens
  MOD_RES (1)..(1): Any amino acid
XSPAAGPGSRSLSPGGRAAAMPAGPQLMPEDALDTGLQPLPTSPASASRRHSRFSTCPS

SEQ ID NO: 94705 - protein, 498 aa, Homo sapiens
MYSRLGEIISMDGSITVTLAAHQAIGLKGIILAGTEEQKAKYLPKLASGEHIAAFCLTEPASGSDAASIRSRATLSEDKKHYILNGSKVWITNGGLANIFTVFAKTEVVDSDGSVKDKITAFIVERDFGGVTNGKPEDKLGIRGSNTCEVHFENTKIPVENILGEVGDGFKVAMNILNSGRFSMGSVVAGLLKRLIEMTAEYACTRKQFNKRLSEFGLIQEKFALMAQKAYVMESMTYLTAGMLDQPGFPDCSIEAAMVKVFSSEAAWQCVSEALQILGGLGYTRDYPYERILRDTRILLIFEGTNEILRMYIALTGLQHAGRILTTRIHELKQAKVSTVMDTVGRRLRDSLGRTVDLGLTGNHGVVHPSLADSANKFEENTYCFGRTVETLLLRFGKTIMEEQLVLKRVANILINLYGMTAVLSRASRSIRIGLRNHDHEVLLANTFCVEAYLQNLFSLSQLDKYAPENLDEQIKKVSQQILEKRAYICAHPLDRTC

SEQ ID NO: 94706 - protein, 924 aa, Homo sapiens
MAVQPKETLQLESAAEVGFVRFFQGMPEKPTTTVRLFDRGDFYTAHGEDALLAAREVFKTQGVIKYMGPAGAKNLQSVVLSKMNFESFVKDLLLVRQYRVEVYKNRAGNKASKENDWYLAYKASPGNLSQFEDILFGNNDMSASIGVVGVKMSAVDGQRQVGVGYVDSIQRKLGLCEFPDNDQFSNLEALLIQIGPKECVLPGGETAGDMGKLRQIIQRGGILITERKKADFSTKDIYQDLNRLLKGKKGEQMNSAVLPEMENQVAVSSLSAVIKFLELLSDDSNFGQFELTTFDFSQYMKLDIAAVRALNLFQGSVEDTTGSQSLAALLNKCKTPQGQRLVNQWIKQPLMDKNRIEERLNLVEAFVEDAELRQTLQEDLLRRFPDLNRLAKKFQRQAANLQDCYRLYQGINQLPNVIQALEKHEGKHQKLLLAVFVTPLTDLRSDFSKFQEMIETTLDMDQVENHEFLVKPSFDPNLSELREIMNDLEKKMQSTLISAARDLGLDPGKQIKLDSSAQFGYYFRVTCKEEKVLRNNKNFSTVDIQKNGVKFTNSKLTSLNEEYTKNKTEYEEAQDAIVKEIVNISSGYVEPMQTLNDVLAQLDAVVSFAHVSNGAPVPYVRPAILEKGQGRIILKASRHACVEVQDEIAFIPNDVYFEKDKQMFHIITGPNMGGKSTYIRQTGVIVLMAQIGCFVPCESAEVSIVDCILARVGAGDSQLKGVSTFMAEMLETASILRSATKDSLIIIDELGRGTSTYDGFGLAWAISEYIATKIGAFCMFATHFHELTALANQIPTVNNLHVTALTTEETLTMLYQVKKGVCDQSFGIHVAELANFPKHVIECAKQKALELEEFQYIGESQGYDIMEPAAKKCYLERENLRVTEPKDQCLILLTWKRKLRGGKRSACSRPERQNQGSATPSASA

SEQ ID NO: 94707 - protein, 144 aa, Homo sapiens
MKGEKPFQCSQCDMRFIQKYLLQRHEKIHTGEKPFRCDECGDETNHASATSTQDFLDQVTSQKKAEAQPVHQAYQMSSFEQPFRAPYHGSRAGIATQFSTANGQVNLRGPGTSAEFSEFPLVNVNDNRAGMTSSPDATTGQTFG

SEQ ID NO: 94708 - protein, 103 aa, Homo sapiens
MTAELREAMALAPWGPVKVKKEEEEEENFPGQASSQQVHSENIKVWAPVQGLQTGLDGSEEEEKVLKPRTYSYWFQKLRYVRKLKNPSSYQKESRKLILKDLS

SEQ ID NO: 94709 - protein, 28 aa, Homo sapiens
MNKSQKCGRLMTRWRETTETQTSRRGNF

SEQ ID NO: 94710 - protein, 190 aa, Homo sapiens
MPDELTEPGRATPARASSFLIENLLAAEAKGAGRATQGDGSREDEEEDDDDPEDEDAEQARRRRLQRRRQLLAGTGPGGEARARALLGPGALGLGPRPPPGPGPPFALGCGGAARWYPRAHGGYGGGLSPDSTQKITPQPVQCGEGQVTRADKYKVNRSDSGSLWMAEEAAGTGWCSHNTVEPLSAWTPE

SEQ ID NO: 94711 - protein, 162 aa, Homo sapiens
MAGKRSGWSRAALLQLLLGVNLVVMPPTRARSLRFVTLLYRHGDRSPVKTYPKDPYQEEEWPQGFGQLTKEGMLQHWELGQALRQRYHGFLNTSYHRQEVYVRSTDFDRTLMSAEANLAGLFPPNGMQRFNPNISWQPIPVHTVPITEDRQAQVTRTVEHSA

SEQ ID NO: 94712 - protein, 318 aa, Homo sapiens
MIKLWTNRDLHIIVMVKNPAKMSLYPSLEDLKVDKVIQAQTAFSANPANPAILSEASAPIPHDGNLYPRLYPELSQYMGLSLNEEEIRANVAVVSGAPLQGLVARPSSINYMVAPVTGNDVGIRRAEIKQGIREVILCKDQDGKIGLRLKSIDNGIFVQLVQANSPASLVGLRFGDQVLQINGENCAGWSSDKAHKVLKQAFGEKITMTIRDRPFERTITMHKDSTGHVGFIFKNGKITSIVKDSSAARNGLLTEHNICEINGQNVIGLKDSQIADILSTSGTVVTITIMPAFIFEHIIKRMAPSIMKSLMDHTIPEV

SEQ ID NO: 94713 - protein, 350 aa, Homo sapiens
MASALFTADSQAMVKIEDMAVSLILEEWGCQNLARRNLSRDNRQENYGSAFPQGGENRNENEESTSKAETSEDSASRGETTGRSQKEFGEKRDQEGKTGERQQKNPEEKTRKEKRDSGPAIGKDKKTITGERGPREKGKGLGRSFSLSSNFTTPEEVPTGTKSHRCDECGKCFTRSSSLIRHKIIHTGEKPYECSECGKAFSLNSNLVLHQRIHTGEKPHECNECGKAFSHSSNLILHQRIHSGEKPYECNECGKAFSQSSDLTKHQRIHTGEKPYECSECGKAFNRNSYLILHRRIHTREKPYKCTKCGKAFTRSSTLTLHHRIHARERASEYSPASLDAFGAFLKSCV

SEQ ID NO: 94714 - protein, 232 aa, Homo sapiens
MLLLINVILTLWVSCANGQVKPCDFPDIKHGGLFHENMRRPYFPVAVGKYYSYYCDEHFETPSGSYWDYIHCTQNGWSPAVPCLRKCYFPYLENGYNQNYGRKFVQGNSTEVACHPGYGLPKAQTTVTCTEKGWSPTPRCIRVRTCSKSDIEIENGFISESSSIYILNKEIQYKCKPGYATADGNSSGSITCLQNGWSAQPICITACIAFRAHAQKSCTCRGRNECLILNFC

SEQ ID NO: 94715 - protein, 370 aa, Homo sapiens
MSRRKQTNPNKVHCDSEGDEEETTQDEVSSHTSEEDGGVVKVEKELENTEQPVGGNEVVEHEVTGNLNSDPLLELCQCPLCQLDCGSREQLIAHVYQHTAAVVSAKSYMCPVCGRALSSPGSLGRHLLIHSEDQRSNCAVCGARFTSHATFNSEKLPEVLNMESLPTVHNEGPSSAEGKDIAFSPPVYPAGILLVCNNCAAYRKLLEAQTPSVRKWALRRQNEPLEVRLQRLERERTAKKSRRDNETPEEREVRRMRDREAKRLQRMQETDEQRARRLQRDREAMRLKRANETPEKRQARLIREREAKRLKRRLEKMDMMLRAQFGQDPSAMAALAAEMNFFQLPVSGVELDSQLLGKMAFEEQNSSSLH

SEQ ID NO: 94716 - protein, 68 aa, Homo sapiens
MQKRQGYCSYCRVQYNNLEQTLTKGKTKKEFFRQKENDSRWKLRDTGSNEEQWKAFVQCSAQEFDQTE

SEQ ID NO: 94717 - protein, 139 aa, Homo sapiens
MVAPLQSSLGNRARPRLYKIKHANHCPANTPVQIPAFDPREADCWGKLRVLEVPLAVSGQKEKQEGASITRNCFPQSAGITGVSHRARPQPTSFGWQWFGYRLSSLKFMLRFEPQCGRCWDVGPHRSCVVLEVESSWID

SEQ ID NO: 94718 - protein, 473 aa, Homo sapiens
MDAMKRGLCCVLLLCGAVFVSPSQEIHARFRRGARSYQVICRDEKTQMIYQQHQSWLRPVLRSNRVEYCWCNSGRAQCHSVPVKSCSEPRCFNGGTCQQALYFSDFVCQCPEGFAGKCCEIGNSDCYFGNGSAYRGTHSLTESGASCLPWNSMILIGKVYTAQNPSAQALGLGKHNYCRNPDGDAKPWCHVLKNRRLTWEYCDVPSCSTCGLRQYSQPQFRIKGGLFADIASHPWQAAIFAKHRRSPGERFLCGGILISSCWILSAAHCFQERFPPHHLTVILGRTYRVVPGEEEQKFEVEKYIVHKEFDDDTYDNDIALLQLKSDSSRCAQESSVVRTVCLPPADLQLPDWTECELSGYGKHEALSPFYSERLKEAHVRLYPSSRCTSQHLLNRTVTDNMLCAGDTRSGGPQANLHDACQGDSGGPLVCLNDGRMTLVGIISWGLGCGQKDVPGVYTKVTNYLDWIRDNMRP

SEQ ID NO: 94719 - protein, 39 aa, Homo sapiens
MDVGADEFEESLPLLQELVQEADFVEVSAGALAACRSTV

SEQ ID NO: 94720 - protein, 33 aa, Homo sapiens
MKIFCSRANPTTGSVEWLEEDEHYDYHQEIARM

SEQ ID NO: 94721 - protein, 11 aa, Homo sapiens
MREYKLVVLGS

SEQ ID NO: 94722 - protein, 346 aa, Homo sapiens
MAPRRARGCRTLGLPALLLLLLLRPPATRDARDRLAVLAGRSRISESFNHEVQTHEACVRLRTMENCPQCHHHRTSRQQAGITCPPPMSVEHADIWVKSYSLYSRERYICNSGFKRKAGTSSLTECVLNKATNVAHWTTPSLKCIRDPALVHQRPAPPSTVTTAGVTPQPESLSPSGKEPAASSPSSNNTAATTAAIVPGSQLMPSKSPSTGTTEISSHESSHGTPSQTTAKNWELTASASHQPPGVYPQGHSDTTVAISTSTVLLCGLSAVSLLACYLKSSSHSRELTLLTLKWPKELLLLRRDISPALVEGAGQMPRASAPRQLQTGQPRMTSVLPRLCLSFGS

SEQ ID NO: 94723 - protein, 160 aa, Homo sapiens
MLPAVGSADEEEDPAEEDCPELVPIETTQSEEEEKSGLGAKIPVTIITGYLGAGKTTLLNYILTEQHSKRVAVILNEFGEGSALEKSLAVSQGGELYEEWLELRNGCLCCSVKDSGLRAIENLMQKKGKFDYILLETTGLADPGIITIVDSKYGLKVKYH

SEQ ID NO: 94724 - protein, 93 aa, Homo sapiens
MHPDLSPHLHTEECNVLINLLKECHKNETCIISATYSVQKKSSGVYHNILKFFGYCNDVDRELRKCLKNEVLALSPKLECSRVIVTHGSLKLK

SEQ ID NO: 94725 - protein, 50 aa, Homo sapiens
MAEDEPDAKSPKTGGRAPPGGAEAGEPTTLLQRLRGTISKAVQNKVEGIL

SEQ ID NO: 94726 - protein, 108 aa, Homo sapiens
MKSCGKRFHDEVGKFRFLNELIKVVSPKYLGSRTSEKVKNKILELLYSWTVGLPEEVKIAEAYQMLKKQGIVKSDPKLPDDTTFPLPPPRPKNVIFEDEEKSKMLARL

SEQ ID NO: 94727 - protein, 197 aa, Homo sapiens
MQGRRELGGEPLSDLQEEAASASLRVAPERLSDDSLEWRRTCPDLLLSDGKASISMPREGGSTCTARCPDPGEHSSTWGEFEGFRESSAKSGQFSQSLELLEGPTEPQPPRTTSAPKECSSHQPCQGGPWVTGTSAVPPSEPILSYENILKCAFQEITVQQAAEDVSTIDHFLEISSEEKPGVERVHKLWDTLSTEH

SEQ ID NO: 94728 - protein, 115 aa, Homo sapiens
MLQKPKSVKLRALRSPRKFGVAGRSCQEVLRKGCLRFQLPERGSRLCLYEDGTELTEDYFPSVPDNAELVLLTLGQAWQGCEWQGLWRCERHQALPQCISRATGGAHPGRPAAAV

SEQ ID NO: 94729 - protein, 128 aa, Homo sapiens
MQDEERYMTLNVQSKKRSSAQTSQLTFKDYSVTLHWYKILLGISGTVNGILTLTLISLILLVSQGVLLKCQKGSCSNATQYEDTGDLKVNNGTRRNISNKDLCASRSADQTGFYTEKPKTIKLRMDWA

SEQ ID NO: 94730 - protein, 121 aa, Homo sapiens
MRDVGGKRRRGLHPFIPSLGPVFKSNLTATVVQSGECKRLGKVGEQPLGDENPSLWFGLREGRSVLGGVSWFQCTESLGPLTLQHGNLGVDLLLFPSRQKLSFALSGPALGKGVGVNEQLF

SEQ ID NO: 94731 - protein, 176 aa, Homo sapiens
MKDKDTRKSKGVAFILFLDKDSAQNCTRAINNKQLFGRVIKASIAIDNGRAAEFIRRRNYFDKSKCYECGESGHLSYACPKNMLGEREPPKKKEKKKKKKAPEPEEEIEEVEESEDEGEDPALDSLSQAIAFQQAKIEEEQKKWKPSSGVPSTSDDSRRPRIKKSTYFSDEEELSD

SEQ ID NO: 94732 - protein, 2596 aa, Homo sapiens
MSTKAEQFASKIRYLQEYHNRVLHNIYPVPSGTDIANTLKYFSQTLLSILSRTGKKENQDASNLTVPMTMCLFPVPFPLTPSLRPQVSSINPTVTRSLLYSVLRDAPSERGPQSRDAQLSDYPSLDYQGLYVTLVTLLDLVPLLQHGQHDLGQSIFYTTTCLLPFLNDDILSTLPYTMISTLATFPPFLHKDIIEYLSTSFLPMAILGSSRREGVPAHVNLSASSMLMIAMQYTSNPVYHCQLLECLMKYKQEVWKDLLYVIAYGPSQVKPPAVQMLFHYWPNLKPPGAISEYRGLQYTAWNPIHCQHIECHNAINKPAVKMCIDPSLSVALGDKPPPLYLCEECSERIAGDHSEWLIDVLLPQAEISAICQKKNCSSHVRRAVVTCFSAGCCGRHGNRPVRYCKRCHSNHHSNEVGAAAETHLYQTSPPPINTRECGAEELVCAVEAVISLLKEAEFHAEQREHELNRRRQLGLSSSHHSLDNADFDNKDDDKHDQRLLSQFGIWFLVSLCTPSENTPTESLARLVAMVFQWFHSTAYMMDDEVGSLVEKLKPQFVTKWLKTVCDVRFDVMVMCLLPKPMEFARVGGYWDKSCSTVTQLKEGLNRILCLIPYNVINQSVWECIMPEWLEAIRTEVPDNQLKEFREVLSKMFDIELCPLPFSMEEMFGFISCRFTGYPSSVQEQALLWLHVLSELDIMVPLQLLISMFSDGVNSVKELANQRKSRVSELAGNLASRRVSVASDPGRRVQHNMLSPFHSPFQSPFRSPLRSPFRSPFKNFGHPGGRTIDFDCEDDEMNLNCFILMFDLLLKQMELQDDGITMGLEHSLSKDIISIINNVFQAPWGGSHTCQKDEKAIECNLCQSSILCYQLACELLERLAPKEESRLVEPTDSLEDSLLSSRPEFIIGPEGEEEENPASKHGENPGNCTEPVEHAAVKNDTERKFCYQQLPVTLRLIYTIFQEMAKFEEPDILFNMLNCLKILCLHGECLYIARKDHPQFLAYIQDHMLIASLWRVVKSEFSQLSSLAVPLLLHALSLPHGADIFWTIINGNFNSKDWKMRFEAVEKVAVICRFLDIHSVTKNHLLKYSLAHAFCCFLTAVEDVNPAVATRAGLLLDTIKRPALQGLCLCLDFQFDTVVKDRPTILSKLLLLHFLKQDIPALSWEFFVNRFETLSLEAQLHLDCNKEFPFPTTITAVRTNVANLSDAALWKIKRARFARNRQKSVRSLRDSVKGPVESKRALSLPETLTSKIRQQSPENDNTIKDLLPEDAGIDHQTVHQLITVLMKFMAKDESSAESDISSAKAFNTVKRHLYVLLGYDQQEGCFMIAPQKMRLSTCFNAFIAGIAQVMDYNINLGKHLLPLVVQVLKYCSCPQLRHYFQQPPRCSLWSLKPHIRQMWLKALLVILYKYPYRDCDISKILLHLIHITVNTLNAQYHSCKPHATAGPLYSDNSNISRYSEKEKGEIELAEYRETGALQDSLLHCVREESIPKKKLRSFKQKSLDIGNADSLLFTLDEHRRKSCIDRCDIEKPPTQAAYIAQRPNDPGRSRQNSATRPDNSEIPENPAMEGFPDARRPVIPEVRLNCMETFEVKVDSPVKPAPKEDLDLIDLSSDSTSGPEKHSILSTSDSDSLVFEPLPPLRIVESDEEEETMNQGDDGPSGKNAASSPSVPSHPSVLSLSTAPLVQVSVEDCSKDFSSKDSGNNQSAGNTDSALITLEDPMDAEGSSKPEELPEFSCGSPLTLKQKRDLLQKSFALPEMSLDDHPDPGTEGEKPGELMPSSGAKTVLLKVPEDAENPTESEKPDTSAESDTEQNPERKVEEDGAEESEFKIQIVPRQRKQRKIAVSAIQREYLDISFNILDKLGEQKDPDPSTKGLSTLEMPRESSSAPTLDAGVPETSSHSSISKQIQPGKRQCNVPTCLNPDLEGQPLRMRGATKSSLLSAPSIVSMFVPAPEEFTDEQPTVMTDKCHDCGAILEEYDEETLGLAIVVLSTFIHLSPDLAAPLLLDIMQSVGRLASSTTFSNQAESMMVPGNAAGVAKQFLRCIFHQLAPNGIFPQLFQSTIKDGTFLRTLASSLMDFNELSSIAALSQLLEGLNNKKNLPAGGAMIRCLENIATFMEALPMDSPSSLWTTISNQFQTFFAKLPCVLPLKCSLDSSLRIMICLLKIPSTNATRSLLEPFSKLLSFVIQNAVFTLAYLVELCGLCYRAFTKERDKFYLSRSVVLELLQALKLKSPLPDTNLLLLVQFICADAGTKLAESTILSKQMIASVPGCGTAAMECVRQYINEVLDFMADMHTLTKLKSHMKTCSQPLHEDTFGGHLKVGLAQIAAMDISRGNHRDNKAVIRYLPWLYHPPSAMQQGPKEFIECVSHIRLLSWLLLGSLTHNAVCPNASSPCLPIPLDAGSHVADHLIVILIGFPEQSKTSVLHMCSLFHAFIFAQLWTVYCEQSAVATNLQNQNEFSFTAILTALEFWSRVTPSILQLMAHNKVMVEMVCLHVISLMEALQECNSTIFVKLIPMWLPMIQSNIKHLSAGLQLRLQAIQNHVNHHSLRTLPGSGQSSAGLAALRKWLQCTQFKMAQVEIQSSEAASQFYPL

SEQ ID NO: 94733 - protein, 93 aa, Homo sapiens
MDDQSRMLQTLAGVNLAGHSVQGGMALPPPPHGHEGADGDGRKQDIGDILHQIMTITDQSLDEAQAKKHALNCHRMKPALFSVLCEIKEKTGM

SEQ ID NO: 94734 - protein, 164 aa, Homo sapiens
  MOD_RES (1)..(1): Any amino acid
XAGAEGAAGRQSELEPVVSLVDVLEEDEELENEACAVLGGSDSEKCSYSQGSVKRQALYACSTCTPEGEEPAGICLACSYECHGSHKLFELYTKSKFKNLECKLLPDKAKVNSGNKYNDNFFGLYCICKRPYPDPEDEIPDEMIQCVVCEDWFHGRHLGAIPPE

SEQ ID NO: 94735 - protein, 622 aa, Homo sapiens
MNTTSKKHGNNGFYDKDSSGWSSSKDKDAYSSFGSRSDSRGKSSFFSDRGSGSRGRFDDRGRSDYDGIGSRGDRSGFGKFERGGNSRWCDKSDEDDWSKPLPPSERLEQELFSGGNTGINFEKYDDIPVEATGNNCPPHIESFSDVEMGEIIMGNIELTRYTRPTPVQKHAIPIIKEKRDLMACAQTGSGKTAAFLLPILSQIYSDGPGEALRAMKENGRYGRRKQYPISLVLAPTRELAVQIYEEARKFSYRSRVRPCVVYGGADIGQQIRDLERGCHLLVATPGRLVDMMERGKIGLDFCKYLVLDEADRMLDMGFEPQIRRIVEQDTMPPKGVRHTMMFSATFPKEIQMLARDFLDEYIFLAVGRVGSTSENITQKVVWVEESDKRSFLLDLLNATGKDSLTLVFVETKKGADSLEDFLYHEGYACTSIHGDRSQRDREEALHQFRSGKSPILVATAVAARGLDISNVKHVINFDLPSDIEEYVHRIGRTGRVGNLGLATSFFNERNINITKDLLDLLVEAKQEVPSWLENMAYEHHYKGSSRGRSKSRFSGGFGARDYRQSSGASSSSFSSSRASSSRSGGGGHGSSRGFGGGGYGGFYNSDGYGGNYNSQGVDWWGN

SEQ ID NO: 94736 - protein, 390 aa, Homo sapiens
MLAARTGAAGSQISEENTKLRRQSGFSVAGKDKSPKKASENAKDSSLSPSGESQLRARQLALLREVEMNWYLKLCDLSSEHTTVCTTGMPHRNLGKSGLRVSCLGLGTWVTFGGQISDEVAERLMTIAYESGVNLFDTAEVYAAGKAEVILGSIIKKKGWRRSSLVITTKLYWGGKAETERGLSRKHIIEEIVRAMTHVINQGMAMYWGTSRWSAMEIMEAYSVARQFNMIPPVCEQAEYHLFQREKVEVQLPELYHKIGVGAMTWSPLACGIISGKYGNGVPESSRASLKCYQWLKERIVSEEGRKQQNKLKDLSPIAERLGCTLPQLAVAWCLRNEGVSSVLLGSSTPEQLIENLGAIQVLPKMTSHVVNEIDNILRNKPYSKKDYRS

SEQ ID NO: 94737 - protein, 193 aa, Homo sapiens
MRQQDINDTVRLLKEKCLFTVQQVTKILHSCPSVLREDLGQLEYKFQYAYFRMGIKHPDIVKSEYLQYSLTKIKQRHIYLERLGRYQTPDKKGQTQIPNPLLKDILRVSEAEFLARTACTSVEEFQVFKKLLAREEEESESSTSDDKRASLDEDEDDDDEEDNDEDDNDEDDDDEDDDEAEDNDEDEDDDEEE

SEQ ID NO: 94738 - protein, 499 aa, Homo sapiens
MAAAMPLALLVLLLLGPGGWCLAEPPRDSLREELVITPLPSGDVAATFQFRTRWDSELQREGVSHYRLFPKALGQLISKYSLRELHLSFTQGFWRTRYWGPPFLQAPSGAELWVWFQDTVTDVDKSWKELSNVLSGIFCASLNFIDSTNTVTPTASFKPLGLANDTDHYFLRYAVLPREVVCTENLTPWKKLLPCSSKAGLSVLLKADRLFHTSYHSQAVHIRPVCRNARCTSISWELRQTLSVVFDAFITGQGKKDWSLFRMFSRTLTEPCPLASESRVYVDITTYNQDNETLEVHPPPTTTYQDVILGTRKTYAIYDLLDTAMINNSRNLNIQLKWKRPPENEAPPVPFLHAQRYVSGYGLQKGELSTLLYNTHPYRAFPVLLLDTVPWYLRLYVHTLTITSKGKENKPSYIHYQPAQDRLQPHLLEMLIQLPANSVTKVSIQFERALLKWTEYTPDPNHGFYVSPSVLSALVPSMVAAKPVDWEESPLFNSLLPWT

SEQ ID NO: 94739 - protein, 119 aa, Homo sapiens
MSTVHEILCKLSLEGDHSTPPSAYGSVKAYTNFDAERDALNIETAIKTKGVDEVTIVNILTNRSNAQRQDIAFAYQRRTKKELASALKSALSGHLETVILGLLKTPAQYDASELKASMK

SEQ ID NO: 94740 - protein, 557 aa, Homo sapiens
MAFMEKPPAGKVLLDDTVPLTAAIEASQSLQSHTEYIIRVQRGISVENSWQIVRRYSDFDLLNNSLQIAGLSLPLPPKKLIGNMDREFIAERQKGLQNYLNVITTNHILSNCELVKKFLDPNNYSANYTEIALQQVSMFFRSEPKWEVVEPLKDIGWRIRKKYFLMKIKNQPKERLVLSWADLGPDKYLSDKDFQCLIKLLPSCLHPYIYRVTFATANESSALLIRMFNEKGTLKDLIYKAKPKDPFLKKYCNPKKIQGLELQQIKTYGRQILEVLKFLHDKGFPYGHLHASNVMLDGDTCRLLDLENSLLGLPSFYRSYFSQFRKINTLESVDVHCFGHLLYEMTYGRPPDSVPVDSFPPAPSMAVVAVLESTLSCEACKNGMPTISRLLQMPLFSDVLLTTSEKPQFKIPTKLKEALRIAKECIEKRLIEEQKQIHQHRRLTRAQSHHGSEEERKKRKILARKKSKRSALENSEEHSAKYSNSNNSGISALPPPPPPPPPPAAPLPPASTEAPAQLSSQAVNGMSRGALLSSIQNFQKGTLRKAKTCDHSAPKIG

SEQ ID NO: 94741 - protein, 426 aa, Homo sapiens
MSNSVPLLCFWSLCYCFAAGSPVPFGPEGRLEDKLHKPKATQTEVKPSVRFNLRTSKDPEHEGCYLSVGHSQPLEDCSFNMTAKTFFIIHGWTMSGIFENWLHKLVSALHTREKDANVVVVDWLPLAHQLYTDAVNNTRVVGHSIARMLDWLQEKDDFSLGNVHLIGYSLGAHVAGYAGNFVKGTVGRITAITEVVKCEHERAVHLFVDSLVNQDKPSFAFQCTDSNRFKKGICLSCRKNRCNSIGYNAKKMRNKRNSKMYLKTRAGMPFRVYHYQMKIHVFSYKNMGEIEPTFYVTLYGTNADSQTLPLEIVERIEQNATNTFLVYTEEDLGDLLKIQLTWEGASQSWYNLWKEFRSYLSQPRNPGRELNIRRIRVKSGETQRKLTFCTEDPENTSISPGRELWFRKCRDGWRMKNETSPTVELP

SEQ ID NO: 94742 - protein, 432 aa, Homo sapiens
MIIANDATVKGGAYYPVTVKKQLRAQEIAMQNRLPCIYLVDSGGAYLPRQADVFPDRDHFGRTFYNQAIMSSKNIAQIAVVMGSCTAGGAYVPAMADENIIVRKQGTIFLAGPPLVKAATGEEVSAEDLGGADLHCRKSGVSDHWALDDHHALHLTRKVVRNLNYQKKLDVTIEPSEEPLFPADELYGIVGANLKRSFDVREVIARIVDGSRFTEFKAFYGDTLVTGFARIFGYPVGIVGNNGVLFSESAKKGTHFVQLCCQRNIPLLFLQNITGFMVGREYEAEGIAKDGAKMVAAVACAQVPKITLIIGGSYGAGNYGMCGRAYSPRFLYIWPNARISVMGGEQAANVLATITKDQRAREGKQFSSADEAALKEPIIKKFEEEGNPYYSSARVWDDGIIDPADTRLVLGLSFSAALNAPIEKTDFGIFRM

SEQ ID NO: 94743 - protein, 537 aa, Homo sapiens
MLADKHAKEIEEESETTVEADLTDKQKHQLKHRELFLSRQYESLPATHIRGKCSVALLNETESVLSYLDKEDTFFYSLVYDPSLKTLLADKGEIRVGPRYQADIPEMLLEGESDEREQSKLEVKVWDPNSPLTDRQIDQFLVVARAVGTFARALDCSSSVRQPSLHMSAAAASRDITLFHAMDTLYRHSYDLSSAISVLVPLGGPVLCRDEMEEWSASEASLFEEALEKYGKDFNDIRQDFLPWKSLTSIIEYYYMWKTTDRYVQQKRLKAAEAESKLKQVYIPTYKPNPNQISTSNGKPGAVNGAVGTTFQPQNPLLGRACESCYATQSHQWYSWGPPNMQCRLCAICWLYWKKYGGLKMPTQSEEEKLSPSPTTEDPRVRSHVSRQAMQGMPVRNTGSPKSAVKTRQAFFLHTTYFTKFARQVCKNTLRLRQAARRPFVAINYAAIRAEYADRHAELSGSPLKSKSTRKPLACIIGYLEIHPAKKPNVIRSTPSLQTPTTKRMLTTPNHTSLSILGKRNYSHHNGLDELTCCVSD

SEQ ID NO: 94744 - protein, 644 aa, Homo sapiens
MEAVCGAWGRGLVLGVSVLGSKEPGDPHANAPRALTVLSTSIQAPGSAQVAGLCGRLTLHRDLRTGRWEPDPQRSRRCLRDPQRVLEYCRQMYPELQIARVEQATQAIPMERWCGGSRSGSCAHPHHQVVPFRCLPGEFVSEALLVPEGCRFLHQERMDQCESSTRRHQEAQEACSSQGLILHGSGMLLPCGSDRFRGVEYVCCPPPGTPDPSGTAVGDPSTRSWPPGSRVEGAEDEEEEESFPQPVDDYFVEPPQAEEEEETVPPPSSHTLAVVGKVTPTPRPTDGVDIYFGMPGEISEHEGFLRAKMDLEERRMRQINEVMREWAMADNQSKNLPKADRQALNEHFQSILQTLEEQVSGERQRLVETHATRVIALINDQRRAALEGFLAALQADPPQAERVLLALRRYLRAEQKEQRHTLRHYQHVAAVDPEKAQQMRFQVHTHLQVIEERVNQSLGLLDQNPHLAQELRPQIQELLHSEHLGPSELEAPAPGGSSEDKGGLQPPDSKDDTPMTLPKGSTEQDAASPEKEKMNPLEQYERKVNASVPRGFPFHSSEIQRDELAPAGTGVSREAVSGLLIMGAGGGSLIVLSMLLLRRKKPYGAISHGVVEVDPMLTLEEQQLRELQRHGYENPTYRFLEERP

SEQ ID NO: 94745 - protein, 435 aa, Homo sapiens
MAERAALEELVKLQGERVRGLKQQKASAELIEEEVAKLLKLKAQLGPDESKQKFVLKTPKGTRDYSPRQMAVREKVFDVIIRCFKRHGAEVIDTPVFELKDFDIAGNFDPMIPDAECLKIMCEILSSLQIGDFLVKVNDRRILDGMFAICGVSDSKFRTICSSVDKLDKVSWEEVKNEMVGEKGLAPEVADRIGDYVQQHGGVSLVEQLLQDPKLSQNKQALEGLGDLKLLFEYLTLFGIDDKISFDLSLARGLDYYTGVIYEAVLLQTPAQAGEEPLGVGSVAAGGRYDGLVGMFDPKGRKVPCVGLSIGVERIFSIVEQRLEALEEKIRTTETQVLVASAQKKLLEERLKLVSELWDAGIKAELLYKKNPKLLNQLQYCEEAGIPLVAIIGEQELKDGVIKLRSVTSREEVDVRREDLVEEIKRRTGQPLCIC

SEQ ID NO: 94746 - protein, 184 aa, Homo sapiens
MATNGSKVADGQISTEVSEAPVANDKPKTLVVKVQKKAADLPDRDTWKGRFDFLMSCVGYAIGLGNVWRFPYLCGKNGGGAFLIPYFLTLIFAGVPLFLLECSLGQYTSIGGLGVWKLAPMFKGVGLAAAVLSFWLNIYYIVIISWAIYYLYNSFTTVSGPFDHPIQQKPHPEPTLGPPRPPLC

SEQ ID NO: 94747 - protein, 139 aa, Homo sapiens
MGPEALSSLLLLLLVASGDADMKGHFDPAKCRYALGMQDRTIPDSDISASSSWSDSTAARHSRLESSDGDGAWCPAGSVFPKEEEYLQVDLQRLHLVALVGTQGRHAGGLGKEFSRSYRLRYSRDGRRWMGWKDRWGQE

SEQ ID NO: 94748 - protein, 344 aa, Homo sapiens
MTFDLTKITKTSSSFEVRTWDPEGVIFYGDTNPKDDWFMLGLRDGRPEIQLHNHWAQLTVGAGPRLDDGRWHQVEVKMEGDSVLLEVDGEEVLRLRQVSGPLTSKRHPIMRIALGGLLFPASNLRLPLVPALDGCLRRDSWLDKQAEISASAPTSLRSCDVESNPGIFLPPGTQAEFNLRDIPQPHAEPWAFSLDLGLKQAAGSGHLLALGTPENPSWLSLHLQDQKVVLSSGSGPGLDLPLVLGLPLQLKLSMSRVVLSQGSKMKALALPPLGLAPLLNLWAKPQGRLFLGALPGEDSSTSFCLNGLWAQGQRLDVDQALNRSHEIWTHSCPQSPGNGTDASH

SEQ ID NO: 94749 - protein, 315 aa, Homo sapiens
MEPEAGTNRTAVAEFILLGLVQTEEMQPVVFVLLLFAYLVTTGGNLSILAAVLVEPKLHAPMYFFLGNLSVLDVGCITVTVPAMLGRLLSHKSTISYDACLSQLFFFHLLAGMDCFLLTAMAYDRLLAICQPLTYSTRMSQTVQRMLVAASWACAFTNALTHTVAMSTLNFCGPNEVNHFYCDLPQLFQLSCSSTQLNELLLFVAAAFMAVAPLVFISVSYAHVVAAVLQIRSAEGRKKAFSTCGSHLTVVGIFYGTGVFSYMRLGSVESSDKDKGVGVFMTVINPMLNPLIYSLRNTDVQGALCQLLVGKRSLT

SEQ ID NO: 94750 - protein, 144 aa, Homo sapiens
MAETSLLEAGASAASTAAALENLQVEASCSVCLEYLKEPVIIECGHNFCKACITRWWEDLERDFPCPVCRKTSRYRSLRPNRQLGSMVEIAKQLQAVKRKIRDESLCPQHHEALSLFCYEDQEAVCLICAISHTHRAHTVVPLD

SEQ ID NO: 94751 - protein, 155 aa, Homo sapiens
MFRLWLLLAGLCGLLASRPGFQNSLLQIVIPEKIQTNTNDSSEIEYEQISYIIPIDEKLYTVHLKQRYFLADNFMIYLYNQGSMNTYSSDIQTQCYYQGNIEGYPDSMVTLSTCSGLRSLKEQPMDDNIFISEKSEPAVPDLFPLYLEMHIVVDK

SEQ ID NO: 94752 - protein, 76 aa, Homo sapiens
MKGNREMVYDCTSSSFDGIIAMMSPEDSWVSKWQRVSNFKPGVYAVSVTGRLPQGIVRELKSRGVAYKSRDTAIKT

SEQ ID NO: 94753 - protein, 266 aa, Homo sapiens
MVCLRLPGGSCMAVLTVTLMVLSSPLALAGDTRPRFLEYSTSECHFFNGTERVRYLDRYFHNQEENVRFDSDVGEFRAVTELGRPDAEYWNSQKDLLEQKRGRVDNYCRHNYGVVESFTVQRRVHPKVTVYPSKTQPLQHHNLLVCSVSGFYPGSIEVRWFRNGQEEKTGVVSTGLIHNGDWTFQTLVMLETVPRSGEVYTCQVEHPSVTSPLTVEWRARSESAQSKMLSGVGGFVLGLLFLGAGLFIYFRNQKGHSGLQPRGFLS

SEQ ID NO: 94754 - protein, 496 aa, Homo sapiens
MIATPLKHSRIYLPPEASSQRRNLPMDAIFFDSIPSGTLTPVKDLVKYQNSSLKLNDHKKNQFLKMTTFNNKNIFQSTMLTEATTSNSSLDISAIKPNKDGLKNKANYESPGKIFLRMKEKVLRDKQEQPSRNSSLLEPQKSGNNETFTPNRVEKKKLQHTYLCEEKENNKSFQSDDSSLRASVQGVPLESSNNDIFLPVKQKIQCQQEKKAPLHNLTYELPTLNQEQENFLAVEARNKTLTRAQLAKQIFHSKESIVATTKSKKDTFVLESVDSADEQFQNTNAETLSTNCIPIKNGSLLMVSDSERTTEGTSQQKVKEGNGKTVPGETGLPGSMKDTCKIVLATPRLHITIPRRSKRNISKLSPPRIFQTVTNGLKKNQVVQLQEWMIKSINNNTAICVEGKLIDVTNIYWHSNVIIERIEHNKLRTISGNVYILKGMIDQISMKEAGYPNYLIRKFMFGFPENWKEHIDNFLEQLRDGVSSCWPDWSRTPGYK

SEQ ID NO: 94755 - protein, 229 aa, Homo sapiens
MIPLQKDNQEEGVCPICQESLKEAVSTNCGHLFCRVCLTQHVEKASASGVFCCPLCRKPCSEEVLGTGYICPNHQKRVCRFCEESRLLLCVECLVSPEHMSHHELTIENALSHYKERLNRRSRKLRKDIAELQRLKAQQEKKLQALQQWLGQLEHMPAEAARILDISRAVTQLRSLVIDLERMAKELDTNTLKNAGDLLNRSAPQKLEVIYPQLKKGVSELLLQPPQKL

SEQ ID NO: 94756 - protein, 80 aa, Homo sapiens
MAQKSLANNSINLPYKDLTSEVTRRRVTMITRKEIITQKSDEAKEMLSHLDLEQAPPPHRTYLTVPPAPPPSPAEDPTVS

SEQ ID NO: 94757 - protein, 109 aa, Homo sapiens
MCFLFSLSGCPRAKKSGIRIAQSKEDKEDQEPIRCPVPGCDGQGHITGKYASHRSASGCPLAAKRQKDGYLNGSQFSWKSVKTEGMSCPTPGCDGSGHVSGSFLTHRRS

SEQ ID NO: 94758 - protein, 891 aa, Homo sapiens
MTVSTDNLLVNKAISKSGQLPTSSNLEANISCSLNELTYNNLPANENQNLKEQNQTEKSLKSPSDTLDGRNENLQESEILSQPKSLSLEATSPLSAEKHSCTVPEGLLFPAEYYVRTTRSMSNCQRKVAVEAVIQSHLDVKKKGFKNKNKDASKNLNLSNEETDQSEIRMSGTCTGQPSSRTSQKLLSLTKVSSPAGPTEDNDLSRKAVAQAPGRRYTGKRKSACTPASDHCEPLLPTSSLSIVNRSKEEVTSHKYQHEKLFIQVKGKKSRHQKEDSLSWSNSAYLSLDDDAFTAPFHRDGMLSLKQLLSFLSITDFQLPDEDFGPLKLEKVKSCSEKPVEPFESKMFGERHLKEGSCIFPEELSPKRMDTEMEDLEEDLIVLPGKSHPKRPNSQSQHTKTGLSSSILLYTPLNTVAPDDNDRPTTDMCSPAFPILGTTPAFGPQGSYEKASTEVAGRTCCTPQLAHLKDSVCLASDTKQFDSSGSPAKPHTTLQVSGRQGQPTCDCDSVPPGTPPPIESFTFKENQLCRNTCQELHKHSVEQTETAELPASDSINPGNLQLVSELKNPSGSCSVDVSAMFWERAGCKEPCIITACEDVVSLWKALDAWQWEKLYTWHFAEVPVLQIVPVPDVYNLVCVALGNLEIREIRALFCSSDDESEKQVLLKSGNIKAVLGLTKRRLVSSSGTLSDQQVEVMTFAEDGGGKENQFLMPPEETILTFAEVQGMQEALLGTTIMNNIVIWNLKTGQLLKKMHIDDSYQASVCHKAYSEMGLLFIVLSHPCAKESESLRSPVFQLIVINPKTTLSVGVMLYCLPPGQAGRFLEGDVKDHCAAAILTSGTIAIWDLLLGQCTALLPPVSDQHWSFVKWSGTDSHLLAGQKDGNIFVYHYS

SEQ ID NO: 94759 - protein, 95 aa, Homo sapiens
  MOD_RES (1)..(1): Any amino acid
XEDWCWKNKSLEVEVLEDDVSAVEFRQTGYMLRCSLSHAITLVQPYCSGEMCPGTSELKTPRNFIRMEMGVRMWGFITSPKESTDSACPSLVCTK

SEQ ID NO: 94760 - protein, 37 aa, Homo sapiens
MDPVVLSYMDSLLRQSDVSLLDPPSWLNDHIIGFAFE

SEQ ID NO: 94761 - protein, 166 aa, Homo sapiens
MEKLHGHVSAHPDILSLENRCLAMLPDLQPLEKLHQHVSTHSDILSLKNQCLATLPDLKTMEKPHGYVSAHPDILSLENQCLATLSDLKTMEKPHGHVSAHPDILSLENRCLATLSSLKSTVSASPLFQSLQISHMTQADLYRVNNSNCLLSEPPSWRAQHFSKGL

SEQ ID NO: 94762 - protein, 428 aa, Homo sapiens
RYHSFSSASRLQPRPSGVTIDESFLTEDKSTQNRKLLQKRRTLVTKLRKNLAEEYLHYLSERDACKILIADLNELRYQREDMSLAQSPGIWGEDPVKLTLALKMTRQDLTRTQMELNNMKANFGDVVPRRDFEMQEKTNKDLQEQLDTLRASYEEVRKEHEILMQLHMSTLKERDQFFSELQEIQRTSTPRPDWTKCKDVVAGGPERWQMLAEGKNSDQLVDVLLEEIGSGLLREKDFFPGLGYGEAIPAFLRFDGLVENKKPSKKDVVNLLKDAWKERLAEEQKETFPDFFFNFLEHRFGPSDAMAWAYTIFENIKIFHSNEVMSQFYAVLMGKRSENVYVTQKETVAQLLKEMTNADSQNEGLLTMEQFNTVLKSTFPLKTEEQIQELMEAGGWHPSSSNADLLNYRSLFMEDEEGQSEPFVQKLW

SEQ ID NO: 94763 - protein, 337 aa, Homo sapiens
MAPWPPKGLVPAMLWGLSLFLNLPGPIWLQPSPPPQSSPPPQPHPCHTCRGLVDSFNKGLERTIRDNFGGGNTAWEEENLSKYKDSETRLVEVLEGVCSKSDFECHRLLELSEELVESWWFHKQQEAPDLFQWLCSDSLKLCCPAGTFGPSCLPCPGGTERPCGGYGQCEGEGTRGGSGHCDCQAGYGGEACGQCGLGYFEAERNASHLVCSACFGPCARCSGPEESNCLQCKKGWALHHLKCVDIDECGTEGANCGADQFCVNTEGSYECRDCAKACLGCMGAGPGRCKKCSPGYQQMWMSVRQRCVRERTSSVKTPRAVIAASVPRATSRWKASV

SEQ ID NO: 94764 - protein, 703 aa, Homo sapiens
MIPASAKAPHKQPHKQSISIGRGTRKRDEDSGTEVGEGTDEWAQSKATVRPPDQLELTDAELKEEFTRILTANNPHAPQNIVRYSFKEGTYKPIGFVNQLAVHYTQVGNLIPKDSDEGRRQHYRDELVAVSYQGSQESVKVISETGNLEEDEEPKELETEPGSQTDVPAAGAAEKVTEEELMTPKQPKERKLTNQFNFSERASQTYNNPVRDRECQTEPPPRTNFSATANQWEIYDAYVEELEKQEKTKEKEKAKTPVAKKSGKMAMRKLTSMESQTDDLIKLSQAAKIMERMVNQNTYDDIAQDFKYYDDAADEYRDQVGTLLPLWKFQNDKAKRLSVTALCWNPKYRDLFAVGYGSYDFMKQSRGMLLLYSLKNPSFPEYMFSSNSGVMCLDIHVDHPYLVAVGHYDGNVAIYNLKKPHSQPSFCSSAKSGKHSDPVWQVKWQKDDMDQNLNFFSVSSDGRIVSWTLVKRKLVHIDVIKLKVEGSTTEVPEGLQLHPVGCGTAFDFHKEIDYMFLVGTEEGKIYKCSKSYSSQFLDTYDAHNMSVDTVSWNPYHTKVFMSCSSDWTVKIWDHTIKTPMFIYDLNSAVGDVAWAPYSSTVFAAVTTDGKAHIFDLAINKYEAICNQPVAAKKNRLTHVQFNLIHPIIIVGDDRGHIISLKLSPNLRKMPKEKKGQEVQKGPAVEIAKLDKLLNLVREVKIKT

SEQ ID NO: 94765 - protein, 130 aa, Homo sapiens
MLRFLAPRLLSLQGRTARYSSAAALPSPILNPDIPYNQLFINNEWQDAVSKKTFPTVNPTTGEVIGHVAEGDRADVDRAVKAAREAFRLGSPWRRMDASERGRLLNRLADLVERDRVYLASLETLDNGKP

SEQ ID NO: 94766 - protein, 30 aa, Homo sapiens
MFLYNLTLQRATGISFAIHGNFSGTKQQEI

SEQ ID NO: 94767 - protein, 85 aa, Homo sapiens
  MOD_RES (1)..(1): Any amino acid
XEESNVLCLSKSPNKHNRLYMKARPFPDGLAEDIDKGGMGHPTLFPFLQRETQMSKLILTNALRGLFGYMARSGFCPRKGKGTRG

SEQ ID NO: 94768 - protein, 120 aa, Homo sapiens
YSSSSSSSSDSSSSSSDSEDEDKKQGKRRKKKKNRSHKSSESSMSETESDSKDSLKKKKKSKDGTEKEKDIKGLSKKRKMYSEDKPLSSESLSESEYIEEVRAKKKKSSEEREKATASIS

SEQ ID NO: 94769 - protein, 825 aa, Homo sapiens
  MOD_RES (1)..(1): Any amino acid
XGNSWHEILKCISQLELAQLIGTGVKPRYISGTVRGREGSLTGTKDQAPDEFVGLGLVGGNVDWKQIASIQESIGETSSQSVVVAVDRIFTGSTRLDGNAIVDFVRWLCAVSMDELLSTTHPRMFSLQKIVEISYYNMGRIRLQWSRIWEVIGDHFNKVGCNPNEDVAIFAVDSLRQLSMKFLEKGELANFRFQKDFLRPFEHIMKRNRSPTIRDMVVRCIAQMVNSQAANIRSGWKNIFSVFHLAASDQDESIVELAFQTTGHIVTLVFEKHFPATIDSFQDAVKCLSEFACNAAFPDTSMEAIRLIRHCAKYVSDRPQAFKEYTSDDMNVAPEDRVWVRGWFPILFELSCIINRCKLDVRTRGLTVMFEIMKTYGHTYEKHWWQDLFRIVFRIFDNMKLPEQQTEKAEWMTTTCNHALYAICDVFTQYLEVLSDVLLDDIFAQLYWCVQQDNEQLARSGTNCLENVVILNGEKFTLEIWDKTCNCTLDIFKTTIPHALLTWRPNSGETAPPPPSPVSEKPLDTISQKSVDIHDSIQPRSVDNRPQAPLVSASAVNEEVSKIKSTAKFPEQKLFAALLIKCVVQLELIQTIDNIVFFPATSKKEDAENLAAAQRDAVDFDVRVDTQDQGMYRFLTSQQLFKLLDCLLESHRFAKAFNSNNEQRTALWKAGFKGKSKPNLLKQETSSLACGLRILFRMYMDESRVSAWEEVQQRLLNVCSEALSYFLTLTSESHREAWTNLLLLFLTKVLKISDNRVSMRLRIQPHISSPIRIGMRGPRAAVQELSEMNQAVPRLHCCLCKATSGLAVSSSVLAFLPPYPALFTN

SEQ ID NO: 94770 - protein, 197 aa, Homo sapiens
PVGHGQSEGERMVVSDFHVFVRDVLQHVDSMQKDYPGLPVFLLGHSMGGAIAILTAAERPGHFAGMVLISPLVLANPESATTFKVDIYNSDPLICRAGLKVCFGIQLLNAVSRVERALPKLTVPFLLLQGSADRLCDSKGAYLLMELAKSQDKTLKIYEGAYHVLHKELPEVTNSVFHEINMWVSQRTATAGTASPP

SEQ ID NO: 94771 - protein, 39 aa, Homo sapiens
MDMDPFLHCVIPNFIQSQDFLEGLQKELMNLDFHENLMI

SEQ ID NO: 94772 - protein, 199 aa, Homo sapiens
MAAGFGRCCRVLRSISRFHWRSQHTKANRQREPGLGFSFEFTEQQKEFQATARKFAREEIIPVAAEYDKTGEYPVPLIRRAWELGLMNTHIPENCGGLGLGTFDACLISEELAYGCTGVQTAIEGNSLGQMPIIIAGNDQQKKKYLGRMTEEPLMCAYCVTEPGAGSDVAGIKTKAEKKGDEYIINGQKMWITNGGKAN

SEQ ID NO: 94773 - protein, 149 aa, Homo sapiens
MEGPEGLGRKQACLAMLLHFLDTYQGLLQEEEGAGHIIKDLYLLIMKDESLYQGLREDTLRLHQLVETVELKIPEENQPPSKQVKPLFRHFRRIDSCLQTRVAFRGSDEIFCRVYMPDHSYVTIRSRLSASVQDILGSVTEKLQYSEEP

SEQ ID NO: 94774 - protein, 432 aa, Homo sapiens
MNNRKEDMEITSHYRHLLRELNEQRQHGVLCDVCVVVEGKVFKAHKNVLLGSSRYFKTLYCQVQKTSEQATVTHLDIVTAQGFKAIIDFMYSAHLALTSRNVIEVMSAASFLQMTDIVQACHDFIKAALDISIKSDASDELAEFEIGASSSSSTEALISAVMAGRSISPWLARRTSPANSSGDSAIASCHDGGSSYGKEDQEPKADGPDDVSSQPLWPGDVGYGPLRIKEEQVSPSQYGGSELPSAKDGAVQNSFSEQSAGDAWQPTGRRKNRKNKETVRHITQQVEDDSRASSPVPSFLPTSGWPFSSRDSNADLSVTEASSSDSRGERAELYAQVEEGLLGGEASYLGPPLTPEKDDALHQATAVANLRAALMSKNSLLSLKADVLGDDGSLLFEYLPRGAHSLSRPGSLVRVADGRTEAPPPSTLRATG

SEQ ID NO: 94775 - protein, 618 aa, Homo sapiens
PSVAYVHTTPGLPSGWEERKDAKGRTYYVNHNNRTTTWTRPIMQLAEDGASGSATNSNNHLIEPQIRRPRSLSSPTVTLSAPLEGAKDSPVRRAVKDTLSNPQSPQPSPYNSPKPQHKVTQSFLPPGWEMRIAPNGRPFFIDHNTKTTTWEDPRLKFPVHMRSKTSLNPNDLGPLPPGWEERIHLDGRTFYIDHSSQVLCGENDTRESVPSYDSKITQWEDPRLQNPAITGPAVPYSREFKQKYDYFRKKLKKPADIPNRFEMKLHRNNIFEESYRRIMSVKRPDVLKARLWIEFESEKGLDYGGVAREWFFLLSKEMFNPYYGLFEYSATDNYTLQINPNSGLCNEDHLSYFTFIGRVAGLAVFHGKLLDGFFIRPFYKMMLGKQITLNDMESVDSEYYNSLKWILENDPTELDLMFCIDEENFGQTYQVDLKPNGSEIMVTNENKREYIDLVIQWRFVNRVQKQMNAFLEGFTELLPIDLIKIFDENELELLMCGLGDVDVNDWRQHSIYKNGYCPNHPVIQWFWKAVLLMDAEKRIRLLQFVTGTSRVPMNGFAELYGSNGPQLFTIEQWGSPEKLPRAHTCFNRLDLPPYETFEDLREKLLMAVENAQGFEGVD

SEQ ID NO: 94776 - protein, 1962 aa, Homo sapiens
MANFLLPRGTSSFRRFTRESLAAIEKRMAEKQARGSTTLQESREGLPEEEAPRPQLDLQASKKLPDLYGNPPQELIGEPLEDLDPFYSTQKTFIVLNKGKTIFRFSATNALYVLSPFHPIRRAAVKILVHSLFNMLIMCTILTNCVFMAQHDPPPWTKYVEYTFTAIYTFESLVKILARGFCLHAFTFLRDPWNWLDFSVIIMAYTTEFVDLGNVSALRTFRVLRALKTISVISGLKTIVGALIQSVKKLADVMVLTVFCLSVFALIGLQLFMGNLRHKCVRNFTALNGTNGSVEADGLVWESLDLYLSDPENYLLKNGTSDVLLCGNSSDAGTCPEGYRCLKAGENPDHGYTSFDSFAWAFLALFRLMTQDCWERLYQQTLRSAGKIYMIFFMLVIFLGSFYLVNLILAVVAMAYEEQNQATIAETEEKEKRFQEAMEMLKKEHEALTIRGVDTVSRSSLEMSPLAPVNSHERRSKRRKRMSSGTEECGEDRLPKSDSEDGPRAMNHLSLTRGLSRTSMKPRSSRGSIFTFRRRDLGSEADFADDENSTAGESESHHTSLLVPWPLRRTSAQGQPSPGTSAPGHALHGKKNSTVDCNGVVSLLGAGDPEATSPGSHLLRPVMLEHPPDTTTPSEEPGGPQMLTSQAPCVDGFEEPGARQRALSAVSVLTSALEELEESRHKCPPCWNRLAQRYLIWECCPLWMSIKQGVKLVVMDPFTDLTITMCIVLNTLFMALEHYNMTSEFEEMLQVGNLVFTGIFTAEMTFKIIALDPYYYFQQGWNIFDSIIVILSLMELGLSRMSNLSVLRSFRLLRVFKLAKSWPTLNTLIKIIGNSVGALGNLTLVLAIIVFIFAVVGMQLFGKNYSELRDSDSGLLPRWHMMDFFHAFLIIFRILCGEWIETMWDCMEVSGQSLCLLVFLLVMVIGNLVVLNLFLALLLSSFSADNLTAPDEDREMNNLQLALARIQRGLRFVKRTTWDFCCGLLRQRPQKPAALAAQGQLPSCIATPYSPPPPETEKVPPTRKETRFEEGEQPGQGTPGDPEPVCVPIAVAESDTDDQEEDEENSLGTEEESSKQTPEDSCSEGSTADMTNTAELLEQIPDLGQDVKDPEDCFTEGCVRRCPCCAVDTTQAPGKVWWRLRKTCYHIVEHSWFETFIIFMILLSSGALAFEDIYLEERKTIKVLLEYADKMFTYVFVLEMLLKWVAYGFKKYFTNAWCWLDFLIVDVSLVSLVANTLGFAEMGPIKSLRTLRALRPLRALSRFEGMRVVVNALVGAIPSIMNVLLVCLIFWLIFSIMGVNLFAGKFGRCINQTEGDLPLNYTIVNNKSQCESLNLTGELYWTKVKVNFDNVGAGYLALLQVATFKGWMDIMYAAVDSRGYEEQPQWEYNLYMYIYFVIFIIFGSFFTLNLFIGVIIDNFNQQKKKLGGQDIFMTEEQKKYYNAMKKLGSKKPQKPIPRPLNKYQGFIFDIVTKQAFDVTIMFLICLNMVTMMVETDDQSPEKINILAKINLLFVAIFTGECIVKLAALRHYYFTNSWNIFDFVVVILSIVGTVLSDIIQKYFFSPTLFRVIRLARIGRILRLIRGAKGIRTLLFALMMSLPALFNIGLLLFLVMFIYSIFGMANFAYVKWEAGIDDMFNFQTFANSMLCLFQITTSAGWDGLLSPILNTGPPYCDPTLPNSNGSRGDCGSPAVGILFFTTYIIISFLIVVNMYIAIILENFSVATEESTEPLSEDDFDMFYEIWEKFDPEATQFIEYSVLSDFADALSEPLRIAKPNQISLINMDLPMVSGDRIHCMDILFAFTKRVLGESGEMDALKIQMEEKFMAANPSKISYEPITTTLRRKHEEVSAMVIQRAFRRHLLQRSLKHASFLFRQQAGSGLSEEDAPEREGLIAYVMSENFSRPLGPPSSSSISSTSFPPSYDSVTRATSDNLQVRGSDYSHSEDLADFPPSPDRDRESIV

SEQ ID NO: 94777 - protein, 150 aa, Homo sapiens
MNLAEICDNAKKGREYALLGNYDSSMVYYQGVMQQIQRHCQSVRDPAIKGKWQQVRQELLEEYEQVKSIVSTLESFKIDKPPDFPVSCQDEPFRDPAVWPPPVPAEHRAPPQIRRPNREVRPLRKEMAGVGARGPVGRAHPISKSEKPST

SEQ ID NO: 94778 - protein, 174 aa, Homo sapiens
MAPISSLSLQTIGAAFVAKVMSVGDRTVTLGIWDTAGSERYEAMSRIYYRGAKAAIVCYDLTDSSSFERAKFWVKELRSLEEGCQIYLCGTKSDLLEEDRRRRRVDFHDVQDYADNIKAQLFETSSKTGQSVDELFQKVAEDYVSVAAFQVMTEDKGVDLGQKPNPYFYSCCHH

SEQ ID NO: 94779 - protein, 139 aa, Homo sapiens
MGAASCEDEELEFKLVFGEEKEAPPLGAGGLGEELDSEDAPPCCRLALGEPPPYGAAPIGIPRPPPPRPGMHSPPPRPAPSPGTWESQPARTSALPPLDWPLPSQYEQLELRIEVQPRAHHRAHYETEGSRGAVKAAPG

SEQ ID NO: 94780 - protein, 38 aa, Homo sapiens
  MOD_RES (1)..(1): Any amino acid
XSGRQLSEVFIQLPSRKELPEYYELIRKPVDFKKIKDS

SEQ ID NO: 94781 - protein, 71 aa, Homo sapiens
MSEGVGTFRMVPEEEQELRAQLEQLTTKDHGPVFGPCSQLPRHTLQKAKDELNEREETREEPVPRGCPLHH

SEQ ID NO: 94782 - protein, 99 aa, Homo sapiens
SKQPSQAQRMYEKALQISEEIQGERHPQTIVLMSDLATTLDAQGRFDEAYIYMQRASDLARQINHPELHMVLSNLAAVLMHRAATTVLGPSKEAKATLG

SEQ ID NO: 94783 - protein, 25 aa, Homo sapiens
MGNPENIEDAYVAVIRPKNTASLNS

SEQ ID NO: 94784 - protein, 798 aa, Homo sapiens
MPPLKSPAAFHEQRRSLERARTEDYLKRKIRSRPERSELVRMHILEETSAEPSLQAKQLKLKRARLADDLNEKIAQRPGPMELVEKNILPVESSLKEAIIVGQVNYPKVADSSSFDEDSSDALSPEQPASHESQGSVPSPLEARVSEPLLSATSASPTQVVSQLPMGRDSREMLFLAEQPPLPPPPLLPPSLTNGTTIPTAKSTPTLIKQSQPKSASEKSQRSKKAKELKPKVKKLKYHQYIPPDQKQDRGAPPMDSSYAKILQQQQLFLQLQILNQQQQQHHNYQAILPAPPKSAGEALGSSGTPPVRSLSTTNSSSSSGAPGPCGLARQNSTSLTGKPGALPANLDDMKVAELKQELKLRSLPVSGTKTELIERLRAYQDQISPVPGAPKAPAATSILHKAGEVVVAFPAARLSTGPALVAAGLAPAEVVVATVASSGVVKFGSTGSTPPVSPTPSERSLLSTGDENSTPGDTFGEMVTSPLTQLTLQASPLQILVKEEGPRAGSCCLSPGGRAELEGRDKDQMLQEKDKQIEALTRMLRQKQQLVERLKLQLEQEKRAQQPAPAPAPLGTPVKQENSFSSCQLSQQPLGPAHPFNPSLAAPATNHIDPCAVAPGPPSVVVKQEALQPEPEPVPAPQLLLGPQGPSLIKGVAPPTLITDSTGTHLVLTVTNKNADSPGLSSGSPQQPSSQPGSPAPAPSAQMDLEHPLQPLFGTPTSLLKKEPPGYEEAMSQQPKQQENGSSSQQMDDLFDILIQSGGNPRNFSRFQGAAIPAREGEAIPEDSLWVPPGSTAITFC

SEQ ID NO: 94785 - protein, 102 aa, Homo sapiens
MASRGARQRLKGSGASSGDTAPAADKLRELLGSREAGGAEHRTEHTTSSMGKGFRLGNIPQHMPFAPMLTCCFMPGQLHFMQEFYKLIRFLCFTFCDVFWLL

SEQ ID NO: 94786 - protein, 1235 aa, Homo sapiens
MARAKLPRSPSEGKAGPGGAPAGAAAPEEPHGLSPLLPARGGGSVGSDVGQRLPVEDFSLDSSLSQVQVEFYVNENTFKERLKLFFIKNQRSSLRIRLFNFSLKLLTCLLYIVRVLLDDPALGIGCWGCPKQNYSFNDSSSEINWAPILWVERKMTLWAIQVIVAIISFLETMLLIYLSYKGNIWEQIFRVSFVLEMINTLPFIITIFWPPLRNLFIPVFLNCWLAKHALENMINDFHRAILRTQSAMFNQVLILFCTLLCLVFTGTCGIQHLERAGENLSLLTSFYFCIVTFSTVGYGDVTPKIWPSQLLVVIMICVALVVLPLQFEELVYLWMERQKSGGNYSRHRAQTEKHVVLCVSSLKIDLLMDFLNEFYAHPRLQDYYVVILCPTEMDVQVRRVLQIPLWSQRVIYLQGSALKDQDLMRAKMDNGEACFILSSRNEVDRTAADHQTILRAWAVKDFAPNCPLYVQILKPENKFHVKFADHVVCEEECKYAMLALNCICPATSTLITLLVHTSRGQEGQESPEQWQRMYGRCSGNEVYHIRMGDSKFFREYEGKSFTYAAFHAHKKYGVCLIGLKREDNKSILLNPGPRHILAASDTCFYINITKEENSAFIFKQEEKRKKRAFSGQGLHEGPARLPVHSIIASMVAMDLQGTEHRPTQSGGGGGGSKLALPTENGSGSRRPSIAPVLELADSSALLPCDLLSDQSEDEVTPSDDEGLSVVEYVKGYPPNSPYIGSSPTLCHLLPVKAPFCCLRLDKGCKHNSYEDAKAYGFKNKLIIVSAETAGNGLYNFIVPLRAYYRSRKELNPIVLLLDNKPDHHFLEAICCFPMVYYMEGSVDNLDSLLQCGIIYADNLVVVDKESTMSAEEDYMADAKTIVNVQTMFRLFPSLSITTELTHPSNMRFMQFRAKDSYSLALSKLEKRERENGSNLAFMFRLPFAAGRVFSISMLDTLLYQSFVKDYMITITRLLLGLDTTPGSGYLCAMKITEGDLWIRTYGRLFQKLCSSSAEIPIGIYRTESHVFSTSEPHDLRAQSQISVNVEDCEDTREVKGPWGSRAGTGGSSQGRHTGGGDPAEHPLLRRKSLQWARRLSRKAPKQAGRAAAAEWISQQRLSLYRRSERQELSELVKNRMKHLGLPTTGYEDVANLTASDVMNRVNLGYLQDEMNDHQNTLSYVLINPPPDTRLEPSDIVYLIRSDPLAHVASSSQSRKSSCSHKLSSCNPETRDETQL

SEQ ID NO: 94787 - protein, 621 aa, Homo sapiens
  MOD_RES (1)..(1): Any amino acid
XPKSSASPYSSVSASLIANGDSTSTCGMHSSGVSRGGSGFSASYNCQEPPSSHIQPGLCGLGNLGNTCFMNSALQCLSNTAPLTDYFLKDEYEAEINRDNPLGMKGEIAEAYAELIKQMWSGRDAHVAPRMFKTQVGRFAPQFSGYQQQDSQELLAFLLDGLHEDLNRVVAKEAWENHRLRNDSVIVDTFHGLFKSTLVCPECAKVSVTFDPFCYLTLPLPLKKDRVMEVFLVPADPHCRPTQYRVTVPLMGAVSDLCEALSRLSGIAAENMVVADVYNHRFHKIFQMDEGLNHIMPRDDIFVYEVCSTSVDGSECVTLPVYFRERKSRPSSTSSASALYGQPLLLSVPKHKLTLESLYQAVCDRISRYVKQPLPDEFGSSPLEPGACNGSRNSCEGEDEEEMEHQEEGKEQLSETEGSGEDEPGNDPSETTQKKIKGQPCPKRLFTFSLVNSYGTADINSLAADGKLLKLNSRSTLAMDWDSETRRLYYDEQESEAYEKHVSMLQPQKKKKTTVALRDCIELFTTMETLGEHDPWYCPNCKKHQQATKKFDLWSLPKILVVHLKRFSYNRYWRDKLDTVVEFPIRGLNMSEFVCNLSARPYVYDLIAVSNHYGAMGVGHY

SEQ ID NO: 94788 - protein, 87 aa, Homo sapiens
MGSKRRRATSPSSSVSGDFDDGHHSVSTPGPSRKRRRLSNLPTVDPIAVCHELYNTIRDYKDEQGRLLCELFIRAPKRRNQPDYYEV

SEQ ID NO: 94789 - protein, 155 aa, Homo sapiens
  MOD_RES (1)..(1): Any amino acid
XDSGVFDQTALAIEHVRFFYQNIWRSWDEEEEDEYDYFVRCVEPRLRLYVFGYQKNSNIQAKGVRSSGQKITHVVSSTMMAGLLRSLLTDRLCQEPGEEEREIQFHSDPLSAINACFEGDTVIVCPGHYVVHGTFSIADSIELEGYGLPDDIVIE

SEQ ID NO: 94790 - protein, 136 aa, Homo sapiens
MVVMNSLRVILQASPGKLLWRKFQIPRFMPARPCSLYTCTYKTRNRALHPLWESVDLVPGGDRQSPINIRWRDSVYDPGLKPLTISYDPATCLHVWNNGYSFLVEFEDSTDKSVIKGGPLEHNYRLKQFHFHWGAI

SEQ ID NO: 94791 - protein, 668 aa, Homo sapiens
MDQREILQKFLDEAQSKKITKEEFANEFLKLKRQSTKYKADKTYPTTVAEKPKNIKKNRYKDILPYDYSRVELSLITSDEDSSYINANFIKGVYGPKAYIATQGPLSTTLLDFWRMIWEYSVLIIPENFSVFSLIREMRTQRPSLVQTQEQYELVYNAVLELFKRQMDVIRDKHSGTESQAKHCIPEKNHTLQADSYSPNLPKSTTKAAKMMNQQRTKMEIKESSSFDFRTSEISAKEELVLHPAKSSTSFDFLELNYSFDKNADTTMKWQTKAFPIVGEPLQKHQSLDLGSLLFEGCSNSKPVNAAGRYFNSKVPITRTKSTPFELIQQRETKEVDSKENFSYLESQPHDSCFVEMQAQKVMHVSSAELNYSLPYDSKHQIRNASNVKHHDSSALGVYSYIPLVENPYFSSWPPSGTSSKMSLDLPEKQDGTVFPSSLLPTSSTSLFSYYNSHDSLSLNSPTNISSLLNQESAVLATAPRIDDEIPPPLPVWTPESFIVVEEAGEFSPNVPKSLSSAVKVKIGTSLEWGGTSEPKKFDDSVILRPSKSVKLRSPKSELHQDRSSPPPPLPERTLESFFLADEDCMQAQSIETYSTSYPDTMENSTSSKQTLKTPGKSFTRSKSLKILRNMKKSICNSCPPNKPAESVQSNNSSSFLNFGMCVILLKS

SEQ ID NO: 94792 - protein, 257 aa, Homo sapiens
  MOD_RES (1)..(1): Any amino acid
XAEAARAAEAAKAAEATKAAEAAAKAAKASNTSTPTKGNTETSASASQTNHVKDVKKIKIEHAPSPSSGGTLKNDKAKTKPPLQVTKVENNLIVDKATKKAVIVGKESKSAATKEESVSLKEKTKPLTPSIGAKEKEQHVALVTSTLPPLPLPPMLPEDKEADSLRGNISVKAVKKEVEKKLRCLLADLPLPPELPGGDDLSKSPEEKKTATQLHSKRRPKTIFDRICGPRYGETKEKDIDWGKRCVDKFDIIGIIG

SEQ ID NO: 94793 - protein, 68 aa, Homo sapiens
MMDLELPPPGLPSQQDMDLIDNYHFYSSIPSMEKEVGNCSPHFLNAFEDSFSSILSTEDPNQLTVNSL

SEQ ID NO: 94794 - protein, 673 aa, Homo sapiens
MREPEELMPDSGAVFTFGKSKFAENNPGKFWFKNDVPVHLSCGDEHSAVVTGNNKLYMFGSNNWGQLGLGSKSAISKPTCVKALKPEKVKLAACGRNHTLVSTEGGNVYATGGNNEGQLGLGDTEERNTFHVISFFTSEHKIKQLSAGSNTSAALTEDGRLFMWGDNSEGQIGLKNVSNVCVPQQVTIGKPVSWISCGYYHSAFVTTDGELYVFGEPENGKLGLPNQLLGNHRTPQLVSEIPEKVIQVACGGEHTVVLTENAVYTFGLGQFGQLGLGTFLFETSEPKVIENIRDQTISYISCGENHTALITDIGLMYTFGDGRHGKLGLGLENFTNHFIPTLCSNFLRFIVKLVACGGCHMVVFAAPHRGVAKEIEFDEINDTCLSVATFLPYSSLTSGNVLQRTLSARMRRRERERSPDSFSMRRTLPPIEGTLGLSACFLPNSVFPRCSERNLQESVLSEQDLMQPEEPDYLLDEMTKEAEIDNSSTVESLGETTDILNMTHIMSLNSNEKSLKLSPVQKQKDHEFSKTEELKLEDVDEEINAENVESKKKTVGDDESVPTGYHSKTEGAERTNDDSSAETIEKKEKANLEERAICEYNENPKGYMLDDADSSSLEILENSETTPSKDMKKTKKMEFRSCCPGWSAMARSWLTTILPPRFKRFSCLSLPSS

SEQ ID NO: 94795 - protein, 171 aa, Homo sapiens
  MOD_RES (1)..(1): Any amino acid
XRYFKFPPEVVRKGRCHSCTGAGRCENCLLRFRTHRSLFKHLHVCAEHAQSPAPPPPPALDREPPAPERPPEVDPASAPGLPFPLLEPFTTPAPAPTGPFLPYLNPAPFGLSPPRLRPFLAAAPGPPASSAAVWKKSQGAGSSPRRPQGGSDAPSGHAAPSRIVWEHTRGR

SEQ ID NO: 94796 - protein, 149 aa, Homo sapiens
MAFLVRCYANCLQPWASKLPADLTKMHLTENPHPQVTHVSSSQSGCSIASDSGSSSLSDIYQATESEVGDVDLTRLPEGPVDSEDDEEEDEEIDRTDPLQGRDLVRECLEKEPADKTDDDIEQLLEFMHQLPAFANMTMSVRRELCSVM

SEQ ID NO: 94797 - protein, 90 aa, Homo sapiens
MKDEPRSTNLFMKLDSVFIWKEPFGLVLIIAPWNYPLNLTLVLLVGALAAGSCVVLKPSEISQGTEKVLAEVLPQYLDQSCFAVVLGGPQ

SEQ ID NO: 94798 - protein, 165 aa, Homo sapiens
MSEEVTYADLQFQNSSEMEKIPEIGKFGEKAPPAPSHVWRPAALFLTLLCLLLLIGLGVLASMFHVTLKIEMKKMNKLQNISEELQRNISLQLMSNMNISNKIRNLSTTLQTIATKLCRELYSKEQEHKCKPCPRRWIWHKDSCYFLSDDVQTWQESKMACAAQN

SEQ ID NO: 94799 - protein, 151 aa, Homo sapiens
MQQKTKLFLQALKYSIPHLGKCMQKQHLNHYNFADHCYNRIKLKKYHLTKCLQNKPKISELARNIPSRSFSCKDLQPVKQENEKPLPENMDAFEKVRTKLETQPQEEYEIINVEVKHGGFVYYQEGCCLVRSKDEEADNDNYEVLFNLEEL

SEQ ID NO: 94800 - protein, 141 aa, Homo sapiens
VFPGNCWAFEGDQGQVVIQLPGRVQLSDITLQHPPPSVEHTGGANSAPRDFAVFFLLSFFTHQGLQVYDETEVSLGKFTFDVEKSEIQTFHLQNDPPAAFPKVKIQILSNWGHPRFTCLYRVRAHGVRTSEGAEGSAQGPH

SEQ ID NO: 94801 - protein, 550 aa, Homo sapiens
MAAALRVAAVGARLSVLASGLRAAVRSLCSQATSVNERIENKRRTALLGGGQRRIDAQHKRGKLTARERISLLLDPGSFVESDMFVEHRCADFGMAADKNKFPGDSVVTGRGRINGRLVYVFSQDFTVFGGSLSGAHAQKICKIMDQAITVGAPVIGLNDSGGARIQEGVESLAGYADIFLRNVTASGVIPQISLIMGPCAGGAVYSPALTDFTFMVKDTSYLFITGPDVVKSVTNEDVTQEELGGAKTHTTMSGVAHRAFENDVDALCNLRDFFNYLPLSSQDPAPVRECHDPSDRLVPELDTIVPLESTKAYNMVDIIHSVVDEREFFEIMPNYAKNIIVGFARMNGRTVGIVGNQPKVASGCLDINSSVKGARFVRFCDAFNIPLITFVDVPGFLPGTAQEYGGIIRHGAKLLYAFAEATVPKVTVITRKAYGGAYDVMSSKHLCGDTNYAWPTAEIAVMGAKGAVEIIFKGHENVEAAQAEYIEKFANPFPAAVRGFVDDIIQPSSTRARICCDLDVLASKKVRVQEVFHQVVQSGHRDGRGAVRW

SEQ ID NO: 94802 - protein, 128 aa, Homo sapiens
AENMADLIDGYCRLVNGTSQSFIIRPQKEGERALPSIPKLANSEKQGMRTHAVSVSETDDYAEIIDEEDTYTMPSTRDYEIQRERIELGRCIGEGQFGDVHQGGPGLLNLKLSSAQSWRKRRLSKKSA

SEQ ID NO: 94803 - protein, 304 aa, Homo sapiens
  MOD_RES (1)..(1): Any amino acid
XSSKDGSVRIWDTTAGRCERILTGHTQSVTCLRWGGDGLLYSASQDRTIKVWRAHDGVLCRTLQGHGHWVNTMALSTDYALRTGAFEPAEASVNPQDLQGSLQELKERALSRYNLVRGQGPERLVSGSDDFTLFLWSPAEDKKPLTRMTGHQALINQVLFSPDSRIVASASFDKSIKLWDGRTGKDDFHSVTWCSSGSSAAARSWLITTSASWVQVILLPQPPRYLASLRGHVAAVYQIAWSADSRLLVSGSSDSTLKVWDVKAQKLAMDLPGHADEVYAVDWSPDGQRVASGGKDKCLRIWRR

SEQ ID NO: 94804 - protein, 255 aa, Homo sapiens
MATAGGGSGADPGSRGLLRLLSFCVLLAGLCRGNSVERKIYIPLNKTAPCVRLLNATHQIGCQSSISGDTGVIHVVEKEEDLQWVLTDGPNPPYMVLLESKHFTRDLMEKLKGRTSRIAGLAVSLTKPSPASGFSPSVQCPNDGFGVYSNSYGPEFAHCREIQWNSLGNGLAYEDFSFPIFLLEDENETKVIKQETFDYIGSSRMVYDMEKGKFPVQLENVDSFVELGQVALRTSLELWMHTDPVSQKNESVRNQ

SEQ ID NO: 94805 - protein, 157 aa, Homo sapiens
MDQKILSLAAEKTADKLQEFLQTLREGDLTNLLQNQAVKGKVAGALLRAIFKGSPCSEEAGTLRRRKIYTCCIQLVESGDLQKEIASEIIGLLMLEAHHFPGPLLVELANEFISAVREGSLVNGKSLELLPIILTALATKKENLAYGKGVLSGEECK

SEQ ID NO: 94806 - protein, 34 aa, Homo sapiens
MDLSTFDFRTGKMLMSKMNKSRQRVRYDSSNQVK

SEQ ID NO: 94807 - protein, 115 aa, Homo sapiens
MDTWLVCWAIFSLLKAGLTEPEVTQTPSHQVTQMGQEVILHCVPISNHLYFYWYRQILGQKVEFLVSFYNNEISEKSEIFDDQFSVERPDGSNFTLKIRSTKLEDSAMYFCASSE

SEQ ID NO: 94808 - protein, 106 aa, Homo sapiens
  MOD_RES (1)..(1): Any amino acid
XHSGQFGTINNFRLGRLPSVPVEWNEINAAWGQTVLLLHALANKMGLKFQRMDVEKGKIEDTGGSGGSYSIKTQFNSEEQWTKALKFMLTNLKWGLAWVSSQFYNK

SEQ ID NO: 94809 - protein, 103 aa, Homo sapiens
MKWCATCRFYRPPRCSHCSVCDNCVEEFDHHCPWVNNCIGRRNYRYFFLFLLSLTAHIMGVFGFGLLYVLYHIEELSGVRTAVTMAVMCVAGLFFIPVAGLTG

SEQ ID NO: 94810 - protein, 110 aa, Homo sapiens
DLRKLLRKVDVERSPGGTPLTNKENMETGTGLTPVMTQALRRKFQVQPGPPPCPVFYPEKQEITLPPDGLWVLRFPYAYVTERGPCFPPKENVQLMSYKVLRGVLKAVTQ

SEQ ID NO: 94811 - protein, 27 aa, Homo sapiens
MSPCPEEAAMRREVVKRIETVVKDLWP

SEQ ID NO: 94812 - protein, 1192 aa, Homo sapiens
MREESGMPPPWDASLLENEFFQVLDDLDSKLAQEQSASSVNTRTPLNYGSRTQFGHFYSSGNRHGNITERHKKHYNETSNMSIYDILRPGTPREGFKTFSPRTSTIYDMYRTREPRVFKEDYVQKNTFGSTSLCFDSRQRSALPATGHFTARSLHFPATTQSKSGFIPPRHQQSPKRTPLSSIIWNRSDSSRDRENQEEFLRAPSPMEIDPADKYVYPRGFQENKRYESYHSQNVYQRVSLNAPMENAMSPDTFENSENMPFYHQSNTFTRSFFSNTFGRSGEQRRFGQGPFWGQEKGHSFWSDFHRSRKSFSSSDRDFEMISMEANSVSAIHGHNVSSEHWESFSSGYGTDVSRGQEEPHPWQFDFQRSTLDSMVVSHGNETQLTPHFGTPNVCSMTGSSYHVKSSELVSQQDSSPVEVHINKEASSFGIAQTLASSFKTSFSQISDDRRNPQSPNLQNPTVTLQKIFPNKPASHPMRSHTEVTVTSSNSVDSLPLAKSQPNILVTEVNNEKDLNESISEEDKQLSKMDQTNKAGEIPQPVSQTGISNSLPDFQNPLSQDSAKSNGFGFNASTIISSKKSPRVFSRKDTSKMYIPHTDKSNDIKQDKRFTENRKLGSTASLPFIQEHRTPPSFPRTDQGCHQELTVNNEDISRIITNNHWSSALTDTQNAQYSKCKLTPGHKTSCDSLDLSSAALPDSSPSKNSSLDAPVVPSTTVFSRRSPSDKDPSLGEREEKDNAGKNQKNQFIVSHSENQERNDSPVPTHDEVVDVKCHSHSPFRNERGKGKIRHHISCIEKLSKTESISVPTSDHRSLIEANQSNSKVSELDTIYCTLPRKSSSFLIHGRQSGSKIMAASLRNGPPPFQIKNNVEDAMGNYMLNKFSPSSPESANECSKVLSDSALEAPEATERMTNVKSSGSTSVRKGPLPFLINRAMSCPSGEPHASTGREGRKKPLTSGMDASELTPRAWERIISPVESDSSVRDCSLTKRQHQKENFQEYTEKEGKMAASRRSVFALSNEDPLPFCSDLSGKERGKTLHKVKTTSTFSVSGDEDNVKCLEVVSIYYTLPRKPSKKFCNLLQQYTQNTNLLIESPQVETETFPNALEKDKQNYSTREQSGTPSCENLKMSVNSDQTLTTENMTAFRLSNRGPLAPTLQEMASVEAAVSLPEEESKAREIFSDNLAKTPLGDSE

SEQ ID NO: 94813 - protein, 97 aa, Homo sapiens
  MOD_RES (1)..(1): Any amino acid
XGQMQNLESARAGRSVSTQTGSMTGQIPRLSKVNLFTLLSLWMELFPAEAQRQKSQKNEEGKHGPLGDNEERTRVSTDKRQDYWKQLRCLDERFTIT

SEQ ID NO: 94814 - protein, 68 aa, Homo sapiens
AEGEGLVLPKKIRVRSAVEQWLVNVEKSMFDVLKKFLSQGIEDWNCQMFSQWVLSHPGQVVLTVTFAI

SEQ ID NO: 94815 - protein, 330 aa, Homo sapiens
MAKPAQGAKYRGSIHDFPGFDPNQDAEALYTAMKGFGSDKEAILDIITSRSNRQRQEVCQSYKSLYGKDLMTDLKSEISGDLARLILGLMMPPAHYDAKQLKKAMEGAGTDEKALIEILATRTNAEIRAINEAYKEDYHKSLEDALSSDTSGHFRRILISLATGHREEGGENLDQAREDAQVAAEILEIADTPSGDKTSLETRFMTILCTRSYPHLRRVFQEFIKMTNYDVEHTIKKEMSGDVRDAFVAIVQSVKNKPLFFADKLYKSMKGAGTDEKTLTRIMVSRSEIDLLNIRREFIEKYDKSLHQAIEGDTSGDFLKALLALCGGED

SEQ ID NO: 94816 - protein, 216 aa, Homo sapiens
MSSEAETQQPPAAPPAAPALSAADTKPGTTGSGAGSGGPGGLTSAAPAGGDKKVIATKVLGTVKWFNVRNGYGFINRNDTKEDVFVHQGAEAANVTGPGGVPVQGSKYAADRNHYRRYPRRRGPPRNYQQNYQNSESGEKNEGSESAPEGQAQQRRPYRRRRFPPYYMRRPYGRRPQYSNPPVQGEVMEGADNQGAGEQGRPVRQNMYRGYRPRFR

SEQ ID NO: 94817 - protein, 160 aa, Homo sapiens
MENSEKTEVVLLACGSFNPITNMHLRLFELAKDYMNGTGRYTVVKGIISPVGDAYKKKGLIPAYHRVIMAELATKNSKWVEVDTWESLQKEWKETLKVLRHHQEKLEASDCDHQQNSPTLERPGRKRKWTETQDSSQKKSLEPKTKDGVSLYHPGWSAVA

SEQ ID NO: 94818 - protein, 77 aa, Homo sapiens
  MOD_RES (1)..(1): Any amino acid
XPPLPGFDSCLPVVPDYSCVPPWHPVGTAYGGSSQIHGAINPGPIGCIAPSPPASHYVPQESKTKSLCFWITHLILN

SEQ ID NO: 94819 - protein, 157 aa, Homo sapiens
MPPTPAARYLRGQQLPRADFQLRPVPSVFAPQEQEYQQALLLVAALAGLGLGLSLIFIAVYLIRFCCCRPPEPPGSKIPSPGGGCVTWSCIVALLAGCTGIGIGFYGNSETSDGVSQLSSALLHANHTLSTIDHLVLETVERLGEAVRTELTTLEEV

SEQ ID NO: 94820 - protein, 74 aa, Homo sapiens
MDSVRSGPFGQIFRPDNFVFGQSGAGNNWAKGHYTEGAELVDAVLDVVRKEAESCDCLQGFQLTHSLGGGTGSG

SEQ ID NO: 94821 - protein, 79 aa, Homo sapiens
MRAEEKYEISLLKKEKMNLLKLIDKKNEEKISLQSEVTKLRKNLAEEYLHYLSERDACKILIADLNELRYQREDMSLAQ

SEQ ID NO: 94822 - protein, 203 aa, Homo sapiens
MGRRSSDTEEESRSKRKKKHRRRSSSSSSSDSRTYSRKKGGRKSRSKSRSWSRDLQPRSHSYDRRRRHRSSSSSSYGSRRKRSRSRSRGRGKSYRVQRSRSKSRTRRSRSRPRLRSHSRSSERSSHRRTRSRSRDRERRKGRDKEKREKEKDKGKDKELHNIKRGESGNIKAGLEHLPPAEQAKARLQLVLEAAAKADEALKA

SEQ ID NO: 94823 - protein, 537 aa, Homo sapiens
MPRAPHFMPLLLLLLLLSLPHTQAAFPQDPLPLLISDLQGTSPLSWFRGLEDDAVAAELGLDFQRFLTLNRTLLVAARDHVFSFDLQAEEEGEGLVPNKYLTWRSQDVENCAVRGKLTDECYNYIRVLVPWDSQTLLACGTNSFSPVCRSYGITSLQQEGEELSGQARCPFDATQSNVAIFAEGSLYSATAADFQASDAVVYRSLGPQPPLRSAKYDSKWLREPHFVQALEHGDHVYFFFREVSVEDARLGRVQFSRVARVCKRDMGGSPRALDRHWTSFLKLRLNCSVPGDSTFYFDVLQALTGPVNLHGRSALFGVFTTQTNSIPGSAVCAFYLDEIERGFEGKFKEQRSLDGAWTPVSEDRVPSPRPGSCPAHSSPLGRSLQVLRGSREAPPVPGPARGLPGPRPEKGGRREAPVVPEASPRRALLPPGRPERRPFQLLKGAAHGLQRGERPSPLGHELDALQDVSPPPRPAPPAFPTRRVSRGPFSPRVYLLTVFPPVLDRRVGGEKPVSSVSQHFRGSWRTPTPRSLPAKLP

SEQ ID NO: 94824 - protein, 79 aa, Homo sapiens
EEVFAQVRRTQAGELSTQVGSFVWSHILQLLETHDPLKRALRDTLPEDILSQEFHPEMWKHSSYSDVTFRSAWAPAGKC

SEQ ID NO: 94825 - protein, 190 aa, Homo sapiens
  MOD_RES (1)..(1): Any amino acid
XRESASPSPEPWTPGHGACSTSSAAIMATATSRNCDKLKSFHLSPRGPPTSEPPPVPANKPKFLKIAEEDPPREAAMPGLFVPPVAPRPPALKLPVPEAMARPAVLPRPEKPQLPHLQRSPPDGQSFRSFSFEKPRQPSQADTGGDDSDEDYEKVVQGYKPPGRAPGWTLLHPELLYQVGEGPGCVGRNL

SEQ ID NO: 94826 - protein, 444 aa, Homo sapiens
MGFCLALAWTLLVGAWTPLGAQNPISWEVQRFDGWYNNLMEHRWGSKGSRLQRLVPASYADGVYQPLGEPHLPNPRDLSNTISRGPAGLASLRNRTVLGVFFGYHVLSDLVSVETPGCPAEFLNIRIPPGDPMFDPDQRGDVVLPFQRSRWDPETGRSPSNPRDPANQVTGWLDGSAIYGSSHSWSDALRSFSRGQLASGPDPAFPRDSQNPLLMWAAPDPATGQNGPRGLYAFGAERGNREPFLQALGLLWFRYHNLWAQRLARQHPDWEDEELFQHARKRVIATYQNIAVYEWLPSFLQKTLPEYTGYRPFLDPSISSEFVAASEQFLSTMVPPGVYMRNASCHFQGVINRNSSVSRALRVCNSYWSREHPSLQSAEDVDALLLGMASQIAEREDHVLVEDVRGTGGHSCPVQPGLILARAAPWGTPGEPPGPWTSVQHHRP

SEQ ID NO: 94827 - protein, 420 aa, Homo sapiens
MKARRPNRDPFLLVFASGAQGEYAGLATIRAYLNQKGEGHRTVCLIPKSAHGTNPASAHMAGMKIQPVEVDKYGNIDAVHLKAMVDKHKENLAAIMITYPSTNGVFEENISDVCDLIHQHGGQVYLDGANMNAQVGICRPGDFGSDVSHLNLHKTFCIPHGGGGPGMGPIGVKKHLAPFLPNHPVISLKRNEDACPVGTVSAAPWGSSSILPISWAYIKMMGGKGLKQATETAILNANYMAKRLETHYRILFRGARGYVGHEFILDTRPFKKSANIEAVDVAKRLQDYGFHAPTMSWPVAGTLMVEPTESEDKAELDRFCDAMISIRQEIADIEEGRIDPRVNPLKMSPHSLTCVTSSHWDRPYSREVAAFPLPFVKPENKFWPTIARIDDIYGDQHLVCTCPPMEVYESPFSEQKRASS

SEQ ID NO: 94828 - protein, 395 aa, Homo sapiens
MDPDPQAGVQVGMRVVRGVDWKWGQQDGGEGGVGTVVELGRHGSPSTPDRTVVVQWDQGTRTNYRAGYQGAHDLLLYDNAQIGVRHPNIICDCCKKHGLRGMRWKCRVCLDYDLCTQCYMHNKHELAHAFDRYETAHSRPVTLSPRQGLPRIPLRGIFQGAKVVRGPDWEWGSQDGGEGKPGRVVDIRGWDVETGRSVASVTWADGTTNVYRVGHKGKVDLKCVGEAAGGFYYKDHLPRLGKPAELQRRVSADSQPFQHGDKVKCLLDTDVLREMQEGHGGWNPRMAEHHSFWVGDVVRVIGDLDTVKRLQAGHGEWTDDMAPALGRVGKVVKVFGDGNLRVAVAGQRWTFSPSCLVAYRPEEDANLDVAERARENKSAAQLRRPVGGGAAPGHH

SEQ ID NO: 94829 - protein, 137 aa, Homo sapiens
MEDERSFSDICGGRLALQRRYYSPSCREFCLSCPRLSLRSLTAVTCTVWLAAYGLFTLCENSMILSAAIFITLLGKESTTFIEMGKVKDIVINEAIYMQKVIYYLCILLKDPVEPHGISQVVPVFQRQSLTLSPRLE

SEQ ID NO: 94830 - protein, 67 aa, Homo sapiens
MAQLKCYYFDYKEQLPESAYMHQLLGLNLLFLLSQNRVAEFHTELERLPAKDIQTNVYIKHPVSLEQ

SEQ ID NO: 94831 - protein, 110 aa, Homo sapiens
MSTVHEILCKLSLEGDHSTPPSAYGSVKAYTNFDAERDALNIETAIKTKGVDEVTIVNILTNRSNAQRQDIAFAYQRRTKKELASALKSALSGHLETVILGLLKTPAQYD

SEQ ID NO: 94832 - protein, 51 aa, Homo sapiens
MNKDAQMRAAINQKLIETGERERLKELLRAKLIECGWKDQLKAHCKDNDFK

SEQ ID NO: 94833 - protein, 45 aa, Homo sapiens
FGDVIPDYVLGQSTCALFLRAPGTCSPLEAQVSSPLHEEARGLVF

SEQ ID NO: 94834 - protein, 80 aa, Homo sapiens
  MOD_RES (1)..(1): Any amino acid
XVGRLMNRSISCTMKNPKVEVFGYPPSPQAVVTARTFPLWSMDSSFRYEDGQVGDANINTQDPKIQKEIMRVIGTQVYTN

SEQ ID NO: 94835 - protein, 294 aa, Homo sapiens
  MOD_RES (1)..(1): Any amino acid
XRRLLLRSVQLHDSGNYSCYRAGRPAGTVHLLVDVPPEEPQLSCFRKSPLSNVVCEWGPRSTPSLTTKAVLLVRKFQNSPAEDFQEPCQYSQESQKFSCQLAVPEGDSSFYIVSMCVASSVGSKFSKTQTFQGCGILQPDPPANITVTAVARNPRWLSVTWQDPHSWNSSFYRLRFELRYRAERSKTFTTWMVKDLQHHCVIHDAWSGLRHVVQLRAQEEFGQGEWSEWSPEAMGTPWTGFSPQTIPGGIWDPAGESRSPPAENEVSTPMQALTTNKDDDNILFRDSANATSLP

SEQ ID NO: 94836 - protein, 487 aa, Homo sapiens
MEFSSPSREECPKPLSRVSIMAGSLTGLLLLQAVSWASGARPCIPKSFGYSSVVCVCNATYCDSFDPPTFPALGTFSRYESTRSGRRMELSMGPIQANHTGTGIGYNIIRVPMASCDFSIRTYTYADTPDDFQLHNFSLPEEDTKLKIPLIHRALQLAQRPVSLLASPWTSPTWLKTNGAVNGKGSLKGQPGDIYHQTWARYFVKFLDAYAEHKLQFWAVTAENEPSAGLLSGYPFQCLGFTPEHQRDFIARDLGPTLANSTHHNVRLLMLDDQRLLLPHWAKVVLTDPEAAKYVHGIAVHWYLDFLAPAKATLGETHRLFPNTMLFASEACVGSKFWEQSVRLGSWDRGMQYSHSIITNLLYHVVGWTDWNLALNPEGGPNWVRNFVDSPIIVDITKDTFYKQPMFYHLGHFSKFIPEGSQRVGLVASQKNDLDAVALMHPDGSAVVVVLNRSSKDVPLTIKDPAVGFLETISPGYSIHTYLWCRQ

SEQ ID NO: 94837 - protein, 133 aa, Homo sapiens
MKRQLRRLRELHLYSTWKKYQEAMKTSLGVPQCERDEGSLGKPLCPPEILSETLPGSVKKRVCFPSEDHLEEFIAEHLPEASNQSLLTVAHADTGIQTNGDLEDLEEHGPGQTVSEEATEVHMMEGDPDTLAE

SEQ ID NO: 94838 - protein, 161 aa, Homo sapiens
MEPEREGTERHPRKVRESRQAPNKLVGAAEAMKAGWDLEESQPEAKKARLSTILFTDNCEVTHDQLCELLKYAVLGKSNVPKPSWCQLFHQNHLNNVVVFVLQGMSQLHFYRFYLEFGCLRKAFRHKFRLPPPSSDFLADVVGLQTEQRAGDLPKTMEGPL

SEQ ID NO: 94839 - protein, 454 aa, Homo sapiens
  MOD_RES (1)..(1): Any amino acid
XLEQPTDPVARDGPLSQTSSKPDPSQWESPSFNPFGSHSVLQNSPPLSSEGSYHFDPDNFDESMDPFKPTTTLTSSDFCSPTGNHVNEILESPKKAKSRLITTTEQVKFLCFLLSGCKVKKHETQSLALDACSRDEGAVISQISDISNRDGHATDEEKLASTSCGQKSAGAEVKGEPEEDLEYFECSNVPVSTINHAFSSSEAGIEKETCQKMEEDGSTVLGLLESSAEKAPVSVSCGGESPLDGICLSESDKTAVLTLIREEIITKEIEANEWKKKYEETRQEVLEMRKIVAEYEKTIAQMIDEQRTSMTSQKSFQQLTMEKEQALADLNSVERSLSDLFRRYENLKGVLEGFKKNEEALKKCAQDYLARVKQEEQRYQALKIHAEEKLDKANEEIAQVRTKAKAESAALHAGLRKEQMKVESLERALQQKNQEIEELTKICDELIAKLGKTD

SEQ ID NO: 94840 - protein, 555 aa, Homo sapiens
MPKNSKVVKRELDDDVTESVKDLLSNEDAADDAFKTSELIVDGQEEKDTDVEEGSEVEDERPAWNSKLQYILAQVGFSVGLGNVWRFPYLCQKNGGGAYLLPYLILLMVIGIPLFFLELSVGQRIRRGSIGVWNYISPKLGGIGFASCVVCYFVALYYNVIIGWSLFYFSQSFQQPLPWDQCPLVKNASHTFVEPECEQSSATTYYWYREALNISSSISESGGLNWKMTICLLAAWVMVCLAMIKGIQSSGKIIYFSSLFPYVVLICFLIRAFLLNGSIDGIRHMFTPKLEIMLEPKVWREAATQVFFALGLGFGGVIAFSSYNKRDNNCHFDAVLVSFINFFTSVLATLVVFAVLGFKANVINEKCITQNSETIMKFLKMGNISQDIIPHHINLSTVTAEDYHLVYDIIQKVKEEEFPALHLNSCKIEEELNKAVQGTGLAFIAFTEAMTHFPASPFWSVMFFLMLVNLGLGSMFGTIEGIVTPIVDTFKVRKEILTVICCLLAFCIGLIFVQRSGNYFVTMFDDYSATLPLLIVVILENIAVCFVYGIDNVPE

SEQ ID NO: 94841 - protein, 135 aa, Homo sapiens
MAPTQGPRAPLEFGGPLGAAALLLLLPATMFHLLLAARSGPARLLGPPASLPGLEVLWSPRALLLWLAWLGLQAALYLLPARKVAEGQELKDKSRLRYPINGPHQPGPVDEGGRASRQSLTGHVAGQWLPVALRG

SEQ ID NO: 94842 - protein, 151 aa, Homo sapiens
  MOD_RES (1)..(1): Any amino acid
XPDRGRLGFQILSKLVNSLYPDGSKPVKVPENPPSMVFKQMEQVAQFLKAAEDYGVIKTDMFQTVDLFEGKDMAAVQRTLMALGSLAVTKNDGHYRGDPNWFMKKAQEHKREFTESQLQEGKHVIGLQMGSNRGASQAGMTGYGRPRQIIS

SEQ ID NO: 94843 - protein, 192 aa, Homo sapiens
  MOD_RES (1)..(1): Any amino acid
XCKKYRDQFTDQQKLIYEEKLEASELFKDKKALYPSSVGQPFQGAYLEINKNPKYKKLKDAIEEKIIIAEVVNKINRANGKSTSRIFLLTNNNLLLADQKSGQIKSEVPLVDVTKVSMSSQNDGFFAVHLKEGSEAASKGDFLFSSDHLIEMATKLYRTTLSQTKQKLNIEISDEYVHVLFENPFSLSAFLF

SEQ ID NO: 94844 - protein, 98 aa, Homo sapiens
ESGKEIVDWFNALRAARLQYLKMAFPELPESEQKEPFKKRWFALDCHERRLLYYKNPLDAFEQGQVFLGNKEQGYEAYEDLPKGIRGNRWKAGLTIVT

SEQ ID NO: 94845 - protein, 349 aa, Homo sapiens
  MOD_RES (1)..(1): Any amino acid
XKPFWKGTGKTMVMDMFYAYVEMKRKKRVHFHGFMLDVHKRIHRLKQSLPKRKPGFMAKSYDPIAPIAEEISEEACLLCFDEFQVTDIADAMILKQLFENLFKNGVVVVATSNRPPEDLYKNGLQRANFVPFIAVLKEYCNTVQLDSGIDYRKRELPAAGKLYYLTSEADVEAVMDKLFDELAQKQNDLTRPRILKVQGRELRLNKACGTVADCTFEELCERPLGASDYLELSKNFDTIFLRNIPQFTLANRTQGRRFITLIDNFYDLKVRIICSASTPISSLFLHQHHDSELEQSRILMDDLGLSQDSAEGLSMFTGEEEIFAFQRTISRLTEMQTEQYWNEGDRTKK

SEQ ID NO: 94846 - protein, 414 aa, Homo sapiens
MSHHDDGATVGLGIQMCEGWRVEAALSFLPHQRKWGETAGAVMAGGVMDKEYVGFAALPNQLHRKSVKKGFDFTLMVAGESGLGKSTLINSLFLTNLYEDRQVPEASARLTQTLAIERRGVEIEEGGVKVKLTLVDTPGFGDSVDCSDCWLPVVKFIEEQFEQYLRDESGLNRKNIQDSRVHCCLYFISPFGRGLRPLDVAFLRAVHEKVNIIPVIGKADALMPQETQALKQKIRDQLKEEEIHIYQFPECDSDEDEDFKRQDAEMKESIPFAVVGSCEVVRDGGNRPVRGRRYSWGTVEVENPHHCDFLNLRRMLVQTHLQDLKEVTHDLLYEGYRARCLQSLARPGARDRASRSKLSRQSATEIPLPMLPLADTEKLIREKDEELRRMQEMLEKMQAQMQQSQAQGEQSDAL

SEQ ID NO: 94847 - protein, 77 aa, Homo sapiens
MASVWKRLQRVGKHASKFQFVASYQELMVECTKKWQPDKLVVVWTRRSRRKSSKAHSWQPGIKNPYRGVVVWPVPEN

SEQ ID NO: 94848 - protein, 134 aa, Homo sapiens
MRRPLSKCGMEPGGGDASLTLHGLQNRSHGKIKLRKRKSTLYFNTQEKSARRRGVFLPVVLLVHMVLLYQNPYKHHGNCSHYNCSFLLSFGRFKVYEQCQILIPGGTCLHNSSHSCHSVDTFALQTFLSRTKKA

SEQ ID NO: 94849 - protein, 169 aa, Homo sapiens
  MOD_RES (1)..(1): Any amino acid
XRALSLRLFQTEEKIERTQRDIRSIQEALARNAGRKRARRQRARLQGSATAAEASLLRRTHLCSLSKSDTRLHELHRGPRSSRALRPASMDLLRPHWLEVSRDITGPQAAPSAFPHQELPRALPAAAATAGCAGLEATYSNVGLAALPGVSLAASPVVAEYARVQKRKG

SEQ ID NO: 94850 - protein, 280 aa, Homo sapiens
MRASKGSEGCQHAVTSQLVTGAGGDQTEMFSPPVSSGKNGPTSLASGHFTGSNVEDRSSSGSWGNGGHPSPSRNYGDGTPYDHMTSRDLGSHDNLSPPFVNSRIQSKTERGSYSSYGRESNLQGCHQQSLLGGDMDMGNPGTLSPTKPGSQYYQYSSNNPRRRPLHSSAMEVQTKKVRKVPPGLPSSVYAPSASTADYNRDSPGYPSSKPATSTFPSSFFMQDGHHSSDPWSSSSGMNQPGYAGMLGNSSHIPQSSSYCSLHPHERLSYPSHSSADINSS

SEQ ID NO: 94851 - protein, 148 aa, Homo sapiens
MVLGNSHLFMNRSNKLAVIASHIQESRFLYPGKNGRLGDFFGDPGNPPEFNPSGSKDGKYELLTSANEVIVEEIKDLMTKSDIKGQHTETLLAGSLAKALCYIHRMNKEVKDNQEMKSRILAQGIAHENLIPLETLVGVSSRSRSEIS

SEQ ID NO: 94852 - protein, 59 aa, Homo sapiens
  MOD_RES (1)..(1): Any amino acid
XRHALIKKLNQLRASEPGLAQLLVDQIYENAMIAAGLVDDPRAMVGRLNELLVKALERH

SEQ ID NO: 94853 - protein, 93 aa, Homo sapiens
  MOD_RES (1)..(1): Any amino acid
XPIANHVISADAIEALTAYSPAVLALHDVLKQQLSLTQQFIQASRHLHASLLRSLDADSFHYHTLEEAKEYIRCHRPAPLTMEDALEEVNKEL

SEQ ID NO: 94854 - protein, 92 aa, Homo sapiens
MAPLPGAELVRRPLQLYRYLLRCCQQLPTKGIQQHYKHAVRQSFRVHSDEDNPERIQQIIKRAIEDADWIMNKLRMVPVEEATSQLLPSSRS

SEQ ID NO: 94855 - protein, 208 aa, Homo sapiens [sequence omitted]

SEQ ID NO: 94856 - protein, 109 aa, Homo sapiens
MWTADEIAQLCYEHYGIRLPKKGKPEPNHEWTLLAAVVKIQSPADKACDTPDKPVQVTKEVVSMGTGTKCIGQSKMRKNGDILNDSHAEVIARRSFQRYLLHQLQLAAT

SEQ ID NO: 94857 - protein, 1365 aa, Homo sapiens
  MOD_RES (1)..(1): Any amino acid
XSSPPKSRVELGKIHFKKHLLHVTSRPLLATTTAVASPPTHAAPLPAVIAESTTVDSPPSSPPPPPPPAQATTLSSPAPVTEPVALPHTPITVLMAAPVPLPVDVAVRSLKEPPIIIVPESLEADTKQDTISNSLEEHVTQILNEQADISSKKEDSHIGKDEEIPDSSKISLSCKKTGSKKKSSQSEGIFLGSESDEDSVRTSSSQRSHDLKFSASIEKERDFKKSSAPLKSEDLGKPSRSKTDRDDKYFSYSKLERDTRYVSSRCRSERERRRSRSHSRSERGSRTNLSYSRSERSHYYDSDRRYHRSSPYRERTRYSRPYTDNRARESSDSEEEYKKTYSRRTSSHSSSYRDLRTSSYSKSDRDCKTETSYLEMERRGKYSSKLERESKRTSENEAIKRCCSPPNELGFRRGSSYSKHDSSASRYKSTLSKPIPKSDKFKNSFCCTELNEEIKQSHSFSLQTPCSKGSELRMINKNPEREKAGSPAPSNRLNDSPTLKKLDELPIFKSEFITHDSHDSIKELDSLSKVKNDQLRSFCPIELNINGSPGAESDLATFCTSKTDAVLMTSDDSVTGSELSPLVKACMLSSNGFQNISRCKEKDLDDTCMLHKKSESPFRETEPLVSPHQDKLMSMPVMTVDYSKTVVKEPVDTRVSCCKTKDSDIYCTLNDSNPSLCNSEAENIEPSVMKISSNSFMNVHLESKPVICDSRNLTDHSKFACEEYKQSIGSTSSASVNHFDDLYQPIGSSGIASSLQSLPPGIKVDSLTLLKCGENTSPVLDAVLKSKKSSEFLKHAGKETIVEVGSDLPDSGKGFASRENRRNNGLSGKCLQEAQEEGNSILPERRGRPEISLDERGEGGHVHTSDDSEVVFSSCDLNLTMEDSDGVTYALKCDSSGHAPEIVSTVHEDYSGSSESSNDESDSEDTDSDDSSIPRNRLQSVVVVPKNSTLPMEETSPCSSRSSQSYRHYSDHWEDERLESRRHLYEEKFESIASKACPQTDKFFLHKGTEKNPEISFTQSSRKQIDNRLPELSHPQSDGVDSTSHTDVKSDPLGHPNSEETVKAKIPSRQQEELPIYSSDFEDVPNKSWQQTTFQNRPDSRLGKTELSFSSSCEIPHVDGLHSSEELRNLGWDFSQEKPSTTYQQPDSSYGACGGHKYQQNAEQYGGTRDYWQGNGYWDPRSGRPPGTGVVYDRTQGQVPDSLTDDREEEENWDQQDGSHFSDQSDKFLLSLQKDKGSVQAPEISSNSIKDTLAVNEKKDFSKNLEKNDIKDRGPLKKRRQEIESDSESDGELQDRKKVRVEVEQGETSVPPGSALVGPSCVMDDFRDPQRWKECAKQGKMPCYFDLIEENVYLTERMKYLWVLY

SEQ ID NO: 94858 - protein, 66 aa, Homo sapiens
MNRPAPVEISYENMRFLITHNPTNATLNKFTEELKKYGVTTLVRVCDATYDKAPVEKEGIHVLMAE

SEQ ID NO: 94859 - protein, 127 aa, Homo sapiens
MAAIRKKLVIVGDGACGKTCLLIVFSKDQFPEVYVPTVFENYIADIEVDGKQVELALWDTAGQEDYDRLRPLSYPDTDVILMCFSIDSPDSLENIPEKWTPEVKHFCPNVPIILVGNKKDLRQDEHT

SEQ ID NO: 94860 - protein, 126 aa, Homo sapiens
MKRHEMAAKPPAMCSHFAKDLRPEQYIKNSFQQVILRRYGKCGYQKGCKSVDEHKLHKGGHKGLNRCVTTTQSKIVQCDKYVKVFHKYSNAKRHKIRHTGKNPFKCKECGKSFCMLSQLTQHEIIH

SEQ ID NO: 94861 - protein, 120 aa, Homo sapiens
  MOD_RES (1)..(1): Any amino acid
XVLLLALGLRGLQAGARRAPDPGFQERFFQQRLDHFNFERFGNKTFPQRFLVSGSGSGARGPSSSTLGTRATCGPSPTTRPSSRSWRPSGGLYWSSRSTATTGSRCRSVRSPRSAGTRSC

SEQ ID NO: 94862 - protein, 72 aa, Homo sapiens
MLLSIGMLMLSATQVYTILTVQLFAFLNLLPVEADILAYNFENASQTFDDLPARFGYRLPAEGLKGFLINSK

SEQ ID NO: 94863 - protein, 49 aa, Homo sapiens
MASDSIFESFPSYPQCFMRECILGMNPSRDVHDASTSRRFTPPSTALSP

SEQ ID NO: 94864 - protein, 63 aa, Homo sapiens
MNLTENGVGEVSIKSRFPGEDHRLDFGHGDSQMSQDGYVTQTGGHKGSPGDGRNGPYTGPCGL

SEQ ID NO: 94865 - protein, 125 aa, Homo sapiens
MFSVQLSLGEQTWESEGSSIKKAQQAVANKALTESTLPKPVQKPPKSNVNNNPGSITPTVELNGLAMKRGEPAIYRPLDPKPFPNYRANYNFRGMYNQRWQHLNGLQGLWSQRSKEMSFPCQNPD

SEQ ID NO: 94866 - protein, 85 aa, Homo sapiens
MLGRFQPFSLVRSFRLGFEACCYPNQKCATQTIRPPDSRCLVQAVSQNFNFAKDVLDQWSQLEKDNGLQLHPCCCKRQDFILFHG

SEQ ID NO: 94867 - protein, 330 aa, Homo sapiens
  MOD_RES (1)..(1): Any amino acid
XFKNESENTCQDVDECQQNPRLCKSYGTCVNTLGSYTCQCLPGFKLKPEDPKLCTDVDECSSGQHQCDSSTVCFNTVGSYSCRCRPGWKPRHGIPNNQKDTVCEDMTFSTWTPPPGVHSQTLSRFFDKVQDLGRDYKPGLANNTIQSILQALDELLEAPGDLETLPRLQQHCVASHLLDGLEDVLRGLSKNLSNGLLNFSYPAGTELSLEVQKQVDRSVTLRQNQAVMQLDWNQAQKSGDPVSDPETEGALCLLGAWPEWMWSLGHHRLQHNRHQRHQHHLPLHPPEQLCRPHGPLRCAGGGSRADCHHLHGAERLSAVPPPGGPHFSPV

SEQ ID NO: 94868 - protein, 154 aa, Homo sapiens
MAVKKIAIFGATGQTGLTTLAQAVQAGYEVTVLVRDSSRLPSEGPRPAHVVVGDVLQAADVDKTVAGQDAVIVLLGTRNDLSPTTVMSEGARNIVAAMKAHGVDKVVACTSGGWWDHGGGAELGGTGEAAQGPLKGDAEAIPCYCAFTEHQLCA

SEQ ID NO: 94869 - protein, 104 aa, Homo sapiens
PSQDKESWFTNREQMQNFDKASFLSDQPEPYLPFLSRFLETQMFASFIDNKIMCHDDDDKDPVLRVFDSRVDKIRLLNVRTPTLRTSMYQKCTTVDEAGQNHII

SEQ ID NO: 94870 - protein, 96 aa, Homo sapiens
  MOD_RES (1)..(1): Any amino acid
XICPDRQLRRYLVLEPDAHAAVQELLAVLTPVTNVAREQLGEARDLLLGRFQCLRCGHEFKPEEPRMGLDSEEGWRPLFQKTDQSALSLKKTLKKK

SEQ ID NO: 94871 - protein, 196 aa, Homo sapiens
MQQSDLFKAEYVLIVDSEGEDEAASRKVEQGPPGGIGTAAVRPKSLAISSSLVSDVVRPKTQGTDLKTSSHPEMLHGMAPQQKHGQQYKTKSSYKAFAAIPTNTLLLEQKALDEPAKTESVSKDNTLEPPVETPTTLPRAAGRETKYANLSSPSSTVSESQLTKPGVIRPVPVKSRILLKKEEEVYEPNPFSKYLE

SEQ ID NO: 94872 - protein, 16 aa, Homo sapiens
RAPRCRPSWRTPKCWS

SEQ ID NO: 94873 - protein, 25 aa, Homo sapiens
MACLHETRTPSPSFGGFVSTLSEAS

SEQ ID NO: 94874 - protein, 90 aa, Homo sapiens
  MOD_RES (1)..(1): Any amino acid
XLLVRLSDVYNRSFLENLKVNTENLLQVENTGKVKGLILTLKGEPGGQTQAFDFYSRYFAPWVGVAEDPVTGTKTKNQDESRKLTQKSMY

SEQ ID NO: 94875 - protein, 433 aa, Homo sapiens
MGHCRLCHGKFSSRSLRSISERAPGASMERPSAEERVLVRDFQRLLGVAVRQDPTLSPFVCKSCHAQFYQCHSLLKSFLQRVNASPAGRRKPCAKVGAQPPTGAEEGACLAPSACTAWWGGCMDMRPAAGPCPTFRGHCPPSTAASSRSCGAATRATTTPWIPAPAARPSCWTVRWQSSGHGTKRRRHGCPSTEGGTLGMPLRPPRVEGQGPQLGLRPRPCPARMWPSLLRTATRWGPGRASHLSQACPFAGPQGSWVRSSFHLQPRMIGDVLSEDENDKKQNAQSSDESFEPYPERKVSGKKSESKEAKKSEEPRIRKKPGPKPGWKKKLRCEREELPTIYKCPYQGCTAVYRGADGMKKHIKEHHEEVRERPCPHPGCNKVFMIDRYLQRHVKLIHTEVRNYICDECGQTFKQRKHLLVHQMRHSGAKPLQ

SEQ ID NO: 94876 - protein, 315 aa, Homo sapiens
MASCPDSDNSWVLAGSESLPVETLGPASRMDPESERALQAPHSPSKTDGKELAGTMDGEGTLFQTESPQSGSILTEETEVKGTLEGDVCGVEPPGPGDTVVQGDLQETTVVTGLGPDTQDLEGQSPPQSLPSTPKAAWIREEGRCSSSDDDTDVDMEGLRRRRGREAGPPQPMVPLAVENQAGGGLSESETGPMEEVERQVLPDPEVLEAVGDRQDGLREQLQAPVPPDSVPSLQNMGLLLDKLAKENQDIRLLQAQLQVGTGRRGWARVTHLGQASVLASSPKRNVSYLPTHPDPPLSHYSQGVFPVLGSHPLC

SEQ ID NO: 94877 - protein, 292 aa, Homo sapiens
  MOD_RES (1)..(1): Any amino acid
XNITCSPDEFTCSSGRCISRNFVCNGQDDCSDGSDELDCAPPTCGAHEFQCSTSSCIPISWVCDDDADCSDQSDESLEQCGRQPVIHTKCPASEIQCGSGECIHKKWRCDGDPDCKDGSDEVNCPSRTCRPDQFECEDGSCIHGSRQCNGIRDCVDGSDEVNCKNVNQCLGPGKFKCRSGECIDISKVCNQEQDCRDWSDEPLKECHINECLVNNGGCSHICKDLVIGYECDCAAGFELIDRKTCGDIDECQNPGICSQICINLKGGYKCECSRGYQMDLATGVCKAAKSQV

SEQ ID NO: 94878 - protein, 127 aa, Homo sapiens
MGLLECCARCLVGAPFASLVATGLCFFGVALFCGCGHEALTGTEKLIETYFSKNYQDYEYLINVIHAFQYVIYGTASFFFLYGALLLAEGFYTTGAVRQIFGDYKTTICGKGLSATVTGGQKGRGSR

SEQ ID NO: 94879 - protein, 796 aa, Homo sapiens
MTNQEKWAHLSPSEFSQLQKYAEYSTKKLKDVLEEFHGNGVLAKYNPEGTIDFEGFKLFMKTFLEAELPDDFTAHLFMSFSNKFPHSSPMVKSKPALLSGGLRMNKGAITPPRTTSPANTCSPEVIHLKDIVCYLSLLERGRPEDKLEFMFRLYDTDGNGFLDSSELENIISQMMHVAEYLEWDVTELNPILHEMMEEIDYDHDGTVSLEEWIQGGMTTIPLLVLLGLENNVKDDGQHVWRLKHFNKPAYCNLCLNMLIGVGKQGLCCSFCKYTVHERCVARAPPSCIKTYVKSKRNTDVMHHYWVEGNCPTKCDKCHKTVKCYQGLTGLHCVWCQITLHNKCASHLKPECDCGPLKDHILPPTTICPVVLTLPTSGVSVPEERQSTVKKEKSGSQQPNKVIDKNKMQRANSVTVDGQGLQVTPVPGTHPLLVFVNPKSGGKQGERIYRKFQYLLNPRQVYSLSGNGPMPGLNFFRDVPDFRVLACGGDGTVGWVLDCIEKANVGKHPPVAILPLGTGNDLARCLRWGGGYEGENLMKILKDIENSTEIMLDRWKFEVIPNDKDEKGDPVPYSIINNYFSIGVDASIAHRFHIMREKHPEKFNSRMKNKFWYFEFGTSETFSATCKKLHESVEIECDGVQIDLINISLEGIAILNIPSMHGGSNLWGESKKRRSHRRIEKKGSDKRTTVTDAKELKFASQDLSDQLLEVVGLEGAMEMGQIYTGLKSAGRRLAQCSCVVIRTSKSLPMQIDGEPWMQTPCTIKITHKNQAPMLMGPPPKTGLFCSLVKRTRNRSKE

SEQ ID NO: 94880 - protein, 102 aa, Homo sapiens
  MOD_RES (1)..(1): Any amino acid
XDETMEEQDIKLREMKQFHKVIDEMLVDIIEENTEIRIILQTYFQQSGLELPTASTKGSRQSSRSPSHTSLSARSSRSTSTSTSQSSIKVLELKFPASSSLK

SEQ ID NO: 94881 - protein, 285 aa, Homo sapiens
MLLLVTSLLLCELPHPAFLLIPEKSDLRTVAPASSLNVRFDSRTMNLSWDCQENTTFSKCFLTDKKNRVVEPRLSNNECSCTFREICLHEGVTFEVHVNTSQRGFQQKLLYPNSGREGTAAQNFSCFIYNADLMNCTWARGPTAPRDVQYFLYIRNSKRRREIRCPYYIQDSGTHVGCHLDNLSGLTSRNYFLVNGTSREIGIQFFDSLLDTKKIERFNPPSNVTVRCNTTHCLVRWKQPRTYQKLSYLDFQYQLDVHRKNTQPGTENLLVLTTGTSALCTFMCS

SEQ ID NO: 94882 - protein, 99 aa, Homo sapiens
MSMILSASVIRVRDGLPLSASTDYEQSTGMQECRKYFKMLSRKLAQLPDRCTLKTGHYNIKVMVMILITSLHFSLEQQPAFTSVIYLSTTPAGGMSNLF

SEQ ID NO: 94883 - protein, 92 aa, Homo sapiens
MWRAEGKWLPKTSRKAQGRTDPVSVLMELRGRRTLIKMPYEISAGTQCCEDDHGNSNSSHVKIFLPKKLLECLPKCSSLPKERHRWNTNERS

SEQ ID NO: 94884 - protein, 89 aa, Homo sapiens
MAEGGFDPCECVCSHEHAMRRLINLLRQSQSYCTDTECLQELPGPSGDNGISVTMILVAWMVIALILFLLRPPNLRGSSLPGKPTSPHN

SEQ ID NO: 94885 - protein, 123 aa, Homo sapiens
MRFFVPLFLVGILFPAILAKQFTKCELSQLLKDIDGYGGIALPELICTMFHTSGYDTQAIVENNESTEYGLFQISNKLWCKSSQVPQSRNICDISCDKFLDDDITDDIMCAKKILDIKGIDYW

SEQ ID NO: 94886 - protein, 719 aa, Homo sapiens
MEVVTFGDVAVHFSREEWQCLDPGQRALYREVMLENHSSVAGLAFSDPTLWFGYLCPCFPRDGNLWAWPSRGAAAFPGFLVFKPELISRLEQGEEPWVLDLQGAEGTEAPRTSKTDSTIRTENEQACEDMDILKSESYGTVVRISPQDFPQNPGFGDVSDSEVWLDSHLGSPGLKVTGFTFQNNCLNEETVVPKTFTKDAPQGCKELGSSGLDCQPLESQGESAEGMSQRCEECGKGIRATSDIALHWEINTQKISRCQECQKKLSDCLQGKHTNNCHGEKPYECAECGKVFRLCSQLNQHQRIHTGEKPFKCTECGKAFRLSSKLIQHQRIHTGEKPYRCEECGKAFGQSSSLIHHQRIHTGERPYGCRECGKAFSQQSQLVRHQRTHTGERPYPCKECGKAFSQSSTLAQHQRMHTGEKAQILKASDSPSLVAHQRIHAVEKPFKCDECGKAFRWISRLSQHQLIHTGEKPYKCNKCTKAFGCSSRLIRHQRTHTGEKPFKCDECGKGFVQGSHLIQHQRIHTGEKPYVCNDCGKAFSQSSSLIYHQRIHKGEKPYECLQCGKAFSMSTQLTIHQRVHTGERPYKCNECGKAFSQNSTLFQHQIIHAGVKPYECSECGKAFSRSSYLIEHQRIHTRAQWFYEYGNALEGSTFVSRKKVNTIKKLHQCEDCEKIFRWRSHLIIHQRIHTGEKPYKCNDCGKAFNRSSRLTQHQKIHMG

SEQ ID NO: 94887 - protein, 187 aa, Homo sapiens
MSAAPASNGVFVVIPPNNASGLCPPPAILPTSMCQPPGIMQFEEPPLGAQTPRATQPPDLRPVETFLTGEPKVLGALAACCSWFAAATWASSSSRAASPSGEEPASSSPDPSQWQPRRTTPVACSFPSTSGDLQSARGGAPPRQTRRRLCMSRRRRQGYSFNTQARVESEVHAHGHSEKGKMLEDLL

SEQ ID NO: 94888 - protein, 383 aa, Homo sapiens
MRLKIGFILRSLLVVGSFLGLVVLWSSLTPRPDDPSPLSRMREDRDVNDPMPNRGGNGLAPGEDRFKPVVPWPHVEGVEVDLESIRRINKAKNEQEHHAGGDSQKDIMQRQYLTFKPQTFTYHDPVLRPGILGNFEPKEPEPPGVVGGPGEKAKPLVLGPEFKQAIQASIKEFGFNMVASDMISLDRSVNDLRQEECKYWHYDENLLTSSVVIVFHNEGWSTLMRTVHSVIKRTPRKYLAEIVLIDDFSNKEHLKEKLDEYIKLWNGLVKVFRNERREGLIQARSIGAQKAKLGQVLIYLDAHCEVAVNWYAPLVAPISKDRTTCTVPLIDYIDGNDYSIEPQQGGDEDGFARGAWDWSLLWKRIPLSHKEKAKRKHKTEPYR

SEQ ID NO: 94889 - protein, 189 aa, Homo sapiens
MTAGSVCVPQIIPLRVPQPGKANHEIDNNTLLEMKSDTPDVNIYYTLDGSKPEFLKRIGYGENNTFKYIKPITLPDGKIQVKAIAVSKDCRQSGIVTKVFHVDYEPPNIVSPEDNVENVLKDSSRQEFKNGFVGSKLKKKYKNSENQRSWNVNLRKFPESPLEIPAYGGGSGSRPPTRQSQARHSPIYI

SEQ ID NO: 94890 - protein, 286 aa, Homo sapiens
MELTELLLVVMLLLTARLTLSSPAPPACDLRVLSKLLRDSHVLHSRLSQCPEVHPLPTPVLLPAVDFSLGEWKTQMEETKAQDILGAVTLLLEGVMAARGQLGPTCLSSLLGQLSGQVRLLLGALQSLLGTQLPPQGRTTAHKDPNAIFLSFQHLLRGKDFWIVGDKLHCLSQNYWLWASEVAAGIQSQDSWSAEPNLQVPGPNPRIPEQDTRTLEWNSWTLSWTLTQDPRSPGHFLRNIRHRLPATQPPAWIFSFPNPSSYWTVYALPSSTHLAHPCGPAPPPAS

SEQ ID NO: 94891 - protein, 118 aa, Homo sapiens
MTKGSLEVKGTMELILCRYQNIWNINLQLRPSLITGIMKDSGNKPPGLLPRKGLYMANDLKLLRHHLQIPIHFPKDFLSVMLEKGSLSAMRFLTAVNLEHPEMLEKASRELWMRVWSR

SEQ ID NO: 94892 - protein, 241 aa, Homo sapiens
GSRQSSSENELKWSDHQRAWSSTDSDSSNRNLKPAMTKTASFGGITVLTRGDSTSSTRSTGKLSKAGSESSSSAGSSGSLSRTHPPLQSTPLVSGVAAGSPGCVPYPENGIGGQVAPSSTSYILLPLEAATGIPPGSILLNPHTALCESRWNSCNIQPTHQSAAPAKRHGGAVPTAATTAAALPAAPTAGPATAATDGRPSGHSVCPGAAGFLPVSAISSSLFSSPAPPTCVSNAALSHER

SEQ ID NO: 94893 - protein, 76 aa, Homo sapiens
MESRMWPALLLSHLLPLWPLLLLPLPPPAQGSSSSPRTPPAPARPPCARGGPSAPRHVCVWERAPPPSRSPRVPRS

SEQ ID NO: 94894 - protein, 93 aa, Homo sapiens
RSSYAGSLRSCDNIRIHFPVPSQWIKALWTMNLQRQKSLKAKMNRRACLGSLQELESEPVIQVTVGSAKYESAYQAVVWKIDRLPDKNSIFRA

SEQ ID NO: 94895 - protein, 144 aa, Homo sapiens
MVRVGDQVTHIRIQNSGDFYDLYGGEKFATLTELVEYYTQQQGVLQDRDGTIIHLKYPLNCSDPTSERWYHGHMSGGQAETLLQAKGEPWTFLVRESLSQPGDFVLSVLSDQPKAGPGSPLRVTHIKVMCEGGRYTVGGLETFD

SEQ ID NO: 94896 - protein, 95 aa, Homo sapiens
MANEVIKCKAAVAWEAGKPLSIEEIEVAPPKAHEVRIKIIATAVCHTDAYTLSGADPEGCFPVILGHEGAGIVESVGEGVTKLKAVWRMQILSKS

SEQ ID NO: 94897 - protein, 113 aa, Homo sapiens
MLCSLLLCECLLLVAGYAHDDDWIDPTDMLNYDAASGTMRKSQAKYGISGEKDVSPDLSCADEISECYHKLDSLTYKIDECEKKKREDYESQSNPVFRRYLNKILIEAGKLGL

SEQ ID NO: 94898 - protein, 69 aa, Homo sapiens
MHQLFRLVLGQKDLSRAGDLFSLDDSEIEDSLTEALEQIKIISSSSKRRTGRDRLNCPFQLPAQKIAEK

SEQ ID NO: 94899 - protein, 138 aa, Homo sapiens
MEDFNMESDSFEDFWKGEDLSNYSYSSTLPPFLLDAAPCEPESLEINKYFVVIIYALVFLLSLLGNSLVMLVILYSRVGRSVTDVYLLNLALADLLFALTLPIWAASKVNGWIFGTFLCKVVSLLKEVNFYSGILLLA

SEQ ID NO: 94900 - protein, 303 aa, Homo sapiens
MGLRKGHGTLGQGLSALQSEQGRLIQLLSESQGHMAHLVNSVSDILDALQRDRGLGRPRNKADLQRAPARGTRPRGCATGSRPRDCLDVLLSGQQDDGVYSVFPTHYPAGFQVYCDMRTDGGGWTVFQRREDGSVNFFRGWDAYRDGFGRLTGEHWLGLKRIHALTTQAAYELHVDLEDFENGTAYARYGSFGVGLFSVDPEEDGYPLTVADYSGTAGDSLLKHSGMRFTTKDRDSDHSENNCAAFYRGAWWYRNCHTSNLNGQYLRGAHASYADGVEWSSWTGWQYSLKFSEMKIRPVREDR

SEQ ID NO: 94901 - protein, 235 aa, Homo sapiens
  MOD_RES (1)..(1): Any amino acid
XKKPAPAPPKPGNPPPGHPGGQSSSGTSQHPPSLSPKPPTRSPSPPTQHTGQPPGQPSAPSQLSAPRRYSSSLSPIQAPNHPPPQPPTQATPLMHTKPNSQGPPNPMALPSEHGLEQPSHTPPQTPTPPSTPPLGKQNPSLPAPQTLAGGNPETAQPHAGTLPRPRPVPKPRNRPSVPPPPQPPGVHSAGDSSLTNTAPTASKIVTGFQNRIAASFLKCTQTQPAKTCLAASCWI

SEQ ID NO: 94902 - protein, 985 aa, Homo sapiens
MHHGTGPQNVQHQLQRSRACPGSEGEEQPAHPNPPPSPAAPFAPSASPSAPQSPSYQIQQLMNRSPATGQNVNITLQSVGPVVGGNQQITLAPLPLPSPTSPGFQFSAQPRRFEHGSPSYIQVTSPLSQQVQTQSPTQPSPGPGQALQNVRAGAPGPGLGLCSSSPTGGFVDASVLVRQISLSPSSGGHFVFQDGSGLTQIAQGAQVQLQHPGTPITVRERRPSQPHTQSGGTIHHLGPQSPAAAGGAGLQPLASPSHITTANLPPQISSIIQGQLVQQQQVLQGPPLPRPLGFERTPGVLLPGAGGAAGFGMTSPPPPTSPSRTAVPPGLSSLPLTSVGNTGMKKVPKKLEEIPPASPEMAQMRKQCLDYHYQEMQALKEVFKEYLIELFFLQHFQGNMMDFLAFKKKHYAPLQAYLRQNDLDIEEEEEEEEEEEEKSEVINDEVKVVTGKDGQTGTPVAIATQLPPKVSAAFSSQQQPFQQALAGSLVAGAGSTVETDLFKRQQAMPSTGMAEQSKRPRLEVGHQGVVFQHPGADAGVPLQQLMPTAQGGMPPTPQAAQLAGQRQSQQQYDPSTGPPVQNAASLHTPLPQLPGRLPPAGVPTAALSSALQFAQQPQVVEAQTQLQIPVKTQQPNVPIPAPPSSQLPIPPSQPAQLALHVPTPGKVQVQASQLSSLPQMVASTRLPVDPAPPCPRPLPTSSTSSLAPVSGSGPGPSPARSSPVNRPSSATNKALSPVTSRTPGVVASAPTKPQSPAQNATSSQDSSQDTLTEQITLENQVHQRIAELRKAGLWSQRRLPKLQEAPRPKSHWDYLLEEMQWMATDFAQERRWKVAAAKKLVRTVVRHHEEKQLREERGKKEEQSRLRRIAASTAREIECFWSNIEQVVEIKLRVELEEKRKKALNLQKVSRRGKELRPKGFDALQESSLDSGMSGRKRKASISLTDDEVDDEEETIEEEEANEGVVDHQTELSNLAKEGRLLLPY

SEQ ID NO: 94903 - protein, 113 aa, Homo sapiens
MAAVVEVEVGGGAAGERELDEVDMSDLSPEEQWRVEHARMHAKHRGHEAMHAEMVLILIATLVVAQLLLVQWKQRHPRSYNRWGFTVLPRLVSSSWAQAIHLPQPPNVLELQE

SEQ ID NO: 94904 - protein, 166 aa, Homo sapiens
  MOD_RES (1)..(1): Any amino acid
XRKGPAEDMSSKLKIMYRTYRIQARSMSGHPEAAQMVRREFQLDLDEIENDNGTVRCEMPELVQHKLDDIFEPVLIPEPKIRAVSPHFDDMHSNTASTINFIISQVASGDINTSIQALTQLRLIYNTHMADEKLEKDEIIKLYSCIIGNMISLFQIESLAREASTG

SEQ ID NO: 94905 - protein, 756 aa, Homo sapiens
MAGSDAEWVTIANNLLFKCHIHLRIHELQDCDANVFIALYQSILGEKVPDLIVIPRSQEDDAHNVQAVIDSLALDYLQVSLSHITALYSVSRRKYSERRMLGPSWDGDEAESTGEIIRLGDTAHTFSLRSNGAQCPNEMLSKKALASPSSKSHEDMLYPPSVLSKSRTSFVEDTETLSVSGIPNARKLGEPIRAAIPLHPPYHPSEPRAPCPIGKEYLHSSHCSPAVNSTGEHTEFSGDLDDGLFLISKLPKGSKWEVYPAQVQGPRTRKPPKGKRNENRATASSCNSPFPQRPRKRLTEQELHDVSEKLSQRLSELDWMLKSALGDRIKEKTDHKEENTGNEEVEDGTEETLSQHSDGIVEYGPKKSRPGLSMRRKPPYRSHSLSPSPVNKHKQFHLERKRQRKPRETDVRQFQAQAFTEAFERELRRHKVQENIGPLRIHEKEEETVGKNIQRRSFVKELQNVVSPGRFTLEKPQRRVRGGLPKPNKAVPMKVSEHSLLPLMLEQFPFLYVSGPTLSKMWKQQIAQVEQLKKEACRENRSKKKLQDEIEEALRRHDLLTTLVKKEYEHNKRLQDFKDCIRRQRLTQSKIKENRQQIVRARKYYDDYRVQLCAKMMRMRTREEMIFKKLFEEGLNIQKQRLRDLRNYAKEKRDEQRRRHQDELDSMENYYKDQFSLLAEAISQEHQELKAREKSQAQTLHKVKRELRSKMEKEIQQLQDMITQNDDDVFFRELEAERFRSRLQLASFQYSKSPSL

SEQ ID NO: 94906 - protein, 94 aa, Homo sapiens
MTELASSGGGSPAGDGEEGLGDERGLVIHHPAEEQPYRCPLCGQTFSQQPSLVRHQKAHAGAGRAAAFVCPECGKAFSVKHNLELQSGQDLKTR

SEQ ID NO: 94907 - protein, 190 aa, Homo sapiens
AAPPKAVLKLEPPWINVLQEDSVTLTCQGARSPESDSIQWFHNGNLIPTHTQPSYRFKANNNDSGEYTCQTGQTSLSDPVHLTVLSEWLVLQTPHLEFQEGETIMLRCHSWKDKPLVKVTFFQNGKSQKFSHLDPTFSIPQANHSHSGDYHCTGNIGYTLFSSKPVTITVQAWAALHQWGSLWLWSLRLL

SEQ ID NO: 94908 - protein, 117 aa, Homo sapiens
MTSATSPIILKWDPKSLEIRTLTVERLLEPLVTQVTTLVNTSNKGPSGKKKGRSKKAHVLAASVEQATQNFLEKGEQIAKESQDLKEELVAAVEDVRKQGETMRIASSEFADDPCSS

SEQ ID NO: 94909 - protein, 553 aa, Homo sapiens
MEQIDIMVSNKKMDWERKMRALETRLDLRDQELANAQTCLDQKGQEVGLLRQKLDSLEKCNLAMTQNYEGQLQSLKAQFSKLTNNFEKLRLHQMKQNKVPRKELPHLKEEIPFELSNLNQKLEEFRAKSREWDKQEILYQTHLISLDAQQKLLSEKCNQFQKQAQSYQTQLNGKKQCLEDSSSEIPRLICDPDPNCEINERDEFIIEKLKSAVNEIALSRNKLQDENQKLLQELKMYQRQCQAMEAGLSEVKSELQSRDDLLRIIEMERLQLHRELLKIGECQNAQGNKTRLESSYLPSIKEPERKIKELFSVMQDQPNHEKELNKIRSQLQQVEEYHNSEQERMRNEISDLTEELHQKEITIATVTKKAALLEKQLKMELEIKEKMLAKQKVSDMKYKAVRTENTHLKGMMGDLDPGEYMSMDFTNREQSRHTSINKLQYENERLRNDLAKLHVNGKSTWTNQNTYEETGRYAYQSQIKVEQNEERLSHDCEPNRSTMPPLPPSTFQAKEMTSPLVSDDDVFPLVSCWLWAFFFFNGLLLYSYTDVNKLTYI

SEQ ID NO: 94910 - protein, 93 aa, Homo sapiens
  MOD_RES (1)..(1): Any amino acid
XTLLLLSGLGAPGGWGCLQCDPLVLEALGHLRSALIPSRFQLEQLQARAGAVLMGMEGPFFRDYALNVFVGKVDKSTGPCGVLCQEPNAALNG

SEQ ID NO: 94911 - protein, 164 aa, Homo sapiens
  MOD_RES (1)..(1): Any amino acid
XRAAPLHSPLRPAVHGAGLPRAARSGPSGRARRWVGHGSAAAGARRGLRQRAGGVPQPANLGAGAEPAGAALVRLARAAGAPRAGPAPQLRRGMAVARISGTSNTRPTGPSGTAGMVSSVPAPTSTPMRPSATATWRHSCAASKPQLQFSEVLAKWRCFFHQMA

SEQ ID NO: 94912 - protein, 98 aa, Homo sapiens
MNYDKLSRALRYYYNKRILHKTKGKRFTYKFNFNKLVLVNYPFIDVGLAGGAVPQSAPPVPSGGSHFRFPPSTPSEVLSPTEDPRSPPACSSSSSSLF

SEQ ID NO: 94913 - protein, 339 aa, Homo sapiens
MAVMAPRTLLLLLLGALALTQTWAGSHSMRYFFTSVSRPGRGEPRFIAVGYVDDTQFVRFDSDAASQRMEPRAPWIEQEGPEYWDQETRNVKAHSQTDRESLRIALRYYNQSEAGSHTIQMMYGCDVGPDGRLLRGYQQDAYDGKDYIALNEDLRSWTAADMAAQITQRKWEAARVAEQLRAYLEGTCVEWLRRYLENGKETLQRTDAPKTHMTHHAVSDHEATLRCWALSFYPAEITLTWQRDGEDQTQDTELVETRPAGDGTFQKWASVVVPSGQEQRYTCHVQHEGLPKPLTLRWELSSQPTIPIMGIIAGLVLLGAVVTGAVVTAVMWRKKSSDR

SEQ ID NO: 94914 - protein, 44 aa, Homo sapiens
MSLHFLYYCSEPTLDVKIAFCQGFDKQVDVSYIAKHYNMSKSKV

SEQ ID NO: 94915 - protein, 212 aa, Homo sapiens
MASLDRVKVLVLGDSGVGKSSLVHLLCQNQVLGNPSWTVGCSVDVRVHDYKEGTPEEKTYYIELWDVGGSVGSASSVKSTRAVFYNSVNGIIFVHDLTNKKSSQNLRRWSLEALNRDLVPTGVLVTNGDYDQEQFADNQIPLLVIGTKLDQIHETKRHEVLTRTAFLAEDFNPEEINLVIEKRYFLREGNQIPGFPDRKRFGAGTLKSLHYD

SEQ ID NO: 94916 - protein, 87 aa, Homo sapiens
  MOD_RES (1)..(1): Any amino acid
XSTPQHSSLETTSRQPAFQALPAPEIRRSSCCLLSPDANVKAAPQSRKAENLQENPPVIVTRVLQALGTVAVALGALGAAYYITESL

SEQ ID NO: 94917 - protein, 2664 aa, Homo sapiens
MAEEGAVAVCVRVRPLNSREESLGETAQVYWKTDNNVIYQVDGSKSFNFDRVFHGNETTKNVYEEIAAPIIDSAIQGYNGTIFAYGQTASGKTYTMMGSEDHLGVIPRAIHDIFQKIKKFPDREFLLRVSYMEIYNETITDLLCGTQKMKPLIIREDVNRNVYVADLTEEVVYTSEMALKWITKGEKSRHYGETKMNQRSSRSHTIFRMILESREKGEPSNCEGSVKVSHLNLVDLAGSERAAQTGAAGVRLKEGCNINRSLFILGQVIKKLSDGQVGGFINYRDSKLTRILQNSLGGNAKTRIICTITPVSFDETLTALQFASTAKYMKNTPYVNEVSTDEALLKRYRKEIMDLKKQLEEVSLETRAQAMEKDQLAQLLEEKDLLQKVQNEKIENLTRMLVTSSSLTLQQELKAKRKRRVTWCLGKINKMKNSNYADQFNIPTNITTKTHKLSINLLREIDESVCSESDVFSNTLDTLSEIEWNPATKLLNQENIESELNSLRADYDNLVLDYEQLRTEKEEMELKLKEKNDLDEFEALERKTKKDQEMQLIHEISNLKNLVKHAEVYNQDLENELSSKVELLREKEDQIKKLQEYIDSQKLENIKMDLSYSLESIEDPKQMKQTLFDAETVALDAKRESAFLRSENLELKEKMKELATTYKQMENDIQLYQSQLEAKKKMQVDLEKELQSAFNEITKLTSLIDGKVPKDLLCNLELEGKITDLQKELNKEVEENEALREEVILLSELKSLPSEVERLRKEIQDKSEELHIITSEKDKLFSEVVHKESRVQGLLEEIGKTKDDLATTQSNYKSTDQEFQNFKTLHMDFEQKYKMVLEENERMNQEIVNLSKEAQKFDSSLGALKTELSYKTQELQEKTREVQERLNEMEQLKEQLENRDSTLQTVEREKTLITEKLQQTLEEVKTLTQEKDDLKQLQESLQIERDQLKSDIHDTVNMNIDTQEQLRNALESLKQHQETINTLKSKISEEVSRNLHMEENTGETKDEFQQKMVGIDKKQDLEAKNTQTLTADVKDNEIIEQQRKIFSLIQEKNELQQMLESVIAEKEQLKTDLKENIEMTIENQEELRLLGDELKKQQEIVAQEKNHAIKKEGELSRTCDRLAEVEEKLKEKSQQLQEKQQQLLNVQEEMSEMQKKINEIENLKNELKNKELTLEHMETERLELAQKLNENYEEVKSITKERKVLKELQKSFETERDHLRGYIREIEATGLQTKEELKIAHIHLKEHQETIDELRRSVSEKTAQIINTQDLEKSHTKLQEEIPVLHEEQELLPNVKEVSETQETMNELELLTEQSTTKDSTTLARIEMERLRLNEKFQESQEEIKSLTKERDNLKTIKEALEVKHDQLKEHIRETLAKIQESQSKQEQSLNMKEKDNETTKIVSEMEQFKPKDSALLRIEIEMLGLSKRLQESHDEMKSVAKEKDDLQRLQEVLQSESDQLKENIKEIVAKHLETEEELKVAHCCLKEQEETINELRVNLSEKETEISTIQKQLEAINDKLQNKIQEIYEKEEQFNIKQISEVQEKVNELKQFKEHRKAKDSALQSIESKMLELTNRLQESQEEIQIMIKEKEEMKRVQEALQIERDQLKENTKEIVAKMKESQEKEYQFLKMTAVNETQEKMCEIEHLKEQFETQKLNLENIETENIRLTQILHENLEEMRSVTKERDDLRSVEETLKVERDQLKENLRETITRDLEKQEELKIVHMHLKEHQETIDKLRGIVSEKTNEISNMQKDLEHSNDALKAQDLKIQEELRIAHMHLKEQQETIDKLRGIVSEKTDKLSNMQKDLENSNAKLQEKIQELKANEHQLITLKKDVNETQKKVSEMEQLKKQIKDQSLTLSKLEIENLNLAQKLHENLEEMKSVMKERDNLRRVEETLKLERDQLKESLQETKARDLEIQQELKTARMLSKEHKETVDKLREKISEKTIQISDIQKDLDKSKDELQKKIQELQKKELQLLRVKEDVNMSHKKINEMEQLKKQFEAQNYLCKCEMDNFQLTKKLHESLEEIRIVAKERDELRRIKESLKMERDQFIATLREMIARDRQNHQVKPEKRLLSDGQQHLTESLREKCSRIKELLKRYSEMDDHYECLNRLSLDLEKEMEFHRIMKKLKYVLSYVTKIKEEQHESINKFEMDFIDEVEKQKELLIKIQHLQQDCDVPSRELRDLKLNQNMDLHIEEILKDFSESEFPSIKTEFQQVLSNRKEMTQFLEEWLNTRFDIEKLKNGIQKENDRICQVNNFFNNRIIAIMNESTEFEERSATISKEWEQDLKSLKEKNEKLFKNYQTLKTSLASGAQVNPTTQDNKNPHVTSRATQLTTEKIRELENSLHEAKESAMHKESKIIKMQKELEVTNDIIAKLQAKVHESNKCLEKTKETIQVLQDKVALGAKPYKEEIEDLKMKLVKIDLEKMKNAKEFEKEISATKATVEYQKEVIRLLRENLRRSQQAQDTSVISEHTDPQPSNKPLTCGGGSGIVQNTKALILKSEHIRLEKEISKLKQQNEQLIKQKNELLSNNQHLSNEVKTWKERTLKREAHKQVTCENSPKSPKVTGTASKKKQITPSQCKERNLQDPVPKESPKSCFFDSRSKSLPSPHPVRYFDNSSLGLCPEVQNAGAESVDSQPGPWHASSGKDVPECKTQ

SEQ ID NO: 94918 - protein, 121 aa, Homo sapiens
MNTGRDSQSPDSAWRSYNDGNQETLNGDATYSSLAAKGFRSVRPNLQDKRSPTQSQITVNGNSGGAVSPMSYYQRPFSPSAYSLPASLNSSIVMQHGTSLDSTDTYPQHAQSLDGTTSSSI

SEQ ID NO: 94919 - protein, 41 aa, Homo sapiens
MILNSLSLCYHNKLILAPMVRVGTLPMRLLALDYGADIVYC

SEQ ID NO: 94920 - protein, 82 aa, Homo sapiens
MRLHYRYKEASGYFHTLRAVMRNPEEDGKDTLQCIAEMLQITKQAMGSDLPIIEKKLERKSSKPHEDIIGIRSQNQGSLAQG

SEQ ID NO: 94921 - protein, 114 aa, Homo sapiens
MAEGSVMFSDVSIDFSQEEWDCLDPVQRDLYRDVMLENYGNLVSMGLYTPKPQVISLLEQGKEPWMVGRELTRGLCSDLESMCETKLLSLKKEVYEIELCQREIMGLTKHGLEY

SEQ ID NO: 94922 - protein, 910 aa, Homo sapiens
  MOD_RES (1)..(1): Any amino acid
XLWIAAKQGKHKVQPPTKQGQKSQRKARRGPAISSWDWLDISSVNSLAEVHRLYVGGPPLEKEPRELFVKGTMKDIRENFQDLMQYCAQDVWATHEVFQQQLPLFLERCPHPVTLAGMLEMGVSYLPVNQNWERYLAEAQGTYEELQREMKKSLMDLANDACQLLSGERYKEDPWLWDLEWDLQEFKQKKAKKVKKEPATASKLPIEGAGAPGDPMDQEDLGPCSEEEEFQQDVMARACLQKLKGTTELLPKRPQHLPGHPGWYRKLCPRLDDPAWTPGPSLLSLQMRVTPKLMALTWDGFPLHYSERHGWGYLVPGRRDNLAKLPTGTTLESAGVVCPYRAIESLYRKHCLEQGKQQLMPQEAGLAEEFLLTDNSAIWQTVEELDYLEVEAEAKMENLRAAVPGQPLALTARGGPKDTQPSYHHGNGPYNDVDIPGCWFFKLPHKDGNSCNVGSPFAKDFLPKMEDGTLQAGPGGASGPRALEINKMISFWRNAHKRISSQMVVWLPRSALPRAVIRHPDYDEEGLYGAILPQVVTAGTITRRAVEPTWLTASNARPDRVGSELKAMVQAPPGYTLVGADVDSQELWIAAVLGDAHFAGMHGCTAFGWMTLQGRKSRGTDLHSKTATTVGISREHAKIFNYGRIYGAGQPFAERLLMQFNHRLTQQEAAEKAQQMYAATKGLRWYRLSDEGEWLVRELNLPVDRTEGGWISLQDLRKVQRETARKSQWKKWEVVAERAWKGGTESEMFNKLESIATSDIPRTPVLGCCISRALEPSAVQEEFMTSRVNWVVQSSAVDYLHLMLVAMKWLFEEFAIDGRFCISIHDEVRYLVREEDRYRAALALQITNLLTSAVDIDRCLRKEVTMDCKTPSNPTGMERRYGIPQGEALDIYQIIELTKGSLEKRSQPGP

SEQ ID NO: 94923 - protein, 736 aa, Homo sapiens
MRPEPTKFWEESLTLEDVAVDFTWEEWQFLSPAQKDLYRDVMLENYSNLVAVGYQASKPDALSKLERGEETCTTEDEIYSRICSEIRKIDDPLQHHLQNQSIQKSVKQCHEQNMFGNIVNQNKGHFLLKQDCDTFDLHEKPLKSNLSFENQKRSSGLKNSAEFNRDGKSLFHANHKQFYTEMKFPAIAKPINKSQFIKQQRTHNIENAHVCSECGKAFLKLSQFIDHQRVHTGEKPHVCSMCGKAFSRKSRLMDHQRTHTELKHYECTECDKTFLKKSQLNIHQKTHMGGKPYTCSQCGKAFIKKCRLIYHQRTHTGEKPHGCSVCGKAFSTKFSLTTHQKTHTGEKPYICSECGKGFIEKRRLTAHHRTHTGEKPFICNKCGKGFTLKNSLITHQQTHTGEKLYTCSECGKGFSMKHCLMVHQRTHTGEKPYKCNECGKGFALKSPLIRHQRTHTGEKPYVCTECRKGFTMKSDLIVHQRTHTAEKPYICNDCGKGFTVKSRLIVHQRTHTGEKPYVCGECGKGFPAKIRLMGHQRTHTGEKPYICNECGKGFTEKSHLNVHRRTHTGEKPYVCSECGKGLTGKSMLIAHQRTHTGEKPYICNECGKGFTMKSTLSIHQQTHTGEKPYKCNECDKTFRKKTCLIQHQRFHTGKTSFACTECGKFSLRKNDLITHQRIHTGEKPYKCSDCGKAFTTKSGLNVHQRKHTGERPYGCSDCGKAFAHLSILVKHRRIHR

SEQ ID NO: 94924 - protein, 95 aa, Homo sapiens
  MOD_RES (1)..(1): Any amino acid
XRSLVCLGVIILLSAFSGPGVRGGPMPKLADRKLCADQECSHPISMAVALQDYMAPDCRFLTIHRGQVVFREITMEIWLLAWAISPVALSERTRP

SEQ ID NO: 94925 - protein, 1469 aa, Homo sapiens
  MOD_RES (1)..(1): Any amino acid
XERQLRKENEKQKNELLSMEAEVCEKIGCLQRFKEMAIFKIAALQKVVDNSVSLSELELANKQYNELTAKYRDILQKDNMLVQRTSNLEHLECENISLKEQVESINKELEITKEKLHTIEQAWEQETKLGNESSMDKAKKSITNSDIVSISKKITMLEMKELNERQRAEHCQKMYEHLRTSLKQMEERNFELETKFAELTKINLDAQKVEQMLRDELADSVSKAVSDADRQRILELEKNEMELKVEVSKLREISDIARRQVEILNAQQQSRDKEVESLRMQLLDYQAQSDEKSLIAKLHQHNVSLQLSEATALGKLESITSKLQKMEAYNLRLEQKLDEKEQALYYARLEGRNRAKHLRQTIQSLRRQFSGALPLAQQEKFSKTMIQLQNDKLKIMQEMKNSQQEHRNMENKTLEMELKLKGLEELISTLKDTKGAQKVINWHMKIEELRLQELKLNRELVKDKEEIKYLNNIISEYERTISSLEEEIVQQNKFHEERQMAWDQREVDLERQLDIFDRQQNEILNAAQKFEEATGSIPDPSLPLPNQLEIALRKIKENIRIILETRATCKSLEEKLKEKESALRLAEQNILSRDKVINELRLRLPATAEREKLIAELGRKEMEPKSHHTLKIAHQTIANMQARLNQKEEVLKKYQRLLEKAREEQREIVKKHEEDLHILHHRLELQADSSLNKFKQTAWDLMKQSPTPVPTNKHFIRLAEMEQTVAEQDDSLSSLLVKLKKVSQDLERQREITELKVKEFENIKLQLQENHEDEVKKVKAEVEDLKYLLDQSQKESQCLKSELQAQKEANSRAPTTTMRNLVERLKSQLALKEKQQKALSRALLELRAEMTAAAEERIISATSQKEAHLNVQQIVDRHTRELKTQVEDLNENLLKLKEALKTSKNRENSLTDNLNDLNNELQKKQKAYNKILREKEEIDQENDELKRQIKRLTSGLQGKPLTDNKQSLIEELQRKVKKLENQLEGKVEEVDLKPMKEKNAKEELIRWEEGKKWQAKIEGIRNKLKEKEGEVFTLTKQLNTLKDLFAKADKEKLTLQRKLKTTGMTVDQVLGIRALESEKELEELKKRNLDLENDILYMRAHQALPRDSVVEDLHLQNRYLQEKLHALEKQFSKDTYSKPSISGIESDDHCQREQELQKENLKLSSENIELKFQLEQANKDLPRLKNQVRDLKEMCEFLKKEKAEVQRKLGHVRGSGRSGKTIPELEKTIGLMKKVVEKVQRENEQLKKASGILTSEKMANIEQENEKLKAELEKLKAHLGHQLSMHYESKTKGTEKIIAENERLRKELKKIKILKHVPEGAETEQGLKRELQVLRLANHQLDKEKAELIHQIEANKDQSGAESTIPDADQLKEKIKDLETQLKMSDLEKQHLKEEIKKLKKELENFDPSFFEEIEDLKYNYKEEVKKNILLEEKVKKLSEQLGVELTSPVAASEEFEDEEESPVNFPIY

SEQ ID NO: 94926 - protein, 618 aa, Homo sapiens
MASEGTNIPSPVVRQIDKQFLICSICLERYKNPKVLPCLHTFCERCLQNYIPAHSLTLSCPVCRQTSILPEKGVAALQNNFFITNLMDVLQRTPGSNAEESSILETVTAVAAGKPLSCPNHDGNVMEFYCQSCETAMCRECTEGEHAEHPTVPLKDVVEQHKASLQVQLDAVNKRLPEIDSALQFISEIIHQLTNQKASIVDDIHSTFDELQKTLNVRKSVLLMELEVNYGLKHKVLQSQLDTLLQGQESIKSCSNFTAQALNHGTETEVLLVKKQMSEKLNELADQDFPLHPRENDQLDFIVETEGLKKSIHNLGTILTTNAVASETVATGEGLRQTIIGQPMSVTITTKDKDGELCKTGNAYLTAELSTPDGSVADGEILDNKNGTYEFLYTVQKEGDFTLSLRLYDQHIRGSPFKLKVIRSADVSPTTEGVKRRVKSPGSGHVKQKAVKRPASMYSTGKRKENPIEDDLIFRVGTKGRNKGEFTNLQGVAASTNGKILIADSNNQCVQIFSNDGQFKSRFGIRGRSPGQLQRPTGVAVHPSGDIIIADYDNKWVSIFSSDGKFKTKIGSGKLMGPKGVSVDRNGHIIVVDNKACCVFIFQPNGKIVTRSPFCSCK

SEQ ID NO: 94927 - protein, 237 aa, Homo sapiens
MRLAGPLRIVVLVVSVGVTWIVVSILLGGPGSGFPRIQQLFTSPESSVTAAPRARKYKCGLPQPCPEEHLAFRVVSGAANVIGPKICLEDKMLMSSVKDNVGRGLNIALVNGPLPPDTGVSGELIEARAFDMWAGDVNDLLKFIRPLHEGTLVFVASYDDPATKMNEETRKLFSELGSRNAKELAFRDSWVFVGAKGVQNKSPFEQHVKNSKHSNKYEGWPEALEMEGCIPRRSTAS

SEQ ID NO: 94928 - protein, 125 aa, Homo sapiens
MKVLKKATLKVRDRVRSKMERDILAEVNHPFIVKLHYAFQTEGKLYLILDFLRGGDLFTRLSKEVMFTEEDVKFYLAELALALDHLHSLGIIYRDLKPENILLDEEGHIKITDFGLSKEAIDHDK

SEQ ID NO: 94929 - protein, 165 aa, Homo sapiens
MGRRSSDTEEESRSKRKKKHRRRSSSSSSSDSRTYSRKKGGRKSRSKSRSWSRDLQPRSHSYDRRRRHRSSSSSSYGSRRKRSRSRSRGRGKSYRVQRSRSKSRTRRSRSRPRLRSHSRSSERSSHRRTRSRSRDRERRKGRDKEKREKEKDKGKDKELHNIKRG

SEQ ID NO: 94930 - protein, 119 aa, Homo sapiens
  MOD_RES (1)..(1): Any amino acid
XVPPHETFGFKVAVIASIVSCAIILLMSMAFLTCCLLKCVKKSKRRRSNRDHGESTSKLASVTRSVDKDPGIPRALSLSGSSSSPQAQVMVHMANPRQPLPASGLATGMPQQPAAYALG

SEQ ID NO: 94931 - protein, 17 aa, Homo sapiens
  MOD_RES (1)..(1): Any amino acid
XTINMHHKRQTVISECS

SEQ ID NO: 94932 - protein, 141 aa, Homo sapiens
MSEARKGPDEAEESQYDSGIESLRSLRSLPESTSAPASGPSDGSPQPCTHPPGPVKEPQEKEDADGERADSTYGSSSLTYTLSLLGGPEAEDPAPRLPLPHVGALSPQQLEALTYISEDGDTQHSIWLYIWTNRAQFGHWC

SEQ ID NO: 94933 - protein, 71 aa, Homo sapiens
MLEYEKHGELKTKSIDLLDLGPSTDVSALVEEIQKAEPLLTASRTEQVKLLIQRLQEKLGQNSNHTFYLFK

SEQ ID NO: 94934 - protein, 88 aa, Homo sapiens
MGQPSLTWMLMVVVASWFITTAATDTSEARWCSECHSNATCTEDEAVTTCTCQEGFTGDGLTCVDLDECAIPGAHNCSANSSCVNTPG

SEQ ID NO: 94935 - protein, 190 aa, Homo sapiens
RAAVQGLEPRPAHLSLGCVAAFLYWFPREHLLHGGKGKVPSYLGCLGLLSNNKITGLRNGSFLGLSLLEKLDLRNNIISTVQPGAFLGLGELKRLDLSNNRIGCLTSETFQGLPRLLRLNISGNIFSSLQPGVFDELPALKVVDLGTEFLTCDCHLRWLLPWAQNRSLQLSEHTLCAYPSALHAQALGSL

SEQ ID NO: 94936 - protein, 161 aa, Homo sapiens
  MOD_RES (1)..(1): Any amino acid
XEWQRYLRQSLEVVAKVMELLPTHAFSTLFPVLQDNLEVYLGLQQFIVTSGSGHRLNITAENDCRRLHCSLRDLSSLLQAVGRLAEYFIGDVFAARFNDALTVVERLVKVTLYGSQIKLYNIETAVPSVLKPDLIDVSKTSCCYLRATYWSHWPPPCGPSF

SEQ ID NO: 94937 - protein, 53 aa, Homo sapiens
MAAQGEPQVQFKPSSGLLGSSLETLTWNLLPCLLSPHQKLSWTQLWQHSMSTT

SEQ ID NO: 94938 - protein, 365 aa, Homo sapiens
MSTVEEDSDTVTVETVNSVTLTQDTEGNLILHCPQNVSENDQSFEVTMTATTEVADDEVTEGTVTQIQILQNEQLDEISPLGNEEVSAVSQAWFTTKEDKDSLTNKGHKWKQGMWSKEEIDILMNNIERYLKARGIKDATEIIFEMSKDERKDFYRTIAWGLNRPLFAVYRRVLRMYDDRNHVGKYTPEEIEKLKELRIKHGNDWATIGAALGRSASSVKDRCRLMKDTCNTGKWTEEEEKRLAEVVHELTSTEPGDIVTQGVSWAAVAERVGTRSEKQCRSKWLNYLNWKQSGGTEWTKEDEINLILRIAELDVADENDINWDLLAEGWSSVRSPQWLRSKWWTIKRQIANHKDVSFPVCSMFR

SEQ ID NO: 94939 - protein, 106 aa, Homo sapiens
MDAIKKKMQMLKLDKENALDRAEQAEADKKAAEDRSKQLEDELVSLQKKLKGTEDELDKYSEALKDAQEKLELAEKKATDVSARSHCFPHLLPAWPLRGHHRAGEQ

SEQ ID NO: 94940 - protein, 15 aa, Homo sapiens
MDRCKHVGRLRLAQD

SEQ ID NO: 94941 - protein, 269 aa, Homo sapiens
MCFMMVKIPFKNNMRLLTLDRIYHLTLQDRIIDAGPKGNYSRFMNHSCQPNCETLKWTVNGDTRVGLFAVCDIPAGTELTFNYNLDCLGNEKTVCRCGASNCSGFLGDRPKTSTTLSSEEKGKKTKKKTRRRRAKGEGKRQSEDECFRCGDGGQLVLCDRKFCTKAYHLSCLGLGKRPFGKWECPWHHCDVCGKPSTSFCHLCPNSFCKEHQDGTAFSCTPDGRSYCCEHDLGAASVRSTKTEKPPPEPGKPKGKRRRRRGWRRVTEGK

SEQ ID NO: 94942 - protein, 323 aa, Homo sapiens
MAGRASSKDWKRSIRYAGRPLQCLIQDGILNPHAASCTCAACCDDMTLSGPVRLFVPYKRRKKENELPTTPVKKDSPKNITLLPATAATTFTVTPSGQITTSGALTFDRASTVEATAVISESPAQGDVFAGATVQEASVQPPCRASHPEPHYPGYQDSCQIAPFPEAALPTSHPKIVLTSLPALAVPPPTPTKAAPPALVNGLELSEPRSWLYLEEMVNSLLNTAQQLKTLFEQAKHASTYREAATNQAKIHADAERKEQSCVNCGREAMSECTGCHKVNYCSTFCQRKDWKDHQHICGQSAAVTVQADEVHVAESVMEKVTV

SEQ ID NO: 94943 - protein, 890 aa, Homo sapiens
MAAAAASASQDELNQLERVFLRLGHAETDEQLQNIISKFLPPVLLKLSSTQEGVRKKVMELLVHLNKRIKSRPKIQLPVETLLVQYQDPAAVSFVTNFTIIYVKMGYPRLPVEKQCELAPTLLTAMEGKPQPQQDSLMHLLIPTLFHMKYPVESSKSASPFNLAEKPKTVQLLLDFMLDVLLMPYGYVLNESQSRQNSSSAQGSSSNSGGGSGIPQPPPGMSFYAAKRVIGDNPWTPEQLEQCKLGIVKFIEAEQVPELEAVLHLVIASSDTRHSVATAADLELKSKQSLIDWNNPAIINKMYKVYLGDIPLKTKEGAVLKPELKRDPVSTRVKLKIVPHLLRSRQAAETFPANIQVVYDGLFGTNTNSKLRTLSLQFVHHICITCPEIKIKPLGPMLLNGLTKLINEYKEDPKLLSMAYSAVGKLSSRMPHLFTKDIALVQQLFEALCKEEPETRLAIQEALSMMVGAYSTLEGAQRTLMEALVASYLIKPEVQVRQVAVKFASTVFPSDHIPSRYLLLLAAGDPREEVHGEAQRVLRCLPGRNRKESTSEQMPSFPEMVYYIQEKASHRMKTPVKYMTGTTVLPFNPAAFGEIVLYLRMCLAHSAGVVPTSQSLADMQDHAPAIGRYIRTLMSSGQMAPSSSNKSGETNPVQIYIGLLQQLLAGVGGLPVMYCLLEAVSVYPEKLATKFVDKTEWIKSLMNNSKEEMRELAALFYSVVVSTVSGNELKSMIEQLIKTTKDNHSPEIQHGSLLALGFTVGRYLAKKKMRMSEQQDLERNADTLPDQEELIQSATETIGSFLDSTSPLLAIAACTALGEIGRNGPLPIPSEGSGFTKLHLVESLLSRIPSSKETNKMKERAIQTLGYFPVGDGDFPHQKLLLQGLMDSVE

SEQ ID NO: 94944 - protein, 650 aa, Homo sapiens
MSNRNNNKLPSNLPQLQNLIKRDPPAYIEEFLQQYNHYKSNVEIFKLQPNKPSKELAELVMFMAQISHCYPEYLSNFPQEVKDLLSCNHTVLDPDLRMTLYTHIVTDIKNINAKHKNNKVNVVLQNFMYTMLRDSNATAAKMSLDVMIELYRRNIWNDAKTVNVITTACFSKVTKILVAALTFFLGKDEDEKQDSDSESEDDGPTARDLLVQYATGKKSSKNKKKLEKAMKVLKKQKKKKKPEVFNFSAIHLIHDPQDFAEKLLKQLECCKERFEVKMMLMNLISRLVGIHELFLFNFYPFLQRFLQPHQREVTKILLFAAQASHHLVPPEIIQSLLMTVANNFVTDKNSGEVMTVGINAIKEITARCPLAMTEELLQDLAQYKTHKDKNVMMSARTLIHLFRTLNPQMLQKKFRGKPTEASIEARVQEYGELDAKDYIPGAEVLEVEKEENAENDEDGWESTSLSEEEDADGEWIDVQHSSDEEQQEISKKLNSMPMEERKAKAAAISTSRVLTQEDFQKIRMAQMRKELDAAPGKSQKRKYIEIDSDEEPRGELLSLRDIERLHKKPKSDKETRLATAMAGKTDRKEFVRKKTKTNPFSSSTNKEKKKQKNFMMMRYSQNVRSKNKRSFREKQLALRDALLKKRKRMK

SEQ ID NO: 94945 - protein, 1236 aa, Homo sapiens
MANGGGGGGGSSGGGGGGGGSSLRMSSNIHANHLSLDASSSSSSSSSSSSSSSSSSSSSSVHEPKMDALIIPVTMEVPCDSRGQRMWWAFLASSMVTFFGGLFIILLWRTLKYLWTVCCHCGGKTKEAQKINNGSSQADGTLKPVDEKEEAVAAEVGWMTSVKDWAGVMISAQTLTGRVLVVLVFALSIGALVIYFIDSSNPIESCQNFYKDFTLQIDMAFNVFFLLYFGLRFIAANDKLWFWLEVNSVVDFFTVPPVFVSVYLNRSWLGLRFLRALRLIQFSEILQFLNILKTSNSIKLVNLLSIFISTWLTAAGFIHLVENSGDPWENFQNNQALTYWECVYLLMVTMSTVGYGDVYAKTTLGRLFMVFFILGGLAMFASYVPEIIELIGNRKKYGGSYSAVSGRKHIVVCGHITLESVSNFLKDFLHKDRDDVNVEIVFLHNISPNLELEALFKRHFTQVEFYQGSVLNPHDLARVKIESADACLILANKYCADPDAEDASNIMRVISIKNYHPKIRIITQMLQYHNKAHLLNIPSWNWKEGDDAICLAELKLGFIAQSCLAQGLSTMLANLFSMRSFIKIEEDTWQKYYLEGVSNEMYTEYLSSAFVGLSFPTVCELCFVKLKLLMIAIEYKSANRESRILINPGNHLKIQEGTLGFFIASDAKEVKRAFFYCKACHDDITDPKRIKKCGCKRPKMSIYKRMRRACCFDCGRSERDCSCMSGRVRGNVDTLERAFPLSSVSVNDCSTSFRAFEDEQPSTLSPKKKQRNGGMRNSPNTSPKLMRHDPLLIPGNDQIDNMDSNVKKYDSTGMFHWCAPKEIEKVILTRSEAAMTVLSGHVVVCIFGDVSSALIGLRNLVMPLRASNFHYHELKHIVFVGSIEYLKREWETLHNFPKVSILPGTPLSRADLRAVNINLCDMCVILSANQNNIDDTSLQDKECILASLNIKSMQFDDSIGVLQANSQGFTPPGMDRSSPDNSPVHGMLRQPSITTGVNIPIITELVNDTNVQFLDQDDDDDPDTELYLTQPFACGTAFAVSVLDSLMSATYFNDNILTLIRTLVTGGATPELEALIAEENALRGGYSTPQTLANRDRCRVAQLALLDGPFADLGDGGCYGDLFCKALKTYNMLCFGIYRLRDAHLSTPSQCTKRYVITNPPYEFELVPTDLIFCLMQFDHNAGQSRASLSHSSHSSQSSSKKSSSVHSIPSTANRQNRPKSRESRDKQNRKEMVYR

SEQ ID NO: 94946 - protein, 46 aa, Homo sapiens
MEEIPAQEAAGSPRVQFQSLETQSECLSPEPQFVQDTDMEQGLTGG

SEQ ID NO: 94947 - protein, 80 aa, Homo sapiens
MTEGRHCQVHLLDDRRLELLVQPKLLARELLDLVASHFNLKEKEYFGITFIDDTPICLHFMQPDTLSEESFHFLQIISKE

SEQ ID NO: 94948 - protein, 163 aa, Homo sapiens
MAEPGEGLPEEVLALIFRHLSLRDRAAAARVCRAWAAAATCSAVWHDTKISCECELEGMLPPYLSACLDHIHNLRLEFEPSRKPSRRAAIELLMVLAGRAPGLRGLRLECRGEKPLFDAGRDVLEAVHAVCGAASQLRHLDLRRLSFTLDDALVLQAARSCPE

SEQ ID NO: 94949 - protein, 211 aa, Homo sapiens
  MOD_RES (1)..(1): Any amino acid
XSMMQQQAATSHYSSAQGGSQHYQGQSSIAMMGQGSQGSSMMGQRPMAPYRPSQQGSSQQYLGQEEYYGEQYSHSQGAAEPMGQQYYPDGHGDYAYQQSSYTEQSYDRSFEESTQHYYEGGNSQYSQQQAGYQQGAAQQQTYSQQQYPSQQSYPGQQQGYGSAQGAPSQYPGYQQGQGQQYGSYRAPQTAPSAQQQRPYGYEQGQYGNYQQ

SEQ ID NO: 94950 - protein, 882 aa, Homo sapiens
MVPWVRTMGQKLKQRLRLDVGREICRQYPLFCFLLLCLSAASLLLNRYIHILMIFWSFVAGVVTFYCSLGPDSLLPNIFFTIKYKPKQLGLQELFPQGHSCAVCGKVKCKRHRPSLLLENYQPWLDLKISSKVDASLSEVLELVLENFVYPWYRDVTDDESFVDELRITLRFFASVLIRRIHKVDIPSIITKKLLKAAMKHIEVIVKARQKVKNTEFLQQAALEEYGPELHVALRSRRDELHYLRKLTELLFPYILPPKATDCRSLTLLIREILSGSVFLPSLDFLADPDTVNHLLIIFIDDSPPEKATEPASPLVPFLQKFAEPRNKKPSVLKLELKQIREQQDLLFRFMNFLKQEGAVHVLQFCLTVEEFNDRILRPELSNDEMLSLHEELQKIYKTYCLDESIDKIRFDPFIVEEIQRIAEGPYIDVVKLQTMRCLFEAYEHVLSLLENVFTPMFCHSDEYFRQLLRGAESPTRNSKLNRNTQKRGESFGISRIGSKIKGVFKSTTMEGAMLPNYGVAEGEDDFIEEGIVVMEDDSPVEAVSTPNTPRNLAAWKISIPYVDFFEDPSSERKEKKERIPVFCIDVERNDRRAVGHEPEHWSVYRRYLEFYVLESKLTEFHGAFPDAQLPSKRIIGPKNYEFLKSKREEFQEYLQKLLQHPELSNSQLLADFLSPNGGETQFLDKILPDVNLGKIIKSVPGKLMKEKGQHLEPFIMNFINSCESPKPKPSRPELTILSPTSENNKKLFNDLFKNNANRAENTERKQNQNYFMEVMTVEGVYDYLMYVDAIFCENTEPRSLQDKQKGAKQTFEEMMNYIPDLLVKCIGEETKYESIRLLFDGLQQPVLNKQLTYVLLDIVIQELFPELNKVQKEVTSVTSWM

SEQ ID NO: 94951 - protein, 130 aa, Homo sapiens
  MOD_RES (1)..(1): Any amino acid
XSHLRNETQQIISLKKEFLNLQDENQQLKKIYHEQEQALQELGNKLSESKLKIEDIKEANKALQGLVWLKDKEATHCKLCEKEFSLSKRKTWQLLHLHVSQTLHLLLLWLCHQLQYQYELVLDLVVRRTK

SEQ ID NO: 94952 - protein, 136 aa, Homo sapiens
MKMLWKLTDNIKYEDCEHVEDPGINIPDQTVIKKGPVSLSKSNSNAVSAIPINKDNLFGGVVNPNEVFCSVPGRLSLLSSTSKYKVTVAEVQRRLSPPECLNASLLGGVLRRAKSKNGGRSLREKLDKIGLNLPAG

SEQ ID NO: 94953 - protein, 85 aa, Homo sapiens
MPAPIRLRELIRTIRTARTQAEEREMIQKECAAIRSSFREEDNTYRCRNVAKLLYMHMLGYPAHFGQLECLKLIASQKFTDKRIG

SEQ ID NO: 94954 - protein, 561 aa, Homo sapiens
MLLARMNPQVQPENNGADTGPEQPLRARKTAELLVVKERNGVQCLLAPRDGDAQPRETWGKKIDFLLSVVGFAVDLANVWRFPYLCYKNGGGAFLIPYTLFLIIAGMPLFYMELALGQYNREGAATVWKICPFFKGVGYAVILIALYVGFYYNVIIAWSLYYLFSSFTLNLPWTDCGHTWNSPNCTDPKLLNGSVLGNHTKYSKYKFTPAAEFYERGVLHLHESSGIHDIGLPQWQLLLCLMVVVIVLYFSLWKGVKTSGKVVWITATLPYFVLFVLLVHGVTLPGASNGINAYLHIDFYRLKEATVWIDAATQIFFSLGAGFGVLIAFASYNKFDNNCYRDALLTSSINCITSFVSGFAIFSILGYMAHEHKVNIEDVATEGAGLVFILYPEAISTLSGSTFWAVVFFVMLLALGLDSSMGGMEAVITGLADDFQVLKRHRKLFTFGVTFSTFLLALFCITKGGIYVLTLLDTFAAGTSILFAVLMEAIGVSWFYGVDRFSNDIQQMMGFRPGLYWRLCWKFVSPAFLLRLAYGITPENEHHLVAQRDIRQFQLQHWLAI

SEQ ID NO: 94955 - protein, 290 aa, Homo sapiens
  MOD_RES (1)..(1): Any amino acid
XEVISNLQAGRLGSTIFVANLDFKVGWKKLKEVFSIAGTVKRADIKEDKDGKSRGMGTVTFEQAIEAVQAISMFNGQFLFDRPMHVKMDDKSVPHEEYRSHDGKTPQLPRGLGGIGMGLGPGGQPISASQLNIGGVMGNLGPGGIGFGGLEAMNSMGGFGGVGRMGELYRGAMTSSMERDFGRGDIGINRGFGDSFGRLGGGMGSMNSVTGGMGMGLDRMSSSFDRMGPGIGAILERSIDMDRGFLSGPMGSGMRERIGSKGNQIFVRNLPFDLTWQKLKEKFSQCGHVM

SEQ ID NO: 94956 - protein, 545 aa, Homo sapiens
MSGNWVHPGQILIWAIWVLAAPTKGPSAEGPQRNTRLGWIQGKQVTVLGSPVPVNVFLGVPFAAPPLGSLRFTNPQPASPWDNLREATSYPNLCLQNSEWLLLDQHMLKVLVWFPGGAFKTGSASIFDGSALAAYEDVLVVVVQYRLGIFGFFTTWDQHAPGNWAFKDQVAALSWVQKNIEFFGGDPSSVTIFGESAGAISVSSLILSPMAKGLFHKAIMESGVAIIPYLEAHDYEKSEDLQVVAHFCGNNASDSEALLRCLRTKPSKELLTLSQKTKSFTRVVDGAFFPNEPLDLLSQKAFKAIPSIIGVNNHECGFLLPMKEAPEILSGSNKSLALHLIQNILHIPPQYLHLVANEYFHDKHSLTEIRDSLLDLLGDVFFVVPALITARYHRDAGAPVYFYEFRHRPQCFEDTKPAFVKADHADEVRFVFGGAFLKGDIVMFEGATEEEKLLSRKMMKYWATFARTGNPNGNDLSLWPAYNLTEQYLQLDLNMSLGQRLKEPRVDFWTSTIPLILSASDMLHSPLSSLTFLSLLQPFFFFCAP

SEQ ID NO: 94957 - protein, 94 aa, Homo sapiens
MSELLRARSQSSERGNDQESSQPVGSVIVQEPTEEKRQEEEPPTDNQGPDMEAFQQELALLKIEDEPGDGPDVREGIMPTFDLTKVLEAGDAQP

SEQ ID NO: 94958 - protein, 42 aa, Homo sapiens
MSKRKAPQETLNGGITDMLTELANFEKNVSQAIHKYNAYSLE

SEQ ID NO: 94959 - protein, 268 aa, Homo sapiens
TDNPCIMCVCLNKEVTCKREKCPVLSRDCALAIKQRGACCEQCKGLALSPRLECSSVISAHCNLRLLHPSDSHASASQVAGITGCTYEGNTYNSSFKWQSPAEPCVLRQCQEGVVTESGVRCVVHCKNPLEHLGMCCPTCPGCVFEGVQYQEGEEFQPEGSKCTKCSCTVRGKCLTSLLGAASFEVMFMTMDPHFCTITAQLVPAGTLLWFARGSAPTLVAVTKARRAVVKSASYECPQKTSKYANLATRFSRMERCGPLSIVPSVLV

SEQ ID NO: 94960 - protein, 60 aa, Homo sapiens
ELERSFLSEPSSPGRTKTTKGFKLGKHKHETFITSRKLQSSGRNKRLQLECSEYSSRKLQ

SEQ ID NO: 94961 - protein, 384 aa, Homo sapiens
MVTEVCSMPAASAVKKPFDLRSKMGKWFHHRFPCCKGSGKSNMGTSGDHDDSFMKMLRSKMGKCCHHCFPCCRGSGTSNVGTSGDHDNSFMKTLRSKMGKWCCHCFPCCRGSGKSNVGAWGDYDDSAFMEPRYHVRREDLDKLHRAAWWGKVPRKDLIVMLRDTDMNKRDKQKRTALHLASANGNSEVVQLLLDRRCQLNVLDNKKRTALIKAVQCQEDECVLMLLEHGADQNIPDEYGNTTLHYAVHNEDKLMAKALLLYGADIESKNKCGLTPLLLGVHEQKQQVVKFLIKKKANLNALDRYGRTALILAVCCGSASIVNLLLEQNVDVSSQDLSGQTAREYAVSSHHHVICELLSDYKEKQMLKISSENSNPENVSRTRNK

SEQ ID NO: 94962 - protein, 1078 aa, Homo sapiens
MDAAGRGCHLLPLPAARGPARAPAAAAAAAASPPGPCSGAACAPSAAAGAGAMNPSSSAGEEKGATGGSSSSGSGAGSCCLGAEGGADPRGAGSAAAAGAAALDEPAAAGQKEKDEALEEKLRNLTFRKQVSYRKAISRAGLQHLAPAHPLSLPVANGPAKEPRATLDWSENAVNGEHLWLETNVSGDLCYLGEENCQVRFAKSALRRKCAVCKIVVHTACIEQLEKINFRCKPTFREGGSRSPRENFVRHHWVHRRRQEGKCKQCGKGFQQKFSFHSKEIVAISCSWCKQAFHNKVTCFMLHHIEEPCSLGAHAAVIVPPTWIIKVKKPQNSLKASNRKKKRTSFKRKASKRGMEQENKGRPFVIKPISSPLMKPLLVFVNPKSGGNQGTKVLQMFMWYLNPRQVFDLSQEGPKDALELYRKVPNLRILACGGDGTVGWILSILDELQLSPQPPVGVLPLGTGNDLARTLNWGGGYTDEPVSKILCQVEDGTVVQLDRWNLHVERNPDLPPEELEDGVCKLPLNVFNNYFSLGFDAHVTLEFHESREANPEKFNSRFRNKMFYAGAAFSDFLQRSSRDLSKHVKVVCDGTDLTPKIQELKFQCIVFLNIPRYCAGTMPWGNPGDHHDFEPQRHDDGYIEVIGFTMASLAALQVGGHGERLHQCREVMLLTYKSIPMQVDGEPCRLAPAMIRISLRNQANMVQKSKRRTSMPLLNDIHQVQTADLRRVSAPPGSFTIPQSVPDRLRIRVNKISLQDYEGFHYDKEKLREASIPLGILVVRGDCDLETCRMYIDRLQEDLQSVSSGSQRVHYQDHETSFPRALSAQRLSPRWCFLDATSADRFYRIDRSQEHLHFVMEISQDEIFILDPDMVVSQPAGTPPGMPDLVVEQASGISDWWNPALRKRMLSDSGLGMIAPYYEDSDLKDLSHSRVLQSPVSSEDHAILQAVIAGDLMKLIESYKNGGSLLIQGPDHCSLLHYAAKTGNGEIVKYILDHGPSELLDMADSETGETALHKAACQRNRAVCQLLVDAGASLRKTDSKGKTPQERAQQAGDPDLAAYLESRQNYKVIGHEDLETAV

SEQ ID NO: 94963 - protein, 137 aa, Homo sapiens
MPTVVVMDVSLSMTRPVSIEGSEEYQRKHLAAHGLTMLFEHMATNYKLEFTALVVFSSLWELMVPFTRDYNTLQEALSNMDDYDKTCLESALVGVCNIVQQEWGGAIPCQVVLVTDGCLGIGRGSLRHSLATQNQRS

SEQ ID NO: 94964 - protein, 46 aa, Homo sapiens
  MOD_RES (1)..(1): Any amino acid
XLYPKFASPWASSPCRPQDIDFHVPSEYLTNIHIRDKLFFFFSWLQ

SEQ ID NO: 94965 - protein, 222 aa, Homo sapiens
MAATSLMSALAARLLQPAHSCSLRLRPFHLAAVRNEAVVISGRKLAQQIKQEVRQEVEEWVASGNKRPHLSVILVGENPASHSYVLNKTRAAAVVGDATVTISHRYTPKEQLKKHTILADIVISAAGIPNLITADMIKEGAAVIDVGINRVHDPVTAKPKLVGDVDFEGVRQKAGYITPVPGGVGPMTVAMLMKNTIIAAKKVLRLEEREVLKSKELGVATN

SEQ ID NO: 94966 - protein, 158 aa, Homo sapiens
MESWWGLPCLAFLCFLMHARDIYPKPKPPYYPQPENPDSGGNIYPRPKPRPQPQPGNSGNSGGYFNDVDRDDGRYPPRPRPRPPAGGGGGGYSSYGNSDNTHGGDHHSTYGNPEGNMVAKIVSPIVSVVVVTLLGAAASYFKLNNRRNCFRTHEPENV

SEQ ID NO: 94967 - protein, 38 aa, Homo sapiens
MACGLVASNLNLKPGECLRVRGEVAPDAKSEFFQQASC

SEQ ID NO: 94968 - protein, 151 aa, Homo sapiens
MERKNPSRESPRRLSAKVGKGTEMKKVARQLGMAAAESDKDSGFSDGSSECLSSAEQMESEDMLSALGWSREDRPRQNSKTAKNAFPTLSPMVVMKNVLVKQGSSSSQLQSWTVQPSFEVISAQPQLLFLHPPVPSPVSPCHTGEKKSDSR

SEQ ID NO: 94969 - protein, 149 aa, Homo sapiens
MPVGQDSEICLLKSGELMIKVPLTVDEIASFGEGSRELFVRSSTYSLIPITVAEAGLTISWVFSSDPKSISFSVVFQEAEDTPLDQCKVLIPTTRCNSHKENIQGQLKVRTPGIYMLIFDNTFSRFVSKKVFYHLTVDRPVIYDGSDFL

SEQ ID NO: 94970 - protein, 120 aa, Homo sapiens
MIVSFLRPPQPCKPALLQSSVKQQVEAIEKQYISAIEKQAHKCEELLNAQHQRLLEMLDTEKELLKEKIKEALIQQSQEQKEILEKCLEEERQRNKEALVSAAKLEKEAVKDAVLKVVEE

SEQ ID NO: 94971 - protein, 98 aa, Homo sapiens
MVQALTTTRIQRQAEGFQCWRGFSIDSGKGLVRAEELSFVAGAPRANHKGAVVILRKDSASRLVPEVMLSGERLTSGFGYSLAVADLNSDGYCSGCPL

SEQ ID NO: 94972 - protein, 862 aa, Homo sapiens; identical to SEQ ID NO: 62346

SEQ ID NO: 94973 - protein, 350 aa, Homo sapiens
MAEAPSSVRDDLKDVSSQRASSVNQMRPGEGQAHRELQILPRVPALSRRQGEDFLLHKSIDVTGDPKSLRPKQTLEKDLKENREENPGLTSPEPQLPKSPTDLVRAKEGKDPPKIASVENVDADTPSACVVEREASTHSGNRGDALNLSSPKRSKPDASSISQEEPQGEATPVGNRESPGQAGMNSIHSPGPASPVSHPDGQEAKALPPFACDVCEKRFTCNSKLVIHKRSHTGERLFQCNLCGKRFMQLISLQFHQRTHTGERPYTCDVCQKQFTQKSYLKCHKRSHTGEKPFECKDCKKVFTYRGSLKEHQRIHSGEKPYKCSKCPRAFSRLKLLRRHQKTHPEATSQ

SEQ ID NO: 94974 - protein, 533 aa, Homo sapiens
MTSAFKLDFLPDMMVEGRLLVPDRINGTANKMNGALDHSDQPDPDAIKMFVGQIPRSWSEKELKELFEPYGAVYQINVLRDRSQNPPQSKGCCFVTFYTRKAALEAQNALHNIKTLPGMHHPIQMKPADSEKSNAVEDRKLFIGMVSKKCNENDIRVMFSPFGQIEECRILRGPDGLSRGCAFVTFSTRAMAQNAIKAMHQSQTMEGCSSPIVVKFADTQKDKEQRRLQQQLAQQMQQLNTATWGNLTGLGGLTPQYLALLQQATSSSNLGAFSGIQQMAGMNALQLQNLATLAAAAAAAQTSATSTNANPLSTTSSALGALTSPVAASTPNSTAGAAMNSLTSLGTLQGLAGATVGLNNINALAGTINTPRSKRLLLPKDNNGMAALNGGLGATGLTNGTAGTMDALTQAYSGIQQYAAAALPTLYSQSLLQQQSAAGSQKEGPEGANLFIYHLPQEFGDQDILQMFMPFGNVISAKVFIDKQTNLSKCFGFVSYDNPVSAQAAIQAMNGFQIGMKRLKVQLKRSKNDSKPY

SEQ ID NO: 94975 - protein, 89 aa, Homo sapiens
MSGKTKARRAAMFFRRCSEDASGSASGNALLSEDENPDANGVTRSWKIILSTMLTLTFLLVGWSAVVRSWLTATSTSWVQAFLLPQPPE

SEQ ID NO: 94976 - protein, 56 aa, Homo sapiens
  MOD_RES (1)..(1): Any amino acid
XLLLLHLELKRCLFTVEPLGDKAEPSPEQRRRLLRNFYTLVTSTHFPPVPLHVMKE

SEQ ID NO: 94977 - protein, 270 aa, Homo sapiens
MDLQNDLGQTALHLAAILGETSTVEKLYAAGAGLCVAERRGHTALHLACRVGAHACARALLQPRPRRPREAPDTYLAQGPDRTPDTNHTPVALYPDSDLEKEEEESEEDWKLQLEAENYEGHTPLHVAVIHKDVEMVRLLRDAGADLDKPEPTCGRSPLHLAVEAQAADVLELLLRAGANPAARMYGGRTPLGSAMLRPNPILARLLRAHGAPEPEGEDEKSGPCSSSSDSDSGDEGDEYDDIVVHSSRSQTRLPPTPASKPLPDDPRPV

SEQ ID NO: 94978 - protein, 467 aa, Homo sapiens
  MOD_RES (1)..(1): Any amino acid
XVSTGADGTVCFWQWDLESLKFSPRPLKFTEKPRPGVQMLCSSFSVGGMFLATGSTDHVIRMYFLGFEAPEKIAELESHTDKVDSIQFCNNGDRFLSGSRDGTARIWRFEQLEWRSILLDMATRISGDLSSEEERFMKPKVTMIAWNQNDSIVVTAVNDHVLKVWNSYTGQLLHNLMGHADEVFVLETHPFDSRIMLSAGHDGSIFIWDITKGTKMKHYFNMIEGQGHGAVFDCKFSQDGQHFACTDSHGHLLIFGFGCSKPYEKIPDQMFFHTDYRPLIRDSNNYVLDEQTQQAPHLMPPPFLVDVDGNPHPTKYQRLVPGRENSADEHLIPQLGYVATSDGEVIEQIISLQTNDNDERSPESSILDGMIRQLQQQQDQRMGADQDTIPRGLSNGEETPRRGFRRLSLDIQSPPNIGLRRSGQVEGVRQMHQNAPRSQIATERDLQAWKRRVVVPEEAGRLPIRER

SEQ ID NO: 94979 - protein, 47 aa, Homo sapiens
MDFMLRYMYNQESVDWVGDYNEPLTGFSWRGGSERETTGIQIWSEIF

SEQ ID NO: 94980 - protein, 737 aa, Homo sapiens
MPASAARPRPGPGQPTASPFPLLLLAVLSGPVSGRVPRSVPRTSLPISEADSCLTRFAVPHTYNYSVLLVDPASHTLYVGARDTIFALSLPFSGERPRRIDWMVPEAHRQNCRKKGKKEDVSRFQQVERLESGRGKCPFEPAQRSAAVMAGGVLYAATVKNYLGTEPIITRAVGRAEDWIRTDTLPSWLNAPAFVAAVALSPAEWGDEDGDDEIYFFFTETSRAFDSYERIKVPRVARVCAGDLGGRKTLQQRWTTFLKADLLCPGPEHGRASSVLQDVAVLRPELGAGTPIFYGIFSSQWEGATISAVCAFRPQDIRTVLNGPFRELKHDCNRGLPVVDNDVPQPRPGECITNNMKLRHFGSSLSLPDRVLTFIRDHPLMDRPVFPADGHPLLVTTDTAYLRVVAHRVTSLSGKEYDVLYLGTEDGHLHRAVRIGAQLSVLEDLALFPEPQPVENMKLYHSWLLVGSRTEVTQVNTTNCGRLQSCSECILAQDPVCAWSFRLDECVAHAGEHRGLVQDIESADVSSLCPKEPGERPVVFEVPVATAAHVVLPCSPSSAWASCVWHQPSGVTALTPRRDGLEVVVTPGAMGAYACECQEGGAAHVVAAYSLVWGSQRDAPSRAHTVGAGLAGFFLGILAASLTLILIGRRQQRRRQRELLARDKVGLDLGAPPSGTTSYSQDPPSPSPEDERLPLALAKRGSGFGGFSPPFLLDPCPSPAHIRLTGAPLATCDETSI

SEQ ID NO: 94981 - protein, 44 aa, Homo sapiens
MGCSAKARWAAGALGVAGLLCAVLGAVMIVMVPSLIKQQVLKSE

SEQ ID NO: 94982 - protein, 73 aa, Homo sapiens
MYRNEFTAWYRRMSVVYGIGTWSVLGSLLYYSRTMAKSSGLTLSPRLECSGMISAHHNLRLRAQVILLPQPPE

SEQ ID NO: 94983 - protein, 117 aa, Homo sapiens
MAAMPLKAQYQEMVTFEDVAVHFTKTEWTGLSPAQRALYRSVMLENFGNLTALGYPVPKPALISLLERGDMAWGLEAQDDPPAERTKNVCKDVETNIDSESTLIQGISEERDGMMSH

SEQ ID NO: 94984 - protein, 46 aa, Homo sapiens
MLEKRSVGCRRCAVVGNSGNLRESSYGPEIDSHDFVLRMNKAPTAG

SEQ ID NO: 94985 - protein, 113 aa, Homo sapiens
MARERGQLVFLEGLKSAVDVVFQAQKEPHPLQFLREANAGNLKPLFEFVREALKPVDSGEARWTYPVLLVDDLSVLLSLGMGAVAVLDFIHYCRATVCWELKVLMELPSLRPP

SEQ ID NO: 94986 - protein, 114 aa, Homo sapiens
MRIRLLCCVAFSLLWAGPVIAGITQAPTSQILAAGRRMTLRCTQDMRHNAMYWYRQDLGLGLRLIHYSNTAGTTGKGEVPDGYSVSRANTDDFPLTLASAVPSQTSVYFCASSD

SEQ ID NO: 94987 - protein, 154 aa, Homo sapiens
  MOD_RES (1)..(1): Any amino acid
XLKVFRNAEKYYGRKSPVGRDVCRLRKAYYNARHEASAQIDEIVGETASEADSSETSVSEKENGHEKDDDVIRCICGLYKDEGLMIQCDKCMVWQHCDCMGVNSDVEHYLCEQCDPRPVDREYDQRENKILRNLWKEWHYIKLRFLAGHGRSCL

SEQ ID NO: 94988 - protein, 157 aa, Homo sapiens
TIIPHGVPYMTKLLRYFVSEDSIFLHLEHVQGHIRLTYFGQWSEVEPQCCGEAVDNLYSAPEVGGISELTEACDWWSFGSLLYELLTGMALSQSHPSGIQAHTQLQLPEWLSRPAASLLTELLQFEPTRRLGMGEGGVSKLKSHPFFSTIQWSKLVG

SEQ ID NO: 94989 - protein, 71 aa, Homo sapiens
MFHFFRKPPESKKPSVPETEADGFVLLEASQRLSSDVLLKVLTLGQTLWVGFVAPRLTLYPWQEIQQMSKE

SEQ ID NO: 94990 - protein, 171 aa, Homo sapiens
MASSSTVPLGFHYETKYVVLSYLGLLSQEKLQEQHLSSPQGVQLDIASQSLDQEILLKVKTEIEEELKSLDKEISEAFTSTGFDRHTSPVFSPANPESSMEDCLAHLGEKVSQELKEPLHKALQMLLSQALCLVLSQRRRNTLESLQKIAMTFTSCPATTLDKSVPQSLQL

SEQ ID NO: 94991 - protein, 114 aa, Homo sapiens
MIEVLTTTDSQKLLHQLNALLEQESRCQPKVCGLRLIESAHDNGLRMTARLRDFEVKDLLSLTQFFGFDTETFSLAVNLLDRFLSKMKVQPKHLGCVGLSCFYLAVKSIEEERN

SEQ ID NO: 94992 - protein, 26 aa, Homo sapiens
MVFYFTSSSVNSSAYTIYMGKDKYES

SEQ ID NO: 94993 - protein, 64 aa, Homo sapiens
MSYYGSSYHIINADAKYPGYPPEHIIAEKRRARRRLLHKDGSCNVYFKHIFGEWGSYVVDIFTT

SEQ ID NO: 94994 - protein, 385 aa, Homo sapiens
MVLMHLAVKNNRMSANNDHFLTPTWQQMRATPLAAPAGSLSRKKRLELDDNLDTERPVQKRARSGPQPRLPPCLLPLSPPTAPDRATAVATASRLGPYVLLEPEEGGRAYQALHCPTGTEYTCKVYPVQEALAVLEPYARLPPHKHVARPTEVLAGTQLLYAFFTRTHGDMHSLVRSRHRIPEPEAAVLFRQMATALAHCHQHGLVLRDLKLCRFVFADRERKKLVLENLEDSCVLTGPDDSLWDKHACPAYVGPEILSSRASYSGKAADVWSLGVALFTMLAGHYPFQDSEPVLLFGKIRRGAYALPAGLSAPARCLVRCLLRREPAERLTATGILLHPWLRQDPMPLAPTRSHLWEAAQVVPDGLGLDEAREEEGDREVVLYG

SEQ ID NO: 94995 - protein, 122 aa, Homo sapiens
MHLTAWPQKSVTFEDVAVYFTQAEWDGLSPAQRTLYRDVMLENYGNVASLGFPLLKPAVISQLEGGSELGGSSPLAAGTGLQGLQTDGVSLCRPNWSAVARTWLTATSVSRVRAILLPHPPE

SEQ ID NO: 94996 - protein, 38 aa, Homo sapiens
MWLFFGITGLLTAALSGCTVAKWIQLLGEICCFAGMGF

SEQ ID NO: 94997 - protein, 77 aa, Homo sapiens
MRMSVGLSLLLPLSGRTFLLLLSVVMAQSHWPSEPSEAVRDWENQLEASMHSVLSDLHEAVPTVVGIPDGTAVVGRS

SEQ ID NO: 94998 - protein, 60 aa, Homo sapiens
MASELCKTISVARLEKHKNLFLNYRNLHHFPLELLKDEGLQYLERLYMKRNSLTSLEDNC

SEQ ID NO: 94999 - protein, 48 aa, Homo sapiens
  MOD_RES (1)..(1): Any amino acid
XSEVDVLVFVVDSADRLRLPWARQELHKLLDKDPDLPVVVVANKQMLK

SEQ ID NO: 95000 - protein, 448 aa, Homo sapiens
MKGSNRNKDHSAEGEGVGKRPKRKCLQWHPLLAKKLLDFSEEEEEEDEEEDIDKVQLLGADGLEQDVGETEDDESPEQRARRPMNAFLLFCKRHRSLVRQEHPRLDNRGATKILADWWAVLDPKEKQKYTDMAKEYKDAFMKANPGYKWCPTTNKPVKSPTPTVNPRKKLWAFPSDSSRDLPSPKKAKTEEMPQLNFGMADPTQMGGLSMLLLAGEHALGTPEVSSGTCRPDVSESPELRQKSPLFQFAEISSSTSHSDASTKQCQTSALFQFAEISSNTSQLGGAEPVKRCGKSALFQLAEMCLASEGMKMEESKLIKAKESDGGRIKELEKGKEEKEIKMEKTDETRLQKEAEFEKSAKENLRDSKELRNFEALQIDDIMAIKMEDPKEIRKEELEEDHKCSHFPDFSYSASSKIIISDVPSRKDHMCHPHGIMIIEDPAALNKPE

SEQ ID NO: 95001 - protein, 134 aa, Homo sapiens
MRMSVGLSLLLPLSGRTFLLLLSVVMAQSHWPSEPSEAVRDWENQLEASMHSVLSDLHEAVPTVVGIPDGTAVVGRSFRVTIPTDLIASSGDIIKVSAAGKEALPSWLHWDSQSHTLEGLPLDTDKGVHYISVS

SEQ ID NO: 95002 - protein, 1416 aa, Homo sapiens
MSDTPSTGFSIIHPTSSEGQVPPPRHLSLTHPVVAKRISFYKSGDPQFGGVRVVVNPRSFKSFDALLDNLSRKVPLPFGVRNISTPRGRHSITRLEELEDGESYLCSHGRKVQPVDLDKARRRPRPWLSSRAISAHSPPHPVAVAAPGMPRPPRSLVVFRNGDPKTRRAVLLSRRVTQSFEAFLQHLTEVMQRPVVKLYATDGRRVPSLQAVILSSGAVVAAGREPFKPGNYDIQKYLLPARLPGISQRVYPKGNAKSESRKSSNWKVFIITSDLPDAGTSSQIYIILYGQHRSSAPIYLYGTDGARFQVGHEDIFTITVGDIGALFKIRIGHTNSGSSPSWHCKEIQLHNMNSGKQFYVPVQRWLARDQEDGEICREFPLLSKGQPVLPVTIYEVNVATGELWNAGTVANVYISIHGEKGDTGSRQLFRSKSSFNFLRGQTDTFFLEAVHLGDLCKIVIGHDGLGPGNGWFLDDVVIKDPTTNYEYAFFCHRWLDQGEDDCKIVRELYARDNSIFSASRYHVYTFPGKLFYDDWRKHDTSEINCPLFIFSGQKLELKRKETWTAESWKFTKGNTLQFYNKLTGGFVRLHPDGTVDAIGEKTDKYGVFDVIFNKRNICIFQSHEMRHLSLALDNGIVTGMVSGEATTELRVLYQPNRCALLESALVPGHTVVFDRHGKIADASSAGYANLSKEFVIFVKGVFLNSAVVLLATSLCQALCLQPDGSCTGVGSQSEKSYWKVHKISSGICMFESVKNAQMYLRIKDGRCDGTGTGDVDCHFKIKKNLKNASISLESTKSPGLFVGLQSDGQAKPMIYTKDENVCFYPQVIQFGRENPMGMSATPSQEEEKIHESKKQKKIPPESEARSPLPSSTAKEIRHFQSSETLLSEDEWKVLVLTGNTGTQANVTLWVYGDKGVTGPISLRKDSSEQLFLPGHEDEFQVEIRNTGNIYKIRIGHDGTSEQPEWNLQRVTMQHMKSKKILDFAANVWLSRIQADGDVVCELPVVKGGQAIFPLVRYQVDVYTGQLKHAETESEVFLCLFGERGDSGLRQLYKSNMQVKFQRGQIDKFQVAAVSLGKLQKVLLRCEASDKSQYWYCEQVIVREPGTTSESIFTCQRWLPFMSQGIIHSEIELYLQEMQINHQPKIQEEANDGDWKVTIVTGDLENAGTTATVFLYVYGETKCSGPIILGSGKHQLFNPNTADIFKINLKDIGEIYKIRIGHDNTGKNPRWYLEEVRLENIATYELFCLPVDSWIAENENDGDLWKEIPIMGPKKAPLPVVLYEIRIYTGTMTGAETESNVFINLIGTRGDSGKRRLHQSKNNEIKFQRGQVDIFSIKAVSLGKLKKVLISHDGTGPGNGWFLGSIVVKSEDEDSSEEVLFLCNRWLDEYQDDGKTQRELLAESSPSAVGETGSTIS

SEQ ID NO: 95003 - protein, 101 aa, Homo sapiens
MCYGKCARCIGHSLVGLALLCIAANILLYFPNGETKYASENHLSRFVWFFSGIVGGGLLMLLPAFVFIGLEQDDCCGCCGHENCGKRCAVPSGYLHMVRVH

SEQ ID NO: 95004 - protein, 264 aa, Homo sapiens
MPDSAPAMADKMDMSLDDIIKLNRSQRGGRGGGRGRGRAGSQGGRGGGAQAAARVNRGGGPIRNRPAIARGAAGGGGRNRPAPYSRPKQLPDKWQHDLFDSGFGGGAGVETGGKLLVSNLDFGVSDADIQELFAEFGTLKKAAVHYDRSGRSLGTADVHFERKADALKAMKQYNGVPLDGRPMNIQLVTSQIDAQRRPAQSVNRGGMTRNRGAGGFGGGGGTRRGTRGGARGRGRGAGRNSKQQLSAEELDAQLDAYNARMDTS

SEQ ID NO: 95005 - protein, 8 aa, Homo sapiens
MALRSHDR

SEQ ID NO: 95006 - protein, 145 aa, Homo sapiens
MAFANLRKVLISDSLDPCCRKILQDGGLQVVEKQNLSKEELIAELQGWHRCGQCGSGGRNKEGHLGYEHPQWEQPQCRRTHLWNDHVPGQADSPGDGFDEGRQMGAEEVHGNRAEWKDPGNSWPGQDWERGSYPDAVLWDEDYRV

SEQ ID NO: 95007 - protein, 21 aa, Homo sapiens
  MOD_RES (1)..(1): Any amino acid
XNTGTASKLTFGTGTRLQVTL

SEQ ID NO: 95008 - protein, 102 aa, Homo sapiens
DVREEVSGRPHLLYLLPGFLPHEQVCAVCLEIYLPYIIPRVADAHWWTFASCVLETGLGRDQQQFKISCSCVASCFSAVCGYNLCWVQSIVQTGHSCVSHFA

SEQ ID NO: 95009 - protein, 40 aa, Homo sapiens
MGKKGKVGKSRRDKFYHLAKETVCALGCFVQVTVPDLLSS

SEQ ID NO: 95010 - protein, 60 aa, Homo sapiens
ISDIRFSPGSGKYLAVASHDSFIDIYNVMSSKRVGICKGATSYITHIDWDIRAFTGQHWC

SEQ ID NO: 95011 - protein, 275 aa, Homo sapiens
FFRKKVMGNRRSDEPAKTKKGLSSILDAARWNRGEPQAEKPGATDRKGGVGMPSRDRNIGAPGQDTPGVSLHPLSLDSPDREPGADAPLELGDSSPQGPMSLESLAPPESTDEGAETERRWKRLSGRLGRSESLRVSDRRRPSRGSLGAKGRGGGRSRSDVDMDPSSATAVLGPARRATPEPGDEGEPGRSGLELEPEEPPGWRELVPPDTLHSLPKSQVKRQEVISELLVTEAAHVRMLRVLHDLFFQPMAECLFFPLEELQNIFPSLDELIEV

SEQ ID NO: 95012 - protein, 204 aa, Homo sapiens
MSGAGVAAGTRPPSSPTPGSRRRRQRPSVGVQSLRPQSPQLRQSDPQKRNLDLEKSLQFLQQQHSEMLAKLHEEIEHLKRENKGEPARGPRPALPPQAHSTLPLPQHRNTAINSSTRLGSGGTQDDLRYKLIMNQTSQKKDSLSTSSFQSVKSISNSGKARPQPGSFNKQDSKADVPQKADLEEEPLLHNSKLDKVPGVQGQAR

SEQ ID NO: 95013 - protein, 178 aa, Homo sapiens
MSLGSELFRDVAIVFSQEEWQWLAPAQRDLYRDVMLETYSNLVSLGLAVSKPDVISFLEQGKEPWMVERVVSGGLCPVLESRYDTKELFPKQHVYEVESPQWEIMESLTSYGLECSSFQDDWECRNQFDRQQGNPDRHFHQMIIRHEEMPTFDQHASLTFYQKIHTREKPFGYNKCRK

SEQ ID NO: 95014 - protein, 158 aa, Homo sapiens
MEADIITNLRCRLKEAEEERLKAAQYGLQLVESQNELQNQLDKCRNEMMTMTESYEQEKYTLQREVELKSRMLESLSCECEAIKQQQKMHLEKLEEQLSRSHGQEVNELKTKIEKLKVELDEARLSEKQLKHQVDHQKELLSCKSEELRVMSERVQES

SEQ ID NO: 95015 - protein, 401 aa, Homo sapiens
MCGIWALFGSDDCLSVQCLSAMKIAHRGPDAFRFENVNGYTNCCFGFHRLAVVDPLFGMQPIRVKKYPYLWLCYNGEIYNHKKMQQHFEFEYQTKVDGEIILHLYDKGGIEQTICMLDGVFAFVLLDTANKKVFLGRDTYGVRPLFKAMTEDGFLAVCSEAKGLVTLKHSATPFLKVEPFLPGHYEVLDLKPNGKVASVEMVKYHHCRDVPLHALYDNVEKLFPGFEIETVKNNLRILFNNAVKKRLMTDRRIGCLLSGGLDSSLVAATLLKQLKEAQVQYPLQTFAIGMEDSPDLLAARKVADHIGSEHYEVLFNSEEGIQALDEVIFSLETYDITTVRASVGMYLISKYIRKNTDSVVIFSGEGSDELTQGYIYFHKDWRGRKKNCFVCQKQNSWCFCL

SEQ ID NO: 95016 - protein, 144 aa, Homo sapiens
MKVFCEVLEELYKKVLLGATLENDSHDYIFYLNPAVSDQDCSTATSLEWANTCGIQGRHQPISVGVAPIAVAPVCLKTNSQMSGSREVMLLQLTVIKVMTTRILSVKTEFHAKEQYRDVIKILLESAKVDSKLICMFQNSDKLL

SEQ ID NO: 95017 - protein, 52 aa, Homo sapiens
MALDGPEQMELEEGKAGSGLRQYYLSKIEELQFAYCGRSYSCCRSRAPMWGK

SEQ ID NO: 95018 - protein, 998 aa, Homo sapiens
MRYRLAWLLHPALPSTFRSVLGARLPPPERLCGFQKKTYSKMNNPAIKRIGNHITKSPEDKREYRGLELANGIKVLLISDPTTDKSSAALDVHIGSLSDPPNIAGLSHFCEHMLFLGTKKYPKENEYSQFLSEHAGSSNAFTSGEHTNYYFDVSHEHLEGALDRFAQFFLCPLFDESCKDREVNAVDSEHEKNVMNDAWRLFQLEKATGNPKHPFSKFGTGNKYTLETRPNQEGIDVRQELLKFHSAYYSSNLMAVCVLGRESLDDLTNLVVKLFSEVENKNVPLPEFPEHPFQEEHLKQLYKIVPIKDIRNLYVTFPIPDLQKYYKSNPGHYLGHLIGHEGPGSLLSELKSKGWVNTLVGGQKEGARGFMFFIINVDLTEEGLLHVEDIILHMFQYIQKLRAEGPQEWVFQECKDLNAVAFRFKDKERPRGYTSKIAGILHYYPLEEVLTAEYLLEEFRPDLIEMVLDKLRPENVRVAIVSKSFEGKTDRTEEWYGTQYKQEAIPDEVIKKWQNADLNGKFKLPTKNEFIPTNFEILPLEKEATPYPALIKDTAMSKLWFKQDDKFFLPKACLNFEFFSPFAYVDPLHCNMAYLYLELLKDSLNEYAYAAELAGLSYDLQNTIYGMYLSVKGYNDKQPILLKKIIEKMATFEIDEKRFEIIKEAYMRSLNNFRAEQPHQHAMYYLRLLMTEVAWTKDELKEALDDVTLPRLKAFIPQLLSRLHIEALLHGNITKQAALGIMQMVEDTLIEHAHTKPLLPSQLVRYREVQLPDRGWFVYQQRNEVHNNCGIEIYYQTDMQSTSENMFLELFCQIISEPCFNTLRTKEQLGAGHGKWMLWMVLPFEELTVKSGWQACYIVFSGPRRANGIQGLRFIIQSEKPPHYLESRVEAFLITMEKSIEDMTEEAFQKHIQALAIRRLDKPKKLSAECAKYWGEIISQQYNFDRDNTEVAYLKTLTKEDIIKFYKPEVIQNMTEFKRGLPLFPLVKPHINFMAAKL

SEQ ID NO: 95019 - protein, 131 aa, Homo sapiens
MESGSTAASEEARSLRECELYVQKHNIQALLKDSIVQLCTARPERPMAFLREYFERLEKEEAKQIQNLQKAGTRTDSREDEISPPPPNPVVKGRRRRGAISAEVYTEEDAASYVRKFFSRLYQKITRQWPL

SEQ ID NO: 95020 - protein, 202 aa, Homo sapiens
MSAAWIPALGLGVCLLLLPGPAGSEGAGKRLKKTPEKKTGNKDCKADIAFLIDGSFNIGQRRFNLQKNFVGKVALMLGIGTEGPHVGLVQASEHPKIEFYLKNFTSAKDVLFAIKEVGFRGGNSNTGKALKHTAQKFFTVDAGVRKGIPKVVVVFIDGWPSDDIEEAGIVAREFGVNVFIVSVAKPIPEELGMVQDVTFVDK

SEQ ID NO: 95021 - protein, 192 aa, Homo sapiens
MKVTLSALDTSESSFTPLVVIELAQDVKEETKEWLKNRIIAKKKDGGAQLLFRPLLNKYEQETLENQNLYLVGASKIRMLLGAEAVGLVKECNDNTMRAFTYRTRQNFKGFDDNNDDFLTMAECQFIIKHELENLRAKDEKMIPGYPQAKLYPGKSLFQLPQLLCLTLLYCLCLERYEAFAPELGHSPNYLP

SEQ ID NO: 95022 - protein, 279 aa, Homo sapiens
  MOD_RES (1)..(1): Any amino acid
XMTHLQKEVTAIETKLEQKRSDRHNLLQACKMQDIKLPLSKGTMDDISQEEGSSQGEDSVSGSQRISSIYAREALIEIDYGDLCEDLKDAQAEEEIKQEMNTLQQKLNEQQSVLQRIAAPNMKAMEKLESVRDKFQETSDEFEAARKRAKKAKQAFEQIKKERFDRFNACFESVATNIDEIYKALSRNSSAQAFLGPENPEEPYLDGINYNCVAPGKRFRPMDNLSGGEKTVAALALLFAIHRWQITSRSSRLATSRPSSSLSRRSSTPRPRASLESIL

SEQ ID NO: 95023 - protein, 243 aa, Homo sapiens
MALLVRVLRNQTSISQWVPVCSRLIPVSPTQGQGDRALSRTSQVPWLETSASEWHPQWPQMSQSRACGGSEQIPGIDIQLNRKYHTTRKLSTTKDSPQPVEEKVGAFTKIIEAMGFTGPLKYSKWKIKIAALRMYTSCVEKTDFEEFFLRCQMPDTFNSWFLITLLHVWMCLVRMKQEGRSGKYMCRIIVHFMWEDVQQRGRVMGVNPYILKKNMILMTNHFYAAILGYDEGILSDDHGLAAA

SEQ ID NO: 95024 - protein, 733 aa, Homo sapiens
  MOD_RES (1)..(1): Any amino acid
XTCCSRPPPSLSLWTVMKSGPEIVKAGLRSFFESASEDIEKMVENLRLGKVSQARTQVKGVGQNLTYTTVALLPVLTTLFQHIAQHQFGDDVILDDVQVSCYRTLCSIYSLGTTKNTYVEKLRPALGECLARLAAAMPVAFLEPQLNEYNACSVYTTKSPRERAILGLPNSVEEMCPDIPVLERLMADIGGLAESGARYTEMPHVIEITLPMLCSYLPRWWERGPEAPPSALPAGAPPPCTAVTSDHLNSLLGNILRIIVNNLGIDEASWMKRLAVFAQPIVSRARPELLQSHFIPTIGRLRKRAGKVVSEEEQLRLEAKAEAQEGELLVRDEFSVLCRDLYALYPLLIRYVDNNRAQWLTEPNPSAEELFRMVGEIFIYWSKSHNFKREEQNFVVQNEINNMSFLTADNKSKMAKAGDIQSGGSDQERTKKKRRGDRYSVQTSLIVATLKKMLPIGLNMCAPTDQDLITLAKTRYALKDTDEEVREFLHNNLHLQGKVEGSPSLRWQMALYRGVPGREEDADDPEKIVRRVQEVSAVLYYLDQTEHPYKSKKAVWHKLLSKQRRRAVVACFRMTPLYNLPTHRACNMFLESYKAAWILTEDHSFEDRMIDDLSKAGEQEEEEEEVEEKKPDPLHQLVLHFSRTALTEKSKLDEDYLYMAYADIMAKSCHLEEGGENGEAEEEVEVSFEEKQMEKQRLLYQQARLHTRGAAEMVLQMISACKGETGAMVSSTL

SEQ ID NO: 95025 - protein, 43 aa, Homo sapiens
MIEDSGKRGNTMAERRQLFAEMRAQDLDRIRLSTYRTACKLRF

SEQ ID NO: 95026 - protein, 121 aa, Homo sapiens
RPLGKSPSEPAHPEATTPGKRVDSKIRVPVRYCMLGSRDLARNPHTLVEVTSFAAINKFQPFNVAVSSNVLFLLVCGPPCLGARGSGAQSVGSGRGSPAYQLHESWGLVCFVCYWYTVGAQ

SEQ ID NO: 95027 - protein, 279 aa, Homo sapiens
MASGDFCSPGEGMEILQQVCSKQLPPCNLSKEDLLQNPYFSKLLLNLSQHVDESGLSLTLAKEQAQAWKEVRLHKTTWLRSEILHRVIQELLVDYYVKIQDTNVTSEDKKFHETLEQRLLVTELMRLLGPSQEREIPPLLGLEKADLLELMPLSEDFVWMRARLQQEVEEQLKKKCFTLLCYYDPNSDADSETVKAAKVWKLAEVLVGEQQQCQDAKSQQKEQMLLLEKKSAAYSQVLLRCLTLLQRLLQEHRLKTQSELDRINAQYLEVKCGAMILKL

SEQ ID NO: 95028 - protein, 194 aa, Homo sapiens
  MOD_RES (1)..(1): Any amino acid
XSFVGSDPSQFCGQQGSPLGRPPGQREFVSSGRSLRLTFRTQPSSENKTAHLHKGFLALYQTVVCGRPVTPIAQNQTTLGSSRAKLGNFPWQAFTSIHGRGGGALLGDRWILTAAHTIYPKDSVSLRKNQSVNVFLGHTAIDEMLKLGNHPVHRVVVHPDYRQNESHNFSGDIALLELQHSIPLGPNVLPVCLP

SEQ ID NO: 95029 - protein, 68 aa, Homo sapiens
MPGRHVSRVRALYKRVLQLHRVLPPDLKSLGDQYVKDEFRRHKTVGSDEAQRFLQEWEGMSRNLDACI

SEQ ID NO: 95030 - protein, 209 aa, Homo sapiens
MEAQAQGLLETEPLQGTDEDAVASADFSSMLSEEEKEELKAELVQLEDEITTLRQVLSAKERHLVEIKQKLGMNLMNELKQNFSKSWHDMQTTTAYKKTHETLSHAGQKATAAFSNVGTAISKKFGDMRSHSIGYSIRHSISMPAMRNSPTFKSFEERVETTVTSLKTKVGGTNPNGGSFEEVLSSTAHASAQSLAGGSRRTKEEELQC

SEQ ID NO: 95031 - protein, 63 aa, Homo sapiens
MSDQQLDCALDLMRRLPPQQIEKNLSDLIDLGCACSCFYENLVNWLPCCPCGFSLGSTGKLQH

SEQ ID NO: 95032 - protein, 128 aa, Homo sapiens
MANGGGGGGGSSGGGGGGGGSSLRMSSNIHANHLSLDASSSSSSSSSSSSSSSSSSSSSSVHEPKMDALIIPVTMEVPCDSRGQRMWWAFLASSMVTFFGGLFIILLWRTLKYLWTVCCHCGGKTKVL

SEQ ID NO: 95033 - protein, 69 aa, Homo sapiens
MSLKMDNRDVAGKANRWFGVAPPKSGKMNMNILHQEELIAQKKREIEAKMEQKAKQNQVASPQPPHPGE

SEQ ID NO: 95034 - protein, 98 aa, Homo sapiens
MEKRTCALCPKDVEYNVLYFAQSENIAAHENCLLYSSGLVECEDQDPLNPDRSFDVESVKKEIQRGRKLKCKFCHKRGATVGCDLKNCNKNYHFFCAK

SEQ ID NO: 95035 - protein, 110 aa, Homo sapiens
  MOD_RES (1)..(1): Any amino acid
XEEAPENMVQLLGELMNQSHMSCRDMYECSCPELDQLVDICRKFGAQGSRLTGAGWGGCTVSMVPADKLPSFLANVHKAYYQRSDGSLAPEKQSLFATKPGASERYENNT

SEQ ID NO: 95036 - protein, 310 aa, Homo sapiens
MEEDSLEDSNLPPKVWHSEMTVSVTGEPPSTVEEEGIPKETDIEIIPEIPETLEPLSLPDVLRISAVLEDTTDQLSILNYIMPVQYEGRQSICVKSREMNLEGTNLDKLPMASTITKIPSPLITEEGPNLPEIRHRGRFAVEFNKMQDLVFKKPTRQTIMTTETLKKIQIDRQFFSDVIADTIKELQDSATYNSLLQALSKERENKMHFYDIIAREEKGRKQIISLQKQLINVKKEWQFEVQSQNEYIANLKDQLQEMKAKSNLENRYMKTNTELQIAQTQKKCNRTEELLVEEIEVIPGTLAKNPGDGN

SEQ ID NO: 95037 - protein, 639 aa, Homo sapiens
MSVEGTTPPIEADTLDSSDAQGGLEPRVEKTRPEPTEVLHACKTQVAELELWLQQANVAVEPETLNADMQQVLEQQLVGCQAMLTEIEHKVAFLLETCKDQGLGDNGATQHEAEALSLKLKTVKCNLEKVQMMLQEKHSEDQHPTILKKSSEPEHQEALQPVNLSELESIVTERPQFSRQKDFQQQQVLELKPMEQKDFIKFIEFNAKKMWPQYCQHDNDTTQESSASNQASSPENDVPDSILSPQGQNGDKWQYLHHELSSKIKLPLPQLVEPQVSTNMGILPSVTMYNFRYPTTEELKTYTTQLEDLRQEASNLQTQENMTEEAYINLDKKLFELFLTLSQCLSSVEEMLEMPRLYREDGSGQQVHYETLALELKKLYLALSDKKGDLLKAMTWPGENTNLLLECFDNLQVCLEHTQAAAVCRSKSLKAGLDYNRSYQNEIKRLYHQLIKSKTSLQQSLNEISGQSVAEQLQKADAYTVELENAESRVAKLRDEGERLHLPYALLQEVYKLEDVLDSMWGMLRARYTELSSPFVTESQQDALLQGMVELVKIGKEKLAHGHLKQTKSKVALQAQIENHKVFFQKLVADMLLIQAYSAKILPSLLQNRETFWAEQVTEVKILEEKSRQCGMKLQSLLQ

SEQ ID NO: 95038 - protein, 803 aa, Homo sapiens
DAFVNSQEWTLSRSVPELKVGIVGNLASGKSALVHRYLTGTYVQEESPEGGRFKKEIVVDGQSYLLLIRDEGGPPEAQFAMWVDAVIFVFSLEDEISFQTVYHYYSRMANYRNTSEIPLVLVGTQDAISSANPRVIDDARARKLSNDLKRCTYYETCATYGLNVERVFQDVAQKIVATRKKQQLSIGPCKSLPNSPSHSSVCSAQVSAVHISQTSNGGGSLSDYSSSVPSTPSTSQKELRIDVPPTANTPTPVRKQSKRRSNLFTSRKGSDPDKEKKGLESRADSIGSGRAIPIKQGMLLKRSGKSLNKEWKKKYVTLCDNGVLTYHPSLHDYMQNVHGKEIDLLRTTVKVPGKRPPRATSACAPISSPKTNGLSKDMSSLHISPNSGNVTSASGSQMASGISLVSFNSRPDGMHQRSYSVSSADQWSEATVIANSAISSDTGLGDSVCSSPSISSTTSPKLDPPPSPHANRKKHRRKKSTSNFKADGLSGTAEEQEENFEFIIVSLTGQTWHFEATTYEERDAWVQAIESQILASLQSCESSKNKSRLTSQSEAMALQSIRNMRGNSHCVDCETQNPNWASLNLGALMCIECSGIHRNLGTHLSRVRSLDLDDWPVELIKVMSSIGNELANSVWEESSQGRTKPSVDSTREEKERWIRAKYEQKLFLAPLPCTELSLGQHLLRATADEDLRTAILLLAHGSRDEVNETCGEGDGRTALHLACRKGNVVLAQLLIWYGVDVTARDAHGNTALAYARQASSQECIDVLLQYGCPDERFVLMATPNLSRRNNNRNNSSGRVPTII

SEQ ID NO: 95039 - protein, 1129 aa, Homo sapiens
MFRRSLNRFCAGEEKRVGTRTVFVGNHPVSETEAYIAQRFCDNRIVSSKYTLWNFLPKNLFEQFRRIANFYFLIIFLVQVTVDTPTSPVTSGLPLFFVITVTAIKQGYEDCLRHRADNEVNKSTVYIIENAKRVRKESEKIKVGDVVEVQADETFPCDLILLSSCTTDGTCYVTTASLDGESNCKTHYAVRDTIALCTAESIDTLRAAIECEQPQPDLYKFVGRINIYSNSLEAVARSLGPENLLLKGATLKNTEKIYGVAVYTGMETKMALNYQGKSQKRSAVEKSINAFLIVYLFILLTKAAVCTTLKYVWQSTPYNDEPWYNQKTQKERETLKVLKMFTDFLSFMVLFNFIIPVSMYVTVEMQKFLGSFFISWDKDFYDEEINEGALVNTSDLNEELGQVDYVFTDKTGTLTENSMEFIECCIDGHKYKGVTQEVDGLSQTDGTLTYFDKVDKNREELFLRALCLCHTVEIKTNDAVDGATESAELTYISSSPDEIALVKGAKRYGFTFLGNRNGYMRVENQRKEIEEYELLHTLNFDAVRRRMSVIVKTQEGDILLFCKGADSAVFPRVQNHEIELTKVHVERNAMDGYRTLCVAFKEIAPDDYERINRQLIEAKMALQDREEKMEKVFDDIETNMNLIGATAVEDKLQDQAAETIEALHAAGLKVWVLTGDKMETAKSTCYACRLFQTNTELLELTTKTIEESERKEDRLHELLIEYRKKLLHEFPKSTRSFKKAWTEHQEYGLIIDGSTLSLILNSSQDSSSNNYKSIFLQICMKCTAVLCCRMAPLQKAQIVRMVKNLKGSPITLSIGDGANDVSMILESHVGIGIKGKEGRQAARNSDYSVPKFKHLKKLLLAHGHLYYVRIAHLVQYFFYKNLCFILPQFLYQFFCGFSQQPLYDAAYLTMYNICFTSLPILAYSLLEQHINIDTLTSDPRLYMKISGNAMLQLGPFLYWTFLAAFEGTVFFFGTYFLFQTASLEENGKVYGNWTFGTIVFTVLVFTVTLKLALDTRFWTWINHFVIWGSLAFYVFFSFFWGGIIWPFLKQQRMYFVFAQMLSSVSTWLAIILLIFISLFPEILLIVLKNVRRRSARRNLSCRRASDSLSARPSVRPLLLRTFSDESNVL

SEQ ID NO: 95040 - protein, 129 aa, Homo sapiens [sequence omitted]

SEQ ID NO: 95041 - protein, 1248 aa, Homo sapiens
MNTSVYSILHVGDHAEFVKNLLPKSLVNGVPWPQEATRRNSHTFNCRMLIHPPDEPGTENQEACQRYEVMQCFTVSQPKSIQEDGEDFQSCLICIARRLPRPPAITGVESFMTKQDTTGKIISIDTSSLRAAGRTGWEDLVRKCIYAFFQPQGREPSYARQLFQEVMTRGTASSPSYRFILNDGTMLSAHTKCKLCYPQSPDMQPFIMGIHIIDREHSGLSPQDDTNSGMSIPRVNPSVNPSISPAHGVARSSTLPPSNSNMVSTRINRQQSSDLHSSSHSNSSNSQGSFGCSPGSQIVANVALNQGQASSQSSNPSLNLNNSPMEGTGISLAQFMSPRRQVTSGLATRPRMPNNSFPPNISTLSSPVGMTSSACNNNNRSYSNIPVTSLQGMNEGPNNSVGFSASSPVLRQMSSQNSPSRLNIQPAKAESKDNKEIASILNEMIQSDNSSSDGKPLDSGLLHNNDRLSDGDSKYSQTSHKLVQLLTTTAEQQLRHADIDTSCKDVLSCTGTSNSASANSSGGSCPSSHSSLTERHKILHRLLQEGSPSDITTLSVEPDKKDSASTSVSVTGQVQGNSSIKLELDASKKKESKDHQLLRYLLDKDEKDLRSTPNLSLDDVKVKVEKKEQMDPCNTNPTPMTKPTPEEIKLEAQSQFTADLDQFDQLLPTLEKAAQLPGLCETDRMDGAVTSVTIKSEILPASLQSATARPTSRLNRLPELELEAIDNQFGQPGTGDQIPWTNNTVTAINQSKSEDQCISSQLDELLCPPTTVEGRNDEKALLEQLVSFLSGKDETELAELDRALGIDKLVQGGGLDVLSERFPPQQATPPLIMEERPNLYSQPYSSPSPTANLPSPFQGMVRQKPSLGTMPVQVTPPRGAFSPGMGMQPRQTLNRPPAAPNQLRLQLQQRLQGQQQLIHQNRQAILNQFAATAPVGINMRSGMQQQITPQPPLNAQMLAQRQRELYSQQHRQRQLIQQQRAMLMRQQSFGNNLPPSSGLPVQMGNPRLPQGAPQQFPYPPNYGTNPGTPPASTSPFSQLAANPEASLANRNSMVSRGMTGNIGGQFGTGINPQMQQNVFQYPGAGMVPQGEANFAPSLSPGSSMVPMPIPPPQSSLLQQTPPASGYQSPDMKAWQQGAIGNNNVFSQAVQNQPTPAQPGVYNNMSITVSMAGGNTNVQNMNPMMAQMQMSSLQMPGMNTVCPEQINDPALRHTGLYCNQLSSTDLLKTEADGTQDKKTEEFFSVVTTD

SEQ ID NO: 95042 - protein, 145 aa, Homo sapiens
  MOD_RES (1)..(1): Any amino acid
XALGTAPSGETVPAMSAAMRERFDRFLHEKNCMTDLLAKLEAKTGVNRSFIALGVIGLVALYLVFGYGASLLCNLIGFGYPAYISIKAIESPNKEDDTQWLTYWVVYGVFSIAEFFSDIFLSWFPFYYMLKVWSGLGFLLPRCLL

SEQ ID NO: 95043 - protein, 209 aa, Homo sapiens; identical to SEQ ID NO: 43167

SEQ ID NO: 95044 - protein, 139 aa, Homo sapiens
MVLLSTLGIVFQGEGPPISSCDTGTMANCERTFIAIKPDGVQRGLVGEIIKRFEQKGFRLVGLKFMQASEDLLKEHYVDLKDRPFFAGLVKYMHSGPVVAMVWEGLNVVKTGRVMLGETNPADSKPGTIRGDFCIQVGR

SEQ ID NO: 95045 - protein, 87 aa, Homo sapiens
MLDHKDLEAEIHPLKNEERKSQENLGNPSKNEDNVKSAPPQSRLSRCRAAAFFLSLFLCLFVVFVVSFVIPCPDRPASQRMWRIDYS

SEQ ID NO: 95046 - protein, 122 aa, Homo sapiens
MGAPGGKINRPRTELKKKLFKRRRVLNRERRLRHRVVGAVIDQGLITRHHLKKRASSARANITLSGKKRRKLLQQIRLAQKEKTAMEGEAGTEVGEGNPGFIWDNTSFFPLLSGSPFKASQD

SEQ ID NO: 95047 - protein, 773 aa, Homo sapiens
MADNLDEFIEEQKARLAEDKAELESDPPYMEMKGKLSAKLSENSKILISMAKENIPPNSQQTRGSLGIDYGLSLPLGEDYERKKHKLKEELRQDYRRYLTQERLKLERNKEYNQFLRGKEESSEKFRQVEKSTEPKSQRNKKPIGQVKPDLTSQIQTSCENSEGPRKDVLTPSEAYEELLNQRRLEEDRYRQLDDEIELRNRRIIKKANEEVGISNLKHQRFASKAGIPDRRFHRFNEDRVFDRRYHRPDQDPEVSEEMDERFRYESDFDRRLSRVYTNDRMHRNKRGNMPPMEHDGDVIEQSNIRISSAENKSAPDNETSKSANQDTCSPFAGMLFGGEDRELIQRRKEKYRLELLEQMAEQQRNKRREKDLELRVAASGAQDPEKSWNELLTSLQLSKEEPDRLKQFSVAPRHFEEMIPPERPRIAFQTPLPPLSAPSVPPIPSVHPVPSQNEDLRSGLSSALGEMVSPRIAPLPPPPLLPPLATNYRTPYDDAYYFYGSRNTFDPSLAYYGSGMMGVQPAAYVSAPVTHQLAQPVVNTVGQNELKITSDQVINSGLIFEDKPKPSKQSLQSYQEALQQQIREREERRKKEREEKEEYEAKLEAEMRTYNPWGKGGGGAPLRDAKGNLITDLNRMHRQNIDAYHNPDARTYEDKRAVVSLDPNLATSNAENLEDAANKSSGHMQTQSSPFARGNVFGEPPTELQIKQQELYKNFLRFQIEEKKQREEAERERLRIAEEKEERRLAEQRARIQQEYEEEQEKKREKEEEAKK

SEQ ID NO: 95048 - protein, 227 aa, Homo sapiens
MKKISLKTLRKSFNLNKSKEETDFMVVQQPSLASDFGKDDSLFGSCYGKDMASCDINGEDEKGGKNRSKSESLMGTLKRRLSAKQKSKGKAGTPSGSSADEDTFSSSSAPIVFKDVRAQRPIRSTSLRSHHYSPAPWPLRPTNSEETCIKMEVRVKALVHSSSPSPALNGVRKDFHDLQSETTCQEQANSLKSSASHNGDLHLHLDEHVPVVIGLMPQDYIQYTVPL

SEQ ID NO: 95049 - protein, 228 aa, Homo sapiens
MVGQPQPRDDVGSPRPRVIVGTIRPRVIVGTIRPRVIVGSARARPPPDGTPRPQLAAEESPRPRVIFGTPRARVILGSPRPRVIVSSPWPAVVVASPRPRTPVGSPWPRVVVGTPRPRVIVGSPRARVADADPASAPSQGALQGRRQDEHSGTRAEGSRPGGAAPGSAKTPLIRITRPPLEWTSRWNDLRCWAFPSVCSFGIPLGRRGSNALHQPTIEELKPSSLSST

SEQ ID NO: 95050 - protein, 14 aa, Homo sapiens
AAFGAHDFHRIYIS

SEQ ID NO: 95051 - protein, 7 aa, Homo sapiens
MAGYKPV

SEQ ID NO: 95052 - protein, 41 aa, Homo sapiens
  MOD_RES (1)..(1): Any amino acid
XACRALVDELEWEIAQVDPKKTIQMGSFRINPDGSQSVVER

SEQ ID NO: 95053 - protein, 87 aa, Homo sapiens
MSLFGTTSGFGTSGTSMFGSATTDNHNPMKDIEVTSSPDDSIGCLSFSPPTLPGNFLIAGSWANDVRCWEVQDSGQTIPKAQQMHTG

SEQ ID NO: 95054 - protein, 120 aa, Homo sapiens
  MOD_RES (1)..(1): Any amino acid
XWDDFSKAVSQALTNHFQAISSDGWWSLEDVTCNNTTDSNIGLSARSIRSITLGNVPWSVGQSFAQSPWDFMRKNKAEHITVLLSGPQEGCLSSVTYASMIPLQMMQNYLRLMGKLNRER

SEQ ID NO: 95055 - protein, 102 aa, Homo sapiens
MSSLGGGSQDAGGSSSSSTNGSGGSGSSGPKAGAADKSAVVAAAAPASVADDTPPPERRNKSGIISEPLNKSLRRSRPLSHYSSFGSSGGSGGGSMMGGESA

SEQ ID NO: 95056 - protein, 219 aa, Homo sapiens
  MOD_RES (1)..(1): Any amino acid
XELCTGCGSRLRSPFSFVYLPRWFSSVLASCPKKPVSSYLRFSKEQLPIFKAQNPDAKTTELIRRIAQRWRELPDSKKKIYQDAYRAEWQVYKEEISRFKEQLTPSQIMSLEKEIMDKHLKRKAMTKKKELTLLGKPKRPRSAYNVYVAERFQEAKGDSPQEKLKTVKENWKNLSDSEKEVSITVVSLKCLLRISVRECIRARLDSCEDNLVLLIIQVF

SEQ ID NO: 95057 - protein, 155 aa, Homo sapiens
  MOD_RES (1)..(1): Any amino acid
XDTLFCKYQLPAPPESSSILYKVFAVTRDGRILAAGGKSNHLHLWCLEARQLFRIIQMPTKVRAIRHLEFLPDSFDAGSNQVLGVLSQDGIMRFINMQTCKLLFEIGSLDEGISSSAISPHGRYIASIMENGSLNIYSVQALTQEINKEEVRAQN

SEQ ID NO: 95058 - protein, 216 aa, Homo sapiens
MPVKGGTKCIKYLLFGFNFIFWLAGIAVLAIGLWLRFDSQTKSIFEQETNNNNSSFYTGVYILIGAGALMMLVGFLGCCGAVQESQCMLGLFFGFLLVIFAIEIAAAIWGYSHKDEVIKEVQEFYKDTYNKLKTKDEPQRETLKAIHYALNCCGLAGGVEQFISDICPKKDVLETFTVKVNSDQDPGVPAPIALDKPCKHESDSSQVLLQQDPFCL

SEQ ID NO: 95059 - protein, 105 aa, Homo sapiens
  MOD_RES (1)..(1): Any amino acid
XNNFITDIHPLQSCIKLIKLDLHGNQGTTYEEEINNIKHITSKINAILAHNSPVLIVQRWIRGFLVRKNLRLLQSSEFKDCLKMCPRKREKKNIFFLIFKLIEKY

SEQ ID NO: 95060 - protein, 115 aa, Homo sapiens
MVSGRFYLSCLLLGSLGSMCILFTIYWMQYWRGGFAWNGSIYMFNWHPVLMVAGMVVFYGGASLVYRLPQSWVGPKLPWKLLHAALHLMAFVLTVVGLVAVFTFHNHGRTANLYS

SEQ ID NO: 95061 - protein, 44 aa, Homo sapiens
  MOD_RES (1)..(1): Any amino acid
XFNTKMADGPDEYDTEAGCVPLLHPENGLARCGPLHLGLLSLQN

SEQ ID NO: 95062 - protein, 3889 aa, Homo sapiens
MEDEERQKKLEAGKAKLAQFRQRKAQSDGQSPSKKQKKKRKTSSSKHDVSAHHDLNIDQSQCNEMYINSSQRVESTVIPESTIMRTLHSGEITSHEQGFSVELESEISTTADDCSSEEEEFGVDDSYSEQGAQDSPTHLEMMESELAGKQHEIEELNRELEEMRVTYGTEGLQQLQEFEAAIKQRDGIITQLTANLQQARREKDETMREFLELTEQSQKLQIQFQQLQASETLRNSTHSSTAADLLQAKQQILTHQQQLEEQDHLLEDYQKKKEDFTMQISFLQEKIKVYEMEQDKKVENSNKEEIQEKETIIEELNTKIIEEEKKTLELKDKLTTADKLLGELQEQIVQKNQEIKNMKLELTNSKQKERQSSEEIKQLMGTVEELQKRNHKDSQFETDIVQRMEQETQRKLEQLRAELDEMYGQQIVQMKQELIRQHMAQMEEMKTRHKGEMENALRSYSNITVNEDQIKLMNVAINELNIKLQDTNSQKEKLKEELGLILEEKCALQRQLEDLVEELSFSREQIQRARQTIAEQESKLNEAHKSLSTVEDLKAEIVSASESRKELELKHEAEVTNYKIKLEMLEKEKNAVLDRMAESQEAELERLRTQLLFSHEEELSKLKEDLEIEHRINIEKLKDNLGIHYKQQIDGLQNEMSQKIETMQFEKDNLITKQNQLILEISKLKDLQQSLVNSKSEEMTLQINELQKEIEILRQEEKEKGTLEQEVQELQLKTELLEKQMKEKENDLQEKFAQLEAENSILKDEKKTLEDMLKIHTPVSQEERLIFLDSIKSKSKDSVWEKEIEILIEENEDLKQQCIQLNEEIEKQRNTFSFAEKNFEVNYQELQEEYACLLKVKDDLEDSKNKQELEYKSKLKALNEELHLQRINPTTVKMKSSVFDEDKTFVAETLEMGEVVEKDTTELMEKLEVTKREKLELSQRLSDLSEQLKQKHGEISFLNEEVKSLKQEKEQVSLRCRELEIIINHNRAENVQSCDTQVSSLLDGVVTMTSRGAEGSVSKVNKSFGEESKIMVEDKVSFENMTVGEESKQEQLILDHLPSVTKESSLRATQPSENDKLQKELNVLKSEQNDLRLQMEAQRICLSLVYSTHVDQVREYMENEKDKALCSLKEELIFAQEEKIKELQKIHQLELQTMKTQETGDEGKPLHLLIGKLQKAVSEECSYFLQTLCSVLGEYYTPALKCEVNAEDKENSGDYISENEDPELQDYRYEVQDFQENMHTLLNKVTEEYNKLLVLQTRLSKIWGQQTDGMKLEFGEENLPKEETEFLSIHSQMTNLEDIDVNHKSKLSSLQDLEKTKLEEQVQELESLISSLQQQLKETEQNYEAEIHCLQKRLQAVSESTVPPSLPVDSVVITESDAQRTMYPGSCVKKNIDGTIEFSGEFGVKEETNIVKLLEKQYQEQLEEEVAKVIVSMSIAFAQQTELSRISGGKENTASSKQAHAVCQQEQHYFNEMKLSQDQIGFQTFETVDVKFKEEFKPLSKELGEHGKEILLSNSDPHDIPESKDCVLTISEEMFSKDKTFIVRQSIHDEISVSSMDASRQLMLNEEQLEDMRQELVRQYQEHQQATELLRQAHMRQMERQREDQEQLQEEIKRLNRQLAQRSSIDNENLVSERERVLLEELEALKQLSLAGREKLCCELRNSSTQTQNGNENQGEVEEQTFKEKELDRKPEDVPPEILSNERYALQKANNRLLKILLEVVKTTAAVEETIGRHVLGILDRSSKSQSSASLIWRSEAEASVKSCVHEEHTRVTDESIPSYSGSDMPRNDINMWSKVTEEGTELSQRLVRSGFAGTEIDPENEELMLNISSRLQAAVEKLLEAISETSSQLEHAKVTQTELMRESFRQKQEATESLKCQEELRERLHEESRAREQLAVELSKAEGVIDGYADEKTLFERQIQEKTDIIDRLEQELLCASNRLQELEAEQQQIQEERELLSRQKEAMKAEAGPVEQQLLQETEKLMKEKLEVQCQAEKVRDDLQKQVKALEIDVEEQVSRFIELEQEKNTELMDLRQQNQALEKQLEKMRKFLDEQAIDREHERDVFQQEIQKLEQQLKVVPRFQPISEHQTREVEQLANHLKEKTDKCSELLLSKEQLQRDIQERNEEIEKLEFRVRELEQALLVSADTFQKVEDRKHFGAVEAKPELSLEVQLQAERDAIDRKEKEITNLEEQLEQFREELENKNEEVQQLHMQLEIQKKESTTRLQELEQENKLFKDDMEKLGLAIKESDAMSTQDQHVLFGKFAQIIQEKEVEIDQLNEQVTKLQQQLKITTDNKVIEEKNELIRDLETQIECLMSDQECVKRNREEEIEQLNEVIEKLQQELANIGQKTSMNAHSLSEEADSLKHQLDVVIAEKLALEQQVETANEEMTFMKNVLKETNFKMNQLTQELFSLKRERESVEKIQSIPENSVNVAIDHLSKDKPELEVVLTEDALKSLENQTYFKSFEENGKGSIINLETRLLQLESTVSAKDLELTQCYKQIKDMQEQGQFETEMLQKKIVNLQKIVEEKVAAALVSQIQLEAVQEYAKFCQDNQTISSEPERTNIQNLNQLREDELGSDISALTLRISELESQVVEMHTSLILEKEQVEIAEKNVLEKEKKLLELQKLLEGNEKKQREKEKKRSPQDVEVLKTTTELFHSNEESGFFNELEALRAESVATKAELASYKEKAEKLQEELLVKETNMTSLQKDLSQVRDHLAEAKEKLSILEKEDETEVQESKKACMFEPLPIKLSKSIASQTDGTLKISSSNQTPQILVKNAGIQINLQSECSSEEVTEIISQFTEKIEKMQELHAAEILDMESRHISETETLKREHYVAVQLLKEECGTLKAVIQCLRSKEGSSIPELAHSDAYQTREICSSDSGSDWGQGIYLTHSQGFDIASEGRGEESESATDSFPKKIKGLLRAVHNEGMQVLSLTESPYSDGEDHSIQQVSEPWLEERKAYINTISSLKDLITKMQLQREAEVYDSSQSHESFSDWRGELLLALQQVFLEERSVLLAAFRTELTALGTTDAVGLLNCLEQRIQEQGVEYQAAMECLQKADRRSLLSEIQALHAQMNGRKITLKREQESEKPSQELLEYNIQQKQSQMLEMQVELSSMKDRATELQEQLSSEKMVVAELKSELAQTKLELETTLKAQHKHLKELEAFRLEVKDKTDEVHLLNDTLASEQKKSRELQWALEKEKAKLGRSEERDKEELEDLKFSLESQKQRNLQLNLLLEQQKQLLNESQQKIESQRMLYDAQLSEEQGRNLELQVLLESEKVRIREMSSTLDRERELHAQLQSSDGTGQSRPPLPSEDLLKELQKQLEEKHSRIVELLNETEKYKLDSLQTRQQMEKDRQVHRKTLQTEQEANTEGQKKMHELQSKVEDLQRQLEEKRQQVYKLDLEGQRLQGIMQEFQKQELEREEKRESRRILYQNLNEPTTWSLTSDRTRNWVLQQKIEGETKESNYAKLIEMNGGGTGCNHELEMIRQKLQCVASKLQVLPQKASERLQFETADDEDFIWVQENIDEIILQLQKLTGQQGEEPSLVSPSTSCGSLTERLLRQNAELTGHISQLTEEKNDLRNMVMKLEEQIRWYRQTGAGRDNSSRFSLNGGANIEAIIASEKEVWNREKLTLQKSLKRAEAEVYKLKAELRNDSLLQTLSPDSEHVTLKRIYGKYLRAESFRKALIYQKKYLLLLLGGFQECEDATLALLARMGGQPAFTDLEVITNRPKGFTRFRSAVRVSIAISRMKFLVRRWHRVTGSVSININRDGFGLNQGAEKTDSFYHSSGGLELYGEPRHTTYRSRSDLDYIRSPLPFQNRYPGTPADFNPGSLACSQLQNYDPDRALTDYITRLEALQRRLGTIQSGSTTQFHAGMRR

SEQ ID NO: 95063 - protein, 58 aa, Homo sapiens
LLAALDWLCQRLLPPPAALAVLAAAGWIALSRLARPQRLPVATRAVLITGAWIPSRPW

SEQ ID NO: 95064 - protein, 352 aa, Homo sapiens
  MOD_RES (324)..(324): Any amino acid
MSDRPTARRWGKCGPLCTRENIMVAFKGVWTQAFWKAVTAEFLAMLIFVLLSLGSTINWGGTEKPLPVDMVLISLCFGLSIATMVQCFGHISGGHINPAVTVAMVCTRKISIAKSVFYIAAQCLGAIIGAGILYLVTPPSVVGGLGVTMVHGNLTAGHGLLVELIITFQLVFTIFASCDSKRTDVTGSIALAIGFSVAIGHLFAINYTGASMNPARSFGPAVIMGNWENHWIYWVGPIIGAVLAGGLYEYVFCPDVEFKRRFKEAFSKAAQQTKGSYMEVEDNRSQVETDDLILKPGVVHVIDVDRGEEKKGKDQSGEVLSSVXLEDRTESRQDSLELSSDFLPPIKETDLL

SEQ ID NO: 95065 - protein, 285 aa, Homo sapiens
MPLRLDIKRKLTARSDRVKSVDLHPTEPWMLASLYNGSVCVWNHETQTLVKTFEVCDLPVRAAKFVARKNWVVTGADDMQIRVFNYNTLERVHMFEAHSDYIRCIAVHPTQPFILTSSDDMLIKLWDWDKKWSCSQVFEGHTHYVMQIVINPKDNNQFASASLDRTIKVWQLGSSSPNFTLEGHEKGVNCIDYYSGGDKPYLISGADDRLVKIWDYQNKTCVQTLEGHAQNVSCASFHPELPIIITGSEDAWSGGTCHVHGCQWKDNLGQAFRSPAGQPKSNGRC

SEQ ID NO: 95066 - protein, 292 aa, Homo sapiens
MLNLLLLALPVLASRAYAAPAPGQALQRVGIVGGQEAPRSKWPWQVSLRVRDRYWMHFCGGSLIHPQWVLTAAHCVGPDVKDLAALRVQLREQHLYYQDQLLPVSRIIVHPQFYTAQIGADIALLELEEPVNVSSHVHTVTLPPASETFPPGMPCWVTGWGDVDNDERLPPPFPLKQVKVPIMENHICDAKYHLGAYTGDDVRIVRDDMLCAGNTRRDSCQGDSGGPLVCKVNGTWLQAGVVSWGEGCAQPNRPGIYTRVTYYLDWIHHYVPKKPDGVSPCWPVWSRTPDLK

SEQ ID NO: 95067 - protein, 205 aa, Homo sapiens
MRAIQPDAGYYNDLVPPIGMLNNPMNAVTTKFVRTSTNKVKCPVFVVRWTPEGRRLVTGASSGEFTLWNGLTFNFETILQAHDSPVRAMTWSHNDMWMLTADHGGYVKYWQSNMNNVKMFQAHKEAIREASFSPTDNKFATCSDDGTVRIWDFLRCHEERILRGHGADVKCVDWHPTKGLVVSGSKDSQQPIKFWDPKTGQSLAT

SEQ ID NO: 95068 - protein, 245 aa, Homo sapiens
  MOD_RES (1)..(1): Any amino acid
XAGVSVAFGAPIGGVLFSLEEVSYYFPLKTLWRSFFAALVAAFVLRSINPFGVFGGLWGAFFIRANIAWCRRRKSTKFGKYPVLEVIIVAAITAVIAFPNPYTRLNTSELIKELFTDCGPLESSSLCDYRNDMNASKIVDDIPDRPAGIGVYSAIWQLCLALIFKIIMTVFTFGIKVPSGLFIPSMAIGAIAGRIVGIAVEQLAYYHHDWFIFKEWCEVGADCITPGLYAMVGAAACLGGVTRMT

SEQ ID NO: 95069 - protein, 57 aa, Homo sapiens
NCNGSPFANSDACFSLAYAVIMLNTDQHNHNVRKQNAPMTLEVISQKSERCEWRQGL

SEQ ID NO: 95070 - protein, 958 aa, Homo sapiens
MGRAAATAGGGGGARRWLPWLGLCFWAAGTAAARGTDNGEALPESIPSAPGTLPHFIEEPDDAYIIKSNPIALRCKARPAMQIFFKCNGEWVHQNEHVSEETLDESSGLKVREVFINVTRQQVEDFHGPEDYWCQCVAWSHLGTSKSRKASVRIAYLRKNFEQDPQGREVPIEGMIVLHCRPPEGVPAAEVEWLKNEEPIDSEQDENIDTRADHNLIIRQARLSDSGNYTCMAANIVAKRRSLSATVVVYVNGGWSSWTEWSACNVRCGRGWQKRSRTCTNPAPLNGGAFCEGMSVQKITCTSLCPVDGSWEVWSEWSVCSPECEHLRIRECTAPPPRNGGKFCEGLSQESENCTDGLCILDKKPLHEIKPQRWSRRGIENASDIALYSGLGAAVVAVAVLVIGVTLYRRSQSDYGVDVIDSSALTGGFQTFNFKTVRQGNSLLLNSAMQPDLTVSRTYSGPICLQDPLDKELMTESSLFNPLSDIKVKVQSSFMVSLGVSERAEYHGKNHSRTFPHGNNHSFSTMHPRNKMPYIQNLSSLPTRTELRTTGVFGHLGGRLVMPNTGVSLLIPHGAIPEENSWEIYMSINQGEPSLQSDGSEVLLSPEVTCGPPDMIVTTPFALTIPHCADVSSEHWNIHLKKRTQQGKWEEVMSVEDESTSCYCLLDPFACHVLLDSFGTYALTGEPITDCAVKQLKVAVFGCMSCNSLDYNLRVYCVDNTPCAFQEVVSDERHQGGQLLEEPKLLHFKGNTFSLQISVLDIPPFLWRIKPFTACQEVPFSRVWCSNRQPLHCAFSLERYTPTTTQLSCKICIRQLKGHEQILQVQTSILESERETITFFAQEDSTFPAQTGPKAFKIPYSIRQRICATFDTPNAKGKDWQMLAQKNSINRNLSYFATQSSPSAVILNLWEARHQHDGDLDSLACALEEIGRTHTKLSNISESQLDEADFNYSRQNGL

SEQ ID NO: 95071 - protein, 56 aa, Homo sapiens
MCFSFIMPPAMADILDIWAVDSQIASDGSIPVDFLLPTGIYIQLEVPREATISYIK

SEQ ID NO: 95072 - protein, 1294 aa, Homo sapiens [sequence omitted]

SEQ ID NO: 95073 - protein, 96 aa, Homo sapiens
LLITGTEQFNQKPKKGIQFLQEKGLLTIPMDNTEVAQWLRENPRLDKKMIGEFHLQFSGSATGRSPPPLPGSLPFAWGSTSHPEVAGGIHRALDEL

SEQ ID NO: 95074 - protein, 128 aa, Homo sapiens
MSKDEERAVKDELLGEKPEIKQKWASRLLAKLRKDIRPEFREDFVLTITGKKPPCCVLSNPDQKGKIRRIDCLRQADKVWRLDLVMVILFKGIPLESTDGERLYKSPQCSNPGLCVQPHHIGVTIKEL

SEQ ID NO: 95075 - protein, 808 aa, Homo sapiens
MKMAPQNADPESMQVQELSVPLPDPQKAGGAEAENCETISEGSIDRIPMRLWVMHGAVMFGREFCYAMETALVTPILLQIGLPEQYYSLTWFLSPILGLIFTPLIGSASDRCTLSWGRRRPFILALCVGVLFGVALFLNGSAIGLALGDVPNRQPIGIVLTVLGVVVLDFSADATEGPIRAYLLDVVDSEEQDMALNIHAFSAGLGGAIGYVLGGLDWTQTFLGSWFRTQNQVLFFFAAIIFTVSVALHLFSIDEEQYSPQQERSAEEPGALDGGEPHGVPAFPDEVQSEHELALDYPDVDIMRSKSDSALHVPDTALDLEPELLFLHDIEPSIFHDASYPATPRSTSQELAKTKLPRLATFLKEAAKEDETLLDNHLNEAKVPNGSGSPTKDALGGYTRVDTKPSATSSSMRRRRHAFRRQASSTFSYYGKLGSHCYRYRRANAVVLIKPSRSMSDLYDMQKRQRQHRHRNQSGATTSSGDTESEEGEGETTVRLLWLSMLKMPRELMRLCLCHLLTWFSVIAEAVFYTDFMGQVIFEGDPKAPSNSTAWQAYNAGVKMGCWGLVIYAATGAICSALLQKYLDNYDLSVRVIYVLGTLGFSVGTAVMAMFPNVYVAMVTISTMGIVSMSISYCPYALLGQYHDIKQYIHHSPGNSKRGFGIDCAILSCQVYISQILVASALGGVVDAVGTVRVIPMVASVGSFLGFLTATFLVIYPNVSEEAKEEQKGLSSPLAGEGRAGGNSEKPTVLKLTRKEGLQGPVETESVTPAGIDVCQISSHWLVPQLLESIFLYDYFRKKIFFSTMWFS

SEQ ID NO: 95076 - protein, 597 aa, Homo sapiens
MAGLTVRDPAVDRSLRSVFVGNIPYEATEEQLKDIFSEVGPVVSFRLVYDRETGKPKGYGFCEYQDQETALSAMRNLNGREFSGRALRVDNAASEKNKEELKSLGTGAPVIESPYGETISPEDAPESISKAVASLPPEQMFELMKQMKLCVQNSPQEARNMLLQNPQLAYALLQAQVVMRIVDPEIALKILHRQTNIPTLIAGNPQPVHGAGPGSGSNVSMNQQNPQAPQAQSLGGMHVNGAPPLMQASMQGGVPAPGQMPAAVTGPGPGSLAPGGGMQAQVGMPGSGPVSMERGQGTLQHSPVGPAGPASIERVQVPMQDPRAAMQRGSLPANVPTPRGLLGDAPNDPRGGTLLSVTGEVEPRGYLGPPHQGPPMHHVPGHESRGPPPHELRGGPLPEPRPLMAEPRGPMLDQRGPPLDGRGGRDPRGIDARGMEARAMEARGLDARGLEARAMEARAMEARAMEARAMEARAMEVRGMEARGMDTRGPVPGPRGPIPSGMQGPSPINMGAVVPQGSRQVPVMQGTGMQGASIQGGSQPGGFSPGQNQVTPQDHEKAALIMQVLQLTADQIAMLPPEQRQSILILKEQIQKSTGAP

SEQ ID NO: 95077 - protein, 82 aa, Homo sapiens
KDELYLNLVLEYVPETVYRVARHFTKAKLTIPILYVKMFGQLAVYWQSSSWASPSSLGTVGWTSWWRSSRCWEHQPGNKSER

SEQ ID NO: 95078 - protein, 124 aa, Homo sapiens
MEAEETMECLQEFPEHHKMILDRLNEQREQDRFTDITLIVDGHHFKAHKAVLAACSKFFYKFFQEFTQEPLVEIEGVSKMAFRHLIEFTYTAKLMIQGEEEANDVWKAAEFLQMLEAIKALEVR

SEQ ID NO: 95079 - protein, 60 aa, Homo sapiens
NAAITAGKLVTLPDITSVAKSLGAKTVAARALECMQVCKIHSEVVEDTEAVSAVQQLLGE

SEQ ID NO: 95080 - protein, 280 aa, Homo sapiens
MSILKVKKAFFALVTNGVRAAPLWDSKKQSFVGMLTITDFINILHRYYKSALVQIYELEEHKIETWREVYLQDSFKPLVCISPNASLFDAVSSLIRNKIHRLPVIDPESGNTLYILTHKRILKFLKLFITEFPKPEFMSKSLEELQIGTYANIAMVRTTTPVYVALGIFVQHRVSALPVVDEKGRVVDIYSKFDVINLAAEKTYNNLDVSVTKALQHRSHYFEGVLKCYLHETLETIINRLVEAEVHRLVVVDENDVVKGIVSLSDILQALVLTGGEKKP

SEQ ID NO: 95081 - protein, 70 aa, Homo sapiens
MVSKRIAQETFDAAVRENIEEFAMGPEEAVKEAVEQFESQGVDLSNIVKTAPKVSADGSQEPTHDILQML

SEQ ID NO: 95082 - protein, 17 aa, Homo sapiens
MDSFDLALLQEWDLESL

SEQ ID NO: 95083 - protein, 29 aa, Homo sapiens
MAEKRPLRTLGPVMYGKLPRLETDSGLEH

SEQ ID NO: 95084 - protein, 153 aa, Homo sapiens
MALDGIRMPDGCYADGTWELSVHVTDLNRDVTLRVTGEVHIGGVMLKLVEKLDVKKDWSDHALWWEKKRTWLLKTHWTLDKYGIQADAKLQFTPQHKLLRLQLPNMKYVKVKVNFSDRVFKAVSDICKTFNIRHPEELSLLKKPRDPTKKKKK

SEQ ID NO: 95085 - protein, 68 aa, Homo sapiens
MVVSEVDIAKADPAAASHPLLLNGDATVAQKNPGSVAENNLCSQYEEKVRPCIDLIDSLRALGVEQDL

SEQ ID NO: 95086 - protein, 79 aa, Homo sapiens
MSEKKLETTAQQRKCPEWMNVQNKRCAVEERKACVRKSVFEDDLPFLEFTGSIVYSYDASDCSFLSEDISFSPGIKNVA

SEQ ID NO: 95087 - protein, 218 aa, Homo sapiens
MMTTRARRRSKRRGAAMPRRPRSLRTTRRMTWRRTTMTPIIRRSWKMTTRTPVTPRKAASAALQMSALPQEPTENLAPFLKELDSAGELPLGPEPFLAAHQDLNDKRTPEERLPEVVPLLNRDQNQALVQLPRLKWVQTTDLDRAAGHQADEILVPLDSKVSRPTKFVVSPKNLKKDLAERWSLPEIVGIPHQLSKPQRQKQTLPDDYLSMDTLYPGS

SEQ ID NO: 95088 - protein, 194 aa, Homo sapiens
  MOD_RES (1)..(1): Any amino acid
XEGERSRGLREPGRSGLSGAGRGLHRPCLAMLSLSGVLARLRTRPRDSFVNSQEWTLSRSVPELKVGIVGNLSSGKSALVHRYLTGTYVQEESPEGGRFKKEIVVDGQSYLLLIRDEGGPPELQFAAWVDAVVFVFSLEDEISFQTVYNYFLRLCSFRNASEVPMVLVGTQDAISAANPRVIDDSRARKLSTDL

SEQ ID NO: 95089 - protein, 317 aa, Homo sapiens
MEKRMPIANDTQFHTSSFLLLGIPGLEDVHIWIGFPFFSVYLIALLGNAAIFFVIQTEQSLHEPMYYCLAMLDSIDLSLSTATIPKMLGIFWFNIKEISFGGYLSQMFFIHFFTVMESIVLVAMAFDRYIAICKPLWYTMILTSKIISLIAGIAVLRSLYMVIPLVFLLLRLPFCGHRIIPHTYCEHMGIARLACASIKVNIMFGLGSISLLLLDVLLIILSHIRILYAVFCLPSWEARLKALNTCGSHIGVILAFSTPAFFSFFTHCFGHDIPQYIHIFLANLYVVVPPTLNPVIYGVRTKHIRETVLRIFFKTDH

SEQ ID NO: 95090 - protein, 25 aa, Homo sapiens
MAGRVPSLLVLLVFPSSCLAFRSPL

SEQ ID NO: 95091 - protein, 99 aa, Homo sapiens
MVNDPPVPALLWAQEVGQVLAGRARRLLLQFGVLFCTILLLLWVSVFLYGSFYYSYMPTVSHLSPVHFYYRTDCDSSTTSLCSFPVANVSLTKGGRDRV

SEQ ID NO: 95092 - protein, 348 aa, Homo sapiens
MAVSVTPIRDTKWLTLEVCREFQRGTCSRPDTECKFAHPSKSCQVENGRVIACFDSLKGRCSRENCKYLHPPPHLKTQLEINGRNNLIQQKNMAMLAQQMQLANAMMPGAPLQPVPMFSVAPSLATNASAAAFNPYLGPVSPSLVPAEILPTAPMLVTGNPGVPVPAAAAAAAQKLMRTDRLEVCREYQRGNCNRGENDCRFAHPADSTMIDTNDNTVTVCMDYIKGRCSREKCKYFHPPAHLQAKIKAAQYQVNQAAAAQAAATAAAMTQSAVKSLKRPLEATFDLGIPQAVLPPLPKRPALEKTNGATAVFNTGIFQYQQALANMQLQQHTAFLPPDTHNICRTSD

SEQ ID NO: 95093 - protein, 118 aa, Homo sapiens
MSAEVIHQVEEALDTDEKEMLLFLCRDVAIDVVPPNVRDLLDILRERGKLSVGDLAELLYRVRRFDLLKRILKMDRKAVETHLLRNPHLVSDYRVLMAEIGEDLDKSDVSSLIFLMKD

SEQ ID NO: 95094 - protein, 127 aa, Homo sapiens
MSASEGMKFKFHSGEKVLCFEPDPTKARVLYDAKIVDVIVGKDEKGRKIPEYLIHFNGWNRSWDRWAAEDHVLRDTDENRRLQRKLARKAVARLRSTGRKKKRCRLPGVDSVLKGLPTEEKDENDEN

SEQ ID NO: 95095 - protein, 184 aa, Homo sapiens
  MOD_RES (1)..(1): Any amino acid
XQKTGNGSAVQTTGRGQHVQKLYKCASCLKEFRSKQDLVKLDINGLPYGLCAGCVNLSKSASPGINVPPGTNRPGLGQNENLSAIEGKGKVGGLKTRCSSCNVKFESESELQNHIQTIHRELVPDSNSTQLKTPQVSPMPRISPSQSDEKKTYQCIKCQMVFYNEWDIQVHVANHMIDSKTKDL

SEQ ID NO: 95096 - protein, 126 aa, Homo sapiens
GRRLCPGQTLPLFFTAKEPSRVTGLENSKAMCVLAGSDHSASLTDAGEVYVWGSNKHGQLANEAAFLPVPQKIEAHCFQNEKVTAIWSGWTHLVAQTDTELHSGRCGDEFLELWSQEALQVDSASR

SEQ ID NO: 95097 - protein, 234 aa, Homo sapiens
MSFLVSKPERIRRWVSEKFIVEGLRDLELFGEQPPGDTRRKTNDASSESIASFSKQEVMSSFLPEGGCYELLTVIGKGFEDLMTVNLARYKPTGEYVTVRRINLEACSNEMVTFLQGELHVSKLFNHPNIVPYRATFIADNELWVVTSFMAYGSAKDLICTHFMDGMNELAIAYILQGVLKALDYIHHMGYVHRISRVMMPSLTSTVWESQPVNWPTAMSPLRICLPPRVKTLR

SEQ ID NO: 95098 - protein, 300 aa, Homo sapiens
MKKGIRYETSRKTSYIFQQPQHGPWQTRMRKISNHGSLRVAKVAYPLGLCVGVFIYVAYIKWHRATATQAFFSITRAAPGARWGQQAHSPLGTAADGHEVFYGIMFDAGSTGTRVHVFQFTRPPRETPTLTHETFKALKPGLSAYADDVEKVKKVFKASPFLVGDDCVSIMNGTDEGVSAWITINFLTGSLKTPGGSSVGMLDLGGGSTQIAFLPRVEGTLQASPPGYLTALRMFNRTYKLYSYSYLGLGLMSARLAILGGVEGQPAKDGKELVSPCLSPSFKGEWEHAEVTYRVSGQKA

SEQ ID NO: 95099 - protein, 19 aa, Homo sapiens
MEYLGGGSALDLLKPGPLE

SEQ ID NO: 95100 - protein, 15 aa, Homo sapiens
MRNGGLGSILDNSQM

SEQ ID NO: 95101 - protein, 188 aa, Homo sapiens
MQFSIRRPKLPSSETHPEESMYKRLGVSAWLNHLNELGQVEEEYKLRKAIFFGGIDVSIRGEVWPFLLRYYSHESTSEEREALRLQKRKEYSEIQQKRLSMTPEEHRAFWRNVQFTVDKDVVRTDRNNQFFRGEDNPNVESMRRILLNYAVYNPAVGYSQGMSDLVAPILAEVLDESDTFWCFVGLMQ

SEQ ID NO: 95102 - protein, 169 aa, Homo sapiens
MNAAVTFANCALGRVPWRKFPVYVLGQFLGSFLAAATIYSLFYTAILHFSGGQLMVTGPVATAGIFATYLPDHMTLWRGFLNEAWLTGMLQLCLFAITDQENNPALPGTEALVIGILVVIIGVSLGMNTGYAINPSRDLPPRIFTFIAGWGKQVFSNGENWWWVPVVAP

SEQ ID NO: 95103 - protein, 21 aa, Homo sapiens
MEEISHGSALSARRESHAPGT

SEQ ID NO: 95104 - protein, 123 aa, Homo sapiens
MAVGTRGTLLKKSLTVWFCGPGARSATRAVSTSLPRREQVTWCCCSGSWPRRTASTSWRCSMAAKPNGAGDTRQNLIPDFYAFRVINNGKVADIKKVNNFIREQDLYALKSVKIPVRNHGILM

SEQ ID NO: 95105 - protein, 79 aa, Homo sapiens
GHNEVIGVCRVGPDAADPHGREHWAEMLANPRKPVEHWHQLVEVSRGPTPTPDKHPCTLGPFIHATNALHVRESQSQAS

SEQ ID NO: 95106 - protein, 179 aa, Homo sapiens
MADMQNLVERLERAVGRLEAVSHTSDMHRGYADSPSKAGAAPYVQAFDSLLAGPVAEYLKISKEIGGDVQKHAEMVHTGLKLERALLVTASQCQQPAENKLSDLLAPISEQIKEVITFREKNRGSKLFNHLSAVSESIQALGWVAMAPKPGPYVKEMNDAAMFYTNRVLKEYKDVDKKH

SEQ ID NO: 95107 - protein, 149 aa, Homo sapiens
MLYNPYWTALPSTLENATSISLMNLTSTPLCNLSDIPPVGIKSKAVVVPWGSCHFLEKARIAQKGGAEAMLVVNNSVLFPPSGNRSEFPDVKILIAFISYKDFRDMNQTLGDNITVKMYSPSWPNFDYTMVVIFVIAVFTVALGGYWSG

SEQ ID NO: 95108 - protein, 118 aa, Homo sapiens
MWVTKLLPALLLQHVLLHLLLLPIAIPYAEGQRKRRNTIHEFKKSAKTTLIKIDPALKIKTKKVNTADQCANRCTRNKGLPFTCKAFVFDKARKQCLWFPFNSMSSGVKKEFGHEFDL

SEQ ID NO: 95109 - protein, 164 aa, Homo sapiens
MAHLRSPSGFGDPGKKDQKESEEELEEEEEEEEVEEEEEEVEEEEEEVEEEEEEVTDIGDYDDDFPDVRPRLASIVSPSLTSTFVPSQSATSTETPSASPPSSTSSHKSFPKIFQTFRKDMSEMSIDRNIHRNLSPGIPVSVQTEESWLQDLSDKVQSRKKASK

SEQ ID NO: 95110 - protein, 48 aa, Homo sapiens
MTRGFAPILPVEFHKMGSFRRPRPRFMSSPVLSDLPRFQAARQALQLS

SEQ ID NO: 95111 - protein, 487 aa, Homo sapiens
MAPYSLLVTRLQKALGVRQYHVASVLCQRAKVAMSHFEPNEYIHYDLLEKNINIVRKRLNRPLTLSEKIVYGHLDDPASQEIERGKSYLRLRPDRVAMQDATAQMAMLQFISSGLSKVAVPSTIHCDHLIEAQVGGEKDLRRAKDINQEVYNFLATAGAKYGVGFWKPGSGIIHQIILENYAYPGVLLIGTDSHTPNGGGLGGICIGVGGADAVDVMAGIPWELKCPKVIGVKLTGSLSGWSSPKDVILKVAGILTVKGGTGAIVEYHGPGVDSISCTGMATICNMGAEIGATTSVFPYNHRMKKYLSKTGREDIANLADEFKDHLVPDPGCHYDQLIEINLSELKPHINGPFTPDLAHPVAEVGKVAEKEGWPLDIRVGLIGSCTNSSYEDMGRSAAVAKQALAHGLKCKSQFTITPGSEQIRATIERDGRTSRRGRRTQSSPPTTGTSRAATTQTPRPMPLSRPQRLSQPWPLREPSSSTQRPTT

SEQ ID NO: 95112 - protein, 161 aa, Homo sapiens
MTSIFHFAIIFMLILQIRIQLSEESEFLVDRSKNGLIHVPKDLSQKTTILNISQNYISELWTSDILSLSKLRILIISHNRIQYLDISVFKFNQELEYLDLSHNKLVKISCHPTVNLKHLDLSFNAFDALPICKEFGNMSQLKFLGLSTTHLEKSSVLPIAH

SEQ ID NO: 95113 - protein, 308 aa, Homo sapiens
MMEEISIMVAYDAHVFSQLHDEDFLTSLVAISKPRSMVPTKKLKKYEKEYQTMRESQLQQEDPMDRYKRENRRLQEASMRLEQENDDLAHELVTSKIALRNDLDQAEDKADVLNKELLLTKQRLVETEEEKRKQEEETAQLKEVFRKQLEKAEYEIKKTTAIIAEYKQICSQLSTRLEKQQAASKEELEVVKGKMMACKHCSDIFSKEGALKLAATGREDQGIETDDEKDSLKKQLREMELELAQTKLQLVEAKCKIQELEHQRGALMNEIQAAKNSWFSKTLNSIKTATGTQPLQPAPVTQPPKEST

SEQ ID NO: 95114 - protein, 184 aa, Homo sapiens
MMAFAPPKNTDGPKMQTKMSTWTPLNHQLLNDRVFEERRALLGKWFDKWTDSQRRRILTGLLERCSLSQQKFCCRKLQEKIPAEALDFTTKLPRVLSLYIFSFLDPRSLCRCAQTPPKDGFVIADVQLVTSNSPEEKQSPLSAFRSSSSLRKKNNSGEKALPPWRSSDKHPTDIIRFNYLDNRD

SEQ ID NO: 95115 - protein, 456 aa, Homo sapiens
  MOD_RES (1)..(1): Any amino acid
XKQQLPPKKKRRVGTTVHCDYLNRPHKSIHRRRTDPMVTLSSILESIINDMRDLPNTYPFHTPVNAKVVKDYYKIITRPMDLQTLRENVRKRLYPSREEFREHLELIVKNSATYNGPKHSLTQISQSMLDLCDEKLKEKEDKLARLEKAINPLLDDDDQVAFSFILDNIVTQKMMAVPDSWPFHHPVNKKFVPDYYKVIVNPMDLETIRKNISKHKYQSRESFLDDVNLILANSVKYNGPESQYTKTAQEIVNVCYQTLTEYDEHLTQLEKDICTAKEAALEEAELESLDPMTPGPYTPQPPDLYDTNTSLSMSRDASVFQDESNMSVLDIPSATPEKQVTQEGEDGDGDLADEEEGTVQQPQASVLYEDLLMSEGEDDEEDAGSDEEGDNPFSAIQLSESGSDSDVGSGGIRPKQPRMLQENTRMDMENEESMMSYEGDGGEASHGLEDSNIRYQ

SEQ ID NO: 95116 - protein, 410 aa, Homo sapiens
MAKRSRSEDEDDDLQYADHDYEVPQQKGLKKLWNRVKWTRDEDDKLKKLVEQHGTDDWTLIASHLQNRSDFQCQHRWQKVLNPELIKGPWTKEEDQRVIELVQKYGKKRKMRVGHSPGSELRDGSLNDGGNMALKHTPLKTLPFSPSQFFNTCPGNEQLNIENPSFTSTPICGQKALITTPLHKETTPKDQKENVGFRTPTIRRSILGTTPRTPTPFKNALAAQEKKYGPLKIVSQPLAFLEEDIREVLKEETGTDLFLKEEDEPAYKSCKQENTASGKKVRKSLVLDNWEKEESGTQLLTEDISDMQSENRFTTSLLMIPLLEIHDNRCNLIPEKQDINSTNKTYTLTKKKPNPNTSKVVKLEKNLQSNCEWETVVYGKTEDQLIMTEQARRYLSTYTATSSTSRALIL

SEQ ID NO: 95117 - protein, 153 aa, Homo sapiens
MADSELQLVEQRIRSFPDFPTPGVVFRDISPVLKDPASFRAAIGLLARHLKATHGGRIDYIAGECPVAASRALPPLRAPRAELEIQKDALEPGQRVVVVDDLLATGGTMNAACELLGRLQAEVLECVSLVELTSLKGREKLAPVPFFSLLQYE

SEQ ID NO: 95118 - protein, 172 aa, Homo sapiens
MNGRADFREPNAEVPRPIPHIGPDYIPTEEERRVFAECNDESFWFRSVPLAATSMLITQGLISKGILSSHPKYGSIPKLILACIMGYFAGKLSYVKTCQEKFKKLENSPLGEALRSGQARRSSPPGHYYQKSKYDSSVSGQSSFVTSPAADNIEMLPHYEPIPFSSSMNESA

SEQ ID NO: 95119 - protein, 166 aa, Homo sapiens
MEEIDRFQVPTAHSEMQPLDPAAASISDGDCDAREEKQRELARKGSLKNGSMGSPVNQQPKKNNVMARTRLVVPNKGYSSLDQSPDEKPLVALDTDSDDDFDMSRYSSSGYSSAEINQDLNIQLLKDGYRLDEIPDDEDLDLIPPKSVNPTCMCCQATSSTACHIQ

SEQ ID NO: 95120 - protein, 158 aa, Homo sapiens
MAATGTAAAAATGRLLLLLLALAANAGTGFAVAEPQIAMFCGKLNMHVNIQTGKWEPDPTGTKSCFETKEEVLQYCQEMYPELQITNVMEANQRVSIDNWCRRDKKQCKSRFVTPFKCLVGEFVSDVLLVPEKCQFFHKERMEVCENHQHWHTVVKEV

SEQ ID NO: 95121 - protein, 216 aa, Homo sapiens
MPTFLQMCEPYFLYLEAAARSIPPIYGPLQELVRKGLLEISQQLTLRLEQLVLMYASFGFVDLEEMNPLSISCFFCGRFSISLSHEVSIFRYCAPTAYTASRFPRYLYKKMRWHLEATPEAPGRGQDSLVDYYFLCYRDTWEDTGQSPANSCPQIQKLWSIGRWVPLGPAEDDLYSWILCPQPLGDYQQLLTIGFEEPTPTLATDLLVQILTGQAG

SEQ ID NO: 95122 - protein, 53 aa, Homo sapiens
MKDIDIGKEYIIPSPGYRSVRERTSTSGTHRDREDSKFRRTRPRHSHCWPGCC

SEQ ID NO: 95123 - protein, 159 aa, Homo sapiens
MELRSGSVGSQAVARRMDGDSRDGGGGKDATGSEDYENLPTSASVSTHMTAGAMAGILEHSVMYPVDSVKTRMQSLSPDPKAQYTSIYGALKKIMRTEGFWRPLRGVNVMIMGAGPAHAMYFACYENMKRTLNDVFHHQGNSHLANGSRNFLRTPDRRG

SEQ ID NO: 95124 - protein, 97 aa, Homo sapiens
SCSNLTLAVKSPLIRTPPSCTRSPWAGCWACGSQWRMPRWRTAVSGSSLAPTPGPWSSSMEKWYTRASRTSLTARARPTLSTSWRPLAPPGARRTGR

SEQ ID NO: 95125 - protein, 171 aa, Homo sapiens
  MOD_RES (1)..(1): Any amino acid
XLHPLQNRWALWFFKNDRSRAWQDNLHLVTKVDTVEDFWALYSHIQLASKLSSGCDYALFKDGIQPMWEDSRNKRGGRWLVSLAKQQRHIELDRLWLETQRGMWGRRQHPHQGGQDRCVDEGGGKPGGRAARWACIQRAPGPLPKDHHWVPGPCRHSHQEQLPSQEQVCGV

SEQ ID NO: 95126 - protein, 728 aa, Homo sapiens
EASLQFVVEPSEATNRSVQAHEVHQKILATDVSSKNTPDSKKISSRNINDHHSEADEEFYLSVGSPSVLLDAKTSVSQNVIPSSAQKRETYTFENSVNMLPSSTEVSVKTKKRLNFDDKVMLKKIEIDNKVSDEEDKTSEGQERKPSGSSQNRIRDSEYEIQRQAKKSFSTLFLETVKRKSESSPIVRHAATAPPHSCPPDDTKLIEDEFIIDESDQSFASRSWITIPRKAGSLKQRTISPAESTALLQGRKSREKHHNILPKTLANDKHSHKPHPVETSQPSDKTVLDTSYALIGETVNNYRSTKYEMYSKNAEKPSRSKRTIKQKQRRKFMAKPAEEQLDVGQSKDENIHTSHITQDEFQRNSDRNMEEHEEMGNDCVSKKQMPPVGSKKSSTRKDKEESKKKRFSSESKNKLVPEEVTSTVTKSRRISRRPSDWWVVKSEESPVYSNSSVRNELPMHHNSSRKSTKKTNQSSKNIRKKTIPLKRQKTATKGNQRVQKFLNAEGSGGIVGHDEISRCSLSEPLESDEADLAKKKNLDCSRSTRSSKNEDNIMTAQNVPLKPQTSGYTCNIPTESNLDSGEHKTSVLEESGPSRLNNNYLMSGKNDVDDEEVHGSSDDSKQSKVIPKNRIHHKLVLPSNTPNVRRTKRTRLKPLEYWRGERIDYQGRPSGGFVISGVLSPDTISSKRKAKENIGKVNKKSNKKRICLDNDERSMNLFLKVTFRFYFK

SEQ ID NO: 95127 - protein, 175 aa, Homo sapiens
MSNVSGILETAGVPLVSANWPQPSPPPAVPAGPQMDHMGNSSQGAPWLFLTSALARGVSGIFVWTALVLTCHQIYLHLRSYTVPQEQRYIIRLLLIVPIYAFDSWLSLLLLGDHQYYVYFDSVRDCYEAFVIYSFLSLCFQYLGGEGAIMAEIRGKPIKSSCLYGTCCLRGMTYS

SEQ ID NO: 95128 - protein, 155 aa, Homo sapiens
MGKGRAGRVGTTALPPRLKEMKSQESAAGSKLVLRCETSSEYSSLRFKWFKNGNELNRKNKPQNIKIQKKPGKSELRINKASLADSGEYMCKVISKLGNDSASANITIVESNATSTSTTGTSHLVKCAEKEKTFCVNGGECFMVKDLSNPSRYLC

SEQ ID NO: 95129 - protein, 245 aa, Homo sapiens
MYQVPLPLDRDGTLVRLRFTMVALVTVCCPLVAFLFCILWSLLFHFKETTATHCGVPNYLPSVSSAIGGEVPQRYVWRFCIGLHSAPRFLVAFAYWNHYLSCTSPCSCYRPLCRLNFGLNVVENLALLVLTYVSSSEDFTIHENAFIVFIASSLGHMLLTCILWRLTKKHTDRKSYSWKQRLFIINFISFFSALAVYFRHNMYCEAGVYTIFAILEYTVVLTNMAFHMTAWWDFGNKELLITSQP

SEQ ID NO: 95130 - protein, 686 aa, Homo sapiens
MEEFVGLREGSSGNPVTLQELWGPCPRIRRGIRGGLEWLKQKLFRLGEDWYFLMTLGVLMALVSCAMDLAVESVVRAHQWLYREIGDSHLLRYLSWTVYPVALVSFSSGFSQSITPSSGGSGIPEVKTMLAGVVLEDYLDIKNFGAKVVGLSCTLACGSTLFLGKVGPFVHLSVMMAAYLGRVRTTTIGEPENKSKQNEMLVAAAAVGVATVFAAPFSGVLFSIEVMSSHFSVWDYWRGFFAATCGAFMFRLLAVFNSEQETITSLYKTSFRVDVPFDLPEIFFFVALGGLCGILGSAYLFCQRIFFGFIRNNRFSSKLLATSKPVYSALATLVLASITYPPSAGRFLASRLSMKQHLDSLFDNHSWALMTQNSSPPWPEELDPQHLWWEWYHPRFTIFGTLAFFLVMKFWMLILATTIPMPAGYFMPIFVYGAAIGRLFGETLSFIFPEGIVAGGITNPIMPGGYALAGAAAFSGAVTHTISTALLAFEVTGQIVHALPVLMAVLAANAIAQSCQPSFYDGTVIVKKLPYLPRILGRNIGSHRVRVEHFMNHSITTLAKDMPLEEVVKVVTSTDVAKYPLVESTESQILVGIVRRAQLVQALKAEPPSWAPGHQCLQDILAAGCPTEPVTLKLSPETSLHEAHNLFELLNLHSLFVTSRGRAVGCVSWVEMKKAISNLTNPPAPK

SEQ ID NO: 95131 - protein, 37 aa, Homo sapiens
MAKSKNHTTHNQSRKWHRNGIKKPRSQRYESLKGPEV

SEQ ID NO: 95132 - protein, 249 aa, Homo sapiens
MPYVDRQNRICGFLDIEEHENSGKFLRRYFILDTQANCLLWYMDNPQNLAMGAGAVGALQLTYISKVSIATPKQKPKTPFCFVINALSQRYFLQANDQKDMKDWVEALNQASKITVPKGGGLPMTTEVLKSLAAPPALEKKPQVAYKTEIIGGVVVHTPISQNGGDGQEGSEPGSHTILRRSQSYIPTSGCRASTGPPLIKSGYCVKQGNVRKSWKRRFFALDDFTICYFKCEQEFEISLANMVKPRLY

SEQ ID NO: 95133 - protein, 122 aa, Homo sapiens
MPKKAHPSPQTPVARCNKAHPAPGPCAEVRALPAPAAEPEPAWEEAPPERALELEGAPAKDQTNEELPEITEVPESIKRRLGRRVPAATPAPRGNLLLQAWMRVHSWASRLFAPNVLPGTGP

SEQ ID NO: 95134 - protein, 181 aa, Homo sapiens
MALSDEPAAGGPEEEAEDETLAFGAALEAFGESAETRALLGRLREVHGGGAEREVALERFRVIMDKYQEQPHLLDPHLEWMMNLLLDIVQDQTSPASLVHLAFKFLYIITKVRGYKTFLRLFPHEVADVEPVLDLVTIQNPKDHETEFHSSCPGWRAMAQSWLTATSVSQVQAILLCQPPE

SEQ ID NO: 95135 - protein, 349 aa, Homo sapiens
MEAARRSLCFRLEQGYTSRGSPLSPQSSIDSELSTSELEDDSISMGYKLQDLTDVQIMARLQEESLRQDYASTSASVSRHSSSVSLSSGKKGTCSDQEYDQYSLEDEEEFDHLPPPQPRLPRCSPFQRGIPHSQTFSSIRECRRSPSSQYFPSNNYQQQQYYSPQAQTPDQQPNRTNGDKLRRSMPNLARMPSTTAISSNISSPVTVRNSQSFDSSLHGAGNGISRIQSCIPSPGQLQHRVHSVGHFPVSIRQPLKATAYVSPTVQGSSNMPLSNGLQLYSNTGIPTPNKAAASGIMGRSALPRPSLAINGSNLPRSKIAQPVRSFLQPPKPLSSLSTLRDGNWRDGCY

SEQ ID NO: 95136 - protein, 105 aa, Homo sapiens
MQGSSLWLSLTFRSARVLSRARFFEWQSPGLPNTAAMENGTGPYGEERPREVQETTVTEGAAKIAFPSANEVFYNPVQEFNRDLTKACMCWKAWQLQAYVPFDLP

SEQ ID NO: 95137 - protein, 375 aa, Homo sapiens
MSLHFLYYCSEPTLDVKIAFCQGFDKQVDVSYIAKHYNMSKSKVDNQFYSVEVGDSTFTVLKRYQNLKPIGSGAQGIVCAAYDAVLDRNVAIKKLSRPFQNQTHAKRAYRELVLMKCVNHKNIISLLNVFTPQKTLEEFQDVYLVMELMDANLCQVIQMELDHERMSYLLYQMLCGIKHLHSAGIIHRDLKPSNIVVKSDCTLKILDFGLARTAGTSFMMTPYVVTRYYRAPEVILGMGYKENVDIWSVGCIMGEMVRHKILFPGRDYIDQWNKVIEQLGTPCPEFMKKLQPTVRNYVENRPKYAGLTFPKLFPDSLFPADSEHNKLKASQARDLLSKMLVIDPAKRISVDDALQHPYINVWYDPAEVEAPEELS

SEQ ID NO: 95138 - protein, 38 aa, Homo sapiens
MSGYKRMRRQHQKQLIALENKLKAEMDEHRLKLQKEVE

SEQ ID NO: 95139 - protein, 698 aa, Homo sapiens
MAFAWWPCLILALLSSLAASGFPRSPFRLLGKRSLPEGVANGIEVYSTKINSKVTSRFAHNVVTMRAVNRADTAKEVSFDVELPKTAFITNFTLTIDGVTYPGNVKEKEVAKKQYEKAVSQGKTAGLVKASGRKLEKFTVSVNVAAGSKVTFELTYEELLKRHKGKYEMYLKVQPKQLVKHFEIEVDIFEPQGISMLDAEASFITNDLLGSALTKSFSGKKGHVSFKPSLDQQRSCPTCTDSLLNGDFTITYDVNRESPGNVQIVNGYFVHFFAPQGLPVVPKNVAFVIDISGSMAGRKLEQTKEALLRILEDMQEEDYLNFILFSGDVSTWKEHLVQATPENLQEARTFVKSMEDKGMTNINDGLLRGISMLNKAREEHRIPERSTSIVIMLTDGDANVGESRPEKIQENVRNAIGGKFPLYNLGFGNNLNYNFLENMALENHGFARRIYEDSDADLQLQGFYEEVANPLLTGVEMEYPENAILDLTQNTYQHFYDGSEIVVAGRLVDEDMNSFKADVKGHGATNDLTFTEEVTTEKITLWNRAVPSTFSWLDTVTVTQDGLSMMINRKNMVVSFGDGVTFVVVLHQVWKKHPVHRDFLGFYVVDSHRMSAQTHGLLGQFFQPFDFKVSDIRPGSDPTKPDATLVVKNHQLIVTRGSQKDYRKDASIGTKVVCWFVHNNGEGLIDGVHTDYIVPNLF

SEQ ID NO: 95140 - protein, 86 aa, Homo sapiens
MRVGAEYQARIPEFDPGATKYTDKDNGGMLVWSPYHSIPDAKLDEYIAIAKEKHGYNVEQALGMLFWHKHNIEKSLADLPNFTPFP

SEQ ID NO: 95141 - protein, 67 aa, Homo sapiens
MPGRSCVALVLLAAAVSCAVAQHAPPVSELEPRRREGRAVDRGLQKINLSSFRTNVQRCSSMVHHKS

SEQ ID NO: 95142 - protein, 50 aa, Homo sapiens
MWEANPEMFHKAEELFSKTTNNEVDDMDTSDTQWGWFYLAECGKWHMFQK

SEQ ID NO: 95143 - protein, 173 aa, Homo sapiens
  MOD_RES (1)..(1): Any amino acid
XIPPPIKSFKEMKFPAAILRGLKKKGIHHPTPIQIQGIPTILSGRDMIGIAFTGSGKTLVFTLPVIMFCLEQEKRLPFSKREGPYGLIICPSRELARQTHGILEYYCRLLQEDSSPLLRCALCIGGMSVKEQMETIRHAVQSSADHQRPWTRPSVHRWARPHPGGLPPRTSEY

SEQ ID NO: 95144 - protein, 215 aa, Homo sapiens
MDQKILSLAAEKTADKLQEFLQTLREGDLTNLLQNQAVKGKVAGALLRAIFKGSPCSEEAGTLRRRKIYTCCIQLVESGDLQKEIASEIIGLLMLEAHHFPGPLLVELANEFISAVREGSLVNGKSLELLPIILTALATKKENLAYGKGVLSGEECKKQLINTLCSGRWDQQYVIQLTSMFKDVPLTAEEVEFVVEKALSMFSKMNLQEIPPLVY

SEQ ID NO: 95145 - protein, 203 aa, Homo sapiens
  MOD_RES (1)..(1): Any amino acid
XGAATQASLESAPRIMRLVAECSRSRARAGELWLPHGTVATPVFMPVGTQATMKGITTEQLDALGCRICLGNTYHLGLRPGPELIQKANGLHGFMNWPHNLLTDSGGFQMVSLVSLSEVTEEGVRFRSPYDGNETLLSPEKSVQIQNALALLCHPGWSAVAQSWLTATSVSQIQAILLSLPSKQLGIQARTSSCSWTTWLAVL

SEQ ID NO: 95146 - protein, 267 aa, Homo sapiens
MREYGVERDLAVYNQLLNIFPKEVFRPRNIIQRIFVHYPRQQECGIAVLEQMENHGVMPNKETEFLLIQIFGRKSYPMLKLVRLKLWFPRFMNVNPFPVPRDLPQDPVELAMFGLRHMEPDLSARVTIYQVPLPKDSTGAADPPQPHIVGKSESMGAAKSLTLPRPCQVLAGPRLGSLGLWAESLAGHRACMSPHQESRVPISRPPWPATIQPGLSLLRAPSPCGSATSVCITTSSELTCCPRRRGKWKRRRRSGTSTTRCSWTWSM

SEQ ID NO: 95147 - protein, 148 aa, Homo sapiens
MASVLSYESLVHAVAGAVGSVTAMTVFFPLDTARLRLQVDEKRKSKTTHMVLLEIIKEEGLLAPYRGWFPVISSLCCSNFVYFYTFNSLKALWVKGQHSTTGKDLVVGFVADGGLSVLPRLVSNPWPQEILLPRPSKVLGLQEWLMCC

SEQ ID NO: 95148 - protein, 144 aa, Homo sapiens
HRVIQELLVDYYVKIQDTNVTSEDKKFHETLEQRLLVTELMRLLGPSQEREIPPLLGLEKADLLELMPLSEDFVWMRARLQQEVEEQLKKKCFTLLCYYDPNSGASPLPHFAAEASSRTPAEDSIRARPHQCPVPGSQVRCYDP

SEQ ID NO: 95149 - protein, 137 aa, Homo sapiens
RGELYKELQKSEKLDEQRTATVRRKTMCGTLDYLPPEMIEGRTYDEKVDLWCIGVLCYELLVGYPPFESASHSETYRRILKVDVRFPLSMPLGARDLISRLLRYQPLERLPLAQILKHPWVQAHSRRVLPPCAQMAS

SEQ ID NO: 95150 - protein, 199 aa, Homo sapiens
MDTESNRRANLALPQEPSSVPAFEVLEISPQEVSSGRLLKSASSPPLHTWLTVLKKEQEFLGFSISGMLSIISERRNATYLVRGSLGANTASSIAGGTGITILIINLKKSLAYIHIHSCQKFFETKCFMASFSTEIVVMMLFLTILGLGSAVSLTICGAGEELKGNKVPEDRVYEELNIYSATYSELEDPGEMSPPIDL

SEQ ID NO: 95151 - protein, 440 aa, Homo sapiens
MGCSAKARWAAGALGVAGLLCAVLGAVMIVMVPSLIKQQVLKNVRIDPSSLSFNMWKEIPIPFYLSVYFFDVMNPSEILKGEKPQVRERGPYVYREFRHKSNITFNNNDTVSFLEYRTFQFQPSKSHGSESDYIVMPNILVLGAAVMMENKPMTLKLIMTLAFTTLGERAFMNRTVGEIMWGYKDPLVNLINKYFPGMFPFKDKFGLFAELNNSDSGLFTVFTGVQNISRIHLVDKWNGLSKVDFWHSDQCNMINGTSGQMWPPFMTPESSLEFYSPEACRSMKLMYKESGVFEGIPTYRFVAPKTLFANGSIYPPNEGFCPCLESGIQNVSTCRQTGKIEPVVLPLLWFAESGAMEGETLHTFYTQLVLMPKVMHYAQYVLLALGCVLLLVPVICQIRSQGPEDTVSQPGLAAGPDRPPSPYTPLLPDSPSGQPPSPTA

SEQ ID NO: 95152 - protein, 152 aa, Homo sapiens
METSASATASEKQEAKSGILEAAGFPDPGKKASPLVVAAAAAAAVAAQGVPQHLLPPFHAPLPIDMRHQEGRYHYEPHSVHGVHGPPALSGSPVISDISLIRLSPHPAGPGESPFNAPHPYVNPHMEHYLRSVHSSPTLSMISAARGLSPAD

SEQ ID NO: 95153 - protein, 131 aa, Homo sapiens
MRVMAPRALLLLLSGGLALTETWACSHSMRYFDTAVSRPGRGEPRFISVGYVDDTQFVRFDSDAASPRGEPRAPWVEQEGPEYWDRETQNYKRQAQADRVSLRNLRGYYNQSEDEDVWLRPGARRAPPPRV

SEQ ID NO: 95154 - protein, 66 aa, Homo sapiens
RYKGHRNNATVKGVNFYGPKSEFVVSGSDCGHIFLWEKSSCQIIQFMEGDKGGWEEVGGGAEVKEE

SEQ ID NO: 95155 - protein, 41 aa, Homo sapiens
MTEVVPSSALSEVSLRLLCHDDIDTVKHLCGDWFPIEMEIF

SEQ ID NO: 95156 - protein, 167 aa, Homo sapiens
MLLLPSAADGRGTAITHALTSASTLCQVEPVGRWFEAFVKRRNRNASASFQELEDKKELSEESEDEELQLEEFPMLKTLDPKDWKNQDHYAVLGLGHVRYKATQRQIKAAHKAMVLKHHPDKRKAAGEPIKEGDNDYFTCITKGSPGDSYQKLILQLIHLMKCYLIQ

SEQ ID NO: 95157 - protein, 60 aa, Homo sapiens
MPSVTQRLRDPDINPCLSESDASTRCLDENNYDRERCSTYFLRYKNCRRFWVSLDWLALC

SEQ ID NO: 95158 - protein, 606 aa, Homo sapiens
MPSPRPVLLRGARAALLLLLPPRLLARPSLLLRRSLSAASCPPISLPAAASRSSMDGAGAEEVLAPLRLAVRQQGDLVRKLKEDKAPQVDVDKAVAELKARKRVLEAKELALQPKDDIVDRAKMEDTLKRRFFYDQAFAIYGGVSGLYDFGPVGCALKNNIIQTWRQHFIQEEQILEIDCTMLTPEPVLKTSGHVDKFADFMVKDVKNGECFRADHLLKAHLQKLMSDKKCSVEKKSEMESVLAQLDNYGQQELADLFVNYNVKSPITGNDLSPPVSFNLMFKTFIGPGGNMPGYLRPETAQGIFLNFKRLLEFNQGKLPFAAAQIGNSFRNEISPRSGLIRVREFTMAEIEHFVDPSEKDHPKFQNVADLHLYLYSAKAQVSGQSARKMRLGDAVEQGVINNTVLGYFIGRIYLYLTKVGISPDKLRFRQHMENEMAHYACDCWDAESKTSYGWIEIVGCADRSCYDLSCHARATKVPLVAEKPLKEPKTVNVVQFEPSKGAIGKAYKKDAKLVMEYLAICDECYITEMEMLLNEKGEFTIETEGKTFQLTKDMINVKRFQKTLYVEEVVPNVIEPSFGLGRIMYTVFEHTFHVREGDEQRTRKP

SEQ ID NO: 95159 - protein, 490 aa, Homo sapiens
MNPQIRNPMERMYRDTFYDNFENEPILYGRSYTWLCYEVKIKRGRSNLLWDTGVFRGQVYFKPQYHAEMCFLSWFCGNQLPAYKCFQITWFVSWTPCPDCVAKLAEFLSEHPNVTLTISAARLYYYWERDYRRALCRLSQAGARVTIMDYEEFAYCWENFVYNEGQQFMPWYKFDENYAFLHRTLKEILRYLMDPDTFTFNFNNDPLVLRRRQTYLCYEVERLDNGTWVLMDQHMGFLCNEAKNLLCGFYGRHAELRFLDLVPSLQLDPAQIYRVTWFISWSPCFSWGCAGEVRAFLQENTHVRLRIFAARIYDYDPLYKEALQMLRDAGAQVSIMTYDEFEYCWDTFVYRQGCPFQPWDGLEEHSQALSGRLRAILQVRASSLCLVPHRPPPPPRSPVPCLPLCSEPPLGSLLPTGRPAPSLPFLLTASFSFPPPASLPPLPSLSLSPGHLPVPSFHSLTSCSIQPPCSSRIRETEGWASVSKEGRDLG

SEQ ID NO: 95160 - protein, 523 aa, Homo sapiens
MESSKPGPVQVVLVQKDQHSFELDEKALASILLQDHIRDLDVVVVSVAGAFRKGKSFILDFMLRYLYSQKESGHSNWLGDPEEPLTGFSWRGGSDPETTGIQIWSEVFTVEKPGGKKVAVVLMDTQGAFDSQSTVKDCATIFALSTMTSSVQIYNLSQNIQEDDLQQLQLFTEYGRLAMDEIFQKPFQTLMFLVRDWSFPYEYSYGLQGGMAFLDKRLQVKEHQHEEIQNVRNHIHSCFSDVTCFLLPHPGLQVATSPDFDGKLKDIAGEFKEQLQALIPYVLNPSKLMEKEINGSKVTCRGLLEYFKAYIKIYQGEDLPHPKSMLQATAEANNLAAAASAKDIYYNNMEEVCGGEKPYLSPDILEEKHCEFKQLALDHFKKTKKMGGKDFSFRYQQELEEEIKELYENFCKHNGSKNVFSTFRTPAVLFTGIVALYIASGLTGFIGLEVVAQLFNCMVGLLLIALLTWGYIRYSGQYRELGGAIDFGAAYVLEQASSHIGNSTQATVRDAVVGRPSMDKKAQ

SEQ ID NO: 95161 - protein, 141 aa, Homo sapiens
MREIVHIQAGQCGNQIGTKFWEVISDEHGIDPAGGYVGDSALQLERINVYYNESSSQKYVPRAALVDLEPGTMDSVRSGPFGQLFRPDNFIFGMFRQTHIFTHIQWSQLYTLFSTLVFLPGSPATYFEDLSISQVWLPHSC

SEQ ID NO: 95162 - protein, 328 aa, Homo sapiens
MAQPYPPAQYPPPPQNGIPAEYAPPPPHPTQDYSGQTPVPTEHGMTLYTPAQTHPEQPGSEASTQPIAGTQTVPQTDEAAQTDSQPLHPSDPTEKQQPKRLHVSNIPFRFRDPDLRQMFGQFGKILDVEIIFNERGSKVNNATARVMTNKKTGNPYTNGWKLNPVVGAVYGPEFYAVTGFPYPTTGTAVAYRGAHLRGRGRAVYNTFRAAPPPPPIPTYGAALEQTLVKMPVPWAGLAPCPLPPQQTPEPAYPTSPAFPPLSCPFASRVVYQDGFYGAEIYGGYAAYRYAQPAAAAAAYSDSYGRVYAAADPYHHTIGPAATYSIGTM

SEQ ID NO: 95163 - protein, 84 aa, Homo sapiens
LDLITFFDEYHSGHIDRAFDIIERLKLVPLNQESVEERVAAFRNFSDEQLRSQARTLITFAGMIPYRTSGDTNARLVQMEVLMN

SEQ ID NO: 95164 - protein, 112 aa, Homo sapiens
MMSDEKNLGVSQKLVSPSRSTSSCSSKQGSRQDSWEVVEGLRGEMNYTQEPPVQKGFLLKKRKWPLKGWHKRFFYLDKGILKYAKSQTDIEREKLHGCIDVGLSVMSVKKSS

SEQ ID NO: 95165 - protein, 347 aa, Homo sapiens
MVQASGHRRSTRGSKMVSWSVIAKIQEIWCEEDERKMVREFLAEFMSTYVMMVFGLGSVAHMVLNKTYGSYLGVNLGFGFGVTMGVHVAGRISGAHMNAAVTFTNCALGRVPWRKFPVHVLGQFLGSFLAAATIYICVSAAAILHFSGGELMVTGPFATAGIFATYLPDHMTLWRGFLNEEWLTRMLQLCLFTITDQENNPALPGTHALVISILVVIIRVSHGINTGYAINPSRDPPPSIFTFIAGWGKQVFSDGENWWWVPVVAPLLGASLGGIIYLVFIGSTIPREPLKLEDSVAYEDHGITVLPKMGSHEPMISPLTLISVSLANRSSVHSAPPLHESMALEHF

SEQ ID NO: 95166 - protein, 129 aa, Homo sapiens
MSKDLVTFGDVAVNFSQEEWEWLNPAQRNLYRKVMLENYRSLVSLGVSVSKPDVISLLEQGKEPWMVKKEGTRGPCPDWEYVFKNSEFSSKQETYEESSKVVTVGARHLSYSLDYPSLREDCQSEDWYK

SEQ ID NO: 95167 - protein, 40 aa, Homo sapiens
  MOD_RES (1)..(1): Any amino acid
XSGRSTLPPGNAREAKPPKKRCLLAPRWDYPEGTPNGVFE

SEQ ID NO: 95168 - protein, 132 aa, Homo sapiens
  MOD_RES (1)..(1): Any amino acid
XSRCFSGPCSPYSSSVVWIHFQEVSPFKIPIEELEDRVFVNCNTSITWVEGTVGTLLSDITRLDLGKRILDPRGIYRCNGTDIYKDKESTVQVHYRTADTQALLRNDQVYQPLRDRDDAQYSHLGGNWARNK

SEQ ID NO: 95169 - protein, 111 aa, Homo sapiens
GIAYLVKVSEGDLRKAITFLQSATRLTGGKEITEKVITDIAGVIPAEKIDGVFAACQSGSFDKLEAVVKDLIDEGHAATQLVNQLHDVVVENNLSDKQKSIITEKLALTNA

SEQ ID NO: 95170 - protein, 72 aa, Homo sapiens
MTEAGKLPLPLPPRLDWFVHTQMGQLAQDGVPEWFHGAISREDAENLLESQPLGSFLIRVSHSHVGYTLSYK

SEQ ID NO: 95171 - protein, 342 aa, Homo sapiens
MAVMAPRTLLLLLLGALALTQTWAGSHSMRYFTTSVSRPGRGEPRFIAVGYVDDTQFVRFDSDAASQRMEPRAPWIEQEGPEYWDLQTRNVKAQSQTDRANLGTLRGYYNQSEAGSHTIQMMYGCDVGSDGRFLRGYRQDAYDGKDYIALNEDLRSWTAADMAAQITQRKWEAARVAEQLRAYLEGTCVEWLRRYLENGKETLQRTDAPKTHMTHHAVSDHEATLRCWALSFYPAEITLTWQRDGEDQTQDTELVETRPAGDGTFQKWASVVVPSGQEQRYTCHVQHEGLPKPLTLRWEPSSQPTIPIVGIIAGLVLFGAVFAGAVVAAVRWRRKSSGGVKG

SEQ ID NO: 95172 - protein, 131 aa, Homo sapiens
MSGTEEAILGGRDSHPAAGGGSVLCFGQCQYTAEEYQAIQKALRQRLGPEYISSRMAGGGQKVCYIEGHRVINLANEMFGYNGWAHSITQQNVDFVDLNNGKFYVGVCAFVRVQLKVRGWSRPAARKDQWV

SEQ ID NO: 95173 - protein, 235 aa, Homo sapiens
MAGKKNVLSSLAVYAEDSEPESDGEAGIEAVGSAAEEKGGLVSDAYGEDDFSRLGGDEDGYEEEEDENSRQSDNTEAEKRDPQELVASFSERVRNMSPDEIKIPPEPPGRCSNHLQDKIQKLYERKIKEGMDMNYIIQRKKEFRNPSIYEKLIQFCAIDELGTNYPKDMFDPHGWSEDSYYEALAKAQKIEMDKLEKAKKERTKACCRDVSAAPGDRSCPSPVRAGTASSWVLSL

SEQ ID NO: 95174 - protein, 169 aa, Homo sapiens
FVKDVRKRFPQHTIMAGNVVTGEMVEELILSGADIIKVGIGPGSVCTTRKKTGVGYPQLSAVMECADAAHGLKGHIISDGGCSCPGDVAKAFGAGADFVMLGGMLAGHSESGGELIERDGKKYKLFYGMSSEMAMKKYAGGVAEYRRCGTYHPRHPRRDPLYVYLCGSS

SEQ ID NO: 95175 - protein, 139 aa, Homo sapiens
MSDLLLLGLIGGLTLLLLLTLLAFAGYSGLLAGVEVSAGSPPIRNVTVAYKFHMGLYGETGRLFTESCSISPKLRSIAVYYDNPHMVPPDKCRCAVGSILSEGEESPSPELIDLYQKFGFKVFSFPAPSHVVTATFPYT

SEQ ID NO: 95176 - protein, 90 aa, Homo sapiens; identical to SEQ ID NO: 81076

SEQ ID NO: 95177 - protein, 196 aa, Homo sapiens
MDHEAAQLEKQHVHNVYESTAPYFSDLQSKAWPRVRQFLQEQKPGSLIADIGCGTGKYLKVNSQVHTVGCDYCGPLVEIARNRGCEAMGLEHPWIWYPRASWNQPPTDIEGPQYFYPPCHPIPDLQKQTIICHFKGPTLNEQQKSSPTHHRLHACFQHCREEESRPWLMALSSWDQVAMEGHVSASLTSCIVRLLL

SEQ ID NO: 95178 - protein, 320 aa, Homo sapiens; identical to SEQ ID NO: 52324

SEQ ID NO: 95179 - protein, 242 aa, Homo sapiens
MQRAVSVVARLGFRLQAFPPALCRPLSCAQEVLRRTPLYDFHLAHGGKMVAFAGWSLPVQYRDSHTDSHLHTRQHCSLFDVSHMLQTKILGSDRVKLMESLVVGDIAELRPNQGTLSLFTNEAGGILDDLIVTNTSEGHLYVVSNAGCWEKDLALMQDKVRELQNQGRDVGLEVLDNALLALQGTVTSGCPSPSLKKNVAMGYVPCEYSRPGTMLLVEVRRKQQMAVVSKMPFVPTNYYTLK

SEQ ID NO: 95180 - protein, 171 aa, Homo sapiens
MNYSLHLAFVCLSLFTERMCIQGSQFNVEVGRSDKLSLPGFENLTAGYNKFLRPNFGGEPVQIALTLDIASISSISESNMDYTATIYLRQRWMDQRLVFEGNKSFTLDARLVEFLWVPDTYIVESKKSFLHEVTVGNRLIRLFSNGTVLYALRITTTVACNMDLSKYPMDT

SEQ ID NO: 95181 - protein, 43 aa, Homo sapiens
MSWLLFLAHRVALAALPCRRGSRGFGMFYAVRRGRKTGVFLTW

SEQ ID NO: 95182 - protein, 125 aa, Homo sapiens
MMEPVHSAWATEEKTEWPKTMTGLPSTSGTTASVVIIRGMKMYVAHVGDSGVVLGIQDDPKDDFVRAVEVTQDHKPELPKERERIEGLGGSVMNKSGVNRVVWKRPRLTHNGPVRRSTVIDQIPF

SEQ ID NO: 95183 - protein, 118 aa, Homo sapiens
  MOD_RES (1)..(1): Any amino acid
XNTEKQLQYFKSLCREIKQRRRGVASILRLCQHLLDDRETCNLNADHQPMQLIIVNLERRWEAIVMQAVQWQTRLQKKMGKESVSDAFFKHNCLSFSQTKNNSFRLGNGVHLINGFTN

SEQ ID NO: 95184 - protein, 150 aa, Homo sapiens
RRSSCTASPMALCLCATSSRTAPTTGASPRGWPITSITLSTLPLICQLGNFSIHMALRDLRPAGSKTRKIPYPTKNPFTWLFLLVSCPNYTYEVGSWIGFAIMTQCLPVALFSLVGFTQMTIWAKGKHRSYLKEFRDYPPLRMPIIPFLL

SEQ ID NO: 95185 - protein, 150 aa, Homo sapiens
MWPPDPDPDPDPEPAGGSRPGPAVPGLRALLPARAFLCSLKGRLLLAESGLSFITFICYVASSASAFLTAPLLEFLLALYFLFADAMQLNDKWQGLCWPMMVFGFFATIVFATDFYLIFNDVAKFLKQGDSADETTAHKTEEENSDSDSD

SEQ ID NO: 95186 - protein, 156 aa, Homo sapiens
MATLKDQLIYNLLKEEQTPQNKITVVGVGAVGMACAISILMKDLADELALVDVIEDKLKGEMMDLQHGSLFLRTPKIVSGKDYNVTANSKLVIITAGARQQEGESRLNLVQRNVNIFKFIIPNVVKYSPNCKLLIVSNPVDILTYVAWKISGFPKN

SEQ ID NO: 95187 - protein, 107 aa, Homo sapiens
MGEPFSNPLAPDGHDVDDPHSFHQSKLTNEDFRKLLMTPRAAPTSAPPSKSRHHEMPREYNEDEDPAARRRKKKSYYAKLRQQEIERERELAEKYRDRAKERRDGVN

SEQ ID NO: 95188 - protein, 113 aa, Homo sapiens
MLLLLLSIIVLHVAVLVLLFVSTIVSQWIVGNGHATDLWQNCSTSSSGNVHHCFSSSPNGLCVMSAAAIYTVRHPEWHLNSDYSYGFAYILAWVAFPLALLSGVIYVILRKRE

SEQ ID NO: 95189 - protein, 324 aa, Homo sapiens
MMWTWALWMLPSLCKFSLAALPAKPENISCVYYYRKNLTCTWSPGKETSYTQYTVKRTYAFGEKHDNCTTNSSTSENRASCSFFLPRITIPDNYTIEVEAENGDGVIKSHMTYWRLENIAKTEPPKIFRVKPVLGIKRMIQIEWIKPELAPVSSDLKYTLRFRTVNSTSWMEVNFAKNRKDKNQTYNLTGLQPFTEYVIALRCAVKESKFWSDWSQEKMGMTEEEAPCGLELWRVLKPAEADGRRPVRLLWKKARGAPVLEKTLGYNIWYYPESNTNLTETMNTTNQQLELHLGGESFWVSMISYNSLGKSPVATLRIPAIQEK

SEQ ID NO: 95190 - protein, 95 aa, Homo sapiens
MQVHKETIDAVPNAIPGRTDIELEIYGMEGIPEKDMDERRRLLEQKTQESQKKKQQDDSDEYDDDDSAASTSFQPQPVQPQQGYIPPMAQPGLPP

SEQ ID NO: 95191 - protein, 565 aa, Homo sapiens
MFRCGGLAAGALKQKLVPLVRTVCVRSPRQRNRLPGNLFQRWHVPLELQMTRQMASSGASGGKIDNSVLVLIVGLSTVGAGAYAYKTMKEDEKRYNERISGLGLTPEQKQKKAALSASEGEEVPQDKAPSHVPFLLIGGGTAAFAAARSIRARDPGARVLIVSEDPELPYMRPPLSKELWFSDDPNVTKTLRFKQWNGKERSIYFQPPSFYVSAQDLPHIENGGVAVLTGKKVVQLDVRDNMVKLNDGSQITYEKCLIATGGTPRSLSAIDRAGAEVKSRTTLFRKIGDFRSLEKISREVKSITIIGGGFLGSELACALGRKARALGTEVIQLFPEKGNMGKILPEYLSNWTMEKVRREGVKVMPNAIVQSVGVSSGKLLIKLKDGRKVETDHIVAAVGLEPNVELAKTGGLEIDSDFGGFRVNAELQARSNIWVAGDAACFYDIKLGRRRVEHHDHAVVSGRLAGENMTGAAKPYWHQSMFWSDLGPDVGYEAIGLVDSSLPTVGVFAKATAQDNPKSATEQSAPRQFHRLPSRGRTTAKVSSSTSGTKWSWGLCYGTSLTECQ

SEQ ID NO: 95192 - protein, 247 aa, Homo sapiens
MLHIEKITTWQDPRKAMNQPLNHMNLHPAVSSTPVPQRSMAVSQPNLVMNHQHQQQMAPSTLSQQNHPTQNPPAGLMSMPNALTTQQQQQQKLRLQRIQMERERIRMRQEELMRQEAALCRQLPMEAETLAPVQAAVNPPTMTPDMRSITNNSSDPFLNGGPYHSREQSTDSGLGLGCYSVPTTPEDFLSNVDEMDTGENAGQTPMNINPQQTRFPDFLDCLPGTNVDLGTLESEDLIPLFNDVESA

SEQ ID NO: 95193 - protein, 586 aa, Homo sapiens
MSKLSFRARALDASKPLPVFRCEDLPDLHEYASINRAVPQMPTGMEKEEESEHHLQRAISAQQVYGEKRDNMVIPVPEAESNIAYYESIYPGEFKMPKQLIHIQPFSLDAEQPDYDLDSEDEVFVNKLKKKMDICPLQFEEMIDRLEKGSGQQPVSLQEAKLLLKEDDELIREVYEYWIKKRKNCRGPSLIPSVKQEKRDGSSTNDPYVAFRRRTEKMQTRKNRKNDEASYEKMLKLRRDLSRAVTILEMIKRREKSKRELLHLTLEIMEKRYNLGDYNGEIMSEVMAQRQPMKPTYAIPIIPITNSSQFKHQEAMDVKEFKVNKQDKADLIRPKRKYEKKPKVLPSSAAATPQQTSPAALPVFNAKDLNQYDFPSSDEEPLSQVLSGSSEAEEDNDPDGPFAFRRKAGCQYYAPHLDQTGNWPWTSPKDGGLGDVRYRYCLTTLTVPQRCIGFARRRVGRGGRVLLDRAHSDYDSVFHHLDLEMLSSPQHSPVNQFANTSETNTSDKSFSKDLSQILVNIKSCRWRHFRPRTPSLHDSDNDELSCRKLYRSINRTGTAQPGTQTCSTSTQSKSSSGSAHFELSSP

SEQ ID NO: 95194 - protein, 45 aa, Homo sapiens
MESDDARAARVKELLVDCYKPTEAFISGLLDKIRGMQKLSTPQKK

SEQ ID NO: 95195 - protein, 224 aa, Homo sapiens
MTLSSAIDSVDKVPVVKAKATHVIMNSLITKQTQESIQHFERQAGLRDAGYTPHKGLTTEETKYLRVAEALHKLKLQSGEVTKEERQPASAQSTPSTTPHSSPKQRPRGWFTSGSSTALPGPNPSTMDSGSGDKDRNLSDKWSLFGPRSLQKYDSGSFATQAYRGAQKPSPLELIRAQANRMAEDPAALKPPKMDIPVMEGKKQPPRAHNLKPRDLNVLTPTGF

SEQ ID NO: 95196 - protein, 268 aa, Homo sapiens
MAGLRNESEQEPLLGDTPGSREWDILETEEHYKSRWRSIRILYLTMFLSSVGFSVVMMSIWPYLQKIDPTADTSFLGWVIASYSLGQMVASPIFGLWSNYRPRKEPLIVSILISVAANCLYAYLHIPASHNKYYMLVARGLLGIGAGNVAVVRSYTAGATSLQERTSSMANISMCQALGFILGPVFQTCFTFLGEKGVTWDVIKLQINMYTTPVLLSAFLGILNIILILAILRQDLTLLLRLEGSGTISAQCNLHLPDSRILIPQLPE

SEQ ID NO: 95197 - protein, 543 aa, Homo sapiens
MPSALAIFTCRPNSHPFQERHVYLDEPIKIGRSVARCRPAQNNATFDCKVLSRNHALVWFDHKTGKFYLQDTKSSNGTFINSQRLSRGSEESPPCEILSGDIIQFGVDVTENTRKVTHGCIVSTIKLFLPDGMEARLRSDVIHAPLPSPVDKVAANTPSMYSQELFQLSQYLQEALHREQMLEQKLATLQRLLAITQEASDTSWQALIDEDRLLSRLEVMGNQLQACSKNQTEDSLRKELIALQEDKHNYETTAKESLRRVLQEKIEVVRKLSEVERSLSNTEDECTHLKEMNERTQEELRELANKYNGAVNEIKDLSDKLKVAEGKQEEIQQKGQAEKKELQHKIDEMEEKEQELQAKIEALQADNDFTNERLTALQVRLEHLQEKTLKECSSLGIQVDDFLPKINGSTEKEHLLSKSGGDCTFIHQFIECQKKLIVEGHLTKAVEETKLSKENQTRAKESDFSDTLSPSKEKSSDDTTDAQMDEQDLNEPLAKVSLLKDDLQGAQSEIEAKQEIQHLRKELIEAQELARTSKQKCFELQGQ

SEQ ID NO: 95198 - protein, 201 aa, Homo sapiens
HMGPSEIGLLATVGVTEVEVNKFPVVAVMSTGNELLNPEDDLLPGKIRDSNRSTLLATIQEHGYPTINLGIVGDNPDDLLNALNEGISRADVIITSGGVSMGEKDYLKQVLDIDLHAQIHFGRVFMKPGLPTTFATLDIDGVRKIIFALPGNPVSAVVTCNLFVVPALRKMQGILDPRPTIIKARVMLSNDQKPKWKPGNS

SEQ ID NO: 95199 - protein, 42 aa, Homo sapiens
MILTKAQYDEIAQCLVSVPPTRQSLRKLKQRFPRCRGRSPTQ

SEQ ID NO: 95200 - protein, 617 aa, Homo sapiens
MPTTHQIHVEQSISLLLNFLLAAFDPEGHGKISVFAVKMALATLCGGKIMDKLRYIFSMISDSSGVMVYGRYDQFLREVLKLPTAVFEGPSFGYTEQSARSCFSQQKKVTLNGFLDTLMSDPPPQCLVWLPLLHRLANVENVFHPVECSYCHSESMMGFRYRCQQCHNYQLCQDCFWRGHAGGSHSNQHQMKEYTSWKSPAKKLTNALSKSLSCASSREPLHPMFPDQPEKPLNLAHIVPPRPVTSMNDTLFSHSVPSSGSPFITRRLPEGISASSPVAEEHSLIKLYVNQLDHGARMLESSNRLDEEHRLIARYAARLAAESSSSPPQQRSAPDISFTIDANKQQRQLIAELENKNREILQEIQRLRLEHEQASQPTPEKAQQNPTLLAELRLLRQRKDELEQRMSALQESRRELMVQLEGLMKLLKTQGAGSPRSSPSHTISRPIPMPIRSASACSTPTHTPQDSLTGVGGDVQEAFAQSSRRNLRNDLLVAADSITNTMSSLVKELNSEVGSETESNVDSEFARTQFEDLVPSPTSEKAFLAQIHARKPGYIHSGATTSTMRGDMVTEDADPYVQPEDENYENDSVRQLENELQMEEYLKQKLQDEAYQVSLQG

SEQ ID NO: 95201 - protein, 64 aa, Homo sapiens
MEIGSAGPAGAQPLLMVPRRPGYGTMGKPIKLLANCFQVEIPKIDVYLYEVDIKPDKCPRRVNR

SEQ ID NO: 95202 - protein, 166 aa, Homo sapiens
MFTSGLTESTQKEVRIVGVEAESMDLVLNYAYTSRVILTEANVQALFTAASIFQIPSIQDQCAKYMISHLDPQNSIGVFIFADHYGHQELGDRSKEYIRKKFLCVTKEQEFLQLTKDQLISILDSDDLNVDREEHVYESIIRWFEHEQNEREVHLPEIFAKCIRFP

SEQ ID NO: 95203 - protein, 295 aa, Homo sapiens
MDVRALPWLPWLLWLLCRGGGDADSRAPFTPTWPRSREREAAAFRESLNRHRYLNSLFPSENSTAFYGINQFSYLFPEEFKAIYLRSKPSKFPRYSAEVHMSIPNVSLPLRFDWRDKQVVTQVRNQQMCGGCWAFSVVGAVESAYAIKGKPLEDLSVQQVIDCSYNNYGCNGGSTLNALNWLNKMQVKLVKDSEYPFKAQNGLCHYFSGSHSGFSIKGYSAYDFSDQEDEMAKALLTFGPLVVIVDAVSWQDYLGGIIQHHCSSGEANHAVLITGFDKTALHIGLCGIPGEVLGE

SEQ ID NO: 95204 - protein, 30 aa, Homo sapiens
MYHSLSETRHPLQPEEQEVGIDPLSSYSNK

SEQ ID NO: 95205 - protein, 230 aa, Homo sapiens
MAQLTPGNTMGLLTVADESLFTEPSEPLPEESKPVEMPFHHCHRDPLPPPGLTPERLHARRQLYAACAVCFVFMAGEVVGGYLAHSLAIMTDAAHLLADVGSMMGSLFSLWLSTRPATRTMTFGWHRSETLGALASVVSLWMVTGILLYLAFVRLLHSDYHIEGGAMLLTASIAVCANLLMAFVLHQAGPPHSHGSRGAEYAPLEEGPEEPLPLGNTSVRAAFVHVLGDL

SEQ ID NO: 95206 - protein, 169 aa, Homo sapiens
MESQCDYSMYFPAVPLPPRAELAGDPGRYRALPRRNHLYLGETVRFLLVLRCRGGAGSGTGGGPGLGSRGAWAELATALAALASVSAGGGMPGGGGAGDQDSEPPGGGDPGGGGLFRGCSPLLTHGPGPATSGGATTLPVEEPIVSTDEVIFPLTVSLDRLPPGTPKAK

SEQ ID NO: 95207 - protein, 102 aa, Homo sapiens
MQTSSSRSVHLSEWQKNYFAITSGICTGPKADAYRAQILRIQYAWANSEISQVCATKLFKKYAEKYSAIIDSDNVESGLNNYAENILTLAGSQQTDSDKWQS

SEQ ID NO: 95208 - protein, 66 aa, Homo sapiens
AQPRRWPVQVLSILCSLLFAILLAFLLAIAYLIVKELHAENLKNEDDVDTGLLGIICISRKFSLML

SEQ ID NO: 95209 - protein, 60 aa, Homo sapiens
MAAFMLGSLLRTFKQVRPLLLSTPLPLTAESHNPRVPHGSATCSARWFLHQLQAKFEVTM

SEQ ID NO: 95210 - protein, 68 aa, Homo sapiens
MDPAGRARGQGATAGGLLLRAAAAAKGLREDLWGAAALPWRSLSRIPKREGLGEEDTAVAGHELPQYQ

SEQ ID NO: 95211 - protein, 49 aa, Homo sapiens
MSLLQSALDFLAGPGSLGGASGRDQSDFVGQTVELGELRLRVRRVLAEG

SEQ ID NO: 95212 - protein, 325 aa, Homo sapiens
MRVMAPRTLILLLSGALALTETWAGSHSMRYFDTAVSRPGRGEPRFISVGYVDDTQFVRFDSDAASPRGEPRAPWVEQEGPEYWDRETQKYKRQAQADRVNLRKLRGYYNQSEDGSHTLQWMYGCDLGPDGRLLRGYDQSAYDGKDYIALNEDLRSWTAADTAAQITQRKWEAAREAEQWRAYLEGTCVEWLRRYLENGKETLQRAEHPKTHVTHHPVSDHEATLRCWALGFYPAEITLTWQRDGEDQTQDTELVETRPAGDGTFQKWAAVVVPSGEEQRYTCHVQHEGLPEPLTLRWGGKGGSCSQAAASNSAQGSDESLIACK

SEQ ID NO: 95213 - protein, 248 aa, Homo sapiens
MAQEVDTAQGAEMRRGAGAARGRASWCWALALLWLAVVPGWSRVSGIPSRRHWPVPYKRFDFRPKPDPYCQAKYTFCPTGSPIPVMEGDDDIEVFRLQAPVWEFKYGDLLGHLKIMHDAIGFRSTLTGKNYTMEWYELFQLGNCTFPHLRPEMDAPFWCNQGAACFFEGIDDVHWKENGTLVQVATISGFHHVGQDSIELRTSSDPPILASQSAGITDVSHCTRPTIRILPQRGTLYYLRWVLLCCPG

SEQ ID NO: 95214 - protein, 427 aa, Homo sapiens
  MOD_RES (1)..(1): Any amino acid
XKAASGVFWWLGIGWYQFVTLISWLNVFLLTRCLRNICKFLVLLIPLFLLLGLSLRGQGNFFSFLPVLNWASMHRTQRVDDPQDVFKPTTSRLKQPLQGDSEAFPWHWMSGVEQQVASLSGQCHHHGENLRELTTLLQKLQARVDQMEGGAAGPSASVRDAVGQPPREAIQKELEQTKQKTISAVGEQLLPTVEHLQLELDQLKSELSSWRHVKTGCETVDAVQERVDVQVREMVKLLFSEDQQGGSLEQLLQRFSSQFVSKGDLQTMLRDLQLQILRNVTHHVSVTKQLPTSEAVVSAVSEAGASGITEAQARAIVNSALKLYSQDKTGMVDFALESGGGSILSTRCSETYETKTALMSLFGIPLWYFSQSPRVVIQVHVPEQAHGGPGAHVLGSPALLQPWPAKQCSRLVHAGPGVPGEGGSGGG

SEQ ID NO: 95215 - protein, 36 aa, Homo sapiens
MATPYVPVPMPIGNSASSFTTNRNQRSSSFGSVSTS

SEQ ID NO: 95216 - protein, 92 aa, Homo sapiens
MNVHRGSDSDRLLRQEASCLVDDTLAVAQEKEANSLASSGPHNLTYPLGPRNEGCLDQEESTTSLGPMRRESMRLLKASVQLYFAQCWCFTP

SEQ ID NO: 95217 - protein, 55 aa, Homo sapiens
MVHLTPEEKSAVTALWGKVNVDEVGGCWWSTLGPRGSLSPLGICPLLMLLWATLR

SEQ ID NO: 95218 - protein, 43 aa, Homo sapiens
MSWLLFLAHRVALAALPCRRGSRGFGMFYAVRRGRKTGVFLTC

SEQ ID NO: 95219 - protein, 168 aa, Homo sapiens
MAAAPQAPGRGSLRKTRPLVVKTSLNNPYIIRWSALESEDMHFILQTLEDRLKAIGLQKIEDKKKKNKTPFLKKESREKCSIAVDISENLKEKKTDAKQQVSGWTPAHVRKQLAIGVNEVTRALERRELLLVLVCKSVKPAMITSHLIQLSLSRSVPACQVPRLSERI

SEQ ID NO: 95220 - protein, 178 aa, Homo sapiens
WTKNVEYTFTGIYTFESLIKILARGFCLEDFTFLRDPWNWLDFTVITFAYVTEFVDLGNVSALRTFRVLRALKTISVIPGLKTIVGALIQSVKKLSDVMILTVFCLSVFALIGLQLFMGNLRNKCLQWPPDNSSFEINITSFFNNSLDGNGTTFNRTVSIFNWDEYIEDKSKIYSINH

SEQ ID NO: 95221 - protein, 127 aa, Homo sapiens
MCSEIILRQEVLKDGFHRDLLIKVKFGESIEDLHTCRLLIKQDIPAGLYVDPYELASLRERNITEAVMVSENFDIEAPNYLSKESEVLIYARRDSQCIDCFQAFLPVHCRYHRPHSEDGEASIVVNN

SEQ ID NO: 95222 - protein, 991 aa, Homo sapiens
MDYRGGDGTSMDYRGREAPHMNYRDRDAHAVDFRGRDAPPSDFRGRGTYDLDFRGRDGSHADFRGRDLSDLDFRAREQSRSDFRNRDVSDLDFRDKDGTQVDFRGRGSGTTDLDFRDRDTPHSDFRGRHRSRTDQDFRGREMGSCMEFKDREMPPVDPNILDYIQPSTQDREHSGMNVNRREESTHDHTIERPAFGIQKGEFEHSETREGETQGVAFEHESPADFQNSQSPVQDQDKSQLSGREEQSSDAGLFKEEGGLDFLGRQDTDYRSMEYRDVDHRLPGSQMFGYGQSKSFPEGKTARDAQRDLQDQDYRTGPSEEKPSRLIRLSGVPEDATKEEILNAFRTPDGMPVKNLQLKEYNTGYDYGYVCVEFSLLEDAIGCMEANQGTLMIQDKEVTLEYVSSLDFWYCKRCKANIGGHRSSCSFCKNPREVTEAKQELITYPQPQKTSIPAPLEKQPNQPLRPADKEPEPRKREEGQESRLGHQKREAERYLPPSRREGPTFRRDRERESWSGETRQDGESKTIMLKRIYRSTPPEVIVEVLEPYVRLTTANVRIIKNRTGPMGHTYGFIDLDSHAEALRVVKILQNLDPPFSIDGKMVAVNLATGKRRNDSGDHSDHMHYYQGKKYFRDRRGGGRNSDWSSDTNRQGQQSSSDCYIYDSATGYYYDPLAGTYYDPNTQQEVYVPQDPGLPEEEEIKEKKPTSQGKSSSKKEMSKRDGKEKKDRGVTRFQENASEGKAPAEDVFKKPLPPTVKKEESPPPPKVVNPLIGLLGEYGGDSDYEEEEEEEQTPPPQPRTAQPQKREEQTKKENEEDKLTDWNKLACLLCRRQFPNKEVLIKHQQLSDLHKQNLEIHRKIKQSEQELAYLERREREGKFKGRGNDRREKLQSFDSPERKRIKYSRETDSDRKLVDKEDIDTSSKGGCVQQATGWRKGTGLGYGHPGLASSEEAEGRMRGPSVGASGRTSKRQSNETYRDAVRRVMFARYKELD

SEQ ID NO: 95223 - protein, 193 aa, Homo sapiens
MPMTLGYWNIRGLAHSIRLLLEYTDSSYEEKKYTMGDAPDYDRSQWLNEKFKLGLDFPNLPYLIDGTHKITQSNAILRYIARKHNLCGESEKEQIREDILENQFMDSRMQLAKLCYDPDFEKLKPEYLQALPEMLKLYSQFLGKQPWFLGDKITFVDFIAYDVLERNQVFEPSCLDAFPNLKDFISRFEVFPL

SEQ ID NO: 95224 - protein, 51 aa, Homo sapiens
MRGERRPLWEEESNAKGGVWKMKVPKDSTSTVWKELLLATIGEQFTDCAAA

SEQ ID NO: 95225 - protein, 124 aa, Homo sapiens
MQQEVRPLMAVEIIEQLHRQFAILSGGRGEDGAPIITFPEFSGFKHIPDEDFLNVMTYLTSIPSVEAASIGFIVVIDRRRDKWSSVKASLTRIAVAFPGNLQLIFILRPSRFIQRTFTDIGIKY

SEQ ID NO: 95226 - protein, 126 aa, Homo sapiens
  MOD_RES (1)..(1): Any amino acid
XAWEANKFLTPGLTHTMERHVDPEALQKMAKCAVQDYTYRGSISGHPYLPEKYWLSQEEADKCSPNYLGSDWYNTWRMEPYNSSCCNKYTTYLPRLPKVSVAPSTDVWGLGHAYPTTSQTTVTDIS

SEQ ID NO: 95227 - protein, 199 aa, Homo sapiens
  MOD_RES (1)..(1): Any amino acid
XEKKGAQDPTAFSVQDPWFCEAREARDVGDTCSVGKKDEEQAALGQKRKRKSPREHNGKVKKKKKIHQEGDALPGHSKPSRSMESSPRKGSKKKPVKVEAPEYIPISDDPKASAKKKMKSKKKVEQPVIEEPALKRKKKKKRKESGVAGDPWKEVRRKALQEEIDRESGKTEASETRKWTGTQFGQWDTAGFENEDQKL

SEQ ID NO: 95228 - protein, 125 aa, Homo sapiens
MVGEGSIQSSRYKKESKSGLVKPGSEADFSSSSSTGSISAPEVHMSTAGSKRSSSSRNRGPHGRSNGASSHKPGSSPSSPREKDLLSMLCRNQLSPVNIHPSYAPSSPSSSNSGSYKGSDCSPIM

SEQ ID NO: 95229 - protein, 95 aa, Homo sapiens
MATSSEEVLLIVKKVRQKKQDGALYLMAERIAWAPEGKDRFTISHMYADIKCQKISPEGKAKIQLQLVLHAGDTTNFHFSNESTAVKERDAVKDL

SEQ ID NO: 95230 - protein, 102 aa, Homo sapiens
MMAEREEDDDTEEAWMQLRPTEPLPSQCCGSGCSPCVFDLYHRDLARWEAAQASKDRSLLRGPESQCYQMGLMSRYVESWRVGDTAFWRGPFGDFFYKPNQA

SEQ ID NO: 95231 - protein, 91 aa, Homo sapiens
ASPLRTSRSRPHPPSIGHPAVVLTSYRSTAERKLLPLLKPPKPTRVRQDATIFGDPPQPDLDLLSEDGIQTGDSPDEAPQNTPPATVEGRY

SEQ ID NO: 95232 - protein, 181 aa, Homo sapiens
MAAAPLLPRPAEELKMAASRKCGAERNARQRGKRRPSGNAARPTPPGPGLLPRFGAPRFGGSRAGPLSGKKFGNPGEKLVKKKWNLDELPKFEKNFYQEHPDLARRTAQEVETYRRSKEITVRGHNCPKPVLNFYEANFPANVMDVIARQNFTEPTAIQAQGWPVALSGLDMVGVAQTGSG

SEQ ID NO: 95233 - protein, 77 aa, Homo sapiens
MATGAAWLLRGPWPRRRMPRAVWAAALRERGAGRLGVRGKDAWVLLTLEYMHSIRNLPSMRFREQHGEDGVEDMTQL

SEQ ID NO: 95234 - protein, 101 aa, Homo sapiens
MSLYGFVASLIILHLSGATKKGTEKQTTSETQKSVQCGTWTKHAEGGIFTSPNYPSKYPPDRECIYIIEAAPRQCIELYFDEKYSIEPSWECKFDHIEVRD

SEQ ID NO: 95235 - protein, 61 aa, Homo sapiens
MAAIYLSRGFFSREPICPFEEKTKVERMVEDYLASGYQHLSGICSVLRSVLHRHQWDRKSS

SEQ ID NO: 95236 - protein, 141 aa, Homo sapiens
MGVPRPQPWALGLLLFLLPGSLGAESHLSLLYHLTAVSSPAPGTPAFWVSGWLGPQQYLSYNSLRGEAEPCGAWVWENQVSWYWEKETTDLRIKEKLFLEAFKALGGKGPYTLQGLLGCELGPDNTSVPTAKFALNGEEFM

SEQ ID NO: 95237 - protein, 154 aa, Homo sapiens
MAGPVKDREAFQRLNFLYQAAHCVLAQDPENQALARFYCYTERTIAKRLVLRRDPSVKRTLCRGCSSLLVPGLTCTQRQRRCRGQRWTVQTCLTCQRSQRFLNDPGHLLWGDRPEAQLGSQADSKPLQPLPNTAHSISDRLPEEKMQTKGSSNQ

SEQ ID NO: 95238 - protein, 53 aa, Homo sapiens
MEPGGEPTGAKESSTLMESLAETGSHYVGQAGLELQVSSGPPASASESAEIQL

SEQ ID NO: 95239 - protein, 91 aa, Homo sapiens
MWTADEIAQLCYEHYGIRLPKKGKPEPNHEWTLLAAVVKIQSPADKACDTPDKPVQVTKEVVSMGTGTKCIGQSKMRKNGTFSTNSSWQPP

SEQ ID NO: 95240 - protein, 980 aa, Homo sapiens
MACPALGLEALQPLQPEPPPEPAFSEAQKWIEQVTGRSFGDKDFRTGLENGILLCELLNAIKPGLVKKINRLPTPIAGLDNIILFLRGCKELGLKESQLFDPSDLQDTSNRVTVKSLDYSRKLKNVLVTIYWLGKAANSCTSYSGTTLNLKEFEGLLAQMRKDTDDIESPKRSIRDSGYIDCWDSERSDSLSPPRHGRDDSFDSLDSFGSRSRQTPSPDVVLRGSSDGRGSDSESDLPHRKLPDVKKDDMSARRTSHGEPKSAVPFNQYLPNKSNQTAYVPAPLRKKKAEREEYRKSWSTATSPLGGERPFRYGPRTPVSDDAESTSMFDMRCEEEAAVQPHSRARQEQLQLINNQLREEDDKWQDDLARWKSRRRSVSQDLIKKEEERKKMEKLLAGEDGTSERRKSIKTYREIVQEKERRERELHEAYKNARSQEEAEGILQQYIERFTISEAVLERLEMPKILERSHSTEPNLSSFLNDPNPMKYLRQQSLPPPKFTATVETTIARASVLDTSMSAGSGSPSKTVTPKAVPMLTPKPYSQPKNSQDVLKTFKVDGKVSVNGETVHREEEKERECPTVAPAHSLTKSQMFEGVARVHGSPLELKQDNGSIEINIKKPNSVPQELAATTEKTEPNSQEDKNDGGKSRKGNIELASSEPQHFTTTVTRCSPTVAFVEFPSSPQLKNDVSEEKDQKKPENEMSGKVELVLSQKERYQKEQDKLKEEWEKAQKEVEEEERRYYEEERKIIEDTVVPFTVSSSSADQLSTSSSMTEGSGTMNKIDLGNCQDEKQDRRWKKSFQGDDSDLLLKTRESDRLEEKGSLTEGALAHSGNPVSKGVHEDHQLDTEAGAPHCGTNPQLAQDPSQNQQTSNPTHSSEDVKPKTLPLDKSINHQIESPSERRKSISGKKLCSSCGLPLGKGAAMIIETLNLYFHIQCFRCGICKGQLGDAVSGTDVRIRNGLLNCNDCYMRSRSAGQPTTL

SEQ ID NO: 95241 - protein, 135 aa, Homo sapiens
  MOD_RES (1)..(1): Any amino acid
XAKLADHGKKMFLITNSPSSFVDKGMSYIVGKDWRDLFDVVIVQAEKPNFFNDKRRPFRKMNEKGVLLWDKIHKLQKGQIYKQGNLYEFLKLTGWRGSRVLYFGDHIYSDLATMVNDSRPSVSAGVVTHGNYFQN

SEQ ID NO: 95242 - protein, 1024 aa, Homo sapiens
  MOD_RES (1)..(1): Any amino acid
XTTTTIGISATSATFTNVFGKKRANVVTTPSTNRKNKKNKTKETPPTAHLILPEQHMSLAQQKADKNKINGEPRGGGAGGNSDSDNLDSTDCNSESSSGGKSQELNFVMDVNSSKYPSLLLHSQEEKTSTATSKTQTRLEGEVTPNSLSTSYKTVSLPLSSPNIKLNLTSPKRGQKREEGWKEVVRRSKKLSVPASVVSRIMGRGGCNITAIQDVTGAHIDVDKQKDKNGERMITIRGGTESTRYAVQLINALIQDPAKELEDLIPKNHIRTPASTKSIHANFSSGVGTTAASSKNAFPLGAPTLVTSQATTLSTFQPANKLNKNVPTNVRSSFPVSLPLAYPHPHFALLAAQTMQQIRHPRLPMAQFGGTFSPSPNTWGPFPVRPVNPGNTNSSPKHNNTSRLPNQNGTVLPSESAGLATASCPITVSSVVAASQQLCVTNTRTPSSVRKQLFACVPKTSPPATVISSVTSTCSSLPSVSSAPITSGQAPTTFLPASTSQAQLSSQKMESFSAVPPTKEKVSTQDQPMANLCTPSSTANSCSSSASNTPGAPETHPSSSPTPTSSNTQEEAQPSSVSDLSPMSMPFASNSEPAPLTLTSPRMVAADNQDTSNLPQLAVPAPRVSHRMQPRGSFYSMVPNATIHQDPQSIFVTNPVTLTPPQGPPAAVQLSSAVNIMNGSQMHINPANKSLPPTFGPATLFNHFSSLFDSSQVPANQGWGDGPLSSRVATDASFTVQSAFLGNSVLGHLENMHPDNSKAPGFRPPSQRVSTSPVGLPSIDPSGSSPSSSSAPLASFSGIPGTRVFLQGPAPVGTPSFNRQHFSPHPWTSASNSSTSAPPTLGQPKGVSASQDRKIPPPIGTERLARIRQGGSVAQAPAGTSFVAPVGHSGIWSFGVNAVSEGLSGWSQSVMGNHPMHQQLSDPSTFSQHQPMERDDSGMVAPSNIFHQPMGLPISMYGGTIIPSHPQLADVPGGPLFNGLHNPDPAWNPMIKVIQNSTECTDAQQIWPGTWAPHIGNMHLKYVN

SEQ ID NO: 95243 - protein, 56 aa, Homo sapiens
MAGLNSLEAVKRKIQALQQQADEAEDRAQGLQRELDGERERREKRNEGDRKPGHEG

SEQ ID NO: 95244 - protein, 146 aa, Homo sapiens
MAKFALNQNLPGILKSIMKKRDGTPGAQPSSGPKSLQFVGVLNGEYESSSSEDASDSDGDSENGGAEPPGSSSGSGDDSGGGSDSGTPGPPSGGDIRDPEPEAEAEPQQVAQGRCELSPRLREACVALQRQLSRPRGVASDGGAVR

SEQ ID NO: 95245 - protein, 648 aa, Homo sapiens
AACSGASRRSERRMPTVCGSSSRRISSTAVPWMNVFSSTPRRSRSRPGGPCPGREGGWLPLVGWPRAAGASQSGWFAFQLAQDDAWKCPHCQVLQQGMVKLSLWTLPDILIIHLKRFCQVGERRNKLSTLVKFPLSGLNMAPHVAQRSTSPEAGLGPWPSWKQPDCLPTSYPLDFLYDLYAVCNHHGNLQGGHYTAYCRNSLDGQWYSYDDSTVEPLREDEVNTRGAYILFYQKRNSIPPWSASSSMRGSTSSSLSDHWLLRLGSHAGSTRGSLLSWSSAPCPSLPQVPDSPIFTNSLCNQEKGGLEPRRLVRGVKGRSISMKAPTTSRAKQGPFKTMPLRWSFGSKEKPPGASVELVEYLESRRRPRSTSQSIVSLLTGTAGEDEKSASPRSNVALPANSEDGGRAIERGPAGVPCPSAQPNHCLAPGNSDGPNTARKLKENAGQDIKLPRKFDLPLTVMPSVEHEKPARPEGQKAMNWKESFQMGSKSSPPSPYMGFSGNSKDSRRGTSELDRPLQGTLTLLRSVFRKKENRRNERAEVSPQVPPVSLVSGGLSPAMDGQAPGSPPALRIPEGLARGLGSRLERDVWSAPSSLRLPRKASRAPRGSALGMSQRTVPGEQASYGTFQRVKYHTLSLGRKKTLPESSF

SEQ ID NO: 95246 - protein, 222 aa, Homo sapiens
MAAMDTGQRADPSNPGDKEGDLQGLWQELYQLQAKQKKLKREVEKHKLFEDYLIKVLEKIPEGCTGWEEPEEVLVEATVKHYGKLFTASQDTQKRLEAFCQMIQAVHRSLESLEEDHRALMLSLKIRLCQLQKKCYRKQEQWWQLKHSITYQKDIDFDTHTSSSYNDQLLGYMQMTITNMARQCCPSAHGVPKSMDLFSKLDLIKRQGFTKLARLVFNSDLK

SEQ ID NO: 95247 - protein, 91 aa, Homo sapiens
  MOD_RES (1)..(1): Any amino acid
XSCTSTWAPCPGRGSKQPPSARSMNGSARRRCQRPSRSSAKAIPPNSQHTSTSAAPCGLTTSPTTLTYVSSSATSSTGRASPMTTSLTGTC

SEQ ID NO: 95248 - protein, 42 aa, Homo sapiens
MDISTRSKDPGSAERTAQKRKFPSPPHSSNGHSPQDTSTSPI

SEQ ID NO: 95249 - protein, 1271 aa, Homo sapiens
MAKQPGRSVQLLKSTDVGRHSLLYLKEIGRGWFGKVFLGEVNSGISSAQVVVKELQASASVQEQMQFLEEVQPYRALKHSNLLQCLAQCAEVTPYLLVMEFCPLGDLKGYLRSCRVAESMAPDPRTLQRMACEVACGVLHLHRNNFVHSDLALRNCLLTADLTVKIGDYGLAHCKYREDYFVTADQLWVPLRWIAPELVDEVHSNLLVVDQTKSGNVWSLGVTIWELFELGTQPYPQHSDQQVLAYTVREQQLKLPKPQLQLTLSDRWYEVMQFCWLQPEQRPTAEEVHLLLSYLCAKGATEAEEEFERRWRSLRPGGGGVGPGPGAAGPMLGGVVELAAASSFPLLEQFAGDGFHADGDDVLTVTETSRGLNFEYKWEAGRGAEAFPATLSPGRTARLQELCAPDGAPPGVVPVLSAHSPSLGSEYFIRLEEAAPAAGHDPDCAGCAPSPPATADQDDDSDGSTAASLAMEPLLGHGPPVDVPWGRGDHYPRRSLARDPLCPSRSPSPSAGPLSLAEGGAEDADWGVAAFCPAFFEDPLGTSPLGSSGAPPLPLTGEDELEEVGARRAAQRGHWRSNVSANNNSGSRCPESWDPVSAGGHAEGCPSPKQTPRASPEPGYPGEPLLGLQAASAQEPGCCPGLPHLCSAQGLAPAPCLVTPSWTETASSGGDHPQAEPKLATEAEGTTGPRLPLPSVPSPSQEGAPLPSEEASAPDAPDALPDSPTPATGGEVSAIKLASALNGSSSSPEVEAPSSEDEDTAEATSGIFTDTSSDGLQARRPDVVPAFRSLQKQVGTPDSLDSLDIPSSASDGGYEVFSPSATGPSGGQPRALDSGYDTENYESPEFVLKEAQEGCEPQAFAELASEGEGPGPETRLSTSLSGLNEKNPYRDSAYFSDLEAEAEATSGPEKKCGGDRAPGPELGLPSTGQPSEQVCLRPGVSGEAQGSGPGEVLPPLLQLEGSSPEPSTCPSGLVPEPPEPQGPAKVRPGPSPSCSQFFLLTPVPLRSEGNSSEFQGPPGLLSGPAPQKRMGGPGTPRAPLRLALPGLPAALEGRPEEEEEDSEDSDESDEELRCYSVQEPSEDSEEEAPAVPVVVAESQSARNLRSLLKMPSLLSETFCEDLERKKKAVSFFDDVTVYLFDQESPTRELGEPFPGAKESPPTFLRGSPGSPSAPNRPQQADGSPNGSTAEEGGGFAWDDDFPLMTAKAAFAMALDPAAPAPAAPTPTPAPFSRFTVSPAPTSRFSITHVSDSDAESKRGPEAGAGGESKEA

SEQ ID NO: 95250 - protein, 333 aa, Homo sapiens
MTLELGGKVTIECAKNNFQAQLEFKLKPFFGGSTSINQISGKITSGEEVLASLSGHWDRDVFIKEEGSGSSALFWTPSGEVRRQRLRQHTVPLEEQTELESERLWQHVTRAISKGDQHRATQEKFALEEAQRQRARERQESLMPWKPQLFHLDPITQEWHYRYEDHSPWDPLKDIAQFEQDGILRTLQQEAVARQTTFLGSPGPRHERSGPDQRLRKASDQPSGHSQATESSGSTPESCPELSDEEQDGDFVPGGESPCPRCRKEARRLQALHEAILSIREAQQELHRHLSAMLSSTARAAQAPTPGLLQSPRSWFLLCVFLACQLFINHILK

SEQ ID NO: 95251 - protein, 94 aa, Homo sapiens
MSVGFIGAGQLAFALAKGFTAAGVLAAHKIMASSPDMDLATVSALRKMGVKLTPHNKETVQHSDVLFLAVKPHIIPFILDEIGADIEDRHIVVS

SEQ ID NO: 95252 - protein, 616 aa, Homo sapiens
MLARRQRDPLQALRRRNQELKQQVDSLLSESQLKEALEPNKRQHIYQRCIQLKQAIDENKNALQKLSKADESAPVANYNQRKEEEHTLLDKLTQQLQGLAVTISRENITEVGAPTEEEEESESEDSEDSGGEEEDAEEEEEEKEENESHKWSTGEEYIAVGDFTAQQVGDLTFKKGEILLVIEKKPDGWWIAKDAKGNEGLVPRTYLEPYSEEEEGQESSEEGSEEDVEAVDETADGAEVKQRTDPHWSAVQKAISEIRSRPSRISLILTLWSCKMIPLPGMSIQVLSRHVRLCLFDGNKVLSNIHTVRATWQPKKPKTWTFSPQVTRILPCLLDGDCFIRSNSASPDLGILFELGISYIRNSTGERGELSCGWVFLKLFDASGVPIPAKTYELFLNGGTPYEKGIEVDPSISRRAHGSVFYQIMTMRRQPQLLVKLRSLNRRSRNVLSLLPETLIGNMCSIHLLIFYRQILGDVLLKDRMSLQSTDLISHPMLATFPMLLEQPDVMDALRSSWAGKESTLKRSEKRDKEFLKSTFLLVYHDCVLPLLHSTRLPPFRWAEEETETARWKVITDFLKQNQENQGALQALLSPDGVHEPFDLSEQTYDFLGEMRKNAV

SEQ ID NO: 95253 - protein, 71 aa, Homo sapiens
MTGLEDQEFDFEFLFEFNQRDEGAAAAAPARPCPPWTGSCRPTQARMSFGLRCSPSPTTEPTTRRRAAGGP

SEQ ID NO: 95254 - protein, 117 aa, Homo sapiens
MEAPLQTGMVLGVMIGAGVAVVVTAVLILLVVRRLRVPKTPAPDGPRYRFRKRDKVLFYGRKIMRKVSQSTSSLVDTSVSATSRPRMRKKLKMLNIAKKILRIQKETPTLQRKEPPP

SEQ ID NO: 95255 - protein, 118 aa, Homo sapiens
YVKQTLREFILKAFSKKPKISREIRQAEDLNTKKENYISNHTLAEMSKGHNFLKEKDKISGFGSSVDKHLMEDSDGQSFIHNPSLTVTVPIAPGESDLENMNAEELSSDSDSEYSKVG

SEQ ID NO: 95256 - protein, 1760 aa, Homo sapiens
MSCSKAYGERYVASVQGSAPSPRKKSTRGFYFAKLYYEAKEYDLAKKYICTYINVREMDPRAHRFLGLLYELEENTEKAVECYRRSVELNPTQKDLVLKIAELLCKNDVTDGRAEYWVERAAKLFPGSPAIYKLKEQLLDCEGEDGWNKLFDLIQSELYVRPDDVHVNIRLVELYRSTKRLKDAVARCHEAERNIALRSSLEWNSCVVQTLKEYLESLQCLESDKSDWRATNTDLLLAYANLMLLTLSTRDVQESRELLESFDSALQSAKSSLGGNDELSATFLEMKGHFYMHAGSLLLKMGQHGNNVQWRALSELAALCYLIAFQVPRPKIKLIKGEAGQNLLEMMACDRLSQSGHMLLNLSRGKQDFLKVVVETFANKSGQSALYDALFSSQSPKDTSFLGSDDIGNIDVQEPELEDLARYDVGAIRAHNGSLQHLTWLGLQWNSLPALPGIRKWLKQLFHHLPQETSRLETNAPESICILDLEVFLLGVVYTSHLQLKEKCNSHHSSYQPLCLPLPVCKQLCTERQKSWWDAVCTLIHRKAVPGNSAKLRLLVQHEINTLRAQEKHGLQPALLVHWAKCLQKMGSGLNSFYDQREYIGRSVHYWKKVLPLLKIIKKKNSIPEPIDPLFKHFHSVDIQASEIVEYEEDAHVTFAILDAVNGNIEDAMTAFESIKSVVSYWNLALIFHRKAEDIANDALSPEEQEECKNYLRKTRGYLIKILDDSDSNLSVVKKLPVPLESVKEMLKSVMQELENYSEGGPLYKNGSLRNADSEIKHSTPSPTKYSLSPSKSYKYSPKTPPRWAEDQNSLLKMIRQEVKAIKKLNSSKSASHHRWPTENYGPDSVPDGYQGSQTFHGAPLTVATTGPSVYYSQSPAYNSQYLLRPAANVTPTKGSSNTEFKSTKEGFSIPVSADGFKFGISEPGNQEKKSEKPLENDTGLQAQDISGRKKGRGVIFGQTSSTFTFADVAKSTSGEGFQFGKKDLNFKGFSGAGEKLFSSQYGKMANKANTSGDFEKDDDAYKTEDSDDIHFEPVVQMPEKVELVTGEEGEKVLYSQGVKLFRFDAEVSQWKERGLGNLKILKNEVNGKVRMLMQREQVLKVCANHWITTTMNLKPLSGSDRAWMWSASDFSDGDAKLERLAAKFKTPELAEEFKQKFEECQRLLLDIPLQTPHKLVDTGRAAKLIQRAEEMKSGLKDFKTFLTNDQTKVAEEENKGSGTGAAGASDTTIKPNAENTGPTLEWDNYDLREDALDDSVSSSSVHASPLASSPVRKNLFHFDESTTGSNFSFKSALSLSKSPAKLNQSGTSVGTDEESDVTQEEERDGQYFEPVVPLPDLVEVSSGEENEQVVFSHRAEFYRYDKDVGQWKERGIGDIKILQNYDNKHVRILMRRDQVLKLCANHRITPDMSLQNMKGTERVWVWTACDFADGERKVEHLAVRFKLQDVADSFKKIFDEAKTAQEKDSLITPHVSRSSTPRESPCGKIAVAVLEETTRERTDVIQGDDVADAASEVEVSSTSETTTKAVVSPPKFVFGSESVKRIFSSEKSKPFAFGNSSATGSLFGFSFNAPLKSNNSETSSVAQSGSESKVEPKKCELSKNSDIEQSSDSKVKNLSASFPTEESSINYTFKTPEKEPPLWYAEFTKEELVQKLSSTTKSADHLNGLLREIEATNAVLMEQIKLLKSEIRRLERNQEQEVSAANVEHLKNVLLQFIFLKPGSERERLLPVINTMLQLSLEEKGKLAAVAQGLQETSIPKKK

SEQ ID NO: 95257 - protein, 204 aa, Homo sapiens
QKIGDTKRNTPIEALCENFPEEMATYLRYVRRLDFFEKPDYEYLRTLFTDLFEKKGYTFDYAYDWVGRPIPTPVGSVHVDSGASAITRESHTHRDRPSQQQPLRNQNVSSERRGEWEIQPSRQTNTSYLTSHLAADRHGGSVQVVSSTNGELNVDDPTGAHSNAPITAHAEVEVVEEANCLKMLNLWCCCFFKRKRKKTAQRHK

SEQ ID NO: 95258 - protein, 3121 aa, Homo sapiens
MPGAAGVLLLLLLSGGLGGVQAQRPQQQRQSQAHQQRGLFPAVLNLASNALITTNATCGEKGPEMYCKLVEHVPGQPVRNPQCRICNQNSSNPNQRHPITNAIDGKNTWWQSPSIKNGIEYHYVTITLDLQQVFQIAYVIVKAANSPRPGNWILERSLDDVEYKPWQYHAVTDTECLTLYNIYPRTGPPSYAKDDEVICTSFYSKIHPLENGEIHISLINGRPSADDPSPELLEFTSARYIRLRFQRIRTLNADLMMFAHKDPREIDPIVTRRYYYSVKDISVGGMCICYGHARACPLDPATNKSRCECEHNTCGDSCDQCCPGFHQKPWRAGTFLTKTECEACNCHGKAEECYYDENVARRNLSLNIRGKYIGGGVCINCTQNTAGINCETCTDGFFRPKGVSPNYPRPCQPCHCDPIGSLNEVCVKDEKHARRGLAPGSCHCKTGFGGVSCDRCARGYTGYPDCKACNCSGLGSKNEDPCFGPCICKENVEGGDCSRCKSGFFNLQEDNWKGCDECFCSGVSNRCQSSYWTYGKIQDMSGWYLTDLPGRIRVAPQQDDLDSPQQISISNAEARQALPHSYYWSAPAPYLGNKLPAVGGQLTFTISYDLEEEEEDTERVLQLMIILEGNDLSISTAQDEVYLHPSEEHTNVLLLKEESFTIHGTHFPVRRKEFMTVLANLKRVLLQITYSFGMDAIFRLSSVNLESAVSYPTDGSIAAAVEVCQCPPGYTGSSCESCWPRHRRVNGTIFGGICEPCQCFGHAESCDDVTGECLNCKDHTGGPYCDKCLPGFYGEPTKGTSEDCQPCACPLNIPSNNFSPTCHLDRSLGLICDGCPVGYTGPRCERCAEGYFGQPSVPGGSCQPCQCNDNLDFSIPGSCDSLSGSCLICKPGTTGRYCELCADGYFGDAVDAKNCQPCRCNAGGSFSEVCHSQTGQCECRANVQGQRCDKCKAGTFGLQSARGCVPCNCNSFGSKSFDCEESGQCWCQPGVTGKKCDRCAHGYFNFQEGGCTACECSHLGNNCDPKTGRCICPPNTIGEKCSKCAPNTWGHSITTGCKACNCSTVGSLDFQCNVNTGQCNCHPKFSGAKCTECSRGHWNYPRCNLCDCFLPGTDATTCDSETKKCSCSDQTGQCTCKVNVEGIHCDRCRPGKFGLDAKNPLGCSSCYCFGTTTQCSEAKGLIRTWVTLKAEQTILPLVDEALQHTTTKGIVFQHPEIVAHMDLMREDLHLEPFYWKLPEQFEGKKLMAYGGKLKYAIYFEAREETGFSTYNPQVIIRGGTPTHARIIVRHMAAPLIGQLTRHEIEMTEKEWKYYGDDPRVHRTVTREDFLDILYDIHYILIKATYGNFMRQSRISEISMEVAEQGRGTTMTPPADLIEKCDCPLGYSGLSCEACLPGFYRLRSQPGGRTPGPTLGTCVPCQCNGHSSLCDPETSICQNCQHHTAGDFCERCALGYYGIVKGLPNDCQQCACPLISSSNNFSPSCVAEGLDDYRCTACPRGYEGQYCERCAPGYTGSPGNPGGSCQECECDPYGSLPVPCDPVTGFCTCRPGATGRKCDGCKHWHAREGWECVFCGDECTGLLLGDLARLEQMVMSINLTGPLPAPYKMLYGLENMTQELKHLLSPQRAPERLIQLAEGNLNTLVTEMNELLTRATKVTADGEQTGQDAERTNTRAKSLGEFIKELARDAEAVNEKAIKLNETLGTRDEAFERNLEGLQKEIDQMIKELRRKNLETQKEIAEDELVAAEALLKKVKKLFGESRGENEEMEKDLREKLADYKNKVDDAWDLLREATDKIREANRLFAVNQKNMTALEKKKEAVESGKRQIENTLKEGNDILDEANRLADEINSIIDYVEDIQTKLPPMSEELNDKIDDLSQEIKDRKLAEKVSQAESHAAQLNDSSAVLDGILDEAKNISFNATAAFKAYSNIKDYIDEAEKVAKEAKDLAHEATKLATGPRGLLKEDAKGCLQKSFRILNEAKKLANDVKENEDHLNGLKTRIENADARNGDLLRTLNDTLGKLSAIPNDTAAKLQAVKDKARQANDTAKDVLAQITELHQNLDGLKKNYNKLADSVAKTNAVVKDPSKNTVADADATVKNLEQEADRLIDKLKPIKELEDNLKKNISEIKELINQARKQANSIKVSVSSGGDCIRTYKPEIKKGSYNNIVVNVKTAVADNLLFYLGSAKFIDFLAIEMRKGKVSFLWDVGSGVGRVEYPDLTIDDSYWYRIVASRTGRNGTISVRALDGPKASIVPSTHHSTSPPGYTILDVDANAMLFVGGLTGKLKKADAVRVITFTGCMGETYFDNKPIGLWNFREKEGDCKGCTVSPQVEDSEGTIQFDGEGYALVSRPIRWYPNISTVMFKFRTFSSSALLMYLATRDLRDFMSVELTDGHIKVSYDLGSGMASVVSNQNHNDGKWKSFTLSRIQKQANISIVDIDTNQEENIATSSSGNNFGLDLKADDKIYFGGLPTLRNLSMKARPEVNLKKYSGCLKDIEISRTPYNILSSPDYVGVTKGCSLENVYTVSFPKPGFVELSPVPIDVGTEINLSFSTKNESGIILLGSGGTPAPPRRKRRQTGQAYYAILLNRGRLEVHLSTGARTMRKIVIRPEPNLFHDGREHSVHVERTRGIFTVQVDENRRYMQNLTVEQPIEVKKLFVGGAPPEFQPSPLRNIPPFEGCIWNLVINSVPMDFARPVSFKNADIGRCAHQKLREDEDGAAPAEIVIQPEPVPTPAFPTPTPVLTHGPCAAESEPALLIGSKQFGLSRNSHIAIAFDDTKVKNRLTIELEVRTEAESGLLFYMARINHADFATVQLRNGLPYFSYDLGSGDTHTMIPTKINDGQWHKIKIMRSKQEGILYVDGASNRTISPKKADILDVVGMLYVGGLPINYTTRRIGPVTYSIDGCVRNLHMAEAPADLEQPTSSFHVGTCFANAQRGTYFDGTGFAKAVGGFKVGLDLLVEFEFRTTTTTGVLLGISSQKMDGMGIEMIDEKLMFHVDNGAGRFTAVYDAGVPGHLCDGQWHKVTANKIKHRIELTVDGNQVEAQSPNPASTSADTNDPVFVGGFPDDLKQFGLTTSIPFRGCIRSLKLTKGTGKPLEVNFAKALELRGVQPVSCPAN

SEQ ID NO: 95259 - protein, 1167 aa, Homo sapiens
MSLKPQQQQQQQQQQQQQQQQQQQQQQQPPPAAANVRKPGGSGLLASPAAAPSPSSSSVSSSSATAPSSVVAATSGGGRPGLGRGRNSNKGLPQSTISFDGIYANMRMVHILTSVVGSKCEVQVKNGGIYEGVFKTYSPKCDLVLDAAHEKSTESSSGPKREEIMESILFKCSDFVVVQFKDMDSSYAKRDAFTDSAISAKVNGEHKEKDLEPWDAGELTANEELEALENDVSNGWDPNDMFRYNEENYGVVSTYDSSLSSYTVPLERDNSEEFLKREARANQLAEEIESSAQYKARVALENDDRSEEEKYTAVQRNSSEREGHSINTRENKYIPPGQRNREVISWGSGRQNSPRMGQPGSGSMPSRSTSHTSDFNPNSGSDQRVVNGVFILSFISFVLSGVPWPSPCPSPSSRPPSRYQSGPNSLPPRAATPTRPPSRPPSRPSRPPSHPSAHGSPAPVSTMPKRMSSEGPPRMSPKAQRHPRNHRVSAGRGSISSGLEFVSHNPPSEAATPPVARTSPSGGTWSSVVSGVPRLSPKTHRPRSPRQNSIGNTPSGPVLASPQAGIIPTEAVAMPIPAASPTPASPASNRAVTPSSEAKDSRLQDQRQNSPAGNKENIKPNETSPSFSKAENKGISPVVSEHRKQIDDLKKFKNDFRLQPSSTSESMDQLLNKNREGEKSRDLIKDKIEPSAKDSFIENSSSNCTSGSSKPNSPSISPSILSNTEHKRGPEVTSQGVQTSSPACKQEKDDKEEKKDAAEQVRKSTLNPNAKEFNPRSFSQPKPSTTPTSPRPQAQPSPSMVGHQQPTPVYTQPVCFAPNMMYPVPVSPGVQPLYPIPMTPMPVNQAKTYRAGKVPNMPQQRQDQHHQSAMMHPASAAGPPIAATPPAYSTQYVAYSPQQFPNQPLVQHVPHYQSQHPHVYSPVIQGNARMMAPPTHAQPGLVSSSATQYGAHEQTHAMYACPKLPYNKETSPSFYFAISTGSLAQQYAHPNATLHPHTPHPQPSATPTGQQQSQHGGSHPAPSPVQHHQHQAAQALHLASPQQQSAIYHAGLAPTPPSMTPASNTQSPQNSFPAAQQTVFTIHPSHVQPAYTNPPHMAHVPQAHVQSGMVPSHPTAHAPMMLMTTQPPGGPQAALAQSALQPIPVSTTAHFPYMTHPSVQAHHQQQL

SEQ ID NO: 95260 - protein, 69 aa, Homo sapiens
  MOD_RES (1)..(1): Any amino acid
XRGTARGFQPPEGGFGWVVVFAATWCNGSIFGIHNSVGILYSMLLEEEKEKNRQVEFQAGFGIRMMLAS

SEQ ID NO: 95261 - protein, 110 aa, Homo sapiens
MAKPAQGAKYRGSIHDFPGFDPNQDAEALYTAMKGFGSDKEAILDIITSRSNRQRQEVCQSYKSLYGKDLIADLKYELTGKFERLIVGLMRPPAYCDAKEIKDAISGIGT

SEQ ID NO: 95262 - protein, 116 aa, Homo sapiens
  MOD_RES (1)..(1): Any amino acid
XTDDVVGPEGMEKFCEDIGVEPENVVMLVLAWKLDAQNMGYFTLQEWLKGMTSLQCDTTEKLRNTLDYLRSFLNDSTNFKLIYRYAFDFARAEDGVSDCELLAGTLAEQEKRTSAA

SEQ ID NO: 95263 - protein, 198 aa, Homo sapiens
  MOD_RES (1)..(1): Any amino acid
XRRLLKDDGRGVSEPLMENGSGAWVRGRHLVLLDTAQAAAAGHRLLAEQEVLAPQVVLAPGGGAAYNLGAPPRTQFSGLRRDLPPSVHLLTLASWGPEMVLLRLEHQFAVGEDSGRNLSAPVTLNLRDLFSTFTITRLQETTLVANQLREAASRLKWTTNTGPTPHQTPYQLDPANITLEPMEIRTFLASVQWKEVDG

SEQ ID NO: 95264 - protein, 407 aa, Homo sapiens
MAPWLQLLSLLGLLPGAVAAPAQPRAASFQAWGPPSPELLAPTRFALEMFNRGRAAGTRAVLGLVRGRVRRAGQGSLYSLEATLEEPPCNDPMVCRLPVSKKTLLCSFQVLDELGRHVLLRKDCGPVDTKVPGAGEPKSAFTQGSAMISSLSQNHPDNRNETFSSVISLLNEDPLSQDLPVKMASIFKNFVITYNRTYESKEEARWRLSVFVNNMVRAQKIQALDRGTAQYGVTKFSDLTEEEFRTIYLNTLLRKEPGNKMKQAKSVGDLAPPEWDWRSKGAVTKVKDQGMCGSCWAFSVTGNVEGQWFLNQGTLLSLSEQELLDCDKMDKACMGGLPSNAYSAIKNLGGLETEDDYSYQGHMQSCNFSAEKAKVYINDSVELSQNEQILPPRDLPPSPAPLQPLAH

SEQ ID NO: 95265 - protein, 117 aa, Homo sapiens
MGCGLNKLEKRDEKRPGNIYSTLKRPQVETKIDVSYEYRFLEFTTLSAAELPGSSAVRLASLRDLPAQLLELYQQGFSLAALHPFVQPTHEREKTPLEHIFRAILIKKTDRKSHLCQ

SEQ ID NO: 95266 - protein, 189 aa, Homo sapiens
MLANSASVRILIKGGKVVNDDCTHEADVYIENGIIQQVGRELMIPGGAKVIDATGKLVIPGGIDTSTHFHQTFMNATCVDDFYHGTKAALVGGTTMIIGHVLPDKETSLVDAYEKCRGLADPKVCCDYALHVGITWWAPKVKAEMETLVREKGVNSFQMFMTYKDLYMLRDSELYQVLHACKDIGAIAR

SEQ ID NO: 95267 - protein, 60 aa, Homo sapiens
MSSHLVEPPPPLHNNNNNCEENEQSLPPPAGLNIRRRSCRRREGSRGFEEKCGLGIRLVQ

SEQ ID NO: 95268 - protein, 1102 aa, Homo sapiens
TFPWLPLTTTDRHVLSSNESSLRSSNHTLIWNTCELLKDVIMQDFPAEIFLQRPKIVQSLLSLLKLAFGDGKHRLALQSVSCLQQLCMYLRNRLNFHRDPGFFSNKHDTVSQNSSLSYCHEARGTHHSQNPSPGSSSPRPSVVGRTGQRPRGDGQDWDAASSSGSSSHAHVNSRISVHSPLDMGHIDLPELETEDTLELQFQQLSLPQFCVSILESAVPLLRTGSRQVIIRVLELLTEDMTLIGEAISTDIWDDSSLFGIDMKEKLLLVLGALGETMCYHKSSISLEQPEVMLVHHRMAFISISLFAVRLLQTLLPVEKASEFLSEPMSTALFLLSLDMPISLEYPNIHEAVVAYLEQLNSENYSIYKRTAEAVYSIECTCNFLSDIGKEGEKNLLELVELADQALRSFSYHQHFPLIKEIISICSKIWKSAQASPLLQGESQKVLLHMLSHPLPRVKAETYHCCLEITKECLGVHNVTKPVSSLCNGIHFLLHPKVLYEISVFGIQEPESEVNTAAKAILLYLLQGRLMMTALTWNKFIESLCPVIPILQGYADTEDPLGNCILLLSKASSDTEEMLPCTTRLKSMLRLLLVKKPSVRSLALKLLAFHLTSEEGADTKRPLIDARVLSRVTDLFIGKKPIELRLDDRRELVIKLETVEKVYEIFTSDDVDLVLRKSAAEQLAVIMQDIKMHAVVKKLCLIDKIIEYLNECVSQDGKVVECLVQPCLTLLRKVLCGDPVMRVSLSQQSSLLTVLFRVSLIFHEDCSVVTEVGALFCLLLFDEVSRMDMWSVNPSNKPSLPSVFSLPVSVFRRYHLPVHVIGHHAVSPYSIVLPLSADCLALKPVSDMLRIAWNLSWYHGSDNLLKQMNSETKTQEFLQVLPACTEDEKLLIDIIHFLNKLIKEQRKNSSLELLNWILELLLRHSANPLLDLLVLTESQAREETDDIRTAVRQQLQKELIALFDTLLLNFMEVTDRKCSELLYVFQTQLALKLLQCLKVTDAPHFYGLPSLERTLRGMANLTAFPGWSSHSPLTKPLDICVKYLSGLLEVITSFYVERGGNAMSFMGKGVTKSTILCLLHLSHEMMAQAGSLEWMSLWFLPLG

SEQ ID NO: 95269 - protein, 39 aa, Homo sapiens
MDPNCSCAAGCCSCCPVGCAKCAQGCICKGASEKCSCCA

SEQ ID NO: 95270 - protein, 69 aa, Homo sapiens
PKGSSSWQTSRPPAQGASWPPQAKPPPKACTQPRPNYASNFSVIGAREERGVRAPSFGLTRKGQRPLQR

SEQ ID NO: 95271 - protein, 331 aa, Homo sapiens
MCSHFDADEIKRLGKRFKKLDLDNSGSLSVEEFMSLPELQQNPLVQRVIDIFDTDGNGEVDFKEFIEGVSQFSVKGDKEQKLRFAFRIYDMDKDGYISNGELFQVLKMMVGNNLKDTQLQQIVDKTIINADKDGDGRISFEEFCARGGKTGLFAGLASSVSMRPASPPSPAADSCSACRFFARRPPLRVTWVKPSSALALCVSISDSIPGNLKALPAETRAQLHHAEASLSQPPLQLRPFPKTSQAGDLQDLGPYVCVRKAVGKGDKQIRAVVKEHSVRSQERIWHYPGITTANMPGHLGQNTESGRDKLPMFGVWFPGCRFWGLWVWRLP

SEQ ID NO: 95272 - protein, 417 aa, Homo sapiens
METLSFPRYNVAEIVIHIRNKILTGADGKNLTKNDLYPNPKPEVLHMIYMRALQIVYGIRLEHFYMMPVNSEVMYPHLMEGFLPFSNLVTHLDSFLPICRVNDFETADILCPKAKRTSRFLSGIINFIHFREACRETYMEFLWQYKSSADKMQQLNAAHQEALMKLERLDSVPVEEQEEFKQLSDGIQELQQSLNQDFHQKTIVLQEGNSQKKSNISEKTKRLNELKLSVVSLKEIQESLKTKIVDSPEKLKNYKEKMKDTVQKLKNARSLNLEDQIESDESELKKLKTEENSFKRLMIVKKEKLATAQFKINKKHEDVKQYKRTVIEDCNKVQEKRGAVYERVTTINQEIQKIKLGIQQLKDAAEREKLKSQEIFLNLKTALEKYHDGIEKAAEDSYAKIDEKTAELKRKMFKMST

SEQ ID NO: 95273 - protein, 911 aa, Homo sapiens
MDSRPRAGCCEWLRCCGGGEARPRTVWLGHPEKRDQRYPRNVINNQKYNFFTFLPGVLFNQFKYFFNLYFLLLACSQFVPEMRLGALYTYWVPLGFVLAVTVIREAVEEIRCYVRDKEVNSQVYSRLTARGTVVGVVLYTGRELRSVMNTSNPRSKIGLFDLEVNCLTKILFGALVVVSLVMVALQHFAGRWYLQIIRFLLLFSNIIPISLRVNLDMGKIVYSWVIRRDSKIPGTVVRSSTIPEQLGRISYLLTDKTGTLTQNEMIFKRLHLGTVAYGLDSMDEVQSHIFSIYTQQSQDPPAQKGPTLTTKVRRTMSSRVHEAVKAIALCHNVTPVYESNGVTDQAEAEKQYEDSCRVYQASSPDEVALVQWTESVGLTLVGRDQSSMQLRTPGDQILNFTILQIFPFTYESKRMGIIVRDESTGEITFYMKGADVVMAGIVQYNDWLEEECGNMAREGLRVLVVAKKSLAEEQYQDFEARYVQAKLSVHDRSLKVATVIESLEMEMELLCLTGVEDQLQADVRPTLETLRNAGIKVWMLTGDKLETATCTAKNAHLVTRNQDIHVFRLVTNRGEAHLELNAFRRKHDCALVISGDSLEVCLKYYEYEFMELACQCPAVVCCRCAPTQKAQIVRLLQERTGKLTCAVGDGGNDVSMIQESDCGVGVEGKEGKQASLAADFSITQFKHLGRLLMVHGRNSYKRSAALSQFVIHRSLCISTMQAVFSSVFYFASVPLYQGFLIIGYSTIYTMFPVFSLVLDKDVKSEVAMLYPELYKDLLKGRPLSYKTFLIWVLISIYQGSTIMYGALLLFESEFVHIVAISFTSLILTELLMVALTIQTWHWLMTVAELLSLACYIASLVFLHEFIDVYFIATLSFLWKVSVITLVSCLPLYVLKYLRRRFSPPSYSKLTS

SEQ ID NO: 95274 - protein, 153 aa, Homo sapiens
  MOD_RES (1)..(1): Any amino acid
XERSLEQNDASTPRPELRFAIQNKHLCHRMSSALESVTVSDRPLGVSITKAEVAPEEDERKKRRRERNKIAAAKCRNKKKEKTECLQKESEKLESVNAELKAQIEELKNEKQHLIYMLNLHRPTCIVRAQNGRTPEDERNLFIQQIKEGTLQS

SEQ ID NO: 95275 - protein, 234 aa, Homo sapiens
MGLDLPDGGHLTHGYMSDVKRISATSIFFESMPYKLNPKTGLIDYNQLALTARLFRPRLIIAGTSAYARLIDYARMREVCDEVKAHLLADMAHISGLVAAKVIPSPFKHADIVTTTTHKTLRGARSGLIFYRKGVKAVDPKTGREIPYTFEDRINFAVFPSLQGGPHNHAIAAVAVALKQACTPMFREYSLQVLKNARAMADALLERGYSLVSGGTDNHLVLVDLRPKGLDGAR

SEQ ID NO: 95276 - protein, 252 aa, Homo sapiens
MGLLSQGSPLSWEETKRHADHVRRHGILQFLHIYHAVKDRHKDVLKWGDEVEYMLVSFDHENKKVRLVLSGEKVLETLQEKGERTNPNHPTLWRPEYGSYMIEGTPGQPYGGTMSEFNTVEANMRKRRKEATSILEENQALCTITSFPRLGCPGFTLPEVKPNPVEGGASKSLFFPDEAINKHPRFSTLTRNIRHRRGEKVVINVPIFKDKNTPSPFIETFTEDDEASRASKPDHIYMDAMGFGMGNCCLQV

SEQ ID NO: 95277 - protein, 183 aa, Homo sapiens
MDHPSREKDERQRTTKPMAQRSAHCSRPSGSSSSSGVLMVGPNFRVGKKIGCGNFGELRLGKNLYTNEYVAIKLEPIKSRAPQLHLEYRFYKQLGSAGEGLPQVYYFGPCGKYNAMVLELLGPSLEDLFDLCDRTFTLKTVLMIAIQLLSRMEYVHSKNLIYRDVKPENFLIGRQGNKKEHVI

SEQ ID NO: 95278 - protein, 31 aa, Homo sapiens
MIFQIPWKHAAKHGWDINKDACLFRSWAIHT

SEQ ID NO: 95279 - protein, 63 aa, Homo sapiens
MTSKRKPCQTQLRRSISEQLRDSTARAWDLLWKNVRERRLAGLSLELGSDHHMGQKKVLEKKV

SEQ ID NO: 95280 - protein, 136 aa, Homo sapiens
  MOD_RES (1)..(1): Any amino acid
XLCIFCYGIRFLWSDFLIMFVHHLVTIGLISFSYINNMVRVGTLIMCLHDVSDFLLEAAKLANYAKYQRLCDTLFVIFSAVFMVTRLGIYPFWILNTTLFESWEIIGPYASWWLLNGLLLTLQLLHVIWSYLIARI

SEQ ID NO: 95281 - protein, 84 aa, Homo sapiens
  MOD_RES (1)..(1): Any amino acid
XKNSKTGSLPVSEIYSFMKEHFPYFKTAPDGWKNSVRHNLSLNKCFEKVDKQPSIPRPLDTPPRPEPQCLPVLSETSPSWILAA

SEQ ID NO: 95282 - protein, 71 aa, Homo sapiens
MCGLQFSLPCLRLFLVVTCYLLLLLHKEILGCSSVCQLCTGRQINCRNLGLSSIPKNFPESTVFLLASKGP

SEQ ID NO: 95283 - protein, 347 aa, Homo sapiens
  MOD_RES (1)..(1): Any amino acid
XAAACGPGAAGYCLLLGLHLFLLTAGPALGWNDPDRMLLRDVKALTLHYDRYTTSRRLDPIPQLKCVGGTAGCDSYTPKVIQCQNKGWDGYDVQWECKTDLDIAYKFGKTVVSCEGYESSEDQYVLRGSCGLEYNLDYTELGLQKLKESGKQHGFASFSDYYYKWSSADSCNMSGLITIVVLLGIAFVVYKLFLSDGQYSPPPYSEYPPFSHRYQRFTNSAGPPPPGFKSEFTGPQNTGHGATSGFGSAFTGQQGYENSGPGFWTGLGTGGILGYLFGSNRAATPFSDSWYYPSYPPSYPGTWNRAYSPLHGGSGSYSDMVVPGDDKVESWSQTLDAEILDFSSLSL

SEQ ID NO: 95284 - protein, 169 aa, Homo sapiens
  MOD_RES (1)..(1): Any amino acid
XINMPSVAKFVTKAYPVSGSPEYLTEDLPDSIQVGGRISPQTVWDYVEKIKASGTKEICVVRFTPVTEEDQISYTLLFAYFSSRKRYGVAANNMKQVKDMYLIPLGATDKIPHPLVPFDGPGRSMTLANTASSIWVALRISQSSEMAILLSANLKSENTALKKCKNTSC

SEQ ID NO: 95285 - protein, 226 aa, Homo sapiens
VNDPETAVKELEALLGFTLRVGVPNTRPVKKTMEIPKDSLQKYLKDLLGIQTTGPLELLQFDHGQSNPTYYIRLANRDLVLRKKPPGTLLPSAHAIEREFRIMKALANAGVPVPNVLDLCEDSSVIGTPFYVMEYCPGLIYKDPSLPGLEPSHRRAIYTAMNTVLCKIHSVDLQAVGLEDYGKQGSTTWCFIQKSQRCLLSLTGNFLPWATPLLMWPTAAWLITCH

SEQ ID NO: 95286 - protein, 173 aa, Homo sapiens
MFTEGEEMYLQGSTVWHPDCKQSTKTEEKLRPTRTSSESIYSRPGSSIPGSPGHTIYAKVDNEILDYKDLAAIPKVKAIYDIERPDLITYEPFYTSGYDDKQERQSLGESPRTLSPTPSAEGYQDVRDRMIHRSTSQGSINSPVYSRHSYTPTTSRSPQHFHRPDQGINIYRK

SEQ ID NO: 95287 - protein, 274 aa, Homo sapiens
MACRGGAGNGHRASATLSRVSPGSLYTCRTRTHNICMVSDFFYPNMGGVESHIYQLSQCLIERGHKVIIVTHAYGNRKGIRYLTSGLKVYYLPLKVMYNQSTATTLFHSLPLLRYIFVRERVTIIHSHSSFSAMAHDALFHAKTMGLQTVFTDHSLFGFADVSSVLTNKLLTVSLCDTNHIICVSYTSKENTVLRAALNPEIVSVIPNAVDPTDFTPDPFRRHDSITIVVVSRLVYRKDGVSLCLPGWSAVAQSRLTANSASRVHAILLPQPPE

SEQ ID NO: 95288 - protein, 86 aa, Homo sapiens
MLASLYNGSVCVWNHETQTLVKTFEVCDLPVRAAKFVARKNWVVTGADDMQIRVFNYNTLERVHMFEAHSDYIRCIAVHPTQPFIL

SEQ ID NO: 95289 - protein, 148 aa, Homo sapiens
MFSWVSKDARRKKEPELFQTVAEGLRQLYAQKLLPLEEHYRFHEFHSPALEDADFDNKPMVLLVGQYSTGKTTFIRHLIEQDFPGMRIGPEPTTDSFIAVMHGPTEGVVPGNALVVDPRRPFRKLNAFGNAFLNRFMCAQLPNPVLDS

SEQ ID NO: 95290 - protein, 91 aa, Homo sapiens
MAGAQTLLTFRDVAIEFSLEEWKCLDLAQQNLYRDVMLENYRNLFSVGLTVCKPGLITCLEQRKEPWNVKRQEAADGHPGPSVEETILSVL

SEQ ID NO: 95291 - protein, 200 aa, Homo sapiens
DKDPTSTFFQFGASIQQQATVMLKIMQDYDWHVFSLVTTIFPGYREFISFVKTTVDNSFVGWDMQNVITLDTSFEDAKTQVQLKKIHSSVILLYCSKDEAVLILSEARSLGLTGYDFFWIVPSLVSGNTELIPKEFPSGLISVSYDDWDYSLEARVRDGIGILTTAASSMLEKFSYIPEAKASCYGQMERPEVPMHTLHP

SEQ ID NO: 95292 - protein, 97 aa, Homo sapiens
MIREEGYDSVFSVVRRHQFRWSEIQKGVREVTEPLNLNPAKRPRRQDWDGELYENGSFYFAKRHLIEMGYLQGGKMAYYEMRAEHSVDIDVDIDWPI

SEQ ID NO: 95293 - protein, 67 aa, Homo sapiens
MAEPDYIEDDNPELIRPQKLINPVKTSRNHQDLHRELLMNQKRGLAPQNKPELQKVMEKRKRDQVIK

SEQ ID NO: 95294 - protein, 435 aa, Homo sapiens
MPKEKYDPPDPRRIYTIMSAEEVANGKKSHWAELEISGRVRSLSTSLWSLTHLTALHLNDNYLSRIPPDIAKLHNLVYLDLSSNKLRSLPAELGNMVSLRELLLNNNLLRVLPYELGRLFQLQTLGLKGNPLSQDILNLYQDPDGTRKLLNFMLDNLAVHPEQLPPRPWITLKERDQILPSASFTVMCYNVLCDKYATRQLYGYCPSWALNWEYRKKGIMEEIVNCDADIISLQEVETEQYFTLFLPALKERGYDGFFSPKSRAKIMSEQERKHVDGCAIFFKTEKFTLVQKHTVEFNQVAMANSDGSEAMLNRVMTKDNIGVAVVLEVHKELFGAGMKPIHAADKQLLIVANAHMHWDPEYSDVKLIQTMMFVSEVKNILEKASSRPGSPTADPNSIPLVLCADLNSLPDSGVVEYLSNGGVADNHKDFKELRA

SEQ ID NO: 95295 - protein, 206 aa, Homo sapiens
MSCNPSFGGIGKGHLMREVDALDGLCSRICDQSGVHYKVLNRRKGPAVWGLRAQIDRKLYKQNMQKEILNTPLLTVQEGAVEDLILTEPEPEHTGKCRVSGVVLVDGSTVYAESVILTTGTFLRGMIVIGLETHPAGRLGDQPSIGLAQTLEKLGFVVGRLKTGTPPRIAKESINFSILNKHIPDNPSIPFSFTNETVWIKILSLH

SEQ ID NO: 95296 - protein, 118 aa, Homo sapiens
MFRAQWMFELAPGVSSSNLENRPCRAARGSLQKTSADTKGKQEQAKEEKARELFLKAVEEEQNGALYEAIKFYRRAMQLVPDIEFKITYTRSPDGDGVGNSYIEDNDDDSKMADLLSY

SEQ ID NO: 95297 - protein, 63 aa, Homo sapiens
DGCRVMLIGKKNSPQEEVELKKLKHLEKSVEKIADQLEELNKELTGIQQRWGFTMLARLVSNS

SEQ ID NO: 95298 - protein, 339 aa, Homo sapiens
MTARAFWLLCLIVGSSPEAPVAERKTSPPHSRKPDSRGCPSAEETPGPRAQPLLEAPQRPRAAEVAPAARAWPDPRRRKPPPPADNQASFREAARAPAGPPGPRLAQAENRASPRREPASEDAPRRARSRALRFPAARPPALATEGSAGHAHPNRPRAAALAPGPAPAPPPRFSLSFGLSPPQRDAEPGAEPCARACRSDLDEREAFCESEFAVNGIVHDVDVLGAGIRLVTLLVDRDGLYKMNRLYLTPDGFFFRVHMLALDSSSCNKPCPEFKPGSRYIVMGHIYHKRRQLPTALLQVLRGRLRPGDGLLRSSSSYVKRFNRKREGQIQGAIHTQCI

SEQ ID NO: 95299 - protein, 168 aa, Homo sapiens
CIRQLCEFLTENGYAHNVSMKSLQAPSVKDFLKIFTFLYGFLCPSYELPDTKFEEEVPRIFKDLGYPFALSKSSMYTVGAPHTWPHIVAALVWLIDCIKSLALLPRLECSGMISAHYNLHLPGSSNSHASASQVARITGAHHHAQLIFVFSVETACHHVGQADLELLT

SEQ ID NO: 95300 - protein, 120 aa, Homo sapiens
MLGMYSSSTTCSPVLWRSSASGRRRSLALLSCHRLTRTCCWSRPSWSSSSSAWRTGLSQARASSSSAQAWCYTGCSVPVASGTGLTVSWPSQGPCTACLSMSLPSPASLPLSSSPTGMGC

SEQ ID NO: 95301 - protein, 270 aa, Homo sapiens
MVLRSLVEYSQDVLAHPVSEEHLPDVSLIGEFSDPAELGKLLQLVLGCAISCEKKQDHIQRIMTLEESVQHVVMEAIQELMTKDTPDSLSPETYGNFDSQSRRYYFLSEEAEEGDELQQRCLDLERQLMLLSEEKQSLAQENAGLRERMGRPEGEGTPGLTAKKLLLLQSQLEQLQEENFRLESGREDERLRCAELEREVAELQHRNQALTSLAQEAQALKDEMDELRQSSERAGQLEATLTSCRRRLGELRELRRQVRQLEERNAGHAE

SEQ ID NO: 95302 - protein, 217 aa, Homo sapiens
MEQINWLSLVYLVVSTPFGVAAIWILDSVGLRAATILGAWLNFAGSVLRMVPCMVVGTQNPFAFLMGGQSLCALAQSLVIFSPAKLAALWFPEHQRATANMLATMSNPLGVLVANVLSPVLVKKGEDIPLMLGVYTIPAGVVCLLSTICLWESVPPTPPSAGAASSTSEKFLDGLKLQLMWNKAYVILAVCLGGMIGISASFSALLEQILCASGHSS

SEQ ID NO: 95303 - protein, 58 aa, Homo sapiens
MSQKRQTKFQNGKSKTSENSSAKREKGMVVNSKEISDAVGQSKFVLENLRHYTVHPNL

SEQ ID NO: 95304 - protein, 68 aa, Homo sapiens
MPALACLRRLCRHVSPQAVLFLLFIFCLFSVFISAYYLYGWKRGLEPSADAPEPDCGDPPPVAPSRLL

SEQ ID NO: 95305 - protein, 282 aa, Homo sapiens
MGLGLRGWGRPLLTVATALMLPVKPPGSWGAQIIGGHEVTPHSRPYMASVRFGGQHHCGGFLLRARWVVSAAHCFSHRDLRTGLVVLGAHVLSTAEPTQQVFGIDALTTHPDYHPMTHANDICLLRLNGSAVLGPAVGLLRPPGRRARPPTAGTRCRVAGWGFVSDFEELPPGLMEAKVRVLDPDVCNSSWKGHLTLTMLCTRSGDSHRRGFCSADSGGPLVCRNRAHGLVSFSGLWCGDPKTPDVYTQVSAFVAWIWDVVRRSSPQPGPLPGTTRPPGEAA

SEQ ID NO: 95306 - protein, 70 aa, Homo sapiens
MQSVQKMFKCHPDEVMSIRTTNREYFLIGHDREKIKDWVSFMSSFRQDIKATQQNTEEELSLGNKRTLFY

SEQ ID NO: 95307 - protein, 55 aa, Homo sapiens
MASIWGRRDESLKVDEHLAKQDAQILYKAGENRWGTDEDKFTEILCLRSFPQLKL

SEQ ID NO: 95308 - protein, 60 aa, Homo sapiens
MELAQEARELGCWAVEEMGVPVAARAPESTLRRNEDPTPCVLPQAYAYTLSPQAVSGPGG

SEQ ID NO: 95309 - protein, 112 aa, Homo sapiens
MNRESFAAGERLVSPAYVRQGCEARRSHEHLIRLLLEKSLALSPRLECSVTISAHCSLRLPGSRHSPASASRVAGTTGARHHTRASVQRMAGMKVHLNSFYMNLQSWTATIS

SEQ ID NO: 95310 - protein, 252 aa, Homo sapiens
MNPAAEAEFNILLATDSYKVTHYKQYPPNTSKVYSYFECREKKTENSKLRKVKYEETVFYGLQYILNKYLKGKVVTKEKIQEAKDVYKEHFQDDVFNEKGWNYILEKYDGHLPIEIKAVPEGFVIPRGNVLFTVENTDPECYWLTNWIETILVQSWYPITVATNSREQKKILAKYLLETSGNLDGLEYKLHDFGYRGVSSQETAGIGASAHLVNFKGTDTVAGLALIKKYYGTKDPVPGYSVPAAEHRFWRF

SEQ ID NO: 95311 - protein, 620 aa, Homo sapiens
MEPEPVEDCVQSTLAALYPPFEATAPTLLGQVFQVVERTYREDALRYTLDFLVPAKHLLAKVQQEACAQYSGFLFFHEGWPLCLHEQVVVQLAALPWQLLRPGDFYLQVVPSAAQAPRLALKCLAPGGGRVQEVPVPNEACAYLFTPEWLQGINKDRPTGRLSTCLLSAPSGIQRLPWAELICPRFVHKEGLMVGHQPSTLPPELPSGPPGLPSPPLPEEALGTRSPGDGHNAPVEGPEGEYVELLEVTLPVRGSPTDAEGSPGLSRVRTVPTRKGAGGKGRHRRHRAWMHQKGLGPRGQDGARPPGEGSSTGASPESPPGAEAVPEAAVLEVSEPPAEAVGEASGSCPLRPGELRGGGGGGQGAEGPPGTPRRTGKGNRRKKRAAGRGALSRGGDSAPLSPGDKEDASHQEALGNLPSPSEHKLPECHLVKEEYEGSGKPESEPKELKTAGEKEPQLSEACGPTEEGAGERELEGPGLLCMAGHTGPEGPLSDTPTPPLETVQEGKGDNIPEEALAVSVSDHPDVAWDLMASGFLILTGGVDQSGRALLTITPPCPPEEPPPSRDTLNTTLHYLHSLLRPDLQTLGLSVLLDLRQAPPLPPALIPALSQLQFRVILFCP

SEQ ID NO: 95312 - protein, 758 aa, Homo sapiens
MVPGKEFQHYTCTMSLKPRVVDFDETWNKLLTTIKAVVMLEYVERATWNDRFSDIYALCVAYPEPLGERLYTETKIFLENHVRHLHKRVLESEEQVLVMYHRYWEEYSKGADYMDCLYRYLNTQFIKKNKLTEADLQYGYGGVDMNEPLMEIGELALDMWRKLMVEPLQAILIRMLLREIKNDRGGEDPNQKVIHGVINSFVHVEQYKKKFPLKFYQEIFESPFLTETGEYYKQEASNLLQESNCSQYMEKVLGRLKDEEIRCRKYLHPSSYTKVIHECQQRMVADHLQFLHAECHNIIRQEKKNDMANMYVLLRAVSTGLPHMIQELQNHIHDEGLRATSNLTQENMPTLFVESVLEVHGKFVQLINTVLNGDQHFMSALDKALTSVVNYREPKSVCKAPELLAKYCDNLLKKSAKGMTENEVEDRLTSFITVFKYIDDKDVFQKFYARMLAKRLIHGLSMSMDSEEAMINKLKQACGYEFTSKLHRMYTDMSVSADLNNKFNNFIKNQDTVIDLGISFQIYVLQAGAWPLTQAPSSTFAIPQELEKSVQMFELFYSQHFSGRKLTWLHYLCTGEVKMNYLGKPYVAMVTTYQMAVLLAFNNSETVSYKELQDSTQMNEKELTKTIKSLLDVKMINHDSEKEDIDAESSFSLNMNFSSKRTKFKITTSMQKDTPQEMEQTRSAVDEDRKMYLQAAIVRIMKARKVLRHNALIQEVISQSRARFNPSISMIKKCIEVLIDKQYIERSQASADEYSYVA

SEQ ID NO: 95313 - protein, 169 aa, Homo sapiens
MPVFHPRFKREFIQEPAKNRPGPQTRSDLLLSGRDWNTLIVGKLSPWIRPDSKVEKIRRNSEAAMLQELNFGAYLGLPAFLLPLNQEDNTNLARVLTNHIHTGHHSSMFWMRVPLVAPEDLRDDIIENAPTTHTEEYSGEEKTWMWWHNFRTLCDYSKRIAVALEIGAD

SEQ ID NO: 95314 - protein, 145 aa, Homo sapiens
MAAPKGSLWVRTQLGLPPLLLLTMALAGGSGTASAEAFDSVLGDTASCHRACQLTYPLHTYPKEEELYACQRGCRLFSICQFVDDGIDLNRTKLECESACTEAYSQSDEQYACHLGCQNQLPFAELRQEQVRNNTAFQTSLLRWH

SEQ ID NO: 95315 - protein, 134 aa, Homo sapiens
MARGSAVAWAALGPLLWGCALGLQGGMLYPQESPSRECKELDGLWSFRADFSDNRRRGFEEQWYRRPLWESGPTVDMPVPSSFNDISQDWRLRHFVGWVWYEREVILPERWTQDLRTRVVLRIGSAHSYAIVGW

SEQ ID NO: 95316 - protein, 66 aa, Homo sapiens
  MOD_RES (1)..(1): Any amino acid
XWWCQPMAQLEALWKKMEGVTNAVLHEVKREGLPVEQRNEILTAILASLTARQNLRREWHARKKCL

SEQ ID NO: 95317 - protein, 293 aa, Homo sapiens
MVSKLTSLQQELLSALLSSGVTKEVLVQALEELLPSPNFGVKLETLPLSPGSGAEPDTKPVFHTLTNGHAKGRLSGDEGSEDGDDYDTPPILKELQALNTEEAAEQRAEVDRMLSEDPWRAAKMIKGYMQQHNIPQREVVDVTGLNQSHLSQHLNKGTPMKTQKRAALYTWYVRKQREILRQFSQQSHGPGQSDDACSEPTNKKMRRNRFKWGPASQRLRSAKEPQQEREALVEECNRQNVCSEGCPPPKPTAWAPTWSLRSVSTTGLQTAGRRRHSGKSWPWTPIAPTRLTA

SEQ ID NO: 95318 - protein, 106 aa, Homo sapiens
MIIEMATGNPYLPSSSDLDLLHKIVLKVGNLSPHLQNIFSKSPIFAGVVLPQVQHPKNARKKYPKLNGLLADIVHACLQIDPADRISSSDLLHHEYFTRDGFIEKK

SEQ ID NO: 95319 - protein, 121 aa, Homo sapiens
  MOD_RES (1)..(1): Any amino acid
XVGMLTITDFINILHRYYKSPMVQIYELEEHKIETWRELYLQETFKPLVNISPDASLFDAVYSLIKNKIHRLPVIDPISGNALYILTHKRILKFLQLFVHQEDGINYTLYKRCLICQSLPS

SEQ ID NO: 95320 - protein, 58 aa, Homo sapiens
MGHCVNLTDGAVEAVLTYCPQIRILLFHGCPLITDHSREVLEQLVGPNKLKQVTWTVY

SEQ ID NO: 95321 - protein, 93 aa, Homo sapiens
MGPVMPPSKKPESSGISVSSGLSQCYGGSGFSKALQEDDDLDFSLPDIRLEEGAMEDEELTNLNWLHESKNLLKSFGESVLRSVSPVQDLDDD

SEQ ID NO: 95322 - protein, 428 aa, Homo sapiens
MGPLSAPPCTQHITWKGLLLTASLLNFWNLPITAQVTIEALPPKVSEGKDVLLLVHNLPQNLAGYIWYKGQLMDLYHYITSYVVDGQINIYGPAYTGRETVYSNASLLIQNVTREDAGSYTLHIIKRGDRTRGVTGYFTFNLYLETPKPSISSSNLNPREAMEAVILTCDPAASDTSYLWWMNGQSLPMTHRLQLSKTNRTLFIFGVTKYIAGPYECEIRNPVSASHSDPVTLNLLLKLPKPYITINNSKPRENKDVLAFTCEPKSENYTYIWWLNGQSLPVSPRVKRPIENRILILPSVTRNETGPYECEIRDRDGGMRSDPVTLNVLYGPDLPSIYPSFTYYRSGENLYLSCFAESNPPAEYFWTINGKFQQSGQKLSIPQITTKHRGLYTCSVRNSATGKESSKSMTVEVSAPSGIGRLPLLNPI

SEQ ID NO: 95323 - protein, 134 aa, Homo sapiens
MSDTLTADVIGRRVEVNGEHATVRFAGVVPPVAGTRQEDPLFVRTSQLSKLQEVSLRNCAVSCAGEKGGVAEACPNIRKVDLSKNLLSSWDEVIHIADQLRHLEVLNVSENKLKFPSGSVLTGTLSVLKVLVLN

SEQ ID NO: 95324 - protein, 494 aa, Homo sapiens
MTIRHQGQQYRPRMAFLQKIEALVKDMQNPETGVRMQNQRVLVTSVPHAMTGSDVLQWIVQRLWISSLEAQNLGNFIVRYGYIYPLQDPKNLILKPDGSLYRFQTPYFWPTQQWPAEDTDYAIYLAKRNIKKKGILEEYEKENYNFLNQKMNYKWDFVIMQAKEQYRAGKERNKADRYALDCQEKAYWLVHRCPPGMDNVLDYGLDRVTNPNEVKVNQKQTVVAVKKEIMYYQQALMRSTVKSSVSLGGIVKYSEQFSSNDAIMSGCLPSNPWITDDTQFWDLNAKLVEIPTKMRVERWAFNFSELIRDPKGRQSFQYFLKKEFSGENLGFWEACEDLKYGDQSKVKEKAEEIYKLFLAPGARRWINIDGKTMDITVKGLKHPHRYVLDAAQTHIYMLMKKDSYARYLKSPIYKDMLAKAIEPQETTKKRQLHPPFYAASPALQPKPCHPETAGRGSQGPRSSQHCGHHPAGPAHGSQPPSDRVHRDLHAPVSF

SEQ ID NO: 95325 - protein, 74 aa, Homo sapiens
  MOD_RES (1)..(1): Any amino acid
XCSLSSEMLGPSWDGDEAESTGEIIRLGDTAHTFSLRSNGLALSPRVECGGAISAHCNLCLSLSSGWDYKCSMS

SEQ ID NO: 95326 - protein, 308 aa, Homo sapiens
MKMEEMSLSGLDNSKLEAIAQEIYADLVEDSCLGFCFEVHRAVKCGYFFLDDTDPDSMKDFEIVDQPGLDIFGQVFNQWKSKECVCPNCSRSIAASRFAPHLEKCLGMGRNSSRIANRRIANSNNMNKSESDQEDNDDINDNDWSYGSEKKAKKRKSDKNPNSPRRSKSLKHKNGELSNSDPFKYNNSTGISYETLGPEELRSLLTTQCGVISEHTKKMCTRSLRCPQHTDEQRRTVRIYFLGPSAVLPEVESSLDNDSFDMTDSQALISRLQWDGSSDLSPSDSGSSKTSENQGWGLGTNSSESRKT

SEQ ID NO: 95327 - protein, 64 aa, Homo sapiens
MGLSFSSGNVSFASRDGDPPCRAKKQMDFHLTNLRDPRSRNNISGFGRRSLNNTTSPTASWLQL

SEQ ID NO: 95328 - protein, 166 aa, Homo sapiens
MAAAAPRRPTQQGTVTFEDVAVNFSQEEWCLLSEAQRCLYRDVMLENLALISSLGCWCGSKDEEAPCKQRISVQRESQSRTPRAGVSPKKAHPCEMCGLILEDVFHFADHQETHHKQKLNRSGACGKNLDDTAYLHQHQKQHIGEKFYRKSVREASFVKKRKLRVS

SEQ ID NO: 95329 - protein, 144 aa, Homo sapiens
MDRSLRNVLVVSFGFLLLFTAYGGLQSLQSSLYSEEGLGVTALSTLYGGMLLSSMFLPPLLIERLGCKGTIILSMCGYVAFSVGNFFASWYTLIPTSILLGLGAAPLWSAQCTYLTITGNTHAEKAGKRGKDMVNQYFGIFFLI

SEQ ID NO: 95330 - protein, 93 aa, Homo sapiens
MENLGVGEGAEACSRLSRSRGRHSMTRAPKHLWRQPRRPIRIQQRFYSDPDKSAGCRERDLSPRPELRKSRLSWPVSSCRRFDLENGLSCGRR

SEQ ID NO: 95331 - protein, 796 aa, Homo sapiens
MAQALSEEEFQRMQAQLLELRTNNYQLSDELRKNGVELTSLRQKVAYLDKEFSKAQKLCSQMEQLEQENQQLKEGAAGAGVAQAGPLVDGELLRLQAENTALQKNVAALQERYGKEAGKFSAVSEGQGDPPGGLAPTVLAPMPLAEVELKWEMEKEEKRLLWEQLQGLESSKQAETSRLQEELAKLSEKLKKKQESFCRLQTEKETLFNDSRNKIEELQQRKEADHKAQLARTQKLQQELEAANQSLAELRDQRQGERLEHAAALRALQDQVSIQSADAQEQVEGLLAENNALRTSLAALEQIQTAKTQELNMLREQTTGLAAELQQQQAEYEDLMGQKDDLNSQLQESLRANSRLLEQLQEIGQEKEQLTQELQEARKSAEKRKAMLDELAMETLQEKSQHKEELGAVRLRHEKEVLGVRARYERELRELHEDKKRQEEELRGQIREEKARTRELETLQQTVEELQAQVHSMDGAKGWFERRLKEAEESLQQQQQEQEEALKQCREQHAAELKGKEEELQDVRDQLEQAQEERDCHLKTISSLKQEVKDTVDGQRILEKKGSAALKDLKRQLHLERKRADKLQERLQDILTNSKSRSGLEELVLSEMNSPSRTQTGDSSSISSFSYREILREKESSAVPARSLSSSPQAQPPRPAELSDEEVAELFQRLAETQQEKWMLEEKVKHLEVSSASMAEDLCRKSAIIETYVMDSRIDVSVAAGHTDRSGLGSVLRDLVKPGDENLREMNKKLQNMLEEQLTKNMHLHKDMEVLSQEIVRLSKECVGPPDPDLEPGETS

SEQ ID NO: 95332 - protein, 39 aa, Homo sapiens
  MOD_RES (1)..(1): Any amino acid
XEPQETAYRTQVSSCCLHICQGIRGISPMPLRTLGNNPD

SEQ ID NO: 95333 - protein, 31 aa, Homo sapiens
MEELVVEVRGSNGAFYKHWDFGELHCSGRGL

SEQ ID NO: 95334 - protein, 128 aa, Homo sapiens
MRLEQRLRDGQEDGSVIERQVGTFERHTKGIGRKVMERQGWAEGQGLGCRCSGVPEALDSDGQHPRCKRGLGYHGEKLQPFGQLKRPRRNGLGLISTIYDEPLPQDQTESLLRRQPPTSMKFRTDMAF

SEQ ID NO: 95335 - protein, 134 aa, Homo sapiens
MTSLHGLKKVKFQAKLEHEYIHNFKLLQASFKRMNVDKVIPVEKLVKGRFQDNLDFIQWFKKFYDANYDGKEYDPVEARQGQDAIPPPDPGEQIFNLPKKSHHANSPTAGAAKSSPAAKPGSTPSRPSSAKRAS

SEQ ID NO: 95336 - protein, 84 aa, Homo sapiens
MDVLSPLSFIKVSHVRMQGILLLVFAKYQHLPYIQILSTKSTPTGLFGYWGNKGGVNICLKLYGYYVSIINCHLPPHISNNYQR

SEQ ID NO: 95337 - protein, 179 aa, Homo sapiens
MALHPRRVRLKPWLVAQVDSGLYPGLIWLHRDSKRFQIPWKHATRHSPQQEEENTIFKAWAVETGKYQEGVDDPDPAKWKAQLRCALNKSREFNLMYDGTKEVPMNPVKIYQVCDIPQPQGSIINPGSTGSAPWDEKDNDVDEEDEEDELDQSQHHVPIQDTFPFLNINELLGQRMKNC

SEQ ID NO: 95338 - protein, 86 aa, Homo sapiens
  MOD_RES (1)..(1): Any amino acid
XMALELGPHKIRVNAVNPTVVMTSMGQATWSDPHKAKTMLNRIPLGKFAGESEVEHVVNAILFLLSDRSGMTTGSTLPVEGGFWAC

SEQ ID NO: 95339 - protein, 215 aa, Homo sapiens
LLPSAAEMKMRSALLRAKPRADTAATADAKDREEEQHRMLSRASGVTGRRETPGPTKPLPWTAGKHSEDGARPRLQPSKNDPPSLRPMPRGSCLPCPCVQGTFRNSPISHPPSPSPSAYSSRTSRPMRDVGEDQVHPPLCHFPQRSLQHQLPQPGAQRFATRGYPMEDMKLQGVPMPPGDLCGPTLLLDVSIKMEKDSGCEGAADGCVPSQVWLG

SEQ ID NO: 95340 - protein, 165 aa, Homo sapiens
MAKVSVLNVAVLENPSPFHSPFRFEISFECSEALADDLEWKIIYVGSAESEEFDQILDSVLVGPVPAGRHMFVFQADAPNPSLIPETDAVGVTVVLITCTYHGQEFIRVGYYVNNEYLNPELRENPPMKPDFSQVGPVSTSCFPQGRSLYLGGVQPFKLRVKVTS

SEQ ID NO: 95341 - protein, 444 aa, Homo sapiens
FAILIIQLSNLSALLQQQDQKVNIRVAVLPCSESTTCLFRTRPLDASDTLVFNEVFWVSMSYPALHQKTLRVDVCTTDRSHLEECLGGAQISLAEVCRSGERSTRWYNLLSYKYLKKQSRELKPVGVMAPASGPASTDAVSALLEQTAVELEKRQEGRSSTQTLEDSWRYEETSENEAVAEEEEEEVEEEEGEEDVFTEKASPDMDGYPALKVDKETNTETPAPSPTVVRPKDRRVGTPSQGPFLRGSTIIRSKTFSPGPQSQYVCRLNRSDSDSSTLSKKPPFVRNSLERRSVRMKRPSPPPQPSSVKSLRSERLIRTSLDLELDLQATRTWHSQLTQEISVLKELKEQLEQAKSHGEKELPQWLREDERFRLLLRMLEKRMDRAEHKGELQTDKMMRAAAKDVHRLRGQSCKEPPEVQSFREKMAFFTRPRMNIPALSADDV

SEQ ID NO: 95342 - protein, 186 aa, Homo sapiens
MRPQILLLLALLTLGLAAQHQDKVPCKMVDKKVSCQVLGLLQVPSVLPPDTETLDLSGNQLRSILASPLGFYTALRHLDLSTNEISFLQPGAFQALTHLEHLSLAHNRLAMATALSAGGLGPLPRVTSLDLSGNSLYSGLLERLLGEAPSLHTLSLAENSLTRLTRHTFRDMPALEQLDLHSNVLM

SEQ ID NO: 95343 - protein, 227 aa, Homo sapiens
  MOD_RES (1)..(1): Any amino acid
XGHRFVWLEDIQAVTGETFRTDKKPDPANWEYKSLYRGDIARYKRKGDSCLGINPKKQCISWEGTSTEKKHSRKQVERYFTKKSVGLMNIDGVAISSKTEPPSSEPISFIPVKDLEDAAPVTTWLNPLGIYDQSTTHWLQGQGPPEQESKQPDAQPDSESAALKAKVEEFNRRVRENPRDTQLWMAFVAFQHSFFSSATFCGRLATLRRPSHCSRPWWTSPSSNPTA

SEQ ID NO: 95344 - protein, 255 aa, Homo sapiens
  MOD_RES (1)..(1): Any amino acid
XWLPLVLLLAVLLLAVLCKVYLGLFSGSSPNPFSEDVKRPPAPLVTDKEARKKVLKQGIHYIGRMEEGSIGRFILDQITEGQLDWAPLSSPFDIMVLEGPNGRKEYPMYSGEKAYIQGLKEKFPQEEAIIDKYIKLVKVVSSGAPHAILLKFLPLPVVQLLDRCGLLTRFSPFLQASTQSLAEVLQQLGASSELQAVLSYIFPTYGVTPNHSAFSMHALLVNHYMKGGFYPRGGSSEIAFHTIPVIQRAGGAVLT

SEQ ID NO: 95345 - protein, 403 aa, Homo sapiens
MTSQRSPLAPLLLLSLHGVAASLEVSESPGSIQVARGQPAVLPCTFTTSAALINLNVIWMVTPLSNANQPEQVILYQGGQMFDGAPRFHGRVGFTGTMPATNVSIFINNTQLSDTGTYQCLVNNLPDIGGRNIGVTGLTVLVPPSAPHCQIQGSQDIGSDVILLCSSEEGIPRPTYLWEKLDNTLKLPPTATQDQVQGTVTIRNISALSSGLYQCVASNAIGTSTCLLDLQVISRAFFYWRSKNKEEEEEEIPNEIREDDLPPKCSSAKAFHTEISSSDNNTLTSSNAYNSRYWSNNPKVHRNTESVSHFSDLGQSFSFHSGNANIPSIYANGTHLVPGQHKTLVVTANRGSSPQVMSRSNGSVSRKPRPPHTHSYTISHATLERIGAVPVMVPAQSRAGSLV

SEQ ID NO: 95346 - protein, 77 aa, Homo sapiens
MTPQSLLQTTLFLLSLLFLVQGAHGRGHREDFRFCSQRNQTHRSSLHYKPTPDLRISIENSEEALTVHAPFPAAHPA

SEQ ID NO: 95347 - protein, 52 aa, Homo sapiens
MEKLRLLGLRYQEYVTRHPAATAQLETAVRGFSYLLAGATLTFDQFLLGPDL

SEQ ID NO: 95348 - protein, 118 aa, Homo sapiens
MHPFWNTIVKVFPTWLAPNLITFSGFLLVVFNFLLMAYFDPDFYASAPGHKHVPDWVWIVVGILNFVAYTLDGVDGKQARRTNSSTPLGELFDHGLDSWSCVYFVVTVYSIFGRGSTG

SEQ ID NO: 95349 - protein, 299 aa, Homo sapiens
MPSPSDCASAADMEKLSALQEQKGELRKRLSYTTHKLEKLETEFDSTRHYLEIELRRAQEELEKVTEKLRRIQSNYMALQRINQELEDKLYRMGQHYEEEKRALSHEIVALNSHLLEAKVTIDKLSEDNELYRKDCNLAAQLLQCSQTYGRVHKVSELPSDFQERVSLHMEKHGCSLPSPLCHPAYADSVPTCVIAKVLEKPDPASLSSRLSDASARDLAFCDGVEKPGPRPPYKGDIYCSDTALYCPEERRRDRRPSVDAPVTDVGFLRAQNSTDSAAEEEEEAEAAAFPAGFQHEAF

SEQ ID NO: 95350 - protein, 77 aa, Homo sapiens
  MOD_RES (1)..(1): Any amino acid
XGAVLGKVNLAQLVVMVLVEVTALGTLRMVISNIFNDWLPGPPQHWGTQLGHRDSSHVWSPDRFAPKSQNMESTSCG

SEQ ID NO: 95351 - protein, 416 aa, Homo sapiens
MSRTFSAKGGRDLVEGPQYLMPPKKGGDGIKPPPIIGRFGTSLKIGIVGLPNVGKSTFFNVLTNSQASAENFPFCTIDPNESRVPVPDERFDFLCQYHKPASKIPAFLNVVDIAGLVKGAHNGQGLGNAFLSHISACDGIFHLTRAFEDDDITHVEGSVDPIRDIEIIHEELQLKDEEMIGPIIDKLEKVAVRGGDKKLKPEYDIMCKVKSWVIDQKKPVRFYHDWNDKEIEVLNKHLFLTSKPMVYLVNLSEKDYIRKKNKWLIKIKEWVDKYDPGALVIPFSGALELKLQELSAEERQKYLEANMTQSALPKIIKAGFAALQLEYFFTAGPDEVRAWTIRKGTKAPQAAGKIHTDFEKGFIMAEVMKYEDFKEEGSENAVKAAGKYRQQGRNYIVEDGDIIFFKFNTPQQPKKK

SEQ ID NO: 95352 - protein, 48 aa, Homo sapiens
MASVLSYESLVHAVAGAVGSVTAMTVFFPLDTARLRLQAWHHIEGGFQ

SEQ ID NO: 95353 - protein, 207 aa, Homo sapiens
MSLVAEAFVSQIAGKVPFIHVGNQVVSELGPIVQFVKAKGHSLSDGLEEVQKAEMKAYMELVNNMLLTAELYLQWCDEATVGEITHARYGSPYPWPLNHILAYQKQWEVKRKMKAIGWGKKTLDQVLEDVDQCCQALSQRLGTQPYFFNKQPTELDALVFGHLYTILTTQLTNDELSEKVKNYSNLLAFCRRIEQHYFEDRGKGRLS

SEQ ID NO: 95354 - protein, 2173 aa, Homo sapiens
MVNENTRMYIPEENHQGSNYGSPRPAHANMNANAAAGLAPEHIPTPGAALSWQAAIDAARQAKLMGSAGNATISTVSSTQRKRQQYGKPKKQGSTTATRPPRALLCLTLKNPIRRACISIVEWKPFEIIILLTIFANCVALAIYIPFPEDDSNATNSNLERVEYLFLIIFTVEAFLKVIAYGLLFHPNAYLRNGWNLLDFIIVVVGLFSAILEQATKADGANALGGKGAGFDVKALRAFRVLRPLRLVSGVPSLQVVLNSIIKAMVPLLHIALLVLFVIIIYAIIGLELFMGKMHKTCYNQEGIADVPAEDDPSPCALETGHGRQCQNGTVCKPGWDGPKHGITNFDNFAFAMLTVFQCITMEGWTDVLYWVNDAVGRDWPWIYFVTLIIIGSFFVLNLVLGVLSGEFSKEREKAKARGDFQKLREKQQLEEDLKGYLDWITQAEDIDPENEDEGMDEEKPRNMSMPTSETESVNTENVAGGDIEGENCGARLAHRISKSKFSRYWRRWNRFCRRKCRAAVKSNVFYWLVIFLVFLNTLTIASEHYNQPNWLTEVQDTANKALLALFTAEMLLKMYSLGLQAYFVSLFNRFDCFVVCGGILETILVETKIMSPLGISVLRCVRLLRIFKITRYWNSLSNLVASLLNSVRSIASLLLLLFLFIIIFSLLGMQLFGGKFNFDEMQTRRSTFDNFPQSLLTVFQILTGEDWNSVMYDGIMAYGGPSFPGMLVCIYFIILFICGNYILLNVFLAIAVDNLADAESLTSAQKEEEEEKERKKLARTASPEKKQELVEKPAVGESKEEKIELKSITADGESPPATKINMDDLQPNENEDKSPYPNPETTGEEDEEEPEMPVGPRPRPLSELHLKEKAVPMPEASAFFIFSSNNRFRLQCHRIVNDTIFTNLILFFILLSSISLAAEDPVQHTSFRNHILGNADYVFTSIFTLEIILKMTAYGAFLHKGSFCRNYFNILDLLVVSVSLISFGIQSSAINVVKILRVLRVLRPLRAINRAKGLKHVVQCVFVAIRTIGNIVIVTTLLQFMFACIGVQLFKGKLYTCSDSSKQTEAECKGNYITYKDGEVDHPIIQPRSWENSKFDFDNVLAAMMALFTVSTFEGWPELLYRSIDSHTEDKGPIYNYRVEISIFFIIYIIIIAFFMMNIFVGFVIVTFQEQGEQEYKNCELDKNQRQCVEYALKARPLRRYIPKNQHQYKVWYVVNSTYFEYLMFVLILLNTICLAMQHYGQSCLFKIAMNILNMLFTGLFTVEMILKLIAFKPKHYFCDAWNTFDALIVVGSIVDIAITEVNPAEHTQCSPSMNAEENSRISITFFRLFRVMRLVKLLSRGEGIRTLLWTFIKSFQALPYVALLIVMLFFIYAVIGMQVFGKIALNDTTEINRNNNFQTFPQAVLLLFRCATGEAWQDIMLACMPGKKCAPESEPSNSTEGETPCGSSFAVFYFISFYMLCAFLIINLFVAVIMDNFDYLTRDWSILGPHHLDEFKRIWAEYDPEAKGRIKHLDVVTLLRRIQPPLGFGKLCPHRVACKRLVSMNMPLNSDGTVMFNATLFALVRTALRIKTEGNLEQANEELRAIIKKIWKRTSMKLLDQVVPPAGDDEVTVGKFYATFLIQEYFRKFKKRKEQGLVGKPSQRNALSLQAGLRTLHDIGPEIRRAISGDLTAEEELDKAMKEAVSAASEDDIFRRAGGLFGNHVSYYQSDGRSAFPQTFTTQRPLHINKAGSSQGDTESPSHEKLVDSTFTPSSYSSTGSNANINNANNTALGRLPRPAGYPSTVSTVEGHGPPLSPAIRVQEVAWKLSSNRERHVPMCEDLELRRDSGSAGTQAHCLLLRRANPSRCHSRESQAAMAGQEETSQDETYEVKMNHDTEACSEPSLLSTEMLSYQDDENRQLTLPEEDKRDIRQSPKRGFLRSASLGRRASFHLECLKRQKDRGGDISQKTVLPLHLVHHQALAVAGLSPLLQRSHSPASFPRPFATPPATPGSRGWPPQPVPTLRLEGVESSEKLNSSFPSIHCGSWAETTPGGGGSSAARRVRPVSLMVPSQAGAPGRQFHGSASSLVEAVLISEGLGQFAQDPKFIEVTTQELADACDMTIEEMESAADNILSGGAPQSPNGALLPFVNCRDAGQDRAGGEEDAGCVRARGRPSEEELQDSRVYVSSL

SEQ ID NO: 95355 - protein, 77 aa, Homo sapiens
MDSPCQPQPLSQALPQLPGSSSEPLEPEPGRARMGVESYLPCPLLPSYHCPGVPSEASAGSGTPRATATSTTASPLR

SEQ ID NO: 95356 - protein, 125 aa, Homo sapiens
  MOD_RES (1)..(1): Any amino acid
XKYYDKNAIAITNISSSDAPLQPLVSSPSLQAAVDKNKLEKEKEKKKEEKKREKEPEKPAKPLTAEKLQKKDQQLEPKKSTSPKKAAEPTVDLLGLVWRKIEKEKSERQLVEVEELTFMYCFPKN

SEQ ID NO: 95357 - protein, 358 aa, Homo sapiens
MNSSPAGTPSPQPSRANGNINLGPSANPNAQPTDFDFLKVIGKGNYGKVLLAKRKSDGAFYAVKVLQKKSILKKKEQSHIMAERSVLLKNVRHPFLVGLRYSFQTPEKLYFVLDYVNGGELFFHLQRERRFLEPRARFYAAEVASAIGYLHSLNIIYRDLKPENILLDCQGHVVLTDFGLCKEGVEPEDTTSTFCGTPEYLAPEVLRKEPYDRAVDWWCLGAVLYEMLHGLPPFYSQDVSQMYENILHQPLQIPGGRTVAACDLLQSLLHKDQRQRLGSKADFLEIKNHVFFSPINWDDLYHKRLTPPFNPNVDTLGPGTRKASFRWDFKKTVKIMSNLYPGERTIHGILGRDEWTLE

SEQ ID NO: 95358 - protein, 174 aa, Homo sapiens
MEAHALTIRLTNKVEFPFLVLLISGGHCLLALVQGVSDFLLLGKSLDIAPGDMLDKVARRLSLIKHPECSTMSGGKAIEHLAKQGNRFHFDIKPPLHHAKNCDFSFTGLQHVTDKIIMKKEKEEGIEKGQILSSAADIAATVQHTMACHLVKRTHRAILFCKQRDLLPQNNAVL

SEQ ID NO: 95359 - protein, 161 aa, Homo sapiens
MNTKDTTEVAENSHHLKIFLPKKLLECLPRCPLLPPERLRWNTNEEIASYLITFEKHDEWLSCAPKTRPQNGSIILYNRKKVKYRKDGYLWKKRKDGKTTREDHMKLKVQGMEGLNRGRVGEQTSPPPTPACLLAVSLWLLRSLFHRPHIPSALLLAAPEP

SEQ ID NO: 95360 - protein, 411 aa, Homo sapiens
MGCSAKARWAAGALGVAGLLCAVLGAVMIVMVPSLIKQQVLKNVRIDPSSLSFNMWKEIPIPFYLSVYFFDVMNPSEILKGEKPQVRERGPYVYREFRHKSNITFNNNDTVSFLEYRTFQFQPSKSHGSESDYIVMPNILVLGAAVMMENKPMTLKLIMTLAFTTLGERAFMNRTVGEIMWGYKDPLVNLINKYFPGMFPFKDKFGLFAELNNSDSGLFTVFTGVQNISRIHLVDKWNGLSKVDFWHSDQCNMINGTSGQMWPPFMTPESSLEFYSPEACRSMKLMYKESGVFEGIPTYRFVAPKTLFANGSIYPPNEGFCPCLESGIQNVSTCRFSAPLFLSHPHFLNADPVLAEAVTGLHPNQEAHSLFLDIHPVTGIPMNCSVKLQLSLYMKSVAGIGSRGQLDCACQ

SEQ ID NO: 95361 - protein, 373 aa, Homo sapiens
MAAEQGQILVIATAAVGGFTLLVILTLFFLITGRCQWYIKAKMKSEEKRRNHLQNGHLRFPGIKTYIDPDTYEDPSLAVHEFAKEIDPSRIRIERVIGAGEFGEVCSGRLKTPGKREIPVAIKTLKGGHMDRQRRDFLREASIMGQFDHPNIIRLEGVVTKSRPVMIVVEYMENGSLDSFLRKHDGHFTVIQLVGMLRGIASGMKYLSDMGYVHRDLAARNILVNSNLVCKVSDFGLSRVLEDDPEAAYTTTGGKIPIRWTAPEAIAYRKFSSASDAWSYGIVMWEVMSYGERPYWEMSNQDVILSIEEGYRLPAPMGCPASLHQLMLHCWQKERNHRPKFTDIVSFLDKLIRNPSALHTLVEDILVSNHESF

SEQ ID NO: 95362 - protein, 44 aa, Homo sapiens
MTAPVPAPRILLPLLLLLLLTPPPGALAQRLRLGCEDLAAYGFT

SEQ ID NO: 95363 - protein, 119 aa, Homo sapiens
  MOD_RES (1)..(1): Any amino acid
XLEAHSEMGSTEILEKETPENLSNGTSSNVEAAKRLAKRLYQLDRFKRSDVAKHLGKNNEFSKLVAEEYLKFFDFTGMTLDQSLRVSLCHPGWSAVAPSWLTATSTSQVQAVLLNQPPE

SEQ ID NO: 95364 - protein, 183 aa, Homo sapiens
MEERGDSEPTPGCSGLGPGGVRGFGDGGGAPSWAPEDAWMGTHPKYLEMMELDIGDATQVYVAFLVYLDLMESKSWHEVNCVGLPELQLICLVGTEIEGEGLQTVVPTPITASLSHNRIREILKASRKLQGDPDLPMSFTLAIVESDSTIVYYKLTDGFMLPDPQVSFEVTDSKKYKKRKIMT

SEQ ID NO: 95365 - protein, 124 aa, Homo sapiens
MTKLDSSDIYNELKETYPNYLPLYVARLHQLDAEKERMKRLNEIVDAANAVISHIDQTALAVYIAMKTDPRPDAATIKNDMDKQKSTLVDALCRKGCALADHLLHTQAQDGAISTDAEGKEEEG

SEQ ID NO: 95366 - protein, 158 aa, Homo sapiens
MWLCPLALTLILMAASGAACEVKDVCVGSPGIPGTPGSHGLPGRDGRDGVKGDPGPPGPMGPPGETPCPPGNNGLPGAPGVPGERGEKGEAGERGPPGLPAHLDEELQATLHDFRHQILQTRGALSLQGSIMTVGEKVFSSNGQSITFDAIQEACARA

SEQ ID NO: 95367 - protein, 190 aa, Homo sapiens
MPRAFLVRSRRPQPPNWGHLPDQLRGDAYIPDCSSLGGPPAQQSSSVRDPWTAQPTQGNLTSAPRGPGTLGCPLCPKAFPLQRMLTRHLKCHSPVRRHLCRCCGKGFHDAFDLKRHMRTHTGIRPFRCSACGKAFTQRCSLEAHLAKVHGQPASYAYRERREKLHVCEDCGFTSSRPDTYAQHRALHRAA

SEQ ID NO: 95368 - protein, 549 aa, Homo sapiens
MYDNMSTMVYIKEDKLEKLTQDEIISKTKQVIQGLEALKNEHNSILQSLLETLKCLKKDDESNLVEEKSNMIRKSLEMLELGLSEAQVMMALSNHLNAVESEKQKLRAQVRRLCQENQWLRDELANTQQKLQKSEQSVAQLEEEKKHLEFMNQLKKYDDDISPSEDKDTDSTKEPLDDLFPNDEDDPGQGIQQQHSSAAAAAQQGGYEIPARLRTLHNLVIQYASQGRYEVAVPLCKQALEDLEKTSGHDHPDVATMLNILALVDQNKYKDAANLLNDALAIREKTLGKDHPAVAATLNNLAVLYGKRGKYKEAEPLCKRALEIREKVLGKDHPDVAKQLNNLALLCQNQGKYEEVEYYYQRALEIYQTKLGPDDPNVAKTKNNLASCYLKQGKFKQAETLYKEILTRAHEREFGSVDDENKPIWMHAEEREECKGKQKDGTSFGEYGGWYKACKVDSPTVTTTLKNLGALYRRQGKFEAAETLEEAAMRSRKQGLDNVHKQRVAEVLNDPENMEKRRSRESLNVDVVKYESGPDGGEEMRKMKLGLVN

SEQ ID NO: 95369 - protein, 1295 aa, Homo sapiens [sequence omitted]

SEQ ID NO: 95370 - protein, 152 aa, Homo sapiens
MASVRFMVTPTKIDDIPGLSDTSPDLSSRSSSRVRFSSRESVPETSRSEPMSEMSGATTSLATVALDPPSDRTSHPQDVIEDLSQNSITGEHSQLLDDGHKKARNAYLNNSNYEEGDEYFDKNLALFEEEMDTRPKVSSLLNRMANYTNLTQ

SEQ ID NO: 95371 - protein, 18 aa, Homo sapiens
MAENSVLTSTTGRTSLAD

SEQ ID NO: 95372 - protein, 162 aa, Homo sapiens
VTVGTTSFDDLIACVSAPDSLQKIESLGYNRLILQIGRGTVVPEPFSTESFTLDVYRYKDSLKEDIQKADLVISHAGKGAGSCLETLEKGKPLVVVINEKLMNNHQLELAKQLHKEGHLFYCTCSTLPGLLQSMDLSTLKCYPPGQPEKFSAFLDKVVGLQK

SEQ ID NO: 95373 - protein, 209 aa, Homo sapiens
  MOD_RES (1)..(1): Any amino acid
XNGKYITKSGTRVDHQTGPIVWGEPGTNGQHAFYQLIHQGTKMIPCDFLIPVQTQHPIRKGLHHKDALPTVAAPRPVCQRCGQPLALVVQVYCPLEGSPFHRLLHVFACACPGCSTGGARSWKVFRSQCLQVPEREAQDAQKQGNSLAAEDWCEGADDWGSDTEEGPSPQFTLDFGNDASSAKDVDWTARLQDLRLQDAVLGAAHPVPP

SEQ ID NO: 95374 - protein, 803 aa, Homo sapiens
MELEKRKENRFVERQSIVPLRLIYRSGGEDESRHDALDTRVRGDLGGPQLTHVDQASFQVDAFGTSFILDVVLNHDLLSSEYIERHIEHGGKTVEVKGGEHCYYQGHIRGNPDSFVALSTCHGLHGMFYDGNHTYLIEPEENDTTQEDFHFHSVYKSRLFEFSLDDLPSEFQQVNITPSKFILKPRPKRSKRQLRRYPRNVEEETKYIELMIVNDHLMFKKHRLSVVHTNTYAKSVVNMADLIYKDQLKTRIVLVAMETWATDNKFAISENPLITLREFMKYRRDFIKEKSDAVHLFSGSQFESSRSGAAYIGGICSLLKGGGVNEFGKTDLMAVTLAQSLAHNIGIISDKRKLASGECKCEDTWSGCIMGDTGYYLPKKFTQCNIEEYHDFLNSGGGACLFNKPSKLLDPPECGNGFIETGEECDCGTPAECVLEGAECCKKCTLTQDSQCSDGLCCKKCKFQPMGTVCREAVNDCDIRETCSGNSSQCAPNIHKMDGYSCDGVQGICFGGRCKTRDRQCKYIWGQKVTASDKYCYEKLNIEGTEKGNCGKDKDTWIQCNKRDVLCGYLLCTNIGNIPRLGELDGEITSTLVVQQGRTLNCSGGHVKLEEDVDLGYVEDGTPCGPQMMCLEHRCLPVASFNFSTCLSSKEGTICSGNGVCSNELKCVCNRHWIGSDCNTYFPHNDDAKTGITLSGNGVAGTNIIIGIIAGTILVLALILGITAWGYKNYREQRQLPQGDYVKKPGDGDSFYSDIPPGVSTNSASSSKKRSNGLSHSWSERIPDTKHISDICENGRPRSNSWQ

SEQ ID NO: 95375 - protein, 108 aa, Homo sapiens
MEGPVLTLGLLAALAVCGSWGLNEEERLIRHLFQEKGYNKELRPVAHKEESVDVALALTLSNLISLKEVEETLTTNVWIEHGWTDNRLKWNAEEFGNISVLRLPPDMQ

SEQ ID NO: 95376 - protein, 137 aa, Homo sapiens
MGPWSRVRVAKCQMLVTCFFILVTAAGPLCGHHGDSYLLRGPLCCHPPSVPGEEPVPGCAPMGLLCGVEPGGPPDSGSRAERCSHREGGPGPHGRGLPVLLPGVLRTGAGGVLETPQPHPAPILPSWMLTCLEEGPA

SEQ ID NO: 95377 - protein, 84 aa, Homo sapiens
MSVGFIGAGQLAFALAKGFTAAGVLAAHKIMASSPDMDLATVSALRKMGVKLTPHNKETVQHSDVLFLAVKPHIIPFILDEIGA

SEQ ID NO: 95378 - protein, 48 aa, Homo sapiens
MESAGLEQLLRELLLPDTERIRRLPPRPRNSSRSFFGPPPLCRLSATC

SEQ ID NO: 95379 - protein, 76 aa, Homo sapiens
FIIDAFKGQVFALSTHPYGCRVIQRILEHCLPDQTLPILEELHQHTEQLVQVVELPVEELRTPVGLCRARVCVFCQ

SEQ ID NO: 95380 - protein, 35 aa, Homo sapiens
MLESADGKICLVMELAEGGDVFDCVLNGGPLPESR

SEQ ID NO: 95381 - protein, 15 aa, Homo sapiens
MEMDEDPDNLPAQGQ

SEQ ID NO: 95382 - protein, 778 aa, Homo sapiens
  MOD_RES (1)..(1): Any amino acid
XEKCPAYPTELVFALDNSYDVTEESFNKTRDIITSIVNDLNIRENNCPVGARVAMVSYNSGTSYLIRWSDYNRKKQLLQQLSQIKYQDTTEPRDVGNAMRFVTRNVFKRTYAGANVRRVAVFFSNGQTASRSSIITATMEFSALDISPTVFAFDERVFLEAFGFDNTGTFQVIPVPPNGENQTLERLRRCALCYDKCFPNACIREAFLPEDSYMDVVFLIDNSRNIAKDEFKAVKALVSSVIDNFNIASDPLISDSGDRIALLSYSPWESSRRKMGTVKTEFDFITYDNQLLMKNHIQTSFQQLNGEATIGRALLWTTENLFPETPYLRKHKVIFVVSAGENYERKEFVKMMALRAKCQGYVIFVISLGSTRKDDMEELASYPLDQHLIQLGRIHKPDLNYIAKFLKPFLYSVRRGFNQYPPPMLEDACRLINLGGENIQNDGFQFVTELQEDFLGGNGFIGQELNSGRESPFVKTEDNGSDYLVYLPSQMFEPQKLMINYEKDQKSAEIASLTSGHENYGRKEEPDHTYEPGDVSLQEYYMDVAFLIDASQRVGSDEFKEVKAFITSVLDYFHIAPTPLTSTLGDRVAVLSYSPPGYMPNTEECPVYLEFDLVTYNSIHQMKHHLQDSQQLNGDVFIGHALQWTIDNVFVGTPNLRKNKVIFVISAGETNSLDKDVLRNVSLRAKCQGYSIFVFSFGPKHNDKELEELASHPLDHHLVQLGRTHKPDWNYIIKFVKPFVHLIRRAINKYPTEDMKATCVNMTSPNPENGGTENTVLW

SEQ ID NO: 95383 - protein, 524 aa, Homo sapiens
MIHVRRHETRRNSKSHVPEQKSRVDWRRTKRSSISQLLDSDEELDSEEFDSDEELDSDESFENDEELDSNKGPDCNKTPGSERELNLSKIQSEGNDSKCLINSGNGSTYEEETNKIKHRNIDLQDQEKHLSQEDNDLNKQTGQIIEDDQEKHLSQEDNDLNKQTGQIIEDDLEEEDIKRGKRKRLSSVMCDSDESDDSDILVRKVGVKRPRRVVEDEGSSVEMEQKTPEKTLAAQKREKLQKLKELSKQRSRQRRSSGRDFEDSEKESCPSSDEVDEEEEEDNYESDEDGDDYIIDDFVVQDEEGDEENKNQQGEKLTTSQLKLVKQNSLYSFSDHYTHFERVVKALLINALDESFLGTLYDGTRQKSYAKDMLTSLHYLDNRFVQPRLESLVSRSRWKEQYKERVENYSNVSIHLKNPENCSCQACGLHRYCKYSVHLSGELYNTRTMQIDNFMSHDKQVFTVGRICASRTRIYHKLKHFKFKLYQECCTIAMTEEVEDEQVKETVERIFRRSKENGWIKEFL

SEQ ID NO: 95384 - protein, 130 aa, Homo sapiens
MQQVASNGATLPSALSASKSNLVISDPIPGAKPLPVPPELAPFVGRMSAQESTPIMNGVTGPDGEDYSPWADRKAAQPKSLSPPQSQSKLSDSYSNTLPVRKSVTPKNSYATTENKTLPRSSSMAAGLER

SEQ ID NO: 95385 - protein, 568 aa, Homo sapiens
MDNPRYGMPFRRAGECPGAERHLLVPCFFGKGALTFRDVAIEFSLEEWQCLDSTQQNLYRNVMLENYRNLVFLGIAAFKPDLIIFLEQGKEPWNMKRHEMVEEPPVICSHFSQEFWPEQGIEDSFQKMILRRYDKCGHENLHLKISCTNVDECNVHKEGYNKLNQSLTTTQSKVFQCGKYANVFHKCSNSNRHKIRHTGEKGLKCKEYVRSFCMLSHLSQHERIYTRENSYKCEENGKAFNWSSTLTYYKSIHTGEKPYKCEECGKAFSKFSILTKHKVIHTGEKPYKCEECGKAFNRSSILTKHKIIHTGEKPYKCEECGKGFSSVSTLNTHKRIHTGEKPYKCEECGKAFSWSSSLTEHKRIHAGEKPYKCEECGKAFNRSSILTKHKIIHTGEKPYKCEGCGKAFSKVSTLNTHKRIHTGEKPYKCEECGKAFSWSSSLTEHKRIHAGEKPYKCEECGKAFTWSSSFTKHKRIHAAEKPYKCEECGKGFSTFSILTKHKIIHTGEKRYKCEECGKAFSWSSILTEHKIIHTGEKPYKCEECGKAFSRSSSLTTQENSYWRETLQM

SEQ ID NO: 95386 - protein, 22 aa, Homo sapiens
MFCVTPPELETKMNITKGGLVL

SEQ ID NO: 95387 - protein, 58 aa, Homo sapiens
MQFRGRNLCRGAGCNRQAVAGQLLPSTWSLHAHGLAKEAPILPVKKMESCSVAQAGVQ

SEQ ID NO: 95388 - protein, 49 aa, Homo sapiens
MSSLGMSPGRRWTWSPTLERDPQACCIAQPSFVTTGRLPGQRSTLNKMC

SEQ ID NO: 95389 - protein, 36 aa, Homo sapiens
MDKSGIDSLDHVTSDAVELANRRGEKKPHSKICSYT

SEQ ID NO: 95390 - protein, 117 aa, Homo sapiens
MASLQRPEIKLESLKEDIKEFFKISGWEKKLQNAVYSELSVFPLPSHPAAPPEHLKEPLVYMRKAQGSWEKRILKSLNSMCTELSIPLARKRPVGEQKELLNKWNEMGTDEPDLSLF

SEQ ID NO: 95391 - protein, 115 aa, Homo sapiens
  MOD_RES (1)..(1): Any amino acid
XNNDKSRDYTRPDLPSGDSQPSLDQTMAAAFGAPGIISASPYAGAGFPPTFAIPQAAGLSVPNVHGALAPLAIPSAAAAAAAAGRIAIPGLAGAGNSVLLVSNLNPEASTVTCSA

SEQ ID NO: 95392 - protein, 267 aa, Homo sapiens
MAQKKYLQAKLTQFLREDRIQLWKPPYTDENKKVGLALKDLAKQYSDRLECCENEVEKVIEEIRCKAIERGTGNDNYRTTGIATIEVFLPPRLKKDRKNLLETRLHITGRELRSKIAETFGLQENYIKIVINKKQLQLGKTLEEQGVAHNVKAMVLELKQSEEDARKNFQLEEEEQNEAKLKEKQIQRTKRGLEILAKRAAETVVDPEMTPYLDIANQTGRSIRIPPSERKALMLAMGYHEKGRAFLKRKEYGIALPCLLDADKYFW

SEQ ID NO: 95393 - protein, 118 aa, Homo sapiens
MPMASPQTLVLYLLVLAVTEAWGQEAVIPGCHLHPFNVTVRSDRQGTCQGSHVAQACVGHCESSAFPSRYSVLVASGYRHNITSVSQCCTISGLKKVRRARARWMDAGVAGRPERWRS

SEQ ID NO: 95394 - protein, 169 aa, Homo sapiens
MGEPSREEYKIQSFDAETQQLLKTALKVACFETEDGEYSVCQRSYSNCSRLMPSRCNTQYRDPGAVDLEKVANVIVDHSLQDCVFSKEAGRMCYAIIQVNNMPMMALVNPVYDCLFRLAQPDSLSKEEEVGGPSPGTSTEGCRMDSPAQPCVSPLLTEVDCLVLQLHRV

SEQ ID NO: 95395 - protein, 201 aa, Homo sapiens
MAAAGAGPGQEAGAGPGPGAVANATGAEEGEMKPVAAGAAAPPGEGISAAPTVEPSSGEAEGGKETTLQCQTGRSNGHSENRVGELPLFEPLPGPTLTQEGAGDTSEVMDTQAGSVDEENGRQLGEVELQCGICTKWFTADTFGIDTSSCLPFMTNYSFHCNVCHHSGNTYFLRKQANLKEMCLSALANLTWQSRTQDEHP

SEQ ID NO: 95396 - protein, 1255 aa, Homo sapiens
MSVKEGAQRKWAALKEKLGPQDSDPTEANLESADPELCIRLLQMPSVVNYSGLRKRLEGSDGGWMVQFLEQSGLDLLLEALARLSGRGVARISDALLQLTCVSCVRAVMNSRQGIEYILSNQGYVRQLSQALDTSNVMVKKQVFELLAALCIYSPEGHVLTLDALDHYKTVCSQQYRFSIVMNELSGSDNVPYVVTLLSVINAVILGPEDLRARTQLRNEFIGLQLLDVLARLRDLEDADLLIQLEAFEEAKAEDEEELLRVSGGVDMSSHQEVFASLFHKVSCSPVSAQLLSVLQGLLHLEPTLRSSQLLWEALESLVNRAVLLASDAQECTLEEVVERLLSVKGRPRPSPLVKAHKSVQANLDQSQRGSSPQNTTTPKPSVEGQQPAAAAACEPVDHAQSESILKVSQPRALEQQASTPPPPPPPPLLPGSSAEPPPPPPPPPLPSVGAKALPTAPPPPPLPGLGAMAPPAPPLPPPLPGSCEFLPPPPPPLPGLGCPPPPPPLLPGMGWGPPPPPPPLLPCTCSPPVAGGMEEVIVAQVDHGLGSAWVPSHRRVNPPTLRMKKLNWQKLPSNVAREHNSMWASLSSPDAEAVEPDFSSIERLFSFPAAKPKEPTMVAPRARKEPKEITFLDAKKSLNLNIFLKQFKCSNEEVAAMIRAGDTTKFDVEVLKQLLKLLPEKHEIENLRAFTEERAKLASADHFYLLLLAIPCYQLRIECMLLCEGAAAVLDMVRPKAQLVLAACETLAAPAGLLTSRQLPIFCQLILRIGNFLNYGSHTGDADGFKISTLLKLTETKSQQNRVTLLHHVLEEAEKSHPDLLQLPRDLEQPSQAAGINLEIIRSEASSNLKKLLETERKVSASVAEVQEQYTERLQASISAFRALDELFEAIEQKQRELADYLCEDAQQLSLEDTFSTMKAFRDLFLRALKENKDRKEQAAKAERRKQQLAEEEARRPRGEDGKPVRKGPGKQEEVCVIDALLADIRKGFQLRKTARGRGDTDGGSKAASMDPPRATEPVATSNPAGDPVGSTRCPASEPGLDATTASESRGWDLVDAVTPGPQPTLEQLEEGGPRPLERRSSWYVDASDVLTTEDPQCPQPLEGAWPVTLGDAQALKPLKFSSNQPPAAGSSRQDAKDPTSLLGVLQAEADSTSEGLEDAVHSRGARPPAAGPGGDEDEDEEDTAPESALDTSLDKSFSEDAVTDSSGSGTLPRARGRASKGTGKRRKKRPSRSQEEVPPDSDDNKTKKLCVIQ

SEQ ID NO: 95397 - protein, 28 aa, Homo sapiens
  MOD_RES (1)..(1): Any amino acid
XLHPVIYHLGQLALLGGGTSLQGTAWEG

SEQ ID NO: 95398 - protein, 174 aa, Homo sapiens
MADLEEQLSDEEKVRIAAKFIIHAPPGEFNEVFNDVRLLLNNDNLLREGAAHAFAQYNLDQFTPVKIEGYEDQVLITEHGDLGNGKFLDPKNRICFKFDHLRKEATDPRPCEVENAVESWRTSVETALRAYVKEHYPNGVCTVYGKKIDGQQTIIACIESHQFQAKNFCCCFYF

SEQ ID NO: 95399 - protein, 577 aa, Homo sapiens
MTRREAERALDTMNFDVIKGKPVRIMWSQRDPSLRKSGVGNIFIKNLDKSIDNKALYDTFSAFGNILSCKVVCDENGSKGYGFVHFETQEAAERAIEKMNGMLLNDRKVFVGRFKSRKEREAELGARAKEFTNVYIKNFGEDMDDERLKDLFGKFGPALSVKVMTDESGKSKGFGFVSFERHEDAQKAVDEMNGKELNGKQIYVGRAQKKVERQTELKRKFEQMKQDRITRYQGVNLYVKNLDDGIDDERLRKEFSPFGTITSAKVMMEGGRSKGFGFVCFSSPEEATKAVTEMNGRIVATKPLYVALAQRKEERQAHLTNQYMQRMASVRAVPNPVINPYQPAPPSGYFMAAIPQTQNRAAYYPPSQIAQLRPSPRWTAQGARPHPFQNMPGAIRPAAPRPPFSTMRPASSQVPRVMSTQRVANTSTQTMGPRPAAAAAAATPAVRTVPQYKYAAGVRNPQQHLNAQPQVTMQQPAVHVQGQEPLTASMLASAPPQEQKQMLGERLFPLIQAMHPTLAGKITGMLLEIDNSELLHMLESPESLRSKVDEAVAVLQAHQAKEAAQKAVNSATGVPTV

SEQ ID NO: 95400 - protein, 130 aa, Homo sapiens
MAQISSNSGFKECPSSHPEPTRAKDVDKEEALQMEAEALAKLQKDRQVTDNQRGFELSSSTRKKAQVYNKQDYDLMVFPESDSQKRALDIDVEKLTQAELEKLLLDDSFETKKTPVLPVTPILSPSFSAQ

SEQ ID NO: 95401 - protein, 146 aa, Homo sapiens
  MOD_RES (1)..(1): Any amino acid
XEEAQRSYILTQGPLPNTCCHFWLMVWQQKTKAVVMLNRIVEKESKRWKELSKEDLSPAFDHSPNKIMTEKYNGNRIGLEEEKLTGDRCTGLSSKMQDTMEENSESALRKRIREDRKATTAQKVQQMKQRLNENERKRKRPRLTDT

SEQ ID NO: 95402 - protein, 242 aa, Homo sapiens
MAAPALGLVCGRCPELGLVLLLLLLSLLCGAAGSQEAGTGAGAGSLAGSCGCGTPQRPGAHGSSAAAHRYSREANAPGPVPGERQLAHSKMVPIPAGVFTMGTDDPQIKQDGEAPARRVTIDAFYMDAYEVSNTEFEKFVNSTGYLTEVDAFPPNGYGLYNIVGNAWEWTSDWWTVHHSVEETLNPKGPPSGKDRVKKGGSYMCHRSYCYRYRCAARSQNTPDSSASNLGFRCAADRLPTMD

SEQ ID NO: 95403 - protein, 122 aa, Homo sapiens
MGAGPGRGGGPWAPRVGAGSEAGWLRRSADVAAQMASRLTLLTLLLLLLAGDRASSNPNATSSSSQDPESLQDRGEGKVATTVISKMLFVEPILEVSSLPTTNSTTNSATKITANTTDEPTT

SEQ ID NO: 95404 - protein, 331 aa, Homo sapiens
MDRAAVARVGAVASASVCALVAGVVLAQYIFTLKRKTGRKTKIIEMMPEFQKSSVRIKNPTRVEEIICGLIKGGAAKLQIITDFDMTLSRFSYKGKRCPTCHNIIDNCKLVTDECRKKLLQLKEKYYAIEVDPVLTVEEKYPYMVEWYTKSHGLLVQQALPKAKLKEIVAESDVMLKEGYENFFDKLQQHSIPVFIFSAGIGDVLEEVIRQAGVYHPNVKVVSNFMDFDETGVLKGFKGELIHVFNKHDGALRNTEYFNQLKDNSNIILLGDSQGDLRMADGVANVEHILKIGYLNDRVDELLEKYMDSYDIVLVQDESLEVANSILQKIL

SEQ ID NO: 95405 - protein, 2169 aa, Homo sapiens
MSEILCQWLNKELKVSRTVSPKSFAKAFSSGYLLGEVLHKFELQDDFSEFLDSRVSSAKLNNFSRLEPTLNLLGVQFDQNVAHGIITEKPGVATKLLYQLYIALQKKKKSGLTGVEMQTMQRLTNLRLQNMKSDTFQERLRHMIPRQTDFNLMRITYRFQEKYKHVKEDLAHLHFEKLERFQKLKEEQRCFDIEKQYLNRRRQNEIMAKIQAAIIQIPKPASNRTLKALEAQKMMKKKKEAEDVADEIKKFEALIKKDLQAKESASKTSLDTAGQTTTDLLNTYSDDEYIKKIQKRLEEDAFAREQREKRRRKLLMDQLIAHEAQEEAYREEQLINRLMRQSQQERRIAVQLMHVRHEKEVLWQNRIFREKQHEERRLKDFQDALDREAALAKQAKIDFEEQFLKEKRFHDQIAVERAQARYEKHYSVCAEILDQIVDLSTKVADYRMLTNNLIPYKLMHDWKELFFNAKPIYEQASVKTLPANPSREQLTELEKRDLLDTNDYEEYKNMVGEWALPEEMVDNLPPSNNCILGHILHRLAEKSLPPRAESTTPELPSFAVKGCLLGKTLSGKTTILRSLQKDFPIQILSIDTLVQEAIQAFHDNEKVSEVLPIQKNDEEDALPVLQEEIKESQDPQHVFSAGPVSDEVLPETEGETMLSANADKTPKAEEVKSSDSFLKLTTRAQLGAKSEQLLKKGKSIPDVLLVDIIVNAINEIPVNQDCILDGFPMTLNQAQLLEEALTGCNRNLTEVERKKAQKSTLAIDPATSKEIPLPSPAFDFVILLDVSDTSSMSRMNDIIAEELSYKTAHEDISQRVAAENQDKDGDQNLRDQIQHRIIGFLDNWPLLEQWFSEPENILIKINAEIDKESLCEKVKEILTTEIAKKKNKVEKKLEEKEAEKKAAASLAELPLPTPPPAPPPEPEKEKEIHQSHVASKTPTAKGKPQSEAPHGKQESLQEGKGKKGETALKRKGSPKGKSSGGKVPVKKSPADSTDTSPVAIVPQPPKPGSEEWVYVNEPVPEEMPLFLVPYWELIENSYINTIKTVLRHLREDQHTVLAYLYEIRTSFQEFLKRPDHKQDFVAQWQADFNSLPDDLWDDEETKAELHQRVNDLRDRLWDICDARKEEAEQERLDIINESWLQDTLGMTMNHFFSLMQAELNRFQDTKRLLQDYYWGMESKIPVEDNKRFTRIPLVQLDSKDNSESQLRIPLVPRISISLETVTPKPKTKSVLKGKMDNSLENVESNFEADEKLVMDTWQQASLAVSHMVAAEIHQRLMEEEKENQPADPKEKSPQMGANKKVKKEPPKKKQEDKKPKGKSPPMAEATPVIVTTEEIAEIKRKNELRVKIKEEHLAALQFEEIATQFRLELIKTKALALLEDLVTKVVDVYKLMEKWLGERYLNEMASTEKLTDVARYHIETSTKIQNELYLSQEDFFINGNIKVFPDPPPSIRPPPVEKEEDGTLTIEQLDSLRDQFLDMAPKGRNPSDGVNRVTEKQKRPQKLDHYLPKRSHQFLKIWLKKYPWLIYDELLNLMFCALCRKHGVKSGGSQVNFFYGTDNFRTEFLNAHHLSEAHAKASLMEATSSSPVNRATTKLMMRTMSKVTLGRVENLFRSCHAIAKTGRPLKDFIWMCKLDDMKGVDIGPVFRTKKSARMFTYFIAEVERKNLREKLEKSKFFSVISDGIIDSLIKEAELVYVQFAHAGKVHCQIVGVQIVERNDPLAIKNAIEKTLEINLQLRLSSQDWAKKLVGFGSDGTHSIEGENNEVALLLREIQPCVQTVYCFAHHLELSYKAVFQNIPLYNDVKDLLHSIYHFYHNSPLHKSALRTAFKGLHLRPVMPSQIGDRKWLHGLQAALQNFLKGYPAIVRQLHSAGRGKSDTSQKKPKELLESLLQADIVKFAHFLLDVMNVLSILSCVNKNRNSSIADIFATLESMLEMLQMYQTRLGPKERMVDSATHFHGNCLRGKENISAVRNIVLTHLIKRLQGCFRDASQNVVRATVIGSFKLWPTKINQEFGEKEVSILTAHYEPVLEAANVKLSEVDTEWSMLKLEIYARFQNIRKLTWDFVNSIYLHKYPNILTLVDLVLTLPASSAEAEHGFSQMKWTKSHMHAKIKAESMTDVLIIQLNSPDINNFDPRKAIHLWNARTPSSTGDTRSNSDCSSNSENESD

SEQ ID NO: 95406 - protein, 350 aa, Homo sapiens
MGKRRCVPPLEPKLAAGCCGVKKPKLSGSGTHSHGNQSTTVPGSSSGPLQNHQHVDSSSGRENVSDLTLGPGNSPITRMNPASGALSPLPRPNGTANTTKNLVVTAEMCCYCFDVLYCHLYGFPQPRLPRFTNDPYPLFVTWKTGRDKRLRGCIGTFSAMNLHSGLREYTLTSALKDSRFPPLTREELPKLFCSVSLLTNFEDASDYLDWEVGVHGIRIEFINEKGVKRTATYLPEVAKEQDNYTGVTSDRKDAGAGSLGTAIMACVGLSSHVSESPRDWQTDWAPDWDQIQTIDSLLRKGGFKAPITSEFRKTIKLTRAQPKCYEFCSDDPVIWHIHLGSETYIAPRIL

SEQ ID NO: 95407 - protein, 903 aa, Homo sapiens
MDHYDSQQTNDYMQPEEDWDRDLLLDPAWEKQQRKTFTAWCNSHLRKAGTQIENIEEDFRDGLKLMLLLEVISGERLAKPERGKMRVHKISNVNKALDFIASKGVKLVSIGAEEIVDGNVKMTLGMIWTIILRFAIQDISVEETSAKEGLLLWCQRKTAPYKNVNIQNFHISWKDGLGFCALIHRHRPELIDYGKLRKDDPLTNLNTAFDVAEKYLDIPKMLDAEDIVGTARPDEKAIMTYVSSFYHAFSGAQKAETAANRICKVLAVNQENEQLMEDYEKLASDLLEWIRRTIPWLENRVPENTMHAMQQKLEDFRDYRRLHKPPKVQEKCQLEINFNTLQTKLRLSNRPAFMPSEGRMVSDINNAWGCLEQVEKGYEEWLLNEIRRLERLDHLAEKFRQKASIHEAWTDGKEAMLRQKDYETATLSEIKALLKKHEAFESDLAAHQDRVEQIAAIAQELNELDYYDSPSVNARCQKICDQWDNLGALTQKRREALERTEKLLETIDQLYLEYAKRAAPFNNWMEGAMEDLQDTFIVHTIEEIQGLTTAHEQFKATLPDADKERLAILGIHNEVSKIVQTYHVNMAGTNPYTTITPQEINGKWDHVRQLVPRRDQALTEEHARQQHNERLRKQFGAQANVIGPWIQTKMEEIGRISIEMHGTLEDQLSHLRQYEKSIVNYKPKIDQLEGDHQLIQEALIFDNKHTNYTMEHIRVGWEQLLTTIARTINEVENQILTRDAKGISQEQMNEFRASFNHFDRDHSGTLGPEEFKACLISLGYDIGNDPQKKTGMMDTDDFRACLISMGYNMGEAEFARIMSIVDPNRLGVVTFQAFIDFMSRETADTDTADQVMASFKILAGDKLQEGGKMQTAHAAFTPPGFAAVSGRAALRLLDFAAFLTTLS

SEQ ID NO: 95408 - protein, 636 aa, Homo sapiens
MAEETRQSKLAAAKRKLKEYWQRNSPGVPAGAKRNRKTNGSIHETATSGGCHSPGDSATGIHGESPTSSATLKDLESPCQELAVVPDSRSVKVSQLKNTIKSLKQQNKQVEHQLEEEKKANNEKQKAERELEVQIQRLNIQKGKLNTDLYHTKRSLRYFEEESKDLAVRLQHSLQRKGELERALSAVTATQKKKAERQFSSRSKARMEWKLEQSMREQALLKAQLTQLKESLKEVQLERDEYAEHLKGERARWQQRMRKMSQEVCSLKKEKKHDKYRVEKLERSLSKLKHQMAEPLPPEPPAVPSEVELQHLRKELERVAGELQAQVEYNQRISLLNEGQKERLREQEERLQEQQERLPEQEERLQQLAEPQNSFKELNNENKSVLQLEQQVKELQEKLGKERLEAASQQKQQLTAQLSLMALPGEGDGGGHLDSEGEEAPRPIPSIPQDLESREAMSGFMDHLEEKADLSELVEKEELGFFQYYRERCHQKVYHPITKPGGSAKDAAPGGGHHQAGPGQGGDEGEAAGAAGDGVAAGGDYKGHSKFLVTAQNPAHEPSPGAPAPQELGAAHKHGDLCEVSLTDSVEPVQGEAREGSPHDNPTAQPIVQDHQEHPGLGSNCCVPFFCWAWLPRRRR

SEQ ID NO: 95409 - protein, 180 aa, Homo sapiens
MPRKGTQPSTARRREEGPPPPSPDGASSDAEPEPPSGRTESPATAAETASEELDNRSLEEILNSIPPPPPPAMTNEAGAPRLMITHIVNQNFKSYAGEKILGPFHKRFSCIIGPNGSGKSNVIDSMLFVFGYRAQKIRSKKLSVLIHNSDEHKDIQSCTVEVHFQKIIDKEGDDYEVIPN

SEQ ID NO: 95410 - protein, 295 aa, Homo sapiens
MSDSEKLNLDSIIGRLLEVQGSRPGKNVQLTENEIRGLCLKSREIFLSQPILLELEAPLKICGDIHGQYYDLLRLFEYGGFPPESNYLFLGDYVDRGKQSLETICLLLAYKIKYPENFFLLRGNHECASINRIYGFYDECLSPDLQSMEQIRRIMRPTDVPDQGLLCDLLWSDPDKDVQGWGENDRGVSFTFGAEVVAKFLHKHDLDLICRAHQVVEDGYEFFAKRQLVTLFSAPNYCGEFDNAGAMMSVDETLMCSFQILKPADKNKGKYGQFSGLNPGGRPITPPRNSAKAKK

SEQ ID NO: 95411 - protein, 200 aa, Homo sapiens
MAEPRFNNPYFWPPPPTMPSQLDNLVLINKIKEQLMAEKIRPPHLPPTSASSQQPLLVPPAPAESSQAVMSLPKLQQVPGLHPQAVPQPDVALHARPATSTVTGLGLSTRTPSVSTSESSAGAGTGTGTSTPSTPTTTSQSRLIASSPTLISGITSPPLLDSIKTIQGHGLLGPPKSERGRKKIKAENPGGPPVLVVPYP

SEQ ID NO: 95412 - protein, 2955 aa, Homo sapiens
  MOD_RES (1)..(1): Any amino acid
XSFRNDGLKASDVLPILKEKVAFVSGGRDKRGGPILTFPARSNHDRIRQEDLRKLVTYLASVPSEDVCKRGFTVIIDMRGSKWDLIKPLLKTLQEAFPAEIHVALIIKPDNFWQKQKTNFGSSKFIFETSMVSVEGLTKLVDPSQLTEEFDGSLDYNHEEWIELRLSLEEFFNSAVHLLSRLEDLQEMLARKEFPVDVEGSRRLIDEHTQLKKKVLKAPVEELDREGQRLLQCIRCSDGFSGRNCIPGSADFQSLVPKITSLLDKLHSTRQHLHQMWHVRKLKLDQCFQLRLFEQDAEKMFDWISHNKELFLQSHTEIGVSYQYALDLQTQHNHFAMNSMNAYVNINRIMSVASRLSEAGHYASQQIKQISTQLDQEWKSFAAALDERSTILAMSAVFHQKAEQFLSGVDAWCKMCSEGGLPSEMQDLELAIHHHQTLYEQVTQAYTEVSQDGKALLDVLQRPLSPGNSESLTATANYSKAVHQVLDVVHEVLHHQRRLESIWQHRKVRLHQRLQLCVFQQDVQQVLDWIENHGEAFLSKHTGVGKSLHRARALQKRHDDFEEVAQNTYTNADKLLEAAEQLAQTGECDPEEIYKAARHLEVRIQDFVRRVEQRKLLLDMSVSFHTHTKELWTWMEDLQKEMLEDVCADSVDAVQELIKQFQQQQTATLDATLNVIKEGEDLIQQLRSAPPSLGEPSEARDSAVSNNKTPHSSSISHIESVLQQLDDAQVQMEELFHERKIKLDIFLQLRIFEQYTIEVTAELDAWNEDLLRQMNDFNTEDLTLAEQRLQRHTERKLAMNNMTFEVIQQGQDLHQYITEVQASGIELICEKDIDLAAQVQELLEFLHEKQHELELNAEQTHKRLEQCLQLRHLQAEVKQVLGWIRNGESMLNASLVNASSLSEAEQLQREHEQFQLAIEKTHQSALQVQQKAEVLLQAGHYDADAIRECAEKVALHWQQLMLKMEDRLKLVNASVAFYKTSEQVCSVLESLEQEYRRDEDWCGGRDKLGPAAEIDHVIPLISKHLEQKEAFLKACTLARRNAEVFLKYIHRNNVSMPSVASHTRGPEQQVKAILSELLQRENRVLHFWTLKKRRLDQCQQYVVFERSAKQALDWIQETGEFYLSTHTSTGETTEETQELLKEYGEFRVPAKQTKEKVKLLIQLADSFVEKGHIHATEIRKWVTTVDKHYRDFSLRMGKYRYSLEKALGVNTEDNKDLELDIIPASLSDREVKLRDANHEVNEEKRKSARKKEFIMAELLQTEKAYVRDLHECLETYLWEMTSGVEEIPPGILNKEHIIFGNIQEIYDFHNNIFLKELEKYEQLPEDVGHCFVTWADKFQMYVTYCKNKPDSNQLILEHAGTFFDEIQQRHGLANSISSYLIKPVQRITKYQLLLKELLTCCEEGKGELKDGLEVMLSVPKKANDAMHVSMLEGFDENLDVQGELILQDAFQVWDPKSLIRKGRERHLFLFEISLVFSKEIKDSSGHTKYVYKNKLLTSELGVTEHVEGDPCKFALWSGRTPSSDNKTVLKASNIETKQEWIKNIREVIQERIIHLKGALKEPLQLPKTPAKQRNNSKRDGVEDIDSQGDGSSQPDTISIASRTSQNTVDSDKLSGGCELTVVLQDFSAGHSSELTIQVGQTVELLERPSERPGWCLVRTTERSPPLEGLVPSSALCISHSRSSVEMDCFFPLVKDAYSHSSSENGGKSESVANLQAQPSLNSIHSSPGPKRSTNTLKKWLTSPVRRLNSGKADGNIKKQKKVRDGRKSFDLGSPKPGDETTPQGDSADEKSKKGWGEDEPDEESHTPLPPPMKIFDNDPTQDEMSSSLLAARQASTEVPTAADLVNAIEKLVKNKLSLEGSSYRGSLKDPAGCLNEGMAPPTPPKNPEEEQKAKALRGRMFVLNELVQTEKDYVKDLGIVVEGFMKRIEEKGVPEDMRGKDKIVFGNIHQIYDWHKDFFLAELEKCIQEQDRLAQLFIKHERKLHIYVWYCQNKPRSEYIVAEYDAYFEEVKQEINQRLTLSDFLIKPIQRITKYQLLLKDFLRYSEKAGLECSDIEKAVELMCLVPKRCNDMMNLGRLQGFEGTLTAQGKLLQQDTFYVIELDAGMQSRTKERRVFLFEQIVIFSELLRKGSLTPGYMFKRSIKMNYLVLEENVDNDPCKFALMNRETSERVVLQAANADIQQAWVQDINQVLETQRDFLNALQSPIEYQRKERSTAVMRSQPARLPQASPRPYSSVPAGSEKPPKGSSYNPPLPPLKISTSNGSPGFEYHQPGDKFEASKQNDLGGCNGTSSMAVIKDYYALKENEICVSQGEVVQVLAVNQQNMCLVYQPASDHSPAAEGWVPGSILAPLTKATAAESSDGSIKKSCSWHTLRMRKRAEVENTGKNEATGPRKPKDILGNKVSVKETNSSEESECDDLDPNTSMEILNPNFIQEVAPEFLVPLVDVTCLLGDTVILQCKVCGRPKPTITWKGPDQNILDTDNSSATYTVSSCDSGEITLKICNLMPQDSGIYTCIATNDHGTTSTSATVKVQGVPAAPNRPIAQERSCTSVILRWLPPSSTGNCTISGYTVEYREEGSQIWQQSVASTLDTYLVIEDLSPGCPYQFRVSASNPWGISLPSEPSEFVRLPEYDAAADGATISWKENFDSAYTELNEIGRGRFSIVKKCIHKATRKDVAVKFVSKKMKKKEQAAHEAALLQHLQHPQYITLHDTYESPTSYILILELMDDGRLLDYLMNHDELMEEKVAFYIRDIMEALQYLHNCRVAHLDIKPENLLIDLRIPVPRVKLIDLEDAVQISGHFHIHHLLGNPEFAAPEVIQGIPVSLGTDIWSIGVLTYVMLSGVSPFLDESKEETCINVCRVDFSFPHEYFCGVSNAARDFINVILQEDFRRRPTAATCLQHPWLQPHNGSYSKIPLDTSRLACFIERRKHQNDVRPIPNVKSYIVNRVNQGT

SEQ ID NO: 95413 - protein, 57 aa, Homo sapiens
  MOD_RES (1)..(1): Any amino acid
XLRQETQEWNQQFWANQNLTFSKMESHSVTQAGVQWHDLGSLQTLPPGSSDSPASAF

SEQ ID NO: 95414 - protein, 335 aa, Homo sapiens; identical to SEQ ID NO: 45998

SEQ ID NO: 95415 - protein, 133 aa, Homo sapiens
MSASAATGVFVLSLSAIPVTYVFNHLAAQHDSWTIVGVAALILFLVALLARVLVKRKPPRDPLFYVYAVFGFTSVVNLIIGLEQDGIIDGFMTHYLREGEPYLNTAYGHMICYWDGSAHYLMYLVMVAAIAWE

SEQ ID NO: 95416 - protein, 53 aa, Homo sapiens
MVHYGHSNQLRQARAMGDYLIVGVHTDGGEIQDGAGHQMGGRGGASGSLRHYT

SEQ ID NO: 95417 - protein, 254 aa, Homo sapiens
MTLDVGPEDELPDWAAAKEFYQKYDPKDVIGRGVSSVVRRCVHRATGHEFAVKIMEVTAERLSPEQLEEVREATRRETHILRQVAGHPHIITLIDSYESSSFMFLVFDLMRKGELFDYLTEKVALSEKETRSIMRSLLEAVSFLHANNIVHRDLKPENILLDDNMQIRLSDFGFSCHLEPGEKLRELCGTPGYLAPEILKCSMDETHPGYGKEVDLWACGVILFTLLAGSPPFWHRRQILMLRMIMEGQYQFSS

SEQ ID NO: 95418 - protein, 16 aa, Homo sapiens
KVREQGARGVSRPAGA

SEQ ID NO: 95419 - protein, 270 aa, Homo sapiens
MAQEVDTAQGAEMRRGAGAARGRASWCWALALLWLAVVPGWSRVSGIPSRRHWPVPYKRFDFRPKPDPYCQAKYTFCPTGSPIPVMEGDDDIEVFRLQAPVWEFKYGDLLGHLKIMHDAIGFRSTLTGKNYTMEWYELFQLGNCTFPHLRPEMDAPFWCNQGAACFFEGIDDVHWKENGTLVQVATISGFHHVGQDSIELRTSSDPPILASQSAGITDVSHCTRPTIRILPQRGTLYYLLWTKTFLLCSLQFSWDFQNIATPYFNLLPKP

SEQ ID NO: 95420 - protein, 76 aa, Homo sapiens
  MOD_RES (1)..(1): Any amino acid
XEQGKEPWNMKRHELVKEPPGRTGHELWLRKLELSLGTAIGTKVCRPASIALNGYHSPGLWKTQDLSQTVAGRSLG

SEQ ID NO: 95421 - protein, 148 aa, Homo sapiens
  MOD_RES (1)..(1): Any amino acid
XPIIIALLSLASIIIVVVLIKVILDKYYFLCGQPLHFIPRKQLCDGELDCPLGEDEEHCVKSFPEGPAVAVRLSKDRSTLQVLDSATGNWFSACFDNFTEALAETACRQMGYSSKPTFRAVEIGPDQDLDVVEITENSQELRMRNSSG

SEQ ID NO: 95422 - protein, 225 aa, Homo sapiens
  MOD_RES (1)..(1): Any amino acid
XWPRRDADTWCAPQVWDEANLRAQELAKRDGWENVPPFDHPLIWKGHASLVQELKAVLRTPPGALVLAVGGGGLLAGVVAGLLEVGWQHVPIIAMETHGAHCFNAAITAGKLVTLPDITSVAKSLGAKTVAARALECMQVCKIHSEVVEDTEAVSAVQQLLDDERMLVEPACGAALAAIYSGLLRRLQAEGCLPPSLTSVVVIVCGGNNINSRELQALKTHLGQV

SEQ ID NO: 95423 - protein, 516 aa, Homo sapiens
MAAPMLRWGCRGRRWAFARVDGGSCHRRGAPTGSTSNQIRGESSVAQQPLHTAQKTRKGEHKWAAVVGLEIHAQISSNSKLFSGSQVRFSAPPNSLVSFFDASLPGTLPVLNRRCVEAAVMTGLALNCHINKKSLFDRKHYFYADLPAGYQITQQRLPIAVNGSLIYGVCAGKKQSQVIPKTVRIKQIQLEQDSGKSLHDNLRSQTLIDLNRAEGQLRVDANISVHHPGEPLGVRTEVKNLNSIRFLAKAIDYEIQRQINELENGGEILNETRSFHHKLGCTMSMRDKEGKQDYRFMPEPNLPPLVLYDATSLPAGADPQQVINIDQIRETLPELPSVTREKLVQQYGMLLEHSFTLLNEVGLLEFFQNVIKETRAEPKKVTSWVLNTFLGYLKQQNLAVSESPVTPSALAELLDLLDSRTISSSAAKQVFEELWKREGKTPGQIVSEKQLELMQDQGALEQLCHSVMEAHPQVVMDVKNRNPRAINKLIGLVRKATQSRADPVMIKEILEKKLSL

SEQ ID NO: 95424 - protein, 526 aa, Homo sapiens
  MOD_RES (1)..(1): Any amino acid
XMVLFCLLFLYPAGHCPNPGISLGAVRTGFRFGHGDKVRYRCSSNLVLTGSSERECQGNGVWSGTEPICRQPYSYDFPEDVAPALGTSFSHMLGATNPTQKTKDHENGTGTNTYAALNSVYLMMNNQMRLLGMETMAWQEIRHAIILLTDGKSNMGGSPKTAVDHIREILNINQKRNDYLDIYAIGVGKLDVDWRELNELGSKKDGERHAFILQDTKALHQVFEHMLDVSKLTDTICGVGNMSANASDQERTPWHVTIKPKSQETCRGALISDQWVLTAAHCFRDGNDHSLWRVNVGDPKSQWGKEFLIEKAVISPGFDVFAKKNQGILEFYGDDIALLKLAQKVKMSTHARPICLPCTMEANLALRRPQGSTCRDHENELLNKQSVPAHFVALNGSKLNINLKMGVEWTSCAEVVSQEKTMFPNLTDVREVVTDQFLCSGTQEDESPCKGESGGAVFLERRFRFFQVGLVSWGLYNPCLGSADKNSRKRAPRSKVPPPRDFHINLFRMQPWLRQHLGDVLNFLPL

SEQ ID NO: 95425 - protein, 72 aa, Homo sapiens
MCTRSLRCPQHTDEQRRTVRIYFLGPSAVLPEVESSLDNDSFDMTDSQALISRLQWDGSSDLSPSDSGSSKT

SEQ ID NO: 95426 - protein, 45 aa, Homo sapiens
MEKYVRLQKIGEGSFGKAILVKSTEDGRQYVIKEINISRKMALST

SEQ ID NO: 95427 - protein, 60 aa, Homo sapiens
MSRFVQDLSKAMSQDGASQFQEVIRQELELSVKKELEKILTTASSHEFEHTKKDLDGFRK

SEQ ID NO: 95428 - protein, 275 aa, Homo sapiens
MGVWLNKDDYIRDLKRIILCFLIVYMAILVGTDQDFYSLLGVSKTASSREIRQAFKKLALKLHPDKNPNNPNAHGDFLKINRAYEVLKDEDLRKKYDKYGEKGLEDNQGGQYESWNYYRYDFGIYDDDPEIITLERREFDAAVNSGELWFVNFYSPGCSHCHDLAPTWRDFAKEVDGLLRIGAVNCGDDRMLCRMKGVNSYPSLFIFRSGMAPVKYHGDRSKESLVSFAMQHVRSTVTELWTGNFVNSIQTAFAAGIGWLITFCSKGGVSQLIGC

SEQ ID NO: 95429 - protein, 433 aa, Homo sapiens
MPAKGRYFLNEGEEGPDQDALYEKYQLTSQHGPLLLTLLLVAATACVALIIIAFSQGDPSRHQAILGMAFLVLAVFAALSVLMYVECLLRRWLRALALLTWACLVALGYVLVFDAWTKAACAWEQVPFFLFIVFVVYTLLPFSMRGAVAVGAVSTASHLLVLGSLMGGFTTPSVRVGLQLLANAVIFLCGNLTGAFHKHQMQDASRDLFTYTVKCIQIRRKLRIEKRQQENLLLSVLPAHISMGMKLAIIERLKEHGDRRCMPDNNFHSLYVKRHQNVSILYADIVGFTQLASDCSPKELVVVLNELFGKFDQIAKANECMRIKILGDCYYCVSGLPVSLPTHARNCVKMGLDMCQAIKQVREATGVDINMRVGIHSGNVLCGVIGLRKWQYDVWSHDVSLANRMEAAGVPGRVHITEATLKHLDKALLLQVR

SEQ ID NO: 95430 - protein, 144 aa, Homo sapiens
MSWKKALRIPGGLRAATVTLLGLPAAEYWNSQKDILERKRAAVDRVCRHNYQLELRTTLQRRVEPTVTISPSRTEALNHHNLLVCSVTDFYPAQIKVRWFRNGQEETAGVVSTPLIRNGDWTFQILVMLEMTPQRGDVYTCHVE

SEQ ID NO: 95431 - protein, 204 aa, Homo sapiens
EKEDGRRWRMFRIGEQDHRVDMKAIEPYKKVISHGGYYGDGLNAIVVFAVCFMPESSQPNYRYLMDNLFKYVIGTLELLVAENYMIVYLNGATTRRKMPSLGWLRKCYQQIDRRLRKNLKSLIIVHPSWFIRTLLAVTRPFISSKFSQKIRYVFNLAELAELVPMEYVGIPECIKQYEEEKFKKKQKRVDQELNGKQDEPKNEQ

SEQ ID NO: 95432 - protein, 110 aa, Homo sapiens
  MOD_RES (1)..(1): Any amino acid
XIQPCPDVKYGKRIHVLPIDDTVEGITGNLFEVYLKPYFLEAYRPIRKVETGFHHVGQARLELLTSGDIFLVRGGMRAVEFKVVETDPSPYCIVAPDTVIHCEGEPIKRE

SEQ ID NO: 95433 - protein, 158 aa, Homo sapiens
ERPNGTSAQPAQVKPEFYRQAELKPCPWTGSNQRRCITFCPTPDQADPCKFLACGEFAQCVKNERTEEAECRCKPGYDSQGSLDGLEPGLCGPGTKECEVLQGKGAPCRLPDHSENQAYKTSVKKFQNQQNNKVISKRNSELLTVEYEEFNHQDWEGN

SEQ ID NO: 95434 - protein, 78 aa, Homo sapiens
MSLPKTPSTPLNSTSTSESKKLKVSVAKEGTRGLPELKEKKNMVDRSKLLPTSLQNEFIPKEVLLSLTYAANAGPCPE

SEQ ID NO: 95435 - protein, 422 aa, Homo sapiens
  MOD_RES (1)..(1): Any amino acid
XGLGGSHALLLLRSCGSLLPELKLEERTEFAHRIWDTLQKLGAVYDVSHYNALLKVYLQNEYKFSPTDFLAKMEEANIQPNRVTYQRLIASYCNVGDIEGASKILGFMKTKDLPVTEAVFSALVTGHARAGDMENAENILTVMRDAGIEPGPDTYLALLNAYAEKGDIDHVKQTLEKVEKSELHLMDRDLLQIIFSFSKAGYPQYVSEILEKVTCERRYIPDAMNLILLLVTEKLEDVALQILLACPVSKEDGPSVFGSFFLQHCVTMNTPVEKLTDYCKKLKEVQMHSFPLQFTLHCALLANKTDLAKALMKAVKEEGFPIRPHYFWPLLVGRRKEKNVQGIIEILKGMQELGVHPDQETYTDYVIPCFDSVNSARAILQENGCLSDSDMFSQAGLRSEAANGNLDFVLSFCGYSCVSAGH

SEQ ID NO: 95436 - protein, 83 aa, Homo sapiens
  MOD_RES (1)..(1): Any amino acid
XRSGSGNFGGGRGGGFGGNDNFGRGGNFSGRGGYGGGGPGYSGGSRGYGSGGQGYGNQGSGYGGSGSYDSYNNGGGGGFGGGS

SEQ ID NO: 95437 - protein, 432 aa, Homo sapiens
  MOD_RES (1)..(1): Any amino acid
XTNILREPVCLGGCEHIFCSNCVSDCIGTGCPVCYTPAWIQDLKINRQLDSMIQLCSKLRNLLHDNELSDLKEDKPRKSLFNDAGNKKNSIKMWFSPRSKKVRYVVSKASVQTQPAIKKDASAQQDSYEFVSPSPPADVSERAKKASARSGKKQKKKTLAEINQKWNLEAEKEDGEFDSKEESKQKLVSFCSQPSVISSPQINGEIDLLASGSLTESECFGSLTEVSLPLAEQIESPDTKSRNEVVTPEKVCKNYLTSKKSLPLENNGKRGHHNRLSSPISKRCRTSILSTSGDFVKQTVPSENIPLPECSSPPSCKRKVGGTSGRKNSNMSDEFISLSPGTPPSTLSSSSYRRVMSSPSAMKLLPNMAVKRNHRGETLLHIASIKENKKEEWEGRLPETSSPELLCHSLPSLEAGSRGKLFFLSYFKTALK

SEQ ID NO: 95438 - protein, 113 aa, Homo sapiens
  MOD_RES (1)..(1): Any amino acid
XGLVGGWQRAALQDPSTSLGGSSAVRGAHRHHRRGRRGQPPGDPLRAQEPQAPERRFLVINQELRESKRMVKPRPRTSSNVHIWNDLMLWALIVNKNAFAETAKFGEACLPPP

SEQ ID NO: 95439 - protein, 108 aa, Homo sapiens
MLISPFPLFFFHSQTIDQFEYDGCDNCDAYLQMKGNREMVYDCTSSSFDGIIAMMSPEDSWVSKWQRVSNFKPGVYAVSVTGRLPQGIVRELKSRGVAYKSRDTAIKT

SEQ ID NO: 95440 - protein, 587 aa, Homo sapiens
MAATLDLKSKEEKDAELDKRIEALRRKNEALIRRYQEIEEDRKKAELEGVAVTAPRKGRSVEKENVAVESEKNLGPSRRSPGTPRPPGASKGGRTPPQQGGRAGMGRASRSWEGSPGEQPRGGGAGGRGRRGRGRGSPHLSGAGDTSISDRKSKEWEERRRQNIEKMNEEMEKIAEYERNQREGVLEPNPVRNFLDDPRRRSGPLEESERDRREESRRHGRNWGGPDFERVRCGLEHERQGRRAGLGSAGDMTLSMTGRERSEYLRWKQEREKIDQERLQRHRKPTGQWRREWDAEKTDGMFKDGPVPAHEPSHRYDDQAWARPPKPPTFGEFLSQHKAEASSRRRRKSSRPQAKAAPRAYSDHDDRWETKEGAASPAPETPQPTSPETSPKETPMQPPEIPAPAHRPPEDEGEENEGEEDEEWEDISEDEEEEEIEVEEGDEEEPAQDHQAPEAAPTGIPCSEQAHGVPFSPEEPLLEPQAPGTPSSPFSPPSGHQPVSDWGEEVELNSPRTTHLAGALSPGGGQSAPAFPESGPSLRGTQEAEEEGSEATPEAGPEGQETAEITDFQRVRFCKVVAAPPLPGAAR

SEQ ID NO: 95441 - protein, 165 aa, Homo sapiens
RKKSFIFSRKFPFYKNKEQSEQETSDPELNYTRPVIILGPMKDRINDDLISEFPDKFGSCVPHTTRPKRDYEVDGRDYHFVISREQMEKDIQEHKFIEAGQYNDNLYGTSVQSVRFVAERGKHCILDVSGNAIKRLQVAQLYPIAIFIKPRSLEPLMEMNKRLTE

SEQ ID NO: 95442 - protein, 58 aa, Homo sapiens
MLPAVGSADEEEDPAEEDCPELVPIETTQSEEEEKSGLGAKIPVTIITGYLVIQRLLC

SEQ ID NO: 95443 - protein, 285 aa, Homo sapiens
MSSFLPEGGCYELLTVIGKGFEDLMTVNLARYKPTGEYVTVRRINLEACSNEMVTFLQGELHVSKLFNHPNIVPYRATFIADNELWVVTSFMAYGSAKDLICTHFMDGMNELAIAYILQGVLKALDYIHHMGYVHRSVKASHILISVDGKVYLSGLRSNLSMISHGQRQRVVHDFPKYSVKVLPWLSPEVLQQNLQGYDAKSDIYSVGITACELANGHVPFKDMPATQMLLEKLNGTVPCLLDTSTIPAEELTMSPSRSVANSGLSDSLTTSTPRPSNGPVPAPS

SEQ ID NO: 95444 - protein, 190 aa, Homo sapiens
MIRKLVAEKLNIPWNHIRLQRTAKGKPVLAKDSSNPYPNFNFNISHQGDYAVLAAEPELQVGIDIMKTSFPGRGSIPEFFHIMKRKFTNKEWETIRSFKDEWTQLDMFYRNWALKESFIKAIGVGLGFELQRLEFDLSPLNLDIGQVYKETRLFLDGEEEKEWAFEESKIDEHHFVAVALRKPDGSRHQD

SEQ ID NO: 95445 - protein, 125 aa, Homo sapiens
MAAVAAASAELLIIGWYIFRVLLQVFLECCIYWVGFAFRNPPGTQPIARSVQVLPAEAGIHGVADRAAGVGGAQAASPQLRPQLPALGGRIIRCSCASRPAREPVPRRNVGSPVFPRQRSTWQGQ

SEQ ID NO: 95446 - protein, 577 aa, Homo sapiens
MATKARVMYDFAAEPGNNELTVNEGEIITITNPDVGGGWLEGRNIKGERGLVPTDYVEILPSDGKDQFSCGNSVADQAFLDSLSASTAQASSSAASNNHQVGSGNDPWSAWSASKSGNWESSEGWGAQPEGAGAQRNTNTPNNWDTAFGHPQAYQGPATGDDDDWDEDWDGPKSSSYFKDSESADAGGAQRGNSRASSSSMKIPLNKFPGFAKPGTEQYLLAKQLAKPKEKIPIIVGDYGPMWVYPTSTFDCVVADPRKGSKMYGLKSYIEYQLTPTNTNRSVNHRYKHFDWLYERLLVKFGSAIPIPSLPDKQVTGRFEEEFIKMRMERLQAWMTRMCRHPVISESEVFQQFLNFRDEKEWKTGKRKAERDELAGVMIFSTMEPEAPDLDLVEIEQKCEAVGKFTKAMDDGVKELLTVGQEHWKRCTGPLPKEYQKIGKALQSLATVFSSSGYQGETDLNDAITEAGKTYEEIASLVAEQPKKDLHFLMECNHEYKGFLGCFPDIIGTHKGAIEKVKESDKLVATSKITLQDKQNMVKRVSIMSYALQVTGSMITTVSSACTWSSKCNFTKRLQKS

SEQ ID NO: 95447 - protein, 96 aa, Homo sapiens
MGLRSHHLSLGLLLLFLLPAECLGAEGRLALKLFRDLFANYTSALRPVADTDQTLNVTLEVTLSQIIDMVRCGGGTAVESYLSQCQEMKGMNGTRC

SEQ ID NO: 95448 - protein, 601 aa, Homo sapiens
MALLAGGLSRGLGSHPAAAGRDAVVFVWLLLSTWCTAPARAIQVTVSNPYHVVILFQPVTLPCTYQMTSTPTQPIVIWKYKSFCRDRIADAFSPASVDNQLNAQLAAGNPGYNPYVECQDSVRTVRVVATKQGNAVTLGDYYQGRRITITGNADLTFDQTAWGDSGVYYCSVVSAQDLQGNNEAYAELIVLGRTSGVAELLPGFQAGPIEDWLFVVVVCLAAFLIFLLLGICWCQCCPHTCCCYVRCPCCPDKCCCPEALYAAGKAATSGVPSIYAPSTYAHLSPAKTPPPPAMIPMGPAYNGYPGGYPGDVDRSSSAGGQGSYVPLLRDTDSSVASEVRSGYRIQASQQDDSMRVLYYMEKELANFDPSRPGPPSGRVERAMSEVTSLHEDDWRSRPSRGPALTPIRDEEWGGHSPRSPRGWDQEPAREQAGGGWRARRPRARSVDALDDLTPPSTAESGSRSPTSNGGRSRAYMPPRSRSRDDLYDQDDSRDFPRSRDPHYDDFRSRERPPADPRSHHHRTRDPRDNGSRSGDLPYDGRLLEEAVRKKGSEERRRPHKEEEEEAYYPPAPPPYSETDSQASRERRLKKNLALSRESLVV

SEQ ID NO: 95449 - protein, 717 aa, Homo sapiens
MAAKRGTKTSMKNMEKELLCPVCQEMYKQPLVLPCTHNVCQACAREVLGQQGYIGHGGDPSSEPTSPASTPSTRSPRLSRRTLPKPDRLDRLLKSGFGTYPGRKRGALHPQVIMFPCPACQGDVELGERGLAGLFRNLTLERVVERYRQSVSVGGAILCQLCKPPPLEATKGCTECRATFCNECFKLFHPWGTQKAQHEPTLPTLSFRPKGLMCPDHKEEVTHYCKTCQRLVCQLCRVRRTHSGHKITPVLSAYQALKDKLTKSLTYILGNQDTVQTQICELEEKRASLLQAIEECQQERLARLSAQIQEHRSLLDGSGLVGYAQEVLKETDQPCFVQAAKQLHNRIARATEALQTFRPAASSSFRHCQLDVGREMKLLTELNFLRVPEAPVIDTQRTFAYDQIFLCWRLPPHSPPAWHYTVEFRRTDVPAQPGPTRWQRREEVRGTSALLENPDTGSVYVLRVRGCNKAGYGEYSEDVHLHTPPAPVLHFFLDSRWGASRERLAISKDQRAVRSVPGLPLLLAADRLLTGCHLSVDVVLGDVAVTQGRSYWACAVDPASYLVKVGVGLESKLQESFQGAPDVISPRYDPDSGHDSGAEDATVEASPPFAFLTIGMGKILLGSGASSNAGLTGRDGPTAGCTVPLPPRLGICLDYERGRVSFLDAVSFRGLLECPLDCSGPVCPAFCFIGGGAVQLQEPVGTKPERKVTIGGFAKLD

SEQ ID NO: 95450 - protein, 92 aa, Homo sapiens
MADGSGWQPPRPCEAYRAEWKLCRSARHFLHHYYVHGERPACEQWQRDLASCRDWEERRNAEAQASRFFQLIFTLTGPSSQLEDKGRILGRL

SEQ ID NO: 95451 - protein, 96 aa, Homo sapiens
  MOD_RES (1)..(1): Any amino acid
XILLVTFASLVAVYVVGGFLYQRLVVGAKGMEQFPHLAFWQDLGNLVAKGNGSRSGTSRALLSSALGVECCCTCPFCWLREVSSCPHFCGERFLIL

SEQ ID NO: 95452 - protein, 87 aa, Homo sapiens
MRLLLALLGVLLSVPGPPVLSLEASEEVELEPCLAPSLEQQEQELTVALGQPVRLCCGRAERGGHWYKEGSRLAPAGRVRGWRGRLE

SEQ ID NO: 95453 - protein, 163 aa, Homo sapiens
MASCAEPSEPSAPLPAGVPPLEDFEVLDGVEDAEGEEEEEEEEEEEDDLSELPPLEDMGQPPAEEAEQPGALAREFLAAMEPEPAPAPAPEEWLDILGNGLLRKKTLVPGPPGSSRPVKGQVVTVHLQTSLENGTRVQEEPELVFTLGDCDVIQALDLSVPLM

SEQ ID NO: 95454 - protein, 77 aa, Homo sapiens
MLNDQLMLLERTFLNPRAFPEERYYSHVLWAPRTGSVVTFPGLSNACSRARDTASGSEAWAEVQRQLSIVVTALEGA

SEQ ID NO: 95455 - protein, 430 aa, Homo sapiens
  MOD_RES (1)..(1): Any amino acid
XGLGGSHALLLLRSCGSLLPELKLEERTEFAHRIWDTLQKLGAVYDVSHYNALLKVYLQNEYKFSPTDFLAKMEEANIQPNRVTYQRLIASYCNVGDIEGASKILGFMKTKDLPVTEAVFSALVTGHARAGDMENAENILTVMRDAGIEPGPDTYLALLNAYAEKGDIDHVKQTLEKVEKSELHLMDRDLLQIIFSFSKAGYPQYVSEILEKVTCERRYIPDAMNLILLLVTEKLEDVALQILLACPVSKEDGPSVFGSFFLQHCVTMNTPVEKLTDYCKKLKEVQMHSFPLQFTLHCALLANKTDLAKALMKAVKEEGFPIRPHYFWPLLVGRRKEKNVQGIIEILKGMQELGVHPDQETYTDYVIPCFDSVNSARAILQENGCLSDSDMFSQAGLRSEAANGNLDFVLSFCKYTTLAVNLIDVYFSYY

SEQ ID NO: 95456 - protein, 816 aa, Homo sapiens
MPSSLMLEVPALADFNRAWTELTDWLSLLDQVIKSQRVMVGDLEDINEMIIKQKATMQDLEQRRPQLEELITAAQNLKNKTSNQEARTIITDRIERIQNQWDEVQEHLQNRRQQLNEMLKDSTQWLEAKEEAEQVLGQARAKLESWKEGPYTVDAIQKKITETKQLAKDLRQWQTNVDVANDLALKLLRDYSADDTRKVHMITENINASWRSIHKRVSEREAALEETHRLLQQFPLDLEKFLAWLTEAETTANVLQDATRKERLLEDSKGVKELMKQWQDLQGEIEAHTDVYHNLDENSQKILRSLEGSDDAVLLQRRLDNMNFKWSELRKKSLNIRSHLEASSDQWKRLHLSLQELLVWLQLKDDELSRQAPIGGDFPAVQKQNDVHRAFKRELKTKEPVIMSTLETVRIFLTEQPLEGLEKLYQEPRELPPEERAQNVTRLLRKQAEEVNTEWEKLNLHSADWQRKIDETLERLRELQEATDELDLKLRQAEVIKGSWQPVGDLLIDSLQDHLEKVKALRGEIAPLKENVSHVNDLARQLTTLGIQLSPYNLSTLEDLNTRWKLLQVAVEDRVRQLHEAHRDFGPASQHFLSTSVQGPWERAISPNKVPYYINHETQTTCWDHPKMTELYQSLADLNNVRFSAYRTAMKLRRLQKALCLDLLSLSAACDALDQHNLKQNDQPMDILQIINCLTTIYDRLEQEHNNLVNVPLCVDMCLNWLLNVYDTGRTGRIRVLSFKTGIISLCKAHLEDKYRYLFKQVASSTGFCDQRRLGLLLHDSIQIPRQLGEVASFGGSNIEPSVRSCFQFVQESKAL

SEQ ID NO: 95457 - protein, 1592 aa, Homo sapiens
MSAPVGPRGRLAPIPAASQPPLQPEMPDLSHLTEEERKIILAVMDRQKKEEEKEQSVLKKLHQQFEMYKEQVKKMGEESQQQQEQKGDAPTCGICHKTKFADGCGHNCSYCQTKFCARCGGRVSLRSNKVMWVCNLCRKQQEILTKSGAWFYNSGSNTPQQPDQKVLRGLRNEEAPQEKKPKLHEQTQFQGPSGDLSVPAVEKSRSHGLTRQHSIKNGSGVKHHIASDIASDRKRSPSVSRDQNRRYDQREEREEYSQYATSDTAMPRSPSDYADRRSQHEPQFYEDSDHLSYRDSNRRSHRHSKEYIVDDEDVESRDEYERQRREEEYQSRYRSDPNLARYPVKPQPYEEQMRIHAEVSRARHERRHSDVSLANADLEDSRISMLRMDRPSRQRSISERRAAMENQRSYSMERTREAQGPSSYAQRTTNHSPPTPRRSPLPIDRPDLRRTDSLRKQHHLDPSSAVRKTKREKMETMLRNDSLSSDQSESVRPPPPKPHKSKKGGKMRQISLSSSEEELASTPEYTSCDDVEIESESVSEKGDMDYNWLDHTSWHSSEASPMSLHPVTWQPSKDGDRLIGRILLNKRLKDGSVPRDSGAMLGLKVVGGKMTESGRLCAFITKVKKGSLADTVGHLRPGDEVLEWNGRLLQGATFEEVYNIILESKPEPQVELVVSRPIGDIPRIPDSTHAQLESSSSSFESQKMDRPSISVTSPMSPGMLRDVPQFLSGQLSIKLWFDKVGHQLIVTILGAKDLPSREDGRPRNPYVKIYFLPDRSDKNKRRTKTVKKTLEPKWNQTFIYSPVHRREFRERMLEITLWDQARVREEESEFLGEILIELETALLDDEPHWYKLQTHDVSSLPLPHPSPYMPRRQLHGESPTRRLQRSKRISDSEVSDYDCDDGIGVVSDYRHDGRDLQSSTLSVPEQVMSSNHCSPSGSPHRVDVIGRTRSWSPSVPPPQSRNVEQGLRGTRTMTGHYNTISRMDRHRVMDDHYSPDRDSHFLTLPRSRYSQTIDHHHRDGRDCEAADRQPYHRSRSTEQRPLLERTTTRSRSTERPDTNLMRSMPSLMTGRSAPPSPALSRSHPRTGSVQTSPSSTPVAGRRGRQLPQLPPKGTLDRNNGVKEIEPYEEVTWEDQQKKVNGTISDDKPLPKKKHQSETGKLVLEIETLNVMKELDSTRRRYAGTMDIEERNRQMKINKYKQVAGSDPRLEQDYHSKYRSGWDPHRGADNVSTKSSDSDVSDISAVSRTSSASRFSSTSYMSVQSERPGGNKKISVFTSKMQSRQMGISGKNMTKSTSISGDMCSLEKNDGSQSDTAVGTLGTSGKKRRSSLGAKMVAIVGLSRKSRSASQLSQTEAGGKKLRSTVQRSTETGLAVEMRNWMTRQASRESTDGSMNSYSSEGNLIFPGVRLASDSQFSDFLDGLGPAQLVGRQTLATPAMGDIQVGMMDKKGQLEVEIIRARGLVVKPGSKTLPAPYVKVYLLDNGVCIAKKKTKVARKTLEPLYQQLLSFEESPQGKVLQIIVWGDYGRMDHKSFMGVAQILLDELELSNMVIGWFKLFPPSSLVDPTLAPLTRRASQSSLESSTGPSYSRS

SEQ ID NO: 95458 - protein, 69 aa, Homo sapiens
MDVEKLEKMRDHERKEETFTPMPSPYYMELTKLLLNHASDNIPKADEIRTLVKDMWDTRIAKLRVSADS

SEQ ID NO: 95459 - protein, 358 aa, Homo sapiens
MALRLLKLAATSASARVVAAGAQRVRGIHSSVQCKLRYGMWHFLLGDKASKRLTERSRVITVDGNICTGKGKLAKEIAEKLGFKHFPEAGIHYPDSTTGDGKPLATDYNGNCSLEKFYDDPRSNDGNSYRLQSWLYSSRLLQYSDALEHLLTTGQGVVLERSIFSDFVFLEAMYNQGFIRKQCVDHYNEVKSVTICDYLPPHLVIYIDVPVPEVQRRIQKKGDPHEMKITSAYLQDIENAYKKTFLPEMSEKCEVLQYSAREAQDSKKVVEDIEYLKFDKGPWLKQDNRTLYHLRLLVQDKFEVLNYTSIPIFLPEVTIGAHQTDRVLHQFREVPSAGICASPPCSPPGQLMQRQRGD

SEQ ID NO: 95460 - protein, 50 aa, Homo sapiens
MASGTTTTAVKIGIIGGTGLDDPEILEGRTEKYVDTPFGKVNIQLVETSI

SEQ ID NO: 95461 - protein, 85 aa, Homo sapiens
MEVTDRIASLEQRVQMQEDDIQLLKSALADVVRRLNITEEQQAVLNRKGPTKARPLMQTLPLRTTVNNGTVLPKKPTGSLPSPSG

SEQ ID NO: 95462 - protein, 1164 aa, Homo sapiens
MALSDEPAAGGPEEEAEDETLAFGAALEAFGESAETRALLGRLREVHGGGAEREVALERFRVIMDKYQEQPHLLDPHLEWMMNLLLDIVQDQTSPASLVHLAFKFLYIITKVRGYKTFLRLFPHEVADVEPVLDLVTIQNPKDHEAWETRYMLLLWLSVTCLIPFDFSRLDGNLLTQPGQARMSIMDRILQIAESYLIVSDKARDAAAVLVSRFITRPDVKQSKMAEFLDWSLCNLARSSFQTMQGVITMDGTLQALAQIFKHGKREDCLPYAATVLRCLDGCRLPESNQTLLRKLGVKLVQRLGLTFLKPKVAAWRYQRGCRSLAANLQLLTQGQSEQKPLILTEDDDEDDDVPEGVERVIEQLLVGLKDKDTVVRWSAAKGIGRMAGRLPRALADDVVGSVLDCFSFQETDKAWHGGCLALAELGRRGLLLPSRLVDVVAVILKALTYDEKRGACSVGTNVRDAACYVCWAFARAYEPQELKPFVTAISSALVIAAVFDRDINCRRAASAAFQENVGRQGTFPHGIDILTTADYFAVGNRSNCFLVISVFIAGFPEYTQPMIDHLVTMKISHWDGVIRELAARALHNLAQQAPEFSATQVFPRLLSMTLSPDLHMRHGSILACAEVAYALYKLAAQENRGLGGQLMRQAVCVLIEKLSLSKMPFRGDTVIDGWQWLINDTLRHLHLISSHSRQQMKDAAVSALAALCSEYYMKEPGEADPAIQEELITQYLAELRNPEEMTRCGFSLALGALPGFLLKGRLQQVLTGLRAVTHTSPEDVSFAESRRDGLKAIARICQTVGVKAGAPDEAVCGENVSQIYCALLGCMDDYTTDSRGDVGTWVRKAAMTSLMDLTLLLARSQPELIEAHTCERIMCCVAQQASEKIDRFRAHAASVFLTLLHFDSPPIPHVPHRGELEKLFPRSDVASVNWSAPSQAFPRITQLLGLPTYRYHVLLGLVVSLGGLTESTIRHSTQSLFEYMKGIQSDPQALGSFSGTLLQIFEDNLLNERVSVPLLKTLDHVLTHGCFDIFTTEEDHPFAVKLLALCKKEIKNSKDIQKLLSGIAVFCEMVQFPGDVRRQALLQLCLLLCHRFPLIRKTTASQVYETLLTYSDVVGADVLDEVVTVLSDTAWDAELAVVREQRNRLCDLLGVPRPQLVPQPGAC

SEQ ID NO: 95463 - protein, 258 aa, Homo sapiens
MDPGKDKEGVPQPSGPPARKKFVIPLDEDEVPPGVAKPLFRSTQSLPTVDTSAQAAPQTYAEYAISQPLEGAGATCPTGSEPLAGETPNQALKPGAKSNSIIVSPRQRGNPVLKFVRNVPWEFGDVIPDYVLGQSTCALFLSLRYHNLHPDYIHGRLQSLGKNFALRVLLVQVDVKDPQQALKELAKMCILADCTLILAWSPEEAGRYLETYKAYEQKPADLLMEKLEQDFVSRVTECLTTVKSVNKTDSQTLLTTFG

SEQ ID NO: 95464 - protein, 80 aa, Homo sapiens
MNPASDGGTSESIFDLDYASWGIRSTLMVAGFVFYLGVFVVCHQLSSSLNATYRSLVAREKVFWDLAATRAVFGVQSTAA

SEQ ID NO: 95465 - protein, 93 aa, Homo sapiens
  MOD_RES (1)..(1): Any amino acid
XAYKAAKEEEKQKLLKWSSDLKQEREQLEQKVKQLSNSISCEEAGFLETSIGKMHGNEEHHPGPAEGDAQLPGEGKTADSPHPRHRPLQTCRL

SEQ ID NO: 95466 - protein, 473 aa, Homo sapiens
  MOD_RES (1)..(1): Any amino acid
XSINTNAFTPITIRYTTPVGSPGVVCMIEMTADGKPPVQKKDTEISHASQAYFESMFLGHIPANVQIHKKAGPVYGFRGCILDLQVNNKEFFIIDEARHGKNIENCHVPWCAHHLCRNNGTCISDNENLFCECPRLYSGKLCQFASCENNPCGNGATCVPKSGTDIVCLCPYGRSGPLCTDAINITQPRFSGTDAFGYTSFLAYSRISDISFHYEFHLKFQLANNHSALQNNLIFFTGQKGHGLNGDDFLAVGLLNGSVVYSYNLGSGIASIRSEPLNLSLGVHTVHLGKFFQEGWLKVDDHKNKSIIAPGRLVGLNVFSQFYVGGYSEYTPDLLPNGADFKNGFQGCIFTLQVRTEKDGHFRGLGNPEGHPNAGRSVGQCHASPCSLMKCGNGGTCIESGTSVYCNCTTGWKGSFCTETVSTCDPEHDPPHHCSRGATCISLPHGYTCFCPLGTTGIYCEQGHQFIGKDVFK

SEQ ID NO: 95467 - protein, 201 aa, Homo sapiens
MGGVASTLQGLPMRLGYTGAGGFPGVCLEHLEPQPGSSDQESEEQQQFRNIFKQIAGDDMEICADELKKVLNTVVNKHKDLKTHGFTLESCRSMIALMDTDGSGKLNLQEFHHLWNKIKAWQKIFKHYDTDQSGTINSYEMRNAVNDAGFHLNNQLYDIITMRYADKHMNIDFDSFICCFVRLEGMFRAFHAFDKDGDGII

SEQ ID NO: 95468 - protein, 81 aa, Homo sapiens
  MOD_RES (1)..(1): Any amino acid
XNIRTVAGIGKERRFIEALETELEKPFKTAIQKANIYGFCFAFAQCIMFIANSASYRYGGYLISNEGLHFSYVFRDGVSPC

SEQ ID NO: 95469 - protein, 2749 aa, Homo sapiens
MSDKMSSFLHIGDICSLYAEGSTNGFISTLGLVDDRCVVQPETGDLNNPPKKFRDCLFKLCPMNRYSAQKQFWKAAKPGANSTTDAVLLNKLHHAADLEKKQNETENRKLLGTVIQYGNVIQLLHLKSNKYLTVNKRLPALLEKNAMRVTLDEAGNEGSWFYIQPFYKLRSIGDSVVIGDKVVLNPVNAGQPLHASSHQLVDNPGCNEVNSVNCNTSWKIVLFMKWSDNKDDILKGGDVVRLFHAEQEKFLTCDEHRKKQHVFLRTTGRQSATSATSSKALWEVEVVQHDPCRGGAGYWNSLFRFKHLATGHYLAAEVDPDFEEECLEFQPSVDPDQDASRSRLRNAQEKMVYSLVSVPEGNDISSIFELDPTTLRGGDSLVPRNSYVRLRHLCTNTWVHSTNIPIDKEEEKPVMLKIGTSPVKEDKEAFAIVPVSPAEVRDLDFANDASKVLGSIAGKLEKGTITQNERRSVTKLLEDLVYFVTGGTNSGQDVLEVVFSKPNRERQKLMREQNILKQIFKLLQAPFTDCGDGPMLRLEELGDQRHAPFRHICRLCYRVLRHSQQDYRKNQEYIAKQFGFMQKQIGYDVLAEDTITALLHNNRKLLEKHITAAEIDTFVSLVRKNREPRFLDYLSDLCVSMNKSIPVTQELICKAVLNPTNADILIETKLVLSRFEFEGVSSTGENALEAGEDEEEVWLFWRDSNKEIRSKSVRELAQDAKEGQKEDRDVLSYYRYQLNLFARMCLDRQYLAINEISGQLDVDLILRCMSDENLPYDLRASFCRLMLHMHVDRDPQEQVTPVKYARLWSEIPSEIAIDDYDSSGASKDEIKERFAQTMEFVEEYLRDVVCQRFPFSDKEKNKLTFEVVNLARNLIYFGFYNFSDLLRLTKILLAILDCVHVTTIFPISKMAKGEENKGSNVMRSIHGVGELMTQVVLRGGGFLPMTPMAAAPEGNVKQAEPEKEDIMVMDTKLKIIEILQFILNVRLDYRISCLLCIFKREFDESNSQTSETSSGNSSQEGPSNVPGALDFEHIEEQAEGIFGGSEENTPLDLDDHGGRTFLRVLLHLTMHDYPPLVSGALQLLFRHFSQRQEVLQAFKQVQLLVTSQDVDNYKQIKQDLDQLRSIVEKSELWVYKGQGPDETMDGASGENEHKKTEEGNNKPQKHESTSSYNYRVVKEILIRLSKLCVQESASVRKSRKQQQRLLRNMGAHAVVLELLQIPYEKAEDTKMQEIMRLAHEFLQNFCAGNQQNQALLHKHINLFLNPGILEAVTMQHIFMNNFQLCSEINERVVQHFVHCIETHGRNVQYIKFLQTIVKAEGKFIKKCQDMVMAELVNSGEDVLVFYNDRASFQTLIQMMRSERDRMDENSPLMYHIHLVELLAVCTEGKNVYTEIKCNSLLPLDDIVRVVTHEDCIPEVKIAYINFLNHCYVDTEVEMKEIYTSNHMWKLFENFLVDICRACNNTSDRKHADSILEKYVTEIVMSIVTTFFSSPFSDQSTTLQTRQPVFVQLLQGVFRVYHCNWLMPSQKASVESCIRVLSDVAKSRAIAIPVDLDSQVNNLFLKSHSIVQKTAMNWRLSARNAARRDSVLAASRDYRNIIERLQDIVSALEDRLRPLVQAELSVLVDVLHRPELLFPENTDARRKCESGGFICKLIKHTKQLLEENEEKLCIKVLQTLREMMTKDRGYGEKLISIDELDNAELPPAPDSENATEELEPSPPLRQLEDHKRGEALRQVLVNRYYGNVRPSGRRESLTSFGNGPLSAGGPGKPGGGGGGSGSSSMSRGEMSLAEVQCHLDKEGASNLVIDLIMNASSDRVFHESILLAIALLEGGNTTIQHSFFCRLTEDKKSEKFFKVFYDRMKVAQQEIKATVTVNTSDLGNKKKDDEVDRDAPSRKKAKEPTTQITEEVRDQLLEASAATRKAFTTFRREADPDDHYQPGEGTQATADKAKDDLEMSAVITIMQPILRFLQLLCENHNRDLQNFLRCQNNKTNYNLVCETLQFLDCICGSTTGGLGLLGLYINEKNVALINQTLESLTEYCQGPCHENQNCIATHESNGIDIITALILNDINPLGKKRMDLVLELKNNASKLLLAIMESRHDSENAERILYNMRPKELVEVIKKAYMQGEVEFEDGENGEDGAASPRNVGHNIYILAHQLARHNKELQSMLKPGGQVDGDEALEFYAKHTAQIEIVRLDRTMEQIVFPVPSICEFLTKESKLRIYYTTERDEQGSKINDFFLRSEDLFNEMNWQKKLRAQPVLYWCARNMSFWSSISFNLAVLMNLLVAFFYPFKGVRGGTLEPHWSGLLWTAMLISLAIVIALPKPHGIRALIASTILRLIFSVGLQPTLFLLGAFNVCNKIIFLMSFVGNCGTFTRGYRAMVLDVEFLYHLLYLVICAMGLFVHEFFYSLLLFDLVYREETLLNVIKSVTRNGRSIILTAVLALILVYLFSIVGYLFFKDDFILEVDRLPNETAVPETGESLASEFLFSDVCRVESGENCSSPAPREELVPAEETEQDKEHTCETLLMCIVTVLSHGLRSGGGVGDVLRKPSKEEPLFAARVIYDLLFFFMVIIIVLNLIFGVIIDTFADLRSEKQKKEEILKTTCFICGLERDKFDNKTVTFEEHIKEEHNMWHYLCFIVLVKVKDSTEYTGPESYVAEMIKERNLDWFPRMRAMSLVSSDSEGEQNELRNLQEKLESTMKLVTNLSGQLSELKDQMTEQRKQKQRIGLLGHPPHMNVNPQQPA

SEQ ID NO: 95470 - protein, 195 aa, Homo sapiens
  MOD_RES (1)..(1): Any amino acid
XKMKLDDFIKNLRGVDNGEDIPRDLLVGIYQRIQGRELRTNDDHVSQVQAVERMIVGKKPVLSLPHRRLVCCCQLYEVPDPNRPQRLGLHQREVFLFNDLLVVTKIFQKKKILVTYSFRQSFPLVEMHMQLFQNSYYQFGIKLLSAVPGGERKVLIIFNAPSLQDRLRFTSDLRESIAEVQEMEKYRVEFFSSPG

SEQ ID NO: 95471 - protein, 114 aa, Homo sapiens
MLTAAGSTAELSACAISGLFNCITIHPLNIAAGVWMIMNAFILLLCEAPFCCQFIEFANTVAEKVDRLRSWQKAVFYCGMAVVPIVISLTLTTLLGNAIAFATGVLYGLSALGK

SEQ ID NO: 95472 - protein, 80 aa, Homo sapiens
MAAPTPARPVLTHLLVALFGMGSWAAVNGIWVELPVVVKELPEGWSLPSYVSVLVALGNLGLLVVTLWRRLAPGKDEQGS

SEQ ID NO: 95473 - protein, 1134 aa, Homo sapiens
MADNLDEFIEEQKARLAEDKAELESDPPYMEMKGKLSAKLSENSKILISMAKENIPPNSQQTRGSLGIDYGLSLPLGEDYERKKHKLKEELRQDYRRYLTQERLKLERNKEYNQFLRGKEESSEKFRQVEKSTEPKSQRNKKPIGQVKPDLTSQIQTSCENSEGPRKDVLTPSEAYEELLNQRRLEEDRYRQLDDEIELRNRRIIKKANEEVGISNLKHQRFASKAGIPDRRFHRFNEDRVFDRRYHRPDQDPEVSEEMDERFRYESDFDRRLSRVYTNDRMHRNKRGNMPPMEHDGDVIEQSNIRISSAENKSAPDNETSKSANQDTCSPFAGMLFGGEDRELIQRRKEKYRLELLEQMAEQQRNKRREKDLELRVAASGAQDPEKSPDRLKQFSVAPRHFEEMIPPERPRIAFQTPLPPLSAPSVPPIPSVHPVPSQNEDLRSGLSSALGEMVSPRIAPLPPPPLLPPLATNYRTPYDDAYYFYGSRNTFDPSLAYYGSGMMGVQPAAYVSAPVTHQLAQPVVNTVGQNELKITSDQVINSGLIFEDKPKPSKQSLQSYQEALQQQIREREERRKKEREEKEEYEAKLEAEMRTYNPWGKGGGGAPLRDAKGNLISHMQTQSSPFARGNVFGEPPTELQIKQQELYKNFLRFQIEEKKQREEAERERLRIAEEKEERRLAEQRARIQQEYEEEQEKKREKEEEQRLKNEEHIRLAEERQKEAERKKKEEEEKYNLQLQHYCERDNLIGEETKHMRQPSPIVPALQNKIASKLQRPPSVDSIIRSFIHESSMSRAQSPPVPARKNQLRAEEEKKNVIMELSEMRKQLRSEERRLQERLLHMDSDDEIPIRKKERNPMDIFDMARHRLQAPVRRQSPKGLDAATFQNVHDFNELKDRDSETRVDLKFMYLDPPRDHHTLEIQQQALLREQQKRLNRIKMQEGAKVDLDAIPSAKVREQRMPRDDTSDFLKNSLLESDSAFIGAYGETYPAIEDDVLPPPSQLPSARERRRNKWKGLDIDSSRPNVAPDGLSLKSISSVNVDELRVRNEERMRRLNEFHNKPINTDDESSLVDPDDIMKHIGDDGSNSVATEPWLRPGTSETLKRFMAEQLNQEQQQIPGKPGTFTWQGLSTAHG

SEQ ID NO: 95474 - protein, 164 aa, Homo sapiens
MSPEPALSPALQLLLWHSALWTVQEATPLGPASSLPQSFLLKCLEQVRKIQGDGAALQEKLAGCLSQLHSGLFLYQGLLQALEGISPELGPTLDTLQLDVADFATTIWQQMEELGMAPALQPTQGAMPAFASAFQRRAGGVLVASHLQSFLEVSYRVLRHLAQP

SEQ ID NO: 95475 - protein, 273 aa, Homo sapiens
MDYAAQKYVGTHDFRNLCKMDVANGVINFQRTILSAQVQLVGQSPGEGRWQEPFQLCQFEVTGQAFLYHQVRCMMAILFLIGQGMEKPEIIDELLNIEKNPQKPQYSMAVEFPLVLYDCKFENVKWIYDQEAQEFNITHLQQLWANHAVKTHMLYSMLQGLDTVPVPCGIGPKMDGMTEWGNVKPSVIKQTSAFVEGVKMRTYKPLMDRPKCQGLESRIQHFVRRGRIEHPHLFHEEETKAKRDCNDTLEEENTNLETPTKRVCVDTEIKSII

SEQ ID NO: 95476 - protein, 91 aa, Homo sapiens
MGGQRNTSVGNIVQRWRDHVVCQKAGVIYSGRKAQEHGTGRTDFTPAQRLMMPTLGHLDSKPSSKSNMIRGRNSATSADEQPHIGNYRLLK

SEQ ID NO: 95477 - protein, 459 aa, Homo sapiens
MGTALLQRGGCFLLCLSLLLLGCWAELGSGLEFPGAEGQWTRFPKWNACCESEMSFQLKTRSARGLVLYFDDEGFCDFLELILTRGGRLQLSFSIFCAEPATLLADTPVNDGAWHSVRIRRQFRNTTLFIDQVEAKWVEVKSKRRDMTVFSGLFVGGLPPELRAAALKLTLASVREREPFKGWIRDVRVNSSQVLPVDSGEVKLDDEPPNSGGGSPCEAGEEGEGGVCLNGGVCSVVDDQAVCDCSRTGFRGKDCSQGKEEYIATFKGSEYFCYDLSQNPIQSSSDEITLSFKTLQRNGLMLHTGKSADYVNLALKNGAVSLVINLGSGAFEALVEPVNGKFNDNAWHDVKVTRNLRQVTISVDGILTTTGYTQEDYTMLGSDDFFYVGGSPSTADLPGSPVSNNFMGCLKEVNIVAIRIIPNSWSHHFRSSMKAPLLKTRCSRVKRHNFKFNILLLFM

SEQ ID NO: 95478 - protein, 60 aa, Homo sapiens
MRKVESRGEGGREMNSQIRQKPDCLWKTSLGKTLCFTIQRLGGSMIQMWCIKARMDMSLN

SEQ ID NO: 95479 - protein, 403 aa, Homo sapiens
MRSLGRTLTGWVQRTFQSTQAATASSRNSCAADDKATEPLPKDCPVSSYNEWDPLEEVIVGRAENACVPPFTIEVKANTYEKYWPFYQKQGGHYFPKDHLKKAVAEIEEMCNILKTEGVTVRRPDPIDWSLKYKTPDFESTGLYSAMPRDILIVVGNEIIEAPMAWRSRFFEYRAYRSIIKDYFHRGAKWTTAPKPTMADELYNQDYPIHSVEDRHKLAAQGKFVTTEFEPCFDAADFIRAGRDIFAQRSQVTNYLGIEWMRRHLAPDYRVHIISFKDPNPMHIDATFNIIGPGIVLSNPDRPCHQIDLFKKAGWTIITPPTPIIPDDHPLWMSSKWLSMNVLMLDEKRVMVDANEVPIQKMFEKLGITTIKVNIRNANSLGGGFHCWTCDVRRRGTLQSYLD

SEQ ID NO: 95480 - protein, 176 aa, Homo sapiens
MIQEWLQVEGLRLWLQAQNDSRGAGKAPFLSPQSWPPPLPPAQSEIMKVVNLKQAILQAWKERWSDYQWAINMKKFFPKGATWDILNLADALLEQAMIGPSPNPLILSYLKYAISSQMVSYSSVLTAISKFDDFSRDLCVQALLDIMDMFCDRLSCHGKAEECIGLCRALLSALHW

SEQ ID NO: 95481 - protein, 131 aa, Homo sapiens
MMYPAGPGSGDSPEGFPEQPRLQPQTGNRATQTLDAFFTCRKNVLLANSSSPQVEGDFAMAPRGPEQEECEGLLQQWREEGLSQVLSTASEGPLIDKGLAQSSLALLMDNPGEENAASEDRWSSRQLSDLR

SEQ ID NO: 95482 - protein, 170 aa, Homo sapiens
MQAMDPAAADLYEEDGKDLDFYDFEPLPTLPEDEENVSLADILSLRDRGLSEQEAWAVCLECSLSMRSVAHAAIFQSLCITPDTLAFNTSGNVCFMEQLSDDPEGAFVPPEFDVTGNTFEVSAGGGNVPHPPFTSMVASAINSEMHLPWGDLCKWPLAGSGAAAARFTGL

SEQ ID NO: 95483 - protein, 63 aa, Homo sapiens
TENGLQDNDIKLRVSEWEVIQESGTKLKPMYGPGYTGLKNLGNSCYLSSVMQAIFSIPEFQRA

SEQ ID NO: 95484 - protein, 130 aa, Homo sapiens
MDISKGLPGMQGGLHIWISENRKMVPVPEGAYGNFFEEHCYVILHVPQSPKATQGASSDLHYWVGKQAGAEAQGAAEAFQQRLQDELGGQTVLHREAQGHESDCFCSYFRPGIIYRKGGLASDLKHVETN

SEQ ID NO: 95485 - protein, 143 aa, Homo sapiens
MGAASCEDEELEFKLVFGEEKEAPPLGAGGLGEELDSEDAPPCCRLALGEPPPYGAAPIGIPRPPPPRPGMHSPPPRPAPSPGTWESQPARSVRLGGPGGGAGGAGGGRVLECPSIRITSISPTPEPPAALEDNPDAWGDGSP

SEQ ID NO: 95486 - protein, 320 aa, Homo sapiens
MDNMSITNTPTSNDACLSIVHSLMCHRQGGESETFAKRAIESLVKKLKEKKDELDSLITAITTNGAHPSKCVTIQRTLDGRLQVAGRKGFPHVIYARLWRWPDLHKNELKHVKYCQYAFDLKCDSVCVNPYHYERVVSPGIDLSGLTLQSNAPSSMMVKDEYVHDFEGQPSLSTEGHSIQTIQHPPSNRASTETYSTPALLAPSESNATSTANFPNIPVASTSQPASILGGSHSEGLLQIASGPQPGQQQNGFTGQPATYHHNSTTTWTGSRTAPYTPNLPHHQNGHLQHHPPMPPHPGHYWPVHNELAFQPPISNHPGL

SEQ ID NO: 95487 - protein, 797 aa, Homo sapiens
  MOD_RES (1)..(1): Any amino acid
XLVKLKENDAADLQKAKEQNQRLDEEILALRNRVRSLDSEKKVLGEMVERLKGEVCESQENKQLGNHSPGKTILKMSQEKNEMFESEWSKEREREKQLASGLDTAEKALKVESEELQKSKSELICLYNEVHNLPGESESKDHFLIACDLLQRENSELETKVLKLSQEFAQLNHFTLGGKTAPSNLITSENTCKDPESNEPILETEIQSRKEETEELCPKLGERKQKEIPEESVKEGSFPREGQKEEGSQQNRDMKDEEKEQQLTMKPEEIVRLREELSHINQSLLQSQSSGDSSDDSGAQHPSSGEKLKYNQQGEVQQLHQNLHRLQILCNSAENELRYERGQNLDLKQHNSLLQEENIKIKIELKHAQQKLLDSTKMCSSLTAEYKHCQQKIKELELEVLKHTQSIKSQNNLQEKLVQEKSKVADAEEKILDLQRKLEHAHKVCLTDTCISEKQQLEEKIKEATQNEAKVKQQYQEEQQKRKLLYQNVDELHRQVRTLQDKENLLEMTCSQQQSRIQQQEALLKQLENEKRKYDEHVKSNQELSEKLSKLQQEKEALREEYLRLLKLLNVHVRNYNEKHHQQKVKLQKVKYRLTNEVELRDKRINQFEDEIGILQHKIEKEKAIQDQITAQNDTLLLEKRKLQEQVIEQEQLIHSNKWTISSIQSRVLYMDKENKQLQENSLRLTQQIGFLERIIRSIHIRRGEETTISDILESEVVNEILPLSNSSFSGKGLVESFASLQETEEIKSKEAMASSKSPEKSPENLVCSQNSEAGYINVASLKETHGIQEQDQKSEL

SEQ ID NO: 95488 - protein, 105 aa, Homo sapiens
MGVSKLDILYRRLLLTKLFIRGWGRPEDLKRLFEFRKMIGNRERCQNLVSSDYPVHIDKIEEQSDCKILDGHFVSPMAHYVPDIMPIESVIARFQFIVPKEWNSK

SEQ ID NO: 95489 - protein, 200 aa, Homo sapiens
EELQSILPSTGINLLDEEFQKIVTDTSRNENGMVELDDFVNALAKERSFPECNALPGVIKAIDKIKDKNVDYEDLNTCLQNFGIYLSKPEFKKITELTEAGETKKVNFKEFIDTMMSNTECFSEKLVLPDAIETLDDLRKETMSVSDLWNTLSSLNSNLKKDEFLAALELVTVDDNMEVDLKDFLMKMKESPHFQKSKGK

SEQ ID NO: 95490 - protein, 131 aa, Homo sapiens
MKRGRLPSSSEDSDDNGSLSTTWSQNSRSQHRRSSCSRHEDRKPSEVFRTDLITAMKLHDSYQLNPDEYYVLADPWRQEWEKGVQVPVSPGTIPQPVARVVSEEKSLMFIRPKKYIVSSGSEPPELGYVDI

SEQ ID NO: 95491 - protein, 165 aa, Homo sapiens
MFKGILQSGLDNFVINHMLKNNVAGQTSIQTLVPNTDQKSTSVKKDNHKKKTVKMLEYLGKDVLHGVFNYLAKHDVLTLKEEEKKKYYDTKIEDKALILVDSLRKNRVAHQMFTQTLLNMDQKITSVKPLLQIEAGPPESAESTNILKLCPREEFLRLCKKNHDE

SEQ ID NO: 95492 - protein, 41 aa, Homo sapiens
MMAYMNPGPHYSVNALALSGPSVDLMHQAVPYPSLVQEPEG

SEQ ID NO: 95493 - protein, 117 aa, Homo sapiens
  MOD_RES (1)..(1): Any amino acid
XEMYQVSRLQHICELFIITQLQSMPSRELASMNLDIVDLLKKAKFHHSDCLSTWLLHFIATNYLIFSQKPEFQDLSVEERSFVEKHRWPSNMYLKQLAEYRKYIHSRKCRCLVIKRH

SEQ ID NO: 95494 - protein, 316 aa, Homo sapiens
MSRKWRGGSDSRGRFRKRAWKTIFGHSLCEGAGSALGEDDTPEIITRVIKCSAGVSGTPAQGCTQEREGKKPRPGTTGADEPKGEAQTFSKERLEQGEPWIPDLLGSKEKELPSGSHIGDRRVHADLLPSKKDRRSWVEQDHWSFEDEKVAGVHWGYEETRTLLAILSQTEFYEALRNCHRNSQVYGAVAERLREYGFLRTLEQCRTKFKGLQKSYRKVKSGHPPETCPFFEEMEALMSAQVIALPSNGLEAAASHSGLVGSDAETEEPGQRGWQHEEGAEEAVAQESDSDDMDLEATPQDPNSAAPVVFRSPGGA

SEQ ID NO: 95495 - protein, 130 aa, Homo sapiens
MPKRKSPENTEGKDGSKVTKQEPTRRSARLSAKPAPPKPEPKPRKTSAKKEPGAKISRGAKGKKEEKQEAGKEGTAPSENGETKAEEIHISRSTVNVSTSRGTPPSTLSVKGQIETVRAQKTESVDNEGE

SEQ ID NO: 95496 - protein, 10 aa, Homo sapiens
MKCLVTGGNV

SEQ ID NO: 95497 - protein, 839 aa, Homo sapiens
MGGKAGNKGAVGIRFQFHSTSFCFICSHLTAGQSQVKERNEDYKEITQKLCFPMGRNVFSHDYVFWCGDFNYRIDLTYEEVFYFVKRQDWKKLLEFDQLQLQKSSGKIFKDFHEGAINFGPTYKYDVGSAAYDTSDKCRTPAWTDRVLWWRKKHPFDKTAGELNLLDSDLDVDTKVRHTWSPGALQYYGRAELQASDHRPVLAIVEVEVQEVDVGARERVFQEVSSFQGPLDATVVVNLQSPTLEEKNEFPEDLRTELMQTLGSYGTIVLVRINQGQMLVTFADSHSALSVLDVDGMKVKGRAVKIRPKTKDWLKGLREEIIRKRDSMAPVSPTANSCLLEENFDFTSLDYESEGDILEDDEDYLVDEFNQPGVSDSELGGDDLSDVPGPTALAPPSKSPALTKKKQHPTYKDDADLVELKRELEAVGEFRHRSPSRSLSVPNRPRPPQPPQRPPPPTGLMVKKSASDASISSGTHGQYSILQTARLLPGAPQQPPKARTGISKPYNVKQIKTTNAQEAEAAIRCLLEARGGASEEALSAVAPRDLEASSEPEPTPGAAKPETPQAPPLLPRRPPPRVPAIKKPTLRRTGKPLSPEEQFEQQTVHFTIGPPETSVEAPPVVTAPRVPPVPKPRTFQPGKAAERPSHRKPASDEAPPGAGASVPPPLEAPPLVPKVPPRRKKSAPAAFHLQVLQSNSQLLQGLTYNSSDSPSGHPPAAGTVFPQGDFLSTSSATSPDSDGTKAMKPEAAPLLGDYQDPFWNLLHHPKLLNNTWLSKSSDPLDSGTRSPKRDPIDPVSAGASAAKAELPPDHEHKTLGHWVTISDQEKRTALQVFDPLAKT

SEQ ID NO: 95498 - protein, 243 aa, Homo sapiens
MGNPENIEDAYVAVIRPKNTASLNSREYRAKSYEILLHEVPIEGQKKKRKKVLLETKLQGNSEITQGILDYVVETTKPISPANQGIRGKRVVLMKKFPLDGEKMGREASLFIVPSVVKDNTKYTYTPGCPIFYCLQDIMRVCSESSTHFATLTARMLIALDKWLDERHAQSHFIPALFRPSPLERIKTNVINPAYATESGQTENSLHMGYSALEIKSKMLALEKADTCIYNPLFGSDLQYTNR

SEQ ID NO: 95499 - protein, 366 aa, Homo sapiens
  MOD_RES (1)..(1): Any amino acid
XAFEKIPSETLNRILGDPEALRDLLNNHILKSAMCAEAIVAGLSVETLEGTTLEVGCSGDMLTINGKAIISNKDILATNGVIHYIDELLIPDSAKTLFELAAESDVSTAIDLFRQAGLGNHLSGSERLTLLAPLNSVFKDGTPPIDAHTRNLLRNHIIKDQLASKYLYHGQTLETLGGKKLRVFVYRNSLCIENSCIAAHDKRGRYGTLFTMDRVLTPPMGTVMDVLKGDNRFSMLVAAIQSAGLTETLNREGVYTVFAPTNEAFRALPPRERSRLLGDAKELANILKYHIGDEILVSGGIGALVRLKSLQGDKLEVSLKNNVVSVNKEPVAEPDIMATNGVVHVITNVLQPPAPVYQKLLERMKH

SEQ ID NO: 95500 - protein, 182 aa, Homo sapiens
MGGCAGSRRRFSDSEGEYSRPPSWNDHLWLAAHLRGMRADSAPGGHARSGRAPESRWGSCPLLALPGEETVPEPRLPLLDHQGAHWKNAVGFWLLGLCNNFSYVVMLSAAHDILSHKRTSGNQSHVDPGPTPIPHNSSSRFDCNSVSTAPPGSRQWDLCCWKLRPGCLFSFCGDQPVWCGLR

SEQ ID NO: 95501 - protein, 559 aa, Homo sapiens
MGANNMPKQVEVRMHDSHLGSEEPKHRHLGLRLCDKLGKNLLLTLTVFGVILGAVCGGLLRLASPIHPDVVMLIAFPGDILMRMLKMLILPLIISSLITGLSGLDAKASGRLGTRAMVYYMSTTIIAAVLGVILVLAIHPGNPKLKKQLGPGKKNDEVSSLDAFLDLIRNLFPENLVQACFQQIQTVTKKVLVAPPPDEEANATSAVVSLLNETVTEVPEETKMVIKKGLEFKDGMNVLGLIGFFIAFGIAMGKMGDQAKLMVDFFNILNEIVMKLVIMIMWYSPLGIACLICGKIIAIKDLEVVARQLGMYMVTVIIGLIIHGGIFLPLIYFVVTRKNPFSFFAGIFQAWITALGTASSAGTLPVTFRCLEENLGIDKRVTRFVLPVGATINMDGTALYEAVAAIFIAQMNGVVLDGGQIVTVSLTATLASVGAASIPSAGLVTMLLILTAVGLPTEDISLLVAVDWLLDRMRTSVNVVGDSFGAGIVYHLSKSELDTIDSQHRVHEDIEMTKTQSIYDDMKNHRESNSNQCVYAAHNSVIVDECKVHFPFMDIETCI

SEQ ID NO: 95502 - protein, 223 aa, Homo sapiens
MVNDPPVPALLWAQEVGQVLAGRARRLLLQFGVLFCTILLLLWVSVFLYGSFYYSYMPTVSHLSPVHFYYRTDCDSSTTSLCSFPVANVSLTKGGRDRVLMYGQPYRVTLELELPESPVNQDLGMFLVTISCYTRGGRIISTSSRSVMLHYRSDLLQMLDTLVFSSLLLFGFAEQKQLLEVELYADYRENSYVPTTGAIIEIHSKRIQLYGAYLRIHAHFTGL

SEQ ID NO: 95503 - protein, 375 aa, Homo sapiens
MRTKQVNLLITLVAVALFSFSCFSIYRITQTNNQLINCRNHILEFKENMLHLRNKTEKNTQEMMKVLNRMKYEITKREILSGNLVAQKADILNKNETVSNTFEDLKFFFPHLRKEGRIYPDVIIGKGKTGVSFALGISTVNRGNYSYLKQTLTSVVSRMTLSQEKDSVVIVLVADSNEDYLHSVVKMITKKFKRQVRSGSLEVISIPAFLYSSMLNAKHLAEASQKLASWRIKQVLDFCILLLYAQPKAKYYLQLEDDIIAKEMYFTKITDFVGNISSNNWFFIEFSMLGFIGKLFRSEDLTHFVRFFLMFYKEKPIDWLLNDIFQVKVCDAGEDLRNCMKRKKQIRIQYKPSLFQHVGIHSSFPRKEQYEKDVY

SEQ ID NO: 95504 - protein, 162 aa, Homo sapiens
MQIEGLKEELAYLRKNHEEEMLALRGQTGGDVNVEMDAAPGVDLSRILNEMRDQYEQMAEKNRRDAETWFLSKTEELNKEVASNSELVQSSRSEVTELRRVLQGLEIELQSQLSMKASLENSLEETKGRYCMQLSQIQGLIGSVEEQLAQLRCEMEQQSQEY

SEQ ID NO: 95505 - protein, 25 aa, Homo sapiens
MCCTKSLLLAALMSVLLLHLCGESE

SEQ ID NO: 95506 - protein, 103 aa, Homo sapiens
MAAGERSWCLCKLLRFFYSLFFPGLIVCGTLCVCLVIVLWGIRLLLQRKKKLVSTSKNGKNQMVIAFFHPYCNAGGGGERVLWCALRALQKKHFWTFPYMRKR

SEQ ID NO: 95507 - protein, 122 aa, Homo sapiens
MSGPTDETAGDLPVKDTGLNLFGMGGLQETSTTRTMKSRQAVSRVSREELEDRFLRLHDENILLKQHARKQEDKIKRMATKLIRLVNDKKRYERVGGGPKRLGRDVEMEEMIEQLQEKVHEL

SEQ ID NO: 95508 - protein, 36 aa, Homo sapiens
MHPDLSPHLHTEECNVLINLLKECHKNDSVQDTHYT

SEQ ID NO: 95509 - protein, 481 aa, Homo sapiens
FPLKSITESFATAIHGLKVGHLTDRVIQRSKRMILDTLGAGFLGTTTEVFHIASQYSKIYSSNISSTVWGQPDIRLPPTYAAFVNGVAIHSMDFDDTWHPATHPSGAVLPVLTALAEALPRSPKFSGLDLLLAFNVGIEVQGRLLHFAKEANDMPKRFHPPSVVGTLGSAAAASKFLGLSSTKCREALAIAVSHAGAPMANAATQTKPLHIGNAAKHGIEAAFLAMLGLQGNKQVLDLEAGFGAFYANYSPKVLPSIASYSWLLDQQDVAFKRFPAHLSTHWVADAAASVRKHLVAERALLPTDYIKRIVLRIPNVQYVNRPFPVSEHEARHSFQYVACAMLLDGGITVPSFHECQINRPQVRELLSKVELEYPPDNLPSFNILYCEISVTLKDGATFTDRSDTFYGHWRKPLSQEDLEEKFRANASKMLSWDTVESLIKIVKNLEDLEDCSVLTTLLKGPSPPEVASNSPACNNSITNLS

SEQ ID NO: 95510 - protein, 318 aa, Homo sapiens
MSSSPVKRQRMESALDQLKQFTTVVADTGDFHAIDEYKPQDATTNPSLILAAAQMPAYQELVEEAIAYGRKLGGSQEDQIKNAIDKLFVLFGAEILKKIPGRVSTEVDARLSFDKDAMVARARRLIELYKEAGISKDRILIKLSSTWEGIQAGKELEEQHGIHCNMTLLFSFAQAVACAEAGVTLISPFVGRILDWHVANTDKKSYEPLEDPGVKSVTKIYNYYKKFSYKTIVMGASFRNTGEIKALAGCDFLTISPKLLGELLQDNAKLVPVLSAKPKPVTWKKSTWMRSLSVGCTTRTRWLWRSSLTGSASLPLMQ

SEQ ID NO: 95511 - protein, 156 aa, Homo sapiens
MAEGEDVGWWRSWLQQSYQAVKEKTEGSSGATEKMKKGLSDFLGVISDTFAPSPDKTIDCDVITLMGTPSGTAEPYDGTKARLYSLQSDPATYCNEPDGPPELFDAWLSQFCLEEKKGEISELLVGSPSIRALYTKMVPAAVSHSEFWHRYFYKVH

SEQ ID NO: 95512 - protein, 102 aa, Homo sapiens
  MOD_RES (1)..(1): Any amino acid
XKVTDHLEALIDPFDLDVFTPHLNSNLHRLVQRTSVLFGLVTGTENQLAPRSSTFNSQEPHNILPLASSQIRFGLLPLSMTSTRKAKSTRNIETKAQYDANC

SEQ ID NO: 95513 - protein, 89 aa, Homo sapiens
MSFRKVNIIILVLAVALFLLVLHHNFLSLSSLLRNEVTDSGIVGPQPIDFVPNALRHAVDGRQEEIPVVIAASEDRLGGAIAAINSIQH

SEQ ID NO: 95514 - protein, 354 aa, Homo sapiens
MPITLTVSTSSLNLMAADCKQIIANHHMQSISFASGGDPDTAEYVAYVAKDPVNQRACHILECPEGLAQDVISTIGQAFELRFKQYLRNPPKLVTPHDRMAGFDGSAWDEEEEEPPDHQYYNDFPGKEPPLGGVVDMRLREGAAPGAARPTAPNAQTPSHLGATLPVGQPVGGDPEVRKQMPPPPPCPGRELFDDPSYVNVQNLDKARQAVGGAGPPNPAINGSAPRDLFDMKPFEDALRVPPPPQSVSMAEQLRGEPWFHGKLSRREAEALLQLNGDFLVRESTTTPGQYVLTGLQSGQPKHLLLVDPEGVVRTKDHRFESVSHLISYHMDNHLPIISAGSELCLQQPVERKL

SEQ ID NO: 95515 - protein, 56 aa, Homo sapiens
MALPALFSLIIGFAFGALYWKKRQPSLTRAVENIQINEEDNEISMLQEKEREFQEV

SEQ ID NO: 95516 - protein, 248 aa, Homo sapiens
MSREFRGHRNCVLTLAYSAPWDLPSTPCAEEAAAGGLLVTGSTDGTAKVWQVASGCCHQTLRGHTGAVLCLVLDTPGHTAFTGSTDATIRAWDILSGEQLRVFREHRGSVICLELVNRLVYSGSADRTVKCWLADTGECVRTFTAHRRNVSALKYHAGTLFTGSGDACARAFDAQSGELRRVFRGHTFIINCIQVHGQVLYTASHDGALRLWDVRGLRGAPRPPPPMRSLSRLFSNKVGCAAAPLQPA

SEQ ID NO: 95517 - protein, 341 aa, Homo sapiens
  MOD_RES (1)..(1): Any amino acid
XREIAEAPELGAALRHGELELKEEWQDEEFPRLLPEEAGTSEDPEDPKGDSQAGTPSTLALCGQRPMRKRLSAPELRLSLTKGPGNDGASPTQSAPSSPDGSSDLEIDELETPSDSEQLDSGHEFEWEDELPRAEGLGTSETAERLGRGCMWDVTGEDGHHWRVFRMGPREQRVDMTVIEPYKKVLSHGGYHGDGLNAVILFASCYLPRSSIPNYTYVMEHLFRYMVGTLELLVAENYLLVHLSGGTSRAQVPPLSWIRQCYRTLDRRLRKNLRALVVVHATWYVKAFLALLRPFISSKFTRKIRFLDSLGELAQLISLDQVHIPEAVRQLDRDLHGSGGT

SEQ ID NO: 95518 - protein, 213 aa, Homo sapiens
MTQQPLRGVTSLRFNQDQSCFCCAMETGVRIYNVEPLMEKGHLDHEQVGSMGLVEMLHRSNLLALVGGGSSPKFSEISGVDPVSPGLPLTLNLGPDNPPTCPAVLIWDDAREGKDSKEKLVLEFTFTKPVLSVRMRHDKIVIVLKNRIYVYSFPDNPRKLFEFDTRDNPKGLCDLCPSLEKQLLVFPGHKCGSLQLVDLASTKPGTSSAPFTI

SEQ ID NO: 95519 - protein, 82 aa, Homo sapiens
  MOD_RES (1)..(1): Any amino acid
XLEGAEVLGNQPAPTCAEPPPAMGTIGWVGAPAGEGSGAHPPKGPTHLGTFVHRLLEPVSSPRPRERGVSSPTSRYRPPLSP

SEQ ID NO: 95520 - protein, 46 aa, Homo sapiens
MACLSPSQLQKQPILIALCWVPDSMPGVGDRAANKIPGPTFTQLQG

SEQ ID NO: 95521 - protein, 225 aa, Homo sapiens
MEKSSSCESLGSQPAAARPPSVDSLSSASTSHSENSVHTKSASVVSSDSISTSADNFSPDLRVLRESNKLAEMEEPPLLPGENIKDMAKDVTYICPFTGAVRGTLTVTNYRLYFKSMERDPPFVLDASLGVINRVEKIGGASSRGENSYGLETVCKDIRNLRFAHKPEGRTRRSIFENLMKYAFPVSNNLPLFAFEYKEVFPENGWKLYDPLLEYRREFQMKAGE

SEQ ID NO: 95522 - protein, 29 aa, Homo sapiens
KRHKADNAVNKKQTQVLRNGAWEIVHWEK

SEQ ID NO: 95523 - protein, 66 aa, Homo sapiens
MLRCGQMIFAQALVCRHLGRDWRWTQRKRQPDSYFSVLNAFIDRKDSYYSIHQIAQMGVGEGKSIG

SEQ ID NO: 95524 - protein, 73 aa, Homo sapiens
MWRVKKLSLSLSPSPQTGKPSMRTPLRELTLQPGALTNSGKRSPACSSLTPSLCKLGLQQISVSIMWTQRRKL

SEQ ID NO: 95525 - protein, 170 aa, Homo sapiens
MRILQLILLALATGLVGGETRIIKGFECKPHSQPWQAALFEKTRLLCGATLIAPRWLLTAAHCLKPRYIVHLGQHNLQKEEGCEQTRTATESFPHPGFNNSLPNKDHRNDIMLVKMASPVSITWAVRPLTLSSRCVTAGTSCLISGWGSTSSPQLRLPHTLRCANITIIE

SEQ ID NO: 95526 - protein, 1309 aa, Homo sapiens
MENLPAVTTEEPTPMGRGPVGPSGGGSTRDQVRTVVMRPSVSWEKAGPEEAKAPVRGDEAPPARVAGPAAGTPPCQMGVYPTDLTLQLLAVRRKSRLRDPGLQQTLRGQLRLLENDSREMARVLGELSARLLSIHSDQDRIVVTFKTFEEIWKFSTYHALGFTHHCLANLLMDQAFWLLLPSEEEETAIQVHVDENALRLTHESLLIQEGPFFVLCPDHHVRVMTGPRDAGNGPQALRQASGAPQGEAAPETDSSPPSPSVSSEEVAVAAAPEPLIPFHQWALRIPQDPIDDAMGGPVMPGNPLMAVGLASALADFQGSGPEEMTFRGGDLIEILGAQVPSLPWLESAIFLNEEEKSFFSEGCFSEEDARQLLRRMSGTDVCSVYSLDSVEEAETEQPQEKEIPPPCLSLEPQETLQKVKNVLEQCKTCPGCPQEPASWGLCAASSDVSLQDPEEPSFCLEAEDDWEDPEALSSLLLFLNAPGYKASFRGLYDVALPWLSSVFRSFSDEEELTGRLAQARGAAKKAGLLMALARLCFLLGRLCSRRLKLSQARVYFEEALGALEGSFGDLFLVVAVYANLASIYRKQKNREKCAQVVPKAMALLLGTPDHICSTEAEGELLQLALRRAVGGQSLQAEARACFLLARHHVHLKQPEEALPFLERLLLLHRDSGAPEAAWLSDCYLLLADIYSRKCLPHLVLSCVKVASLRTRGSLAGSLRSVNLVLQNAPQPHSLPAQTSHYLRQALASLTPGTGQALRGPLYTSLAQLYSHHGCHGPAITFMTQAVEASAIAGVRAIVDHLVALAWLHVLHGQSPVALDILQSVRDAVVASEDQEGVIANMVAVALKRTGRTRQAAESYYRALRVARDLGQQRNQAVGLANFGALCLHAGASRLAQHYLLEAVRLFSRLPLGECGRDFTHVLLQLGHLCTRQGPAQQGKGYYEWALLVAVEMGHVESQLRAVQRLCHFYSAVMPSEAQCVIYHELQLSLACKVADKVLEGQLLETISQLYLSLGTERAYKSALDYTKRSLGIFIDLQKKEKEAHAWLQAGKIYYILRQSELVDLYIQVAQNVALYTGDPNLGLELFEAAGDIFFDGAWEREKAVSFYRDRALPLAVTTGNRKAELRLCNKLVALLATLEEPQEGLEFAHMALALSITLGDRLNERVAYHRLAALQHRLGHGELAEHFYLKALSLCNSPLEFDEETLYYVKVYLVLGDIIFYDLKDPFDAAGYYQLALAAAVDLGNKKAQLKIYTRLATIYHNFLLDREKSLFFYQKARTFATELNVRRVNLPPLPLCGWAPWLAPSHPR

SEQ ID NO: 95527 - protein, 92 aa, Homo sapiens
MDSLDHMLTDPLELGPCGDGHGTRIMEDCLLGGTRVSLPEDLLEDPEIFFDVVSLSTWQEVLSDSQREHLQQFLPQFPEDSAEQQNELILAL

SEQ ID NO: 95528 - protein, 32 aa, Homo sapiens
MAESSSESDHFRCRDRLSPWAARSTHRGTRSL

SEQ ID NO: 95529 - protein, 58 aa, Homo sapiens
MEYLGGGSALDLLKPGPLEETYIATILREILKGLDYLHSERKIHRDIKGPAGGGCGSC

SEQ ID NO: 95530 - protein, 255 aa, Homo sapiens
MALEDRPSSLLVDQGDSSSPSFNPSDNSLLSSSSPIDEMEERKSSSLKRRHYVLQELVETERDYVRDLGYVVEGYMALMKEDGVPDDMKGKDKIVFGNIHQIYDWHRDFFLGELEKCLEDPEKLGSLFVKHERRLHMYIAYCQNKPKSEHIVSEYIDTFFEDLKQRLGHRLQLTDLLIKPVQRIMKYQLLLKDFLKYSKKASLDTSELERAVEVMCIVPRRCNDMMNVGRLQGFDGRVVALCHRFKETFREICWF

SEQ ID NO: 95531 - protein, 104 aa, Homo sapiens
  MOD_RES (1)..(1): Any amino acid
XKDPAVIRSLTLEPDPIIVPGNVTLSVMGSTSVPLSSPLKVDLVLEKEVAGLWIKIPCTDYIGSCTFEHFCDVLDMLIPTGEPCPEPLRTYGLPCHCPFKEVST

SEQ ID NO: 95532 - protein, 171 aa, Homo sapiens
MSPAPRPPRCLLLPLLTLGTALASLGSAQSSSFSPEAWLQQYGYLPPGDLRTHTQRSPQSLSAAIAAMQKFYGLQVTGKADADTMKAMRRPRCGVPDKFGAEIKANVRRKRYAIQGLKWQHNEITFWASMATARPSMVRAASWPMPTSQAPTLEETPTLTLPSLGLSGMRI

SEQ ID NO: 95533 - protein, 445 aa, Homo sapiens
MAGASVKVAVRVRPFNSREMSRDSKCIIQMSGSTTTIVNPKQPKETPKSFSFDYSYWSHTSPEDINYASQKQVYRDIGEEMLQHAFEGYNVCIFAYGQTGAGKSYTMMGKQEKDQQGIIPQLCEDLFSRINDTTNDNMSYSVEVSYMEIYCERVRDLLNPKNKGNLRVREHPLLGPYVEDLSKLAVTSYNDIQDLMDSGNKARTVAATNMNETSSRSHAVFNIIFTQKRHDAETNITTEKVSKISLVDLAGSERADSTGAKGTRLKEGANINKSLTTLGKVISALAEMDSGPNKNKKKKKTDFIPYRDSVLTWLLRENLGGNSRTAMVAALSPADINYDETLSTLRYADRAKQIRCNAVINEDPNNKLIRELKDEVTRLRDLLYAQGLGDITDTNTVPGGPKLTNALVGMSPSSSLSALSSRAASVSSLHERILFAPGSEEAIER

SEQ ID NO: 95534 - protein, 176 aa, Homo sapiens
MIITKAGRRMFPAMRVKISGLDPHQQYYIAMDIVPVDNKRYRYVYHSSKWMVAGNADSPVPPRVYIHPDSPASGETWMRQVISFDKLKLTNNELDDQGHIILHSMHKYQPRVHVIRKDCGDDLSPIKPVPSGEGVKAFSFPETVFTTVTAYQNQQITRLKIDRNPFAKGFRDSGRN

SEQ ID NO: 95535 - protein, 122 aa, Homo sapiens
MEAFQELRKPSARLECDHCSFRGTDYENVQIHMGTIHPEFCDEMDAGGLGKMIFYQKSAKLFHCHKCFFTSKMYSNVYYHITSKHASPDKWNDKPKNQLNKETDPVKSPPLPEHQKIPCNSA

SEQ ID NO: 95536 - protein, 478 aa, Homo sapiens
MAARPITLGIDLGTTSVKAALLRAAPDDPSGFAVLASCARAARAEAAVESAVAGPQGREQDVSRILQALHECLAALPRPQLRSVVGIGVSGQMHGVVFWKTGQGCEWTEGGITPVFEPRAVSHLVTWQDGRCSSEFLASLPQPKSHLSVATGFGCATIFWLLKYRPEFLKSYDAAGTIHDYVVAMLCGLPRPLMSDQNAASWGYFNTQSQSWNVETLRSSGFPVHLLPDIAEPGSVAGRTSHMWFEIPKGTQVGVALGDLQASVYSCMAQRTDAVLNISTSVQLAASMPSGFQPAQTPDPTAPVAYFPYFNRTYLGVAASLNGGNVLATFVHMLVQWMADLGLEVEESTVYSRMIQAAVQQRDTHLTITPTVLGERHLPDQLASVTRISSSDLSLGHVTRALCRGIVQNLHSMLPIQQLQEWGVERVMGSGSALSRNDVLKQEVQRAFPLPMSFGQDVDAAVGAALVMLRRHLNQKES

SEQ ID NO: 95537 - protein, 189 aa, Homo sapiens
MTFTFQSEDLKRDCGKKMSHQHVFSLAMEEDVKTADTKKASRILDHEKENTRSICLLEQKRKVVSSNIDVPPARKSSEELDMDKVTAAMVLTSLSTSPLVRSPPVRPNESLSGSWKEGGCVPSSTSSSGYWSWSAPSDQSNPSTPSPPLSADSFKPFRSPAQPDDGIDEAEASNLLFDEPIPRKRKNSM

SEQ ID NO: 95538 - protein, 87 aa, Homo sapiens
MTTFKEAVTFKDVAVFFTEEELGLLDPAQRKLYQDVMLENFTNLLSVGHQPFHPFHFLREEKFWMMETATQREGNSGKKQATVCPCT

SEQ ID NO: 95539 - protein, 1338 aa, Homo sapiens [sequence omitted]

SEQ ID NO: 95540 - protein, 304 aa, Homo sapiens
MSKIRGLPPEVREPGPGVELGVENGLLCQLIHSPEFNLFSNSVVFESNFIQADFQVTKPGNWRDVCEGSATVILGVTSSVPSLPLPNVLLMANVTWPQGPFTTWSTPGDAPVINLSRLLPLKYVELRIYDRLQRILRVRTVTEKIYYLKLHEKHPEIVFQFWVRLVKILQKGLSITTKDPRIKFTHCLVPKMPTNSTETTPENSLLSSPQPSEPLVLLAAEQTSGSFSQLSGKPQLTADRNNDTAIEIDNCSSYKIPSPVASPINLNIPMRAALSHSLWEQEDWNEHLLQVHIASYLGEHFLGA

SEQ ID NO: 95541 - protein, 14 aa, Homo sapiens
MIQTYSNGSTKDRK

SEQ ID NO: 95542 - protein, 106 aa, Homo sapiens
MAFTQLTFRDVAIEFSQDEWKCLNSTQRTLYRDVMLENYRNLVSLDLSRNCVIKELAPQQEGNPGEVFHTVTLEQHEKHDIEEFCFREIKKKIHDFDCQWRDDERN

SEQ ID NO: 95543 - protein, 139 aa, Homo sapiens
  MOD_RES (1)..(1): Any amino acid
XNCWNVIHYSGFLHLELLSSYDVDVNQIINTISEWIVLIKTRGVRRPEFQTLLTESESEHGERVNGRCLNNWLRRGKTLKLIFSLRKEMEAFLVSVGATTVHFSDKQWLCDFGFLVDIMEHLRELSEELRTQVWPYQKR

SEQ ID NO: 95544 - protein, 237 aa, Homo sapiens
  MOD_RES (1)..(1): Any amino acid
XVISSSIQLLVQDLDAACDPALTAMSKMQWQNVEHVGDQSPYVTSVILHIKQNVPIIRDNLASTRKYFTQFCVKFANSFIPKFITHLFKCKPISMVGAEQLLLDTHSLKMVLLDLPSISSQVVRKAPASYTKIVVKGMTRAEMILKVVMAPHEPLVVFVDNYIKLLTDCNTETFQKILDMKGLKRSEQSSMLELLRQRLPAPPSGAESSGSLSLTAPTPEQESSRIRKLEKLIKKRL

SEQ ID NO: 95545 - protein, 584 aa, Homo sapiens
MTADKDKDKDKEKDRDRDRDREREKRDKARESENSRPRRSCTLEGGAKNYAESDHSEDEDNDNNSATAEESTKKNKKKPPKKKSRYERTDTGEITSYITEDDVVYRPGDCVYIESRRPNTPYFICSIQDFKLVHNSQACCRSPTPALCDPPACSLPVASQPPQHLSEAGRGPVGSKRDHLLMNVKWYYRQSEVPDSVYQHLVQDRHNENDSGRELVITDPVIKNRELFISDYVDTYHAAALRGKCNISHFSDIFAAREFKARVDSFFYILGYNPETRRLNSTQGEIRVGPSHQAKLPDLQPFPSPDGDTVTQHEELVWMPGVNDCDLLMYLRAARSMAAFAGMCDGGSTEDGCVAASRDDTTLNALNTLHESGYDAGKALQRLVKKPVPKLIEKCWTEDEVKRFVKGLRQYGKNFFRIRKELLPNKETGELITFYYYWKKTPEAASSRAHRRHRRQAVFRRIKTRTASTPVNTPSRPPSSEFLDLSSASEDDFDSEDSEQELKGYACRHCFTTSTPYPRDLPGAIPPPMSAAHQLQAMHAQSAELQRLAMEQQWLHGHPHMHGGHLPSQEDYYSRLKKEGDKQL

SEQ ID NO: 95546 - protein, 143 aa, Homo sapiens
  MOD_RES (1)..(1): Any amino acid
XTLENQKGTGVKKSPMLCGQYPVKSEGKELKIVVQPETQHRARYLTEGSRGSVKDRTQQGFPTVKLEGHNEPVVLQVFVGNDSGRVKPHGFYQACRVTGRNTTPCKEVDIEGTTVIEVGLDPSNNMTLASASRSARNLKEKLA

SEQ ID NO: 95547 - protein, 113 aa, Homo sapiens
MRSNSALRVLFSGSLRLKCRNACCQRWYFTFNGAECSGPLPIEAIIYLDQGSPEMNSTINIHRTSSVEGLCEGIGAGLVDVAIWVGTCSDYPKGDASTGWNSVSRIIIEELPK

SEQ ID NO: 95548 - protein, 32 aa, Homo sapiens
MLRGTMTAWRGMRPEVTLACLLLATAGCFADL

SEQ ID NO: 95549 - protein, 102 aa, Homo sapiens
MVMEKPSPLLVGREFVRQYYTLLNKAPEYLHRFYGRNSSYVHGGVDASGKPQEAVYGQNDIHHKVLSLNFSECHTKIRHVDAHATLSDGVVVQVMGLLSNSG

SEQ ID NO: 95550 - protein, 244 aa, Homo sapiens
MVLEMLNPIHYNITSIVPEAMPAATMPVLLLTGLFLLVWNYEGTSSIPGPGYCMGIGPLISHGRFLWMGIGSACNYYNRVYGEFMRVWISGEETLIISKSSSMFHIMKHNHYSSRFGSKLGLQCIGMHEKGIIFNNNPELWKTTRPFFMKESAIVVKIQGYFDAWQALLIKPDIFFKISWLYKKYEKSVKDLKDAIEVLIAEKRRRISTEEKLEECMDFATELILAEKRGDLTRENVNQCILEM

SEQ ID NO: 95551 - protein, 87 aa, Homo sapiens
MHILFVDVAMRTDSSKMTDVESGVANFASSARAGRRNALPDIQSSAATDGTSDLPLKLEALSVKEDAKEKDEKTTQDQLEKPQNEEK

SEQ ID NO: 95552 - protein, 331 aa, Homo sapiens
PSGRAGNWPGSPQVSGPSPAARMPGMSPANPSLHSPVPDASHSPRAGTSSQTMPTNMPPPRKLPQRSWAASIPTILTHSALNILLLPSPTPGLVPGLAGSYLCSPLERFLGSVIMRRHLQRIIQQETLQLINSNEPGVIMFKTDALKCRVALSPKTNQTLQLKVTPENAGQWKPDELQVLEKFFETRVAGPPFKANTLIAFTKLLGAPTHILRDCVHIMKLELFPDQATQLKWNVQFCLTIPPSAPPIAPPGTPAVVLKSKMLFFLQLTQKTSVPPQEPVSIIVPIIYDMASGTTQQADIPRQQNSSVAAPMMVSNILKRFAEMNPPRQGT

SEQ ID NO: 95553 - protein, 251 aa, Homo sapiens
  MOD_RES (1)..(1): Any amino acid
XIGLMSLSKGLLEEKYRYLFKEVAGPTEMCDQRQLGLLLHDAIQIPRQLGEVAAFGGSNIEPSVRSCFQQNNNKPEISVKEFIDWMHLEPQSMVWLPVLHRVAAAETAKHQAKCNICKECPIVGFRYRSLKHFNYDVCQSCFFSGRTAKGHKLHYPMVEYCIPTTSGEDVRDFTKVLKNKFRSKKYFAKHPRLGYLPVQTVLEGDNLETPSQSPQLFHDDTHSRIEQYATRLAQMERTNGSFLTDSSSTTG

SEQ ID NO: 95554 - protein, 439 aa, Homo sapiens
MEPSTAARAWALFWLLLPLLGAVCASGPRTLVLLDNLNVRETHSLFFRSLKDRGFELTFKTADDPSLSLIKYGEFLYDNLIIFSPSVEDFGGNINVETISAFIDGGGSVLVAASSDIGDPLRELGSECGIEFDEEKTAVIDHHNYDISDLGQHTLIVADTENLLKAPTIVGKSSLNPILFRGVGMVADPDNPLVLDILTGSSTSYSFFPDKPITQYPHAVGKNTLLIAGLQARNNARVIFSGSLDFFSDSFFNSAVQKAAPGSQRYSQTGNYELAVALSRWVFKEEGVLRVGPVSHHRVGETAPPNAYTVTDLVEYSIVIQQLSNGKWVPFDGDDIQLEFVRIDPFVRTFLKKKGGKYSVQFKLPDVYGVFQFKVDYNRLGYTHLYSSTQVSVRPLQHTQYERFIPSAYPYYASAFSMMLGLFIFSIVFLHMKEKEKSD

SEQ ID NO: 95555 - protein, 194 aa, Homo sapiens
MEKPPSLGDQETRRKAREQAARLKKLQEQEKQQKVEFRKRMEKEVSDFIQDSGQIKKKFQPMNKIERSILHDVVEVAGLTSFSFGEDDDCRYVMIFKKEFAPSDEELDSYRRGEEWDPQKAEEKRKLKELAQRQEEEAAQQGPVVVSPASDYKDKYSHLIGKGAAKDAAHMLQANKTYGCGEATVRLGVAGRGA

SEQ ID NO: 95556 - protein, 421 aa, Homo sapiens
MWVPAGEPGSGTGSWSVGDWTTQGMRVAEPGCGQRVARGPWEHLQALFVLFVLAYIHIVFSRSPINCLEHVRDKWPREGILRVEVRHNSSRAPVFLQFCDSGGRGSFPGLAVEPGSNLDMEDEEEEELTMEMFGNSSIKFELDIEPKVFKPPSSTEALNDSQEFPFPETPTKVWPQDEYIVEYSLEYGFLRLSQATRQRLSIPVMVVTLDPTRDQCFGDRFSRLLLDEFLGYDDILMSSVKGLAENEENKGFLRNVVSGEHYRFVSMWMARTSYLAAFAIMVIFTLSVSMLLRYSHHQIFVFIAPLLTVILALVGEDPTRPPPPRAAPRPARFNRRRLSLQGWRPSCRSSSTTPPPPSTSSSSCGSRTSMTPSAATPAPASGIGCGSSISTTSPSMPITTASMGSIAAWPWSPPGSSSSIP

SEQ ID NO: 95557 - protein, 151 aa, Homo sapiens
MVMHARSGGNLEVMGLMLGKVDGETMIIMDSFALPVEGTETRVNAQAAAYEYMAAYIENAKQVGRLENAIGWYHSHPGYGCWLSGIDVSTQMLNQQFQEPFVAVVIDPTRTISAGKVNLGAFRTYPKGYKPPDEGPSEYQTIPLNKIEDFG

SEQ ID NO: 95558 - protein, 238 aa, Homo sapiens
MAVFSGVLESALFLDQNTLQARQGSRSPLTMDKFVIRTPRIQNSPQKKDSGGKVYKQATIESLKRVVVVEDIKRWKTMLELPDQTKENLVEALQELKKKIPSREVLKSTRIGHTVNKMRKHSDSEVASLAREVYTEWKTFTEKHSNRPSIEVRSDPKTESLRKNAQKLLSEALELKMDHLLVENIERETFHLCSRLINGPYRRTVRALVFTLKHRAEIRAQVKSGSLPVGTFVQTHKK

SEQ ID NO: 95559 - protein, 13 aa, Homo sapiens
MCVRSCFQSPRLQ

SEQ ID NO: 95560 - protein, 509 aa, Homo sapiens
MLLPVFTLKLRHKISPRMVAIGRYDGTHPCLAAATQTGKVFIHNPHTRNQHVSASRVFQSPLESDVSLLSINQAVSCLTAGVLNPELGYDALLVGTQTNLLAYDVYNNSDLFYREVADGANAIVLGTLGDISSPLAIIGGNCALQGFNHEGSDLFWTVTGDNVNSLALCDFDGDGKKELLVGSEDFDIRVFKEDEIVAEMTETEIVTSLCPMYGSRFGYALSNGTVGVYDKTSRYWRIKSKNHAMSIHAFDLNSDGVNELITGWSNGKVDARSDRTGEVIFKDNFSSAIAGVVEGDYRMDGHIQLICCSVDGEIRGYLPGTAEMRGNLMDTSAEQDLIRELSQKKQNLLLELRNYEENAKAELASPLNEADGHRGIIPANTRLHTTLSVSLGNETQTAHTELRISTSNDTIIRAVLIFAEGIFTGESHVVHPSIHNLSSSICIPIVPPKDVPVDLHLKAFVGYRSSTQFHVFESTRQLPRFSMYALTSLDPASEPISYVNFTIAERAQR

SEQ ID NO: 95561 - protein, 149 aa, Homo sapiens
MDRMTEDALRLNLLKRSLDPADERDDVLAKRLKMEGHEAMERLKMLALLKRKDLANLEVPHELPTKQDGSGVKGYEEKLNGNLRPHGDNRTAGRPGKENINDEPVDMSARRSEPERGRLTPSPDIIVLSDNEASSPRSSSRMEERLKAA

SEQ ID NO: 95562 - protein, 86 aa, Homo sapiens
MTLQELVHKAASCYMDRVAVCFDECNNQLPVYYTYKTVVNAASELSNFLLLHCDFQGIREIGLYCQPGIDLPSWILGNLNLFMKHY

SEQ ID NO: 95563 - protein, 315 aa, Homo sapiens
MADIIARLREDGIQKRVIQEGRGELPDFQDGTKATFHYRTLHSDDEGTVLDDSRARGKPMELIIGKKFKLPVWETIVCTMREGEIAQFLCDIKHVVLYPLVAKSLRNIAVGKDPLEGQRHCCGVAQMREHSSLGHADLDALQQNPQPLIFHMEMLKVESPGTYQQDPWAMTDEEKAKAVPLIHQEGNRLYREGHVKEAAAKYYDAIACLKNLQMKEQPGSPEWIQLDQQITPLLLNYCQCKLVVEEYYEVLDHCSSILNKYDDNVKAYFKRGKAHAAVWNAQEAQADFAKVLELDPALAPVVSRELRALEARIRQ

SEQ ID NO: 95564 - protein, 776 aa, Homo sapiens
  MOD_RES (1)..(1): Any amino acid
XKSNTLPISLQSIRSSLLLGFRRSMNINLWSEITELLYKDGRYCQEPRGPTEAVGYFLYNLIDSMSDSEVQAKEEHLRQYFHQLEKMNVKIPENIYRGIRNLLESYHVPELIKDAHLLVESKNLDFQKTVQLTSSELESTLETLKAENQPIRDVLKQLILVLCSEENMQKALELKAKYESDMVTGGYAALINLCCRHDKVEDALNLKEEFDRLDSSAVLDTGKYVGLVRVLAKHGKLQDAINILKEMKEKDVLIKDTTALSFFHMLNGAALRGEIETVKQLHEAIVTLGLAEPSTNISFPLVTVHLEKGDLSTALEVAIDCYEKYKVLPRIHDVLCKLVEKGETDLIQKAMDFVSQEQGEMVMLYDLFFAFLQTGNYKEAKKIIETPGIRARSARLQWFCDRCVANNQVETLEKLVELTQKLFECDRDQMYYNLLKLYKINGDWQRADAVWNKIQEENVIPREKTLRLLAEILREGNQEVPFDVPELWYEDEKHSLNSSSASTTEPDFQKDILIACRLNQKKGAYDIFLNAKEQNIVFNAETYSNLIKLLMSEDYFTQAMEVKAFAETHIKGFTLNDAANSRLIITQVRRDYLKEAVTTLKTVLDQQQTPSRLAVTRVIQALAMKGDVENIEVVQKMLNGLEDSIGLSKMVFINNIALAQIKNNNIDAAIENIENMLTSENKVIEPQYFGLAYLFRKVIEEQLEPAVEKISIMAERLANQFAIYKPVTDFFLQLVDAGKVDDARALLQRCGAIAEQTPILLLFLLRNSRKQGKDLI

SEQ ID NO: 95565 - protein, 384 aa, Homo sapiens
VKDKITAFIVERDFGGVTNGKPEDKLGIRGSNTCEVHFENTKIPVENILGEVGDGFKVAMNILNSGRFSMGSVVAGLLKRLIEMTAEYACTRKQFNKRLSEFGLIQEKFALMAQKAYVMESMTYLTAGMLDQPGFPDCSIEAAMVKVFSSEAAWQCVSEALQILGGLGYTRDYPYERILRDTRILLIFEGTNEILRMYIALTGLQHAGRILTTRIHELKQAKVSTVMDTVGRRLRDSLGRTVDLGLTGNHGVVHPSLADSANKFEENTYCFGRTVETLLLRFGKTIMEEQLVLKRVANILINLYGMTAVLSRASRSIRIGLRNHDHEVLLANTFCVEAYLQNLFSLSQLDKYAPENLDEQIKKVSQQILEKRAYICAHPLDRTC

SEQ ID NO: 95566 - protein, 141 aa, Homo sapiens
MLGWCEAIARNPHRIPNNTRTPEISGDLADASQTSTLNEKSPGRSASRSSNISKASSPTTGTAPRSQSRLSVCPSTQDICRICHCEGDEESPLITPCRCTGTLRFVHQSCLHQWIKSSDTRCCELCKYDFIMETKLKPLRK

SEQ ID NO: 95567 - protein, 54 aa, Homo sapiens
MSGGEQKPERYYVGVDVGTGSVRAALVDQSGVLLAFADQPIKNWEPQFNHHEQS

SEQ ID NO: 95568 - protein, 41 aa, Homo sapiens
MVEGDCQIQMGRFISFLQELSCFVTRCYEVVMNVVHQLAAL

SEQ ID NO: 95569 - protein, 151 aa, Homo sapiens
MESERSKRMGNACIPLKRIAYFLCLLSALLLTEGKKPAKPKCPAVCTCTKDNALCENARSIPRTVPPDVISLSFVRSGFTEISEGSFLFTPSLQLLLFTSNSFDVISDDAFIGLPHLEYLFIENNNIKSISRHTFRGLKSLIHLRDGVGRI

SEQ ID NO: 95570 - protein, 601 aa, Homo sapiens
MGVGRQQRGPFQGVRVKNSVKELLLHIRSHKQKASGQAVDDFKTQGVNIEQFRELKNTVSYSGKRKGPDSLSDGPACKRPALLHSQFLTPPQTPTPGESMEDVHLNEPKQESSADLLQNIINIKNECSPVSLNTVQVSWLNPVVVPQSSPAEQCQDFHGGQVFSPPQKCQPFQVRGSQQMIDQASLYQYSPQNQHVEQQPHYTHKPTLEYSPFPIPPQSPAYEPNLFDGPESQFCPNQSLVSLLGDQRESENIANPMQTSSSVQQQNDAHLHSFSMMPSSACEAMVGHEMASDSSNTSLPFSNMGNPMNTTQLGKSLFQWQVEQEESKLANISQDQFLSKDADGDTFLHIAVAQGRRALSYVLARKMNALHMLDIKEHNGQSAFQVAVAANQHLIVQDLVNIGAQVNTTDCWGRTPLHVCAEKGHSQVLQAIQKGAVGSNQFVDLEATNYDGLTPLHCAVIAHNAVVHELQRNQQPHSPEVQELLLKNKSLVDTIKCLIQMGAAVEAKDRKSGRTALHLAAEEANLELIRLFLELPSCLSFVNAKAYNGNTALHVAASLQYRLTQLDAVRLLMRKGADPSTRNLENEQPVHLVPDGPVGEQ

SEQ ID NO: 95571 - protein, 100 aa, Homo sapiens
  MOD_RES (1)..(1): Any amino acid
XLFIEVAPAGPLLLHLLDWVRLHVCEVDSLSADVLGSENPSKHDSFWNLIMLGDEAALLEQKELLSNWYHFLVTRLLYSNPTVKPIDLHYYAQPGPVSGR

SEQ ID NO: 95572 - protein, 187 aa, Homo sapiens
RVVRGCLDKGRTLNSRKGICDFMSNGKFHMRDPNNQLHVIKNLKIAVSNIVTQPPQPGAIRKLLNDVVSGSQPAEGLVANVITAGDYDLNISATTPWFESYRETFLQSMPALDHEFLNHYLACMLVASSSEAEPVEQFSKLSQEQHRIQHNSDYSYPKWFIPNTLKYYVLLHDVSAGDEQRAESIYE

SEQ ID NO: 95573 - protein, 46 aa, Homo sapiens
MADKEAGGSDGPRETAPTSAYSSPARSLGDTGITPLSPSHIVGVHS

SEQ ID NO: 95574 - protein, 36 aa, Homo sapiens
  MOD_RES (1)..(1): Any amino acid
XDKKFARKPPRFSCLLPDPRELIEIKNKKKFFSCSC

SEQ ID NO: 95575 - protein, 45 aa, Homo sapiens
  MOD_RES (1)..(1): Any amino acid
XVYSFQEEEPVLDPHLAKHLAHFGIDMLHMHGVRQRMGSRTMTSS

SEQ ID NO: 95576 - protein, 231 aa, Homo sapiens
  MOD_RES (1)..(1): Any amino acid
XSADSLEGGILDLGSVLSHILPVSELREAQLYSVDVTLDPDTAYPSLILSDNLRQVRYSYLQQDLPDNPERFNLFPCVLGSPCFIAGRHYWEVEVGDKAKWTIGVCEDSVCRKGGVTSAPQNGFWAVSLWYGKEYWALTSPMTALPLRTPLQRVGIFLDYDAGEVSFYNVTERCHTFTFSHATFCGPVRPYFSLSYSGGKSAAPLIICPMSGIDGFSGHVGNHGHSMETSP

SEQ ID NO: 95577 - protein, 39 aa, Homo sapiens
CRRQQCSVERRGFRQELDSWRHKLIHCVPFPSVRRPAGP

SEQ ID NO: 95578 - protein, 60 aa, Homo sapiens
VAKTKQQIEEQRVQVQVVERAQQVAVQEQEIARREKELEARVRKPAEAERYKLERLAEAE

SEQ ID NO: 95579 - protein, 120 aa, Homo sapiens
MSPCGRARRQTSRGAMAVLAWKFPRTRLPMGASALCVVVLCWLYIFPVYRLPNEKEIVQGVLQQGTAWRRNQTAARAFSVSTLLTLAAHESLNIHLGGGITVLVFKEHRFYFTSGPKMQD

SEQ ID NO: 95580 - protein, 86 aa, Homo sapiens
MADQRMDISSTISDFMSPGPTDLLSSSLGTSGVDCNRKRKGSSTDYQENLRGGIPPTADVLSAEVHRSNLGSTMAGGQMPTRRCYD

SEQ ID NO: 95581 - protein, 40 aa, Homo sapiens
  MOD_RES (1)..(1): Any amino acid
XGKMPEVDYVVLSEWFDWILRNMDVSVDLIGIPGSNSPSP

SEQ ID NO: 95582 - protein, 132 aa, Homo sapiens
  MOD_RES (1)..(1): Any amino acid
XDRVGCVWQTVRDHLYHLCVQAQDFCFLVERAVVGLLRLAIRLLRREEISAQVGKDDVDNSKPGPSRPGPSPLINQYSLTVGLDLGPHDTKSLLKCVESLSFIVRDAAHITPDNFELCVKTLRIFVEASLNG

SEQ ID NO: 95583 - protein, 219 aa, Homo sapiens
EFPMSPVTSAHAGTYRCYGSLNSDPYLLSHPSEPLELVVSGPSMGSSPPPTGPISTPAGPEDQPLTPTGSDPQSGLGRHLGVVIGILVAVVLLLLLLLLLFLILRHRRQGKHWTSTQRKADFQHPAGAVGPEPTDRGLQWRSSPAADAQEENLYAAVKDTQPEDGVEMDTRAAASEAPQDVTYAQLHSLTLRRKATEPPPSQEREPPAEPSIYATLAIH

SEQ ID NO: 95584 - protein, 146 aa, Homo sapiens
MSLRRHIGNPEYLMKRIPQNPRYQHIKSRLDTGNSMTKYTEKLEEIKKNYRYKKDELFKRLKVTTFAQLIIQVASLSDQTLEVTAEEIQRLEDNDSAASDPDAETTARTNGKGNPGEQSPSPEQFINNAGAGDSSRSTLQRPTEPS

SEQ ID NO: 95585 - protein, 39 aa, Homo sapiens
MGDTGLRKRREDEKSIQSQEPKTTSLQKEVPCALRSLAQ

SEQ ID NO: 95586 - protein, 175 aa, Homo sapiens
MLLILLSVALLAFSSAQDLNEDGGDSEQFLDEERQGPPLGGQQSQPSAGDGNQDDGPQQGPPQQGGQQQQGPPPPQGKPQGPPQQGGQQQQGPPPPQGKPQGPPQQGGHPPPPQGRPQGPPQQGGHPRPPRGRPQGPPQQGGHQQGPPPPPPGKPQGPPPQGGRPQGPPQGQSPQ

SEQ ID NO: 95587 - protein, 79 aa, Homo sapiens
MAALRQATAAARCRCRQPQPFLLACLHGGAGGPEPLSHFEVEVCQLPRPGLRGVLFRRVAGTALAFRTLVTRISNDLEL

SEQ ID NO: 95588 - protein, 388 aa, Homo sapiens
MGLLSNSGQPERKFMQTFVLAPEGSVPNKFYVHNDMFRYEDEVFGDSEPELDEESEDEVEEEQEERQPSPEPVQENANSGYYEAHPVTNGIEEPLEESSHEPEPEPESETKTEELKPQVEEKNLEELEEKSTTPPPAEPVSLPQEPPKAFSWASVTSKNLPPSGTVSSSGIPPHVKAPVSQPRVEAKPEVQSQPPRVREQRPRERPGFPPRGPRPGRGDMEQNDSDNRRIIRYPDSHQLFVGNLPHDIDENELKEFFMSFGNVVELRINTKGVGGKLPNFGFVVFDDSEPVQRILIAKPIMFRGEVRLNVEEKKTRAARERETRGGGDDRRDIRRNDRGPGGPRGIVGGGMMRDRDGRGPPPRGGMAQKLGSGRGTGQMEGRFTGQRR

SEQ ID NO: 95589 - protein, 363 aa, Homo sapiens
MACWPQLRLLLWKNLTFRRRQTCQLLLEVAWPLFIFLILISVRLSYPPYEQHECHFPNKAMPSAGTLPWVQGIICNANNPCFRYPTPGEAPGVVGNFNKSIVARLFSDARRLLLYSQKDTSMKDMRKVLRTLQQIKKSSSNLKLQDFLVDNETFSGFLYHNLSLPKSTVDKMLRADVILHKVFLQGYQLHLTSLCNGSKSEEMIQLGDQEVSELCGLPREKLAAAERVLRSNMDILKPILMDVTCDDIAHGQLTVPRSAAVAATGDAKPNMMGRETLLSICASVPKVEFHERHILKHFSFCVCVSVSLFPAKGIVSFSWASFRIWVLWKAVFWQHGESMAVWEGQLGLGLNIAFEYFTSIDVG

SEQ ID NO: 95590 - protein, 40 aa, Homo sapiens
MASLKCSTVVCVICLEKPKYRCPACRVPYATLKLVLLRKK

SEQ ID NO: 95591 - protein, 42 aa, Homo sapiens
MAPSVPAAEPEYPKGIRAVLLGPPGAGKGTQLEKLKFEWLVL

SEQ ID NO: 95592 - protein, 809 aa, Homo sapiens
MYCIVIVILIFHYFLSDTSHKMFCSFFFLTDENRCLKANAKSCGECIQAGPNCGWCTNSTFLQEGMPTSARCDDLEALKKKGCPPDDIENPRGSKDIKKNKNVTNRSKGTAEKLKPEDITQIQPQQLVLRLRSGEPQTFTLKFKRAEDYPIDLYYLMDLSYSMKDDLENVKSLGTDLMNEMRRITSDFRIGFGSFVEKTVMPYISTTPAKLRNPCTSEQNCTSPFSYKNVLSLTNKGEVFNELVGKQRISGNLDSPEGGFDAIMQVAVCGSLIGWRNVTRLLVFSTDAGFHFAGDGKLGGIVLPNDGQCHLENNMYTMSHYYDYPSIAHLVQKLSENNIQTIFAVTEEFQPVYKELKNLIPKSAVGTLSANSSNVIQLIIDAYNSLSSEVILENGKLSEGVTISYKSYCKNGVNGTGENGRKCSNISIGDEVQFEISITSNKCPKKDSDSFKIRPLGFTEEVEVILQYICECECQSEGIPESPKCHEGNGTFECGACRCNEGRVGRHCECSTDEVNSEDMDAYCRKENSSEICSNNGECVCGQCVCRKRDNTNEIYSGKFCECDNFNCDRSNGLICGGNGVCKCRVCECNPNYTGSACDCSLDTSTCEASNGQICNGRGICECGVCKCTDPKFQGQTCEMCQTCLGVCAEHKECVQCRAFNKGEKKDTCTQECSYFNITKVESRDKLPQPVQPDPVSHCKEKDVDDCWFYFTYSVNGNNEVMVHVVENPECPTGPDIIPIVAGVVAGIVLIGLALLLIWKLLMIIHDRREFAKFEKEKMNAKWDTQENPIYKSPINNFKNPNYGRKAGL

SEQ ID NO: 95593 - protein, 97 aa, Homo sapiens
MTPQSLLQTTLFLLSLLFLVQASGTRHTGAASTTNPHQTCASPSRTPKRPSQSMPLSLQPTLLPDPSLTPGASTTSASTGTDMLGDYIFSMASVTSC

SEQ ID NO: 95594 - protein, 157 aa, Homo sapiens
MKTPNAQEAEGQQTRAAAGRATGSANMTKKKVSQKKQRGRPSSQPRRNIVGCRISHGWKEGDEPITQWKGTVLDQLLDDYKEGDLRIMPESSESPPTEREPGGVVDGLIGKHVEYTKEDGSKRIGMVIHQVEAKPSVYFIKFDDDFHIYVYDLVKKS

SEQ ID NO: 95595 - protein, 334 aa, Homo sapiens
MGQTGKKSEKGPVCWRKRVKSEYMRLRQLKRFRRADEVKSMFSSNRQKILERTEILNQEWKQRRIQPVHILTSVSSLRGTRECSVTSDLDFPTQVIPLKTLNAVASVPIMYSWSPLQQNFMVEDETVLHNIPYMGDEVLDQDGTFIEELIKNYDGKVHGDRECGFINDEIFVELVNALGQYNDDDDDDDGDDPEEREEKQKDLEDHRDDKESRPPRKFPSDKIFEAISSMFPDKGTAEELKEKYKELTEQQLPGALPPECTPNIDGPNAKSVQREQSLHSFHTLFCRRCFKYDCFLHPFHATPNTYKRKNTETALDNKPCGPQCYQHLPLLPRN

SEQ ID NO: 95596 - protein, 40 aa, Homo sapiens
MYCGIQILALWESIKYHVFEDHGLSSLCIQDLSLNNLIKT

SEQ ID NO: 95597 - protein, 55 aa, Homo sapiens
MAQRHLQRSLCPWVSYLPQPYAEHSKVILNGNLHCHFKRISQIFAGHFMEGDTEA

SEQ ID NO: 95598 - protein, 521 aa, Homo sapiens
MEALLEGIQNRGHGGGFLTSCEAELQELMKQIDIMVAHKKSEWEGRTHALETCLKIREQELKSLRSQLDVTHKEVGMLHQQVEEHEKIKQEMTMEYKQELKKLHEELCILKRSYEKLQKKQMREFRGNTKNHREDRSEIERLTAKIEEFRQKSLDWEKQRLIYQQQVSSLEAQRKALAEQSEIIQAQLVNRKQKLESVELSSQSEIQHLSSKLERANDTICANELEIERLTMRVNDLVGTSMTVLQEQQQKEEKLRESEKLLEALQEEKRELKAALQSQENLIHEARIQKEKLQEKVKATNTQHAVEAIRPREESLAEKKYTSQGQGDLDSVLSQLNFTHTSEDLLQAEVTCLEGSLESVSATCKQLSQELMEKYEELKRMEAHNNEYKAEIKKLKEQILQGEQSYSSALEGMKMEISHLTQELHQRDITIASTKGSSSDMEKRLRAEMQKAEDKAVEHKEILDQLESLKLENRHLSEMVMKLELGLHERWGFTMLSSLVLNFGIQAIRQPQRPKVLELQV

SEQ ID NO: 95599 - protein, 274 aa, Homo sapiens
MNKHQKPVLTGQRFKTRKRDEKEKFEPTVFRDTLVQGLNEAGDDLEAVAKFLDSTGSRLDYRRYADTLFDILVAGSMLAPGGTRIDDGDKTKMTNHCVFSANEDHETIRNYAQVFNKLIRRYKYLEKAFEDEMKKLLLFLKAFSETEQTKLAMLSGILLGNGTLPATILTSLFTDSLVKEGIAASFAVKLFKAWMAEKDANSVTSSLRKANLDKRLLELFPVNRQSVDHFAKYFTDAGLKELSDFLRVQQSLGTRKELQKELQERLSQECPIKE

SEQ ID NO: 95600 - protein, 314 aa, Homo sapiens
METRNYSAMTEFFLVGLSQYPELQLFLFLLCLIMYMIILLGNSLLIIITILDSRLHTPMYFFLGNLSFLDICYTSSSIPPMLIIFMSERKSISFIGCALQMVVSLGLGSTECVLLAVMAYDHYVAICNPLRYSIIMNGVLYVQMAAWSWIIGCLTSLLQTVLTMMLPFCGNNVIDHITCEILALLKLVCSDITINVLIMTVTNIVSLVILLLLIFISYVFILSSILRINCAEGRKKAFSTCSAHSIVVILFYGSALFMYMKPKSKNTNTSDEIIGLSYGVVSPMLNPIIYSLRNKEVKEAVKKVLSRHLHLLKM

SEQ ID NO: 95601 - protein, 133 aa, Homo sapiens
MTVLEQDTQGLDGWWLCSLHGRQGIVPGNRLKILVGMYDKKPAGPGPGPPATPAQPQPGLHAPAPPASQYTPMLPNTYQPQPDSVYLVPTPSKAQQGLYQVPGPSPQFQSPPAKQTSTFSKQTPHHPFPSPAT

SEQ ID NO: 95602 - protein, 82 aa, Homo sapiens
MRIISRQIVLLFSGFWGLAMGAFPSSVQIGGLFIRNTDQEYTAFRLAIFLHNTSPNASEAPFNLVPHVDNIETANSFAVTNA

SEQ ID NO: 95603 - protein, 476 aa, Homo sapiens
MGEIIMGNIELTRYTRPTPVQKHAIPIIKEKRDLMACAQTGSGKTAAFLLPILSQIYSDGPGEALRAMKENGRYGRRKQYPISLVLAPTRELAVQIYEEARKFSYRSRVRPCVVYGGADIGQQIRDLERGCHLLVATPGRLVDMMERGKIGLDFCKYLVLDEADRMLDMGFEPQIRRIVEQDTMPPKGVRHTMMFSATFPKEIQMLARDFLDEYIFLAVGRVGSTSENITQKVVWVEESDKRSFLLDLLNATGKDSLTLVFVETKKGADSLEDFLYHEGYACTSIHGDRSQRDREEALHQFRSGKSPILVATAVAARGLDISNVKHVINFDLPSDIEEYVHRIGRTGRVGNLGLATSFFNERNINITKDLLDLLVEAKQEVPSWLENMAYEHHYKGSSRGRSKSSRFSGGFGARDYRQSSGASSSSFSSSRASSSRSGGGGHGSSRGFGGGGYGGFYNSDGYGGNYNSQGVDWWGN

SEQ ID NO: 95604 - protein, 249 aa, Homo sapiens
MARQPYRFPQARIPERGSGVFRLTVRNAMAHRDSEMKEECLREDLKFYFMSPCEKYRARRQIPWKLGLQILKIVMVTTQLVRFGLSNQLVVAFKEDNTVAFKHLFLKGYSGTDEDDYSCSVYTQEDAYESIFFAINQYHQLKDITLGTLGYGENEDNRIGLKVCKQHYKKGTMFPSNETLNIDNDVELDCVQLDLQDLSKKPPDWKNSSFFRLEFYRLLQVEISFHLKGIDLQTIHSRELPDCYVFQNT

SEQ ID NO: 95605 - protein, 213 aa, Homo sapiens
MTESRSVTQAGVHWRNLGSLQPLPLRFKQFSCLSLLSSWDYREKKWVTVGDTSLRIFKWVPVTDSKEKEKSKSNSSAAREPNGFPSDASANSSLLLEFQDENSNQSSVSDVYQLKVDSSTNSSPSPQQSESLSPAHTSDFRTDDSQPPTLGQEILEEPSLPSSEVADEPPTLTKEEPVPLETQVVEEEEDSGAPPLKRFCVDQPTVPQTASES

SEQ ID NO: 95606 - protein, 94 aa, Homo sapiens
MALGVPISVYLLFNAMTALTEEAAVTVTPPITAQQGNWTVNKTEADNIEGPIALKFSHLCLEDHNSYCINGACAFHHELEKAICRCFTGYTGER

SEQ ID NO: 95607 - protein, 39 aa, Homo sapiens
MENFQKVEKIGEGTYGVVYKARNKLTGEVVALKKIRLDT

SEQ ID NO: 95608 - protein, 295 aa, Homo sapiens
MHDQHFHLLTPLPHRGLSCQRGPAVHDRQRAAGLARGADRAAGNASYRSIGALNQVRFRHWFVAKLYMNTHPGRLLLGLTLGLWLTTAWVLSVAERQAVNATGHLSDTLWLIPITFLTIGYGDVVPGTMWGKIVCLCTGVMGVCCTALLVAVVARKLEFNKAEKHVHNFMMDIQYTKEMKESAARVLQEAWMFYKHTRRKESHAARRHQRKLLAAINAFRQVRLKHRKLREQVNSMVDISKMHMILYDLQQNLSSSHRALEKQIDTLAGKLDALTELLSTALGPRQLPEPSQQSK

SEQ ID NO: 95609 - protein, 48 aa, Homo sapiens
MDSTACLKSLLLTVSQYKAVKSEANATQLLRHLELTYCLWEEAEGIIP

SEQ ID NO: 95610 - protein, 231 aa, Homo sapiens
MAENDVDNELLDYEDDEVETAAGGDGAEAPAKKDVKGSYVSIHSSGFRDFLLKPELLRAIVDCGFEHPSEVQHECIPQAILGMDVLCQAKSGMGKTAVFVLATLQQLEPVTGQVSVLVMCHTRELAFQISKEYERFSKYMPNVKVAVFFGGLSIKKDEEVLKKNCPHIVVGTPGRILALARNKSLNLKHIKHFILDECDKMLEQLDMRRDVQEIFRMTPHEKQVMMFSATL

SEQ ID NO: 95611 - protein, 907 aa, Homo sapiens
VESAIAEGGASRFSASSGGGGSRGAPQHYPKTAGNSEFLGKTPGQNAQKWIPARSTRRDDNSAANNSANEKERHDAIFRKVRGILNKLTPEKFDKLCLELLNVGVESKLILKGVILLIVDKALEEPKYSSLYAQLCLRLAEDAPNFDGPAAEGQPGQKQSTTFRRLLISKLQDEFENRTRNVDVYDKRENPLLPEEEEQRAIAKIKMLGNIKFIGELGKLDLIHESILHKCIKTLLEKKKRVQLKDMGEDLECLCQIMRTVGPRLDHERAKSLMDQYFARMCSLMLSKELPARIRFLLQDTVELREHHWVPRKAFLDNGPKTINQIRQDAVKDLGVFIPAPMAQGMRSDFFLEGPFMPPRMKMDRDPLGGLADMFGQMPGSGIGTGPGVIQDRFSPTMGRHRSNQLFNGHGGHIMPPTQSQFGEMGGKFMKSQGLSQLYHNQSQGLLSQLQGQSKDMPPRFSKKGQLNADEISLRPAQSFLMNKNQVPKLQPQITMIPPSAQPPRTQTPPLGQTPQLGLKTNPPLIQEKPAKTSKKPPPSKEELLKLTETVVTEYLNSGNANEAVNGVREMRAPKHFLPEMLSKVIILSLDRSDEDKEKASSLISLLKQEGIATSDNFMQAFLNVLDQCPKLEVDIPLVKSYLAQFAARAIISELVSISELAQPLESGTHFPLFLLCLQQLAKLQDREWLTELFQQSKVNMQKMLPEIDQNKDRMLEILEGKGLSFLFPLLKLEKELLKQIKLDPSPQTIYKWIKDNISPKLHVDKGFVNILMTSFLQYISSEVNPPSDETDSSSAPSKEQLEQEKQLLLSFKPVMQKFLHDHVDLQVSALYALQVHCYNSNFPKGMLLRFFVHFYDMEIIEEEAFLAWKEDITQEFPGKGKALFQVNQWLTWLETAEEEESEEEAD

SEQ ID NO: 95612 - protein, 126 aa, Homo sapiens
MSPGLLTTRKEALMAFRDVAVAFTQKEWKLLSSAQRTLYREVMLENYSHLVSLGIAFSKPKLIEQLEQGDEPWREENEHLLDLCPGEWEALGKRGCRAVRSSAGKEGGAIFEVLGGSSSSGLLGHW

SEQ ID NO: 95613 - protein, 139 aa, Homo sapiens
MPSYTVTVATGSQWFAGTDDYIYLSLVGSAGCSEKHLLDKPFYNDFERGAVDSYDVTVDEELGEIQLVRIEKRKYWLNDDWYLKYITLKTPHGDYIEFPCYRWITGDVEVVLRDGREMDGVEPWLPLEHRCQMPQGFTP

SEQ ID NO: 95614 - protein, 466 aa, Homo sapiens
MKSLSLLLAVALGLATAVSAGPAVIECWFVEDASGKGLAKRPGALLLRQGPGEPPPRPDLDPELYLSVHDPAGALQAAFRRYPRGAPAPHCEMSRFVPLPASAKWASGLTPAQNCPRALDGAWLMVSISSPVLSLSSLLRPQPEPQQEPVLITMATVEMGFHHVGQAALELLTSVVLTVLTHTPAPRVRLGQDALLDLSFAYMPPTSEAASSLAPGPPPFGLEWRRQHLGKGHLLLAATPGLNGQMPAAQEGAVAFAAWDDDEPWGPWTGNGTFWLPTVQPFQEGTYLATIHLPYLQGQVTLELAVYKPPKVSLMPATLARAAPGEAPPELLCLVSHFYPSGGLEVEWELRGGPGGRSQKAEGQRWLSALRHHSDGSVSLSGHLQPPPVTTEQHGARYACRIHHPSLPASGRSAEVTLEVAGLSGPSLEDSVGLFLSAFLLLGLFKALGWAAVYLSTCKDSKKKAE

SEQ ID NO: 95615 - protein, 157 aa, Homo sapiens
MHPDGTIDGTKDENSDYTLFNLIPVGLRVVAIQGVKASLYVAMNGEGYLYSSDVFTPECKFKESVFENYYVIYSSTLYRQQESGRAWFLGLNKEGQIMKGNRVKKTKPSSHFVPKPIEVCMYREPSLHEIGEKQGRSRKSSGTPTMNGGKVVNQDST

SEQ ID NO: 95616 - protein, 546 aa, Homo sapiens
MPSPRPVLLRGARAALLLLLPPRLLARPSLLLRRSLSAASCPPISLPAAASRSSMDGAGAEEVLAPLRLAVRQQGDLVRKLKEDKAPQVDVDKAVAELKARKRVLEAKELALQPKDDIVDRAKMEDTLKRRFFYDQAFAIYGGVSGLYDFGPVGCALKNNIIQTWRQHFIQEEQILEIDCTMLTPEPVLKTSGHVDKFADFMVKDVKNGECFRADHLLKAHLQKLMSDKKCSVEKKSEMESVLAQLDNYGQQELADLFVNYNVKSPITGNDLSPPVSFNLMFKTFIGPGGNMPGYLRPETAQGIFLNFKRLLEFNQGKLPFAAAQIGNSFRNEISPRSGLIRVREFTMAEIEHFVDPSEKDHPKFQNVADLHLYLYSAKAQVSGQSARKMRLGDAVEQGVINNTVLGYFIGRIYLYLTKVGISPDKLRFRQHMENEMAHYACDCWDAESKTSYGWIEIVGCADRSCYDLSCHARATKVPLVAEKPLKEPKTVNVVQFEPSKGAIGKAYKKDAKLVMEYLAICDECYITEMEMLLNEKGGRSCSECN

SEQ ID NO: 95617 - protein, 227 aa, Homo sapiens
MGGCFCIPRERSLTRGPGKETPSKDPTVSSECIASSEYKEKCFLPQNINPDLTLSFCVKSRSRRCVNGPLQEAARRRLWALENEDQEVRMLFKDLSARLVSIQSQRAQFLITFKTMEEIWKFSTYLNLGYVSMCLEHLLFDHKYWLNCILVEDTEIQVSVDDKHLETIYLGLLIQEGHFFCRALCSVTPPAEKEGECLTLCKNELISVKMAEAGSELEGVSLVTGGS

SEQ ID NO: 95618 - protein, 36 aa, Homo sapiens
MMAAVPPGLEPWNRVRIPKAGNRSAVTVQNPGAALG

SEQ ID NO: 95619 - protein, 361 aa, Homo sapiens
MSEARKGPDEAEESQYDSGIESLRSLRSLPESTSAPASGPSDGSPQPCTHPPGPVKEPQEKEDADGERADSTYGSSSLTYTLSLLGGPEAEDPAPRLPLPHVGALSPQQLEALTYISEDGDTLVHLAVIHEAPAVLLCCLALLPQEVLDIQNNLYQTALHLAVHLDQPGAVRALVLKGASRALQDRHGDTALHVACQRQHLACARCLLEGRPEPGRGTSHSLDLQLQNWQGLACLHIATLQKNQPLMELLLRNGADIDVQEGTSGKTALHLAVETQERGLVQFLLQAGAQVDARMLNGCTPLHLAAGRGLMGISSTLCKAGADSLLRNVEDETPQDLTEESLVLLPFDDLKISGKLLLCTD

SEQ ID NO: 95620 - protein, 446 aa, Homo sapiens
MAAATIVHDTSEAVELCPAYGLYLKPITKMTISVALPQLKQPGKSISNWEVMERLKGMVQNHQFSTLRISKSTMDFIRFEGEVENKSLVKSFLACLDGKTIKLSGFSDILKVRAAEFKIDFPTRHDWDSFFRDAKDMNETLPGERPDTIHLEGLPCKWFALKESGSEKPSEDVLVKVFEKFGEIRNVDIPMLDPYREEMTGRNFHTFSFGGHLNFEAYVQYREYMGFIQAMSALRGMKLMYKGEDGKAVACNIKVSFDSTKHLSDASIKKRQLERQKLQELEQQREEQKRREKEAEERQRAEERKQKELEELERERKREEKLRKREQKQRDRELRRNQKKLEKLQAEEQKQLQEKIKLEERKLLLAQRNLQSIRLIAELLSRAKVPGGSLCSRQPRPGCPQCPPLKCGRRHGAVSPPAAAVATKPALMPRMTAPSREGVALVCRSR

SEQ ID NO: 95621 - protein, 209 aa, Homo sapiens
MGPEALSSLLLLLLVASGDADMKGHFDPAKCRYALGMQDRTIPDSDISASSSWSDSTAARHSRLESSDGDGAWCPAGSVFPKEEEYLQVDLQRLHLVALVGTQGRHAGGLGKEFSRSYRLRYSRDGRRWMGWKDRWGQEVISGNEDPEGVVLKDLGPPMVARLVRFYPRADRVMSVCLRVELYGCLWRDGLLSYTAPVGQTMYLSEAVY

SEQ ID NO: 95622 - protein, 665 aa, Homo sapiens
MGDILAHESELLGLVKEYLDFAEFEDTLKTFSKECKIKGKPLCKTVGGSFRDSKSLTIQKDLVAAFDNGDQKVFFDLWEEHISSSIRDGDSFAQKLEFYLHIHFAIYLLKYSVGRPDKEELDEKISYFKTYLETKGAALSQTTEFLPFYALPFVPNPMVHPSFKELFQDSWTPELKLKLIKFLALISKASNTPKLLTIYKENGQSNKEILQQLHQQLVEAERRSVTYLKRYNKIQADYHNLIGVTAELVDSLEATVSGKMITPEYLQSVCVRLFSNQMRQSLAHSVDFTRPGTASTMLRASLAPVKLKDVPLLPSLDYEKLKKDLILGSDRLKAFLLQALRWRLTTSHPGEQRETVLQAYISNDLLDCYSHNQRSVLQLLHSTSDVVRQYMARLINAFASLAEGRLYLAQNTKVLQMLEGRLKEEDKDIITRENVLGALQKFSLRRPLQTAMIQDGLIFWLVDVLKDPDCLSDYTLEYSVALLMNLCLRSTGKNMCAKVAGLVLKVLSDLLGHENHEIQPYVNGALYSILSVPSIREEARAMGMEDILRCFIKEGNAEMIRQIEFIIKQLNSEELPDGVLESDDDEDEDDEEDHDIMEADLDKDELIQPQLGELSGEKLLTTEYLGIMTNTGKTRRKGLANVQWSGDEPLQRPVTPGGHRNGYPV

SEQ ID NO: 95623 - protein, 684 aa, Homo sapiens
MVENERLRQEMRRCEAELQELRTKPAGPCPGCEHSQESAQLRDKLSQLQLEMAESKGMLSELNLEVQQKTDRLAEVELRLKDCLAEKAQEEERLSRRLRDSHETIASLRAQSPPVKYVIKTVEVESSKTKQALSESQARNQHLQEQVAMQRQVLKEMEQQLQSSHQLTARLRAQIAMYESELERAHGQMLEEMQSLEEDKNRAIEEAFARAQVEMKAVHENLAGVRTNLLTLQPALRTLTNDYNGLKRQVRGFPLLLQEALRSVKAEIGQAIEEVNSNNQELLRKYRRELQLRKKCHNELVRLKGNIRVIARVRPVTKEDGEGPEATNAVTFDADDDSIIHLLHKGKPVSFELDKVFSPQASQQDEVQALVTSCIDGFNVCIFAYGQTGAGKTYTMEGTAENPGINQRALQLLFSEVQEKASDWEYTITVSAAEIYNEVLRDLLGKEPQEKLEIRLCPDGSGQLYVPGLTEFQVQSVDDINKVFEFGHTNRTTEFTNLNEHSSRSHALLIVTVRGVDCSTGLRTTGKLNLVDLAGSERVGKSGAEGSRLREAQHINKSLSALGDVIAALRSRQGHVPFRNSKLTYLLQDSLSGDSKTLMVVQVSPVEKNTSETLYSLKFAERVRSVELGPGLRRAELGSWSSQEHLEWEPACQTPQPSARAHSAPSSGTSSRPGSIRRKLQPSA

SEQ ID NO: 95624 - protein, 326 aa, Homo sapiens
MKRRAGLGGSMRSVVGFLSQRGLHGDPLLTQDFQRRRLRGCRNLYKKDLLGHFGCVNAIEFSNNGGQWLVSGGDDRRVLLWHMEQAIHSRVKPIQLKGEHHSNIFCLAFNSGNTKVFSGGNDEQVILHDVESSETLDVFAHEDAVYGLSVSPVNDNIFASSSDDGRVLIWDIRESPHGEPFCLANYPSAFHSVMFNPVEPRLLATANSKEGVGLWDIRKPQSSLLRYGGNLSLQSAMSVRFNSNGTQLLALRRRLPPVLYDIHSRLPVFQFDNQGYFNSCTMKSCCFAGDRDQHHNWKWRAQAVSFQPFLSLTRNGDADVDLKLAV

SEQ ID NO: 95625 - protein, 347 aa, Homo sapiens
METNGAKIVSTRAWKKNEKLELLVGCIAELREADEGLLRAGENDFSIMYSTRKRSAQLWLGPAAFINHDCKPNCKFVPADGNAACVKVLRDIEPGDEVTCFYGEGFFGEKNEHCECHTCERKGEGAFRTRPREPALPPRPLDKYQLRETKRRLQQGLDSGSRQGLLGPRACVHPSPLRRDPFCAACQPLRLPACSARPDTSPLWLQWLPQPQPRVRPRKRRRPRPRRAPVLSTHHAARVSLHRWGGCGPHCRLRGEALVALGQPPHARWAPQQDWHWARRYGLPYVVRVDLRRLAPAPPATPAPAGTPGPILIPKQALAFAPFSPPKRLRLVVSHGSIDLDVGGEEL

SEQ ID NO: 95626 - protein, 457 aa, Homo sapiens
MKTGHSSSLLPSTTTSDSTAQEGYESRGGMLDWKHLLDSPDSTDPLGAVSSHNHQDKKGVIRESYLKGHDQLVPVTLLAIAVILAFVMGAVFSGITVYCVCDHRRKDVAVVQRKEKELTHSRRGSMSSVTKLSGLFGDTQSKDPKPEAILTPLMHNGKLATPGNTAKMLIKADQHHLDLTALPTPESTPTLQQKRKPSRGSREWERNQNLINACTKDMPPMGSPVIPTDLPLRASPSHIPSVVVLPITQQGYQHEYVDQPKMSEVAQMALEDQAATLEYKTIKEHLSSKSPNHGVNLVENLDSLPPKVPQREASLGPPGASLSQTGLSKRLEMHHSSSYGVDYKRSYPTNSLTRSHQATTLKRNNTNSSNSSHLSRNQSFGRGDNPPPAPQRVDSIQVHSSQPSGQAVTVSRQPSLNAYNSLTRSGLKRTPSLKPDVPPKPSFAPLSTSMKPNDACT

SEQ ID NO: 95627 - protein, 2093 aa, Homo sapiens
MLRLVVQSAKIDPPLAPLPRPCMSIDFRDIKKRTRVVEGNDPVWNETLIWHLWNRPLENDSFLQVTLQDMGSQKKERFIGLATVLLKPLLKQPSEVLFVKDLTLLNHSMKPTDCTVTLQVAHMSNQDIEKTGAEDHLGITAREAASQKLMVPGSTAHRALSSKPQHFQVRVKVFEARQLMGNNIKPVVKVSIAGQQHQTRIKMGNNPFFNEIFFQNFHEVPAKFFDETILIQTDIGFIYHSPGHTLLRKWLGLCQPNNPGSGVTGYLKVTIYALGVGDQALIDQKLLYGTDDTDIQIFKSAVVPINMAYLQLFIYCAEDLHLKKHQSVNPQLEVELIGEKLRTHMQTQTDNPIWNQILTFRIQLPCLSSYIKFRVLDCRKKDCPDEIGTASLSLNQISSTGEEIEGKQSLEPTSYTPRVYSGFLPCFGPSFLTLHGGKKAPFRIQEEGACIPDSVRDGLAYRGRVFLELITQIKSYQDSTIKDLSHEVTRIEKHQNRQKYGLCVIFLSCTMMPNFKELIHFEVSIGHYGNKMDLNYKPLVSSTPYSPVIYDGNIYHYVPWYNTKPVVAVTSNWEDVSFRMNCLNLLHFTRDRLKANLDTLKSTRNPKDPALLYQWEKLLRELAEDCKRPLPCMTYQPKATSLDRKRWQLRSLLLQELAQKAKQAKPKDMVATAEDWLYRLNTVLPEPQMGLPDVMIWLVAKEQRVAYAQVPAHSVLFSPAGALHSGRLCGKIQTLFLQYPEGEGQKDVLPAHLRVCMWLGNVTDSKDLQLLRQGDTAVYAEMYENQAKYKDQWGQQGLYHCPNFSDVMGNKTLPMTDFQPPLGWHWQDSWTVEPQRRLLLDIDINKSQVLEEVYENQGRDTRGAWGPAAIPNTDVNGQPMEARENVKCPQGWHFKKDWVVELNHAVDSWEYGVGIPPSGLPQVWSPVEKTYHSCRRRRWARVRFRNHGELSHEQETLSFLQLGLAKGEEEGWEYDTFGSKFHLNPQPQSRFRRRCWRRRLAPNKDKGIAPIFLLEGSLACEGGSVREEGDWAWARGNRSSTQEPQGRLSWVQAMDLKYHAGKEEDSKTWPWGLDRQFRDPQRQDTRPPNLPFIYCTFNKPHYYQLFCYIYQARNLVSNQILTFQGPFIRVVFLNHSQCTQTLRSSAGPTWAQTLIFQHLLLYENPQDTKESPPLVVLELWQRDFWGKESLWGRSVWPPMVWLDLQDRILPPMRWHPLVKELGKEEGEILASCELILQTEKLGEKQLPILSVPWKNGAYTLPKSIQPTIKRMAIEILAWGLRNMKKASSPQLLVEFGEESLRTEPIRDFQTNPNFPESESVLVLTVLMPTEEAYALPLVVKVVDNWAFGQQTVTGQANIDFLQPYFCDPWAQDYMHPKLPTLSEKKHQDFLGYLYRKFWFKSSKAEDEYEHEVDWWSKLFWATDEHKSLKYKYKDYHTLKVYECELEAVPAFQGLQDFCQTFKLYQEQPKLDSPVVGEFKGLFRIYPFPENPEAPKPPLQFLVWPEREDFPQPCLVRVYMVRAINLQPQDYNGLCDPYVILKLGKTELGNRDMYQPNTLDPIFGMMFELTCNIPLEKDLEIQLYDFDLFSPDDKIGTTVIDLENRLLSGFGAHCGLSKSYCQSGPFRWRDQMPPSYLLERYAKRKGLPPPLFSPEEDAVFYNGKKFKLQSFEPKTPTVHGLGPKKERLALYLLHTQGLVPEHVETRTLYSHSQPGIDQGKVQMWVDIFPKKLGPPGPQVNINPRKPKRKASEHSGHRYELRCIIWKTANVDLVDDNLSREKTSDIYIKGWLYGLEKDMQKTDIHYHSLTGEADFNWRFIFTMDYLAAERTCVQSQKDYIWSLDATSMKFPARLIIQVWDNDIFSPDDFLGVLELDLSDMPLPARHAKQCSIRMMDADPKWPYFIQYKHFSLFKKKTVTGWWPCQVLDGGKWRLSGKVKMSLEILSEKEALIKPAGRGQSEPNQYPTLHPPLRTNTSFTWLRSPVQNFCYIFWKRYRFKLIAFMVISIIALMLFNFIYSAPHYLAMSWIKPQLQLYPPIKIFNIINSLNTSNASSSILPTQDPNLKPTIDHEWKLHPGPTNHLSDIFPELPAPGD

SEQ ID NO: 95628 - protein, 316 aa, Homo sapiens
MFPPSGHQDVSERRLDTQRPQVTMWERDVSSDRQEPGRRGRSWGLEGSQALSQQAEVIVRQLQELRRLEEEVRLLRETSLQQKMRLEAQAMELEALARAEKAGRAEAEGLRAALAGAEVVRKNLEEGRQRELEEVQRLHQEQLSSLTQAHEEALSSLTSKAEGLEKSLSSLETRRAGEAKELAEAQREAELLRKQLSKTQEDLEAQVTLVENLRKYVGEQVPSEVHSQTWELERQKLLDTMQHLQEDRDSLHATAELLQVRVQSLTHILALQEEELTRKVQPSDSLEPEFTRKCQSLLNRWREKVFALMVQLKAQE

SEQ ID NO: 95629 - protein, 91 aa, Homo sapiens
MVAKPPVMSFHFAQDLWPEQNIKDSFQKVTLRRYGKCEYENLQLRKGCKHVDECTGHKGGHNTVNQCLTATPSKIFQCNKYVKVFDKFSNS

SEQ ID NO: 95630 - protein, 37 aa, Homo sapiens
MGDLELLLPGEAEVLVRGLRSFPLREMGSEGQVEPAA

SEQ ID NO: 95631 - protein, 345 aa, Homo sapiens
MILTPIKAYSSPSTTPEARRREPQAPRQPSLMGPESQSPDCKDGAAATGATATPSAGASGGLQPHQLSSCDGELAVAPLPEGDLPGQFTRVMGKVCTQLLVSRPDEENISSYLQLIDKCLIHEAFTETQKKRLLSWKQQVQKLFRSFPRKTLLDISGYRQQRNRGFGQSNSLPTAGSVGGGMGRRNPRQYQIPSRNVPSARLGLLGTSGFVSSNQRNTTATPTIMKQGRQNLWFANPGGSNSMPSRTHSSVQRTRSLPVHTSPQNMLMFQQPGSQVHSGLCLTDLRGWLSLSGAPSMPALTVPKSSQGEFQLPVTEPDINNRLESLCLSMTEHALGDGVDRTSTI

SEQ ID NO: 95632 - protein, 1698 aa, Homo sapiens
MRLLWGLIWASSFFTLSLQKPRLLLFSPSVVHLGVPLSVGVQLQDVPRGQVVKGSVFLRNPSRNNVPCSPKVDFTLSSERDFALLSLQVPLKDAKSCGLHQLLRGPEVQLVAHSPWLKDSLSRTTNIQGINLLFSSRRGHLFLQTDQPIYNPGQRVRYRVFALDQKMRPSTDTITVMVENSHGLRVRKKEVYMPSSIFQDDFVIPDISEPGTWKISARFSDGLESNSSTQFEVKKYVLPNFEVKITPGKPYILTVPGHLDEMQLDIQARYIYGKPVQGVAYVRFGLLDEDGKKTFFRGLESQTKLVNGQSHISLSKAEFQDALEKLNMGITDLQGLRLYVAAAIIESPGGEMEEAELTSWYFVSSPFSLDLSKTKRHLVPGAPFLLQALVREMSGSPASGIPVKVSATVSSPGSVPEVQDIQQNTDGSGQVSIPIIIPQTISELQLSVSAGSPHPAIARLTVAAPPSGGPGFLSIERPDSRPPRVGDTLNLNLRAVGSGATFSHYYYMILSRGQIVFMNREPKRTLTSVSVFVDHHLAPSFYFVAFYYHGDHPVANSLRVDVQAGACEGKLELSVDGAKQYRNGESVKLHLETDSLALVALGALDTALYAAGSKSHKPLNMGKVFEAMNSYDLGCGPGGGDSALQVFQAAGLAFSDGDQWTLSRKRLSCPKEKTTRKKRNVNFQKAINEKLGQYASPTAKRCCQDGVTRLPMMRSCEQRAARVQQPDCREPFLSCCQFAESLRKKSRDKGQAGLQRALEILQEEDLIDEDDIPVRSFFPENWLWRVETVDRFQILTLWLPDSLTTWEIHGLSLSKTKGLCVATPVQLRVFREFHLHLRLPMSVRRFEQLELRPVLYNYLDKNLTVSVHVSPVEGLCLAGGGGLAQQVLVPAGSARPVAFSVVPTAATAVSLKVVARGSFEFPVGDAVSKVLQIEKEGAIHREELVYELNPLDHRGRTLEIPGNSDPNMIPDGDFNSYVRVTASDPLDTLGSEGALSPGGVASLLRLPRGCGEQTMIYLAPTLAASRYLDKTEQWSTLPPETKDHAVDLIQKGYMRIQQFRKADGSYAAWLSRGSSTWLTAFVLKVLSLAQEQVGGSPEKLQETSNWLLSQQQADGSFQDLSPVIHRSMQGGLVGNDETVALTAFVTIALHHGLAVFQDEGAEPLKQRVEASISKASSFLGEKASAGLLGAHAAAITAYALTLTKAPADLRGVAHNNLMAMAQETGDNLYWGSVTGSQSNAVSPTPAPRNPSDPMPQAPALWIETTAYALLHLLLHEGKAEMADQAAAWLTRQGSFQGGFRSTQDTVIALDALSAYWIASHTTEERGLNVTLSSTGRNGFKSHALQLNNRQIRGLEEELQFSLGSKINVKVGGNSKGTLKVLRTYNVLDMKNTTCQDLQIEVTVKGHVEYTMEANEDYEDYEYDELPAKDDPDAPLQPVTPLQLFEGRRNRRRREAPKLTSLSDRYVSHFETEGPHVLLYFDSVPTSRECVGFEAVQEVPVGLVQPASATLYDYYNPERRCSVFYGAPSKSRLLATLCSAEVCQCAEGKCPRQRRALERGLQDEDGYRMKFACYYPRVEYGFQVKVLREDSRAAFRLFETKITQVLHFTKDVKAAANQMRNFLVRASCRLRLEPGKEYLIMGLDGATYDLEGHPQYLLDSNSWIEEMPSERLCRSTRQRAACAQLNDFLQEYGTQGCQV

SEQ ID NO: 95633 - protein, 154 aa, Homo sapiens
MVCSPVTLRIAPPDRRFSRSAIPEQIISSTLSSPSSNAPDPCAKETVLSALKEKKKKRTVEEEDQIFLDGQENKRRPSLSLSPRLVQWCNFGSLHPLPPRFKRFSCLSLPSRWITAVLSTVSLMPLLHSKFLDPGQIHSSSQWMSSTLLMTPET

SEQ ID NO: 95634 - protein, 140 aa, Homo sapiens
MVSSAQMGFNLQALLEQLSQDELSKFKYLITTFSLAHELQKIPHKEVDKADGKQLVEILTTHCDSYWVEMASLQVFEKMHRMDLSERAKDEVREAALKSFNKRKPLSLGITRKERPPLDVDEMLERFKTEAQAFTETKGN

SEQ ID NO: 95635 - protein, 283 aa, Homo sapiens
MTGEQMAAFHPSSTPNPLERPIKMGWLKKQRSIVKNWQQRYFVLRAQQLYYYKDEEDTKPQGCMYLPGCTIKEIATNPEEAGKFVFEIIPASWDQNRMGQDSYVLMASSQAEMEEWVKFLRRVAGTPCGAVFGQRLDETVAYEQKFGPHLVPILVEKCAEFILEHGRNEEGIFRLPGQDNLVKQLRDAFDAGERPSFDRDTDVHTVASLLKLYLRDLPEPVVPWSQYEGFLLCGQLTNADEAKNYRNRNDCQSVVSAQIHQFCPRVSLLAHGQAHLLVNDLLV

SEQ ID NO: 95636 - protein, 88 aa, Homo sapiens
MLKVTVPSCSASSCSSVTASAAPGTASLVPDYWIDGSNRDALSDFFEVESELGRGATSIVYRCKQKGTQKPYALKVLKKTDCGKGILQ

SEQ ID NO: 95637 - protein, 107 aa, Homo sapiens
MSRGSSAGFDRHITIFSPEGRLYQVEYAFKAINQGGLTSVAVRGKDCAVIVTQKKVPDKLLDSSTVTHLFKITENIGCVMTGMTVSLCRPGCSASWVQAILVPQPPR

SEQ ID NO: 95638 - protein, 154 aa, Homo sapiens
MAAAGAFRLRRAASALLLRSPRLPARELSAPARLYHKKVVDHYENPRNVGSLDKTSKNVGTGLVGAPACGDVMKLQIQVDEKGKIVDARFKTFGCGSAIASSSLATEWVKGKTVEEALTIKNTDIAKELCLPPVKLHCSKSVLFPAEEKTQLSP

SEQ ID NO: 95639 - protein, 40 aa, Homo sapiens
MSLDIQSLDIQCEELSDARWAELLPLLQQCQVVRLDDCGL

SEQ ID NO: 95640 - protein, 107 aa, Homo sapiens
MGRVSGLVPSRFLTLLAHLVVVITLFWSRDSNIQACLPLTFTPEEYDKQDIQLVAALSVTLGLFAVELAGFLSGVSMFNSTQSLICILSACPPFPHDPLLSGLPSAT

SEQ ID NO: 95641 - protein, 186 aa, Homo sapiens
MATPMHRLIARRQAFDTELQPVKTFWILIQPSIVISEANKQHVRCQKCLEFGHWTYECTGKRKYLHRPSRTAELKKALKEKENRLLLQQSIGETNVERKAKKKSSSSSSSDSSASDSSSESEETSTSSSSEDSDTDESSSSSSSSASSTTSSSSSDSDSDSSSSSSSSTSTDSSSDDEPPKKKKKK

SEQ ID NO: 95642 - protein, 295 aa, Homo sapiens
ASTKGPSVFPLAPSSKSTSGGTAALGCLVKDYFPEPVTVSWNSGALTSGVHTFPAVLQSSGLYSLSSVVTVPSSSLGTQTYICNVNHKPSNTKVDKKVEPKSCDKTHTCPPCPAPELLGGPSVFLFPPKPKDTLMISRTPEVTCVVVDVSHEDPEVKFNWYVDGVEYKCKVSNKALPAPIEKTISKAKGQPREPQVYTLPPSRDELTKNQVSLTCLVKGFYPSDIAVEWESNGQPENNYKTTPPVLDSDGSFFLYSKLTVDKSRWQQGNVFSCSVMHEALHNHYTQKSLSLSPGK

SEQ ID NO: 95643 - protein, 77 aa, Homo sapiens
MWRLPRALCVHAAKTSKLSGPWSRPAAFMSTLLINQPQYAWLKELGLREENEGVYNGSWGGRGEGLRFLYMIIILLF

SEQ ID NO: 95644 - protein, 410 aa, Homo sapiens
MNMPSTPLAPTTGTATCSWSASTCTTTRPAVRPPSFPHRPPGNAALPSLMPSRPTQVAGQCGAGNNWAKGHYTEGAELMESVMDVVRKEAESCDCLQGFQLTHSLGGGTGSGMGTLLLSKIREEYPDRIINTFSILPSPKVSDTVVEPYNATLSVHQLIENADETFCIDNEALYDICSKTLKLPTPTYGDLNHLVSATMSGVTTCLRFPGQLNADLRKLAVNMVPFPRLHFFMPGFAPLTSRGSQQYRALTVAELTQQMFDAKNMMAACDPRHGRYLTAAAIFRGRMPMREVDEQMFNIQDKNSSYFADWLPNNVKTAVCDIPPRGLKMSATFIGNNTAIQELFKRVSEQFTAMFRRKAFLHWYTGEGMDEMEFTEAESNMNDLVSEYQQYQDATAEEEEDEEYAEEEVA

SEQ ID NO: 95645 - protein, 152 aa, Homo sapiens
MPSKGPLQSVQVFGRKKTATAVAHCKRGNGLIKVNGRPLEMIEPRTLQYKLLEPVLLLGKERFAGVDIRVRVKGGGHVAQIYGESQELGAWRRWLWEGGLHSAPVPFNCVSFSQLSVSPSPKPWWPITRNMWMRLPRRRSKTSSSSMTGPCW

SEQ ID NO: 95646 - protein, 1654 aa, Homo sapiens
MTDRFWDQWYLWYLRLLRLLDRGSFRNDGLKASDVLPILKEKVAFVSGGRDKRGGPILTFPARSNHDRIRQEDLRKLVTYLASVPSEDVCKRGFTVIIDMRGSKWDLIKPLLKTLQEAFPAEIHVALIIKPDNFWQKQKTNFGSSKFIFETSMVSVEGLTKLVDPSQLTEEFDGSLDYNHEEWIELRLSLEEFFNSAVHLLSRLEDLQEMLARKEFPVDVEGSRRLIDEHTQLKKKVLKAPVEELDREGQRLLQCIRCSDGFSGRNCIPGSADFQSLVPKITSLLDKLHSTRQHLHQMWHVRKLKLDQCFQLRLFEQDAEKMFDWISHNKELFLQSHTEIGVSYQYALDLQTQHNHFAMNSMNAYVNINRIMSVASRLSEAGHYASQQIKQISTQLDQEWKSFAAALDERSTILAMSAVFHQKAEQFLSGVDAWCKMCSEGGLPSEMQDLELAIHHHQTLYEQVTQAYTEVSQDGKALLDVLQRPLSPGNSESLTATANYSKAVHQVLDVVHEVLHHQRRLESIWQHRKVRLHQRLQLCVFQQDVQQVLDWIENHGEAFLSKHTGVGKSLHRARALQKRHDDFEEVAQNTYTNADKLLEAAEQLAQTGECDPEEIYKAARHLEVRIQDFVRRVEQRKLLLDMSVSFHTHTKELWTWMEDLQKEMLEDVCADSVDAVQELIKQFQQQQTATLDATLNVIKEGEDLIQQLRSAPPSLGEPSEARDSAVSNNKTPHSSSISHIESVLQQLDDAQVQMEELFHERKIKLDIFLQLRIFEQYTIEVTAELDAWNEDLLRQMNDFNTEDLTLAEQRLQRHTERKLAMNNMTFEVIQQGQDLHQYITEVQASGIELICEKDIDLAAQVQELLEFLHEKQHELELNAEQTHKRLEQCLQLRHLQAEVKQVLGWIRNGESMLNASLVNASSLSEAEQLQREHEQFQLAIEKTHQSALQVQQKAEVLLQAGHYDADAIRECAEKVALHWQQLMLKMEDRLKLVNASVAFYKTSEQVCSVLESLEQEYRRDEDWCGGRDKLGPAAEIDHVIPLISKHLEQKEAFLKACTLARRNAEVFLKYIHRNNVSMPSVASHTRGPEQQVKAILSELLQRENRVLHFWTLKKRRLDQCQQYVVFERSAKQALDWIQETGEFYLSTHTSTGETTEETQELLKEYGEFRVPAKQTKEKVKLLIQLADSFVEKGHIHATEIRKWVTTVDKHYRDFSLRMGKYRYSLEKALGVNTEDNKDLELDIIPASLSDREVKLRDANHEVNEEKRKSARKKEFIMAELLQTEKAYVRDLHECLETYLWEMTSGVEEIPPGILNKEHIIFGNIQEIYDFHNNIFLKELEKYEQLPEDVGHCFVTWADKFQMYVTYCKNKPDSNQLILEHAGTFFDEIQQRHGLANSISSYLIKPVQRITKYQLLLKELLTCCEEGKGELKDGLEVMLSVPKKANDAMHVSMLEGFDENLDVQGELILQDAFQVWDPKSLIRKGRERHLFLFEISLVFSKEIKDSSGHTKYVYKNKLLTSELGVTEHVEGDPCKFALWSGRTPSSDNKTVLKASNIETKQEWIKNIREVIQERIIHLKGALKEPLQLPKTPAKQRNNSKRDGVEDIDSQGDGSSQPDTISIASRTSQNTVDSDKDGNLVPRWHLGPGDPFSTYV

SEQ ID NO: 95647 - protein, 214 aa, Homo sapiens
MSRCALRGRDLALAIAGTVSFHGLLRLFRAGHRLVLVLGDLHIPHRCNSLPAKFKKLLVPGKIQHILCTGNLCTKESYDYLKTLAGDVHIVRGDFDENLNYPEQKVVTVGQFKIGLIHGHQVIPWGDMASLALLQRQFDVDILISGHTHKFEAFEHENKFYINPGSATGAYNALETNIIPSFVLMDIQASTVVTYVYQLIGDDVKVERIEYKKP

SEQ ID NO: 95648 - protein, 187 aa, Homo sapiens
MSANEDQEMELEALRSIYEGDESFRELSPVSFQYRIGENGDPKAFLIEISWTETYPQTPPILSMNAFFNNTISSAVKQSILAKLQEAVEANLGTAMTYTLFEYAKDNKEQFMENHNPINSATSISNIISIETPNTAPSSKKKDKKEQLSKAQKRKLADKTDHKGELPRGWNWVDVVKLSKTGSKDDE

SEQ ID NO: 95649 - protein, 146 aa, Homo sapiens
MDSEGGSLLLDEDSEVFKMLQENREGRAAPRQSSSFRLLQEALEAEERGGTPAFLPSSLSPQSSLPASRALATPPKLHTCEKCSTSIANQAVRIQEGRYRHPGCYTCADCGLNLKMRGHFWVGDELYCEKHARQRYSAPATLSSRA

SEQ ID NO: 95650 - protein, 129 aa, Homo sapiens
MADGEEPMAVDGGCGDTGDWEGRWNHVKKFLERSGPFTHPDFEPSTESLQFLLDTCKVLVIGAGGLGCELLKNLALSGFRQIHVIDMDTIDVSNLNRQFLFRISYYCMWTGLYHRQKMDKWHADISSKL

SEQ ID NO: 95651 - protein, 94 aa, Homo sapiens
MVKLNSNPSEKGTKPPSVEDGFQTVPLITPLEVNHLQLPAPEKVIVKTRTEYQPEQKNKGKFRVPKIAEFTCLPHSTGPVKVDQDPAAYKYLQE

SEQ ID NO: 95652 - protein, 67 aa, Homo sapiens
MALLAEHLLKPLPADKQIETGPFLEAVSHLPPFFDCLGSPVFTPIKADISGNITMRKLRLRGVEGLA

SEQ ID NO: 95653 - protein, 339 aa, Homo sapiens
MVGDEASELRSMLEVNYPMENGIVRNWDDMKHLWDYTFGPEKLNIDTRNCKILLTEPPMNPTKNREKIVEVMFETYQFSGVYVAIQAVLTLYAQGLLTGVVVDSGDGVTHICPVYEGFSLPHLTRRLDIAGRDITRYLIKLLLLRGYAFNHSADFETVRMIKEKLCYVGYNIEQEQKLALETTVLVESYTLPDGRIIKVGGERFEAPEALFQPHLINVEGVGVAELLFNTIQAADIDTRSEFYKHIVLSGGSTMYPGLPSRLERELKQLYLERVLKGDVEKLSKFKIRIEDPPRRKHMVFLGGAVLADIMKDKDNFWMTRQEYQEKGVRVLEKLGVTVR

SEQ ID NO: 95654 - protein, 495 aa, Homo sapiens
MANRELAFKAGDVIKVLDASNKDWWWGQIDDEEGWFPASFVRLWVNQEDEVEEGPSDVQNGHLDPNSDCLCLGRPLQNRDQMRANVINEIMSTERHYIKHLKDICEGYLKQCRKRRDMFSDEQLKVIFGNIEDIYRFQMGFVRDLEKQYNNDDPHLSEIGPCFLEHQDGFWIYSEYCNNHLDACMELSKLMKDSRYQHFFEACRLLQQMIDIAIDGFLLTPVQKICKYPLQLAELLKYTAQDHSDYRYVAAALAVMRNVTQQINERKRRLENIDKIAQWQASVLDWEGEDILDRSSELIYTGEMAWIYQPYGRNQQRVFFLFDHQMVLCKKDLIRRDILYYKGRIDMDKYEVVDIEDGRDDDFNVSMKNAFKLHNKETEEIHLFFAKKLEEKIRWLRAFREERKMVQEDEKIGFEISENQKRQAAMTVRKVPKQKGVNSARSVPPSYPPPQDPLNHGQYLVPDGIAQSQVFEFTEPKRSQSPFWQNFSRLTPFKK

SEQ ID NO: 95655 - protein, 222 aa, Homo sapiens
MFKNIVLIQGRILLLTICAAGIGGTFQFGYNLSIINAPTLHIQEFTNETWQARTGEPLPDHLVLLMWSLIVSLYPLGGLFGALLAGPLAITLGRKKSLLVNNIFVVSAAILFGFSRKAGSFEMIMLGRLLVGVNAGVSMNIQPMYLGESAPKELRGAVAMSSAIFTALGIVMGQVVGLRSGSKEQVFTEERVKIWAFKDKRVPVIPEKRGEGRAWTLGKRSC

SEQ ID NO: 95656 - protein, 116 aa, Homo sapiens
METDLAEMPEKGALSSQDSPHFQEKSTEEGEVAALRLTARSQETVTFKDVAMDFTPEEWGKLDPAQRDVMLENYRNLVSLWLPVSKPESYNLENGKEPLKLERKAPKSSYSELPFC

SEQ ID NO: 95657 - protein, 144 aa, Homo sapiens
MARQKKMGQSVLRAVFFLVLGLLGHSHGGFPNTISIGGLFMRNTVQEHSAFRFAVQLYNTNQNTTEKPFHLNYHVDHLDSSNSFSVTNACPAERDYLPWPGSIRENNWTALPCCKDHGLLHLKCSPGGARQNWAYCIWGVTGEL

SEQ ID NO: 95658 - protein, 414 aa, Homo sapiens
MCFRVKFYPADPAALKEEITRYLVFLQIKRDLYHGRLLCKTSDAALLAAYILQAEIGDYDSGKHPEGYSSKFQFFPKHSEKLERKIAEIHKTELSGQTPATSELNFLRKAQTLETYGVDPHPCKDVSGNAAFLAFTPFGFVVLQGNKRVHFIKWNEVTKLKFEGKTFYLYEKKIILTYFAPTPEACKHLWKCGIENQAFYKLEKSSQVRTVSSSNLFFKGSRFRYSGRVAKEVMESSAKIKREPPEIHRAGMVPSRSCPSITHGPRLSSVPRTRRRAVHISIMEGLESLRDSAHSTPVRSTSHGDTFLPHVRSSRTDSNERVAVIADEAYSPADSVLPTPVAEHSLELMLLSRQINGATCSIEEEKESEASTPTATEVEALGGELRALCQGHSGPEEEQAMVCLQNPLSGEPAH

SEQ ID NO: 95659 - protein, 511 aa, Homo sapiens
MAVLLLLLRALRRGPGPGPRPLWGPGPAWSPGFPARPGRGRPYMASRPPGDLAEAGGRALQSLQLRLLTPTFEGINGLLLKQHLVQNPVRLWQLLGGTFYFNTSRLKQKNKEKDKSKGKAPEEDEEERRRRERDDQMYRERLRTLLVIAVVMSLLNALSTSGGSISWNDFVHEMLAKGEVQRVQVVPESDVVEVYLHPGAVVFGRPRLALMYRMQVANIDKFEEKLRAAEDELNIEAKDRIPVSYKRTGFFGNALYSVGMTAVGLAILWYVFRLAGMTGREGGFSAFNQLKMARFTIVDGKMGKGVSFKDVAGMHEAKLEVREFVDYLKSPERFLQLGAKVPKGALLLGPPGCGKTLLAKAVATEAQVPFLAMAGPEFVEVIGGLGAARVRSLFKEARARAPCIVYIDEIDAVGKKRSTTMSGFSNTEEEQTLNQLLVEMDGMGTTDHVIVLASTNRADILDGALMRPGRLDRHVFIDLPTLQRKGVALSPRLECSAAITTHCGLNLQGSS

SEQ ID NO: 95660 - protein, 209 aa, Homo sapiens
MADTPRDAGLKQAPASRNEKAPVDFGYVGIDSILEQMRRKAMKQGFEFNIMVVGQSGLGKSTLINTLFKSKISRKSVQPTSEERIPKTIEIKSITHDIEEKGVRMKLTVIDTPGFGDHINNENCWQPIMKFINDQYEKYLQEEVNINRKKRIPDTRVHCCLYFIPATGHSLRPLDIEFMKRLSKVVNIVPVIAKADTLTLEERVHFKQR

SEQ ID NO: 95661 - protein, 56 aa, Homo sapiens
MAVAGPAPGAGARPRLDLQFLQRFLQILKVLFPSWSSQNALMFLTLLCLTLLAEEL

SEQ ID NO: 95662 - protein, 584 aa, Homo sapiens
MAAEQDPEARAAARPLLTDLYQATMALGYWRAGRARDAAEFELFFRRCPFGGAFALAAGLRDCVRFLRAFRLRDADVQFLASVLPPDTDPAFFEHLRALDCSEVTVRALPEGSLAFPGVPLLQVSGPLLVVQLLETPLLCLVSYASLVATNAARLRLIAGPEKRLLEMGLRRAQGPDGGLTASTYSYLGGFDSSSNVLAGQLRGVPVAGTLAHSFVTSFSGSEVPPDPMLAPAAGEGPGVDLAAKAQVWLEQVCAHLGLGVQEPHPGERAAFVAYALAFPRAFQGLLDTYSVWRSGLPNFLAVALALGELGYRAVGVRLDSGDLLQQAQEIRKVFRAAAAQFQVPWLESVLIVVSNNIDEEALARLAQEGSEVNVIGIGTSVVTCPQQPSLGGVYKLVAVGGQPRMKLTEDPEKQTLPGSKAAFRLLGSDGSPLMDMLQLAEEPVPQAGQELRVWPPGAQEPCTVRPAQVEPLLRLCLQQGQLCEPLPSLAESRALAQLSLSRLSPEHRRLRSPAQYQVGGRPTLSFCPVRPRPHPAHRSCPLLPAGGAVREAAGPGEQSVCGAVPLRLGAGLTGNNTNHSLFP

SEQ ID NO: 95663 - protein, 353 aa, Homo sapiens
MASSSGSKAEFIVGGKYKLVRKIGSGSFGDIYLAINITNGEEVAVKLESQKARHPQLLYESKLYKILQGGVGIPHIRWYGQEKDYNVLVMDLLGPSLEDLFNFCSRRFTMKTVLMLADQMISRIEYVHTKNFIHRDIKPDNFLMGIGRHCNKCLESPVGKRKRSMTVSTSQDPSFSGLNQLFLIDFGLAKKYRDNRTRQHIPYREDKNLTGTARYASINAHLGIEQSRRDDMESLGYVLMYFNRTSLPWQGLKAATKKQKYEKISEKKMSTPVEVLCKGFPAEFAMYLNYCRGLRFEEAPDYMYLRQLFRILFRTLNHQYDYTFDWTMLKQKAAQQAASSSGQGQQAQTPTGF

SEQ ID NO: 95664 - protein, 193 aa, Homo sapiens
MEPPGDWGPPPWRSTPKTDVLRLVLYLTFLGAPCYAPALPSCKEDEYPVGSECCPKCSPGYRVKEACGELTGTVCEPCPPGTYIAHLNGLSKCLQCQMCDPAMGLRASRNCSRTENAVCGCSPGHFCIVQDGDHCAACRAYATSSPGQRVQKGGTESQDTLCQNCPPGTFSPNGTLEECQHQTNRAWKSQTDL

SEQ ID NO: 95665 - protein, 652 aa, Homo sapiens
MTPILTVLICLGLSLGPRTHVQAGHLPKPTLWAEPGSVITQGSPVTLRCQGGQETQEYRLYREKKTAPWITRIPQELVKKGQFPIPSITWEHAGRYRCYYGSDTAGRSESSDPLELVVTGAYIKPTLSAQPSPVVNSGGNVTLQCDSQVAFDGFILCKEGEDEHPQCLNSQPHARGSSRAIFSVGPVSPSRRWWYRCYAYDSNSPYEWSLPSDLLELLVLGVSKKPSLSVQPGPIVAPEETLTLQCGSDAGYNRFVLYKDGERDFLQLAGAQPQAGLSQANFTLGPVSRSYGGQYRCYGAHNLSSEWSAPSDPLDILIAGQFYDRVSLSVQPGPTVASGENVTLLCQSQGWMQTFLLTKEGAADDPWRLRSTYQSQKYQAEFPMGPVTSAHAGTYRCYGSQSSKPYLLTHPSDPLELVVSGPSGGPSSPTTGPTSTSAGPEDQPLTPTGSDPQSGLGRHLGVVIGILVAVILLLLLLLLLFLILRHRRQGKHWTSTQRKADFQHPAGAVGPEPTDRGLQWRSSPAADAQEENLYAAVKHTQPEDGVEMDTRQSPHDEDPQAVTYAEVKHSRPRREMASPPSPLSGEFLDTKDRQAEEDRQMDTEAAASEAPQDVTYAQLHSLTLRRKATEPPPSQEGPSPAVPSIYATLAIH

SEQ ID NO: 95666 - protein, 181 aa, Homo sapiens
MVLGAGWGWAYQLHLLQALKRKPDLFLCERLDVKAVFQCAVLALKFPEAPTVKASCGFFTELLPRCGEVESVGKVVQEDGRMLLIAVLEAIGGQASRSLMDCFADILFALNKHCFSLLSMWIKEALQPPGFPSARLSPEQKDTFSQQILRERVNKRRVKEMVKEFTLLCRGLHGTDYTADY

SEQ ID NO: 95667 - protein, 65 aa, Homo sapiens
MFANLKYVSLGILVFQTTSLVLTMRYSRTLKEEGPRYLSSTAVVVAELLKIMACILLVYKDSSRM

SEQ ID NO: 95668 - protein, 368 aa, Homo sapiens
MPYQYPALTPEQKKELSDIAHRIVAPGKGILAADESTGSIAKRLQSIGTENTEENRRFYRQLLLTADDRVNPCIGGVILFHETLYQKADDGRPFPQVIKSKGGVVGIKVDKGVVPLAGTNGETTTQGLDGLSERCAQYKKDGADFAKWRCVLKIGEHTPSALAIMENANVLARYASICQQVGLQNGIVPIVEPEILPDGDHDLKRCQYVTEKVLAAVYKALSDHHIYLEGTLLKPNMVTPGHACTQKFSHEEIAMATVTALRRTVPPAVTGITFLSGGQSEEEASINLNAINKCPLLKPWALTFSYGRALQASALKAWGGKKENLKAAQEEYVKRALANSLACQGKYTPSGQAGAAASESLFVSNHAY

SEQ ID NO: 95669 - protein, 124 aa, Homo sapiens
MWVPVVFLTLSVTWIGAAPLILSRIVGGWECEKHSQPWQVLVASRGRAVCGGVLVHPQWVLTAAHCIRNKSVILLGRHSLFHPEDTGQVFQVSHSFPHPLYDMSLLKNRFLRPGDDSTLNQRSS

SEQ ID NO: 95670 - protein, 228 aa, Homo sapiens
MNYITAIIEEQPKNYQVWHHRRVLVEWLRDPSQELEFIADILNQDAKNYHAWQHRQWVIQEFKLWDNELQYVDQLLKEDVRNNSVWNQRYFVISNTTGYNDRAVLEREVQYTLEMIKLVPHNESAWNYLKGILQDRGLSKYPNLLNQLLDLQPSHSSPYLIAFLVDIYEDMLENQCDNKEDILNKALELCEILAKEKDTIRKEYWRYIGRSLQSKHSTENDSPTNVQQ

SEQ ID NO: 95671 - protein, 161 aa, Homo sapiens
MGKRDRADRDKKKSRKRHYEDEEDDEEDAPGNDPQEAVPSAAGKQVDESGTKVDEYGAKDYRLQMPLKDDHTSRPLWVAPDGHIFLEAFSPVYKYAQDFLVAIAEPVCRPTHVHEYKLTAYSLYAAVSVGLQTSDITEYLRKLSKTGVPDGIMQFIKASDS

SEQ ID NO: 95672 - protein, 518 aa, Homo sapiens
MRTWDYRWSLALVAQTGVHCCNLSSLQPLPPRFKRFSCLSLSSGWDYSNSGNMKPPLLVFIVCLLWLKDSHCAPTWKDKTAISENLKSFSEVGEIDADEEVKKALTGIKQMKIMMERKEKEHTNLMSTLKKCREEKQEALKLLNEVQEHLEEEERLCRESLADSWGECRSCLENNCMRIYTTCQPSWSSVKNKIERFFRKIYQFLFPFHEDNEKDLPISEKLIEEDAQLTQMEDVFSQLTVDVNSLFNRSFNVFRQMQQEFDQTFQSHFISDTDLTEPYFFPAFSKEPMTKADLEQCWDIPNFFQLFCNFSVSIYESVSETITKMLKAIEDLPKQDKAPDHGGLISKMLPGQDRGLCGELDQNLSRCFKFHEKCQKCQAHLSEDCPDVPALHTELDEAIRLVNVSNQQYGQILQMTRKHLEDTAYLVEKMRGQFGWVSELANQAPETEIIFNSIQVVPRIHEGNISKQDETMMTDLSILPSSNFTLKIPLEESAESSNFIGYVVAKALQHFKEHFKTW

SEQ ID NO: 95673 - protein, 125 aa, Homo sapiens
MGMVVLLMGLVFASVYIYRYFFLAQLARDNFFRCGVLYEDSLSSQVRTQMELEEDVKIYLDENYERINVPVPQFGGGDPADIIHDFQRGLTAYHDISLDKCYVIELNTTIVLPPRNFWELLMNVK

SEQ ID NO: 95674 - protein, 73 aa, Homo sapiens
MESPLIYVSVLLLNIFEFSSGIVYNKDDTEKRFACSNKGFPQENEIIKLYLFLENLKIQCFFQTENEIASKAM

SEQ ID NO: 95675 - protein, 576 aa, Homo sapiens
MKLLHVFLLFLCFHLRFCKVTYTSQEDLVEKKCLAKKYTHLSCDKVFCQPWQRCIEGTCVCKLPYQCPKNGTAVCATNRRSFPTYCQQKSLECLHPGTKFLNNGTCTAEGKFSVSLKHGNTDSEGIVEVKLVDQDKTMFICKSSWSMREANVACLDLGFQQGADTQRRFKLSDLSINSTECLHVHCRGLETSLAECTFTKRRTMGYQDFADVVCYTQKADSPMDDFFQCVNGKYISQMKACDGINDCGDQSDELCCKACQGKGFHCKSGVCIPSQYQCNGEVDCITGEDEVGCAEETEILTADMDAERRRIKSLLPKLSCGVKNRMHIRRKRIVGGKRAQLGDLPWQVAIKDASGITCGGIYIGGCWILTAAHCLRASKTHRYQIWTTVVDWIHPDLKRIVIEYVDRIIFHENYNAGTYQNDIALIEMKKDGNKKDCELPRSIPACVPWSPYLFQPNDTCIVSGWGREKDNERVFSLQWGEVKLISNCSKFYGNRFYEKEMECAGTYDGSIDACKGDSGGPLVCMDANNVTYVWGVVSWGENCGKPEFPGVYTKVANYFDWISYHVGRPFISQYNV

SEQ ID NO: 95676 - protein, 1266 aa, Homo sapiens
MGPLMVLFCLLFLYPGLADSAPSCPQNVNISGGTFTLSHGWAPGSLLTYSCPQGLYPSPASRLCKSSGQWQTPGATRSLSKAVCKPGHCPNPGISLGAVRTGFRFGHGDKVRYRCSSNLVLTGSSERECQGNGVWSGTEPICRQPYSYDFPEDVAPALGTSFSHMLGATNPTQKTKDHENGTGTNTYAALNSVYLMMNNQMRLLGMETMAWQEIRHAIILLTDGKSNMGGSPKTAVDHIREILNINQKRNDYLDIYAIGVGKLDVDWRELNELGSKKDGERHAFILQDTKALHQVFEHMLDVSKLTDTICGVGNMSANASDQERTPWHVTIKPKSQETCRGALISDQWVLTAAHCFRDGNDHSLWRVNVGDPKSQWGKEFLIEKAVISPGFDVFAKKNQGILEFYGDDIALLKLAQKVKMSTHARPICLPCTMEANLALRRPQGSTCRDHENELLNKQSVPAHFVALNGSKLNINLKMGVEWTSCAEVVSQEKTMFPNLTDVREVVTDQFLCSGTQEDESPCKGVTTTPWSLARPQGSCSLEGVEIKGGSFRLLQEGQALEYVCPSGFYPYPVQTRTCRSTGSWSTLKTQDQKTVRKAECRAIHCPRPHDFENGEYWPRSPYYNVSDEISFHCYDGYTLRGSANRTCQVNGRWSGQTAICDNGAGYCSNPGIPIGTRKVGSQYRLEDSVTYHCSRGLTLRGSQRRTCQEGGSWSGTEPSCQDSFMYDTPQEVAEAFLSSLTETIEGVDAEDGHGPGEQQKRKIVLDPSGSMNIYLVLDGSDSIGASNFTGAKKCLVNLIEKVASYGVKPRYGLVTYATYPKIWVKVSEADSSNADWVTKQLNEINYEDHKLKSGTNTKKALQAVYSMMSWPDDVPPEGWNRTRHVIILMTDGLHNMGGDPITVIDEIRDLLYIGKDRKNPREDYLDVYVFGVGPLVNQVNINALASKKDNEQHVFKVKDMENLEDVFYQMIDESQSLSLCGMVWEHRKGTDYHKQPWQAKISVIRPSKGHESCMGAVVSEYFVLTAAHCFTVDDKEHSIKVSVGGEKRDLEIEVVLFHPNYNINGKKEAGIPEFYDYDVALIKLKNKLKYGQTIRPICLPCTEGTTRALRLPPTTTCQQQKEELLPAQDIKALFVSEEEKKLTRKEVYIKNGDKKGSCERDAQYAPGYDKVKDISEVVTPRFLCTGGVSPYADPNTCRGDSGGPLIVHKRSRFIQVGVISWGVVDVCKNQKRQKQVPAHARDFHINLFQVLPWLKEKLQDEDLGFL

SEQ ID NO: 95677 - protein, 508 aa, Homo sapiens
MVELVISPSLTVNSDCLDKLKFNRADAAVWTLSDRQGITKSAPLRVSQLFSRSCPRVLPRQPSTAMAAYGQTQYSAGIQQATPYTAYPPPAQAYGIPSYSIKTEDSLNHSPGQSGFLSYGSSFSTSPTGQSPYTYQMHGTTGFYQGGNGLGNAAGFGSVHQDYPSYPGFPQSQYPQYYGSSYNPPYVPASSICPSPLSTSTYVLQEASHNVPNQSSESLAGEYNTHNGPSTPAKEGDTDRPHRASDGKLRGRSKRSSDPSPAGDNEIERVFVWDLDETIIIFHSLLTGTFASRYGKDCDQIHVDDVSSDDNGQDLSTYNFSADGFHSSAPGANLCLGSGVHGGVDWMRKLAFRYRRVKEMYNTYKNNVGGLIGTPKRETWLQLRAELEALTDLWLTHSLKALNLINSRPNCVNVLVTTTQLIPALAKVLLYGLGSVFPIENIYSATKTGKESCFERIMQRFGRKAVYVVIGDGVEEEQGAKKHNMPFWRISCHADLEALRHALELEYL

SEQ ID NO: 95678 - protein, 269 aa, Homo sapiens
MNRLLIFLIPWKDLNMLLMKIITKYVYELLEKDCNLKKVSIPEGYGVIVLNPNENYIEVEKPKIHVQSSSDSSDEPAEKRERKDKVSKETKKRRDFYEKYRNPQREKEMMQLYIRENGSPEEHAIYVWDHFIAQAAAENVFFVAHSYGGLAFVELMIQREADVKNKVTAVALTDSVHNVWHQEAGKTIREWMRENCCNWVSSSEPLDTSVESMLPDCPRVSAGTDRHELTSWKSFPSIFKFFTEASEAKTSSLKPAVTRRSHRIKHEEL

SEQ ID NO: 95679 - protein, 132 aa, Homo sapiens
MLKNIELFDKLSLRFNGRVLFIKDVIGDEICCWSFYGQGRKIAEVCCTSIVYATEKKQTKVEFPEARIYEETLNILLYEAQDGRGPDNALLEATGGAAGRSHHLDEDEERERIERVRRIHIKRPDDRAHLHQ

SEQ ID NO: 95680 - protein, 647 aa, Homo sapiens
MSHVAVENALGLDQQFAGLDLNSSDNQSGGSTASKGRYIPPHLRNREATKGFYDKDSSGWSSSKDKDAYSSFGSRSDSRGKSSFFSDRGSGSRGRFDDRGRSDYDGIGSRGDRSGFGKFERGGNSRWCDKSDEDDWSKPLPPSERLEQELFSGGNTGINFEKYDDIPVEATGNNCPPHIESFSDVEMGEIIMGNIELTRYTRPTPVQKHAIPIIKEKRDLMACAQTGSGKTAAFLLPILSQIYSDGPGEALRAMKENGRYGRRKQYPISLVLAPTRELAVQIYEEARKFSYRSRVRPCVVYGGADIGQQIRDLERGCHLLVATPGRLVDMMERGKIGLDFCKYLVLDEADRMLDMGFEPQIRRIVEQDTMPPKGVRHTMMFSATFPKEIQMLARDFLDEYIFLAVGRVGSTSENITQKVVWVEESDKRSFLLDLLNATGKDSLTLVFVETKKGADSLEDFLYHEGYACTSIHGDRSQRDREEALHQFRSGKSPILVATAVAARGLDISNVKHVINFDLPSDIEEYVHRIGRTGRVGNLGLATSFFNERNINITKDLLDLLVEAKQEVPSWLENMAYEHHYKGSSRGRSKSSRFSGGFGARDYRQSSGASSSSFSSSRASSSRSGGGGHGSSRGFGGGSCSSVEQVPP

SEQ ID NO: 95681 - protein, 244 aa, Homo sapiens
MNGRSCSMSLHRTSGTPQGPRMVSGHHIPAIRAHSGTPGPSPCGSTSSPTMASLANNLHLKMPSGGGMAPQNNVAESRIHLPALSPRRQMLTNGKPRFQVTQAGGMSGSHTLKPKQQEFGSPFPPNPGKGALGFGPQCKSIGKGSCNNLVVTSSPMMVQRLGLISPPASQVSTACNQISPSLQRAMNAANLNIPPSDTRSLISRESLASTTLSLTESQSASSMKQEWSQGYRALPSLSNHGSQN

SEQ ID NO: 95682 - protein, 158 aa, Homo sapiens
MIFWSFVAGVVTFYCSLGPDSLLPNIFFTIKYKPKQLGLQELFPQGHSCAVCGKVKCKRHRPSLLLENYQPWLDLKISSKVDASLSEVLELVLENFVYPWYRDVTDDESFVDELRITLRFFASVLIRRIHKTEFCSVAQAGVQWHDLSSLQPPPPRFK

SEQ ID NO: 95683 - protein, 128 aa, Homo sapiens
MEETQQKSNLELLRISLLLIESWLEPVRFLRSMFANNLVYDTSDSDDYHLLKDLEEGIQTLMGRLEDGSRRTGQILKQTYSKFDTNSHNHDALLKNYGLLYCFRKDMDKVETFLRMVQCRSVEGSCGF

SEQ ID NO: 95684 - protein, 144 aa, Homo sapiens
MAGPVKDREAFQRLNFLYQAAHCVLAQDPENQALARFYCYTERTIAKRLVLRRDPSVKRTLCRGCSSLLVPGLTCTHRQRRCRGQRWTVQTCLTCQRSQRFLNDPGHLLWGDRPEAQLGSQAGERFQTTTTLAKHSPLHFRPPS

SEQ ID NO: 95685 - protein, 308 aa, Homo sapiens
MLKCVPCTYKKEPVRISNGNKIWTLKFSHNISNKTPLVLLHGFGGGLGLWALNFGDLCTNRPVYAFDLLGFGRSSRPRFDSDAEEVENQFVESIEEWRCALGLDKMILLGHNLGGFLAAAYSLKYPSRVNHLILVEPWGFPERPDLADQDRPIPVWIRALGAALTPFNPLAGLRIAGPFGLSLVQRLRPDFKRKYSSMFEDDTVTEYIYHCNVQTPSGETAFKNMTIPYGWAKRPMLQRIGKMHPDIPVSVIFGARSCIDGNSGTSIQSLRPHSYVKTIAILGAGHYVYADQPEEFNQKVKEICDTVD

SEQ ID NO: 95686 - protein, 134 aa, Homo sapiens
MGAEWELGAEAGGSLLLCAALLAAGCALGLRLGRGQGAADRGALIWLCYDALVHFALEGPFVYLSLVGNVANSDGLIASLWKEYGKADARWVYFDPTIVSVEILTVALDGSLALFLIYAIVKEKYYRDRVAWGE

SEQ ID NO: 95687 - protein, 340 aa, Homo sapiens
MSLVPATNYIYTPLNQLKGGTIVNVYGVVKFFKPPYLSKGTDYCSVVTIVDQTNVKLTCLLFSGNYEALPIIYKNGDIVRFHRLKIQVYKKETQGITSSGFASLTFEGTLGAPIIPRTSSKYFNFTTEDHKMVEALRVWASTHMSPSWTLLKLCDVQPMQYFDLTCQLLGKAEVDGASFLLKVWDGTRTPFPSWRVLIQDLVLEGDLSHIHRLQNLTIDILVYDNHVHVARSLKVGSFLRIYSLHTKLQSMNSENQTMLSLEFHLHGGTSYGRGIRVLPESNSDVDQLKKDLESANLTANQHSDVICQSEPDDSFPNGVSLRPPGWSSVARSRLIAASTS

SEQ ID NO: 95688 - protein, 437 aa, Homo sapiens
MIWNTMMGTSILSIPWGIKQAGFTTGMCVIILMGLLTLYCCYRVVKSRTMMFSLDTTSWEYPDVCRHYFGSFGQWSSLLFSLVSLIGAMIVYWVLMSNFLFNTGKFIFNFIHHINDTDTILSTNNSNPVICPSAGSGGHPDNSSMIFYANDTGAQQFEKWWDKSRTVPFYLVGLLLPLLNFKSPSFFSKFNILGTVSVLYLIFLVTFKAVRLGFHLEFHWFIPTEFFVPEIRFQFPQLTGVLTLAFFIHNCIITLLKNNKKQENNVRDLCIAYMLVTLTYLYIGVLVFASFPSPPLSKDCIEQNFLDNFPSSDTLSFIARIFLLFQMMTVYPLLGYLARVQLLGHIFGDIYPSIFHVLILNLIIVGAGVIMACFYPNIGGIIRYSGAACGLAFVFIYPSLIYIISLHQEERLTWPKLIFHVFIIILGVANLIVQFFM

SEQ ID NO: 95689 - protein, 129 aa, Homo sapiens
LDNEVEKTANLVISNWNQQIKAKKKLMVSTKKHEALFQLVESSKQSMTEKEKRKLLNKLTKSTEKLEKEDENYYQKNMAGYSTRLKWENTLENCYQSILELEKERIQLLCNNLNQYSQHISLFGQTLTT

SEQ ID NO: 95690 - protein, 102 aa, Homo sapiens
MAAAATAAEGVPSRGPPGEVIHLNVGGKRFSTSRQTLTWIPDSFFSSLLSGRISTLKDETGAIFIDRDPTVFAPILNFLRTKELDPRLAWKKGRESLTVFSP

SEQ ID NO: 95691 - protein, 76 aa, Homo sapiens
  MOD_RES (1)..(1): Any amino acid
XEQRLMNEAFQPASDLFGPITLHSPSDWITSHPEAPQDFEQFFSDPYRKTPSPNKRSIYIQSIGKYWLSRKHQNYQ

SEQ ID NO: 95692 - protein, 167 aa, Homo sapiens
MKAIKKSLTEEEYLYLDFSHQTEGCIFPLHTSVTLFLLSYCDCKIFKICLVVTKEVSRDSSLLRDDLIQDVEIQIISRQELPPIVQNCCLPAVVERSDNFCRAGLAVVLRHIIQKSYEADPLKKELLELLGFKKTCLKACAEVSQWTRLCELTIPLAIENFLRESSD

SEQ ID NO: 95693 - protein, 1047 aa, Homo sapiens
MTILHGGFLLAEQLFHPKALAELTKSDWERVGRPIVEALREISSAAAHSQPFAWKKKALIIIWAKVLQPHPVTPSDTETRWQEDLFFSVGNMIPTINHTILFELLKSLEASGLFIQLLMALPTTICHAELERFLEHVTVDTSAEDVAFFLDVWWEVMKHKGHPQDPLLSQFSAMAHKYLPALDEFPHPPKRLRSDPDACPTMPLLAMLLRGLTQIQSRILGPGRKCCALANLADMLTVFALTEDDPQEVSATVYLDKLATVISVWNSDTQNPYHQQALAEKVKEAERDVSLTSLAKLPSETIFVGCEFLHHLLREWGEELQAVLRSSQGTSYDSYRLCDSLTSFSQNATLYLNRTSLSKEDRQVVSELAECVRDFLRKTSTVLKNRALEDITASIAMAVIQQKMDRHMEVCYIFASEKKWAFSDEWVACLGSNRALFRQPDLVLRLLETVIDVSTADRAIPESQIRQVIHLILECYADLSLPGKNKVLAGILRSWGRKGLSEKLLAYVEGFQEDLNTTFNQLTQSASEQGLAKAVASVARLVIVHPEVTVKKMCSLAVVNLGTHKFLAQILTAFPALRFVEEQGPNSSATFMVSCLKETVWMKFSTPKEEKQFLELLNCLMSPVKPQGIPVAALLEPDEVLKEFVLPFLRLDVEEVDLSLRIFIQTLEANACREEYWLQTCSPFPLLFSLCQLLDRFSKYWQLPKEKRCLSLDRKDLAIHILELLCEIVSANAETFSPDVWIKSLSWLHRKLEQLDWTVGLRLKSFFEGHFKCEVPATLFEICKLSEDEWTSQAHPGYGAGTGLLAWMECCCVSSGISERMLSLLVVDVGNPEEVRLFSKGFLVALVQVMPWCSPQEWQRLHQLTRRLLEKQLLHVPYSLEYIQFVPLLNLKPFAQELQLSVLFLRTFQFLCSHSCRDWLPLEGWNHVVKLLCGSLTRLLDSVRAIQAAGPWVQGPEQDLTQEALFVYTQVFCHALHIMAMLHPEVCEPLYVLALETLTCYETLSKTNPSVSSLLQRAHEQRFLKSIAEGIGPEERRQTLLQKMSSF

SEQ ID NO: 95694 - protein, 44 aa, Homo sapiens
YGLASRLRDTRRLSFLLPLSMCGVTPWTPSTLWTSSGNVAWVSL

SEQ ID NO: 95695 - protein, 192 aa, Homo sapiens
  MOD_RES (1)..(1): Any amino acid
XTPAAVGAMEDKSAEHKRTQYSCYCCKLSMKEGDPAIYAERAGYDKLWHPACFVCSTCHELLVDMIYFWKNEKLYCGRHYCDSEKPRCAGCDELIFSNEYTQAENQNWHLKHFCCFDCDSILAGEIYVMVNDKPVCKPCYVKNHAVVRSVLRIWLPQPALGLEFMLFLKPLTNGKQKAVLLSRKQIIPTTGC

SEQ ID NO: 95696 - protein, 35 aa, Homo sapiens
MDVFVDFTWEEWQLLDPAQKCLYRSVMLENYSNLV

SEQ ID NO: 95697 - protein, 438 aa, Homo sapiens
MKPILLQGHERSITQIKYNREGDLLFTVAKDPIVNVWYSVNGERLGTYMGHTGAVWCVDADWDTKHVLTGSADNSCRLWDCETGKQLALLKTNSAVRTCGFDFGGNIIMFSTDKQMGYQCFVSFFDLRDPSQIDNNEPYMKIPCNDSKITSAVWGPLGECIIAGHESGELNQYSAKSGEVLVNVKEHSRQINDIQLSRDMTMFVTASKDNTAKLFDSTTLEHQKTFRTERPVNSAALSPNYDHVVLGGGQEAMDVTTTSTRIGKFEARFFHLAFEEEFGRVKGHFGPINSVAFHPDGKRGRCQKRRHRRAQTAPTVALPQTPMTVGTGSPAATRSPGRGESQRQPSSRLSQLSMLCSESPQASTRRMKLSCRGRPLGGGSLVIFSSSSPCQVQPGSKCSRPMRETQNPVKSPSDKRDTEPFRESSLTAHTTHRGVPNL

SEQ ID NO: 95698 - protein, 63 aa, Homo sapiens
MPVSINLWVPARGQSRDSCDHYKVIYTDWANHYLAKSGHKRLIRDLQQDVTDGVLLAQIIQVV

SEQ ID NO: 95699 - protein, 3062 aa, Homo sapiens
MRSRLPPALAALGAALLLSSIEAEVDPPSDLNFKIIDENTVHMSWAKPVDPIVGYRITVDPTTDGPTKEFTLSASTTETLLSELVPETEYVVTITSYDEVEESVPVIGQLTIQTGSSTKPVEKKPGKTEIQKCSVSAWTDLVFLVDGSWSVGRNNFKYILDFIAALVSAFDIGEEKTRVGVVQYSSDTRTEFNLNQYYQRDELLAAIKKIPYKGGNTMTGDAIDYLVKNTFTESAGARVGFPKVAIIITDGKSQDEVEIPARELRNVGVEVFSLGIKAADAKELKQIASTPSLNHVFNVANFDAIVDIQNEIISQVCSGVDEQLGELVSGEEVVEPPSNLIAMEVSSKYVKLNWNPSPSPVTGYKVILTPMTAGSRQHALSVGPQTTTLSVRDLSADTEYQISVSAMKGMTSSEPISIMEKTQPMKVQVECSRGVDIKADIVFLVDGSYSIGIANFVKVRAFLEVLVKSFEISPNRVQISLVQYSRDPHTEFTLKKFTKVEDIIEAINTFPYRGGSTNTGKAMTYVREKIFVPSKGSRSNVPKVMILITDGKSSDAFRDPAIKLRNSDVEIFAVGVKDAVRSELEAIASPPAETHVFTVEDFDAFQRISFELTQSICLRIEQELAAIKKKAYVPPKDLSFSEVTSYGFKTNWSPAGENVFSYHITYKEAAGDDEVTVVEPASSTSVVLSSLKPETLYLVNVTAEYEDGFSIPLAGEETTEEVKGAPRNLKVTDETTDSFKITWTQAPGRVLRYRIIYRPVAGGESREVTTPPNQRRRTLENLIPDTKYEVSVIPEYFSGPGTPLTGNAATEEVRGNPRDLRVSDPTTSTMKLSWSGAPGKVKQYLVTYTPVAGGETQEVTVRGDTTNTVLQGLKEGTQYALSVTALYASGAGDALFGEGTTLEERGSPQDLVTKDITDTSIGAYWTSAPGMVRGYRVSWKSLYDDVDTGEKNLPEDAIHTMIENLQPETKYRISVFATYSSGEGEPLTGDATTELSQDSKTLKVDEETENTMRVTWKPAPGKVVNYRVVYRPHGRGKQMVAKVPPTVTSTVLKRLQPQTTYDITVLPIYKMGEGKLRQGSGTTASRFKSPRNLKTSDPTMSSFRVTWEPAPGEVKGYKVTFHPTGDDRRLGELVVGPYDNTVVLEELRAGTTYKVNVFGMFDGGESSPLVGQEMTTLSDTTVMPILSSGMECLTRAEADIVLLVDGSWSIGRANFRTVRSFISRIVEVFDIGPKRVQIALAQYSGDPRTEWQLNAHRDKKSLLQAVANLPYKGGNTLTGMALNFIRQQNFRTQAGMRPRARKIGVLITDGKSQDDVEAPSKKLKDEGVELFAIGIKNADEVELKMIATDPDDTHAYNVADFESLSRIVDDLTINLCNSVKGPGDLEAPSNLVISERTHRSFRVSWTPPSDSVDRYKVEYYPVSGGKRQEFYVSRMETSTVLKDLKPETEYVVNVYSVVEDEYSEPLKGTEKTLPVPVVSLNIYDVGPTTMHVQWQPVGGATGYILSYKPVKDTEPTRPKEVRLGPTVNDMQLTDLVPNTEYAVTVQAVLHDLTSEPVTVREVTLPLPRPQDLKLRDVTHSTMNVFWEPVPGKVRKYIVRYKTPEEDVKEVEVDRSETSTSLKDLFSQTLYTVSVSAVHDEGESPPVTAQETTRPVPAPTNLKITEVTSEGFRGTWDHGASDVSLYRITWAPFGSSDKMETILNGDENTLVFENLNPNTIYEVSITAIYPDESESDDLIGSERTLPILTTQAPKSGPRNLQVYNATSNSLTVKWDPASGRVQKYRITYQPSTGEGNEQTTTIGGRQNSVVLQKLKPDTPYTITVSSLYPDGEGGRMTGRGKTKPLNTVRNLRVYDPSTSTLNVRWDHAEGNPRQYKLFYAPAAGGPEELVPIPGNTNYAILRNLQPDTSYTVTVVPVYTEGDGGRTSDTGRTLMRGLARNVQVYNPTPNSLDVRWDPAPGPVLQYRVVYSPVDGTRPSESIVVPGNTRMVHLERLIPDTLYSVNLVALYSDGEGNPSPAQGRTLPRSGPRNLRVFGETTNSLSVAWDHADGPVQQYRIIYSPTVGDPIDEYTTVPGRRNNVILQPLQPDTPYKITVIAVYEDGDGGHLTGNGRTVGLLPPQNIHISDEWYTRFRVSWDPSPSPVLGYKIVYKPVGSNEPMEAFVGEMTSYTLHNLNPSTTYDVNVYAQYDSGLSVPLTDQGTTLYLNVTDLKTYQIGWDTFCVKWSPHRAATSYRLKLSPADGTRGQEITVRGSETSHCFTGLSPDTDYGVTVFVQTPNLEGPGVSVKEHTTVKPTEAPTEPPTPPPPPTIPPARDVCKGAKADIVFLTDASWSIGDDNFNKVVKFIFNTVGGFDEISPAGIQVSFVQYSDEVKSEFKLNTYNDKALALGALQNIRYRGGNTRTGKALTFIKEKVLTWESGMRKNVPKVLVVVTDGRSQDEVKKAALVIQQSGFSVFVVGVADVDYNELANIASKPSERHVFIVDDFESFEKIEDNLITFVCETATSSCPLIYLDGYTSPGFKMLEAYNLTEKNFASVQGVSLESGSFPSYSAYRIQKNAFVNQPTADLHPNGLPPSYTIILLFRLLPETPSDPFAIWQITDRDYKPQVGVIADPSSKTLSFFNKDTRGEVQTVTFDTEEVKTLFYGSFHKVHIVVTSKSVKIYIDCYEIIEKDIKEAGNITTDGYEILGKLLKGERKSAAFQIQSFDIVCSPVWTSRDRCCDIPSRRDEGKCPAFPNSCTCTQDSVGPPGPPGPAGGPGAKGPRGERGISGAIGPPGPRGDIGPPGPQGPPGPQGPNGLSIPGEQGRQGMKGDAGEPGLPGRTGTPGLPGPPGPMGPPGDRGFTGKDGAMGPRGPPGPGSPGVTGPSGKPGKPGDHGRPGPSGLKGEKGDRGDIASQNMMRAVARQVCEQLISGQMNRFNQMLNQIPNDYQSSRNQPGPPGPPGPPGSAGARGEPGPGGRPGFPGTPGMQGPPGERGLPGEKGERGTGSSGPRGLPGPPGPQGESRTGPPGSTGSRGPPGPPGRPGNSGIRGPPGPPGYCDSSQCASIPYNGQGYPGTLLPL

SEQ ID NO: 95700 - protein, 1632 aa, Homo sapiens
MTESSMKKLASTLLDAITDKDPLVQEQVCSALCSLGEARPVETLRACEEYLRQHDKLAHPYRAAVLRAMERVLSSRASELDKDTASTIILLASSEMTKTKDLVWDWQQAASGVLVAVGRQFISKVMEELLRRLHPGTLPHCAVLHTLASLSVANAFGVVPFLPSVLSSLLPVLGVAKQDTVRVAFCSALQRFSEGALEYLANLDRAPDPTVRKDAFATDIFSAYDVLFHQWLQSREAKLRLAVVEALGPMSHLLPSERLEEQLPKLLPGILALYKKHAETFYLSKSLGQILEAAVSVGSRTLETQLDALLAALHSQICVPVESSSPLVMSNQKEVLRCFTVLACSSPDRLLAFLLPRLDTSNERTRVGTLQVVRHVINSAAAQMEDKKPFILSSMRLPLLDTNSKVKRAVVQVISAMAHHGYLEQPGGEAMIEYIVQQCALPPEQEPEKPGPGSKDPKADSVRAISVRTLYLVSTTVDRMSHVLWPYLLQFLTPVRFTGALTPLCRSLVHLAQKRQEAGADAFLIQYDAHASLPSPYAVTGRLLVVSSSPYLGDGRGAAALRLLSVLHPNIHPLLGQHWETTVPLLLGYLDEHTEETLPQEEWEEKLLMFLRDTLAIISDNAWICQLSLELCRQLPCYDEAPQEKNFLYKCIGTTLGAASSKEVVRKHLQELLETARYQEEAEREGLACCFGICAISHLEDTLAQLEDFVRSEVFRKSIGILNIFKDRSENEVEKVKSALILCYGHVAARAPRELVLAKVESDILRNICQHFSTKDPALKLCLVQSVCMVSRAICSSTQAGSFHFTRKAELVAQMMEFIRAEPPDSLRTPIRKKAMLTCTYLVSVEPALDEQARADVIHGCLHSIMALLPEPKEEDGGCQKSLYLETLHALEDLLTSLLQRNMTPQGLQIMIEHLSPWIKSPRGHERARALGLSALLLRYFLEHLRVSALVPFHNLGLLIGLFSPRCADLWPATRQEAVDCVYSLLYLQLGYEGFSRDYRDDVAERLLSLKDGLVHPDPAILFHTCHSVGQIIAKRLPPDQLISLLLTMFEALGDPEKNCSRAATVMINCLLQERGGVLQEKVPEIVSVLRSKLQEAQGEHVLPAAQHSVYLLATQHCAAVVSSLLGSPLPLDSHTCMLWRALAVEPRLAAQVLGLLLEKMSRDVPFKESRAFLLGRTPDRVATLLPLSATCALFEVMSTPAAGPAVLELYPQLFVVLLLRVSCTVGVQLPRNLQAQERRGASPALATRNLEPCSSAVDTLRSMLLRSGSEDVVQRMDLEGGWELLRTSAGHEEGATRLARAMAEHAGPRLPLVLKTLACTHSSAYENQRVTTTAFLAELLNSNVANDLMLLDSLLESLAARQKDTCASVRRLVLRGLANLASGCPDKVRTHGPQLLTAMIGGLDDGDNPHSPVALEAMLGLARLVHLVESWDLRSGLLHVAIRIRPFFDSEKMEFRTASIRLFGHLNKVCHGDCEDVFLDQVVGGLAPLLLHLQDPQATVASACRFALRMCGPNLACEELSAAFQKHLQEGRALHFGEFLNTTCKHLMHHFPDLLGRLLTTCLFYFKSSWENVRAAAPLFTGFLVLHSEPRQQPQVDLDQLIAALQILLKDPAPEVRTRAAEALGRLVKLA

SEQ ID NO: 95701 - protein, 363 aa, Homo sapiens
MQETVELDPFPIDEKPYKLCAAYDAVLDRNVAIKKLSRPFQNQTHAKRAYRELVLMKCVNHKNIISLLNVFTPQKTLEEFQDVYLVMELMDANLCQVIQMELDHERMSYLLYQMLCGIKHLHSAGIIHRDLKPSNIVVKSDCTLKILDFGLARTAGTSFMMTPYVVTRYYRAPEVILGMGYKENVDIWSVGCIMGEMVRHKILFPGRDYIDQWNKVIEQLGTPCPEFMKKLQPTVRNYVENRPKYAGLTFPKLFPDSLFPADSEHNKLKASQARDLLSKMLVIDPAKRISVDDALQHPYINVWYDPAEVEAPPPQIYDKQLDEREHTIEEWKELIYKEVMNSEEKTKNGVVKGQPSPSAQVQQ

SEQ ID NO: 95702 - protein, 103 aa, Homo sapiens
MDSLEEPQKKVFKARKTMRVSDRQQLEAVYKVKEELLKTDVKLLNGNHENGDLDPTSPLENMDYIKDKEEVNGIEEICFDPEGSKAEWKETPCILSVNVKNKQ

SEQ ID NO: 95703 - protein, 435 aa, Homo sapiens
MTITYTSQVANARLGSFSRLLLCWRGSIYKLLYGEFLIFLLCYYIIRFIYRLALTEEQQLMFEKLTLYCDSYIQLIPISFVLGFYVTLVVTRWWNQYENLPWPDRLMSLVSGFVEGKDEQGRLLRRTLIRYANLGNVLILRSVSTAVYKRFPSAQHLVQAGFMTPAEHKQLEKLSLPHNMFWVPWVWFANLSMKAWLGGRIRDPILLQSLLNEMNTLRTQCGHLYAYDWISIPLVYTQVVTVAVYSFFLTCLVGRQFLNPAKAYPGHELDLVVPVFTFLQFFFYVGWLKVGLSRALLGWRHGQRGHGQQLPETRMQCQERKVSRVESSQAWWRTPVIPATREAEAGESLEPGRRRLWWQSSSSTPLERMMMILRPTGLSTGICRCPCWLWMRCTRTCLGWSRTCTGISPSHSPPTQLLPPSSVEPPLWAPPSTSA

SEQ ID NO: 95704 - protein, 366 aa, Homo sapiens
MAPAGVSLRATILCLLAWAGLAAGDRVYIHPFHLVIHNESTCEQLAKANAGKPKDPTFIPAPIQAKTSPVDEKALQDQLVLVAAKLDTEDKLRAAMVGMLANFLGFRIYGMHSELWGVVHGATVLSPTAVFGTLASLYLGALDHTADRLQAILGVPWKDKNCTSRLDAHKVLSALQAVQGLLVAQGRADSQAQLLLSTVVGVFTAPGLHLKQPFVQGLALYTPVVLPRSLDFTELDVAAEKIDRFMQAVTGWKTGCSLMGASVDSTLAFNTYVHFQGKMKGFSLLAEPQEFWVDNSTSVSVPMLSGMGTFQHWSDIQDNFSVTQVPFTESACLLLIQPHYASDLDKVEGLTFQQNSLNWMKKLSPR

SEQ ID NO: 95705 - protein, 180 aa, Homo sapiens
MPMMWKQQLLEDGADPCAADDKGRTALHFASCNGNDQIVQLLLDHGADPNQRDGLGNTPLHLAACTNHVPVITTLLRGGARVDALDRAGRTPLHLAKSKLNILQEGHAQCLEAVRLEVKQIIHMLREYLERLGQHEQRERLDDLCTRLQMTSTKEQVDEVTDLLASFTSLSLQMQSMEKR

SEQ ID NO: 95706 - protein, 122 aa, Homo sapiens
MTPQSLLQTTLFLLSLLFLVQGAHGRGHREDFRFCSQRNQTHRSSLHYKPTPDLRISIENSEEALTVHAPFPAAHPASRSFPDPRGLYHFCLYWNRHAGRLHLLYGKRDFLLSDKASSLLCF

SEQ ID NO: 95707 - protein, 100 aa, Homo sapiens
MPPPGKVPRKENLWLQCEWGSCSFVCSTMEKFFEHVTQHLQQHLHGSGEEEEEEEEDDPLEEEFSCLWQECGFCSLDSSADLIRHVYFHCYHTKLKQWGL

SEQ ID NO: 95708 - protein, 12 aa, Homo sapiens
MGYKLQDLTDVQ

SEQ ID NO: 95709 - protein, 673 aa, Homo sapiens
MIDSVKLRRDSAADFFSHYEYLCALQNSVPLPAVRACLREGVLDFNADRLRGVDWAPLLSTLKINKDLPLVSIKSFFQPWLGDTGSDMNKFCRSRVPAIRYKDVTFQLCKALKGCLSISSVLKNLELNGLILRERDLTILAKGLNKSASLVHLSLANCPIGDGGLEIICQGIKSSITLKTVNFTGCNLTWQGADHMAKILKYQTMRRHEETWAESLRYRRPDLDCMAGLRRITLNCNTLIGDLGACAFADSLSEDLWLRDHSMMKAVIKKVLQNGRSAKSEYQWITSPSVKEPSKTAKQKRRTIILGSGHKGKATIRIVIWRHRGLATKKPVSSGRKHSLGKEYYAPAPLPPGVSGFLPWRTAERAKRHRGFPLIKTRDICNQLQQPGFPVTVTVESPSSSEVEEVDDSSESVHEVPEKTSIEQEALQEKLEECLKQLKEERVIRLKVDKRVSELEHENAQLRNINFSLSEALHAQSLTNMILDDEGVLGSIENSFQKFHAFLDLLKDAGLGQLATMAGIDQSDFQLLGHPQMTSTVSNPPKEEKKALEDEKPEPKQNALGQMQNIQVSICMQSAYNEGTLMKFQKITGDARIPLPLDSFPVPVSTPEGLGTSSNNLGVPATEQRQESFEGFIARMCSPSPDATSGTGSQRKEEELSRNSRSSSEKKTKTESH

SEQ ID NO: 95710 - protein, 322 aa, Homo sapiens
MSDHGDVSLPPEDRVRALSQLGSAVEVNEDIPPRRYFRSGVEIIRMASIYSEEGNIEHAFILYNKYITLFIEKLPKHRDYKSAVIPEKKDTVKKLKEIAFPKAEELKAELLKRYTKEYTEYNEEKKKEAEELARNMAIQQELEKEKQRVAQQKQQQLEQEQFHAFEEMIRNQELEKERLKIVQEFGKVDPGLGGPLVPDLEKPSLDVFPTLTVSSIQPSDCHTTVRPAKPPVVDRSLKPGALSNSESIPTIDGLRHVVVPGRLCPQFLQLASANTARGVETCGILCGKLVKRKKKPNSSLNRNCFFPSWHPVTLRENIQDEE

SEQ ID NO: 95711 - protein, 270 aa, Homo sapiens
MRMERLQAWMTRMCRHPVISESEVFQQFLNFRDEKEWKTGKRKAERDELAGVMIFSTMEPEAPDLDLVEIEQKCEAVGKFTKAMDDGVKELLTVGQEHWKRCTGPLPKEYQKIGKALQSLATVFSSSGYQGETDLNDAITEAGKTYEEIASLVAEQPKKDLHFLMECNHEYKGFLGCFPDIIGTHKGAIEKVKESDKLVATSKITLQDKQNMVKRVSIMSYALQAEMNHFHSNRIYDYNSVIRLYLEQQVQFYETIAEKLRQALSRFPVM

SEQ ID NO: 95712 - protein, 102 aa, Homo sapiens
MPMWAGGVGSPRRGMAPASTDDLFARKLRQPARPPLTPHTFEPRPVRGPLLRSGSDAGEARPPTPASPRARAHSHEEASRPAATSTRLFTDPLALLGLPAEE

SEQ ID NO: 95713 - protein, 162 aa, Homo sapiens
MIKAILIFNNHGKPRLSKFYQPYSEDTQQQIIRETFHLVSKRDENVCNFLEGGLLIGGSDNKLIYRHYATLYFVFCVDSSESELGILDLIQVFVETLDKCFENVCELDLIFHVDKVHNILAEMVMGGMVLETNMNEIVTQIDAQNKLEKSETFIFQSPRQDR

SEQ ID NO: 95714 - protein, 74 aa, Homo sapiens
MDDNRRIQMLADTVATLPRGRKQLALTRSSSLSDFSWSQRKLVTVEKQDNETFGFEIQSYRPQNQNACSSEMFT

SEQ ID NO: 95715 - protein, 820 aa, Homo sapiens
MFSQQQQQQLQQQQQQLQQLQQQQLQQQQLQQQQLLQLQQLLQQSPPQAPLPMAVSRGLPPQQPQQPLLNLQGTNSASLLNGSMLQRALLLQQLQGLDQFAMPPATYDTAGLTMPTATLGNLRGYGMASPGLAAPSLTPPQLATPNLQQFFPQATRQSLLGPPPVGVPMNPSQFNLSGRNPQKQARTSSSTTPNRKTMPVEDKSDPPEGSEEAAEPRMDTPEDQDLPPCPEDIAKEKRTPAPEPEPCEASELPAKRLRSSEEPTEKEPPGQLQVKAQPQARMTVPKQTQTPDLLPEALEAQVLPRFQPRVLQVQAQVQSQTQPRIPSTDTQVQPKLQKQAQTQTSPEHLVLQQKQVQPQLQQEAEPQKQVQPQVHTQAQPSVQPQEHPPAQVSVQPPEQTHEQPHTQPQVSLLAPEQTPVVVHVCGLEMPPDAVEAGGGMEKTLPEPVGTQVSMEEIQNESACGLDVGECENRAREMPGVWGAGGSLKVTILQSSDSRAFSTVPLTPVPRPSDSVSSTPAATSTPSKQALQFFCYICKASCSSQQEFQDHMSEPQHQQRLGEIQHMSQACLLSLLPVPRDVLETEDEEPPPRRWCNTCQLYYMGDLIQHRRTQDHKIAKQSLRPFCTVCNRYFKTPRKFVEHVKSQGHKDKAKELKSLEKEIAGQDEDHFITVDAVGCFEGDEEEEEDDEDEEEIEVEEELCKQVRSRDISREEWKGSETYSPNTAYGVDFLVPVMGYICRICHKFYHSNSGAQLSHCKSLGHFENLQKYKAAKNPSPTTRPVSRRCAINARNALTALFTSSGRPPSQPNTQDKTPSKAL

SEQ ID NO: 95716 - protein, 212 aa, Homo sapiens
MPLRRTSSRGNAGRPELTPIAIMAGRLLVQRLFGGSSDLMDYDNVPTTVFTPLEYGCVGLSEEEAVARHGQEHVEVYHAHYKPLEFTVAGRDASQCYVKMVCLREPPQLVLGLHFLGPNAGEVTQGFALGIKCGASYAQVMRTVGIHPTCSEEVVKLRISKRSGLDPTVTGCCGMAAGQVWGASTLSWSACEMVSVERKCWTGGPCAPQGWL

SEQ ID NO: 95717 - protein, 152 aa, Homo sapiens
MSLRRHIGNPEYLMKRIPQNPRYQHIKSRLDTGNSMTKYTEKLEEIKKNYRYKKDELFKRLKVTTFAQLIIQVASLSDQTLEVTAEEIQRLEDNDSAASDPDAETTARTNGKGNPGEQSPSPEQFINNAGAGDSSRSTLQSMCPSVPTPSAM

SEQ ID NO: 95718 - protein, 159 aa, Homo sapiens
MYRRKSGWTGCAITCSPCTAMTQLRNCMRLSRSCSLTWETPRWYMAGRVATSTSGCHCWMSRRDLTPLPHPSEPGVLDCLGPCHLLPLLSPGSPCWVLGLHFSLHPPSAASASHALTITSLPPGLLPFVGVELTAHPQALMGRGFPSGMGAAGRHLCFL

SEQ ID NO: 95719 - protein, 51 aa, Homo sapiens
MAEPDYIEDDNPELIRPQKLINPVKTSRNHQDLHRELLMNQKRILVWLEIH

SEQ ID NO: 95720 - protein, 131 aa, Homo sapiens
  MOD_RES (1)..(1): Any amino acid
XEKHELIEFRRIAAYLFKGNNRWKQSVELCKKDSLYKDAMQYASESKDTELAEELLQWFLQEEKRECFGACLFTCYDLLRPDVVLETAWRHNIMDFAMPYFIQVMKEYLTKVDAIKEKVKVDSLTSLSLED

SEQ ID NO: 95721 - protein, 249 aa, Homo sapiens
MQLDKFIYHLAPVEKSHGRLQNRTSRSQKKKSKSPERSKYCINAKNYEQPTISSKSHSPSPYTKRRMCELSEDTRRRLAHLNLGPYEFKKETDKPPFVIRHVDPPSPRADTLLGSSGRDCERDGWSRVHNDHSHLGCCRPKDYKVIRTPHGRDFDDSLEKCEEYLSPRSCSKPRHSARTLLVHSAPSTMPKHSPSPVLNRASLRERFHSDWCSPSNCDEIHDRDERDLEKDDELELKRSLLCRDSAYDS

SEQ ID NO: 95722 - protein, 193 aa, Homo sapiens
IYPSNPTDDDVSSGSSSERSSTSGGYIFYTFSTVHPIPDEDSPWITDSTDRIPATSTSSNTISAGWEPNEENEDERDRHLSFSGSGIDDDEDFISSTNMDSSHSITLQPTANPNTGLVEDLDRTGPLSMTTQQSNSQSFSTSHEGLEEDKDHPTTSTLTSSNRNDVTGGRRDPNHSEGSTTLLEGYTSHYPHT

SEQ ID NO: 95723 - protein, 129 aa, Homo sapiens
MWEKMETKTIVYDLDTSGGLMEQIQALLAPPKTDEAEKRSRKPEKEPRRSGRATNHDSCDSCKEGGDLLCCDHCPAAFHLQCCNPPLSEEMLPPGEWMCHRCTVRRKVLARGEERRKPQGKMLRRHSMN

SEQ ID NO: 95724 - protein, 368 aa, Homo sapiens
  MOD_RES (1)..(1): Any amino acid
XSIALRIDEDEKEKMQPVLPFSKSQTDVYNDSTNLACRNGHLQSESGAVPKRKDPLTHTSNSLPRSKTVMKTGSAGLSGHHRAPSYSGLSMVSGVKQGSGPAPTTHKGTPKTNRTNKPSTPTTATRKKKDLKNFRNVDSNLANLIMNEIVDNGTAVKFDDIAGQDLAKQALQEIVILPSLRPELFTGLRAPARGLLLFGPPGNGKTMLAKAVAAESNATFFNISAASLTSKYVGEGEKLVRALFAVARELQPSIIFIDEVDSLLCERREGEHDASRRLKTEFLIEFDGVQSAGDDRVLVMGATNRPQELDEAVLRRFIKRVYVSLPNEETRLLLLKNLLCKQGSPLTQKELAQLARTKTRTGEEYVCQ

SEQ ID NO: 95725 - protein, 178 aa, Homo sapiens
MAELRVLVAVKRVIDYAVKIRVKPDRTGVVTDGVKHSMNPFCEIAVEEAVRLKEKKLVKEVIAVSCGPAQCQAIDDDCNQTGQMTAGFLDWPQGTFASQVTLEGDKLKVEREIDGGLETLRLKLPAVVTADLRLNEPRYATLPNIMKAKKKKIEVIKPGDLGVDLTSKLSVISVEDPP

SEQ ID NO: 95726 - protein, 115 aa, Homo sapiens
DVNSRKCLNRFVDEGSLYGLSIATSRNGQYVACGSNCGVVNIYNQDSCLQETNPKPIKAIMNLVTGVTSLTFNPTTEILAIASEKMKEAVRLVAPLLRLLKRLFEVQLSHKRSLS

SEQ ID NO: 95727 - protein, 275 aa, Homo sapiens
MESPISTSFYTDTLNISSLQIATRNGHASLVNFLLSENVDLHQKVEPKESPLHLVVINNHITVVNSLLSAQHDIDILNQKQQTPLHVAADRGNVELVETLLKAGCDLKAVDKQGKTALAVASRSNHSLVVGMLIKAERYYAWREEHHESIRDPSTGFTLTFKQDHSLETRHIRTLLWDLAYHQLKANEWQRLARSWNFTDDQIRAIEEQWSGNESFREHGHRALLIWLHGTLMTQGDPAKQLYEELVHAGFPKLAEKTRHFKSKTDSNSKKCVVS

SEQ ID NO: 95728 - protein, 99 aa, Homo sapiens
  MOD_RES (1)..(1): Any amino acid
XDRVTFRRIIVKNNAKKRKMFESFIESVPLLKSLEVSERMKIVDVIGEKIYKDGERIITQGEKADSFYIIESGEVSILIRSRLWMYKHSRGFWGPAWTS

SEQ ID NO: 95729 - protein, 125 aa, Homo sapiens
MAGFGAMEKFLVEYKSAVEKKLAEYKCNTNTAIELKLVRFPEDLENDIRTFFPEYTHQLFGDEQMMLRAKLDKSFHLDFAQTRMISFLYWKRKLISSHSEPYFIPTQFSVQQEEKTLPFRYIRLT

SEQ ID NO: 95730 - protein, 102 aa, Homo sapiens
ESVTFKDVSVDFTQEEWYHVDPAQRSLYRDVMLENYSHLVSLGYQVSKPEVIFKLEQGEEPWISEGEIQRPFYPGFVCLLPLSLPSGSKGERRQKLPRKNPE

SEQ ID NO: 95731 - protein, 36 aa, Homo sapiens
MSVLISQSVINYVEEENIPALKALLEKCKDVDERNE

SEQ ID NO: 95732 - protein, 467 aa, Homo sapiens
MATITCTRFTEEYQLFEELGKGAFSVVRRCVKVLAGQEYAAKIINTKKLSARDHQKLEREARICRLLKHPNIVRLHDSISEEGHHYLIFDLVTGGELFEDIVAREYYSEADASHCIQQILEAVLHCHQMGVVHRDLKPENLLLASKLKGAAVKLADFGLAIEVEGEQQAWFEVLRKDPYGKPVDLWACGVILYILLVGYPPFWDEDQHRLYQQIKAGAYDFPSPEWDTVTPEAKDLINKMLTINPSKRITAAEALKHPWISHRSTVASCMHRQETVDCLKKFNARRKLKGAILTTMLATRNFSGGKSGGNKKSDGVKESSESTNTTIEDEDTKVRKQEIIKVTEQLIEAISNGDFESYTKMCDPGMTAFEPEALGNLVEGLDFHRFYFENLWSRNSKPVHTTILNPHIHLMGDESACIAYIRITQYLDAGGIPRTAQSEETRVWHRRDGKWQIVHFHRSGAPSVLPH

SEQ ID NO: 95733 - protein, 131 aa, Homo sapiens
MVTGFLGCLGAIKENKCLLLSFFIVLLVILLAELILLILFFVYMDKVNENAKKDLKEGLLLYHTENNVGLKNAWNIIQAEMRCCGVTDYTDWYPVLGENTVPDRCCMENSQGCGRNATTPLWRTGCYEKVK

SEQ ID NO: 95734 - protein, 207 aa, Homo sapiens
MHSLKKVTFEDVAIDFTQEEWAMMDTSKRKLYRDVMLENISHLVSLGYQISKSYIILQLEQGKELWREGREFLQDQNPDRESALKKKHMISMHPITRKDASTSMTMENSLILEDPFECNDSGEDCTHSSTITQRLLTHSGKKPYVSKQCGKSLRNLFSPKPHKQIHTKGKSYQCNLCEKAYTNCFRLRRHKMTHTGERPYACHLCGK

SEQ ID NO: 95735 - protein, 150 aa, Homo sapiens
MEITTACWRRSCVISFIKGLASPVGNGYIKPPVPPASGTHREKGPPTMLPINVDPDSKPGEYVLKSLFVNFTTQAERKIRIIMAEPLEKPLTKSLQRGEDPQFDQVISSMSSLSEYCLPSILRTLFDWYKRQNGIEDESHEYRPRTSNKS

SEQ ID NO: 95736 - protein, 62 aa, Homo sapiens
  MOD_RES (1)..(1): Any amino acid
XSDMGSRPESMGCRKDTVPRPASPTEAGCVQEHSFCQLAEITESASLYFTCTLYPEAQVCDD

SEQ ID NO: 95737 - protein, 161 aa, Homo sapiens
MLDRLSGKILHIDFGDCFEVAMTREKFPEKIPFRLTRMLTNAMEVTGLDGNYRITCHTVMEVLREHKDSVMAVLEAFVYDPLLNWRLMDTNTKGNKRSRTRTDSYSAGQSVEILDGVELGEPAHKKTGTTVPESIHSFIGDGLVKPEALNKKAIQIINRVR

SEQ ID NO: 95738 - protein, 31 aa, Homo sapiens
  MOD_RES (1)..(1): Any amino acid
XHGNIEDAVTAFESIKSVVSYWNLALESRRH

SEQ ID NO: 95739 - protein, 64 aa, Homo sapiens
MTLQWAAVATFLYAEIGLILIFCLPFIPPQRWQKIFSFNVWGKIATFWNKAFLTIIILLIVLFL

SEQ ID NO: 95740 - protein, 148 aa, Homo sapiens
MLRHLMYKIKSTGPITVAEYMKEVLTNPAKGYYVYRDMLGEKGDFITSPEISQIFGELLGIWFISEWMATGKSTAFQLVELGPGRGTLVGDILRVFTQLGSVLKNCDISVHLVEVSQKLSEIQALTLTKEKVPLERNAGSPVYMKGVT

SEQ ID NO: 95741 - protein, 305 aa, Homo sapiens
  MOD_RES (1)..(1): Any amino acid
XDVTRLPSPTSPFSSLSQDQAATSKATLSSTSGLDLMSESGEGEISPQREVSRSQDQFSDMRISINQTPGKSLDFGFTIKWDIPGIFVASVEAGSPAEFSQLQVDDEIIAINNTKFSYNDSKEWEEAMAKAQETGHLVMDVRRYGKADWGKDQPSLPFIRHKTLNLTSMATKIIGSPETKWIDATSGIYNSEKSSNLSVTTDFSESLQSSNIESKEINGIHDESNAFESKGSSDSVVPDLPVPTISAPSRWVWDQEEERKRQERWQKEQDRLLQEKYQREQEKLREEWQRAKQEAERENSKYLDE

SEQ ID NO: 95742 - protein, 131 aa, Homo sapiens
MAAEIDFLREQNRRLNEDFRRYQMESFSKYSSVQKAVCQGEGDDTFENLVFDQSFLAPLVTEYDKHLGELNGQLKYYQKQVGEMKLQLENVIKENERVLLCLPGWSAVVRSRLTASSASRIRAILLPQPPQ

SEQ ID NO: 95743 - protein, 653 aa, Homo sapiens
MRAGRGATPARELFRDAAFPAADSSLFCDLSTPLAQFREDITWRRPQEICATPRLFPDDPREGQVKQGLLGDCWFLCACAALQKSRHLLDQVIPPGQPSWADQEYRGSFTCRIWQFGRWVEVTTDDRLPCLAGRLCFSRCQREDVFWLPLLEKVYAKVHGSYEHLWAGQVADALVDLTGGLAERWNLKGVAGSGGQQDRPGRWEHRTCRQLLHLKDQCLISCCVLSPRAGARELGEFHAFIVSDLRELQGQAGQCILLLRIQNPWGRRCWQGLWREGGEGWSQVDAAVASELLSQLQEGEFWVEEEEFLREFDELTVGYPVTEAGHLQSLYTERLLCHTRALPGAWVKGQSAGGCRNNSGFPSNPKFWLRVSEPSEVYIAVLQRSRLHAADWAGRARALVGDSHTSWSPASIPGKHYQAVGLHLWKVEKRRVNLPRVLSMPPVAGTACHAYDREVHLRCELSPGYYLAVPSTFLKDAPGEFLLRVFSTGRVSLSAIRAVAKNTTPGAALPAGEWGTVQLRGSWRVGQTAGGSRNFASYPTNPCFPFSVPEGPGPRCVRITLHQHCRPSDTEFHPIGFHIFQVPEGGRSQDAPPLLLQEPLLSCVPHRYAQEVSRLCLLPAGTYKVVPSTYLPDTEGAFTVTIATRIDRSPSWQ

SEQ ID NO: 95744 - protein, 69 aa, Homo sapiens
  MOD_RES (1)..(1): Any amino acid
XVGKSCLLLQFTDKRFQPVHDLTIGTKHLGAQEAETVKSYPAAGAVVLASHLLGWNGHRCRVRCSNDNY

SEQ ID NO: 95745 - protein, 245 aa, Homo sapiens
  MOD_RES (1)..(1): Any amino acid
XGIFQVLGRMKMDMVNYTIQSLQPHLQEHSIQYERAKFQELLNKQPSLLNHTTKWLTQAAGDLTMSPPTCPDTSDSSSVAGPSPNEAANNPEPLSPTMVLCQGFLNLLLWDLENEEFPETLLMDRTRLQELKSQLHQLTVMASVLLVASSFSGSVLFGSPQFVDKLKRITKSLLEDFHSRPEEAILTVSEQVSQEIHQSLKNMGLVALSSDNTASLMGQLQNIAKKENCVCSVIAQALETKVESV

SEQ ID NO: 95746 - protein, 89 aa, Homo sapiens
MSTRKRRGGAINSRQAQKRTREATSTPEISLEAEPIELVETAGDEIVDLTCESLEPVVVDLTHNDSVVIVDGEWFRFLFHWVWRGNWHR

SEQ ID NO: 95747 - protein, 70 aa, Homo sapiens
MSLQMVTVSNNIALIQPGFSLMNFDGQVFFFGQKGWPKRSCPTGVFHLDVKHNHVKLKPTIFSKDSCYLP

SEQ ID NO: 95748 - protein, 600 aa, Homo sapiens
MREQLKGHETQTTCWDHPKMTELYQSLADLNNVRFSAYRTAMKLRRLQKALCLDLLSLSAACDALDQHNLKQNDQPMDILQIINCLTTIYDRLEQEHNNLVNVPLCVDMCLNWLLNVYDTGRTGRIRVLSFKTGIISLCKAHLEDKYRYLFKQVASSTGFCDQRRLGLLLHDSIQIPRQLGEVASFGGSNIEPSVRSCFQFANNKPEIEAALFLDWMRLEPQSMVWLPVLHRVAAAETAKHQAKCNICKECPIIGFRYRSLKHFNYDICQSCFFSGRVAKGHKMHYPMVEYCTPTTSGEDVRDFAKVLKNKFRTKRYFAKHPRMGYLPVQTVLEGDNMETLAEMENSNGSYLNDSISPNESIDDEHLLIQHYCQSLNQDSPLSQPRSPAQILISLESEERGELERILADLEEENRNLQAEYDRLKQQHEHKGLSPLPSPPEMMPTSPQSPRDAELIAEAKLLRQHKGRLEARMQILEDHNKQLESQLHRLRQLLEQPQAEAKVNGTTVSSPSTSLQRSDSSQPMLLRVVGSQTSDSMGEEDLLSPPQDTSTGLEEVMEQLNNSFPSSRGHNVGSLFHMADDLGRAMESLVSVMTDEEGAE

SEQ ID NO: 95749 - protein, 334 aa, Homo sapiens
  MOD_RES (1)..(1): Any amino acid
XKKKKKGRMKKEDNIQAKEENMDTSNTSISKMKRSRPTSEGSDIESTEPQKQCSKKKKKRDRVEASSLPEVRTGKRKRSSSEDAESLAPRSKVKKIIQKDIIKEASEASKENRAPCLNGELFYLFQDIEISTEEEKDTGDLKDSSLLKTKRKHKKKHKERHKMGEEVIPLRVLSKSEWMDLKKEYLALQKASMASLKKTISQIKSESEMETDSGVPQNTGMKNEKTANREECRTQEKVNATGPQFVSGVIVKIISTEPLPGRKQVRDTLAAISEVLYVDLLEGDTECHARFKTPEDAQAVINAYTEINKKHCWKLEILSGDHEQRYWQKILVDR

SEQ ID NO: 95750 - protein, 725 aa, Homo sapiens
MAGQMPHSHQYSDRRQPNISDQQVSALSYSDQIQQPLTNQRRMPQTFRDPATAPLRKLSVDLIKTYKHINEVYYAKKKRRHQQGQGDDSSHKKERKVYNDGYDDDNYDYIVKNGEKWMDRYEIDSLIGKGSFGQVVKAYDRVEQEWVAIKIIKNKKAFLNQAQIEVRLLELMNKHDTEMKYYIVHLKRHFMFRNHLCLVFEMLSYNLYDLLRNTNFRGVSLNLTRKFAQQMCTALLFLATPELSIIHCDLKPENILLCNPKRSAIKIVDFGSSCQLGQRIYQYIQSRFYRSPEVLLGMPYDLAIDMWSLGCILVEMHTGEPLFSGANEVDQMNKIVEVLGIPPAHILDQAPKARKFFEKLPDGTWNLKKTKDGKREYKPPGTRKLHNILGVETGGPGGRRAGESGHTVADYLKFKDLILRMLDYDPKTRIQPYYALQHSFFKKTADEGTNTSNSVSTSPAMEQSQSSGTTSSTSSSSGGSSGTSNSGRARSDPTHQHRHSGGHFTAAVQAMDCETHSPQVRQQFPAPLGWSGTEAPTQVTVETHPVQETTFHVAPQQNALHHHHGNSSHHHHHHHHHHHHHGQQALGNRTRPRVYNSPTNSSSTQDSMEVGHSHHSMTSLSSSTTSSSTSSSSTGNQGNQAYQNRPVAANTLDFGQNGAMDVNLTVYSNPRQETGIAGHPTYQFSANTGPAHYMTEGHLTMRQGADREESPMTGVCVQQSPVASS

SEQ ID NO: 95751 - protein, 121 aa, Homo sapiens
MENEPDHENVEQSLCAKTSEEELNKSFNLEASLSKFSYIDMDKELEFKNDLIDDKEFDIPQVDTPPTLESILNETDDEDESFILEDPTLLNIDTIDSHSYDTSSVASSDSGDRTNLKRKKK

SEQ ID NO: 95752 - protein, 1049 aa, Homo sapiens
MNGRLHLGHTFSLSKCESKAAAKAGSSKYQWGIMKSLGLSDEEIVKFSEAEHWLDYFPPLAIQDLKRMGLKVDWRRSFITTDVNPYYDSFVRWQFLTLRERNKIKFGKRYTIYSPKDGQPCMDHDRQTGEGVGPQEYTLLKLKVLEPYPSKLSGLKGKNIFLVAATLRPETMFGQTNCWVRPDMKYIGFETVNGDIFICTQKAARNMSYQGFTKDNGVVPVVKELMGEEILGASLSAPLTSYKVIYVLPMLTIKEDKGTGVVTSVPSDSPDDIAALRDLKKKQALRAKYGIRDDMVLPFEPVPVIEIPGFGNLSAVTICDELKIQSQNDREKLAEAKEKIYLKGFYEGIMLVDGFKGQKVQDVKKTIQKKMIDAGDALIYMEPEKQVMSRSSDECVVALCDQWYLDYGEENWKKQTSQCLKNLETFCEETRRNFEATLGWLQEHACSRTYGLGTHLPWDEQWLIESLSDSTIYMAFYTVAHLLQGGNLHGQAESPLGIRPQQMTKEVWDYVFFKEAPFPKTQIAKEKLDQLKQEFEFWYPVDLRVSGKDLVPNHLSYYLYNHVAMWPEQSDKWPTAVRANGHLLLNSEKMSKSTGNFLTLTQAIDKFSADGMRLALADAGDTVEDANFVEAMADAGILRLYTWVEWVKEMVANWDSLRSGPASTFNDRVFASELNAGIIKTDQNYEKMMFKEALKTGFFEFQAAKDKYRELAVEGMHRELVFRFIEVQTLLLAPFCPHLCEHIWTLLGKPDSIMNASWPVAGPVNEVLIHSSQYLMEVTHDLRLRLKNYMMPAKGKKTDKQPLQKPSHCTIYVAKNYPPWQHTTLSVLRKHFEANNGKLPDNKVIASELGSMPELKKYMKKVMPFVAMIKENLEKMGPRILDLQLEFDEKAVLMENIVYLTNSLELEHIEVKFASEAEDKIREDCCPGKPLNVFRIEPGVSVSLVNPQPSNGHFSTKIEIRQGDNCDSIIRRLMKMNRGIKDLSKVKLMRFDDPLLGPRRVPVLGKEYTEKTPISEHAVFNVDLMSKKIHLTENGIRVDIGDTIIYLVH

SEQ ID NO: 95753 - protein, 94 aa, Homo sapiens
MLCWGYWSLGQPGISTNLQGIVAEPQVCGFISDRSVKEVACGGNHSVFLLEDGEVYTCGLNTKGQLGHEREGNKPEQIGALADQHIIHVACGES

SEQ ID NO: 95754 - protein, 122 aa, Homo sapiens
MSVAIRKRSWEEHVTHWMGQPFNSDDRNTACHHGLVADSLQASMEKDATLNVDRKEKCVSLPDCCHGSELRDFPGRPMGHLSKDVDENDSHEGEDQFLSLEASTETLVHVSDEDNNADLCLT

SEQ ID NO: 95755 - protein, 187 aa, Homo sapiens
MADSVKTFLQDLARGIKDSIWGICTISKLDARIQQKREEQRRRRASSVLAQRRAQSIERKQESEPRIVSRIFQCCAWNGGVFWFSLLLFYRVFIPVLQSVTARIIGDPSLHGDVWSWLEFFLTSIFSALWVLPLFVLSKVVNAIWFQDIADLAFEVSGRKPHPFPSVSKIIADMLFNLLLQALFLIQ

SEQ ID NO: 95756 - protein, 166 aa, Homo sapiens
  MOD_RES (1)..(1): Any amino acid
XHSGICELHCPALVTYNTDTFESMPNPEGRYTFGASCVTACPYNYLSTDVGSCTLVCPLHNQEVTAEDGTQRCEKCSKPCARVCYGLGMEHLREVRAVTSANIQEFAGCKKIFGSLAFLPESFDGVSLCQQAGVQWYDLGSLQPLPPGFKQFSCLSLLSSWDYRDP

SEQ ID NO: 95757 - protein, 40 aa, Homo sapiens
MENFSLLSISGPPISSSALSAFPDIMFSRATSLPGKLWCH

SEQ ID NO: 95758 - protein, 121 aa, Homo sapiens
MATLGHTFPFYAGPKPTFPMDTTLASIIMIFLTALATFIVILPGIRGKTRLFWLLRVVTSLFIGAAILAVNFSSEWSVGQVSTNTSYKAFSSEWISADIGLQVGLGGVNITLTGTPVQQLN

SEQ ID NO: 95759 - protein, 113 aa, Homo sapiens
MLTAVPSHLFSAKNGRVDSEDRRSRHCPYLDTINSFSPFPTGRGLKSHAYIHSVQFSHHVFLNLHTLKFYCLPDNYEIIDSSLEDITYVLKPTFTKQQIANLDKQAKLSRAYD

SEQ ID NO: 95760 - protein, 160 aa, Homo sapiens
MVDKMDQDLKISQKHINSIKSVFGGLVNYFKSKPVETPPEQNGTLTSQPNNRLKEAISTSKEQEAKYQASHPNLRKLDDTDPVPRGAGSAMSTDAYPKNPHLRAYHQKIDSNLDELSMGLGRLKDIALGMQTEIEEQDDILDRLTTKVDKLDVNIKSTER

SEQ ID NO: 95761 - protein, 135 aa, Homo sapiens
MMYMPGSSDPRSQPINLNHYATKKSVAESMLDVALFMSNAMRLKAVLEQGPSSHYYTTLVTLISLSLLLQVVIGVLLVVIARLNLNEVEKQWRLNQLNNAATILVFFTVVINVFITAFGAHKTGFLAARASRNPL

SEQ ID NO: 95762 - protein, 142 aa, Homo sapiens
MHCIFVGAESLFLKSLIQDTCADLCILDIGLLGIRGSAEAVVMARSHIQQFVKLFENKENLPSSQKESEVKREFKQFVEAHADNYTMDLLILPTSLKKELLTLTQGEENLFETGDDEVIEMRDSQQTEFTQNAATGLNISRD

SEQ ID NO: 95763 - protein, 118 aa, Homo sapiens
MAWQGLVLAACLLMFPSTTADCLSRCSLCAVKTQDGPKPINPLICSLQCQAALLPSEEWERCQSFLSFFTPSTLGLNDKEDLGSKSVGEGPYSELAKLSGSFLKELEKSKFLPSISTK

SEQ ID NO: 95764 - protein, 202 aa, Homo sapiens
  MOD_RES (1)..(1): Any amino acid
XSSLSVRGAFSTPLGLSDLSRASVTKVTGPRNCALRHYIGINLTDPMFRGIYRGVQKHQDDLQDVIGRAVEIGVKKFMITGGNLQDSKDALHLAQTNGMFFSTVGCHPTRCGEFEKNNPDLYLKELLNLAENNKGKVVAIGECGLDFDRLQFCPKDTQLKYFEKQFELSEQTKLPMFLHCRNSHAEFLDIMKRNRDRCVGGV

SEQ ID NO: 95765 - protein, 137 aa, Homo sapiens
MMTKMLHVAHWNSAKYSSLAEAASKADGLAVIGVLMKVGEANPKLQKVLDALQAIKTKGKRAPFTNFDPSTLLPSSLDFWTYPGSLTHPPLYESVTWIICKESISVSSEQLAQFRSLLSNVEGDNAVPMQHNNRPTQ

SEQ ID NO: 95766 - protein, 223 aa, Homo sapiens
MRGPGQADCAVAIGRPLGEVVTLRVLESSLNCSAGDMLLLWGRLTWRKMCRKLLDMTFSSKTNTLVVRQRCGRPGGGVLLRYGSQLAPETFYRECDMQLFGPWGEIVSPSLSPATSNAGGCRLFINVAPHARIAIHALATNMGAGTEGANASYILIRDTHSLRTTAFHGQQVLYWESESSQAEMEFSEGFLKAQASLRGQYWTLQSWVPEMQDPQSWKGKEGT

SEQ ID NO: 95767 - protein, 58 aa, Homo sapiens
MAADSEPESEVFEITDFTTASEWERFISKVEEVLNDWKLIGNSLGKPLEKVRSICWCL

SEQ ID NO: 95768 - protein, 108 aa, Homo sapiens
MGCTYSSPPEEPALRRTSSVRESSFVEKMKKTGRNIIVFYGSQTGTAEEFANRLSKDAHRYGMRGMSADPEEYDLADLSSLPEIDNALVVFCMATYGEGDPTDNAQDF

SEQ ID NO: 95769 - protein, 301 aa, Homo sapiens; identical to SEQ ID NO: 8780

SEQ ID NO: 95770 - protein, 165 aa, Homo sapiens
MDFLVLFLFYLASVLMGLVLICVCSKTHSLKGLARGGAQIFSCIIPECLQRAVHGLLHYLFHTRNHTFIVLHLVLQGMVYTEYTWEVFGYCQELELSLHYLLLPYLLLGVNLFFFTLTCGTNPGIITKANELLFLHVYEFDEVMFPKNVRCSTCDLRKPARSKHC

SEQ ID NO: 95771 - protein, 183 aa, Homo sapiens
GLMGGDLTSGAGTSAGNGYGNPRNSPGLLVSPGNLNKNMQAKSPPPMNLGMNNRKPDLRVLIPPGSKNTMPSVNQRINNSQSAQSLATPVVSVATPTLPGQGMGGYPSAISTTYGTEYSLSSADLSSLSGFNTASALHLGSVTGWQQQHLHNMPPSALSQLGPYHHPFEIPTTHAPRGGEISC

SEQ ID NO: 95772 - protein, 89 aa, Homo sapiens
  MOD_RES (1)..(1): Any amino acid
XVVDYFLRRLDLPIERQPRKMLMKWKEMADRYDRLLETCSIALVGKYTKFSDSYASVIKALEHSALAINHKLEIKNAQPGVTSLLFSPV

SEQ ID NO: 95773 - protein, 49 aa, Homo sapiens
MAAQQRDCGGAAQLAGPAAEADPLGRFTCPVCLEVYEKPVQVPCGHVNV

SEQ ID NO: 95774 - protein, 85 aa, Homo sapiens
  MOD_RES (1)..(1): Any amino acid
XLYRDVMLENYRNLVSLGICLPDLSVTSMLEQKRDPWTLQSEEKIANDPDGRECIKGVNTDSPLLQCITSVPCVFCTASMIHTIP

SEQ ID NO: 95775 - protein, 42 aa, Homo sapiens
MALVTVQRSPTPSTTSSPCASRAELGFLVQGGRFPVIVRKNL

SEQ ID NO: 95776 - protein, 1554 aa, Homo sapiens
  MOD_RES (1)..(1): Any amino acid
XLRTTKKKKKDHQDYCEVCQQGGEIILCDTCPRAYHMVCLDPDMEKAPEGKWSCPHCEKEGIQWEAKEDNSEGEEILEEVGGDLEEEDDHHMEFCRVCKDGGELLCCDTCPSSYHIHCLNPPLPEIPNGEWLCPRCTCPALKGKVQKILIWKWGQPPSPTPVPRPPDADPNTPSPKPLEGRPERQFFVKWQGMSYWHCSWVSELQLELHCQVMFRNYQRKNDMDEPPSGDFGGDEEKSRKRKNKDPKFAEMEERFYRYGIKPEWMMIHRILNHSVDKKGHVHYLIKWRDLPYDQASWESEDVEIQDYDLFKQSYWNHRELMRGEEGRPGKKLKKVKLRKLERPPETPTVDPTVKYERQPEYLDATGGTLHPYQMEGLNWLRFSWAQGTDTILADEMGLGKTVQTAVFLYSLYKEGHSKGPFLVSAPLSTIINWEREFEMWAPDMYVVTYVGDKDSRAIIRENEFSFEDNAIRGGKKASRMKKEASVKFHVLLTSYELITIDMAILGSIDWACLIVDEAHRLKNNQSKFFRVLNGYSLQHKLLLTGTPLQNNLEELFHLLNFLTPERFHNLEGFLEEFADIAKEDQIKKLHDMLGPHMLRRLKADVFKNMPSKTELIVRVELSPMQKKYYKYILTRNFEALNARGGGNQVSLLNVVMDLKKCCNHPYLFPVAAMEAPKMPNGMYDGSALIRASGKLLLLQKMLKNLKEGGHRVLIFSQMTKMLDLLEDFLEHEGYKYERIDGGITGNMRQEAIDRFNAPGAQQFCFLLSTRAGGLGINLATADTVIIYDSDWNPHNDIQAFSRAHRIGQNKKVMIYRFVTRASVEERITQVAKKKMMLTHLVVRPGLGSKTGSMSKQELDDILKFGTEELFKDEATDGGGDNKEGEDSSVIHYDDKAIERLLDRNQDETEDTELQGMNEYLSSFKVAQYVVREEEMGEEEEVEREIIKQEESVDPDYWEKLLRHHYEQQQEDLARNLGKGKRIRKQVNYNDGSQEDRDWQDDQSDNQSDYSVASEEGDEDFDERSEAPRRPSRKGLRNDKDKPLPPLLARVGGNIEVLGFNARQRKAFLNAIMRYGMPPQDAFTTQWLVRDLRGKSEKEFKAYVSLFMRHLCEPGADGAETFADGVPREGLSRQHVLTRIGVMSLIRKKVQEFEHVNGRWSMPELAEVEENKKMSQPGSPSPKTPTPSTPGDTQPNTPAPVPPADGIKIEENSLKEEESIEGEKEVKSTAPETAIECTQAPAPASEDEKVVVEPPEGEEKVEKAEVKERTEEPMETEPKGAADVEKVEEKSAIDLTPIVVEDKEEKKEEEEKKEVMLQNGETPKDLNDEKQKKNIKQRFMFNIADGGFTELHSLWQNEERAATVTKKTYEIWHRRHDYWLLAGIINHGYARWQDIQNDPRYAILNEPFKGEMNRGNFLEIKNKFLARRFKLLEQALVIEEQLRRAAYLNMSEDPSHPSMALNTRFAEVECLAESHQHLSKESMAGNKPANAVLHKVLKQLEELLSDMKADVTRLPATIARIPPVAVRLQMSERNILSRLANRAPEPTPQQVAQQQ

SEQ ID NO: 95777 - protein, 18 aa, Homo sapiens
MNLHVYISEHEHFTDFNA

SEQ ID NO: 95778 - protein, 169 aa, Homo sapiens
  MOD_RES (1)..(1): Any amino acid
XRDPSIHYSPQFHKVTVAGISIYCYAWLVPLALWGFLRWRKGVQERMGPYTFLETVCIYGYSLFVFIPMVVLWLIPVPWLQWLFGALALGLSAAGLVFTLWPVVREDTRLVATVLLSVVVLLHALLAMGCKLYFFQSLPPENVAPPPQITSLPSNIALSPTLPQSLAPS

SEQ ID NO: 95779 - protein, 279 aa, Homo sapiens
  MOD_RES (1)..(1): Any amino acid
XRAAPARYLGEVTGPATWSAREKRQLVRLLQARQGQPEPDATELARELRGRSEAEIRVFLQQLKGRVAREAIQKVHPGGLQGPRRREAQPPAPIEVWTDLAEKITGPLEEALAVAFSQVLTIAATEPVTLLHSKPPKPTQARGKPLLLSAPGGQEDPAPEIPSSAPAAPSSAPRTPDPAPEKPSESSAGPSTEEDFAVDFEKIYKYLSSVSRSGRSPELSAAGEKGEGGGRSRGIKGPWQQAGVSPYPSPPSITRVRCGPRPAHVTSRGAATPALHSPG

SEQ ID NO: 95780 - protein, 122 aa, Homo sapiens
MLKSLDVGNSRSTILESQLLQITRFAYKVNYNLTFEDWQPPFACEVKSFRFTPRVQRLNELEAMTRVRLDFLDQLAKFWELQGSTLKIPVVERKILDLYALSKIVASKGGFEMVTKEKKWSK

SEQ ID NO: 95781 - protein, 352 aa, Homo sapiens
MLLLLLHKEAALEPQGPAVGYNSLPVSDDHHVSGIQARKKQQSVFWIKTEDQPTFNLLRKGIMDIEAYLERIGYKKSRNKLDLETLTDILQHQIRAVPFENLNIHCGDAMDLGLEAIFDQVVRRNRGGWCLQVNHLLYWALTTIGFETTMLGGYVYSTPAKKYSTGMIHLLLQVTIDGRNYIVDAGFGRSYQMWQPLELISGKDQPQVPCVFRLTEENGFWYLDQIRREQYIPNEEFLHSDLLEDSKYRKIYSFTLKPRTIEDFESMNTYLQTSPSSVFTSKSFCSLQTPDGVHCLVGFTLTHRRFNYKDNTDLIEFKTLSEEEIEKVLKNIFNISLQRKLVPKHGDRFFTI

SEQ ID NO: 95782 - protein, 39 aa, Homo sapiens
AERRPLQPRTEAAAAPAGRGTVKTVVCKAETPACMESAF

SEQ ID NO: 95783 - protein, 95 aa, Homo sapiens
  MOD_RES (1)..(1): Any amino acid
XKEAQVAARVWREFEMKRMDPGFLDKQARCHYLKGKLRHLKTQIQKFDDQGDSEGSVSPYQGSLSPGLQMPLQFGLSSDSPSSRKAFQDFLLWVL

SEQ ID NO: 95784 - protein, 139 aa, Homo sapiens
RPIYPNRREREAMILSSYAGILMNSIPIEEVFKIYGADSSADSGTIKVPRVSSLCLSLHPFAMLTAPKAAAYARKQIETGFHRGLDLLTSRSARLGLPKRWDYRLEPPRPAQLLGHLENWNCTMELHNRFSGSRREASS

SEQ ID NO: 95785 - protein, 114 aa, Homo sapiens
MAASQQQASAASSAAGVSGPSSAGGPGPQQQPQPPAQLVGPAQSGLLQQQQQDFDPVQRYKMLIPQLKESLQTLMKVAAQNLIQNTNIDNGQVSLCHPGWTTVARSWLIAALNT

SEQ ID NO: 95786 - protein, 284 aa, Homo sapiens
VRAPSPEEMEEEAIASLPGEETEDMDFLSGLELADLLDPRQPDWHLDPGLSSPGPLSSSGGGSDSGGLWRGDDDDEAAAAEMQRFSDLLQRLLNGIGGCSSSSDSGSAEKRRRKSPGGGGGGGSGNDNNQAATKSPRKAAAAAARLNRLKKKEYVMGLESRVRGLAAENQELRAENRELGKRVQALQEESRYLRAVLANETGLARLLSRLSGVGLRLTTSLFRDSPAGDHDYALPVGKQKQDLLEEDDSAGGVCLHVDKDKVSVEFCSACARKASSSLKIFFFR

SEQ ID NO: 95787 - protein, 117 aa, Homo sapiens
MLSSVLAALIGIAGSGYCVIVAALGLAEGPLCLDSLGQWNYTFASTEGQYLLDTSTWSECTEPKHIVEWNVSLFSILLALGGIEFILCLIQVINGVLGGICGFCCSHQQVRTCMKMS

SEQ ID NO: 95788 - protein, 438 aa, Homo sapiens
MSLTVVSMACVGFFLLQGAWPLMGGQDKPFLSARPSTVVPRGGHVALQCHYRRGFNNFMLYKEDRSHVPIFHGRIFQESFIMGPVTPAHAGTYRCRGSRPHSLTGWSAPSNPVVIMVTGNHRKPSLLAHPGPLLKSGETVILQCWSDVMFEHFFLHREGISEDPSRLVGQIHDGVSKANFSIGPLMPVLAGTYRCYGSVPHSPYQLSAPSDPLDIVITGLYEKPSLSAQPGPTVQAGENVTLSCSSWSSYDIYHLSREGEAHERRLRAVPKVNRTFQADFPLGPATHGGTYRCFGSFRALPCVWSNSSDPLLVSVTGICRHLHVLIGTSVVIFLFILLLFFLLYRWCSNKKNAAVMDQEPAGDRTVNRQDSDEQDPQEVTYAQLDHCVFIQRKISRPSQRPKTPLTDTSVYTELPNAEPRSKVVSCPRAPQSGLEGVF

SEQ ID NO: 95789 - protein, 7 aa, Homo sapiens
MQLYSAR

SEQ ID NO: 95790 - protein, 90 aa, Homo sapiens
MARIPVQLMTRAAQLYTLPHAMAMTRLLLLDHGADPNQRDGLGNTPLHLAACTNHVPVITTLLRGGARVDALDRAGRTPLHLAKSKLNIL

SEQ ID NO: 95791 - protein, 198 aa, Homo sapiens
MDPTALVEAIVEEVACPICMTFLREPMSIDCGHSFCHSCLSGLWEIPGESQNWGYTCPLCRAPVQPRNLRPNWQLANVVEKVRLLRLHPGMGLKGDLCERHGEKLKMFCKEDVLIMCEACSQSPEHEAHSVVPMEDVAWEYKIQVETRKQSIVWEFEKYQRLLEKKQPPHRQLGAEVAAALASLQREAAETMQKLELN

SEQ ID NO: 95792 - protein, 162 aa, Homo sapiens
MTQEEFRSLFGSIGEIESCKLVRDKITGQSLGYGFVNYIDPKDAEKAINTLNGLRLQTKTIKVSYARPSSASIRDANLYVSGLPKTMTQKELEQLFSQYGRIITSRILVDQVTGVSRGVGFIRFDKRIEAEEAIKGLNGQKPSGATEPITVKFANNPSQKSS

SEQ ID NO: 95793 - protein, 96 aa, Homo sapiens
MIEKMQGSRMDEQRCSFPPPLKTEEDYIPYPSVHEVLGREGPFPLILLPQFGGYWIEGTNHEITSIPETEPLQSPTTKVKLECNPTARIYRKHFLG

SEQ ID NO: 95794 - protein, 234 aa, Homo sapiens
ARRAFVPQLRSGKFNVLLTTYEYIIKDKHILAKIRWKYMIVDEGHRMKNHHCKLTQVLNTHYVAPRRLLLTGTPLQNKLPELWALLNFLLPTIFKSCSTFEQWFNAPFAMTGEKVDLNEEETILIIRRLHKVLRPFLLRRLKKEVEAQLPEKVEYVIKCDMSALQRVLYRHMQAKGVLLTDGSEKDKKGKGGTKTLMNTIMQLRKICNHPYMFQHIEVSPPRLGRLRPCCLLSS

SEQ ID NO: 95795 - protein, 133 aa, Homo sapiens
MSRGLPKQKPIEGVKQVIVVASGKGGVGKSTTAVNLALALAANDSSKAIGLLDVDVYGPSVPKMMNLKGNPELSQSNLMRPLLNYGIACMSMGFLVEESEPVVWRGLMVMSAIEKLLRQVDWGQLDYLVVDMP

SEQ ID NO: 95796 - protein, 307 aa, Homo sapiens
MFCCLGYEWLSGGCKTWHSAWVINTLADHHHRGTDFGGSPWLRIIIAFPRSYKVVLTLWTVYLWLSFLKTIFQSENGHDVSTDVQQRARRSNRRRQEGNKIGLKDVITLRRHVETKGRAKIRKMKVTTKINHHDKINGKRKTAKKQKLSVKECEHAEKERQVSEAEENGKLDMKEIHTYMKMFQRAQELRRRAEDYHKCKIPPSARKALCNWVRMAAAEHRHSSGLPYWPYLTAETLKNRMGHQPPPPTQQHSITDNSLSLKTPPECLLTPLPPSADDNLKTPPECLLTPLPPSAPPSADDNLKTPP

SEQ ID NO: 95797 - protein, 299 aa, Homo sapiens
FSIPEFQRAYVGNLPRIFDYSPLDPTQDFNTQMTKLGHGLLSGQYSKPPVKSELIEQVMKEEHKPQQNGISPRMFKAFVSKSHPEFSSNRQQDAQEFFLHLVNLVERNRIGSENPSDVFRFLVEERIQCCQTRKVRYTERVDYLMQLPVAMEAATNKDELIAYELTRREAEANRRPLPELVRAKIPFSACLQAFSEPENVDDFWSSALQAKSAGVKTSRFASFPEYLVVQIKKFTFGLDWVPKKFDVSIDMPDLLDINHLRARGLQPGEEELPDISPPIVIPDDSKASDIDESSVMQLA

SEQ ID NO: 95798 - protein, 53 aa, Homo sapiens
MAIHKALVMCLGLPLFLFPGAWAQGHVPPGCSQGLNPLYYNLCDRSGAWGIVL

SEQ ID NO: 95799 - protein, 40 aa, Homo sapiens
MPGGLEKTCHQCISKIASNGVSPVVRLHQDEAAAVQGRGD

SEQ ID NO: 95800 - protein, 160 aa, Homo sapiens
MKLIILEHYSQASEWAAKYIRNRIIQFNPGPEKYFTLGLPTGSTPLGCYKKLIEYYKNGDLSFKYVKTFNMDEYVGLPRDHPESYHSFMWNNFFKHIDIHPENTHILDGNAVDLQAECDAFEEKIKAAGGIELFVGGIGPDGHIAFNEPGSSLVSRTRVK

SEQ ID NO: 95801 - protein, 194 aa, Homo sapiens
LLRVDIISWGCTITALEVKDRQGRASDVVLGFAELEGYLQKQPYFGAVIGRVANRIAKGTFKVDGKEYHLAINKEPNSLHGGVRGFDKVLWTPRVLSNGVQFSRISPDGEEGYPGELKVWVTYTLDGGELIVNYRAQASQATPVNLTNHSYFNLAGQASPNINDHEVTIEADTYLPVDETLIPTGGTNRRFLQG

SEQ ID NO: 95802 - protein, 764 aa, Homo sapiens
MNFIKDNSRALIQRMGMTVIKQITDDLFVWNVLNREEVNIICCEKVEQDAARGIIHMILKKGSESCNLFLKSLKEWNYPLFQDLNGQSLFHQTSEGDLDDLAQDLKDLYHTPSFLNFYPLGEDIDIIFNLKSTFTEPVLWRKDQHHHRVEQLTLNGLLQALQSPCIIEGESGKGKSTLLQRIAMLWGSGKCKALTKFKFVFFLRLSRAQGGLFETLCDQLLDIPGTIRKQTFMAMLLKLRQRVLFLLDGYNEFKPQNCPEIEALIKENHRFKNMVIVTTTTECLRHIRQFGALTAEVGDMTEDSAQALIREVLIKELAEGLLLQIQKSRCLRNLMKTPLFVVITCAIQMGESEFHSHTQTTLFHTFYDLLIQKNKHKHKGVAASDFIRSLDHCGDLALEGVFSHKFDFELQDVSSVNEDVLLTTGLLCKYTAQRFKPKYKFFHKSFQEYTAGRRLSSLLTSHEPEEVTKGNGYLQKMVSISDITSTYSSLLRYTCGSSVEATRAVMKHLAAVYQHGCLLGLSIAKRPLWRQESLQSVKNTTEQEILKAININSFVECGIHLYQESTSKSALSQEFEAFFQGKSLYINSGNIPDYLFDFFEHLPNCASALDFIKLDFYGGAMASWEKAAEDTGGIHMEEAPETYIPSRAVSLFFNWKQEFRTLEVTLRDFSKLNKQDIRYLGKIFSSATSLRLQIKRCAGVAGSLSLVLSTCKNIYSLMVEASPLTIEDERHITSVTNLKTLSIHDLQNQRLPESNLFSFDRWSD

SEQ ID NO: 95803 - protein, 96 aa, Homo sapiens
MVAAKKTKKSLESINSRLQLVMKSGKYVLGYKQTLKMIRQGKAKLVILANNCPALSGNNIELGTACGKYYRVCTLAIIDPGDSDIIRSMPEQTGEK

SEQ ID NO: 95804 - protein, 168 aa, Homo sapiens
  MOD_RES (1)..(1): Any amino acid
XSQLKGVSTFMAEMLETASILRSATKDSLIIIDELGRGTSTYDGFGLAWAISEYIATKIGAFCMFATHFHELTALANQIPTVNNLHVTALTTEETLTMLYQVKKGVCDQSFGIHVAELANFPKHVIECAKQKALELEEFQYIGESQGYDIMEPAAKKCYLEREVVTIM

SEQ ID NO: 95805 - protein, 183 aa, Homo sapiens
  MOD_RES (1)..(1): Any amino acid
XLPVAAAAAAVVVPGVFVPPVSLPWPAGTASTSLLGPPPGLLTPPVATELSQNARHLQGGEKQRVFTGIVTSLHDYFGVVDEEVFFQLSVVKGRLPQLGEKVLVKAAYNPGQAVPWNAVKVQTLSNQPLLKSPAPPLLHVAALGQKQGILGAQPQLIFQPHRIPPLFPQKPLSLFQTSHTLHL

SEQ ID NO: 95806 - protein, 161 aa, Homo sapiens
  MOD_RES (1)..(1): Any amino acid
XCPTEIIAFGDRLEEFRSINTEVVACSVDSQFTHLAWINTPRRQGGLGPIRIPLLSDLTHQISKDYGVYLEDSGHTLRGLFIIDDKGILRQITLNDLPVGRSVDETLRLVQAFQYTDKHGEVCPAGWKPGSETIKPEDTMKAWWPRESYNPRSSWKAEVFR

SEQ ID NO: 95807 - protein, 670 aa, Homo sapiens
MVSWGRFICLVVVTMATLSLARPSFSLVEDTTLEPEGAPYWTNTEKMEKRLHAVPAANTVKFRCPAGGNPMPTMRWLKNGKEFKQEHRIGGYKVRNQHWSLIMESVVPSDKGNYTCVVENEYGSINHTYHLDVVERSPHRPILQAGLPANASTVVGGDVEFVCKVYSDAQPHIQWIKHVEKNGSKYGPDGLPYLKVLKAAGVNTTDKEIEVLYIRNVTFEDAGEYTCLAGNSIGISFHSAWLTVLPAPGREKEITASPDYLEIAIYCIGVFLIACMVVTVILCRMKNTTKKPDFSSQPAVHKLTKRIPLRRQVSAESSSSMNSNTPLVRITTRLSSTADTPMLAGVSEYELPEDPKWEFPRDKLTLGKPLGEGCFGQVVMAEAVGIDKDKPKEAVTVAVKMLKDDATEKDLSDLVSEMEMMKMIGKHKNIINLLGACTQDGPLYVIVEYASKGNLREYLRARRPPGMEYSYDINRVPEEQMTFKDLVSCTYQLARGMEYLASQKCIHRDLAARNVLVTENNVMKIADFGLARDINNIDYYKKTTNGRLPVKWMAPEALFDRVYTHQSDVWSFGVLMWEIFTLGGSPYPGIPVEELFKLLKEGHRMDKPANCTNELYMMMRDCWHAVPSQRPTFKQLVEDLDRILTLTTNEEYLDLSQPLEPYSPCYPDPR

SEQ ID NO: 95808 - protein, 111 aa, Homo sapiens
  MOD_RES (1)..(1): Any amino acid
XPLVKVQIFGVRLDTARQETNYVENNGFNPYWGQTLCFRVLVPELAMLRFVVMDYDWKSRNDFIGQYTLPWTCMQQGYRHIHLLSKDGISLRPASIFVYICIQEGLEGDES

SEQ ID NO: 95809 - protein, 229 aa, Homo sapiens
MAAATGAVAASAASGQAEGKKITDLRVIDLKSELKRRNLDITGVKTVLISRLKQAIEEEGGDPDNIELTVSTDTPNKKPTKGKGKKHEADELSGDASVEDDAFIKDCELENQEAHEQDGNDELKDSEEFGENEEENVHSKELLSAEENKRAHELIEAEGIEDIEKEDIESQEIEAQEGEDDTFLTAQDGEEEENEKDSEASKPKDGQDAIAQSPEKESKDYEMNANHKD

SEQ ID NO: 95810 - protein, 327 aa, Homo sapiens
MAWVKFLRKPGGNLGKVYQPGSMLSLAPTKGLLNEPGQNSCFLNSAVQVLWQLDIFRRSLRVLTGHVCQGDACIFCALKTIFAQFQHSREKALPSDNIRHALAESFKDEQRFQLGLMDDAAECFENMLERIHFHIVPSRDADMCTSKSCITHQKFAMTLYEQCVCRSCGASSDPLPFTEFVRYISTTALCNEVERMLERHERFKPEMFAELLQAANTTDDYRKCPSNCGQKIKIRRVLMNCPEIVTIGLVWDSEHSDLTEAVVRNLATHLYLPGLFYRVTDENAKNSELNLVGMICYTSQHYCAFAFHTKSSKWVFFDDANVKEIIP

SEQ ID NO: 95811 - protein, 129 aa, Homo sapiens
MMPNKYSIIRRFFKPHSIDRMKKFKRRLSLTLRGSQTIDESLSELAEQMTIEENSSKDNEPIVKNGRPPTSHSMHSFLHQYTGSFKKPPLRRPHSVIGGSLGSFMAMPRNGSRLDIVHENLKMGSDGES

SEQ ID NO: 95812 - protein, 174 aa, Homo sapiens
ESSYSLLAENSYVKMTCDIRGSLQEDSQVTVAIVLENRSSSILKGMELSVLDSLNARMARPQGSSVHDGVPVPFQLPPGVSNEAQYVFTIQSIVMAQKLKGTLSFIAKNDEGATHEKLDFRLHFSCSSYLITTPCYRIFWRRSVFTTIFPLWSEWTPAPPCTAAPSRATMSASW

SEQ ID NO: 95813 - protein, 132 aa, Homo sapiens
MNTLSLPLNIRRGGSDTNLNFDVPDGILDFHKVKLTADSLKQKILKVTEQIKIEQTSRDGNVAEYLKLVNNADKQQAGRIKQVFEKKNQKSAHSIAQLQKKLEQYHRKLREIEQNGASRSSKDISKDHLKDI

SEQ ID NO: 95814 - protein, 598 aa, Homo sapiens
GIGKGHLMREVDALDGLCSRICDQSGVHYKVLNRRKGPAVWGLRAQIDRKLYKQNMQEGAVEDLILTEPEPEHTGKCRVSGVVLVDGSTVYAESVILTTGTFLRGMIVIGLETHPAGRLGDQPSIGLAQTLEKLGFVVGRLKTGTPPRIAKESINFSILNKHIPDNPSIPFSFTNETVWIKPEDQLPCYLTHTNPRVDEIVLKNLHLNSHVKETTRGPRYCPSIESKVLRFPNRLHQVWLEPEGMDSDLIYPQGLSMTLPAELQEKMITCIRGLEKAKVIQPGYGVQYDYLDPRQITPSLETHLVQRLFFAGQINGTTGYEEAAAQGVIAGINASLRVSRKPPFVVSRTEGYIGVLIDDLTTLGTSEPYRMFTSRVEFRLSLRPDNADSRLTLRGYKDAGCVSQQRYERACWMKSSLEEGISVLKSIEFLSSKWKKLIPEASISTSRSLPVRALDVLKYEEVDMDSLAKAVPEPLKKYTKCRELAERLKIEATYESVLFHQLQEIKGVQQDEALQLPKDLDYLTIRDVSLSHEVREKLHFSRPQTIGAASRIPGVTPAAIINLLRFVKTTQRRQSAMNESSKTDQYLCDADRLQEREL

SEQ ID NO: 95815 - protein, 236 aa, Homo sapiens
MALPALGLDPWSLLGLFLFQLLQLLLPTTTAGGGGQGPMPRVRYYAGDERRALSFFHQKGLQDFDTLLLSGDGNTLYVGAREAILALDIQDPGVPRLKNMIPWPASDRKKSECAFKKKSNEELQDSYLLPISEDKVMEGKGQSPFDPAHKHTAVLVDGMLYSGTMNNFLGSEPILMRTLGSQPVLKTDNFLRWLHHDASFVAAIPSTQVVYFFFEETASEFDFFERLHTSRVARVC

SEQ ID NO: 95816 - protein, 466 aa, Homo sapiens
MADDAGLETPLCSEQFGSGEARGCRAAADGSLQWEVGGWRWWGLSRAFTVKPEGRDAGEVGASGAPSPPLSGLQAVFLPQGFPDSVSPDYLPYQLWDSVQAFASSLSGSLATQAVLLGIGVGNAKATVSAATATWLVKDSTGMLGRIVFAWWKGSKLDCNAKQWRLFADILNDVAMFLEIMAPVYPICFTMTVSTSNLAKCIVSVAGGATRAALTVHQARRNNMADVSAKDSSQETLVNLAGLLVSLLMLPLVSGCPGLGCFFFLTALHIYANYRAVRALVMETLNEGRLRLVLKHYLQRGEVLDPTAANRMEPLWTGFWPAPSLSLGVPLHRLVSSVFELQQLVEGHQESYLLCWDQSQNQVQVVLNQKAGPKTILRAATHGLMLGALQGDGPLPAELEELRNRVRAGPKKESWVVVKETHEVLDMLFPKFLKGLQDAGWKTEKHQLEVDEWRATWLLSPEKKVL

SEQ ID NO: 95817 - protein, 67 aa, Homo sapiens
MFHFISHLRDRIFASWAISGDQSFSLNSEGAERMATTGTPTADRGDAAATDDPAARFQVQKHSWDGL

SEQ ID NO: 95818 - protein, 170 aa, Homo sapiens
  MOD_RES (1)..(1): Any amino acid
XAPAPPKAEAKAKALKAKKAVLKGVHSHKKKKIRTSPTFRRPKTLRLRRQPKYPRKSAPRRNKLDHYAIIKFPLTTESAMKKIEDNNTLVFIVDVKANKHQIKQAVKKLYDIDVAKVNTLIRPDGEKKAYVRLAPDYDALDVANKVSFLPTNPLMLTPWVQMMHMLATKA

SEQ ID NO: 95819 - protein, 106 aa, Homo sapiens; identical to SEQ ID NO: 55080

SEQ ID NO: 95820 - protein, 178 aa, Homo sapiens
MQTCPLAFPGHVSQALGTLLFLAASLSAQNEGWDSPICTEGVVSVSWGENTVMSCNISNAFSHVNIKLRAHGQESAIFNEVAPGYFSRDGWQLQVQGGVAQLVIKGARDSHAGLYMWHLVGHQRNNRQVTLEVSGAEPQSAPDTGFWPVPAVVTAVFILLVALVMFAWYRCRCSQQRR

SEQ ID NO: 95821 - protein, 87 aa, Homo sapiens
MVYRYCCKLNKKLKPKNIFQSIPFLRKLEVKLVKVMAAHRKTCSFYRFCSEMTTDCYGDADCCGHYWASLATFIQFVKKENSALHLF

SEQ ID NO: 95822 - protein, 92 aa, Homo sapiens
MARTKQTARKSTGGKAPRKQLATKAARKSAPSTGGVKKPHRYRPGTVALREIRRYQKSTELLIRKLPFQRLVREIAQDFKTDLRFQSAAIGG

SEQ ID NO: 95823 - protein, 129 aa, Homo sapiens
MGGTWASKEPLRPRCRPINATLAVEKEGCPVCITVNTTICAGYCPTMTRVLQGVLPALPQVVCNYRDVRFESIRLPGCPRGVNPVVSYAVALSCQCALCRRSTTDCGGPKDHPLTCDDPRFQASSSSKA

SEQ ID NO: 95824 - protein, 37 aa, Homo sapiens
MAAGFKKRTAVLMEENLVNSEPQLSTSVQLVPQMVLL

SEQ ID NO: 95825 - protein, 50 aa, Homo sapiens
MAADIFPRKKPANSSSTSVQQYHQQNLSNNNLIPAPNWQGLYPTIRESMF

SEQ ID NO: 95826 - protein, 117 aa, Homo sapiens
MDDDANGDVDVEESDEFLREDLNYHDPTVKHSTFHGEDKLISVEDLWKAWKSSEVYNWTVDEVVQWLITYVELPQYEETFRKLQLSGHAMPRLAVTNTTMTGTVLKMTDRSHRQKLQ

SEQ ID NO: 95827 - protein, 287 aa, Homo sapiens
MDSFKVVLEGPAPWGFRLQGGKDFNVPLSISRLTPGGKAAQAGVAVGDWVLSIDGENAGSLTHIEAQNKIRACGERLSLGLSRAQPVQSKPQKASAPAADPPRYTFAPSVSLNKTARPFGAPPPADSAPQQNGQPLRPLVPDASKQRLMENTEDWRPRPGTGQSRSFRILAHLTGTEFMQDPDEEHLKKSRWLPGMRGTPGAASEAGALPRLPARDRTPANWTLLGEAALPIPTPVGPGIQLGSFHAPSHLPWGQQDPGWGVGPCQEAQPCRALNGRSCSQVPRTEA

SEQ ID NO: 95828 - protein, 102 aa, Homo sapiens
NTKNDRIFSEGIFLGIALLEGGNTQTQYSFYQQLHEQKKSEKFFKVLYDRMKAAQKEIRSTVTVNTIDLGNKKRDDDNELMTSGPRMREFWSWGDPKTALQD

SEQ ID NO: 95829 - protein, 103 aa, Homo sapiens
MRQRLLPSVTSLLLVALLFPGSSQARHVNHSATEALGELRERAPGQGTNGFQLLRHAVKRDLLPPRTPPYQVHISHQEARGPSFKICVGFLGPRWARGCSTGN

SEQ ID NO: 95830 - protein, 117 aa, Homo sapiens
MDPKQTTLLCLGDFPMPFISAKSSPVIPLDGSVKIQCQAIREAYLTQLMIIKNSTYREIGRRLKFWNETDPEFVIDHMDANKAGRYQCQYRIGHYRFRYSNTLELVVTDSIHQDYTT

SEQ ID NO: 95831 - protein, 194 aa, Homo sapiens
MLSSTLRVAVVCVSNVNRSMEAHSILRRKGLSVRSFGTESHVRLPGPRPNRPVVYDFATTYKEMYNDLLRKDRERYTRNGILHILGRNERIKPGPERFQECTDSFDVIFTCEESVYDTVVEDLCSREQQTFQPVHVINMEIQDTLEDATLGAFLICEICQCLQQSDDMEDNLEELLLQMEEKAGKSFLHTVCFY

SEQ ID NO: 95832 - protein, 421 aa, Homo sapiens
MIYFDDFSCQSWLYVLGQKRSDSYVLLEHSVKKAVHFGLPYLASLGIQSLVQQRAFAGKTANKLMDALKDSDLLHWKHSLSELIDISIAQKTAIWRLYGRSTMALQQAQMLLSMNSLEAVNAGVQQNNTESFAVALCHLAELHAEQGCFAAASEVLKHLKERFPPNSQHAQLWMLCDQKIQFDRAMNDGKYHLADSLVTGITALNSIEGVYRKAVVLQAQNQMSEAHKLLQKLLVHCQKLKNTEMVISVLLSVAELYWRSSSPTIALPMLLQALALSKEYRLQYLASETVLNLAFAQLILGIPEQALSLLHMAIEPILADGAILDKGRAMFLVAKCQVASAASYDQPKKAEALEAAIENLNEAKNYFAKVDCKERIRDVVYFQARLYHTLGKTQERNRCAMLFRQLHQELPSHGVPLINHL

SEQ ID NO: 95833 - protein, 87 aa, Homo sapiens
MAGPAWISKVHGTAPDIAGKDMANPTALLLSAVMMLRHMGLFDHAARIEAACFATIKDGKSLTKDLGGNAKCSDFTEEICRRVKDLD

SEQ ID NO: 95834 - protein, 41 aa, Homo sapiens
MSGTLEKVLCLRNNTIFKQAFSLLRFRTSGEKPIYSVDGTV

SEQ ID NO: 95835 - protein, 118 aa, Homo sapiens
  MOD_RES (1)..(1): Any amino acid
XCKLLSTELQAELSRTGRSREVLELGQVLDTGKRKRHVPYSVSETRLEEALENLCERILDYSVHAERKGSLRYAKGQSQTMATLKGLVQKGVKVDLGIPLELWDEPSVEVTYLKKQSG

SEQ ID NO: 95836 - protein, 76 aa, Homo sapiens
  MOD_RES (1)..(1): Any amino acid
XMEPTEAYEVLCYVPARSLPYNQPGTCYTLVALPKEDPTAVACTFSCMMKFTVKDCDPTTGETDDEGYEDEYVSHS

SEQ ID NO: 95837 - protein, 229 aa, Homo sapiens
MLVAKLIQCIVFGPLRVSERQHLKDKFWNFIFYKFIFIFGVLNVQTVEEVVMWCLWFAGLVFLHLMVQLCKDRFEYLSFSPTTPMSSHGRVLSLLVAMLLSCCGLAAVCSITGYTHGMHTLAFMAAESLLVTVRTAHVILRYVIHLWDLNHEGTWEGKGTYVYYTDFVMELTLLSLDLMHHIHMLLFGNIWLSMASLVIFMQLRYLFHEVQRRIRRHKNYLRVVGNMEA

SEQ ID NO: 95838 - protein, 141 aa, Homo sapiens
MFRSDRMWSCHWKWKPSPLLFLFALYIMCVPHSAVWGCANCRVVLSNPSGTFTSPCYPNDYPNSQACMWTLRAPTGYIIQITFNDFDIEEAPNCIYDSLSLDNGESQTKFCGATAKGLSFNSSANEMHVSFSSDFSIQKKG

SEQ ID NO: 95839 - protein, 33 aa, Homo sapiens
  MOD_RES (1)..(1): Any amino acid
XVLWEALRKMGLRPGYDWPLQLLPSVLSSGQRG

SEQ ID NO: 95840 - protein, 126 aa, Homo sapiens
  MOD_RES (1)..(1): Any amino acid
XGRVRGAAQRRGMIAAVDTDSPREVFFRVAADMFSDGNFNWGRVVALFYFASKLVLKALCTKVPELIRTIMGWTLDFLRERLLGWIQDQGGWDGLLSYFGTPTWQTVTIFVAGVLTASLTIWKKMG

SEQ ID NO: 95841 - protein, 178 aa, Homo sapiens
  MOD_RES (1)..(1): Any amino acid
XAKTINKVLLQYAAIVSSDFSSHCDKENVPCILMNNIQQLRVQLEKMFESMGGKEKKEGERFFYELDSEASTILKELQVKLSGVLDELSVTYGESFQVIIEECIKQMSFELNQMRANGNTTSNKNSAAMDAEIVLRSLMDFLDKTLSLSAKICEKTVLKRVLKELWKLVLNKIEKQIV

SEQ ID NO: 95842 - protein, 15 aa, Homo sapiens
MATLGHTFPFYAGPK

SEQ ID NO: 95843 - protein, 1136 aa, Homo sapiens [sequence omitted]

SEQ ID NO: 95844 - protein, 204 aa, Homo sapiens
  MOD_RES (1)..(1): Any amino acid
XIQHVGLPLAPGTHSAPTSLPQSDLSQFQTQTQPLVGQVDDTRRKSEPLPQPPLSLIAENKPVVKPPVADSLANPLQLTPMNSLATSVFSIAIPVDGDEDSASGGGVVAIDNKIEQAMDLVKSHLMYAVREEVEVLKEQIKELVERNSLLERENALLKSLSSNDQLSQLPTQQANPGSTSQQQAVIAQPPQPTQPPQQPNVSSA

SEQ ID NO: 95845 - protein, 81 aa, Homo sapiens
MTGTRSRPQPAQNATTANTSRPLKSSGTRSWPPPSTTPGSSWRSTMPGWLRTTSGSSMRMSWPCARALRLTSTACAESWMS

SEQ ID NO: 95846 - protein, 41 aa, Homo sapiens
TDFLITLAVPSAVALVLFLILAYIMCCRREGVEKRNMQTPE

SEQ ID NO: 95847 - protein, 145 aa, Homo sapiens
MAGLRNESEQEPLLGDTPGSREWDILETEEHYKSRWRSIRILYLTMFLSSVGFSVVMMSIWPYLQKIDPTADTSFLGWVIASYSLGQMVASPIFGLWSNYRPRKEPLIVSILISVAANCLYAYLHIPASHNKYYMLVARGLLGIG

SEQ ID NO: 95848 - protein, 50 aa, Homo sapiens
MEHTHAHLAANSSLSWWSPGSACGLGFVPVVYYSLLLCLGLPDIMKPIKL

SEQ ID NO: 95849 - protein, 462 aa, Homo sapiens
MAKSALRENGTNSETFRQRFRRFHYQEVAGPREAFSQLWELCCRWLRPEVRTKEQIVELLVLEQFLTVLPGEIQNWVQEQCPENGEEAVTLVEDLEREPGRPRSSVTVSVKGQEVRLEKMTPPKSSQELLSVRQESVEPQPRGVPKKERARSPDLGPQEQMNPKEKLKPFQRSGFEAGFENEDNSKRDISEEVQLHRTLLARSERKIPRYLHQGKGNESDCRSGRQWAKTSGEKRGKLTLPEKSLSEVLSQQRPCLGERPYKYLKYSKSFGPNSLLMHQVSHQVENPYKCADCGKSFSRSARLIRHRRIHTGEKPYKCLDCGKSFRDSSNFITHRRIHTGEKPYQCGECGKCFNQSSSLIIHQRTHTGEKPYQCEECGKSFNNSSHFSAHRRIHTGERPHVCPDCGKSFSKSSDLRAHHRTHTGEKPYGCHDCGKCFSKSSALNKHGEIHAREKLLTQSAPK

SEQ ID NO: 95850 - protein, 39 aa, Homo sapiens
DMFAQTRGNSLAEQRKTHHPAWPLIHRRSLEAGGCSHAG

SEQ ID NO: 95851 - protein, 81 aa, Homo sapiens
  MOD_RES (1)..(1): Any amino acid
XMPDLHKNMLNRRSFSDVLPESPKSARKKEEARQAEFVRIGQALKLKSIVRGDAPSSLAASGICKKEMTFHQCPCLTELCQ

SEQ ID NO: 95852 - protein, 117 aa, Homo sapiens
MDMRVPAQLLGLLLLWLPGTRCDIQMTQSPSSLSASVGDRVTITCRASQGISNSLAWYQQKPGKAPKLLLYAASRLESGVPSRFSGSGSGTDYTLTISSLQPEDFATYYCQQYYSTP

SEQ ID NO: 95853 - protein, 622 aa, Homo sapiens
MDSEKSSEWRSDVLNRLQSKYGSLYRRDNVILSGTHTHSGPAGYFQYTVFVIASEGFSNQTFQHMVTGILKSIDIAHTNMKPGKIFINKGNVDGVQINRSPYSYLQNPQSERARYSSNTDKEMIVLKMVDLNGDDLGLISWFAIHPVSMNNSNHLVNSDNVGYASYLLEQEKNKGYLPGQGPFVAAFASSNLGDVSPNILGPRCINTGESCDNANSTCPIGGPSMCIAKGPGQDMFDSTQIIGRAMYQRAKELYASASQEVTGPLASAHQWVDMTDVTVWLNSTHASKTCKPALGYSFAAGTIDGVGGLNFTQGKTEGDPFWDTIRDQILGKPSEEIKECHKPKPILLHTGELSKPHPWHPDIVDVQIITLGSLAITAIPGEFTTMSGRRLREAVQAEFASHGMQNMTVVISGLCNVYTHYITTYEEYQAQRYEAASTIYGPHTLSAYIQLFRNLAKAIATDTVANLSRGPEPPFFKQLIVPLIPSIVDRAPKGRTFGDVLQPAKPEYRVGEVAEVIFVGANPKNSVQNQTHQTFLTVEKYEATSTSWQIVCNDASWETRFYWHKGLLGLSNATVEWHIPDTAQPGIYRIRYFGHNRKQDILKPAVILSFEGTSPAFEVVTI

SEQ ID NO: 95854 - protein, 163 aa, Homo sapiens
  MOD_RES (1)..(1): Any amino acid
XAAFLGSGTPGSGSGSRGRLNSFTQGILPIAFSRPTSQNYCSLEQPGQGGSTSAFEQLQRSRRRLISQRSSLETLEDIEENAPLRRCRTLSGSPRPKNFKKIHFIKNMRQHDTRNGRIVLISGRRSFCSIFSVLPYRDSTQVGYVYACMLCSSLGEKISHQCT

SEQ ID NO: 95855 - protein, 54 aa, Homo sapiens
  MOD_RES (1)..(1): Any amino acid
XQHQVLLVALLGPESDGFLAWSTFPAFNRLQGDRLRVPLVSVRGSRLGLGQSRG

SEQ ID NO: 95856 - protein, 172 aa, Homo sapiens
  MOD_RES (1)..(1): Any amino acid
XLSRAMSRCVLEPRPPGKRWMVAGLGNPGLPGTRHSVGMAVLGQLARRLGVAESWTRDRHCAADLALAPLGDAQLVLLRPRRLMNANGRSVARAAELFGLTAEEVYLVHDELDKPLGRLALKLGGSARGHNGVRSCISCLNSNELLPLLLDRATDLILDHIRERSQGPSLGP

SEQ ID NO: 95857 - protein, 165 aa, Homo sapiens
MGSTEILEKETPENLSNGTSSNVEAAKRLAKRLYQLDRFKRSDVAKHLGKNNEFSKLVAEEYLKFFDFTGMTLDQSLRYFFKAFSLVGETQERERVLIHFSNRYFYCNPDTIASQDGVHCLTCAIMLLNTDLHGHNIGKKMTCQEFIANLQGVNEGVDFSKDLLK

SEQ ID NO: 95858 - protein, 110 aa, Homo sapiens
MRPARHWETRFGARDFGGFQDCFFRDRLMDTARIAVVGAGVVGLSTAVCISKLVPRCSVTIISDKFTPDTTSDVAAGMLIPHTYPVGRYFRALRLKKCHSGLTWFWDFER

SEQ ID NO: 95859 - protein, 685 aa, Homo sapiens
LGDDGGFVNRFTVNSDDFGIKQAKSKRKLQNQVLDSKNFKSVKRKLHNDWVMKIRYISALNCFGSCSLDSNHSLVLESLKRLEDNLPVREFSMPRGANTFCYCVKANVIVTGGDDKVIRLWHPNISTKPVGKLVGHMFSIAEIVTNEKDQHVVSLSSAKVFRVWDIQTLSLLQVFHDSQGGPGDMQIYSMIYDANHGMLITGSSVMDMYPLTRMIQDTKQVPHTHEREINVMLYNKYFHQVLTICSESIIRVWELETGLQVYQILEPHGFNTEVTSAAVDESGFLFATGAYNGTVRIWDFGSGQEMKVLPEGKDWKEDEHCLRRLIFLKAQEKHQQLVLALERNGTIKMIQGKEDDIYLMVIWELPDVVPFLQDGKHAVHLRMSTRDRNMAIPFPDVELIVERNFSQPTDNPTMDLLRVNCIDLLQVEGYNLIAAGTLNEGHVILCNISSFLDPPHDEKKFKQLLSWRAHSLEIIQVIYVEEKQVVLTASIDGSVRLWHALNGHYCGYFGQRRLFELSQTRDFILPCDVTEYPIEIKEESKFTEKQKYEYPLIFDREKWRKMSSVSLLFKRTPPKAFEVEQDFKFFKSLSSPKIRRYPLEGFVTENREAGIVFGSLPIYSISSPTSLRFLPLIGVEAQKDSSDGITGKKKGGHVQREKAPRRRSLKKNLVPQINLASSFFPAIPK

SEQ ID NO: 95860 - protein, 240 aa, Homo sapiens
MESNLSGLVPAAGLVPALPPAVTLGLTAAYTTLYALLFFSVYAQLWLVLLYGHKRLSYQTVFLALCLLWAALRTTLFSFYFRDTPRANRLGPLPFWLLYCCPVCLQFFTLTLMNLYFAQVVFKAKVKRRPEMSRGLLAVRGAFVGASLLFLLVNVLCAVLSHRRRAQPWALLLVRVLVSDSLFVICALSLAACLCLVARRAPSTSIYLEAKGTSVCQAAAMGGAMVLLYASRACYNLTAL

SEQ ID NO: 95861 - protein, 244 aa, Homo sapiens
MALITLRKNLYRLSDFQMHRALAALKNKPLNHVHKVVKERLCPWLCSRQPEPFGVKFHHAHCKKFHSKNGNDLHPLGGPVFSQVSDCDRLEQNVKNEESQMFYRRLSNLTSSEEVLSFISTMETLPDTMAAGALQRICEVEKKDGDQGLPKEILENSIFQALCFQFEKEPSQLSNTSLVTALQALILLHVDPQSSLLLNLVAECQNRLRKGGMEVRNLCILGESLITLHSSGCVTLELIINQLQ

SEQ ID NO: 95862 - protein, 85 aa, Homo sapiens
  MOD_RES (1)..(1): Any amino acid
XQTPEAGRKEKPMLQSRHSLDGSKLTEKVETAQPLWITLALQKQKGFREQQATREERKQAREAKQAEKLSKENWRSPTRLPQRRW

SEQ ID NO: 95863 - protein, 348 aa, Homo sapiens
MGRPRLTLVCQVSIIISARDLSMNNLTELQPGLFHHLRFLEELRLSGNHLSHIPGQAFSGLYSLKILMLQNNQLGGIPAEALWELPSLQSLRLDANLISLVPERSFEGLSSLRHLWLDDNALTEIPVRALNNLPALQAMTLALNRISHIPDYAFQNLTSLVVLHLHNNRIQHLGTHSFEGLHNLETLDLNYNKLQEFPVAIRTLGRLQELGFHNNNIKAIPEKAFMGNPLLQTIHFYDNPIQFVGRSAFQYLPKLHTLSLNGAMDIQEFPDLKGTTSLEILTLTRAGIRLLPSGMCQQLPRLRVLELSHNQIEELPSLHRCQKLEEMRSGGLYFLPPSARGAWSGARV

SEQ ID NO: 95864 - protein, 259 aa, Homo sapiens
MTPPRLFWVWLLVAGTQGVNDGDMRLADGGATNQGRVEIFYRGQWGTVCDNLWDLTDASVVCRALGFENATQALGRAAFGQGSGPIMLDEVQCTGTEASLADCKSLGWLKSNCRHERDAGVVCTNETRSTHTLDLSRELSEALGQIFDSQRGCDLSISVNVQGEDALGFCGHTVILTANLEAQALWKEPGSNVTMSVDAECVPMVRDLLRYFYSRRIDITLSSVKCFHKLASAYGARQLQGYCASLFAILLPQDPSFQM

SEQ ID NO: 95865 - protein, 88 aa, Homo sapiens
MEPEREGTERHPRKVRESRQAPNKLVGAAEAMKAGWDLEESQPEAKKARLSTILFTDNCEVTHDQLCELLKYAVLGKSNVPKPRAFTF

SEQ ID NO: 95866 - protein, 248 aa, Homo sapiens
KQVEEELTHLQKKLKGTEDELDKYSEDLKDAQEKLELTEKKASDAEGDVAALNRRIQLVEEELDRAQERLATALQKLEEAEKAADESERGMKVIENRAMKDEEKMEIQEMQLKEAKHIAEEADRKYEEVARKLVILEGELERAEERAEVSELKCGDLEEELKNVTNNLKSLEAASEKYSEKEDKYEEEIKLLSDKLKEAETRAEFAERTVAKLEKTIDDLEDELYAQKLKYKAISEELDHALNDMTSL

SEQ ID NO: 95867 - protein, 130 aa, Homo sapiens
MAGQDPALSTSHPFYDVARHGILQVAGDDRFGRRVVTFSCCRMPPSHELDHQRLLEYLKYTLDQYVENDYTIVYFHYGLNSRNKPSLGWLQSAYKEFDRKDGDLTMWPRLVSNSKLKRSSHLSLPKYWDY

SEQ ID NO: 95868 - protein, 320 aa, Homo sapiens; identical to SEQ ID NO: 52324

SEQ ID NO: 95869 - protein, 224 aa, Homo sapiens
MGEKSENCGVPEDLLNGLKVTDTQEAECAGPPVPDPKNQHSQSKLLRDDEAHLQEDQGEEECFHDCSASFEEEPGADKVENKSNEDVNSSELDEEYLIELEKNMSDEEKQKRREESTRLKEEGNEQFKKGDYIEAESSYSRALEMCPSCFQKERSILFSNRAAARMKQDKKEMAINDCSKGKLKDLGNLVLRPFGLSTENFQIKQDSSTGSYSINFVQNPNNNR

SEQ ID NO: 95870 - protein, 430 aa, Homo sapiens
MGERAGSPGTDQERKAGKHHYSYLSDFETPQSSGRSSLVSSSPASVRRKNPKRQTSDGQVHHQAPRKPSPKGLPNRKGVRVGFRSQSLNREPLRKDTDLVTKRILSARLLKINELQNEVSELQVKLAELLKENKSLKRLQYRQEKALNKFEDAENEISQLIFRHNNEITALKERLRKSQEKERATEKRVKDTESELFRTKFSLQKLKEISEARHLPERDDLAKKLVSAELKLDDTERRIKELSKNLELSTNSFQRQLLAERKRAYEAHDENKVLQKEVQRLYHKLKEKERELDIKNIYSNRLPKSSPNKEKELALRKNAACQSDFADLCTKGVQTMEDFKPEEYPLTPETIMCYENKWEEPGHLTLDLQSQKQDRHGEAGILNPIMEREEKFVTDEELHVVKQEVEKLEDGKKKSLFKHVTSQHPLRKKE

SEQ ID NO: 95871 - protein, 157 aa, Homo sapiens
MKTPFGKAAAGQRSRTGAGHGSVSVTMIKRKAAHKKHRSRPTSQPRGNIVGCRIQHGWKDGDEPLTQWKGTVLDQLLDDYKDGDLRILQDSNDSPLAEREPGEVIDSLVGKQVEYAKDDGSKRTGMVIHQVEAKPSVYFIKFDDDFHIYVYDLVKTS

SEQ ID NO: 95872 - protein, 160 aa, Homo sapiens
MCSHFDADEIKRLGKRFKKLDLDNSGSLSVEEFMSLPELQQNPLVQRVIDIFDTDGNGEVDFKEFIEGVSQFSVKGDKEQKLRFAFRIYDMDKDGYISNGELFQVLKMMVGNNLKDTQLQQIVDKTIINADKDGDGRISFEEFCAVVGGLDIHKKMVVDV

SEQ ID NO: 95873 - protein, 161 aa, Homo sapiens
MAHLRGFANQLKPGPLEETYIATILREILKGLDYLHSERKIHRDIKAANVLLSEQGDVKLADFGVAGQLTDTQIKRNTFVGTPFWMAPEVIKQSAYDFKADIWSLGITAIELAKGEPPNSDLHPMRVLFLIPKNSPPTLEGQHSKPFKEFVEACLNKDPRF

SEQ ID NO: 95874 - protein, 852 aa, Homo sapiens
MEHRGPPPEYPFKGMPPQSVVCKPQEPGHFYSEHRLNQPGRTEGQLMRYQHPPEYGAARPAQDISLPLSARNSQPHSPTSSLTSGGSLPLLQSPPSTRLSPARHPLVPNQGDHSAHLPRPQQHFLPNQAHQGDHYRLSQPGLSQQQQQQQQQHHHHHHHQQQQQQQPQQQPGEAYSAMPRAQPSSASYQPVPADPFAIVSRAQQMVEILSDENRNLRQELEGCYEKVARLQKVETEIQRVSEAYENLVKSSSKREALEKAMRNKLEGEIRRMHDFNRDLRERLETANKQLAEKEYEGSEDTRKTISQLFAKNKESQREKEKLEAELATARSTNEDQRRHIEIRDQALSNAQAKVVKLEEELKKKQVYVDKVEKMQQALVQLQAACEKREQLEHRLRTRLERELESLRIQQRQGNCQPTNVSEYNAAALMELLREKEERILALEADMTKWEQKYLEENVMRHFALDAAATVAAQRDTTVISHSPNTSYDTALEARIQKEEEEILMANKRCLDMEGRIKTLHAQIIEKDAMIKVLQQRSRKEPSKTEQLSCMRPAKSLMSISNAGSGLLSHSSTLTGSPIMEEKRDDKSWKGSLGILLGGDYRAEYVPSTPSPVPPSTPLLSAHSKTGSRDCSTQTERGTESNKTAAVAPISVPAPVAAAATAAAITATAATITTTMVAAAPVAVAAAAAPAAAAAPSPATAAATAAAVSPAAAGQIPAAASVASAAAVAPSAAAAAAVQVAPAAPAPVPAPALVPVPAPAAAQASAPAQTQAPTSAPAVAPTPAPTPTPAVAQAEVPASPATGPGPHRLSIPSLTCNPDKTDGPVFHSNTLERKTPIQILGQEPDAEMVEYLI

SEQ ID NO: 95875 - protein, 86 aa, Homo sapiens
MAEGDEAARGQQPHQGLWRRRRTSDPSAAVNHVSSTTSLESCSVARLECSGTIFAYCNLPGSSDSSASASQVAGITGFSKLDWWKQ

SEQ ID NO: 95876 - protein, 73 aa, Homo sapiens
  MOD_RES (1)..(1): Any amino acid
XRLAEVSGGGTGLRSALSVPPPQPAGSSRAGSGTGTHTGSDPPMERGAGAGRKLPDTGRCPGAPDFGASTPRA

SEQ ID NO: 95877 - protein, 265 aa, Homo sapiens
  MOD_RES (1)..(1): Any amino acid
XCFKTDTKEFVREIKHSSFGRNVFAISYIPGLLFAVNGKPHFGDQEPVQGFVMNFSNGEIIDIFKPVRKHFDMPHDIVASEDGTVYIGDAHTNTVWKFTLTEKLEHRSVKKAGIEVQEIKAEAVVETKMENKPTSSELQKMQEKQKLIKEPGSGVPVVLITTLLVIPVVVLLAIAIFIRWKKSRAFGADSEHKLETSSGRVLGRFRGKGSGGLNLGNFFASRKGYSRKGFDRLSTEGSDQEKEDDGSESEEEYSAPLPALAPSSS

SEQ ID NO: 95878 - protein, 172 aa, Homo sapiens
  MOD_RES (1)..(1): Any amino acid
XNNRPGPREPPPYQEPRPRGNPPHSAPCVPNGSAYSGDYMEPEKPGAPLLPPPPQNSVPHYAEADIVTLQGVTGGNTYAVPALPPGAVGDGPPRVDFPRSRLRFKEKLGEGQFGEVHLCEVDSPQDLVSLDFPLNVRKGHPLLVAVKILRPDATKNASFSLFSRNDFLKEVK

SEQ ID NO: 95879 - protein, 1914 aa, Homo sapiens
MASGLGSPSPCSAGSEEEDMDALLNNSLPPPHPENEEDPEEDLSETETPKLKKKKKPKKPRDPKIPKSKRQKKERMLLCRQLGDSSGEGPEFVEEEEEVALRSDSEGSDYTPGKKKKKKLGPKKEKKSKSKRKEEEEEEDDDDDSKEPKSSAQLLEDWGMEDIDHVFSEEDYRTLTNYKAFSQFVRPLIAAKNPKIAVSKMMMVLGAKWREFSTNNPFKGSSGASVAAAAAAAVAVVESMVTATEVAPPPPPVEVPIRKAKTKEGKGPNARRKPKGSPRVPDAKKPKPKKVAPLKIKLGGFGSKRKRSSSEDDDLDVESDFDDASINSYSVSDGSTSRSSRSRKKLRTTKKKKKGEEEVTAVDGYETDHQDYCEVCQQGGEIILCDTCPRAYHMVCLDPDMEKAPEGKWSCPHCEKEGIQWEAKEDNSEGEEILEEVGGDLEEEDDHHMEFCRVCKDGGELLCCDTCPSSYHIHCLNPPLPEIPNGEWLCPRCTCPALKGKVQKILIWKWGQPPSPTPVPRPPDADPNTPSPKPLEGRPERQFFVKWQGMSYWHCSWVSELQLELHCQVMFRNYQRKNDMDEPPSGDFGGDEEKSRKRKNKDPKFAEMEERFYRYGIKPEWMMIHRILNHSVDKKGHVHYLIKWRDLPYDQASWESEDVEIQDYDLFKQSYWNHRELMRGEEGRPGKKLKKVKLRKLERPPETPTVDPTVKYERQPEYLDATGGTLHPYQMEGLNWLRFSWAQGTDTILADEMGLGKTVQTAVFLYSLYKEGHSKGPFLVSAPLSTIINWEREFEMWAPDMYVVTYVGDKDSRAIIRENEFSFEDNAIRGGKKASRMKKEASVKFHVLLTSYELITIDMAILGSIDWACLIVDEAHRLKNNQSKFFRVLNGYSLQHKLLLTGTPLQNNLEELFHLLNFLTPERFHNLEGFLEEFADIAKEDQIKKLHDMLGPHMLRRLKADVFKNMPSKTELIVRVELSPMQKKYYKYILTRNFEALNARGGGNQVSLLNVVMDLKKCCNHPYLFPVAAMEAPKMPNGMYDGSALIRASGKLLLLQKMLKNLKEGGHRVLIFSQMTKMLDLLEDFLEHEGYKYERIDGGITGNMRQEAIDRFNAPGAQQFCFLLSTRAGGLGINLATADTVIIYDSDWNPHNDIQAFSRAHRIGQNKKVMIYRFVTRASVEERITQVAKKKMMLTHLVVRPGLGSKTGSMSKQELDDILKFGTEELFKDEATDGGGDNKEGEDSSVIHYDDKAIERLLDRNQDETEDTELQGMNEYLSSFKVAQYVVREEEMGEEEEVEREIIKQEESVDPDYWEKLLRHHYEQQQEDLARNLGKGKRIRKQVNYNDGSQEDRDWQDDQSDNQSDYSVASEEGDEDFDERSEAPRRPSRKGLRNDKDKPLPPLLARVGGNIEVLGFNARQRKAFLNAIMRYGMPPQDAFTTQWLVRDLRGKSEKEFKAYVSLFMRHLCEPGADGAETFADGVPREGLSRQHVLTRIGVMSLIRKKVQEFEHVNGRWSMPELAEVEENKKMSQPGSPSPKTPTPSTPGDTQPNTPAPVPPAEDGIKIEENSLKEEESIEGEKEVKSTAPETAIECTQAPAPASEDEKVVVEPPEGEEKVEKAEVKERTEEPMETEPKGKGAADVEKVEEKSAIDLTPIVVEDKEEKKEEEEKKEVMLQNGETPKDLNDEKQKKNIKQRFMFNIADGGFTELHSLWQNEERAATVTKKTYEIWHRRHDYWLLAGIINHGYARWQDIQNDPRYAILNEPFKGEMNRGNFLEIKNKFLARRFKLLEQALVIEEQLRRAAYLNMSEDPSHPSMALNTRFAEVECLAESHQHLSKESMAGNKPANAVLHKVLKQLEELLSDMKADVTRLPATIARIPPVAVRLQMSERNILSRLANRAPEPTPQQVAQQQ

SEQ ID NO: 95880 - protein, 574 aa, Homo sapiens
PSSANSISSSTSSNHSGHTPEPPLPPVGGDLASRLSSDEGEMDGADESEKLDCQFSTHHPRPLAFCSFGSRLMGRGYYVFDRRWDRFRFALNSMVEKHLNSQMWKHRNPSHRASGPSPLFRTCLTNLLSLSNIGAAWVSTLESVAPRYPLNLAAQTPGPGGPEPGGMAADGGVEDIRKKRNGQDSFFFNKHLTLHQEPPTQYSLSARKIPPAADSPLPSPAAHITTPVPASVLQPFSNPSAVYLPSAPISSRLTSSYIMTSAMLSNAAFVTSPDPSALMSHTTAFPHVAATLSIMDSTFKAPSAVSPIPAVIPSPSHKPSKTKTSKSSKVKDLSTRSDESPSNKKRKPQSSTSSSSSSSSSSLQTSLSSPLSGPHKKNCVLNASSALNSYQAAPPYNSLSVHNSNNGVSPLSAKLEPSGRTSLPGGPADIVRQVGAVGGSSDSCPLSVPSLALHAGDLSLASHNAVSSLPLSFDKSEGKKRKNSSSSSKACKITKMPGMNSVHKKNPPSLLAPVPDPVNSTSSRQVRDLLAPPSPALGGRGSWAAPLLSRAAPTGNTSLIPVLVFPEGSFHPLL

SEQ ID NO: 95881 - protein, 313 aa, Homo sapiens
MPKLNSTFVTEFLFEGFSSFRRQHKLVFFVVFLTLYLLTLSGNVIIMTIIRLDHHLHTPMYFFLCMLSISETCYTVAIIPHMLSGLLNPHQPIATQSCATQLFFYLTFGINNCFLLTVMGYDRYVAICNPLRYSVIMGKRACIQLASGSLGIGLGMAIVQVTSVFGLPFCDAFVISHFFCDVRHLLKLACTDTTVNEIINFVVSVCVLVLPMGLVFISYVLIISTILKIASAEGQKKAFATCASHLTVVIIHYGCASIIYLKPKSQSSLGQDRLISVTYTHHSPTEPCCVQPEEQGGQRCSAQSRGAKNSVSL

SEQ ID NO: 95882 - protein, 93 aa, Homo sapiens
MNIQQQLMKTNLKQMDSLMPLMMTAQDPSSAPETDGQFLPCAPEPTDPQRLSSSEETESTQCCPGSPVAQTESPCDLSSIVEEENTDRSCRKK

SEQ ID NO: 95883 - protein, 454 aa, Homo sapiens
  MOD_RES (1)..(1): Any amino acid
XDLVPSVTVKVTLQNRVILQKAKLSVYVQPPLELTCDQFTFEFMTPDLTRTVSFSVYLKRSYTPSELEGNAVVSYSRPTDRNPDGIPRVIQCKFRLPLKLICLPGQPSKTASHKITIDTNKSPVSLLSLFPGFASQSDDDQVNVMGFHFLGGARITVLASKTSQRYRIQSEQFEDLWLITNELILRLQEYFEKQGVKDFACSFSGSIPLQEYFELIDHHFELRINGEKLEELLSERAVQFRAIQRRLLARFKDKTPAPLQHLDTLLDGTYKQVIALADAVEENQGNLFQSFTRLKSATHLVILLIALWQKLSADQVAILEAAFLPLQEDTQELGWEETVDAAISHLLKTCLSKSSKEQALNLNSQLNIPKDTSQLKKHITLLCDRLSKGGRLCLSTDAAAPQTMVMPGGCTTIPESDLEERSVEQDSTELFTNHRHLTAETPRPGKRLDGLHKR

SEQ ID NO: 95884 - protein, 478 aa, Homo sapiens
MSGVMCLKASDTWASGIRSQPQGCLGKWRSMRCKHTRMHLAHLGNSRQLISLGPPRTREDGSRISQQVEQSRSQVQAIGEKVSLAQAKIEKIKGSKKAIKVFSSAKYPAPERLQEYGSIFTGAQDPGLQRRPRHRIQSKHRPLDERALQEKLKDFPVCVSTKPEPEDDAEEGLGGLPSNISSVSSLLLFNTTENLYKKYVFLDPLAGAVTKTHVMLGAETEEKLFDAPLSISKREQLEQQVPENYFYVPDLGQVPEIDVPSYLPDLPSIANDLMYSADLGPGIAPSAPGTIPELPTFHTEVAEPLKADLQDGVLTPPPPPPPPPPAPEVLASAPPLPPSTAAPVGQGARQDDGSSSASPSVQGAPREVVDPSGGWATLLESIRQAGGIGKAKLRSMKERKLEKKKQKEQEQVRATSQGGHLMSDLFNKLVMRRKGISGKGPGAGEGPGGAFARVSDSIPPVPPPQQPQAEEDEDDWES

SEQ ID NO: 95885 - protein, 41 aa, Homo sapiens
MLPAGEIGASPAAPCCSESGDERKNLEEKKMRSCSAVQAGM

SEQ ID NO: 95886 - protein, 78 aa, Homo sapiens
  MOD_RES (1)..(1): Any amino acid
XCAVGLTSYSVLVIRIVQPELKALAIGFHSMIMRSLGGILVPIYFGALIDTTCMKWSTNSCGARGACRIYNSTYLGIF

SEQ ID NO: 95887 - protein, 46 aa, Homo sapiens
  MOD_RES (1)..(1): Any amino acid
XVWSAGCVLAELLLGQPIFPGDSGVDQLVEIIKDSSGTGHFTSGVR

SEQ ID NO: 95888 - protein, 476 aa, Homo sapiens
MDRNPSPPPPGRDKEEEEEVAGGDCIGSTVYSKHWLFGVLSGLIQIVSPENTKSSSDDEEQLTELDEEMENEICRVWDMSMDEDVALFLQEFNAPDIFMGVLAKSKCPRLREICVGILGNMACFQEICVSISSDKNLGQVLLHCLYDSDPPTLLETSRLLLTCLSQAEVASVWVERIQEHPAIYDSICFIMSSSTNVDLLVKVGEVVDKLFDLDEKLMLEWVRNGAAQPLDQPQEESEEQPVFRLVPCILEAAKQVRSENPEWLDVYMHILQLLTTVDDGIQAIVHCPDTGKDIWNLLFDLVCHEFCQSDDPPIILQEQKTVLASVFSVLSAIYASQTEQEYLKIEKGKYNLPLIDSLIRVLQNMEQCQKKPENSAESNTEETKRTDLTQDDFHLKILKDILCEFLSNIFQALTKETVAQGVKEGQLSKQKCSSAFQNLLPFYSPVVEDFIKILREVDKALADDLEKNFPSLKVQT

SEQ ID NO: 95889 - protein, 1031 aa, Homo sapiens
  MOD_RES (1)..(1): Any amino acid
XYAEQLVVELKDIIRQKDVQLQQKDEALQEERKAADNKIKKLKLHAKAKLTSLNKYIEEMKAQGGTVLPTEPQSEEQLSKHDKSSTEEEMEIEKIKHKLQEKEELISTLQAQLTQAQAEQPAQKLRVLQRKLEEHEESLVGRAQVVDLLQQELTAAEQRNQILSQQLQQMEAEHNTLRNTVETEREESKILLEKMELEVAERKLSFHNLQEEMHHLLEQFEQAGQAQAELESRYSALEQKHKAEMEEKTSHILSLQKTGQELQSACDALKDQNSKLLQDKNEQAVQSAQTIQQLEDQLQQKSKEISQFLNRLPLQQHETASQTSFPDVYNEGTQAVTEENIASLQKRVVELENEKGALLLSSIELEELKAENEKLSSQITLLEAQNRTGEADREVSEISIVDIANKRSSSAEESGQDVLENTFSQKHKELSVLLLEMKEAQEEIAFLKLQLQGKRAEEADHEVLDQKEMKQMEGEGIAPIKMKVFLEDTGQDFPLMPNEESSLPAVEKEQASTEHQSRTSEEISLNDAGVELKSTKQDGDKSLSAVPDIGQCHQDELERLKSQILELELNFHKAQEIYEKNLDEKAKEISNLNQLIEEFKKNADNNSSAFTALSEERDQLLSQVKELSMVTELRAQVKQLEMNLAEAERQRRLDYESQTAHDNLLTEQIHSLSIEAKSKDVKIEVLQNELDDVQLQFSEQSTLIRSLQSQLQNKESEVLEGAERVRHISSKVEELSQALSQKELEITKMDQLLLEKKRDVETLQQTIEEKDQQVTEISFSMTEKMVQLNEEKFSLGVEIKTLKEQLNLLSRAEEAKKEQVEEDNEVSSGLKQNYDEMSPAGQISKEELQHEFDLLKKENEQRKRKLQAALINRKELLQRVSRLEEELANLKDESKKEIPLSETERGEVEEDKENKEYSEKCVTSKCQEIEIYLKQTISEKEVELQHIRKDLEEKLAAEEQFQALVKQMNQTLQDKTNQIDLLQAEISENQAIIQKLITSNTDASDGDSVALVKETVVISPPCTGSSEHWKP

SEQ ID NO: 95890 - protein, 60 aa, Homo sapiens
MFTVTRCLFSFGLMTEEGGIPTLLYGLGSWLFARVTETVHTSYGPITVYFLNKEDEGAMY

SEQ ID NO: 95891 - protein, 61 aa, Homo sapiens
  MOD_RES (1)..(1): Any amino acid
XGFGGSRGGGGYGGSGGSYNDFGNYNNQSSNFGPMKGGNFGGRSSGPYGGGGQYFAKPRNQ

SEQ ID NO: 95892 - protein, 96 aa, Homo sapiens
MKSPALQPLSMAGLQLMTPASSPMGPFFGLPWQQEAIHDNIYTPRKYQVELLEAALDHNTIVCLNTGSGKTFIAVLLTKELSYQIRGDFSRNGKRT

SEQ ID NO: 95893 - protein, 98 aa, Homo sapiens
MLKEWAIKDIGFRLDSLHTILQQEVLLQEDVELIELLDPSILSAGQSQQQENGHLPTLCSLATPNIWDLSMLFAFISLLVMLPTWWIVSSWLVWGVIL

SEQ ID NO: 95894 - protein, 462 aa, Homo sapiens
MGLCAECRSLVPMNTPICVVCEAPLALQLQPQASLHLKEKVICRACGTGNPAHLRYCVTCEGALPSSQELGIPAGCSVCPKCGASNHLSARFCGSCGICVKSLVKLSLDRSLALAAEEPRPFSESLNIPLPRSDVGTKRDIGTQTVGLFYPSGKLLAKKEQELASQKQRQEKMSDHKPLLTAISPGRGYWRRQLDHISAHLRCYAQNNPEFRALIAEPRMGKLISATVHEDGCEVSIRLNYSQVSNKNLYLNKAVNFSDHLLSSAAEGDGGLCGSRSSWVSDYSQSTSDTIEKIKRIKNFKTKTFQEKKEQLIPENRLLLKEVGPTGEGRVSVIEQLLDEGADPNCCDEDNRPVITVAVMNKHHEAIPVLVQRGADIDQQWGPLRNTALHEATLLGLAGRESTATLLGCNASIQKKNAGGQTAYDLALNTGDDLVTSLFAAKFGQGLEDQLAQTRSLSLDDC

SEQ ID NO: 95895 - protein, 132 aa, Homo sapiens
MNSGGGFGLGLGFGLTPTSVIQVTNLSSAVTSEQMRTLFSFLGEIEELRLYPPDNAPLAFSSKVCYVKFRDPSSVGVAQHLTNTVFIDRALIVVPCAEVMQPTRTVVMCNTTFDHRENTVLGKRPCLISFGS

SEQ ID NO: 95896 - protein, 135 aa, Homo sapiens
MISVKRNTWRALSLVIGDCRKKGNFEYCQDRTEKHSTMPDSPVDVKTQSRLTPPTMPPPPTTQGAPRTSSFTPTTLTNGTSHSPTALNGAPSPPNGFSNGPSSSSSSSLANQQLPPACGARQLSKLKRFLTTLQQ

SEQ ID NO: 95897 - protein, 487 aa, Homo sapiens
MANLLKTVVTGCSCPLLSNLGSCKGLRVKKDFLRTFYTHQELWCKAPVKPGIPYKQLTVGVPKEIFQNEKRVALSPAGVQNLVKQGFNVVVESGAGEASKFSDDHYRVAGAQIQGAKEVLASDLVVKVRAPMVNPTLGVHEADLLKTSGTLISFIYPAQNPELLNKLSQRKTTVLAMDQVPRVTIAQGYDALSSMANIAGYKAVVLAANHFGRFFTGQITAAGKVPPAKILIVGGGVAGLASAGAAKSMGAIVRGFDTRAAALEQFKSLGAEPLEVDLKESGEGQGGYAKEMSKEFIEAEMKLFAQQCKEVDILISTALIPGKKAPVLFNKEMIESMKEGSVVVDLAAEAGGNFETTKPGELYIHKGITHIGYTDLPSRMATQASTLYSNNITKLLKAISPDKDNFYFDVKDDFDFGTMGHVIRGTVVMKDGKVIFPAPTPKNIPQGAPVKQKTVAELEAEKAATITPFRKTMSTASAYTADEDREG

SEQ ID NO: 95898 - protein, 90 aa, Homo sapiens
  MOD_RES (1)..(1): Any amino acid
XQEKITRTKEEALELINGYIQKIKSGEEDFESLASQFSDCSSAKARGDLGAFSRGQMQKPFEDASFALRTGEMSGPVFTDSGIHIILRTE

SEQ ID NO: 95899 - protein, 52 aa, Homo sapiens
MTREPPGCRRVNSLMLYTLRSITSHRSSHPERWATSSQKRKKKTLMPIVMKP

SEQ ID NO: 95900 - protein, 179 aa, Homo sapiens
MAACRYCCSCLRLRPLSDGPFLLPRRDRALTQLQVRALWSSAGSRAVAVDLGNRKLEISSGKLARFADGSAVVQSGDTAVMVTAVSKTKPSPSQFMPLVVDYRQKAAAAGRIPTNYLRREIGTSDKEILTSRIIDRSIRPLFPAGYFYDTQVLCNLLAVDGVNEPDVLAINGGKYKSRD

SEQ ID NO: 95901 - protein, 80 aa, Homo sapiens
MIKTQESLTLEDVAVEFSWEEWQLLDTAQKNLYRDVMVENYNHLVSLGYQTSKPDVLSKLAHGQEPWTTDAKIQNKNCPD

SEQ ID NO: 95902 - protein, 68 aa, Homo sapiens
MNRAFSRKKDKTWMHTPEALSKHFIPYNAKFLGSTEVEQPKGTEVVRDAVRKLKFARHIKKSEGQKIP

SEQ ID NO: 95903 - protein, 586 aa, Homo sapiens
MNRESFAAGERLVSPAYVRQGCEARRSHEHLIRLLLEKSLALSPRLECSVTISAHCSLRLPGSRHSPASASRVAGTTGARHHTRLMFVFLVEMGFHHVGQADLKLLTSSDRPFLAFQSARITGGKCPENGWDESTLELFLHELAIMDSNNFLGNCGVGEREGRVASALVARRHYRFIHGIGRSGDISAVQPKAAGSSLLNKITNSLVLDIIKLAGVHTVANCFVVPMATGMSLTLCFLTLRHKRPKAKYIIWPRIDQKSCFKSMITAGFEPVVIENVLEGDELRTDLKAVEAKVQELGPDCILCIHSTTSCFAPRVPDRLEELAVICANYDIPHIVNNAYGVQSSKCMHLIQQGARVGRIDAFVQSLDKNFMVPVGGAIIAGFNDSFIQEISKMYPGRASASPSLDVLITLLSLGSNGYKKLLKERKEMFSYLSNQIKKLSEAYNERLLHTPHNPISLAMTLKTLDEHRDKAVTQLGSMLFTRQVSGARVVPLGSMQTVSGYTFRGFMSHTNNYPCAYLNAASAIGMKMQDVDLFIKRLDRCLKAVRKERSKESDDNYDKTEDVDIEEMALKLDNVLLDTYQDASS

SEQ ID NO: 95904 - protein, 90 aa, Homo sapiens
  MOD_RES (1)..(1): Any amino acid
XGIKTITMLDEQKEQLNRIEEGLDQINKDMRETEKTLTELNKCCGLCVCPCNSKQTDLGITEDALGKHAELKTILFQAKNFKAWTARYLH

SEQ ID NO: 95905 - protein, 242 aa, Homo sapiens
MQGEQGRRLFRLLLNDLPGRDRLPCSYPQPHVEQASTSASPRLLAVNIPEDTLLSYPESSLPLQRHCAFHRFSKAKFESLFRTYDKDITFQYFKSFKRVRINFSNPFSAADARLQLHKTEFLGKEMKLYFAQTLHIGSSHLAPPNPDKQFLISPPASPPVGWKQVEDATPVINYDLLYAISKLGPGEKYELHAATDTTPSVVVHVCESDQEKEEEEEMERMRRPKPKIIQTRRPEYTPIHLS

SEQ ID NO: 95906 - protein, 490 aa, Homo sapiens
MTASSGWEPAPAATMASRIGLRMQLMREQAQQEEQRERMQQQAVMHYMQQQQQQQQQQLGGPPTPAINTPVHFQSPPPVPGEVLKVQSYLENPTSYHLQQSQHQKVREYLSETYGNKFAAHISPAQGSPKPPPAASPGVRAGHVLSSSAGNSAPNSPMAMLHIGSNPERELDDVIDNIMRLDDVLGYINPEMQMPNTLPLSSSHLNVYSSDPQVTASLVGVTSSSCPADLTQKRELTDAESRALAKERQKKDNHNLIERRRRFNINDRIKELGMLIPKANDLDVRWNKGTILKASVDYIRRMQKDLQKSRELENHSRRLEMTNKQLWLRIQELEMQARVHGLPTTSPSGMNMAELAQQVVKQELPSEEGPGEALMLGAEVPDPEPLPALPPQAPLPLPTQPPSPFHHLDFSHSLSFGGREDEGPPGYPEPLAPGHGSPFPSLSKKDLDLMLLDDSLLPLASDPLLSTMSPEASKASSRRSSFSMEEGDVL

SEQ ID NO: 95907 - protein, 669 aa, Homo sapiens
MNLFCISLEGSMDSLYEPIPEQQANQENMSSRTDSPIPPFGESEQTPNNLFVGVSNLENAKPKKRKLFRRFMSENKIFEGKTVNDKIWQEHSKHKNDSHIRRPCQLKDLNEDDFLSNNIHTYQGKTLQGTSYQVTSECWSPFHYQRHVETTVDELAIKSGSDPVESMGTLKRLQKLVWTKKARVQNLDEVKPTLINLQDEDDTLISCLKLTKSREKKVNSVSTRRKEEMEIRLDTLSASLGRSSTLNNCNLEDKLAWYEGEAYMWHHWKPFPENPLWTCLDFQIAQVGPWDHCSSCIRHTRLKSSCSDMDLLHSWRSSSFGNFDRFRNNSLSKPDDSTEAHEGDPTNGSGEQSKTSNNGGGLGKKMRAISWTMKKKVGKKYIKALSEEKDEEDGENAHPYRNSDPVIGTHTEKVSLKASDSMDSLYSGQSSSSGITSCSDGTSNRDSFRLDDDGPYSGPFCGRARVHTDFTPSPYDTDSLKIKKGDIIDIICKTPMGMWTGMLNNKVGNFKFIYVDVISEEEAAPKKIKANRRSNSKKSKTLQEFLERIHLQEYTSTLLLNGYETLEDLKDIKESHLIELNIENPDDRRRLLSAAENFLEEEIIQEQENEPEPLSLSSDISLNKSQLDDCPRDSGCYISSGNSDNGKEDLESENLSDMVHKIIITEPSD

SEQ ID NO: 95908 - protein, 593 aa, Homo sapiens
  MOD_RES (1)..(1): Any amino acid
XEGMAGAVPGAIMDEDYYGSAAEWGDEADGGQQEDDSGEGEDDAEVQQECLHKFSTRDYIMEPSIFNTLKRYFQAGGSPENVIQLLSENYTAVAQTVNLLAEWLIQTGVEPVQVQETVENHLKSLLIKHFDPRKADSIFTEEGETPAWLEQMIAHTTWRDLFYKLAEAHPDCLMLNFTVKLISDAGYQGEITSVSTACQQLEVFSRVLRTSLATILDGGEENLEKNLPEFAKMVCHGEHTYLFAQAMMSVLAQEEQGGSAVRRIAQEVQRFAQEKGHDASQITLALGTAASYPRACQALGAMLSKGALNPADITVLFKMFTSMDPPPVELIRVPAFLDLFMQSLFKPGARINQDHKHKYIHILAYAASVVETWKKNKRVSINKDELKSTSKAVETVHNLCCNENKGASELVAELSTLYQCIRFPVVAMGVLKWVDWTVSEPRYFQLQTDHTPVHLALLDEISTCHQLLHPQVLQLLVKLFETEHSQLDVMEQLELKKTLLDRMVHLLSRGYVLPVVSYIRKCLEKLDTDISLIRYFVTEVLDVIAPPYTSDFVQLFLPILENDSIAGTIKTEGEHDPVTEFIAHCKSNFIMVN

SEQ ID NO: 95909 - protein, 498 aa, Homo sapiens
QEELQTFISELYVFLVDQMHVALNQTMPDDVQGTVATIYTSSEQLQLFAFEAEVNENFEMAAAYYKERLVREPQNLDHWLDYGAFCLLTEDNIKAQECFQKALSLNQSHIHSLLLCGVLAVLLENYEQAEIFFEDATCLEPTNVVAWTLLGLYYEIQNNDIRMEMAFHEASKQLQARMLQAQVTKQKSTGVEDTEERGKRESSLGPWGITNGSATAIKVEAPAGPGAALSILDKFLEESSKLQSDSQEPILTTQTWDPSISQKPSNTFIKEIPTKKEASKCQDSSALLHPGLHYGVSQTTTIFMETIHFLMKVKAVQYVHRVLAHELLCPQGGPSCEYYLVLAQTHILKKNFAKAEEYLQQAAQMDYLNPNVWGLKGHLYFLSGNHSEAKACYERTISFVVDASEMHFIFLRLGLIYLEEKELEELTEAEDALSEANALNNYNAEVWAYLALVCLKVGRQLEAEQAYKYMIKLKLKDEALLAEIHTLQETVGFGNPSF

SEQ ID NO: 95910 - protein, 191 aa, Homo sapiens
MEHKDDDDDDVSFAKWMSSFWGHSWREEDQRGLRERHRLQATSHRKTSLPCPSFYTVNFFILYSQLPVLPRIPSSDCHPRRHSHEDQEFRCRSHVRDYRKYSEDGSFKEPLESKGRSHSKIEKFSESFERQLCFRTKRSASLGPESRKERNERECLRMEIKSRKKVEEERSSRKEEHGEAHMAPLFEKGPE

SEQ ID NO: 95911 - protein, 131 aa, Homo sapiens
MPFNGEKQCVGEDQPSDSDSSRFSESMASLSDYECSRQSFASDSSSKSSSPASTSPPRVVTFDEVMATARNLSNLTLAHEIAVNENFQLKQEALPEKSLAGRVKHIVHQAFWDVLDSELNADPPEFEHAIK

SEQ ID NO: 95912 - protein, 72 aa, Homo sapiens
  MOD_RES (1)..(1): Any amino acid
XQVTVRDPSGRPLRLPPVLSHPIFDNHDRHRIEEKRKRTYETFKSIMKKSPFSGPTDPRPPPRRIAVPSRSS

SEQ ID NO: 95913 - protein, 42 aa, Homo sapiens
  MOD_RES (1)..(1): Any amino acid
XKPINQVTLTSLDIPFAMFAPKNLELEDTDPMVSPPLTTSSQ

SEQ ID NO: 95914 - protein, 150 aa, Homo sapiens
  MOD_RES (1)..(1): Any amino acid
XKYVEDEMARLPDRLSVTWPEGDELLPNEVRPAGTPIGALRIEILNKKGEAMQKLPGTSHGGSKKLLVELKVILHSSSGNKEIISHISQHGGKWPYWFKKMENIQKLGNYTLKLQVVLNESNADTYAGRPLPSKAIKFSVKVVYLYIMKK

SEQ ID NO: 95915 - protein, 1600 aa, Homo sapiens
MELGRLEIPAELAVMLKTAESHRDALAGSITECLPPEVPARPSLTLPADIDLFPFSSFVAIGFQEPSLPRPGQPLAKPLTQLDGDNPQRALDINKVMLRLLGDGSLESWQRQIMGAYLVRQGQCRPGLRNELFSQLVAQLWQNPDEQQSQRGWALMAVLLSAFPPLPVLQKPLLKFVSDQAPRGMAALCQHKLLGALEQSQLASGATRAHPPTQLEWLAGWRRGRMALDVFTFSEECYSAEVESWTTGEQLAGWILQSRDAWQDLAGCDFVLDLISQTEDLGDPARPRSYPITPLGSAEAIPLAPGIQAPSLPPGPPPGPAPTLPSRDHTGEVQRSGSLDGFLDQIFQPVISSGLSDLEQSWALSSRMKGGGAIGPTQQGYPMVYPGMIQMPAYQPGMVPAPMPMMPAMGTVPAMPAMVVPPQPPLPSLDAGQLAVQQQNFIQQQALILAQQMTAQAMSLSLEQQMQQRQQQARASEAASQASPSAVTSKPRKPPTPPEKPQRDLGSEGGCLRETSEEAEDRPYQPKSFQQKRNYFQRMGQPQITVRTMKPPAKVHIPQGEAQEEEEEEEEEEEQEEQEVETRAVPSPPPPPIVKKPLKQGGAKAPKEAEAEPAKETAAKGHGQGPAQGRGTVVRSSDSKPKRPQPSREIGNIIRMYQSRPGPVPVPVQPSRPPKAFLRKIDPKDEALAKLGINGAHSSPPMLSPSPGKGPPPAVAPRPKAPLQLGPSSSIKEKQGPLLDLFGQKLPIAHTPPPPPAPPLPLPEDPGTLSAERRCLTQPVEDQGVSTQLLAPSGSVCFSYTGTPWKLFLRKEVFYPRENFSHPYYLRLLCEQILRDTFSESCIRISQNERRKMKDLLGGLEVDLDSLTTTEDSVKKRIVVAARDNWANYFSRFFPVSGESGSDVQLLAVSHRALAHDPGLEVGAGGKVTSVHARSLRSFAEVLGVECRGGSTLELSLKSEQLVLHTARARAIEALVELFLNELKKDSGYVIALRSYITDNCSLLSFHRGDLIKLLPVATLEPGWQFGSAGGRSGLFPADIVQPAAAPDFSFSKEQRSGWHKGQLSNGEPGLARWDRASERPAHPWSQAHSDDSEATSLSSVAYAFLPDSHSYTMQEFARRYFRRSQALLGQTDGGAAGKDTDSLVQYTKAPIQESLLSLSDDVSKLAVASFLALMRFMGDQSKPRGKDEMDLLYELLKLCQQEKLRDEIYCQVIKQVTGHPRPEHCTRGWSFLSLLTGFFPPSTRLMPYLTKFLQDSGPSQELARSSQEHLQRTVKYGGRRRMPPPGEMKAFLVAAEVQEELCRQMGITEPQEVQEFALFLIKEKSQLVRPLQPAEYLNSVVVDQDVSLHSRRLHWETPLHFDNSTYISTHYSQVLWDYLQGKLPVSAKADAQLARLAALQHLSKANRNTPSGQDLLAYVPKQLQRQVNTASIKNLMGQELRRLEGHSPQEAQISFIADLGDQAEQVPGPQQSDFLPAPSPPAEAMSQLPLFGYTVYGVLRVSMQALSGPTLLGLNRQHLILMDPSSQSLYCRIALKSLQRLHLLSPLEEKGPPGLEVNYGSADNPQTIWFELPQAQELLYTTVFLIDSSASCTEWPSIN

SEQ ID NO: 95916 - protein, 80 aa, Homo sapiens
  MOD_RES (1)..(1): Any amino acid
XNGPVLWFKGTGPNRKLIYNFKQEQNPRPPKNRPAGRAGSRAHHDAHTCLSALPERNSTNYFVQPCCCLRLLGLTGLLSK

SEQ ID NO: 95917 - protein, 198 aa, Homo sapiens
  MOD_RES (1)..(1): Any amino acid
XEEGTSSSEKSKSSGSSRSKRKPSIVTKYVESDDEKPLDDETVNEDASNENSENDITMQSLPKGTVIVQPEPVLNEDKDDFKGPEFRSRSKMKTENLKKRGDGLHGIVSCTACGQQVNHFQKDSIYRHPSLQVLICKNCFKYYMSDDISRDSDGMDEQCRWCAEGGNLICCDFCHNAFCKKCILRNLGRKELSTIMDE

SEQ ID NO: 95918 - protein, 207 aa, Homo sapiens
MVSQSTVRQDSPVEPWEGISDHSGIIDGSPRLLNTDHPPCQLDIRLMRHKAVWINPQDVQQQPQDLQSQVPAAGNSGTHFVTDAASPSGPSPSCLGDSLAETTLSEDTTDSVGSASPHGSSEKSSSFSLSSTEVHMVRPGYSHRVSLPTSPGILATSPYPETDSAFFEPSHLTSAADEGAVQVSRRTISSNSFSPEVFVLPVDVEKI

SEQ ID NO: 95919 - protein, 80 aa, Homo sapiens
  MOD_RES (1)..(1): Any amino acid
XIVSVLAPEKLSASTRRRYETQWDADEQAFNTTVKQLLSRLPKQRYLKLVCDEIYNIKVEKKVSVLFLYSYRDDYYRILF

SEQ ID NO: 95920 - protein, 239 aa, Homo sapiens
MVSISGPGQAGVLHRRLRAHRQRGLREHRQRPRAALRVQRERGRLPLRRRAGPRSLPRLRRLPAARCALPANQQRPRPPARGVAGPGLLRTLVLPVVRGLLLPHQSVAAHGARAGHDAGGGRGAGRHRLQLLLHPQLGGAHREGPAAVPPGHRHVTLRHRTAEHRGEPGLPRLSGGQRRGGHRDLPEPALHRDPGHQPQRVPGARLLAAGRHRPGLQGHPTNAGPRVSGTSLGSFQLSA

SEQ ID NO: 95921 - protein, 167 aa, Homo sapiens
MDWKEVLRRRLATPNTCPNKKKSEQELKDEEMDLFTKYYSEWKGGRKNTNEFYKTIPRFYYRLPAEDEVLLQKLREESRAVFLQRKSRELLDNEELQNLWFLLDKHQTPPMIGEEAMINYENFLKVGEKAGAKCKQFFTAKVFAKLLHTDSYGRISIMQFFNYVMRK

SEQ ID NO: 95922 - protein, 153 aa, Homo sapiens
FSLLISYYGLVFDLQSLGRDIFLLQALFGAVDFLGRATTALLLSFLGRRTIQAGSQAMAGLAILANMLVPQDLQTLRVVFAVLGKGCFGISLTCLTIYKAELFPTPVRLVVLFFLPETQGLPLPDTIQDLESQKSTAAQGNRQEAVTVESTSL

SEQ ID NO: 95923 - protein, 215 aa, Homo sapiens
  MOD_RES (1)..(1): Any amino acid
XAGVSGPAGRGRGGEHGPQVPLSQPPEDELDRLTKKLVHDMNHPPSGEYFGQCGGCGEDVVGDGAGVVALDRVFHVGCFVCSTCRAQLRGQHFYAVERRAYCEGCYVSRSVAQTGVQWGDLCSLQPQPALVQAILMPQAPEQLGLQATLEKCATCSQPILDRILRAMGKAYHPGCFTCVVCHRGLDGIPFTVDATSQIHCIEDFHRKFAPRCSVC

SEQ ID NO: 95924 - protein, 81 aa, Homo sapiens
MEISRLAQSKRNIISLNMDLERDTQRIDEANQKLLLKIQEREDKIQRLESEIIQTRGLVEDEEWEKENRTTMERERALQEL

SEQ ID NO: 95925 - protein, 266 aa, Homo sapiens
ELAAKVVQMFYVAEPKQVPHILCSPSMKNINPLTAMSYLRKLDTSGFSSILVTLTKAAVALKMGDLDMHRNEMKSHSEMKLVCGFILEPRLLIQQRKGQIVPTELALHLKETQPGLLVASVLGLQKNNKIGIEEADSFFKVLCAKDEDTIPQLLVDFWEAQLVACLPDVVLQELFFKLTSQYIWRLSKRQPPDTTPLRTSEDLINACSHYGLIYPWVHVVISSDSLADKNYTEDLSKLQLPLFRSWSHFQKTLLPASVSMFCVVHA

SEQ ID NO: 95926 - protein, 490 aa, Homo sapiens
MILADFQACTGIENIDEAITLLEQNNWDLVAAINGVIPQENGILQSEYGGETIPGPAFNPASHPASAPTSSSSSAFRPVMPSRQIVERQPRMLDFRVEYRDRNVDVVLEDTCTVGEIKQILENELQIPVSKMLLKGWKTGDVEDSTVLKSLHLPKNNSLYVLTPDLPPPSSSSHAGALQEFSSRYGDCHPVFFIGSLEAAFQEAFYVKARDRKLLAIYLHHDESVLTNVFCSQMLCAESIVSYLSQNFITWAWDLTKDSNRARFLTMCNRHFGSVVAQTIRTQKTDQFPLFLIIMGKRSSNEVLNVIQGNTTVDELMMRLMAAMEIFTAQQQEDIKDEDEREARENVKREQDEAYRLSLEADRAKREAHEREMAEQFRLEQIRKEQEEEREAIRLSLEQALPPEPKEENAEPVSKLRIRTPSGEFLERRFLASNKLQIVFDFVASKGFPWDEYKLLSTFPRRDVTQLDPNKSLLEVKLFPQETLFLEAKE

SEQ ID NO: 95927 - protein, 140 aa, Homo sapiens
  MOD_RES (1)..(1): Any amino acid
XRMKGLAGFARLCVGDQYEAASSYLFPQICMKYGRQRWKLRGRIEGSGKQVWDSEETIFLPLLTEFLSIKVTELKGLANHVVVGSVSCETKDLFAALPQVVAVDINDLGTIKLSLEVTWSPFDKDDQPSAASSVNKASTV

SEQ ID NO: 95928 - protein, 180 aa, Homo sapiens
MVPWVRTMGQKLKQRLRLDVGREICRQYPLFCFLLLCLSAASLLLNRYIHILMIFWSFVAGVVTFYCSLGPDSLLPNIFFTIKYKPKQLGLQELFPQGHSCAVCGKVKCKRHRPSLLLENYQPWLDLKISSKVDASLSESLTLSPRLVYSGNILAHCNLCLSGSSDTPASAPQIAGNTGS

SEQ ID NO: 95929 - protein, 2489 aa, Homo sapiens
MPAILVASKMKSGLPKPVHSAAPILHVPPARAGPQPCYLKLGSKVEVSKTTYPSQIPLKSQVLQGLQEPAGEGLPLRKSGSVENGFDTQIYTDWANHYLAKSGHKRLIRDLQQDVTDGVLLAQIIQVVANEKIEDINGCPKNRSQMIENIDACLNFLAAKGINIQGLSAEEIRNGNLKAILGLFFSLSRYKQQQQQPQKQHLSSPLPPAVSQVAGAPSQCQAGTPQQQVPVTPQAPCQPHQPAPHQQSKAQAEMQSSASSKDSSQSKIIRFTLGQKKISRLPGPTARVSAAGSEAKTRGGSTTANNRRSQSFNNYDKSKPVTSPPPPPSSHEKEPLASSASSHPGMSDNAPASLESGSSSTPTNCSTSSAIPQPGAATKPWRSKSLSVKHSATVSMLSVKPPGPEAPRPTPEAMKPAPNNQKSMLEKLKLFNSKGGSKAGEGPGSRDTSCERLETLPSFEESEELEAASRMLTTVGPASSSPKIALKGIAQRTFSRALTNKKSSLKGNEKEKEKQQREKDKEKSKDLAKRASVTERLDLKEEPKEDPSGAAVPEMPKKSSKIASFIPKGGKLNSAKKEPMAPSHSGIPKPGMKSMPGKSPSAPAPSKEGERSRSGKLSSGLPQQKPQLDGRHSSSSSSLASSEGKGPGGTTLNHSISSQTVSGSVGTTQTTGSNTVSVQLPQPQQQYNHPNTATVAPFLYRSQTDTEGNVTAESSSTGVSVEPSHFTKTGQPALEELTGEDPEARRLRTVKNIADLRQNLEETMSSLRGTQVTHSTLETTFDTNVTTEMSGRSILSLTGRPTPLSWRLGQSSPRLQAGDAPSMGNGYPPRANASRFINTESGRYVYSAPLRRQLASRGSSVCHVDVSDKAGDEMDLEGISMDAPGYMSDGDVLSKNIRTDDITSGYMTDGGLGLYTRRLNRLPDGMAVVRETLQRNTSLGLGDADSWDDSSSVSSGISDTIDNLSTDDINTSSSISSYANTPASSRKNLDVQTDAEKHSQVERNSLWSGDDVKKSDGGSDSGIKMEPGSKWRRNPSDVSDESDKSTSGKKNPVISQTGSWRRGMTAQVGITMPRTKPSAPAGALKTPGTGKTDDAKVSEKGRLSPKASQVKRSPSDAGRSSGDESKKPLPSSSRTPTANANSFGFKKQSGSAAGLAMITASGVTVTSRSATLGKIPKSSALVSRSAGRKSSMDGAQNQDDGYLALSSRTNLQYRSLPRPSKSNSRNGAGNRSSTSSIDSNISSKSAGLPVPKLREPSKTALGSSLPGLVNQTDKEKGISSDNESVASCNSVKVNPAAQPVSSPAQTSLQPGAKYPDVASPTLRRLFGGKPTKQVPIATAENMKNSVVISNPHATMTQQGNLDSPSGSGVLSSGSSSPLYSKNVDLNQSPLASSPSSAHSAPSNSLTWGTNASSSSAVSKDGLGFQSVSSLHTSCESIDISLSSGGVPSHNSSTGLIASSKDDSLTPFVRTNSVKTTLSESPLSSPAASPKFCRSTLPRKQDSDPHLDRNTLPKKGLRYTPTSQLRTQEDAKEWLRSHSAGGLQDTAANSPFSSGSSVTSPSGTRFNFSQLASPTTVTQMSLSNPTMLRTHSLSNADGQYDPYTDSRFRNSSMSLDEKSRTMSRSGSFRDGFEEESWEKSSVDNFVSRLHSSLHFSLPLFHHARYELVHGSSLSLVSSTSSVYSTPEEKCQSEIRKLRRELDASQEKVSALTTQLTANAHLVAAFEQSLGNMTIRLQSLTMTAEQKDSELNELRKTIELLKKQNAAAQAAINGVINTPELNCKGNGTAQSADLRIRRQHSSDSVSSINSATSHSSVGSNIESDSKKKKRKNWVNIQLRSSFKQAFGKKKSPKSASSHSDIEEMTDSSLPSSPKLPHNGSTGSTPLLRNSHSNSLISECMDSEAETVMQLRNELRDKEMKLTDIRLEALSSAHQLDQLREAMNRMQSEIEKLKAENDRLKSESQGSGCSRAPSQVSISASPRQSMGLSQHSLNLTESTSLDMLLDDTGECSARKEGGRHVKIVVSFQEEMKWKEDSRPHLFLIGCIGVSGKTKWDVLDGVVRRLFKEYIIHVDPVSQLGLNSDSVLGYSIGEIKRSNTSETPELLPCGYLVGENTTISVTVKGLAENSLDSLVFESLIPKPILQRYVSLLIEHRRIILSGPSGTGKTYLANRLSEYIVLREGRELTDGVIATFNVDHKSSKELRQYLSNLADQCNSENNAVDMPLVIILDNLHHVSSLGEIFNGLLNCKYHKCPYIIGTMNQATSSTPNLQLHHNFRWVLCANHTEPVKGFLGRFLRRKLMETEISGRVRNMELVKIIDWIPKVWHHLNRFLEAHSSSDVTIGPRLFLSCPIDVDGSRVWFTDLWNYSIIPYLLEAVREGLQLYGRRAPWEDPAKWVMDTYPWAASPQQHEWPPLLQLRPEDVGFDGYSMPREGSTSKQMPPSDAEGDPLMNMLMRLQEAANYSSPQSYDSDSNSNSHHDDILDSSLESTL

SEQ ID NO: 95930 - protein, 249 aa, Homo sapiens
MIRTFPGENKKYFKRSELAKKEEEAYFERCGYKPINEKPSGEIQPKEEDQKPLTSSNPVLELELAEEKLPMTLSRQEVIRRLRERGEPIRLFGETDYDAFQRLRKIEILTPEVNKGLRNDLKAALDKIDQQYLNEIVGGQEPGEEDTQNDLKVHEENTTIEELEALGESLGKGDDHKDMDIITKFLKFLLGVWAKELNAREDYVKRSVQGKLNSATQKQTESYLRPLFRKLRKRNLPADIKESITDIIK

SEQ ID NO: 95931 - protein, 57 aa, Homo sapiens
MATDWLGSIVSINCGDSLGVYQGRVSAVDQVSQTISLTRPFHNGVKCLVPEVTFRVI

SEQ ID NO: 95932 - protein, 849 aa, Homo sapiens
MSAGEVERLVSELSGGTGGDEEEEWLYGGPWDVHVHSDLAKDLDENEVERPEEENASANPPSGIEDETAENGVPKPKVTETEDDSDSDSDDDEDDVHVTIGDIKTGAPQYGSYGTAPVNLNIKTGGRVYGTTGTKVKGVDLDAPGSINGVPLLEVDLDSFEDKPWRKPGADLSDYFNYGFNEDTWKAYCEKQKRIRMGLEVIPVTSTTNKITAEDCTMEVTPGAEIQDGRFNLFKVQQGRTGNSEKETALPSTKAEFTSPPSLFKTGLPPSRNSTSSQSQTSTASRKANSSVGKWQDRYGRAESPDLRRLPGAIDVIGQTITISRVEGRRRANENSNIQLPYDSRWEFPRDGLVLGRVLGSGAFGKVVEGTAYGLSRSQPVMKVAVKMLKPTARSSEKQALMSELKIMTHLGPHLNIVNLLGACTKSGPIYIITEYCFYGDLVNYLHKNRDSFLSHHPEKPKKELDIFGLNPADESTRSYVILSFENNGDYMDMKQADTTQYVPMLERKEVSKYSDIQRSLYDRPASYKKKSMLDSEVKNLLSDDNSEGLTLLDLLSFTYQVARGMEFLASKNCVHRDLAARNVLLAQGKIVKICDFGLARDIMHDSNYVSKGSTFLPVKWMAPESIFDNLYTTLSDVWSYGILLWEIFSLGGTPYPGMMVDSTFYNKIKSGYRMAKPDHATSEVYEIMVKCWNSEPEKRPSFYHLSEIVENLLPGQYKKSYEKIHLDFLKSDHPAVARMRVDSDNAYIGVTYKNEEDKLKDWEGGLDEQRLSADSGYIIPLPDIDPVPEEEDLGKRNRHSSQTSEESAIETGSSSSTFIKREDETIEDIDMMDDIGIDSSDLVEDSFL

SEQ ID NO: 95933 - protein, 99 aa, Homo sapiens
NTYYSNTEFIILVIDSTDRDRLLTTREELYKMLAHEALQDASVLIFANKQDVKDSMRMVEISHFLTLSTIKDHSWHIQGCCALTREGLVAALPGSLGPG

SEQ ID NO: 95934 - protein, 71 aa, Homo sapiens
MTGKLAEKLPVTMSSLLNQLPDNLYPEEIPSALNLFSGSSDSVVHYNQMATASHPGWSHVRRGVPAVGERM

SEQ ID NO: 95935 - protein, 287 aa, Homo sapiens
MDPKQTTLLCLVLCLGQRIQAQEGDFPMPFISAKSSPVIPLDGSVKIQCQAIREAYLTQLMIIKNSTYREIGRRLKFWNETDPEFVIDHMDANKAGRYQCQYRIGHYRFRYSNTLELVVTGLYGKPFLSADRGLVLMPGENISLTCSSAHIPFDRFSLAKEGELSLPQHQSGEHPANFSLGPVDLNVSGIYRCYGWYNRSPYLWSFPSNALELVVTDSIHQDYTTQNLIRMAVAGLVLVALLAILVENWHSHTALNKEASADVAEPSWSQQMCQPGLTFARTPSVCK

SEQ ID NO: 95936 - protein, 291 aa, Homo sapiens
  MOD_RES (1)..(1): Any amino acid
XPRCRRLQLKDMIPTEMQRLTKYPLLLQSIGQNTEEPTEREKVELAAECCREILHHVNQAVRDMEDLLRLKDYQRRLDLSHLRQSSDPMLSEFKNLDITKKKLVHEGPLTWRVTKDKAVEVHVLLLDDLLLLLQRQDERLLLKSHSRTLTPTPDGKTMLRPVLRLTSAMTREVATDHKAFYVLFTWDQEAQIYELVAQTVSERKNTREPLLSSSENGNGGRETSPADARTERILSDLLPFCRPGPEGQLAATALRKVLSLKQLLFPAEEDNGAGPPRDGDGVPGGGPLSPA

SEQ ID NO: 95937 - protein, 74 aa, Homo sapiens
  MOD_RES (1)..(1): Any amino acid
XPNAANTILRQLDMELISLKRQVQNAKQVNSALKQKMEGGIEEFKPPESNQKINARWTTEEQLLAVQGDWLLGK

SEQ ID NO: 95938 - protein, 195 aa, Homo sapiens
  MOD_RES (1)..(1): Any amino acid
XGTTEYHPFTLTSAPHEDTLSLHIRAAGPWTTRLREIYSAPTGDRCARYPKLYLDGPFGEGHQEWHKFEVSVLVGGGIGVTPFASILKDLVFKSSVSCQVFCKKIYFIWVTRTQRQFEWLADIIREVEENDHQDLVSVHIYITQLAEKFDLRTTMLACAPSPTLAVPPLSPSSTPCRRSTPRSGRSGCLAVAPLA

SEQ ID NO: 95939 - protein, 74 aa, Homo sapiens
  MOD_RES (1)..(1): Any amino acid
XFFRYRCGRVEGTGPEGGTDADSAVARPTAPAFLTRSSLVRPAGSRRLAPVGRTEDSPASAPWVQTVFVCSCCG

SEQ ID NO: 95940 - protein, 220 aa, Homo sapiens
  MOD_RES (1)..(1): Any amino acid
XKVLKEISVGELNPNETVQANLEAQLLSKLDHPAIVKFHASFVEQDNFCIITEYCEGRDLDDKIQEYKQAGKIFPENQIIEWFIQLLLGVDYMHERRILHRDLKSKNVFLKNNLLKIGDFGVSRLLMGSCDLATTLTGTPHYMSPEALKHQGYDTKSDIWSLACILYEMCCMNHAFAGSNFLSIVLKIVEGDTPSLPERYPKELNAIMERYRNKHVVTEI

SEQ ID NO: 95941 - protein, 165 aa, Homo sapiens
RWKIEQLQIQMEAAPFRSKEPCMAEEVCSMSWYTPMPIKKGSVVMRVDISSNGLGTFIPDKRFQMNINGFLKRDRDNNIQFTVGEELFNLMPQYFVGVSSRPLWHTVDQSPVLILGGIPNEKYVLMTDTSFKDFSLVEAVGFVSWPASASRSCALCISIAMALST

SEQ ID NO: 95942 - protein, 64 aa, Homo sapiens
ARKMRKYYLICLQQILQDDGKEGAEKKIMNAASKLATMAKLLETPISSEEAKSQKDNSPKRTQG

SEQ ID NO: 95943 - protein, 102 aa, Homo sapiens
QLRCLPVARCRQALVPRAFHASAVGLRSSDEQKQQPPNSFSQQHSETQGAEKPDPESSHSPPRYTDQGGEEEEDYESEEQLQHRILTAALEFVPAHGWTAEV

SEQ ID NO: 95944 - protein, 190 aa, Homo sapiens
MTNLKDIGLYNLRNITRGAIRIEKNADLCYLSTVDWSLILDAVSNNYIVGNKPPKECGDLCPGTMEEKPMCEKTTINNEYNYRCWTTNRCQKMCPSTCGKRACTENNECCHPECLGSCSAPDNDTACVACRHYYYAGVCVPACPPNTYRFEGWRCVDRDFCANILSAESSDSEGFVIHDGECMQECPSGF

SEQ ID NO: 95945 - protein, 144 aa, Homo sapiens
MELVLVFLCSLLAPMVLASAAEKEKEMDPFHYDYQTLRIGGLVFAVVLFSVGILLILSRRCKCSFNQKPRNRAPESRELKCSHQVEGGSPKGDVDPFYYDYETVRNGGLIFAGLAFIVGLLILLSRRFRCGGNKKRRQINEDEP

SEQ ID NO: 95946 - protein, 149 aa, Homo sapiens
  MOD_RES (1)..(1): Any amino acid
XALGAVIALLLWGQLFAVDSGNDVTDIADDGCPKPPEIAHGYVEHSVRYQCKNYYKLRTEGDGVYTLNDKKQWINKAVGDKLPECEADDGCPKPPEIAHGYVEHSVRYQCKNYYKLRTEGDGVYTLNNEKQWINKAVGDKLPECEAGGC

SEQ ID NO: 95947 - protein, 282 aa, Homo sapiens
MLLWPLRGWAARALRCFGPGSRGSPASGPGPRRVQRRAWPPDKEQEKEKKSVICVEGNIASGKTTCLEFFSNATDVEVLTEPVSKWRNVRGHNPLGLMYHDASRWGLTLQTYVQLTMLDRHTRPQVSSVRLMERSIHSARYIFVENLYRSGKMPEVDYVVLSEWFDWILRNMDVSVDLIVYLRTNPETCYQRLKKRCREEEKVIPLVGSALSTPDRLLVFPWQEYLEAIHHLHEEWLIKGSLFPMAAPVLVIEADHHMERMLELFEQNRDRILTPENRKHCP

SEQ ID NO: 95948 - protein, 140 aa, Homo sapiens
MAYEKSTDISDVSRSMFLYPWLEYPDKTKELRKAMAPVHLPLSCYQMPKEEFPPSPECWRQHPSKPNSVPYCYFKKPEIYTHWHDLYDQREEREAEKMLRKMRDDCRYIKEELTKSLESPREDEQFYAAQALGCLRISDK

SEQ ID NO: 95949 - protein, 83 aa, Homo sapiens
MLREEAAQKRKGKESGMALPQGRLTFRDVAIEFSLAEWKFLNPAQRALYREVMLENYRNLEAVDISSKHMMKEVLSTGQGNRE

SEQ ID NO: 95950 - protein, 159 aa, Homo sapiens
  MOD_RES (1)..(1): Any amino acid
XVDENGTLDLSMNKQRPRDSCCPILTPLEPMSPQQQAVMNNRCFQLGEGDCWDLPVDYTKMKPRRIDEDESKDITPEDLDPFQEALEERRYPGEVTIPSPKPKYPQCKESKKDLITLSGCPLADKSIRSMLATSSQELNRSTAAGRACALAAVPMDTSR

SEQ ID NO: 95951 - protein, 221 aa, Homo sapiens
MSGEATVLAYHAPEEQEGLLVVKVEEENYVLDQDFGLQENPWSQEVFRQKFRQFSYSDSTGPREALSRLRELCCQWLRPEVHSKEQILELLMLEQFLAILPEELQAWLREHRPENGEEAVTMLEELEKELEEPRQQDTTHGQEMFWQEMTSTGALKSLSLNSPVQPLENQCKTETQESQAFQERDGVSLYHPGWSAVVQPQLTAAALNPWVKVILLPQPPE

SEQ ID NO: 95952 - protein, 301 aa, Homo sapiens
MSGTEEAILGGRDSHPAAGGGSVLCFGQCQYTAEEYQAIQKALRQRLGPEYISSRMAGGGQKVCYIEGHRVINLANEMFGYNGWAHSITQQNVDFVDLNNGKFYVGVCAFVRVQLKDGSYHEDVGYGVSEGLKSKALSLEKARKEAVTDGLKRALRSFGNALGNCILDKDYLRSLNKLPRQLPLEVDLTKAKRQDLEPSVEEARYNSCRPNMALGHPQLQQVTSPSRPSHAVIPADQDCSSRSRGCCSGARPRRRPLMQKPELIRRGERGHAPAEAPAEAAAAAVPGADGEAAGSSLHAVS

SEQ ID NO: 95953 - protein, 235 aa, Homo sapiens
MDDRKRAKRKSSYREQQPGPPRGRNALWGAADADRRGLGQERRGFTMLAGLKLLSSSDLPTSASRSAGTTSVSHRAQPFERFEAEELCVNGPVGMMSGEPLHVKTPIRDSMALSKMAGTSVYLKMDSAQPSGSFKIRGIGHFCKRWAKQGCAHFVCSSAGNAGMAAAYAARQLGVPATIVVPSTTPALTIERLKNEGATVKVVGELLDEAFELAKALAKNNPGWVYIPPFDDPLI

SEQ ID NO: 95954 - protein, 72 aa, Homo sapiens
MDFPCLWLGLLLPLVAALDFNYHRQEGMEAFLKTVAQNYSSVTHLHSIGKSVKETCGFLLWGGFQRNTELGF

SEQ ID NO: 95955 - protein, 80 aa, Homo sapiens
MGLCKCPKRKVTNLFCFEHRVNVCEHCLVANHAKISFTGPASMNVLPSYPETRHLPAISAPAAMAPSSPQPTWLAPWPPH

SEQ ID NO: 95956 - protein, 59 aa, Homo sapiens
MSPAPDAAPAPASISLFDLSADAPVFQGLSLAQGREKAQKESYSRVLWIFQRSYFVQLV

SEQ ID NO: 95957 - protein, 261 aa, Homo sapiens
MTGLALLYSGVFVAFWACALAVGVCYTIFDLGFRFDVAWFLTETSPFMWSNLGIGLAISLSVVGAAWGIYITGSSIIGGGVKAPRIKTKNLVSIIFCEAVAIYGIIMAIVISNMAEPFSATDPKAIGHRNYHAGYSMFGAGLTVGLSNLFCGVCVGIVGSGAALADAQNPSLFVKILIVEIFGSAIGLFGVIVAILQVMNPLGKPLCPCPQPSLTLLLEKLKCSPSLPITIDSPKQLPPPHFHLLVFSYRGSLFLSLIWCH

SEQ ID NO: 95958 - protein, 259 aa, Homo sapiens
MTEQEEAEWESINVLLMMHGLKPLSLVKRTDLKDLIIFDKQSSQRMRQNLKLLVEETSCQQNMIQELIETNQQLRNELQLEQSRAANQEQRANDLEQIMESVKSKIGELEDESLSRACHQQNKIKDLQKEQKTLQVKCQHYKKKRTEQEETIASLQMEVCRLKKEEEDRIVTQNRVFAYLCKRVPHTVLDRQLLCLIDYYESKIRKIHTQRQYKEDESQSEEENDYRNLDASPTYKGLLMSLQNQLKESKSKIDALSSE

SEQ ID NO: 95959 - protein, 357 aa, Homo sapiens
  MOD_RES (1)..(1): Any amino acid
XSFSLSLFRKHVLGPCSVSLQSPLRDSVLATSGSLAHQPISRPPCLAPVGSLLNFMASHGNDAARARFESKVPSFYYRPTPSDCQLLREQWIRAKYERQEFIYPEKQEPYSAGYREGFLWKRGRDNGQFLSRKFVLTEREGALKYFNRNDAKEPKAVMKIEHLNATFQPAKIGHPHGLQVTYLKDNSTRNIFIYHEDGKEIVDWFNALRAARFHYLQVAFPGAGDADLVPKLSRNYLKEGYMEKTGPKQTEGFRKRWFTMDDRRLMYFKDPLDAFARGEVFIGSKESGYTVLHGFPPSTQGHHWPHGITIVTPDRKFLFACETESDQREWVAAFQKAVDRPMLPQEYAVEAHFKHKP

SEQ ID NO: 95960 - protein, 71 aa, Homo sapiens
MAPLALHLLVLVPILLSLVASQDWKAERSQDPFEKCMQDPDYEQLLKVVTWGLNRTLKPQRVIVVGAGVAG

SEQ ID NO: 95961 - protein, 178 aa, Homo sapiens
MSKGPAVGIDLGTTYSCVGVFQHGKVEIIANDQGNRTTPSYVAFTDTERLIGDAAKNQVAMNPTNTVFDAKRLIGRRFDDAVVQSDMKHWPFMVVNDAGRPKVQVEYKGETKSFYPEEVSSMVLTKMKEIAEAYLGKTVTNAVVTVPAYFNDSQRQATKDAGTIAGLNVLRIINEPTA

SEQ ID NO: 95962 - protein, 141 aa, Homo sapiens
METDLAEMPEKGALSSQDSPHFQEKSTEEGEVAALRLTARSQETVTFKDVAMDFTPEEWGKLDPAQRDVMLENYRNLVSLWLPVSKPESYNLENGKEPLKLERKAPKSSYSAVAVIILFLIPYVHLESWFREITGRRISRS

SEQ ID NO: 95963 - protein, 126 aa, Homo sapiens
MQVPQHLKRSHQSHSSMLRPSCLLLRSSCHPRFLPFPSDAGQVNELDGIPLILDNCNISDSNPFLTQWVIYAIRNLTEDNSQNQDLIAKMEEQGLADASLLKKVGFEVEKKGEKLILKSTRDTPKP

SEQ ID NO: 95964 - protein, 131 aa, Homo sapiens
MSKQQPTQFINPETPGYVGFANLPNQVHRKSVKKGFEFTLMVVGESGLGKSTLINSLFLTDLYPERVIPGAAEKIERTVQIEASTVEIEERGVKLRLTVVDTPGYGDAINCRDCFKTIISYIDEQFERYLH

SEQ ID NO: 95965 - protein, 160 aa, Homo sapiens
MQFMLLFSRQGKLRLQKWYVPLSDKEKKKITRELVQTVLARKPKMCSFLEWRDLKIVYKRYASLYFCCAIEDQDNELITLEIIHRYVELLDKYFGSVCELDIIFNFEKAYFILDEFLLGGEVQETSKKNVLKAIEQADLLQEKTETMYHSKSFIGFKKAY

SEQ ID NO: 95966 - protein, 119 aa, Homo sapiens
  MOD_RES (1)..(1): Any amino acid
XYLSEVSLQKYDCPFSGTSFVVFSLFLICAMAGDVVYADIKTVRTSPLELAFPLQRSVSFNFSTVHKSCPAKDWKVHKGKCYWIAETKKSWNKSQNDCAINNSYLMVIQDITAMKSNLF

SEQ ID NO: 95967 - protein, 408 aa, Homo sapiens
MAVYWCTEALPLSVTALLPIVLFPFMGILPSNKVCPQYFLDTNFLFLSGLIMASAIEEWNLHRRIALKILMLVGVQPARLILGMMVTTSFLSMWLSNTASTAMMLPIANAILKSLFGQKEVRKDPSQESEENTAAVRRNGLHTVPTEMQFLASTEAKDHPGETEVPLDLPADSRKEDEYRRNIWKGFLISIPYSASIGGTATLTGTAPNLILLGQLKSFFPQCDVVNFGSWFIFAFPLMLLFLLAGWLWISFLYGGLSFRGWRKNKSEIRTNAEDRARAVIREEYQNLGPIKFAEQAVFILFCMFAILLFTRDPKFIPGWASLFNPGFLSDAVTGVAIVTILFFFPSQRPSLKWWFDFKAPNTETEPLLTWKKAQETVPWNIILLLGGGFAMAKGCEESGLSVWIGGQ

SEQ ID NO: 95968 - protein, 43 aa, Homo sapiens
MRTKAAGCAERRPLQPRTEAAAAPAGRDVHCLCLECGSFISSS

SEQ ID NO: 95969 - protein, 15 aa, Homo sapiens
MGEVEAPGRLWLESP

SEQ ID NO: 95970 - protein, 358 aa, Homo sapiens
MEALLEGIQNRGHGGGFLTSCEAELQELMKQIDIMVAHKKSEWEGRTHALETCLKIREQELKSLRSQLDVTHKEVGMLHQQVEEHEKIKQEMTMEYKQELKKLHEELCILKRSYEKLQKKQMREFRGNTKNHREDRSEIERLTAKIEEFRQKSLDWEKQRLIYQQQVSSLEAQRKALAEQSEIIQAQLVNRKQKLESVELSSQSEIQHLSSKLERANDTICANELEIERLTMRVNDLVGTSMTVLQEQQQKEEKLRESEKLLEALQEEKRELKAALQSQENLIHEARIQKEKLQEKVKATNTQHAVEAIRPREESLAEKKYTSQGQGDLDSVLSQLNFTHTSEDLLQAEVTCLEVWNL

SEQ ID NO: 95971 - protein, 137 aa, Homo sapiens
  MOD_RES (1)..(1): Any amino acid
XDAEKNREEFEDQSLEKDSDDKTPDDDPEQGKSEEEPNKTCESSNTSATTTSIQPNLENSNSSSELNSSQSESAKAADDPENGERESHTPVSIQEEIVGDFKSEKSNGELSESPGAGKGASGSTRIITRLRNPDSKL

SEQ ID NO: 95972 - protein, 1251 aa, Homo sapiens [sequence omitted]

SEQ ID NO: 95973 - protein, 14 aa, Homo sapiens
MQLMESEQKRVNKE

SEQ ID NO: 95974 - protein, 102 aa, Homo sapiens
MQKSEGSGGTQLKNRATGNYDQRTSSSTQLKHRNAVQGSKSSLSTSSPESARKLHPRPSDKLNPKTINPFGEQSRVPSAFAAIYSKGGIPCRLVHGSVKHRL

SEQ ID NO: 95975 - protein, 183 aa, Homo sapiens
MATQAKRPRVAGPVDGGDLDPVACFLSWCRRVGLELSPKSELRCRASRAGCHCCWRCSTSCRPRPHAGGPTLRSGPSWAAWSTRCSGTKTEAERHLVYERWDFLCKLEMVGEEGAFVIGREEVLTEEELTTTLKVLCMPAEEFRELKDQDGGGDDKREEGSLTITNIPKLKASWRQLLQNSVL

SEQ ID NO: 95976 - protein, 522 aa, Homo sapiens
MARLTKRRQADTKAIQHLWAAIEIIRNQKQIANIDRITKYMSRVHGMHPKETTRQLSLAVKDGLIVETLTVGCKGSKAGIEQEGYWLPGDEISIKKKNTNKQEMGTYLRFIVSRMKERAIDLNKKGKDNKHPMYRRLVHSAVDVPTIQEKVNEGKYRSYEEFKADAQLLLHNTVIFYGADSEQADIARMLYKDTCHEIPNHELVWAKMKGFGFWPAKVMQKEDNQVDVRFFGHHHQRAWIPSENIQDITVNIHRLHVKRSMGWKKACDELELHQRFLREGRFWKSKNEDRGEEEAESSISSTSNEQLKVTQEPRAKKGRRNQSVEPKKEEPEPETEAVSSSQEIPTMPQPIEKVSVSTQTKKLSASSPRMLHRSTQTTNDGVCQSMCHDKYTKIFNDFKDRMKSDHKRETERVVREALEKLRSEMEEEKRQAVNKAVANMQGEMDRKCKQVKEKCKEEFVEEIKKLATQHKQLISQTKKKQWCYNCEEEAMYHCCWNTSYCSIKCQQEHWHAEHKRTCRRKR

SEQ ID NO: 95977 - protein, 237 aa, Homo sapiens
KATKKTDKPRQEDKDDLDVTELTNEDLLDQLVKYGVNPGPIVGTTRKLYEKKLLKLREQGTESRSSTPLPTISSSAENTRQNGSNDSDRYSDNEEDSKIELKLEKREPLKGRAKTPVTLKQRRVEHNQVVNRVTGNFKHASPILPITEFSDIPRRAPKKPLTRAEVGEKTEERRVERDILKEMFPYEASTPTGISASCRRPIKGAAGRPLELSDFRMEESFSSKYVPKYVPLADVKS

SEQ ID NO: 95978 - protein, 305 aa, Homo sapiens
  MOD_RES (1)..(1): Any amino acid
XFSNSRFEDGDSSGFWRESSNDCEDNPTRNRGFSKRGGYRDGNNSEASGPYRRGGRGSFRGCRGGFGLGSPNNDLDPDECMQRTGGLFGSRRPVLSGTGNGDTSQSRSGSGSERGGYKGLNEEVITGSGKNSWKSEAEGGESSDTQGPKVTYIPPPPPEDEDSIFAHYQTGINFDKYDTILVEVSGHDAPPAILTFEEANLCQTLNNNIAKAGYTKLTPVQKYSIPIILAGRDLMACAQTGSGKTAAFLLPILAHMMHDGITASRFKELQEPECIIVAPTRELVNQIYLEARKFSFGLVSNRSNT

SEQ ID NO: 95979 - protein, 126 aa, Homo sapiens
MIDKNQTCGVGQDSVPYMICLIHILEEWFGVEQLEDYLNFANYLLWVFTPLILLILPYFTIFLLYLTIIFLHIYKRKNVLKEAYSHNLWDGARKTVATLWDGHAAVWHGYEVHGMEKIPEDGPALI

SEQ ID NO: 95980 - protein, 564 aa, Homo sapiens
  MOD_RES (1)..(1): Any amino acid
XSLILQKKPNIRNTSSMAGELRPASLVVLPRSLAPAFERFCQVNTGPLPLLGQSEPEKWMLPPQGAISETRMGHPQFWKYEFGACTGSLASLEQYSEQLKDMVAFFLGCSFSLEEALEKAGLPRRDPAGHSQAGAYKTTVPCVTHAGFCCPLVVTMRPIPKDKLEGLVRACCSLGGEQGQPVHMGDPELLGIKELSKPAYGDAMVCPPGEVPVFWPSPLTSLGAVSSCETPLAFASIPGCTVMTDLKDAKAPPGCLTPERIPEVHHISQDPLHYSIASVSASQKIRELESMIGIDPGNRGIGHLLCKDELLKASLSLSHARSVLITTGFPTHFNHEPPEETDGPPGAVALVAFLQALEKEVAIIVDQRAWNLHQKIVEDAVEQGVLKTQIPILTYQGGSVEAAQAFLCKNGDPQTPRFDHLVAIERAGRAADGNYYNARKMNIKHLVDPIDDLFLAAKKIPGISSTGVGDGGNELGMGKVKEAVRRHIRHGDVIACDVEADFAVIAGVSNWGGYALACALYILYSCAVHSQYLRKAVGPSRAPGDQAWTQALPSVIKESKGRKL

SEQ ID NO: 95981 - protein, 120 aa, Homo sapiens
MGLADASGPRDTQALLSATQAMDLRRRDYHMERPLLNQEHLEELGRWGSAPRTHQWRTWLQCSRARAYALLLQHLPVLVWLPRYPVRDWLLGDLLSGLSVAIMQLPQDLLSRPALLPFYP

SEQ ID NO: 95982 - protein, 466 aa, Homo sapiens
NSEFKSETAAIPSAPVLPPPPVHSSIPPPGPVPMGMPPMSKPPPVQQTVDYGHGRDISTNKVEQIPYGERITLRPDPLPERSTFETEHAGQRDRYDRERDREPYFDRQSNVIADHRDFKRDRETHRDRDRDRGVIDYDRDRFDRERRPRDDRAQSYRDKKDHSSSRRGGFDRPSYDRKSDRPVYEGPSMFGGERRTYPEERMPLPAPSLSHQPPPAPRVEKKPESKNVDDILKPPGRESRPERIVVIMRGLPGSGKTHVAKLIRDKEVEFGGPAPRVLSLDDYFITEVEKEEKDPDSGKKVKKKVMEYEYEAEMEETYRTSMFKTFKKTLDDGFFPFIILDAINDRVRHFDQFWSAAKTKGFEVYLAEMSADNQTCGKRNIHGRKLKEINKMADHWETAPRHMMRLDIRSLLQDAAIEEVEMEDFDANIEEQKEEKKDAEEEESELVGDRPTTLNSVSLLKFLKKV

SEQ ID NO: 95983 - protein, 138 aa, Homo sapiens
MEEGHGLDLTYITERIIAVSFPAGCSEESYLHNLQEVTRMLKSKHGDNYLVLNLSEKRYDLTKLNPKIMDVGWPELHAPPLDKMCTICKAQESWLNSNLQHVVVIHCRGGKGRIGVVISSYMHFTNVSASADQALDRF

SEQ ID NO: 95984 - protein, 189 aa, Homo sapiens
MQAGKPILYSYFRSSCSWRVRIALALKGIDYETVPINLIKDGGQQLAIIEYLEEMRPTPRLLPQDPKKRASVRMISDLIAGGIQPLQNLSVLKQVGEEMQLTWAQNAITCGFNALEQILQSTAGIYCVGDEVTMADLCLVPQVANAERFKVDLTPYPTISSINKRLLVLEAFQVSHPCRQPDTPTELRA

SEQ ID NO: 95985 - protein, 409 aa, Homo sapiens
MLVHLFRVGIRGGPFPGRLLPPLRFQTFSAVRYSDGYRSSSLLRAVAHLRSQLWAHLPRAPLAPRWSPSAWCWVGGALLGPMVLSKHPHLCLVALCEAEEAPPASSTPHVVGSRFNWKLFWQFLHPHLLVLGVAVVLALGAALVNVQIPLLLGQLVEVVAKYTRDHVGSFMTESQNLSTHLLILYGVQGLLTFGYLVLLSHVGERMAVDMRRALFSSLLRQDITFFDANKTGQLVSRLTTDVQEFKSSFKLVISQGLRSCTQVAGCLVSLSMLSTRLTLLLMVATPALMGVGTLMGSGLRKLSRQCQEQIARAMGVADEALGNVRTVRAFAMEQREEERYGAELEACRCRAEELGRGIALFQGLSNIAFNCMVLGTLFIGGSLVAGQQLTGGDLMSFLVASQTVQRDVL

SEQ ID NO: 95986 - protein, 26 aa, Homo sapiens
MNERREQLRAKRPEVPFPEITRMLGN

SEQ ID NO: 95987 - protein, 116 aa, Homo sapiens
MGVQVETISPGDGRTFPKRGQTCVVHYTGCGQFWPSCSRISSTFLFQIMETWRDPSIEGNDFHWKEEKGVLRISHVIPVPISRGPKSGPSHSGPGQSLTQDASPASPGNSHFPTTR

SEQ ID NO: 95988 - protein, 90 aa, Homo sapiens
MEYHTKIRELILDGSLQLIQEGLKSGFLYPLFEKQDKGSKPITLPLDACSLSELCEMAKHLPSLNEMEHQTLQLVEEDTSVTEQDLFLRV

SEQ ID NO: 95989 - protein, 739 aa, Homo sapiens
MAADVSVTHRPPLSPKSGAEVEAGDAAERRAPEEELPPLDPEEIRKRLEHTERQFRNRRKILIRGLPGDVTNQEVHDLLSDYELKYCFVDKYKGTAFVTLLNGEQAEAAINAFHQSRLRERELSVQLQPTDALLCVANLPPSLTQQQFEELVRPFGSLERCFLVYSERTGQSKGYGFAEYMKKDSAARAKSDLLGKPLGPRTLYVHWTDAGQLTPALLHSRCLCVDRLPPGFNDVDALCRALSAVHSPTFCQLACGQDGQLKGFAVLEYETAEMAEEAQQQADGLSLGGSHLRVSFCAPGPPGRSMLAALIAAQATALNRGKGLLPEPNILQLLNNLGPSASLQLLLNPLLHGSAGGKQGLLGAPPAMPLLNGPALSTALLQLALQTQGQKKPGILGDSPLGALQPGAQPANPLLGELPAGGGLPPELPPRRGKPPPLLPSVLGPAGGDREALGLGPPAAQLTPPPAPVGLRGSGLRGLQKDSGPLPTPPGVSLLGEPPKDYRIPLNPYLNLHSLLPASNLAGKEARGWGGAGRSRRPAEGPPTNPPAPGGGSSSSKAFQLKSRLLSPLSSARLPPEPGLSDSYSFDYPSDMGPRRLFSHPREPALGPHGPSRHKMSPPPSGFGERSSGGSGGGPLSHFYSGSPTSYFTSGLQAGLKQSHLSKAIGSSPLGSGEGLLGLSPGPNGHSHLLKTPLGGQKRSFAHLLPSPEPSPEGSYVGQHSQGLGGHYADSYLKRKRIF

SEQ ID NO: 95990 - protein, 163 aa, Homo sapiens
MNTSRFADHHDLLTETKRPIDTVISQQAFYSDESVSAMEKQYLRNSNLTPQQKIDELHHGFTGLDLEEQWMYPSRSDHSNCHNIQTNDTAKTTFQEYPLIKNCFTPQTGLSDIMKESGVDIYHYGRDRICTKGLEAPLQQKRAEMFLSQFNRYNENVDYCRYP

SEQ ID NO: 95991 - protein, 30 aa, Homo sapiens
MEPEAGTNRTAVAEFILLGLVQTEEMQPVV

SEQ ID NO: 95992 - protein, 144 aa, Homo sapiens
MATGDERFYAEHLMPTLQGLLDPESAHRLAVRFTSLGLLPRARFQDSDMLEVRVLGHKFRNPVGIAAGFDKHGEAVDGLYKMGFGFVEIGSVTPKPQEGNPRPRVFRLPEDQAVINRYGFNSHGLSVVEHRLRARQQKQAKLTE

SEQ ID NO: 95993 - protein, 200 aa, Homo sapiens
MAPAADREGYWGPTTSTLDWCEENYSVTWYIAEFWNTVSNLIMIIPPMFGAVQSVRDGLEKRYIASYLALTVVGMGSWCFHMTLKYEMQLLDELPMIYSCCIFVYCMFECFKIKNSVNYHLLFTLVLFSLIVTTVYLKVKEPIFHQVMYGMLVFTLVLRSIYIVTWVYPWLRGLGYTSLGIFLLGFLFWNIDNIFCESLR

SEQ ID NO: 95994 - protein, 118 aa, Homo sapiens
  MOD_RES (1)..(1): Any amino acid
XSQKSTEQQLAAQLVTLQNELELAETKCALQEEKLQQDALQTAEAWAIFQEQTVVLQVRPHSDAKEVQVKVMEAAEELDAWQSGRELCDGQLRGVQYSTESLMEEMARADRETRLFGG

SEQ ID NO: 95995 - protein, 641 aa, Homo sapiens
MLGSWHTVRVPGSENELHLAELEPSSLYEVLMVARSAAGEGQPAMLTFRTSKEKTASSKNTQASSPPVGIPKYPVVSEAANNNFGVVLTDSSRHSGVPEAPDRPTISTASETSVYVTWIPRANGGSPITAFKVEYKRMRTSNWLVAAEDIPPSKLSVEVRSLEPGSTYKFRVIAINHYGESFRSSASRPYQVVGFPNRFSSRPITGPHIAYTEAVSDTQIMLKWTYIPSSNNNTPIQGFYIYYRPTDSDNDSDYKRDVVEGSKQWHMIGHLQPETSYDIKMQCFNEGGESEFSNVMICETKVKRVPGASEYPVKDLSTPPNSLGSGGNVGPATSPARSSDMLYLIVGCVLGVMVLILMVFIAMCLWKNRQQNTIQKYDPPGYLYQGSDMNGQMVDYTTLSGASQINGNVHGGFLTNGGLSSGYSHLHHKVPNAVNGIVNGSLNGGLYSGHSNSLTRTHVDFEHPHHLVNGGGMYTAVPQIDPLECVNCRNCRNNNRCFTKTNSTFSSSPPPVVPVVAPYPQDGLEMKPLSHVKVPVCLTSAVPDCGQLPEESVKDNVEPVPTQRTCCQDIVNDVSSDGSEDPAEFSRGDSCAHSETEINIVSWNALILPPVPEGCAEKTMWSPPGIPLDSPTEVLQQPRET

SEQ ID NO: 95996 - protein, 249 aa, Homo sapiens
MPPLLPLRLCRLWPRNPPSRLLGAAAGQRSRPSTYYELLGVHPGASTEEVKRAFFSKSKELHPDRDPGNPSLHSRFVELSEAYRVLSREQSRRSYDDQLRSGSPPKSPRTTVHDKSAHQTHSSSWTPPNAQYWSQFHSVRPQGPQLRQQQHKQNKQVLGYCLLLMLAGMGLHYIAFRKVKQMHLNFMDEKDRIITAFYNEARARARSVPALFCSLLPVQEPHFGIPIPTTQVPSPPGPTEASFSRSDNG

SEQ ID NO: 95997 - protein, 136 aa, Homo sapiens
MREYKLVVLGSGGVGKSALTVQFVQGIFVEKYDPTIEDSYRKQVEVDAQQCMLEILDTAGTEQFTAMRDLYMKNGQGFALVYSITAQSTFNDLQDLREQILRVKDTDDIFYDLVRQINRKTPVPGKARKKSSCQLL

SEQ ID NO: 95998 - protein, 103 aa, Homo sapiens
MSDSKCDSQFYSVQVADSTFTVLKRYQQLKPIGSGAQGIVCAAFDTVLGINVAVKKLSRPFQNQTHAKRAYRELVLLKCVNHKNIISLLNVFTPQKTLEEFQD

SEQ ID NO: 95999 - protein, 195 aa, Homo sapiens
  MOD_RES (1)..(1): Any amino acid
XVPCAPAPRCWRSWPRSWPRPRWPRPRPRTWCMWTRPARCGPCGASGGAQASAPRCHTARLTSTSSAGTSSSTSPMWAPSLTAASSRGSTGRGLSYNFTHLDGYLDLLRENQLLPGFELMGSASGHFTDFEDKQQVFEWKDLVSSLARRYIGRYGLAHVSKWNFETWNEPDHHDFDNVSMTMQGFLNYYDACSEG

SEQ ID NO: 96000 - protein, 94 aa, Homo sapiens
MSTNICSFKDRCVSILCCKFCKQVLSSRGMKAVLLADTEIDLFSTDIPPTNAVDFTGRCYFTKICKCKLKDIACLKWCKRPTSGQLARDRREYR

SEQ ID NO: 96001 - protein, 1015 aa, Homo sapiens
  MOD_RES (1)..(1): Any amino acid
XLVPDSKQGKPQSATDYSDPDNVDDGLFIVDIPKTNNDKEVNAEHHIKGKGRGVQESKRGLVQDKTELEDENQEGMTVHSSVHSNNLNSMPAAEKGKDTLKSAYDDTENDLKGAAIHISKGMLHEEKPGEQILEGGSESESAQKAAGNQMNDRKIQQESLGSAPLMGDDHPNASRDSVEGDALVNGAKLHTLSVEHQREELKEELVLKTQNQPRFSSPDEIDLPRELEDEVPILGRNLPWQQERDVAATASKQMSEKIRLSEGEAKEDSLDEEFFHHKAMQGTEVGQTDQTDSTGGPAFLSKVEEDDYPSEELLEDENAINAKRSKEKNPGNQGRQFDVNLQVPDRAVLGTIHPDPEIEESKQETSMILDSEKTSETAAKGVNTGGREPNTMVEKERPLADKKAQRPFERSDFSDSIKIQTPELGEVFQNKDSDYLKNDNPEEHLKTSGLAGEPEGELSKEDHENTEKYMGTESQGSAAAEPEDDSFHWTPHTSVEPGHSDKREDLLIISSFFKEQQSLQRFQKYFNVHELEALLQEMSSKLKSAQQESLPYNMEKVLDKVFRASESQILSIAEKMLDTRVAENRDLGMNENNIFEEAAVLDDIQDLIYFVRYKHSTAEETATLVMAPPLEEGLGGAMEEMQPLHEDNFSREKTAELNVQVPEEPTHLDQRVIGDTHASEVSQKPNTEKDLDPGPVTTEDTPMDAIDANKQPETAAEEPASVTPLENAILLIYSFMFYLTKSLVATLPDDVQPGPDFYGLPWKPVFITAFLGIASFAIFLWRTVLVVKDRVYQVTEQQISEKLKTIMKENTELVQKLSNYEQKIKESKKHVQETRKQNMILSDEAIKYKDKIKTLEKNQEILDDTAKNLRVMLESEREQNVKNQDLLQQEIEDWSKLHAELSEQIKSFEKSQKDLEVALTHKDDNINALTNCITQLNLLECESESEGQNKGGNDSDELANGEVGGDRNEKMKNQIKQMMDVSRTQTAISVVEEDLKLLQLKLRASVSTKCNLEDQ

SEQ ID NO: 96002 - protein, 792 aa, Homo sapiens
MGAPACALALCVAVAIVAGASSESLGTEQRVVGRAAEVPGPEPGQQEQLVFGSGDAVELSCPPPGGGPMGPTVWVKDGTGLVPSERVLVGPQRLQVLNASHEDSGAYSCRQRLTQRVLCHFSVRVTDAPSSGDDEDGEDEAEDTGVDTGAPYWTRPERMDKKLLAVPAANTVRFRCPAAGNPTPSISWLKNGREFRGEHRIGGIKLRHQQWSLVMESVVPSDRGNYTCVVENKFGSIRQTYTLDVLERSPHRPILQAGLPANQTAVLGSDVEFHCKVYSDAQPHIQWLKHVEVNGSKVGPDGTPYVTVLKTAGANTTDKELEVLSLHNVTFEDAGEYTCLAGNSIGFSHHSAWLVVLPAEEELVEADEAGSVYAGILSYGVGFFLFILVVAAVTLCRLRSPPKKGLGSPTVHKISRFPLKRQQVSLESNASMSSNTPLVRIARLSSGEGPTLANVSELELPADPKWELSRARLTLGKPLGEGCFGQVVMAEAIGIDKDRAAKPVTVAVKMLKDDATDKDLSDLVSEMEMMKMIGKHKNIINLLGACTQGGPLYVLVEYAAKGNLREFLRARRPPGLDYSFDTCKPPEEQLTFKDLVSCAYQVARGMEYLASQKCIHRDLAARNVLVTEDNVMKIADFGLARDVHNLDYYKKTTNLVLWGPALGDLHAGGLPVPRHPCGGALQAAEGGPPHGQARQLHTRPVHDHAGVLACRALPEAHLQAAGGGPGPCPYRDVHRRVPGPVGAFRAVLPGWPGHPQLQLLRGRLRVCPRPAAPGPTQQWGLADVKGHWSPTM

SEQ ID NO: 96003 - protein, 220 aa, Homo sapiens [sequence omitted]

SEQ ID NO: 96004 - protein, 810 aa, Homo sapiens
MVSEEEEEEDGDAEETQDSEDDEEDEMEEDDDDSDYPEEMEDDDDDASYCTESSFRSHSTYSSTPGRRKPRVHRPRSPILEEKDIPPLEFPKSSEDLMVPNEHIMNVIAIYEVLRNFGTVLRLSPFRFEDFCAALVSQEQCTLMAEMHVVLLKAVLREEDTSNTTFGPADLKDSVNSTLYFIDGMTWPEVLRVYCESDKEYHHVLPYQEAEDYPYGPVENKIKVLQFLVDQFLTTNIAREELMSEGVIQYDDHCRVCHKLGDLLCCETCSAVYHLECVKPPLEEVPEDEWQCEVCVAHKVPGVTDCVAEIQKNKPYIRHEPIGYDRSRRKYWFLNRRLIIEEDTENENEKKIWYYSTKVQLAELIDCLDKDYWEAELCKILEEMREEIHRHMDITEDLTNKARGSNKSFLAAANEEILESIRAKKGDIDNVKSPEETEKDKNETENDSKDAEKNREEFEDQSLEKDSDDKTPDDDPEQGKSEEPTEVGDKGNSVSANLGDNTTNATSEETSPSEGRSPVGCLSETPDSSNMAEKKVASELPQDVPEEPNKTCESSNTSATTTSIQPNLENSNSSSELNSSQSESAKAADDPENGERESHTPVSIQEEIVGDFKSEKSNGELSESPGAGKGASGSTRIITRLRNPDSKLSQLKSQQVAAAAHEANKLFKEGKEVLVVNSQGEISRLSTKKEVIMKGNINNYFKLGQEGKYRVYHNQYSTNSFALNKHQHREDHDKRRHLAHKFCLTPAGEFKWNGSVHGSKVLTISTLRLTITQLETTSLHPFFIPTGHHIGQIGSRQFRCVANPENLHWL

SEQ ID NO: 96005 - protein, 828 aa, Homo sapiens
MALSPWTPGLGAGEKLVQAAAVSTGPSLELCTLPSTLGSSVAVEALEQLFVVEQSLQSDYFKCNEEAKIFLKDIAVAVKKLEEMRKATIDLLEIESMELNKLYYLLETLPNSIKRELEECVRDARRLNLFEINTIKMRITRTENEIELLKKKITDLTKYNEALGEKQEELARKHARFVLSLNQTMEKKATTTVYINETYTKINLKREDIALQKKCIQEAEELMEKERAEYLIRKQELTAQINEFENTREVKRMETYQKKKELDKLQTKMSKIKETVTVSAAVLSDHNLEIARLHESIRYWEQEVSELKKDLAILEAKLCFFTDNKEKLDDISNDEKNEFLNKIKQLVETLHAARMEYKDLREKMKTLARQYKIVLSEEEKAFLQKQKIHDENQKQLTFISQKEYFLSQKRVDIKNMEEGLITLQELQQATKTVYQQQIKILSANLERESQRCVITQWKMACLRKKHARWTAKIKAEIQAITEKIQNAEVRRIELLNETSFRQQEISGFVAQIEKLTTELKEEEKAFVNKEKMLMKELSKYEEIFVKETQINKEKEEELVEYLPQLQVAEQEYKEKRRKLEELSNIITAQRQEEDLLNNHIFLFTRDFSRYISNMEDVKQELQQLRDQESKKNKDHFETLKNLENGFYINDQKADLLLLENKKLKEYILYLKNNIEKYREGQEALMHTSSDLSRQLIAQEAQYKDLWAEFQTTVKILVDNGEETLQDINNLTDKLRERDEKMQHVSTWLRGSLEGLRLLVEQESPMDLLSKQQLRALLVTSKEEKTCQLSDLVIPNYATNIQLNIDTYLGLNTLVVLSNSAFHLREFSR

SEQ ID NO: 96006 - protein, 84 aa, Homo sapiens
MLRGTMTAWRGMRPEVTLACLLLATAGCFADLNEVPQVTVQPASTVQKPGGTVILGCVVEPPRMNVTWRLNGKELNGSDDALGV

SEQ ID NO: 96007 - protein, 202 aa, Homo sapiens
MNGDDTFARRPTVGAQIPEKIQKAFDDIAKYFSKEEWEKMKVSEKIVYVYMKRKYEAMTKLGFKAILPSFMRNKRVTDFQGNDFDNDPNRGNQVQRPQMTFGRLQGIFPKIMPKKPAEEGNVSKEVPEASGPQNDGKQLCPPGKPTTSEKINMISGKRKQFRNNPTGFPGDVQVCGLGVWHGSQITLGPGWAEELAQLQMRC

SEQ ID NO: 96008 - protein, 140 aa, Homo sapiens
MTKLQAKHQAECDLLEDMRTFSQKKAAIEREYAQGMQKLASQYLKRDWPGVKADDRNDYRSMYPVWKSFLEGTMQVAQSRMNICENYKNFISEPARTVRSLKEQQLKRCVDQLTKIQTELQETVKDLAKGKKKYFETEQM

SEQ ID NO: 96009 - protein, 1409 aa, Homo sapiens
MWSLTASEGESTTAHFFLGAGDEGLGTRGIGMRPEESDSELLEDEEDEVPPEPQIIVGICAMTKKSKSKPMTQILERLCRFDYLTVVILGEDVILNEPVENWPSCHCLISFHSKGFPLDKAVAYSKLRNPFLINDLAMQYYIQDRREVYRILQEEGIDLPRYAVLNRDPARPEECNLIEGEDQVEVNGAVFPKPFVEKPVSAEDHNVYIYYPSSAGGGSQRLFRKIGSRSSVYSPESSVRKTGSYIYEEFMPTDGTDVKVYTVGPDYAHAEARKSPALDGKVERDSEGKEIRYPVMLTAMEKLVARKVCVAFKQTVCGFDLLRANGHSFVCDVNGFSFVKNSMKYYDDCAKILGNTIMRELAPQFQIPWSIPTEAEDIPIVPTTSGTMMELRCVIAIIRHGDRTPKQKMKMEVKHPRFFALFEKHGGYKTGKLKLKRPEQLQEVLDITRLLLAELEKEPGGEIEEKTGKLEQLKSVLEMYGHFSGINRKVQLTYYPHGVKASNEGQDPQRETLAPSLLLVLKWGGELTPAGRVQAEELGRAFRCMYPGGQGDYAGFPGCGLLRLHSTFRHDLKIYASDEGRVQMTAAAFAKGLLALEGELTPILVQMVKSANMNGLLDSDGDSLSSCQHRVKARLHHILQQDAPFGPEDYDQLAPTRSTSLLNSMTIIQNPVKVCDQVFALIENLTHQIRERMQDPRSVDLQLYHSETLELMLQRWSKLERDFRQKSGRYDISKIPDIYDCVKYDVQHNGSLGLQGTAELLRLSKALADVVIPQEYGISREEKLEIAVGFCLPLLRKILLDLQRTHEDESVNKLHPLESHVHSLLSVFRYGGLLDETQDAQWQRALDYLSAISELNYMTQIVIMLYEDNTQDPLSEERFHVELHFSPGVKGVEEEGSAPAGCGFRPASSENEEMKTNQGSMENLCPGKASDEPDRALQTSPQPPEGPGLPRRSPLIRNRKAGSMEVLSETSSSRPGGYRLFSSSRPPTEMKQSGLGSQCTGLFSTTVLGGSSSAPNLQDYARSHGKKLPPASLKHRDELLFVPAVKRFSVSFAKHPTNGFEGCSMVPTIYPLETLHNALSLRQVSEFLSRVCQRHTDAQAQASAALFDSMHSSQASDNPFSPPRTLHSPPLQLQQRSEKPPWYSSGPSSTVSSAGPSSPTTVDGNSQFGFSDQPSLNSHVAEEHQGLGLLQETPGSGAQELSIEGEQELFEPNQSPQVPPMETSQPYEEVSQPCQEVPDISQPCQDISEALSQPCQKVPDISQQCQENHDNGNHTCQEVPHISQPCQKSSQLCQKVSEEVCQLCLENSEEVSQPCQGVSVEVGKLVHKFHVGVGSLVQETLVEVGSPAEEIPEEVIQPYQEFSVEVGRLAQETSAINLLSQGIPEIDKPSQEFPEEIDLQAQEVPEEIN

SEQ ID NO: 96010 - protein, 118 aa, Homo sapiens
  MOD_RES (1)..(1): Any amino acid
XGIEMLHGTTTLAFKFRHGVIVAADSRATAGAYIASQTVKKVIEINPYLLGTMAGGAADCSFWERLLARQCRIYELRNKERISVAAASKLLANMVYQYKGMGLSMGTMICGWDKRGPG

SEQ ID NO: 96011 - protein, 165 aa, Homo sapiens
MNSLLIGELSPEQPSFEPTKNKELTDEFRELRATVERMGLMKANHVFFLLYLLHILLLDGAAWLTLWVFGTSFLPFLLCAVLLSAVQAQAGWLQHDFGHLSVFSTSKWNHLLHHFVIGHLKGAPASWWNHMHFQHHAKPNCFRKDPDINMHPFFFALGKILSVEV

SEQ ID NO: 96012 - protein, 2611 aa, Homo sapiens
MKILLIIFVLIIWTETLADQSPGPGPVYADVVFLVDSSDHLGPKSFPFVKTFINKMINSLPIEANKYRVALAQYSDEFHSEFHLSTFKGRSPMLNHLKKNFQFIGGSLQIGKALQEAHRTYFSAPINGRDRKQFPPILVVLASAESEDEVEEASKALQKDGVKIISVGVQKASEENLKAMATSHFHFNLRTIRDLSTFSQNMTQIIKDVTKYKEGAVDADMQVHFPISCQKDSLADLVFLVDESLGTGGNLRHLQTFLENITSSMDVKENCMRLGLMSYSNSAKTISFLKSSTTQSEFQQQIKNLSIQVGKSNTGAAIDQMRRDGFSESYGSRRAQGVPQIAVLVTHRPSDDEVHDAALNLRLEDVNVFALSIQGANNTQLEEIVSYPPEQTISTLKSYADLETYSTKFLKKLQNEIWSQISTYAEQRNLDKTGCVDTKEADIHFLIDGSSSIQEKQFEQIKRFMLEVTEMFSIGPDKVRVGVVQYSDDTEVEFYITDYSNDIDLRKAIFNIKQLTGGTYTGKALDYILQIIKNGMKDRMSKVPCYLIVLTDGMSTDRVVEPAKRLRAEQITVHAVGIGAANKIELQEIAGKEERVSFGQNFDALKSIKNEVVREICAEKGCEDMKADIMFLVDSSWSIGNENFRKMKIFMKNLLTKIQIGADKTQIGVVQFSDKTKEEFQLNRYFTQQEISDAIDRMSLINEGTLTGKALNFVGQYFTHSKGARLGAKKFLILITDGVAQDDVRDPARILRGKDVTIFSVGVYNANRSQLEEISGDSSLVFHVENFDHLKALERKLIFRVCALHDCKRITLLDVVFVLDHSGSIKKQYQDHMINLTIHLVKKADVGRDRVQFGALKYSDQPNILFYLNTYSNRSAIIENLRKRRDTGGNTYTAKALKHANALFTEEHGSRIKQNVKQMLIVITDGESHDHDQLNDTALELRNKGITIFAVGVGKANQKELEGMAGNKNNTIYVDNFDKLKDVFTLVQERMCTEAPEVCHLQEADVIFLCDGSDRVSNSDFVTMTTFLSDLIDNFDIQSQRMKIGMAQFGSNYQSIIELKNSLTKTQWKTQIQNVSKSGGFPRIDFALKKVSNMFNLHAGGRRNAGVPQTLVVITSGDPRYDVADAVKTLKDLGICVLVLGIGDVYKEHLLPITGNSEKIITFQDFDKLKNVDVKKRIIREICQSCGKTNCFMDIVVGFDISTHVQGQPLFQGHPQLESYLPGILEDISSIKGVSCGAGTEAQVSLAFKVNSDQGFPAKFQIYQKAVFDSLLQVNVSGPTHLNAQFLRSLWDTFKDKSASRGQVLLIFSDGLQSESNIMLENQSDRLREAGLDALLVVSLNTTAHHEFSSFEFGKRFDYRTHLTIGMRELGKKLSQYLGNIAERTCCCTFCKCPGIPGPHGTRGLQAMKGSQGLKGSRGHRGEDGNPGVRGDTGPQGDKGIAGCPGAWGQKGLKGFSGPKGGHGDDGIDGLDGEEGCHGFPGIKGEKGDPGSQGSPGSRGAPGQYGEKGFPGDPGNPGQNNNIKGQKGSKGEQGRQGRSGQKGVQGSPSSRGSRGREGQRGLRGVSGEPGNPGPTGTLGAEGLQGPQGSQGNPGRKGEKGSQGQKGPQGSPGLMGAKGSTGRPGLLGKKGEPGLPGDLGPVGQTGQRGRQGDSGIPGYGQMGRKGVKGPRGFPGDAGQKGDIGNPGIPGGPGPKGFRGLALTVGLKGEEGSRGLPGPPGQRGIKGMAGQPVYSQCDLIRFLREHSLFKNAYPTELVFALDNSYDVTEESFNKTRDIITSIVNDLNIRENNCPVGARVAMVSYNSGTSYLIRWSDYNRKKQLLQQLSQIKYQDTTEPRDVGNAMRFVTRNVFKRTYAGANVRRVAVFFSNGQTASRSSIITATMEFSALDISPTVFAFDERVFLEAFGFDNTGTFQVIPVPPNGENQTLERLRRCALCYDKCFPNACIREAFLPEDSYMDVVFLIDNSRNIAKDEFKAVKALVSSVIDNFNIASDPLISDSGDRIALLSYSPWESSRRKMGTVKTEFDFITYDNQLLMKNHIQTSFQQLNGEATIGRALLWTTENLFPETPYLRKHKVIFVVSAGENYERKEFVKMMALRAKCQGYVIFVISLGSTRKDDMEELASYPLDQHLIQLGRIHKPDLNYIAKFLKPFLYSVRRGFNQYPPPMLEDACRLINLGGENIQNDGFQFVTELQEDFLGGNGFIGQELNSGRESPFVKTEDNGSDYLVYLPSQMFEPQKLMINYEKDQKSAEIASLTSGHENYGRKEEPDHTYEPGDVSLQEYYMDVAFLIDASQRVGSDEFKEVKAFITSVLDYFHIAPTPLTSTLGDRVAVLSYSPPGYMPNTEECPVYLEFDLVTYNSIHQMKHHLQDSQQLNGDVFIGHALQWTIDNVFVGTPNLRKNKVIFVISAGETNSLDKDVLRNVSLRAKCQGYSIFVFSFGPKHNDKELEELASHPLDHHLVQLGRTHKPDWNYIIKFVKPFVHLIRRAINKYPTEDMKATCVNMTSPNPENGGTENTVLLLPGIYEIKTENGDLFDEFDSQAQHLLVLGNNHSSGSETATDLMQKLYLLFSTEKLAMKDKEKAHLEEISALVVDKQQEKEDKEMEATDI

SEQ ID NO: 96013 - protein, 308 aa, Homo sapiens
  MOD_RES (1)..(1): Any amino acid
XTIQLLRKFLKNHVIEDIKGRWGSENVDDNNQLFRFPATSPLKTLPRRTPKRHGLHLSQENGEKIKHEIINEDQENAIDNRELSQEDVEEVWRYVILIYLQTILGVPSLEEVINPKQVIPQYIMYNMANTSKRGVVILQNKSDDLPHWVLSAMKCLANWPRSNDMNNPTYVGFERDVFRTIADYFLDLPEPLLTFEYYELFVNILGNFKDFRSSIPVVCGYITVSDRSSGIHKIQDDPQSSKFLHLNNLNSFKSTECLLLSLLHREKNKEESDSTERLQISNPGFQERCAKKMQLVNLRNRRACCNLI

SEQ ID NO: 96014 - protein, 184 aa, Homo sapiens
MTFQFNFTIEDHLENELTPIRDGALTLDSSKELSVSESQKGEERDRKCSAEQFDLPQDHLWEHKSMENAAPSQDTDSPLSAASSSRNLEPHGKQPSLRAAKEHAMPKDLKKMLENKVIETLPGFQHVKLSVVKTILLKENFPGENIVSKSFSSHSDLITGVYEGGLKIWECTFDLLAYFTKAKV

SEQ ID NO: 96015 - protein, 75 aa, Homo sapiens
MLKMGFQQQVLDILENIPNDCQTILVSATIPTSIEQLASQLLHNPVRIITGEKNLPCANVRQIILWVEDPAKKKK

SEQ ID NO: 96016 - protein, 435 aa, Homo sapiens
MASNSWNASSSPGEAREDGPEGLDKGLDNDAEGVWSPDIEQSFQEALAIYPPCGRRKIILSDEGKMYGRNELIARYIKLRTGKTRTRKQVSSHLQVLARRKSREIQSKLKAMNLDQVSKDKALQSMASMSSAQIVSASVLQNKFSPPSPLPQAVFSTSSRFWSSPPLLGQQPGPSQDIKPFAQPAYPIQPPLPPTLSSYEPLAPLPSAAASVPVWQDRTIASSRLRLLEYSAFMEVQRDPDTYSKHLFVHIGQTNPAFSDPPLEAVDVRQIYDKFPEKKGGLKELYEKGPPNAFFLVKFWADLNSTIQEGPGAFYGVSSQYSSADSMTISVSTKVCSFGKQVVEKVETEYARLENGRFVYRIHRSPMCEYMINFIHKLKHLPEKYMMNSVLENFTILQVVTSRDSQETLLVIAFVFEVSTSEHGAQHHVYKLVKD

SEQ ID NO: 96017 - protein, 331 aa, Homo sapiens
MGPLSAPPCTQHITWKGLLLTASLLNFWNLPTTAQVIIEAKPPKVSEGKDVLLLVHNLPQNLTGYIWYKGQMTDLYHYITSYVVHGQIIYGPAYSGRETVYSNASLLIQNVTQEDAGSYTLHIIKRGDGTGGVTGYFTVTLYSETPKPSISSSNLNPREVMEAVRLICDPETPDASYLWLLNGQNLPMTHRLQLSKTNRTLYLFGVTKYIAGPYECEIRNPVSASRSDPVTLNLLHGPDLPRIYPSFTYYRSGENLDLSCFADSNPPAEYSWTINGKFQLSGQKLFIPQITTNHSGLYACSVRNSATGKEISKSMIVKVSGPCHGNQTESH

SEQ ID NO: 96018 - protein, 242 aa, Homo sapiens
MNEEEQFVNIDLNDDNICSVCKLGTDKETLSFCHICFELNIEGVPKSDLLHTKSLRGHKDCFEKYHLIANQGCPRSKLSKSTYEEVKTILSKKINWIVQYAQNKDLDSDSECSKNPQHHLFNFRHKPEEKLLPQFDSQVPKYSAKWIDGSAGGISNCTQRILEQRENTDFGLSMLQDSGATLCRNSVLWPHSHNQAQKKEETISSPEANVQTQHPHYSREELNSMTLGEVEQLNAKLLQQIQ

SEQ ID NO: 96019 - protein, 385 aa, Homo sapiens
MVSVTMATSEWIQFFKEAGIPPGPAVNYAVMFVDNRIQKSMLLDLNKEIMNELGVTVVGDIIAILKHAKVVHRQDMCKAATESVPCSPSPLAGEIRRGTSAASRMITNSLNHDSPPSTPPRRPDTSTSKISVTVSNKMAAKSAKATAALARREEESLAVPAKRRRVTAEMEGKYVINMPKGTTPRTRKILEQQQAAKGLHRTSVFDRLGAETKADTTTGSKPTGVFSRLGATPETDEDLAWDSDNDSSSSVLQYAGVLKKLGRGPAKASPQPALTVKAKATSSATTAAAPTLRRLALSSRSGLERKPESLSKVSIIKRLGAAALVPEAQDSQVTSTKSKSSAEVKVTIKRTLVGPRGSSSSEGLGAQMDHAGTVSVFKRLGRRTF

SEQ ID NO: 96020 - protein, 425 aa, Homo sapiens
MSLKDSGSDLSHRPKRRRFHESYNFNMKCPTPGCNSLGHLTGKHERHFSISGCPLYHNLSADECKAPTERQLRYKEKVAELRKKRNSGLSKEQKEKYMEHRQTYGNTREPLLENLTSEYDLDLFRRAQARASEDLEKLRLQGQITEGSNMIKTIAFGRYELDTWYHSPYPEEYARLGRLYMCEFCLKYMKSQTILRRHMAKCVWKHPPGDEIYRKGSISVFEVDGKKNKIYCQNLCLLAKLFLDHKTLYYDVEPFLFYVMTEADNTGCHLIGYFSKEKNSFLNYNVSCILTMPQYMRQGYGKMLIDFSYLLSKVEEKVGSPERPLSDLGLISYRSYWKEVLLRYLHNFQGKEISIKEISQETAVNPVDIVSTLQALQMLKYWKGKHLVLKRQDLIDEWIAKEAKRSNSNKTMDPSCLKWTPPKGT

SEQ ID NO: 96021 - protein, 841 aa, Homo sapiens
MAARRITQETFDAVLQEKAKRYHMDASGEAVSETLQFKAQDLLRAVPRSRAEMYDDVHSDGRYSLSGSVAHSRDAGREGLRSDVFPGPSFRSSNPSISDDSYFRKECGRDLEFSHSDSRDQVIGHRKLGHFRSQDWKFALRGSWEQDFGHPVSQESSWSQEYSFGPSAVLGDFGSSRLIEKECLEKESRDYDVDHPGEADSVLRGGSQVQARGRALNIVDQEGSLLGKGETQGLLTAKGGVGKLVTLRNVSTKKIPTVNRITPKTQGTNQIQKNTPSPDVTLGTNPGTEDIQFPIQKIPLGLDLKNLRLPRRKMSFDIIDKSDVFSRFGIEIIKWAGFHTIKDDIKFSQLFQTLFELETETCAKMLASFKCSLKPEHRDFCFFTIKFLKHSALKTPRVDNEFLNMLLDKGAVKTKNCFFEIIKPFDKYIMRLQDRLLKSVTPLLMACNAYELSVKMKTLSNPLDLALALETTNSLCRKSLALLGQTFSLASSFRQEKILEAVGLQDIAPSPAAFPNFEDSTLFGREYIDHLKAWLVSSGCPLQVKKAEPEPMREEEKMIPPTKPEIQAKAPSSLSDAVPQRADHRVVGTIDQLVKRVIEGSLSPKERTLLKEDPAYWFLSDENSLEYKYYKLKLAEMQRMSENLRGADQKPTSADCAVRAMLYSRAVRNLKKKLLPWQRRGLLRAQGLRGWKARRATTGTQTLLSSGTRLKHHGRQAPGLSQAKPSLPDRNDAAKDCPPDPVGPSPQDPSLEASGPSPKPAGVDISEAPQTSSPCPSADIDMKTMETAEKLARFVAQVGPEIEQFSIENSTDNPDLWGPAFISGIRKNLPRGTFNLHPKAK

SEQ ID NO: 96022 - protein, 458 aa, Homo sapiens
MATNGSKVADGQISTETLPWKQCDNPWNTDRCFSNYSMVNTTNMTSAVVEFWERNMHQMTDGLDKPGQIRWPLAITLAIAWILVYFCIWKGVGWTGKVVYFSATYPYIMLIILFFRGVTLPGAKEGILFYITPNFRKLSDSEVWLDAATQIFFSYGLGLGSLIALGSYNSFHNNVYRDSIIVCCINSCTSMFAGFVIFSIVGFMAHVTKRSIADVAASGPGLAFLAYPEAVTQLPISPLWAILFFSMLLMLGIDSQFCTVEGFITALVDEYPRLLRNRRELFIAAVCIISYLIGLSNITQGGIYVFKLFDYYSASGMSLLFLVFFECVSISWFYGVNRFYDNIQEMVGSRPCIWWKLCWSFFTPIIVAGVFIFSAVQMTPLTMGNYVFPKWGQGVGWLMALSSMVLIPGYMAYMFLTLKGSLKQRIQVMVQPSEDIVRPENGPEQPQAGSSTSKEAYI

SEQ ID NO: 96023 - protein, 87 aa, Homo sapiens
  MOD_RES (1)..(1): Any amino acid
XEEKINKIKLVAVKAKKELDSSRKETQTVKEELESLRSEKDQLSASMRDLIQGAESYKNMKSSQSNWMWKKNVLIILSIVLKTLQDN

SEQ ID NO: 96024 - protein, 123 aa, Homo sapiens
MPVPWFLLSLALGRSPVVLSLERLVGPQDATHCSPGLSCRLWDSDILCLPGDIVPAPGPVLAPTHLQTELVLRCQKETDCDLCLRVAVHLAVHGLPYCPLRPAGGASACCPCAVWSVCGLCGI

SEQ ID NO: 96025 - protein, 97 aa, Homo sapiens
  MOD_RES (1)..(1): Any amino acid
XAEKYSQKEDKYEEEIKILTDKLKEAETRAEFAERSVAKLEKTIDDLEDELYAQKLKYKAISEELDHALNDMTSIIDQAALRDKDPDNAAGCGGSCL

SEQ ID NO: 96026 - protein, 612 aa, Homo sapiens
MRGRVRTVANVTVKGPILKRLPRKLDVLEGENAVLLVETLEAGVEGRWSRDGEELPVICQSSSGHMHALVLPGVTREDAGEVTFSLGNSRTTTLLRVKCVKHSPPGPPILAEMFKGHKNTVLLTWKPPEPAPETPFIYRLERQEVGSEDWIQCFSIEKAGAVEVPGDCVPSEGDYRFRICTVSGHGRSPHVVFHGSAHLVPTARLVAGLEDVQVYDGEDAVFSLDLSTIIQGTWFLNGEELKSNEPEGQVEPGALRYRIEQKGLQHRLILHAVKHQDSGALVGFSCPGVQDSAALTIQESPVHILSPQDRVSLTFTTSERVVLTCELSRVDFPATWYKDGQKVEESELLVVKMDGRKHRLILPEAKVQDSGEFECRTEGVSAFFGVTVQDPPVHIVDPREHVFVHAITSECVMLACEVDREDAPVRWYKDGQEVEESDFVVLENEGPHRRLVLPATQPSDGGEFQCVAGDECAYFTVTITDVSSWIVYPSGKVYVAAVRLERVVLTCELCRPWAEVRWTKDGEEVVESPALLLQKEDTVRRLVLPAVQLEDSGEYLCEIDDESASFTVTVTESYQSQDSSNNNPELCVLLKKPKTRRLWSRFPPWRRTAGTE

SEQ ID NO: 96027 - protein, 178 aa, Homo sapiens
MKSRFSTIDLRAVLAELNASLLGMRVNNVYDVDNKTYLIRLQKPDFKATLLLESGIRIHTTEFEWPKNMMPSSFAMKGNIVLTDYEYVILNILRFRTDEADDVKFAVRERYPLDHARAAEPLLTLERLTEIVASAPKGELLKRVLNPLLPYGPALIEHCLLENGFSGNVKVDEKLETK

SEQ ID NO: 96028 - protein, 562 aa, Homo sapiens
MCPKSLSEKNSNNEVACKKTKIKKTCRRIIPPKMKNTSSKAESTLQNSSSAVHTESNKLQPKRTADAMNLSVDVESSQDGDSDEDTTPSLDFSGLSPYERKRLKNISENADFFASLQLSESAARLREMIEKRQPPKSKRKKPKRENGIGCRRSMRLLKVDPSGVSLPAAPTPPTLVADETPLLPPGPLEMTSENQEDNNERFKGFLHTWAGMSKPSSKNTEKGLSSIKSYKANLNGMVISEDTVYKVTTGPIFSMALHPSETRTLVAVGAKFGQVGLCDLTQQPKEDGVYVFHPHSQPVSCLYFSPANPAHILSLSYDGTLRCGDFSRAIFEEVYRNERSSFSSFDFLAEDASTLIVGHWDGNMSLVDRRTPGTSYEKLTSSSMGKIRTVHVHPVHRQYFITAGLRDTHIYDARRLNSRRSQPLISLTEHTKSIASAYFSPLTGNRVVTTCADCNLRIFDSSCISSKIPLLTTIRHNTFTGRWLTRFQAMWDPKQEDCVIVGSMAHPRRVEIFHETGKRVHSFGGEYLVSVCSINAMHPTRYILAGGNSSGKIHVFMNEKSC

SEQ ID NO: 96029 - protein, 78 aa, Homo sapiens
MMQLRQLDMKRITEEERRMASVLAKKEEEKKRESHKQSLLKEKKRLTINNVARQWDLQQQRVANIATNEDRKDSDSPQ

SEQ ID NO: 96030 - protein, 112 aa, Homo sapiens
MYIFCTDCWLIAVLYFTWLVFDWNTPKKGGRRSQWVRNWAVWRYFRDYFPIQLVKTHNLLTTRNYIFGYHPHGIMGLGAFCNFSTEATEVSKKFPGIRPYLATLAGNFRMPV

SEQ ID NO: 96031 - protein, 533 aa, Homo sapiens
MKRTPTAEEREREAKKLRLLEELEDTWLPYLTPKDDEFYQQWQLKYPKLILREASSVSEELHKEVQEAFLTLHKHGCLFRDLVRIQGKDLLTPVSRILIGNPGCTYKYLNTRLFTVPWPVKGSNIKHTEAEIAAACETFLKLNDYLQIETIQALEELAAKEKANEDAVPLCMSADFPRVGMGSSYNGQDEVDIKSRAAYNVTLLNFMDPQKMPYLKEEPYFGMGKMAVSWHHDENLVDRSAVAVYSYSCEGPEEESEDDSHLEGRDPDIWHVGFKISWDIETPGLAIPLHQGDCYFMLDDLNATHQHCVLAGSQPRFSSTHRVAECSTGTLDYILQRCQLALQNVCDDVDNDDVSLKSFEPAVLKQGEEIHNEVEFEWLRQFWFQGNRYRKCTDWWCQPMAQLEALWKKMEGVTNAVLHEVKREGLPVEQRNEILTAILASLTARQNLRREWHARCQSRIARTLPADQKPECRPYWEKDDASMPLPFDLTDIVSELRDRVSPCHVGWSAVVRSRLTAASTSWAQAILLPQPPK

SEQ ID NO: 96032 - protein, 55 aa, Homo sapiens
  MOD_RES (1)..(1): Any amino acid
XGGLLPQGFIQRELFSKLGELAVGMKSESRTIGEQCSVCGVELPDNEAVEQHRVF

SEQ ID NO: 96033 - protein, 155 aa, Homo sapiens [sequence omitted]

SEQ ID NO: 96034 - protein, 241 aa, Homo sapiens
MRLLRRWAFAALLLSLLPTPGLGTQGPAGALRWGGLPQLGGPGAPEVTEPSRLVRESSGGEVRKQQLDTRVRQEPPGGPPVHLAQVSFVIPAFNSNFTLDLELNHHLLSSQYVERHFSREGTTQHSTGAGDHCYYQGKLRGNPHSFAALSTCQGLHGVFSDGNLTYIVEPQEVAGPWGAPQGPLPHLIYRTPLLPDPLGCREPGCLFAVPAQSAPPNRPRLRRKRSAGATLQCTVKPSMWS

SEQ ID NO: 96035 - protein, 236 aa, Homo sapiens
MTMLQESFSFDDLSVDFTQKEWQLLDPSQKNLYKDVMLENYSSLVSLGYEVMKPDVIFKLEQGEEPWVGDGEIPSSDSPEVWKVDGNMMWHQDNQDKLKIIKRGHECDAFGKNFNLNMNFVPLRKSNSEGDLDGLILKHHLDLLIPKGDYGKAESDDFNVFDNFFLHSKPEDTDTWLKYYDCDKYKESYKKSQIIIYHRNRLGEKLYECSECRKRFSKKPSLIKHQSRHIRDIAFG

SEQ ID NO: 96036 - protein, 89 aa, Homo sapiens
  MOD_RES (1)..(1): Any amino acid
XVLPLENKMKDPRKFPLILYLGMVIVTILYISLGCLGYLQFGANIQGSITLNLPNCCPLHSSPPSPATASPHWLPWTAFCLGNSCRAFC

SEQ ID NO: 96037 - protein, 203 aa, Homo sapiens
MSSSGTPDLPVLLTDLKIQYTKIFINNEWHDSVSGKKFPVFNPATEEELCQVEEGDKEDVDKAVKAARQAFQIGSPWRTMDASERGRLLYKLADLIERDRLLLATMESMNGGKLYSNAYLNDLAGCIKTLRYCAGWADKIQGRTIPIDGNFFTYTRHEPIGVCGQIIPWNFPLVMLIWKIGPALSCGNTVVVKPAEQTPLTAL

SEQ ID NO: 96038 - protein, 163 aa, Homo sapiens
MMSYLKQPPYAVNGLSLTTSGMDLLHPSVGYPATPRKQRRERTTFTRAQLDVLEALFAKTRYPDIFMREEVALKINLPESRVQVWFKNRRAKCRQQQQQQQNGGQNKVRPAKKKTSPAREVSSESGTSGQFTPPSSTSVPTIASSSAPVSIWSPASISPLSDP

SEQ ID NO: 96039 - protein, 143 aa, Homo sapiens
  MOD_RES (1)..(1): Any amino acid
XTTVHRSTYQNHSTETPSLTAAVPSSVSVPRAPSISPSTLSPATSNHSQHYANEDSKMGSTVTAAVIGIIVPIVVIALLCMSGYLIWRNWKRKNTKSMNFDNPVYRKTTEEEDEDELHIGRTAQIGHVYPARVALSLEDDGLP

SEQ ID NO: 96040 - protein, 435 aa, Homo sapiens [sequence omitted]

SEQ ID NO: 96041 - protein, 744 aa, Homo sapiens
MAEISNLKLKLTAVEKDRLDYEDKFRDTEGLIQEINDLRLKVSEMDSERLQYEKKLKSTKSLMAKLSSMKIKVGQMQYEKQRMEQKWESLKDELASLKEQLEEKESEVKRLQEKLVCKMKGEGVEIVDRDIEVQKMKKAVESLMAANEEKDRKIEDLRQCLNRYKKMQDTVVLAQGKKGKDGEYEELLNSSSISSLLDAQGFSDLEKSPSPTPVMGSPSCDPFNTSVPEEFHTTILQVSIPSLLPATVSMETSEKSKLTPKPETSFEENDGNIILGATVDTQLCDKLLTSSLQKSSSLGNLKKETSDGEKETIQKTSEDRAPAESRPFGTLPPRPPGQDTSMDDNPFGTRKVRSSFGRGFFKIKSNKRTASAPNLAETEKETAEHLDLAGASSRPKDSQRNSPFQIPPPSPDSKKKSRGIMKLFGKLRRSQSTTFNPDDMSEPEFKRGGTRATAGPRLGWSRDLGQSNSDLDMPFAKWTKEQVCNWLMEQGLGSYLNSGKHWIASGQTLLQASQQDLEKELGIKHSLHRKKLQLALQALGSEEETNHGKLDFNWVTRWLDDIGLPQYKTQFDEGRVDGRMLHYMTVDDLLSLKVVSVLHHLSIKRAIQVLRINNFEPNCLRRRPSDENTIAPSEVQKWTNHRVMEWLRSVDLAEYAPNLRGSGVHGGLMVLEPRFNVETMAQLLNIPPNKTLLRRHLATHFNLLIGAEAQHQKRDAMELPDYVLLTATAKVKPKKLAFSNFGNL

SEQ ID NO: 96042 - protein, 335 aa, Homo sapiens
MEERKHETMNPAHVLFDRFVQATTCKGTLKAFQELCDHLELKPKDYRSFYHKLKSKLNYWKAKALWAKLDKRGSHKDYKKGKACTNTKCLIIGAGPCGLRTAIDLSLLGAKVVVIEKRDAFSRNNVLHLWPFTIHDLRGLGAKKFYGKFCAGAIDHISIRQLQLILLKVALILGIEIHVNVEFQGLIQPPEDQENERIGWRALVHPKTHPVSEYEFEVIIGGDGRRNTLEGFRRKEFRGKLAIAITANFINRNTTAEAKVEEISGVAFIFNQKFFQELREATGLRRHRAPAFPRKRGPGGSAQLCQGGGRLLYPAAAAVSGFCHQSLWAARCGHV

SEQ ID NO: 96043 - protein, 146 aa, Homo sapiens
MKLPILRSNPEDQILYQTERYNEETFGYEVPIKEEGDYVLVLKFAEVYFAQSQQKVFDVRLNGHVVVKDLDIFDRVGHSTAHDEIIPMSIRKGKLSVQGEVSTFTGKLYIEFVKGYYDNPKVCALYIMAGTVDDVPKLQPHPGLEK

SEQ ID NO: 96044 - protein, 903 aa, Homo sapiens
MNKAPQSTGPPPAPSPGLPQPAFPPGQTAPVVFSTPQATQMNTPSQPRQGRSTYVVPTQQYPVQPGAPGFYPGASPTEFGTYAGAYYPAQGVQQFPTGVAPTPVLMNQPPQIAPKRERKTIRIRDPNQGGKDITEEIMSGARTASTPTPPQTGGGLEPQANGETPQVAVIVRPDDRSQGAIIADRPGLPGPEHSPSESQPSSPSPTPSPSPVLEPGSEPNLAVLSIPGDTMTTIQMSVEESTPISRETGEPYRLSPEPTPLAEPILEVEVTLSKPVPESEFSSSPLQAPTPLASHTVEIHEPNGMVPSEDLEPEVESSPELAPPPACPSESPVPIAPTAQPEELLNGAPSPPAVDLSPVSEPEEQAKEVTASMAPPTIPSATPATAPSATSPAQEEEMEEEEEEEEGEAGEAGEAESEKGGEELLPPESTPIPANLSQNLEAAAATQVAVSVPKRRRKIKELNKKEAVGDLLDAFKEANPAVPEVENQPPAGSNPGPESEGSGVPPRPEEADETWDSKEDKIHNAENIQPGEQKYEYKSDQWKPLNLEEKKRYDREFLLGFQFIFASMQKPEGLPHISDVVLDKANKTPLRPLDPTRLQGINCGPDFTPSFANLGRTTLSTRGPPRGGPGGELPRGPAGLGPRRSQQGPRKEPRKIIATVLMTEDIKLNKAEKAWKPSSKRTAADKDRGEEDADGSKTQDLFRRVRSILNKLTPQMFQQLMKQVTQLAIDTEERLKGVIDLIFEKAISEPNFSVAYANMCRCLMALKVPTTEKPTVTVNFRKLLLNRCQKEFEKDKDDDEVFEKKQKEMDEAATAEERGRLKEELEEARDIARRRSLGNIKFIGELFKLKMLTEAIMHDCVVKLLKNHDEESLECLCRLLTTIGKDLDFEKAKPRMDQYFNQM

SEQ ID NO: 96045 - protein, 463 aa, Homo sapiens
MRLGSGTFATCCVAIEVLGIAVFLRGFFPAPVRSSARAEHGAEPPAPEPSAGASSNWTTLPPPLFSKVVIVLIDALRDDFVFGSKGVKFMPYTTYLVEKGASHSFVAEAKPPTVTMPRIKALMTGSLPGFVDVIRNLNSPALLEDSVIRQAKAAGKRIVFYGDETWVKLFPKHFVEYDGTTSFFVSDYTEVDNNVTRHLDKVLKRGDWDILILHYLGLDHIGHISGPNSPLIGQKLSEMDSVLMKIHTSLQSKERETPLPNLLVLCGDHGMSETGSHGASSTEEVNTPLILISSAFERKPGDIRHPKHVQQTDVAATLAIALGLPIPKDSVGSLLFPVVEGRPMREQLRFLHLNTVQLSKLLQENVPSYEKDPGFEQFKMSERLHGNWIRLYLEEKHSEVLFNLGSKVLRQYLDALKTLSLSLSAQVAQFSPCSCSASHRHCAERLSWKSHCHLLGFLCSFIW

SEQ ID NO: 96046 - protein, 271 aa, Homo sapiens
MGRVQLFEISLSHGRVVYSPGEPLAGTVRVRLGAPLPFRAIRVTCIGSCGVSNKANDTAWVVEEGYFNSSLSLADKGSLPAGEHSFPFQFLLPATAPTSFEGPFGKIVHQVRAAIHTPRFSKDHKCSLVFYILSPLNLNSIPDIEALQLHADVENQSGKDTSPVVASLLQKVSYKAKRWIHDVRTIAEVEGAGVKAWRRAQWHEQILVPALPQSALPGCSLIHIDYYLQVSLKAPEATVTLPVFIGNIAVNHAPVSPRPGLGLPPGAPPLV

SEQ ID NO: 96047 - protein, 379 aa, Homo sapiens
MREPEELMPDSGAVFTFGKSKFAENNPGKFWFKNDVPVHLSCGDEHSAVVTALKPEKVKLAACGRNHTLVSTEGGNVYATGGNNEGQLGLGDTEERNTFHVISFFTSEHKIKQLSAGSNTSAALTEDGRLFMWGDNSEGQIGLKNVSNVCVPQQVTIGKPVSWISCGYYHSAFVTTDGELYVFGEPENGKLGLPNQLLGNHRTPQLVSEIPEKVIQVACGGEHTVVLTENAVYTFGLGQFGQLGLGTFLFETSEPKVIENIRDQTISYISCGENHTALITDIGLMYTFGDGRHGKLGLGLENFTNHFIPTLCSNFLRFIVKLVACGGCHMVVFAAPHRGVAKEIEFDEINDTCLSVATFLPYSSLTSGNVLQRTLSARM

SEQ ID NO: 96048 - protein, 1756 aa, Homo sapiens
MRRSKAYGERYLASVQGSAPSPGKKLRGFYFAKLYYEAKEYDLAKKYVCTYLSVQERDPRAHRFLGLLYELEENTEKAVECYRRSLELNPPQKDLVLKIAELLCKNDVTDGRAKYWVERAAKLFPGSPAIYKLKEHLLDCEGEDGWNKLFDWIQSELYVRPDDVHMNIRLVELYRSNKRLKDAVARCHEAERNIALRSSLEWNSCVVQTLKEYLESLQCLESDKSDWRATNTDLLLAYANLMLLTLSTRDVQESRELLESFDSALQSAKSSLGGNDELSATFLEMKGHFYMHAGSLLLKMGQHGNNVQWQALSELAALCYVIAFQVPRPKIKLIKGEAGQNLLEMMACDRLSQSGHMLLNLSRGKQDFLKEVVETFANKSGQSVLYNALFSSQSSKDTSFLGSDDIGNIDVQEPELEDLARYDVGAIQAHNGSLQHLTWLGLQWNSLPALPGIRKWLKQLFHHLPQETSRLETNAPESICILDLEVFLLGVVYTSHLQLKEKCNSHHSSYQPLCLPLPVCKRLCTERQKSWWDAVCTLIHRKAVPGNSAELRLVVQHEINTLRAQEKHGLQPALLVHWAKCLQKMGRGLNSSYDQQEYIGRSVHYWKKVLPLLKIIKKNSIPEPIDPLFKHFHSVDIQASEIVEYEEDAHITFAILDAVHGNIEDAVTAFESIKSVVSYWNLALIFHRKAEDIENDAVFPEEQEECKNYLRKTRDYLIKIIDDSDSNLSVVKKLPVPLESVKEMLKSVMQELEDYSEGGPLYKNGSLRNADSEIKHSTPSPTKYSLSPSKSYKYSPKTPPRWAEDQNSLRKMICQEVKAITKLNSSKSASRHRWPTENYGPDSVPDGYQGSQTFHGAPLTVATTGPSVYYSQSPAYNSQYLLRPAANVTPTKGSSNTEFKSTKEGFSIAVSADGFKFGISEPGNQEKKSEKPLENDTGFQAQDISGQKNGRGVIFGQTSSTFTFADVAKSTSGEGFQFGKKDPNFKGFSGAGEKLFSSQCGKMANKANTSGDFEKDDDACKTEDSDDIHFEPVVQMPEKVELVTGEEGEKVLYSQGVKLFRFDAEISQWKERGLGNLKILKNEVNGKPRMLMRRDQVLKVCANHWITTTMNLKPLSGSDRAWMWLASDFSDGDAKLERLAAQFKTPELAEEFKQKFEECQRLLLDIPLQTPHKLVDTGRAAKLIQRAEEMKSGLKDFKTFLTNDQTKVTEEENKGSGTGAAGASDTTIKPNPENTGPTLEWDNYDLREDALDDNVSSSSVHDSPLASSPVRKNIFRFDESTTGFNFSFKSALSLSKSPAKLNQSGTSVGTDEESDVTQEEERDGQYFEPVVPLPDLVEVSSGEENEQVVFSHMAELYRYDKDVGQWKERGIGDIKILQNYDNKQVRIVMRRDQVLKLCANHRITPDMSLQNMKGTERVWVWTACDFADGERKVEHLAVRFKLQDVADSFKKIFDEAKTAQEKDSLITPHVSRSSTPRESPCGKIAVAVLEETTRERTDVIQGDDVADAASEVEVSSTSETTTKAVVSPPKFVFGSESVKRIFSSEKSNPFAFGNSSATGSLFGFSFNAPLKSNDSETSSVAQSGSESKVEPKKCELSKNSDIEQSSDSKVKNLSASFPMEESSINYTFKTPEKEPPLWHAEFTKEELVQKLSSTTKSADQLNGLLRETEATSAVLMEQIKLLKSEIRRLERNQEESAANVEHLKNVLLQFIFLKPGSERESLLPVINTMLQLSPEEKGKLAAVAQGGSETPISKKK

SEQ ID NO: 96049 - protein, 68 aa, Homo sapiens
MAGLTAAAPRPGVLLLLLSILHPSRPGGVPGAIPGGVPGGVFYPGNVHETSTHPGHADDADVHNRCTF

SEQ ID NO: 96050 - protein, 706 aa, Homo sapiens
MEENPTLESEAWGSSREWLAPREARGGPSLSSVLNELPSAATLRYRDPGVLPWGALEEEEEDGGRSRKAFTEVTQTELQDPHPSRELPWPMQARRAHRQRNASRDQVVYGSGTKTDRWARLLRRSKEKTKEGLRSLQPWAWTLKRIGGQFGAGTESYFSLLRFLLLLNVLASVLMACMTLLPTWLGGAPPGPPGPDISSPCGSYNPHSQGLVTFATQLFNLLSGEGYLEWSPLFYGFYPPRPRLAVTYLCWAFAVGLICLLLILHRSVSGLKQTLLAESEALTSYSHRVFSAWDFGLCGDVHVRLRQRIILYELKVELEETVVRRQAAVRTLGQQARVWLVRVLLNLLVVALLGAAFYGVYWATGCTVELQEMPLVQELPLLKLGVNYLPSIFIAGVNFVLPPVFKLIAPLEGYTRSRQIVFILLRTVFLRLASLVVLLFSLWNQITCGGDSEAEDCKTCGYNYKQLPCWETVLGQEMYKLLLFDLLTVLAVALLIQFPRKLLCGLCPGALGRLAGTQEFQVPDEVLGLIYAQTVVWVGSFFCPLLPLLNTVKFLLLFYLKKLTLFSTCSPAARTFRASAANFFFPLVLLLGLAISSVPLLYSIFLIPPSKLCGPFRGQSSIWAQIPESISSLPETTQNFLFFLGTQAFAVPLLLISSILMAYTVALANSYGRLISELKRQRETEAQNKVFLARRAVALTSTKPAL

SEQ ID NO: 96051 - protein, 194 aa, Homo sapiens
  MOD_RES (1)..(1): Any amino acid
XNLMNAIMGSGILGLAYVLANTGVFGFSFLLLTVALLASYSVHLLLSMCIQTAMSSYLLIIKTELPAAIAEFLTGDYSRYWYLDGQTLLIIICVGIVFPLALLPKIGFLGYTSSLSFFFMMFFALVVIIKKWSIPCPLTLNYVEKGFQISNVTDDCKPKLFHFSKESAYALPTMAFSFLCHTSILPIYCELQSP

SEQ ID NO: 96052 - protein, 162 aa, Homo sapiens
MEYMAESTDRSPGHILCCECGVPISPNPANICVACLRSKVDISQGIPKQVSISFCKQCQRYFQPPGTWIQCALESRELLALCLKKIKAPLSKVRLVDAGFVWTEPHSKRLKVKLTIQKEVMNGAILQQVFVVDYVVQSQMCGDCHRVEAKDFWKAVIQVRQK

SEQ ID NO: 96053 - protein, 212 aa, Homo sapiens
MCFPKGLGAWVSACDTEDTVGHLGPWRDKDPALWCQLCLSSQHQAIERFYDKMQNAESGRGQVMSSLAELEDDFKEGYLETVAAYYEEQHPELTPLLEKERDGLRCRGNRSPVPDVEDPATEEPGESFCDKVMRWFQAMLQRLQTWWHGVLAWVKEKVVALVHAVQALWKQFQSFCCSLSELFMSSFQSYGAPRGDKEELTPQKCSEPQSSK

SEQ ID NO: 96054 - protein, 759 aa, Homo sapiens
MAARLLAPPGPDSFKPFTPESLANIERRIAESKLKKPPKADGSHREDDEDSKPKPNSDLEAGKSLPFIYGDIPQGLVAVPLEDFDPYYLTQKTFVVLNRGKTLFRFSATPALYILSPFNLIRRIAIKILIHSVFSMIIMCTILTNCVFMTFSNPPDWSKNVEYTFTGIYTFESLVKIIARGFCIDGFTFLRDPWNWLDFSVIMMAYVTEFVDLGNVSALRTFRVLRALKTISVIPGLKTIVGALIQSVKKLSDVMILTVFCLSVFALIGLQLFMGNLRNKCVVWPINFNESYLENGTKGFDWEEYINNKTNFYTVPGMLEPLLCGNSSDAGQCPEGYQCMKAGRNPNYGYTSFDTFSWAFLALFRLMTQDYWENLYQLTLRAAGKTYMIFFVLVIFVGSFYLVNLILAVVAMAYEEQNQATLEEAEQKEAEFKAMLEQLKKQQEEAQAAAMATSAGTVSEDAIEEEGEEGGGSPRSSSEISKLSSKSAKERRNRRKKRKQKELSEGEEKGDPEKVFKSESEDGMRRKAFRLPDNRIGRKFSIMNQSLLSIPGSPFLSRHNSKSSIFSFRGPGRFRDPGSENEFADDEHSTVEESEGRRDSLFIPIRARERRSSYSGYSGYSQGSRSSRIFPSLRRSVKRNSTVDCNGVVSLIGGPGSHIGGRLLPEVKIDKAATDDSVRKNTNRSRLGMAVSPAPSPPLSLLCPSHLVCLDPTPVNTPAISVFFLAYFYFSLQFSPYYSPCLLLSFILCSIFPIFPPCF

SEQ ID NO: 96055 - protein, 124 aa, Homo sapiens
MLVLGSQKLTQLRDSIRCVSDLQIGGEFSNTPDQAPEHISKDLYKSAFFYFEGTFYNDKRYPECRDLSRTIIEWSESHDRGYGKFQTARMEDFTFNDLCIKLGFPYLYCHQGDCEHVIVITDIR

SEQ ID NO: 96056 - protein, 1201 aa, Homo sapiens [sequence omitted]

SEQ ID NO: 96057 - protein, 114 aa, Homo sapiens
MCIAEIDLIPRDRPFVCAPSSKTGSVTTTYCCNQDHCNKIELPTTGLPLLVQRTIARTIVLQESIGKGRFGEVWRGKWRGEEVAVKIFSSREERSWFREAEIYQTVMLRHENIL

SEQ ID NO: 96058 - protein, 221 aa, Homo sapiens
HIVGKRGDTRKKIEMETKTSISIPKPGQDGEIVITGQHRNGVISARTRIDVLLDTFRRKQPFTHFLAFFLNEVEVQEGFLRFQEEVLAKCSMDHGVDSSIFQNPKKLHLTIGMLVLLSEEEIQQTCEMLQQCKEEFINDISGGKPLEVEMAGIEYMNDDPGMVDVLYAKVHMKDGSNRLQELVDRVLERFQASGLIVKEWNSVKLHATVMNTLFRKDPNVV

SEQ ID NO: 96059 - protein, 154 aa, Homo sapiens
MGGLLGRQRLLLRMGGGRLGAPMERHGRASATSVSSAGEQAAGDPEGRRQEPLRRRASSASVPAVGASAEGTRRDRLGSYSGPTSVSRQRVESLRKKRPQMGSLMLPRLVLNSSWSQAIFPLRPPKVLGYRREPLCPTWQSSTKSFGNSLASWL

SEQ ID NO: 96060 - protein, 160 aa, Homo sapiens
MVKNVLERPEDQRLIYSGKLLLDHQCLRDLLPKQEKRHVLHLVCNVKSPSKMPEINAKVAESTEEPAGSNRGQYPEDSSSDGLRQREVLRNLSSPGWENISRPEAAQQAFQGLGPGFSGYTPYGWLQLSWFQQIYARQYYMQYLAATAASGAFVPPPSAQ

SEQ ID NO: 96061 - protein, 37 aa, Homo sapiens
MEVEAVCGGAGEVEAQDSDPAPAFSKAPGSAGHYELP

SEQ ID NO: 96062 - protein, 132 aa, Homo sapiens
RDHLEEETAKFFTQVHQAIKTLRDDKTVLLEEIYTHKNLFTERLNKISDGLKEKACNESCARNRRTSLWAVSLSSALLLAIAGAGTGQPACLPEVNRGRSYHRHKVHSSLGPGDPIPPYPPSWVLGPQSSEA

SEQ ID NO: 96063 - protein, 154 aa, Homo sapiens
RPRGRAGVTTPAPGNRTVVPPHETFGFKVAVIASIVSCAIILLMSMAFLTCCLLKCVKKSKRRRSNRSAQLWSQLKDEDLETVQAAYLGLKHFNKPVSGPSQAHDNHSFTTDHGESTSKLASVTRSVDKDPGIPRALSLSGSSSSPQAQVMVHM

SEQ ID NO: 96064 - protein, 99 aa, Homo sapiens
MFYVIGGITVSVVAFFFTIKFLFELAARVVSFLQNEDRERRGDRTIYDYVRGNYLDPRSCKVSWDWKDPYEVGHSMAFRVHEWWFLLRPKLCATFLLLY

SEQ ID NO: 96065 - protein, 73 aa, Homo sapiens
  MOD_RES (1)..(1): Any amino acid
XAGSDEEGDNPFSAIQLSESGSDSDVGSGGIRPKQPRMLQENTRMDMENEESMMSYEGDGGEASHGLEDSNIR

SEQ ID NO: 96066 - protein, 677 aa, Homo sapiens
MHHQQRMAALGTDKELSDLLDFSAMFSPPVSSGKNGPTSLASGHFTGSNVEDRSSSGSWGNGGHPSPSRNYGDGTPYDHMTSRDLGSHDNLSPPFVNSRIQSKTERGSYSSYGRESNLQGCHQQSLLGGDMDMGNPGTLSPTKPGSQYYQYSSNNPRRRPLHSSAMEVQTKKVRKVPPGLPSSLVLSPQVYAPSASTADYNRDSPGYPSSKPATSTFPSSFFMQDGHHSSDPWSSSSGMNQPGYAGMLGNSSHIPQSSSYCSLHPHERLSYPSHSSADINSSLPPMSTFHRSGTNHYSTSSCTPPANGTDSIMANRGSGAAGSSQTGDALGKALASIYSPDHTNNSFSSNPSTPVGSPPSLSAGTAVWSRNGGQASSSPNYEGPLHSLQSRIEDRLERLDDAIHVLRNHAVGPSTAMPGGHGDMHGIIGPSHNGAMGGLGSGYGTGLLSANRHSLMVGTHREDGVALRGSHSLLPNQVPVPQLPVQSATSPDLNPPQDPYRGMPPGLQGQSVSSGSSEIKSDDEGDENLQDTKSSEDKKLDDDKKDIKSITRSRSSNNDDEDLTPEQKAEREKERRMANNARERLRVRDINEAFKELGRMVQLHLKSDKPQTKLLILHQAVAVILSLEQQVRERNLNPKAACLKRREEEKVSSEPPPLSLAGPHPGMGDASNHMGQM

SEQ ID NO: 96067 - protein, 654 aa, Homo sapiens
MEGAMAVRVTAAHTAEAQAEAGREAGEGAVAAVAAALAPSGFLGLPAPFSEEDEDDVHRCGRCQAEFTALEDFVQHKIQKACQRAPPEALPATPATTALLGQEVVPAAPGPEEPITVAHIVVEAASLAADISHASDLVGGGHIKEVIVAAEAELGDGEMAEAPGSPRQQGLGLAGEGEQAQVKLLVNKDGRYVCALCHKTFKTGSILKAHMVTHSSRKDHECKLCGASFRTKGSLIRHHRRHTDERPYKCSKCGKSFRESGALTRHLKSLTPCTEKIRFSVSKDVVVSKEDARAGSGAGAAGLGTATSSVTGEPIETSPVIHLVTDAKGTVIHEVHVQMQELSLGMKALAPEPPVSQELPCSSEGSRENLLHQAMQNSGIVLERAAGEEGALEPAPAAGSSPQPLAVAAPQLPVLEVQPLETQVASEASAVPRTHPCPQCSETFPTAATLEAHKRGHTGPRPFACAQCGKAFPKAYLLKKHQEVHVRERRFRCGDCGKLYKTIAHVRGHRRVHSDERPYPCPKCGKRYKTKNAQQVHFRTHLEEKPHVCQFCSRGFREKGSLVRHVRHHTGEKPFKCYKCGRGFAEHGTLNRHLRTKGGCLLEVEELLVSEDSPAAATTVLTEDPHTVPLRTMRRPVRPRRSSRAPRQRWTATS

SEQ ID NO: 96068 - protein, 401 aa, Homo sapiens
MALRVTRNSKINAENKAKINMAGAKRVPTAPAATSKPGLRPRTALGDIGNKVSEQLQAKMPMKKEAKPSATGKVIDKKLPKPLEKVPMLVPVPVSEPVPEPEPEPEPEPVKEEKLSPEPILVDTASPSPMETSGCAPAEEDLCQAFSDVILAVNDVDAEDGADPNLCSEYVKDIYAYLRQLEEEQAVRPKYLLGREVTGNMRAILIDWLVQVQMKFRLLQETMYMTVSIIDRFMQNNCVPKKMLQLVGVTAMFIASKYEEMYPPEIGDFAFVTDNTYTKHQIRQMEMKILRALNFGLGRPLPLHFLRRASKIGEVDVEQHTLAKYLMELTMLDYDMVHFPPSQIAAGAFCLALKILDNGEWTPTLQHYLSYTEESLLPVMQHLAKNVVMVNQGLTKHMVSQ

SEQ ID NO: 96069 - protein, 134 aa, Homo sapiens
MFADLDYDIEEDKLGIPTVPGKVTLQKDAQNLIGISIGGGAQYCPCLYIVQVFDNTPAALDGTVAAGDEITGVNGRSIKGKTKVEVAKMIQEVKGEVTIHYNKLQADPKQGMSLDIVLKKVKHRLVENMSSGTA

SEQ ID NO: 96070 - protein, 235 aa, Homo sapiens
MEKQCCSHPVICSLSTMYTFLLGAIFIALSSSRILLVKYSANEENKYDYLPTTVNVCSELVKLVFCVLVSFCVIKKDHQSRNLKYASWKEFSDFMKWSIPAFLYFLDNLIVFYVLSYLQPAMAVIFSNFSIITTALLFRIVLKRRLNWIQWASLLTLFLSIVALTAGTKTLQHNLAGRGFHHDAFFSPSNSCLLFRSPPWNFSWKPHQSFSLYLFIMPASLKFRNTHLGKKGSEI

SEQ ID NO: 96071 - protein, 116 aa, Homo sapiens
MAATGTAAAAATGRLLLLLLVGLTAPALALAGYIEALAANAGTGFAVAEPQIAMFCGKLNMHVNIQTGKWEPDPTGTKSCFETKEEVLQYCQEMYPELQITNSGWRCVRITSTGTR

SEQ ID NO: 96072 - protein, 106 aa, Homo sapiens; identical to SEQ ID NO: 43169

SEQ ID NO: 96073 - protein, 84 aa, Homo sapiens
MKEPDDQDTDGEKSVTSKSDGKKSLRSSKSESRSPVQEDNTFLEDDTDETFTKGEGSYLEEDSDEERLEGSLSSFQYGDLQSTT

SEQ ID NO: 96074 - protein, 74 aa, Homo sapiens
MRSIRSFANDDRHVMVKHSTIYPSPEELEAVQNMVSTVECALKHVSDWLDETNKGTKTEGETEVKKDEAGENYS

SEQ ID NO: 96075 - protein, 289 aa, Homo sapiens
MPTGDFDSKPSWADQVEEEGEDDKCVTSELLKGIPLATGDTSPEPELLPGAPLPPPKEVINGNIKTVTEYKIDEDGKKFKIVRTFRIETRKASKAVARRKNWKKFGNSEFDPPGPNVATTTVSDDVSMTFITSKEDLNCQEEEDPMNKLKGQKIVSCRICKGDHWTTRCPYKDTLGPMQKELAEQLGLSTELEPVQATQNKTGKYVPPSLRDGASRRGESMQPNRRADDNATIRVTNLSEDTRETDLQELFRPFGSISRIYLAKDKTTGQSKGFAFISFHRREDAARAI

SEQ ID NO: 96076 - protein, 114 aa, Homo sapiens
MFARGSRRRRSGRAPPEAEDPDRGQPCNSCREQCPGFLLHGWRKICQHCKCPREEHAVHAVPVDLERIMCRLISDFQRHSISDDDSGCASEEYAWVPPGLKPEQLFSPTPMSSQ

SEQ ID NO: 96077 - protein, 33 aa, Homo sapiens
MVTRLLQQQNLPQTGEQELESLVLKLSVLKDFL

SEQ ID NO: 96078 - protein, 154 aa, Homo sapiens
  MOD_RES (1)..(1): Any amino acid
XIQITLNNTTDRKIENIHIGEKKLPIGMKMHVFNPIDSLEPEGSITVSMGIDFCDSTQTASFQLCTKDDCFNVNIQPPVGELLLPVAMSEKDFKKEQGVLTGMNETSAVIIAAPQNFTPSVIFQKVVNVANVGAVPSGQDNIHRSLFFLFQVCS

SEQ ID NO: 96079 - protein, 145 aa, Homo sapiens
MQGRITKVLNMKPPEILSMIEEAAGTRMYEYKKIAAQKTIEKKEAKLKEIKTILEEEITPTIQKLKEERSSYLEYQKVMREIEHLSRLYIAYQFLLAEDTKVRSAEELKEMQDKVIKLQEELSENDKKIKALNHEIEELEKRKDK

SEQ ID NO: 96080 - protein, 157 aa, Homo sapiens
MDLCHPEPAELSSGETEELQRIKWHRKQLLEDIQKLKDEIADVFAQIDCFESAEESRMAQKEKELCIGRKKFNMDPAKGIQYFIEHKLLTPDVQDIARFLYKGEGLNKTAIGTYLGERDPINLQVLQAFVDCHEFANLNLVQALRFREGASDLGFGG

SEQ ID NO: 96081 - protein, 328 aa, Homo sapiens
MQGPPRSLRAGLSLDDFIPGHLQSHIGSSSRGTRVPVIRNGGSNTLNFQFHDPAPRTVCNGGYTPRRDASQHPDPAWYQTWPGPGSKPSASTKIPASQHTQNWSATWTKDSKRRDKRWVKYEGIGPVDESGMPIAPRSSVDRPRDWYRRMFQQIHRKMPDLQLDWTFEEPPRDPRHLGAQQRPAHRPGPATSSSGRSWDHSEELPRSTFNYRPGAFSTVLQPSNQVLRRREKVDNVWTEESWNQFLQELETGQRPKKPLVDDPGEKPSQPIEVLLERELAELSAELDKDLRAIETRLPSPKPGLSLELQLPTCTLPGFRPVPESPQNG

SEQ ID NO: 96082 - protein, 149 aa, Homo sapiens
MVECLTSLLLLNFLKVRISFLKHFTPFIIICDVLQWFYSSAITAIATSVCHGPPCRQLHHALMPHGKGGRSSVSGIVATVFGATGFLGRYVVNHLGRMGSQVIIPYRCDKYDIMHLRPMGDLGQLLFLEWDARDKDSIRRVVQHSNVVI

SEQ ID NO: 96083 - protein, 144 aa, Homo sapiens
MGQESSKPVWPNPTGGYQSNTGRRYGRRHAYVSFRPPTSQRERIASQRKTNSEVPMHRSAPSQTTKRSRSPFSTTRRSWDDSESSGTNLNIDNEDYSRYPPREYRASGSRRGMAYGHIDSYGADDSEEEGAGPVERPPVRGKTG

SEQ ID NO: 96084 - protein, 156 aa, Homo sapiens
MATQQVDSRRQVAAEQVAAQLLERRRGSHCDDEKQTLLALLILVLYLSTEIWGSSWEVSERIRECNYYQNLAVPQGLEYQTNEPSEEPIKTIRNWLKEKLHVFSEKLEEEVQQLEQLAWDLELWLDALLGEPHQEEHCSTYKSHLHLEHEVSIRDH

SEQ ID NO: 96085 - protein, 66 aa, Homo sapiens
MEQHEPRTPALALASGPCVYVYKNLRPYFKFSLPQLPPNPLEQDLWNQAKEDRIDPLTLKEMLESI

SEQ ID NO: 96086 - protein, 204 aa, Homo sapiens
MMKTLLLFVGLLLTWESGQVLGDQTVSDNELQEMSNQGSKYVNKEIQNAVNGVKQIKTLIEKTNEERKTLLSNLEEAKKKKEDALNETRESETKLKELPGVCNETMMALWEECKPCLKQTCMKFYARVCRSGSGLVGRQLEEFLNQSSPFYFWMNGDRIDSLLENDRQQTHMLDVMQDHFSRASSIIDELFQDRFFTREPQDTY

SEQ ID NO: 96087 - protein, 108 aa, Homo sapiens
MDKLTIISGCLFLAADIFAIASIANPDWINTGESAGALTVGLVRQCQTIHGRDRTCIPPRLPPEWVTTLFFIIMGIISLTVTCGLLVASHWRREATKYARWIAFTGSK

SEQ ID NO: 96088 - protein, 106 aa, Homo sapiens; identical to SEQ ID NO: 55080

SEQ ID NO: 96089 - protein, 77 aa, Homo sapiens
  MOD_RES (1)..(1): Any amino acid
XWWFGEVQGQKGWFPKSYVKLISGPIRKSTSMDSGSSESPASLKRVASPAAKPVVSGEGLWNCWENREFRKKTWSLL

SEQ ID NO: 96090 - protein, 40 aa, Homo sapiens
MQENYGILVSLGYPIPKPDLIFRLEQGEEPWVPDSPRPEE

SEQ ID NO: 96091 - protein, 37 aa, Homo sapiens
MYSFNTLRLYLWETIVFFRSPSERELQHFHQQLWFHC

SEQ ID NO: 96092 - protein, 26 aa, Homo sapiens
MRKDTDDIESPKRSIRDSGYIDCWDS

SEQ ID NO: 96093 - protein, 377 aa, Homo sapiens
  MOD_RES (1)..(1): Any amino acid
XAKKTFDQWKDMIPDLSEYKWIVPDIVWEIDEYIDFEKIRKALPSSEDLVKLAPDFDKIVESLSLLKDFFTSGSPEETAFRATDRGSESDKHFRKVSDKEKIDQLQEELLHTQLKYQRILERLEKENKELRKLVLQKDDKGIHHRKLKKSLIDMYSEVLDVLSDYDASYNTQDHLPRVVVVGDQSAGKTSVLEMIAQARIFPRGSGEMMTRSPVKVTLSEGPHHVALFKDSSREFDLTKEEDLAALRHEIELRMRKNVKEGCTVSPETISLNVKGPGLQRMVLVDLPGVINTVTSGMAPDTKETIFSISKAYMQNPNAIILCIQDGSVDAERSIVTDLVSQMDPHGRRTIFVLTKVDLAEKNVASPSRGTALKALKL

SEQ ID NO: 96094 - protein, 70 aa, Homo sapiens
MFTLDVKSNTVFDIITDNCDLHFKISRDRLSASSLTMESFAFLWAGGRASYGVSKGYREDPSKAFIYKRY

SEQ ID NO: 96095 - protein, 146 aa, Homo sapiens
MALVRGGWLWRQSSILRRWKRNWFALWLDGTLGYYHDETAQDEEDRVLIHFNVRDIKIGPECHDVQPPEGRSRDGLLTVNLREGGRLHLCAETKDDALAWKTALLEANSTPMIRLKLIHPHNKYLLSCYYGPGGVPSARDQRCAST

SEQ ID NO: 96096 - protein, 141 aa, Homo sapiens
  MOD_RES (1)..(1): Any amino acid
XAYDIFLNAKEQNIVFNAETYSNLIKLLMSEDYFTQAMEVKAFAETHIKGFTLNDAANSRLIITQVRRDYLKEAVTTLKTVLDQQQTPSRLAVTRVIQALAMKGDVENIEVVQKMLNGLEDSIGLSKMVFINNIALAQIKK

SEQ ID NO: 96097 - protein, 173 aa, Homo sapiens
PFYIPRQDCNTSLVRACWNELFTLGLAQCAQVMSLSTILAAIVNHLQNSIQEDKLSGDRIKQVMEHIWKLQEFCNSMAKLDIDGYEYAYLKAIVLFSPDHPGLTSTSQIEKFQEKAQMELQDYVQKTYSEDTYRTCSPESGNGKHGAEEKQNSQRTQPQKVVIWDLLLVAETF

SEQ ID NO: 96098 - protein, 89 aa, Homo sapiens
  MOD_RES (1)..(1): Any amino acid
XSGLCAHLFGLSDCPVLSGSGAVYRVCAGTATFHLLQAVLLVHLHSPTSPRAQLHNSMALHWHLWRLCIHPTAVGAYYSFCPFLEQELQ

SEQ ID NO: 96099 - protein, 140 aa, Homo sapiens
MVHDRLDRYCCGFEPEPSDPCVEERLREKCQNPAELRLVHILVRSSDPSHLVYIDNAGNLQHPEDKLNFRLLEGIDGFPESAVKVLASGCLQNMLLKSLQMDPVFWESQGGAQGLKQVLQTLEQRGQVLLGHIQKHNLTL

SEQ ID NO: 96100 - protein, 115 aa, Homo sapiens
MTTFKEAVTFKDVAVVFTEEELGLLDPAQRKLYRDVMLENFRNLLSVGHQPFHQDTCHFLREEKFWMMGTATQREGNSGGKIQTELESVPEAGAHEEWSCQQIWEQIAKDLTRSQ

SEQ ID NO: 96101 - protein, 743 aa, Homo sapiens
MRALAVLSVTLVMACTEAFFPFISRGKELLWGKPEESRVSSVLEESKRLVDTAMYATMQRNLKKRGILSPAQLLSFSKLPEPTSGVIARAAEIMETSIQAMKRKVNLKTQQSQHPTDALSEDLLSIIANMSGCLPYMLPPKCPNTCLANKYRPITGACNNRDHPRWGASNTALARWLPPVYEDGFSQPRGWNPGFLYNGFPLPPVREVTRHVIQVSNEVVTDDDRYSDLLMAWGQYIDHDIAFTPQSTSKAAFGGGSDCQMTCENQNPCFPIQIITLRDYIPRILGPEAFQQYVGPYEGYDSTANPTVSNVFSTAAFRFGHATIHPLVRRLDASFQEHPDLPGLWLHQAFFSPWTLLRGGGLDPLIRGLLARPAKLQVQDQLMNEELTERLFVLSNSSTLDLASINLQRGRDHGLPGYNEWREFCGLPRLETPADLSTAIASRSVADKILDLYKHPDNIDVWLGGLAENFLPRARTGPLFACLIGKQMKALRDGDWFWWENSHVFTDAQRRELEKHSLSRVICDNTGLTRVPMDAFQVGKFPEDFESCDSITGMNLEAWRETFPQDDKCGFPESVENGDFVHCEESGRRVLVYSCRHGYELQGREQLTCTQEGWDFQPPLCKDVNECADGAHPPCHASARCRNTKGGFQCLCADPYELGDDGRTCVDSGRLPRVTWISMSLAALLIGGFAGLTSTVICRWTRTGTKSTLPISETGGGTPELRCGKHQAVGTSPQRAAAQDSEQ

SEQ ID NO: 96102 - protein, 330 aa, Homo sapiens
MKLFDASPTFFAFLLGHILAMEVLAWLLIYLLGPGWVPSALAAFILAISQAQSWCLQHDLGHASIFKKSWWNHVAQKFVMGQLKGFSAHWWNFRHFQHHAKPNIFHKDPDVTVAPVFLLGESSVEYGKKKRRYLPYNQQHLYFFLIGPPLLTLVNFEVENLAYMLVCMQWADLLWAASFYARFFLSYLPFYGVPGVLLFFVAVRVLESHWFVWITQMNHIPKEIGHEKHRDWVSSQLAATCNVEPSLFTNWFSGHLNFQIEHQCQHTLPTPSLFPRMPRHNYSRVAPLVKSLCAKHGLSYEVKPFLTALVDIVRSLKKSGDIWLDAYLHQ

SEQ ID NO: 96103 - protein, 94 aa, Homo sapiens
MSVNMDELKHQVMINQFVLTAGCAADQAKQLLQAAHWQFESSQGHPQPQRSLGTRAAAGPAGAWRVSRGLSSCRQPSAPFSRRPTSPTATITTR

SEQ ID NO: 96104 - protein, 67 aa, Homo sapiens
  MOD_RES (1)..(1): Any amino acid
XKDSNSMVRIKTTEVLHITASHSVGRYAFLEHDIVLALSFLLNDPSPVCRGNLYKAYMQLVQVPRGT

SEQ ID NO: 96105 - protein, 129 aa, Homo sapiens
MDHHQPGTGRYQVLLNEEDNSESSAIEQPPTSNPAPQIVQAASSAPALETDSSPPPYSSITVEVPTTSDTEVYGEFYPVPPPYSVATSLPTYDEAEKAKAAAMAAAAAETSQRNFGMMIKHSVFLIYMF

SEQ ID NO: 96106 - protein, 132 aa, Homo sapiens
MAAHLKKRVYEEFTKVVQPQEEIATKKLRLTKPSKSAALHIDLCKATSPADALQYLLQFARKPVEAESVEGVVRILLEHYYKENDPSVRLKIASLLGLLSKTAGFSPDCIMDDAINILQNETSDRYVSWCKK

SEQ ID NO: 96107 - protein, 13 aa, Homo sapiens
MKGSNRNKDHSAE

SEQ ID NO: 96108 - protein, 44 aa, Homo sapiens
MMDGHEVTVVDNFFTGRKRNVEHWIGHENFELINHDVVEPLYIE

SEQ ID NO: 96109 - protein, 272 aa, Homo sapiens
MGCAPSIHISERLVAEDAPSPAAPPLSSGGPRLPQGQKTAALPRTRGAGLLESELRDGSGKKVAVADVQFGPMRFHQDQLQVLLVFTKEDNQCNGFCRACEKAGFKCTVTKEAQAVLACFLDKHHDIIIIDHRNPRQLDAEALCRSIRSSKLSENTVIVGVVRRVDREELSVMPFISAGFTRRYVENPNIMACYNELLQLEFGEVRSQLKLRACNSVFTALENSEDAIEITSEDRFIQPCCSSSWFGAVHIPSSAPVEVGVGLLPSWSLRRT

SEQ ID NO: 96110 - protein, 57 aa, Homo sapiens
MAGQFRSYVWDPLLILSQIVLMQTVYYGSLGLWLALVDGLVRSSPSLDQMFDAEEAC

SEQ ID NO: 96111 - protein, 34 aa, Homo sapiens
  MOD_RES (1)..(1): Any amino acid
XKSVSEGHLKRNIVVKTVEMRDGEGTHPETSGII

SEQ ID NO: 96112 - protein, 111 aa, Homo sapiens
MVLKAFFPTCCVSTDSGLLVGRWVPEQSSAVVLAVLHFPFIPIQVKQLLAQVRQASQVGVAVLGTWCHCRQEPEESLGRFLESLGAVFPHEPWLRLCRERGGTFWSCEATH

SEQ ID NO: 96113 - protein, 54 aa, Homo sapiens
MPSSLLGAAMPASTSAAALQEALENAGRLIDRQLQEDRMYPDLSELLMVSAPSE

SEQ ID NO: 96114 - protein, 49 aa, Homo sapiens
MAAAGVVSGKATLSARYSRILTDDSLGDRWCYFLKSLICSSLSFSQDYI

SEQ ID NO: 96115 - protein, 135 aa, Homo sapiens
MASLDRVKVLVLGDSGVGKSSLVHLLCQNQVLGNPSWTVGCSVDVRVHDYKEGTPEEKTYYIELWDVGGSVGSASSVKSTRAVFYNSVNGIIFVHDLTNKKSSQNLRRWSLEALNRDLVPTGVLVTNGTAQIHGT

SEQ ID NO: 96116 - protein, 125 aa, Homo sapiens
MNQPESANDPEPLCAVCGQAHSLEENHFYSYPEEVDDDLICHICLQALLDPLDTPCGHTYCTLCLTNFLVEKDFCPMDRKPLVLQHCKKSSILVNKLLNKLLVTCPFREHCTQVLQRCDLEHHFQ

SEQ ID NO: 96117 - protein, 275 aa, Homo sapiens
  MOD_RES (1)..(1): Any amino acid
XFDGALNVDLTEFQTNLVPYPRIHFPLVTYAPIISAEKAYHEQLSVAEITSSCFEPNSQMVKCDPRHGKYMACCMLYRGDVVPKDVNVAIAAIKTKRTIQFVDWCPTGFKVGINYQPPTVVPGGDLAKVQRAVCMLSNTTAIAEAWARLDHKFDLMYAKRAFVHCQRIQLGISCSSMTSLVSASLEPFLKAVFDFHESFEDGRPADLQNAPRFGLARTRVLAKGFRLLTFDGNSTEVIPRWLHSVLWWHAIPVFPALMTFLYRIFTLITFFIVIM

SEQ ID NO: 96118 - protein, 736 aa, Homo sapiens
MLLPVFTLKLRHKISPRMVAIGRYDGTHPCLAAATQTGKVFIHNPHTRNQHVSASRVFQSPLESDVSLLSINQAVSCLTAGVLNPELGYDALLVGTQTNLLAYDVYNNSDLFYREVADGANAIVLGTLGDISSPLAIIGGNCALQGFNHEGSDLFWTVTGDNVNSLALCDFDGDGKKELLVGSEDFDIRVFKEDEIVAEMTETEIVTSLCPMYGSRFGYALSNGTVGVYDKTSRYWRIKSKNHAMSIHAFDLNSDGVNELITGWSNGKVDARSDRTGEVIFKDNFSSAIAGVVEGDYRMDGHIQLICCSVDGEIRGYLPGTAEMRGNLMDTSAEQDLIRELSQKKQNLLLELRNYEENAKAELASPLNEADGHRGIIPANTRLHTTLSVSLGNETQTAHTELRISTSNDTIIRAVLIFAEGIFTGESHVVHPSIHNLSSSICIPIVPPKDVPVDLHLKAFVGYRSSTQFHVFESTRQLPRFSMYALTSLDPASEPISYVNFTIAERAQRVVVWLGQNFLLPEDTHIQNAPFQVCFTSLRNGGHLHIKIKLSGEITINTDDIDLAGDIIQSMASFFAIEDLQVEADFPVYFEELRKVLVKKFVRPFSFLSVHGLQVDEYHSVHQKLSADMADHSNLIRSLLVGAEDARLMRDMKTMKSRYMELYDLNRDLLNGYKIRCNNHTELLGNLKAVNQAIQRAGRLRVGKPKNQVITACRDAIRSNNINTLFKIMRVGTASS

SEQ ID NO: 96119 - protein, 145 aa, Homo sapiens
MYGKIIFVLLLSEIVSISALSTTEVAMHTSTSSSVTKSYISSQTNDTHKRDTYAATPRAHEVSEISVRTVYPPEEETGERVQLAHHFSEPEITLIIFGVMAGVIGTILLISYGIRRLIKRQVINENLFTKPNVERTQRRHKTSVK

SEQ ID NO: 96120 - protein, 115 aa, Homo sapiens
  MOD_RES (1)..(1): Any amino acid
XEREVSTAPAGTDMPAAKKQKLSSDENSNPDLSGDENSCENAIVCWKPGKMEDDIDKIKPSESNVTILGRFDYSQCDIWYMRFSMDFWQKMLALGNQVGKLYVWDLEVEDPHKAK

SEQ ID NO: 96121 - protein, 83 aa, Homo sapiens
MVQKYQSPVRVYKYPFELIMAAYERRFPTCPLIPMFVGSDTVNEFKSEDGAIHVIERRCKLDVDAPRLLKKELIMFILSRKTH

SEQ ID NO: 96122 - protein, 119 aa, Homo sapiens
MPLEMEPKMSKLAFGCQRSSTSDDDSGCALEEYAWVPPGLRPEQIQLYFACLPEEKVPYVNSPGEKHRIKQLLYQLPPHDNEVRYCQSLSEEEKKELQVFSAQRKKEALGRGTIKLLSR

SEQ ID NO: 96123 - protein, 196 aa, Homo sapiens
TTKAKYKTPTYPYLLPKSTSTANQLPFTLPGGQCTTVQNQFFISCSDGRTVLNKVGDEIVDRILKAHKQGWCYRVYVLLPLLPGFEGDISTGGGNSIQAILHFTYRTLCRGEYSILHRLKAAMGTAWRDYISICGLRTHGELGGHPVSELIYIHSKVLIADDRTVIIGSANINDRSLLGKRDSELAVLIEDTETEP

SEQ ID NO: 96124 - protein, 63 aa, Homo sapiens
MAGQGLPLHVATLLTGLLECLGFAGVLFGWPSLVFVFKNEDYFKDLCGPDAGPIGNATGQAGR

SEQ ID NO: 96125 - protein, 114 aa, Homo sapiens
KRRGDALIEMESEQDVQKALEKHRMYMGQRYVEVYEINNEDVDALMKSLQVKSSPVVNDGVVRLRGLPYSCNEKDIVDFFADTSRYFQAEGMKFEHMSVLIRERKSHLFLLLSI

SEQ ID NO: 96126 - protein, 643 aa, Homo sapiens
MTLTLSVLICLGLSVGPRTCVQAGTLPKPTLWAEPASVIARGKPVTLWCQGPLETEEYRLDKEGLPWARKRQNPLEPGAKAKFHIPSTVYDSAGRYRCYYETPAGWSEPSDPLELVATGFYAEPTLLALPSPVVASGGNVTLQCDTLDGLLTFVLVEEEQKLPRTLYSQKLPKGPSQALFPVGPVTPSCRWRFRCYYYYRKNPQVWSNPSDLLEILVPGVSRKPSLLIPQGSVVARGGSLTLQCRSDVGYDIFVLYKEGEHDLVQGSGQQPQAGLSQANFTLGPVSRSHGGQYRCYGAHNLSPRWSAPSDPLDILIAGLIPDIPALSVQPGPKVASGENVTLLCQSWHQIDTFFLTKEGAAHPPLCLKSKYQSYRHQAEFSMSPVTSAQGGTYRCYSAIRSYPYLLSSPSYPQELVVSGPSGDPSLSPTGSTPTPGPEDQPLTPTGLDPQSGLGRHLGVVTGVSVAFVLLLFLLLFLLLRHRHQSKHRTSAHFYRPAGAAGPEPKDQGLQKRASPVADIQEEILNAAVKDTQPKDGVEMDARQSPHDEDPQAVTYAEVKHSRPRREMASPPSPLSGEFLDTKDRQAEEDRQMDTEAAASEAPQDVTYAQLHSLTLRREATEPPPSQEREPPAEPSIYAPLAIH

SEQ ID NO: 96127 - protein, 385 aa, Homo sapiens
MSGPVPSRARVYTDVNTHRPREYWDYESHVVEWGNQDDYQLVRKLGRGKYSEVFEAINITNNEKVVVKILKPVKKKKIKREIKILENLRGGPNIITLADIVKDPVSRTPALVFEHVNNTDFKQLYQTLTDYDIRFYMYEILKALDYCHSMGIMHRDVKPHNVMIDHEHRKLRLIDWGLAEFYHPGQEYNVRVASRYFKGPELLVDYQMYDYSLDMWSLGCMLASMIFRKEPFFHGHDNYDQLVRIAKVLGTEDLYDYIDKYNIELDPRFNDILGRHSRKRWERFVHSENQHLVSPEALDFLDKLLRYDHQSRLTAREAMEHPYFYTVVKDQARMGSSSMPGGSTPVSSANMMSEMKFCRVAQAGLELLSSTVYPPWPPKVLRLEA

SEQ ID NO: 96128 - protein, 55 aa, Homo sapiens
MSKRPSYAPPPTPAPATQMPSTPGFVGYNPYSHLAYNNYRLGGNPGTNSRVTEIS

SEQ ID NO: 96129 - protein, 59 aa, Homo sapiens
MDPDSDQPLNSLGKFRCQTPAQTPYPHGDLQKGGDPHHHSTTEPGEYHHCGCPHQGDSG

SEQ ID NO: 96130 - protein, 405 aa, Homo sapiens
MLARRKPMLPALTINPTIAEGPSPTSEGASEANLVDLQKKLEELELDEQQKRLEAFLTQKAKVGELKDDDFERTSELDAGNGGVVTKVQHRPSGLIMARKLIHLEIKPAIRNQIIREHQVLHECNSPYIVGFYGAFYCDREISICMEHMDGGSLDQGLKEAKRIPEDILGKVSIAVLRGLAYLREKHQIMHRNVKPSNILVNSRGEIKLCDFGVSGQLIDSMANSFVGTRSYMAPERLQGTHYSVQSVIWSMDLSLVELAIERYPIPPPDAKELEAIFGQPVVDREEGEPHSISSWPGSPGRPNSGYGMDSLPAMAIFELLDYIVKEPPPKLPNGVFTPDFQEFVNKCLIKNPTERADLKMLTNHAFIKRSEACLLSNHQAKHTLMNTSNSASKWTLTTLMLTTN

SEQ ID NO: 96131 - protein, 41 aa, Homo sapiens
MGFNLTFHLSYKFRLLLLLTLCLTVVGWATSNYFVGAIQEI

SEQ ID NO: 96132 - protein, 140 aa, Homo sapiens
MSSPASTPSRRGSRRGRATPAQTPRSEDARSSPSQRRRGEDSTSTGELQPMPTSPGVDLQSPAAQDVLFSSPPQMHSSAIPLDFDVSSPLTYGTPSSRVEGTPRSGVRGTPVRQRPDLGSAQKGLQVDLQSDGAAAEDIV

SEQ ID NO: 96133 - protein, 204 aa, Homo sapiens
MGADPYHSSAQCLSILFSLSLHSPGLPVLMSSSLLLLPKSTANPETPNSTISREASTQSSSAATSQGYILPEGKIMPNTVFVGGIDVRMDETEIRSFFARYGSVKEVKIITDRTGVSKGYGFVSFFNDVDVQKIVESQINFHGKKLKLGPAIRKQNLCAYHVQPRPLVFNHPPPPQFQNVWTNPNTETYMQPTTTMNPITQYVQ

SEQ ID NO: 96134 - protein, 506 aa, Homo sapiens
MANRELAFKAGDVIKVLDASNKDWWWGQIDDEEGWFPASFVRLWVNQEDEVEEGPSDVQNGHLDPNSDCLCLGRPLQNRDQMRANVINEIMSTERHYIKHLKDICEGYLKQCRKRRDMFSDEQLKVIFGNIEDIYRFQMGFVRDLEKQYNNDDPHLSEIGPCFLEHQDGFWIYSEYCNNHLDACMELSKLMKDSRYQHFFEACRLLQQMIDIAIDGFLLTPVQKICKYPLQLAELLKYTAQDHSDYRYVAAALAVMRNVTQQINERKRRLENIDKIAQWQASVLDWEGEDILDRSSELIYTGEMAWIYQPYGRNQQRVFFLFDHQMVLCKKDLIRRDILYYKGRIDMDKYEVVDIEDGRDDDFNVSMKNAFKLHNKETEEIHLFFAKKLEEKIRWLRAFREERKMVQEDEKIGFEISENQKRQAAMTVRKVPKQKGVNSARSVPPSYPPPQDPLNHGQYLVPDGIAQSQVFEFTEPKRSQSPFWQNFSRCLGSIDRSMEGFKTEPT

SEQ ID NO: 96135 - protein, 122 aa, Homo sapiens
  MOD_RES (1)..(1): Any amino acid
XKKKGKPASMVKNKEQVRHFYYRTWHKITKYIDFDHVFSRGLKKSSQELYGLICYGELRKKIGGCMDDKNATKLNELIQVGRSFTMLARLVLNSRPQETCQGPPLYVTKGGTCGSKRPCAGP

SEQ ID NO: 96136 - protein, 58 aa, Homo sapiens
MPYMRYSRKVWDQVKASNPDLKLWEIGKIIGGMWRDLTDEEKQEYLNEYEAEKSTMNL

SEQ ID NO: 96137 - protein, 91 aa, Homo sapiens
MDAENNIEKYPLNLQPLESKVKIIQRAWREYLQRQEPLGKRSPSPPSVSSEKLSSSVSMNTFSDSSTPDYREDGMDLGSDAGSSSSSSRAS

SEQ ID NO: 96138 - protein, 144 aa, Homo sapiens
MAYQSLRLEYLQIPPVSRAYTTACVLTTAAVQLELITPFQLYFNPELIFKHFQIWRLITNFLFFGPVGFNFLFNMIFLYRYCRMLEEGSFRGRTADFVFMFLFGGFLMTQSDRMSKSKELLTQVLQLDTYIFSWKMYFPINLVE

SEQ ID NO: 96139 - protein, 76 aa, Homo sapiens
MSTEEQYRIRQVNIYYYLEDDSMSVIEPVVENSGILQGKLIKRQRLAKNDRGDHYHWKDLNRGINITIYGKTFRVV

SEQ ID NO: 96140 - protein, 269 aa, Homo sapiens
  MOD_RES (1)..(1): Any amino acid
XRNVKKEFTSHALDSHILDYYENPAIKEDVSTLIGDDLASCKDETDESSKEETEPQVLKFRVTCNRAGEKHCFTSNEAARDFGGAVQDYFKWKADMTNFDVEVLLNIHDNEVIVGIALTEESLHRRNITHFGPTTLRSTLAYGMLSKPSWGLPIDAVQWDICNLPLRTGSVDIIVTDLPFGKRMGSKKRNWNLYPACLREMSRVCTPTTGRAVLLTQDTKCFTKALSGMRHVWRKVDTVWVNVGGLRAAVYVLIRTPQAFVHPSEQDGE

SEQ ID NO: 96141 - protein, 100 aa, Homo sapiens
MSLRCGDAARTLGPRVFGRYFCSPVRPLSSLPDKKKELLQNGPDLQDFVSGDLADRSTWDEYKGNLKRQKGERYVRKLDVPILESVGEVENMPPPQPRSC

SEQ ID NO: 96142 - protein, 981 aa, Homo sapiens
MVVSAGPWSSEKAEMNILEINEKLRPQLAENKQQFGNLKERCFLTQLAGFLANRQKKYKYEECKDLIKFMLRNERQFKEEKLAEQLKQAEELRQYKVLVHSQERELTQLKEKLREGRDASRSLNEHLQALLTPDEPDKSQGQDLQEQLAEGCRLAQHLVQKLSPENDEDEDEDVQVEEDEKVLESSAPREVQKAEESKVAEDSLEECAITCSNSHGPCDSNQPHKNIKITFEEDEVNSTLVVDRESSHDECQDALNILPVPGPTSSATNVSMVVSAGPLSSEKAEMNILEINEKLRPQLAEKKQQFRNLKEKCFLTQLAGFLANQQNKYKYEECKDLIKFMLRNERQFKEEKLAEQLKQAEELRQYKVLVHAQERELTQLREKLREGRDASRSLNEHLQALLTPDEPDKSQGQDLQEQLAEGCRLAQHLVQKLSPENESDDEEEEEKGPVSPRNLQESEEEEVPQESWDEGHRWDQVKKEDQEATGPRLSRELLDEKGPEVLQDSLDRCYSTPSGCLELTDSCQPYRSAFYVLEQQRVGLAVDMDEIEKYQEVEEDQDPSCPRLSRELLDEKEPEVLQDSLGRWYSTPSGYLELPDLGQPYSSAVYSLEEQYLGLALDLDRIKKDQEEEEDQGPPCPRLSRELLEVVEPEVLQDSLDRCYSTPSSCLEQPDSCQPYGSSFYALEEKHVGFSLDVGEIEKKGKGKKRRGRRSKKKRRRGRKEGEENQNPPCPRLSRELLDEKEPEVLQDSLDRCYSTPSGYLELPDLGQPYSSAVYSLEEQYLGLALDVDRIKKDQEEEEDQGPPCPRLSRELLEVVEPEVLQDSLDRCYSTPSSCLEQPDSCQPYGSSFYALEEKHVGFSLDVGEIEKKGKGKKRRGRRSKKERRRGRKEGEEDQNPPCPRLNGVLMEVEEPEVLQDSLDGCYSTPSMYFELPDSFQHYRSVFYSFEEQHISFALYVDNRFFTLTVTSLHLVFQMEVIFPQ

SEQ ID NO: 96143 - protein, 98 aa, Homo sapiens
MRTPRLRAQPRGAVYQAPSPPPAPVGLGSMAVFRSGLLVLTTPLASLAPRLASILTSAARLVNHTLYVHLQPGMSLEGPAQPQSSPVQATFEVLDFIT

SEQ ID NO: 96144 - protein, 126 aa, Homo sapiens
  MOD_RES (1)..(1): Any amino acid
XLEYKTVRTFSESLKSEKTEEPKDDDVIRNIIRLREKLGWQTILPQHSLKYGSSKIAIQKITLKKPLEDDGEFVYCLPRKSPKSLYNPYDLQVVSAHTAKHCKEFWVITASFISKRYLVICGAVYI

SEQ ID NO: 96145 - protein, 303 aa, Homo sapiens
MAAAAVSGALGRAGWRLLQLRCLPVSVSVARCRQALVPRAFHASAVGLRSSDEQKQQPPNSFSQQHSETQGAEKPDPESSHSPPRYTDQGGEEEEDYESEEQLQHRILTAALEFVPAHGWTAEAIAEGAQSLGLSSAAASMFGKDGSELILHFVTQCNTRLTRVLEEEQKLVQLGQAEKRKTDQFLRDAVETRLRMLIPYIEHWPRALSILMLPHNIPSSLSLLTSMVDDMWHYAGDQSTDFNWYTRRAMLAAIYNTTELVMMQDSSPDFEDTWRFLENRVNDAMNMGHTAKQVKSTGEALVQ

SEQ ID NO: 96146 - protein, 291 aa, Homo sapiens
MGITLHLLLHSDRDPIPDVPAVYFVMPTEENIDRMCQDLRNQLYESYYLNFISAISRSKLEDIANAALAASAVTQVAKVFDQYLNFITLEDDMFVLCNQNKELVSYRAINRPDITDTEMETVMDTIVDSLFCFFVTLGAVPIIRCSRGTAAEMVAVKLDKKLRENLRDARNSLFTGDTLGAGQFSFQRPLLVLVDRNIDLATPLHHTWTYQALVHDVLARKLDVYFEYEEKIMSKTTLDKSLLDIISDPDAGTPEDKMRLFLIYYISTQQAPSEGFYQDGLSSGQLWQHYH

SEQ ID NO: 96147 - protein, 154 aa, Homo sapiens
MLTEASLSIWGWGSLGIVLFLITFGPFVIFYLTFYILCFVGGGLVVTLLFGKTNSEKYLEQCEHSFLPPTSPGVPKCLEEMKREARTIKIDRRLTGANIIDEPLQQVIQFSLRDYVQYWYYTLSDDESFLLEIRQTLQNALIQFATRCWGYSSE

SEQ ID NO: 96148 - protein, 121 aa, Homo sapiens
MSKLSFRARALDAAKPLPIYRGKDMPDLNDCVSINRAVPQMPTGMEKEEESEHHLQRAISAQQVFREKKESMVIPVPEAESNVNYYNRLYKGEFKQPKQFIHIQLKLHLKLLLFRIEVLFF

SEQ ID NO: 96149 - protein, 106 aa, Homo sapiens
MDNRFATAFVIACVLSLISTIYMAASIGTDFWYEYRSPVQENSSDLNKSIWDEFISDEADEKTYNDALFRYNGTVGLWRRCITIPKNMHWYSPPERTGNCSCSRVI

SEQ ID NO: 96150 - protein, 42 aa, Homo sapiens
MKSLPILLLLCVAVCSAYPLDGAAREISRKLLRPQKRCETVC

SEQ ID NO: 96151 - protein, 138 aa, Homo sapiens
MLCDLSQFNFGEILMTQVIHSIEYCLGCISNTASYLRLWALSLAHAQLSDVLWAMLMRVGLRVDTTYGVLLLLPVIALFAVLTIFILLIMEGLSAFLHAIRLHWVEFQNKFYVGAGTKFVPFSFSLLSSKFNNDDSVA

SEQ ID NO: 96152 - protein, 119 aa, Homo sapiens
  MOD_RES (1)..(1): Any amino acid
XFKLDFGNSQGKTSQTWHGGIATIFQSPGDEVWGVVWKMNKSNLNSLDEQEGVKSGMYVVIEVKVATQEGKEITCRSYLMTNYESAPPSPQYKKVEKETSHCLSESGKSPLQAQDKNVG

SEQ ID NO: 96153 - protein, 61 aa, Homo sapiens
  MOD_RES (1)..(1): Any amino acid
XYTLFIVLYPMGVSGELLTIYAALPFVRQAGLYSISLPNKYNFSFDYYAFLILIMISYIPS

SEQ ID NO: 96154 - protein, 105 aa, Homo sapiens
MRLHYRYKEASGYFHTLRAVMRNPEEDGKDTLQCIAEMLQITKQAMGSDLPIIEKKLERKSSKPHEDIIGIRSQNQGSLAQGKNFLMSKFSSLNQKVKQTKSNVN

SEQ ID NO: 96155 - protein, 368 aa, Homo sapiens
MAAHRPGPLKQQNKAHKGGRHRGRGSAQRDGKGRLALKTLSKKVRKELSRVDQRHRASQLRKQKKEAVLAEKRQLGGKDGPPHQVLVVPLHSRISLPEAMQLLQDRDTGTVHLNELGNTQNFMLLCPRLKHRWFFTSARPGDLHVVLDMAKVADTILFLLDPLEGWDSTALAVQGISGLPLKKQIDTRKKLSKAVEKRFPHDKLLLLDTQQEAGMLLRQLANQKQQHLAFRDRRAYLFAHAVDFVPSEENNLVGTLKISGYVRGQTLNVNRLLHIVGYGDFQMKQIDAPGDPFPLNPRGIKPQKDPDMAMEICATDAVDDMEEGLKVLMKADPGRQESLQAEVIPDPMEGEQTWPTEEELSEAKGQYW

SEQ ID NO: 96156 - protein, 94 aa, Homo sapiens
MLRLPTVFRQMRPVSRVLAPHLTRAYAKDVKFGADARALMLQGVDLLADAVAVTMGPKGRTVIIEQSWGSPKVTKDGVTVAKSIDLKDKYKNIG

SEQ ID NO: 96157 - protein, 1495 aa, Homo sapiens
MQCLEMTTKRKIIGRLVPCRCFRGEEEIISVLDYSHCSLQQVPKEVFNFERTLEELYLDANQIEELPKQLFNCQALRKLSIPDNDLSNLPTTIASLVNLKELDISKNGVQEFPENIKCCKCLTIIEASVNPISKLPDGFTQLLNLTQLYLNDAFLEFLPANFGRLVKLRILELRENHLKTLPKSMHKLAQLERLDLGNNEFGELPEVLDQIQNLRELWMDNNALQVLPGSIGKLKMLVYLDMSKNRIETVDMDISGCEALEDLLLSSNMLQQLPDSIGLLKKLTTLKVDDNQLTMLPNTIGNLSLLEEFDCSCNELESLPSTIGYLHSLRTLAVDENFLPELPREIGSCKNVTVMSLRSNKLEFLPEEIGQMQKLRVLNLSDNRLKNLPFSFTKLKELAALWLSDNQSKALIPLQTEAHPETKQRVLTNYMFPQQPRGDEDFQSDSDSFNPTLWEEQRQQRMTVAFEFEDKKEDDENAGKVKDLSCQAPWERGQRGITLQPARLSGDCCTPWARCDQQIQDMPVPQNDPQLAWGCISGLQQERSMCTPLPVAAQSTTLPSLSGRQVEINLKRYPTPYPEDLKNMVKSVQNLVGKPSHGVRVENSNPTANTEQTVKEKYEHKWPVAPKEITVEDSFVHPANEMRIGELHPSLAETPLYPPKLVLLGKDKKESTDESEVDKTHCLNNSVSSGTYSDYSPSQASSGSSNTRVKVGSLQTTAKDAVHNSLWGNRIAPSFPQPLDSKPLLSQREAVPPGNIPQRPDRLPMSDTFTDNWTDGSHYDNTGFVAEETTAENANSNPLLSSKSRSTSSHGRRPLIRQDRIVGVPLELEQSTHRHTPETEVPPSNPWQNWTRTPSPFEDRTAFPSKLETTPTTSPLPERKEHIKESTEIPSPFSPGVPWEYHDSNPNRSLSNVFSQIHCRPESSKGVISISKSTERLSPLMKDIKSNKFKKSQSIDEIDIGTYKVYNIPLENYASGSDHLGSHERPDKMLGPEHGMSSMSRSQSVPMLDDEMLTYGSSKGPQQQKASMTKKVYQFDQSFNPQGSVEVKAEKRIPPPFQHNPEYVQQASKNIAKDLISPRAYRGYPPMEQMFSFSQPSVNEDAVVNAQFASQGARAGFLRRADSLVSATEMAMFRRVNEPHELPPTDRYGRPPYRGGLDRQSSVTVTESQFLKRNGRYEDEHPSYQEVKAQAGSFPVKNLTQRRPLSARSYSTESYGASQTRPVSARPTMAALLEKIPSDYNLGNYGDKPSDNSDLKTRPTPVKGEESCGKMPADWRQQLLRHIEARRLDRTPSQQSNILDNGQEDVSPSGQWNPYPLGRRDVPPDTITKKAGSHIQTLMGSQSLQHRSREQQPYEGNINKVTIQQFQSPLPIQIPSSQATRGPQPGRCLIQTKGQRSMDGYPEQFCVRIEKNPGLGFSISGGISGQGNPFKPSDKGIFVTRVQPDGPASNLLQPGDKILQANGHSFVHMEHEKAVLLLKSFQNTVDLVIQRELTV

SEQ ID NO: 96158 - protein, 85 aa, Homo sapiens
LSPEDQRVFNFDVRQLNWLEYIENYVLGVKKYLLKEDMAGIPKAKQRLKRLRNIHYLFNTALFLIAWRLLIARSQMARNVWFFIM

SEQ ID NO: 96159 - protein, 396 aa, Homo sapiens
MAAVATCGSVAASTGSAVATASKSNVTSFQRRGPRASVTNDSGPRLVSIAGTRPSVRNGQLLVSTGLPALDQLLGGGLAVGTVLLIEEDKYNIYSPLLFKYFLAEGIVNGHTLLVASAKEDPANILQELPAPLLDDKCKKEFDEDVYNHKTPESNIKMKIAWRYQLLPKMEQIGPVSSSRFGHYYDASKRMPQELIEASNWHGFFLPEKISSTLKVEPCSLTPGYTKLLQFIQNIIYEEGFDGSNPQKKQRNILRIGIQNLGSPLWGDDICCAENGGNSHSLTKFLYVLRGLLRTSLSACIITMPTHLIQNKAIIARVTTLSDVVVGLESFIGSERETNPLYKDYHGLIHIRQIPRLNNLICDESDVKDLAFKLKRKLFTIEDWRKSLWSFPNLKI

SEQ ID NO: 96160 - protein, 217 aa, Homo sapiens
MSLFGTTSGFGTSGTSMFGSATTDNHNPMKDIEVTSSPDDSIGCLSFSPPTLPGNFLIAGSWANDVRCWEVQDSGQTIPKAQQMHTGPVLDVCWSDDGSKVFTASCDKTAKMWDLSSNQAIQIAQHDAPVKTIHWIKAPNYSCVMTGSWDKTLKFWDTRSSNPMMVLQLPERCYCADVIYPMAVVATAERGLIVYQLENQPSEFRRIESPLKHQRQR

SEQ ID NO: 96161 - protein, 45 aa, Homo sapiens
MAYSTVQRVALASGLVLALSLLLPKAFLSRGKRQEPPPTPEEHRL

SEQ ID NO: 96162 - protein, 445 aa, Homo sapiens
VRPMMPQKVQLEVGRPQAPLNSFHAAKKPPNQSLPLQPFQLAFGHQVNRQVFRQGPPPPNPVAAFPPQKQQQQQQPQQQQQQQQAALPQMPLFENFYSMPQQPSQQPQDFGLQPAGPLGQSHLAHHSMAPYPFPPNPDMNPELRKALLQDSAPQPALPQVQIPFPRRSRRLSKEGILPPSALDGAGTQPGQEATGNLFLHHWPLQQPPPGSLGQPHPEALGFPLELRESQLLPDGERLAPNGREREAPAMGSEEGMRAVSTGDCGQVLRGGVIQSTRRRRRASQEANLLTLAQKAVELASLQNAKDGSGSEEKRKSVLASTTKCGVEFSEPSLATKRAREDSGMVPLIIPVSVPVRTVDPTEAAQAGGLDEDGKGPEQNPAEHKPSVIVTRRRSTRIPGTDAQAQKKFADFCPRGDDKKGFWTCSFFQACLGGCGRQTKFQRQRT

SEQ ID NO: 96163 - protein, 45 aa, Homo sapiens
MDLDLLDLNPRIIAAIKKAKLKSVKEVLHFSGPDLKRLTNLSSPE

SEQ ID NO: 96164 - protein, 123 aa, Homo sapiens
MYVRVSFDTKPDLLLHLMTKEWQLELPKLLISVHGGLQNFELQPKLKQVFGKGLIKAAMTTGAWIFTGGVNTGVIRHVGDALKDHASKSRGKICTIGIAPWGIVENQEDLIGRDVSPECCRFP

SEQ ID NO: 96165 - protein, 307 aa, Homo sapiens
MKRLVCVLLVCSSAVAQLHKDPTLDHHWHLWKKTYGKQYKEKNEEAVRRLIWEKNLKFVMLHNLEHSMGMHSYDLGMNHLGDMTSEEVMSLMSSLRVPSQWQRNITYKSNPNRILPDSVDWREKGCVTEVKYQGSCGACWAFSAVGALEAQLKLKTGKLVSLSAQNLVDCSTEKYGNKGCNGGFMTTAFQYIIDNKGIDSDASYPYKAMDQKCQYDSKYRAATCSKYTELPYGREDVLKEAVANKGPVSVGVDARHPSFFLYRSGVYYEPSCTQNVNHGVLVVGYGDLNGKEYWLVKNRWSLTLSPG

SEQ ID NO: 96166 - protein, 223 aa, Homo sapiens
  MOD_RES (1)..(1): Any amino acid
XTCPLPGALLQDPYFIQSEEKMEASLPPNQTQALQHGLSLLPQTFSLRPGPAPPPLPVAVVQAILEGKGSFSPEGPRNAQQPEPGDPREIPDRGPLGLESGDRSPESLLPPMLLQPPQESVEPAGPLDVLGPSLQGREWTLMDLDMELSLMQPLVPERGEPELAVKGLNSPSPGKDPTLGAPLLLDVQAALGGPALGLPGALTIYSTPESRTASYLGPEASPS

SEQ ID NO: 96167 - protein, 113 aa, Homo sapiens
MSDRSLHLEASLDKELYYHGEPLNVNVHVTNNSTKTVKKIKVSVRQYADICLFSTAQYKCPVAQLEQDDQVSPSSTFCKVYTITPLLSDNREKRGLALDGKLKHEDTNLASST

SEQ ID NO: 96168 - protein, 89 aa, Homo sapiens
MRKCGWFVRELRVEFAAENYLSGGGPGDGGGADTGTGGEEVEALQLSARWLEVLRTYLELVLCVLVSIRNNRLHGVGTQPHCHCSSSGL

SEQ ID NO: 96169 - protein, 329 aa, Homo sapiens
MENQAHNTMGTSPCEAELQELMEQIDIMVSNKKMDWERKMRALETRLDLRDQELANAQTCLDQKGQEVGLLRQKLDSLEKCNLAMTQNYEGQLQSLKAQFSKLTNNFEKLRLHQMKQNKVPRKELPHLKEEIPFELSNLNQKLEEFRAKSREWDKQEILYQTHLISLDAQQKLLSEKCNQFQKQAQSYQTQLNGKKQCLEDSSSEIPRLICDPDPNCEINERDEFIIEKLKSAVNEIALSRNKLQDENQKLLQELKMYQRQCQAMEAGLSEVKSELQSRDDLLRIIEMERLQLHRELLKIGECQNAQGNKTRLESSYLPSIKEPERKIK

SEQ ID NO: 96170 - protein, 109 aa, Homo sapiens
MSPGAMRRSLPSTSSTSSTKRLKSVEDEMDSPGEEPFYTGQGRSPGSGSQSSGWHEVEPGMPSPTTLKKSEKSGFSSPSPSQTSSLGTAFTQHHRPVITGPRAFLWSLP

SEQ ID NO: 96171 - protein, 169 aa, Homo sapiens
MAATLANGGFCPITGERVLSPEAVRNTLSLMHSCGMYDFSGQFAFHVGLPAKSGVAGGILLVVPNVMGMMCWSPPLDKMGNSVKGIHFCHDLVSLCNFHNYDNLRHFAKKLDPRREGGDQRHSFGPLDYESLQQELALKETVWKKVSPESNEDISTTVVYRMESLGEKS

SEQ ID NO: 96172 - protein, 144 aa, Homo sapiens
  MOD_RES (1)..(1): Any amino acid
XRNLFHRQGFSYDYVFDWNMLKFGAARNPEDVDRERREHEREERMGQLRGSATRALPPGPPTGATANRLRSAAEPVASTPASRIQPAGNTSPRAISRVDRERKVSMRLHRGAPANVSSSDLTGRQEVSRIPASQTSVPFDHLGK

SEQ ID NO: 96173 - protein, 98 aa, Homo sapiens
  MOD_RES (1)..(1): Any amino acid
XEAFAKGGNLTLGGNLTVAVGPLGRFYCQDIRAYDILFGDTPRPAQAEDLYEILDSFTEKYENEGQRINARKAAREQRKSSVPFGFMFHSVFSENLFL

SEQ ID NO: 96174 - protein, 1861 aa, Homo sapiens
MRRLEGLCLRRRRRRRGPARERSGDKMKYQKYLTVLQMAIGVTPSNRGSLLPLKRKLWVTPSSENPNGATSSVSQGKPSLRRIKGRLHRSKSLDSMDFCELTSTAMEETAIWEQHTVTLHRAPGFGFGIAISGGRDNPHFQSGETSIVISDVLKGGPAEGQLQENDRVAMVNGVSMDNVEHAFAVQQLRKSGKNAKITIRRKKKVQIPVSRPDPEPVSDNEEDSYDEEIHDPRSGRSGVVNRRSEKIWPRDRSASRERSLSPRSDRRSVASSQPAKPTKVTLVKSRKNEEYGLRLASHIFVKEISQDSLAARDGNIQEGDVVLKINGTVTENMSLTDAKTLIERSKGKLKMVVQRDERATLLNVPDLSDSIHSANASERDDISEIQSLASDHSGRSHDRPPRRSRSRSPDQRSEPSDHSRHSPQQPSNGSLRSRDEERISKPGAVSTPVKHADDHTPKTVEEVTVERNEKQTPSLPEPKPVYAQVGQPDVDLPVSPSDGVLPNSTHEDGILRPSMKLVKFRKGDSVGLRLAGGNDVGIFVAGVLEDSPAAKEGLEEGDQILRVNNVDFTNIIREEAVLFLLDLPKGEEVTILAQKKKDVYRRIVESDVGDSFYIRTHFEYEKESPYGLSFNKGEVFRVVDTLYNGKLGSWLAIRIGKNHKEVERGIIPNKNRAEQLASVQYTLPKTAGGDRADFWRFRGLRSSKRNLRKSREDLSAQPVQTKFPAYERVVLREAGFLRPVTIFGPIADVAREKLAREEPDIYQIAKSEPRDAGTDQRSSGIIRLHTIKQIIDQDKHALLDVTPNAVDRLNYAQWYPIVVFLNPDSKQGVKTMRMRLCPESRKSARKLYERSHKLRKNNHHLFTTTINLNSMNDGWYGALKEAIQQQQNQLVWVSEGKADGATSDDLDLHDDRLSYLSAPGSEYSMYSTDSRHTSDYEDTDTEGGAYTDQELDETLNDEVGTPPESAITRSSEPVREDSSGMHHENQTYPPYSPQAQPQPIHRIDSPGFKPASQQKAEASSPVPYLSPETNPASSTSAVNHNVNLTNVRLEEPTPAPSTSYSPQADSLRTPSTEAAHIMLRDQEPSLSSHVDPTKVYRKDPYPEEMMRQNHVLKQPAVSHPGHRPDKEPNLTYEPQLPYVEKQASRDLEQPTYRYESSSYTDQFSRNYEHRLRYEDRVPMYEEQWSYYDDKQPYPSRPPFDNQHSQDLDSRQHPEESSERGYFPRFEEPAPLSYDSRPRYEQAPRASALRHEEQPAPGYDTHGRLRPEAQPHPSAGPKPAESKQYFEQYSRSYEQVPPQGFTSRAGHFEPLHGAAAVPPLIPSSQHKPEALPSNTKPLPPPPTQTEEEEDPAMKPQSVLTRVKMFENKRSASLETKKDVNDTGSFKPPEVASKPSGAPIIGPKPTSQNQFSEHDKTLYRIPEPQKPQLKPPEDIVRSNHYDPEEDEEYYRKQLSYFDRRSFENKPPAHIAASHLSEPAKPAHSQNQSNFSSYSSKGKPPEADGVDRSFGEKRYEPIQATPPPPPLPSQYAQPSQPVTSASLHIHSKGAHGEGNSVSLDFQNSLVSKPDPPPSQNKPATFRPPNREDTAQAAFYPQKSFPDKAPVNGTEQTQKTVTPAYNRFTPKPYTSSARPFERKFESPKFNHNLLPSETAHKPDLSSKTPTSPKTLVKSHSLAQPPEFDSGVETFSIHAEKPKYQINNISTVPKAIPVSPSAVEEDEDEDGHTVVATARGIFNSNGGVLSSIETGVSIIIPQGAIPEGVEQEIYFKVCRDNSILPPLDKEKGETLLSPLVMCGPHGLKFLKPVELRLPHCASMTPDGWSFALKSSDSSSGDPKTWQNKCLPGDPNYLVGANCVSVLIDHF

SEQ ID NO: 96175 - protein, 75 aa, Homo sapiens
MAFTQLTFRDVAIEFSQDEWKCLNSTQRTLYRDVMLENYRNLVSLGEDNFLPEVKICPWYLSIFPCVPLGSPCIT

SEQ ID NO: 96176 - protein, 783 aa, Homo sapiens
MTADKDKDKDKEKDRDRDRDREREKRDKARESENSRPRRSCTLEGGAKNYAESDHSEDEDNDNNSATAEESTKKNKKKPPKKKSRYERTDTGEITSYITEDDVVYRPGDCVYIESRRPNTPYFICSIQDFKLVHNSQACCRSPTPALCDPPACSLPVASQPPQHLSEAGRGPVGSKRDHLLMNVKWYYRQSEVPDSVYQHLVQDRHNENDSGRELVITDPVIKNRELFISDYVDTYHAAALRGKCNISHFSDIFAAREFKARVDSFFYILGYNPETRRLNSTQGEIRVGPSHQAKLPDLQPFPSPDGDTVTQHEELVWMPGVNDCDLLMYLRAARSMAAFAGMCDGGSTEDGCVAASRDDTTLNALNTLHESGYDAGKALQRLVKKPVPKLIEKCWTEDEVKRFVKGLRQYGKNFFRIRKELLPNKETGELITFYYYWKKTPEAASSRAHRRHRRQAVFRRIKTRTASTPVNTPSRPPSSEFLDLSSASEDDFDSEDSEQELKGYACRHCFTTTSKDWHHGGRENILLCTDCRIHFKKYGELPPIEKPVDPPPFMFKPVKEEDDGLSGKHSMRTRRSRGSMSTLRSGRKKQPASPDGRTSPINEDIRSSGRNSPSAASTSSNDSKAETVKKSAKKVKEEASSPLKSNKRQREKVASDTEEADRTSSKKTKTQEISRPNSPSEGEGESSDSRSVNDEGSSDPKDIDQDNRSTSPSIPSPQDNESDSDSSAQQQMLQAQPPALQAPTGVTPAPSSAPPGTPQLPTPGPTPSATAVPPQGSPTASQ

SEQ ID NO: 96177 - protein, 232 aa, Homo sapiens
MYASVLLITAMSLDRSLAVARPFVSQKLRTKAMARRVLAGIWVLSFLLATPVLAYRTVVPWKTNMSLCFPRYPSEGHRAFHLIFEAVTGFLLPFLAVVASYSDIGRRLQARRFRRSRRTGRLVVLIILTFAAFWLPYHVVNLAEAGRALAGQAAGLGLVGKRLSLARNVLIALAFLSSSVNPVLYACAGGGLLRSAGVGFVAKLLEGTGSEASSTRRGGSLGQTARSGPAAL

SEQ ID NO: 96178 - protein, 26 aa, Homo sapiens
  MOD_RES (1)..(1): Any amino acid
XTATLLKISQLDKWIPKAFPALTFST

SEQ ID NO: 96179 - protein, 88 aa, Homo sapiens
MVINLCLPQFRPRIHCNKISADGYEVENLISEDLTKRSHGFRTEYFIKPPVYVTVSFPFNVEICRINIDLTAGGGQNVTGLEMYTSAS

SEQ ID NO: 96180 - protein, 138 aa, Homo sapiens
MSEGVDLIDIYADEEFNQDPEFNNTDQIDLYDDVLTATSQPSDDRSSSTEPPPPVRQEPSPKPNNKTPAILYTYSGLRNRRAAVYVGSFSWWTTDQQLIQVIRSIGVYDVVELKFAENRANGQSKGYAEVVVASENSV

SEQ ID NO: 96181 - protein, 84 aa, Homo sapiens
MDHTSPTYMLANLTHLHSEQLLQGLNLLRQHHELCDIILRVGDVKIHAHKVVLASVSPYFKAMFTGNLSEKENSEVEFQCIDET

SEQ ID NO: 96182 - protein, 181 aa, Homo sapiens
MSLCGARANAKMMAAYNGGTSAAAAGHHHHHHHHLPHLPPPHLHHHHHPQHHLHPGSAAAVHPVQQHTSSAAAAAAAAAAAAAMLNPGQQQPYFPSPAPGQAPGPAAAAPAQVQAAAAATVKAHHHQHSHHPQQQLDIEPDRPIGYGAFGVVWLRICSTEKFLHYQPRLTATAGFFGGSAL

SEQ ID NO: 96183 - protein, 84 aa, Homo sapiens
MLGGRPRCECAPDCSGLPARLQVCGSDGATYRDECELRAARCRGHPDLSVMYRGRCRKSCEHVVCPRPQSCVVDQTGSAHCVVC

SEQ ID NO: 96184 - protein, 75 aa, Homo sapiens
MAAAAAATAAAAASIRERQTVALKRMLNFNVPHIKNSTGEPVWKVLIYDRFGQDIISPLLSVKELRDMGITLHLH

SEQ ID NO: 96185 - protein, 18 aa, Homo sapiens
MVGAGISTPSGIPDFRSP

SEQ ID NO: 96186 - protein, 73 aa, Homo sapiens
MAAVSMSVVLRQTLWRRRAVAVAALSVSRVPTRSLRTSTWRLAQDQTQDTQLITVDEKLAFGVPVHSTWMHFN

SEQ ID NO: 96187 - protein, 112 aa, Homo sapiens
MLQKREAPVPTKTKVAVDENKAKEFLGSLKRQKRQLWDRTRPEVQQWYQQFLYMGFDEAKFEDDITYWLNRDRNGHEYYGDYYQRHYDEDSAIGPRSPYGFRHGASVNYDDY

SEQ ID NO: 96188 - protein, 610 aa, Homo sapiens
MLLAQINRDSQGMTEFPGGGMEAQHVTLCLTEAVTVADGDNLENMEGVSLQAVTLADGSTAYIQHNSKDAKLIDGQVIQLEDGSAAYVQHVPIPKSNSYDQSALQAVQLEDGTTAYIHHAVQVPQSDTILAIQADGTVAGLHTGDATIDPDTISALEQYAAKVSIDGSESVAGTGMIGENEQEKKMQIVLQGHATRVTAKSQQSGEKAFRCEYDGCGKLYTTAHHLKVHERSHTGDRPYQCEHAGCGKAFATGYGLKSHVRTHTGEKPYRCSEDNCTKSFKTSGDLQKHIRTHTGERPFKCPFEGCGRSFTTSNIRKVHVRTHTGERPYYCTEPGCGRAFASATNYKNHVRIHTGEKPYVCTVPGCDKRFTEYSSLYKHHVVHTHSKPYNCNHCGKTYKQISTLAMHKRTAHNDTEPIEEEQEAFFEPPPGQGEDVLKGSQITYVTGVEGDDVVSTQVATVTQSGLSQQVTLISQDGTQHVNISQADMQAIGNTITMVTQDGTPITVPAHDAVISSAGTHSVAMVTAEGTEGEQVAIVAQDLAAFHTASSEMGHQQHSHHLVTTETRPLTLVATSNGTQIAVQLGEQPSLEEAIRIASRIQQGETPGLDD

SEQ ID NO: 96189 - protein, 129 aa, Homo sapiens
MLTFMASDSEEEVCDERTSLMSAESPTPRSCQEGRQGPEDGENTAQWRSQENEEDGEEDPDRYVCSGVPGRPPGLEEELTLKYGAKHVIMLFVPVTLCMIVVVATIKSVRFYTEKNGQLIYTPFTEDTP

SEQ ID NO: 96190 - protein, 156 aa, Homo sapiens
GNPGEKGNRGVPGMPGLKGLKGLPGPAGPPGPRGDLGSTGNPGEPGLRGIPGSMGNMGMPGSKGKRGTLGFPGRAGRPGLPGIHGLQGDKGEPGYSEGTRPGPPGPTGDPGLPGDMGKKGEMGQPGPPGHLGPAGPEGAPGSPGSPGLPVPAAPSL

SEQ ID NO: 96191 - protein, 9 aa, Homo sapiens
LLLKLLPDD

SEQ ID NO: 96192 - protein, 129 aa, Homo sapiens
MELREKLRALQLQRWKARKKSAASPHAGQESHTLALEPAFGKISPLSADEETIPKYAGHKNQSATLLGQRSSSNNSAPPKPMSLKIERISSWKTPPQENRDKNLSRRRQDRRATPTGRPTPCAERRGGV

SEQ ID NO: 96193 - protein, 749 aa, Homo sapiens
MSSPASTPSRRGSRRGRATPAQTPRSEDARSSPSQRRRGEDSTSTGELQPMPTSPGVDLQSPAAQDVLFSSPPQMHSSAIPLDFDVSSPLTYGTPSSRVEGTPRSGVRGTPVRQRPDLGSAQKGLQVDLQSDGAAAEDIVASEQSLGQKLVIWGTDVNVAACKENFQRFLQRFIDPLAKEEENVGIDITEPLYMQRLGEINVIGEPFLNVNCEHIKSFDKNLYRQLISYPQEVIPTFDMAVNEIFFDRYPDSILEHQIQVRPFNALKTKNMRNLNPEGIYRAVPIRVNPRVSNVKSVYKTHIDVIHYRKTDAKRLHGLDEEAEQKLFSEKRVELLKELSRKPDIYERLASALAPSIYEHEDIKKGILLQLFGGTRKDFSHTGRGKFRAEINILLCGDPGTSKSQLLQYVYNLVPRGQYTSGKGSSAVGLTAYVMKDPETRQLVLQTGALVLSDNGICCIDEFDKMNESTRSVLHEVMEQQTLSIAKAGIICQLNARTSVLAAANPIESQWNPKKTTIENIQLPHTLLSRFDLIFLLLDPQDEAYDRRLAHHLVALYYQSEEQAEEELLDMAVLKDYIAYAHSTIMPRLSEEASQALIEAYVDMRKIGSSRGMVSAYPRQLESLIRLAEAHAKVRLSNKVEAIDVEEAKRLHREALKQSATDPRTGIVDISILTTGMSATSRKRKEELAEALKKLILSKGKTPALKYQQLFEDIRGQSDIAITKDMFEEALRALADDDFLTVTGKTVRLL

SEQ ID NO: 96194 - protein, 134 aa, Homo sapiens
EFLKRFVEATRKWKVGIPSDPLVRSYVKRALAEGAQIWCGEGVDKLSLPARNQAGYFMLPTVITDIKDESCCMTEEIFGPVTCVVPFDSEEEVIERANNVKYGLAATVWSSNVGRVHRVAKKLQSGLVWTNCWL

SEQ ID NO: 96195 - protein, 148 aa, Homo sapiens
GPEFVRKHIFNKHAEKIEEVKKEVAFFNNFLTDAKRPALPEIKPAQPPGPAQILPPGLTPGLPYPHQTPQGLMPYGQPRPPILGYGGWFVETQGPLWNIGTWMPQTMLISFEPSPVPQSCIIHTCTTLSYEALRIFCTISLTANKSTS

SEQ ID NO: 96196 - protein, 118 aa, Homo sapiens
  MOD_RES (1)..(1): Any amino acid
XLRNAKIYVERAVKQKKIFTIQGCYPVIRCLLRRRGWVEKKMVHRSGPTLLPPQKDLDSSAMGDSDTTEDEDEDEDEEFQPSQLFDFDDLLKFDDLDGTHALMRRGRTQAPRHSGPAL

SEQ ID NO: 96197 - protein, 119 aa, Homo sapiens
GRGSGFPGKRRPRGAGLSGRGGRGRSKLKSGIGAVVLPGVSTADISSNKDDEENSMHNTVVLFSSSDKFTLNQDMCVVCGSFGQGAEGRLLACSQCGQCYHPYCVSIKMDACSLSELKY

SEQ ID NO: 96198 - protein, 59 aa, Homo sapiens
MVENERLRQEMRRCEAELQELRTKPAGPCPGCEHSQESAQLRDKLSQLQLEMAESKGML

SEQ ID NO: 96199 - protein, 110 aa, Homo sapiens
  MOD_RES (1)..(1): Any amino acid
XINDIAFKPDGTQLILAAGSRLLVYDTSDGTLLQPLKGHKDTVHNDAIQCVSYNPITHQLASCSSSDFGLWSPEQKSVSKHKSSSKIICCSWTNDGQYLALGMFNGIISI

SEQ ID NO: 96200 - protein, 631 aa, Homo sapiens
MVSNPVHGLPFLPGTSFKDSTKTAFHRSQTLSYRNGYAIVRRPTVGIGGDRLQFNQLSQAELDELASKAPVLTYGQPKQAPPADFIPAHVAFDKKVLKFDAYFQEDVPMSTEEQYRIRQVNIYYYLEDDSMSVIEPVVENSGILQGKLIKRQRLAKNDRGDHYHWKDLNRGINITIYGKTFRVVDCDQFTQVFLESQGIELNPPEKMALDPYTELRKQPLRKYVTPSDFDQLKQFLTFDKQVLRFYAIWDDTDSMYGECRTYIIHYYLMDDTVEIREVHERNDGRDPFPLLMNRQRVPKVLVENAKNFPQCVLEISDQEVLEWYTAKDFIVGKSLTILGRTFFIYDCDPFTRRYYKEKFGITDLPRIDVSKREPPPVKQELPPYNGFGLVEDSAQNCFALIPKAPKKDVIKMLVNDNKVLRYLAVLESPIPEDKDRRFVFSYFLATDMISIFEPPVRNSGIIGGKYLGRTKVVKPYSTVDNPVYYGPSDFFIGAVIEVFGHRFIILDTDEYVLKYMESNAAQYSPEALASIQNHVRKREAPAPEAESKQTEKDPGVQELEALIDTIQKQLKDHSCKDNIREAFQIYDKEASGYVDRDMFFKICESLNVPVDDSLVKERQGLTLLPDWNAVV

SEQ ID NO: 96201 - protein, 248 aa, Homo sapiens
MDHAEENEILAATQRYYVERPIFSHPVLQERLHTKDKVPDSIADKLKQAFTCTPKKIRNIIYMFLPITKWLPAYKFKEYVLGDLVSGISTGVLQLPQGLAFAMLAAVPPIFGLYSSFYPVIMYCFLGTSRHISIGPFAVISLMIGGVAVRLVPDDIVIPGGVNATNGTEARDALRVKVAMSVTLLSGIIQFCLGVCRFGFVAIYLTEPLVRGFTTAAAVHVFTSMLKYLFGVKTKRYSGIFSVVYASG

SEQ ID NO: 96202 - protein, 36 aa, Homo sapiens
MLYLKGAQGRRFISDQSRRKDLSDRPLPDEAQIPNY

SEQ ID NO: 96203 - protein, 49 aa, Homo sapiens
MAATAVAAAVAGTESAQGPPGPAASLELWLSDHRPKHVGTGLVSYPEFL

SEQ ID NO: 96204 - protein, 77 aa, Homo sapiens
MRFMMMRAENFFILRRKPVEGYDISFLITNFHTEQMYKHKLVDFVIHFMEEIDKEISEMKLSVNARARIVAEEFLKN

SEQ ID NO: 96205 - protein, 205 aa, Homo sapiens
MWLLVSVILISRISSVGGEGLCFFPFVENGHSESSGQTHLEGDTVQIICNTGYRLQNNENNISCVERGWSTPPKCRSTISAEKCGPPPPIDNGDITSFLLSVYAPGSSVEYQCQNLYQLEGNNQITCRNGQWSEPPKCLDPCVISQEIMEKYNIKLKWTNQQKLYSRTGDIVEFVCKSGYHPTKSHSFRAMCQNGKLVYPSCEEK

SEQ ID NO: 96206 - protein, 136 aa, Homo sapiens
MTSSSPAGLEGSDLSSINTMMSAVMSVGKVTENGGSPQGIKSPSKPPGPNRIGRRNQETKEEKSSYNCPLCEKICTTQHQLTMHIRQHNTDTGGADHSCSICGKSLSSASSLDRHMLVHSGERPYKCTVCGQSFTT

SEQ ID NO: 96207 - protein, 335 aa, Homo sapiens
  MOD_RES (1)..(1): Any amino acid
XRVESEESGDEEGKKHSSGIVADLSEQSLKDGEERGEEDPEEEHELPVDMETINLDRDAEDVDLNHYRIGKIEGFETLCLRQNLIKCIENLEELQSLRELDLYDNQIKKIENLEALTELEILDISFNLLRNIEGVDKLTRLKKLFLVNNKISKIENLSNLHQLQMLELGSNRIRAIENIDTLTNLESLFLGKNKITKLQNLDALTNLTVLSMQSNRLTKIEGLQNLVNLRELYLSHNGIEVIEGLENNNKLTMLDIASNRIKKIENISHLTELQEFWMNDNLLESWSDLDELKGARSLETVYLERNPLQKDPQYRRKVMLALPSVRQIDATFVRF

SEQ ID NO: 96208 - protein, 149 aa, Homo sapiens
GDPVALNYTFYQVISASSQTPLALRSLQNRCLVPGYYSTHLQRWLTYYPSGQLLIVDGQELRTNPAASMESIQKFLGITPFLNYTRTLRFDDDKGFWCQGLEGGKTRCLGRSKGRRYPDMDTEVSKARGRGIPLHFQDLILCPTSYHFC

SEQ ID NO: 96209 - protein, 123 aa, Homo sapiens
MANIAVQRIKREFKEVLKSEETSKNQIKVDLVDENFTELRGEIAGPPDTPYEGGRYQLEIKIPETYPFNPPKYKQNPEMFKQTARLWAHVYAGAPVSSPEYTKKIENLCAMGFDRNAVIVALS

SEQ ID NO: 96210 - protein, 5078 aa, Homo sapiens
MPGAPLLRLLTAVSAAVAVAVAGAPGTVMPPTTGDATLAFVFDVTGSMWDELMQVIDGASRILERSLSRRSQAIANYALVPFHDPDIGPVTLTADPTVFQRELRELYVQGGGDCPEMSVGAIKAAVEVANPGSFIYVFSDARAKDYHKKEELLRLLQLKQSQVVFVLTGDCGDRTHPGYLAYEEIAATSSGQVFHLDKQQVTEVLKWVESAIQASKVHLLSTDHEEEGEHTWRLPFDPSLKEVTISLSGPGPEIEVQDPLGRILQEDEGLNVLLNIPDSAKVVAFKPEHPGLWSIKVYSSGRHSVRITGVSNIDFRAGFSTQPLLDLNHTLEWPLQGVPISLVINSTGLKAPGRLDSVELAQSSGKPLLTLPTKPLSNGSTHQLWGGPPFHTPKERFYLKVKGKDHEGNPLLRVSGVSYSGVAPGAPLVSMAPRIHGYLHQPLLVSCSVHSALPFRLQLRRGEARLGEERHFQESGNSSWEILRASKAEEGTYECTAVSRAGTGRAKAQIVVTDPPPQLVPAPNVTVSPGETAVLSCRVLGEAPYNLTWVRDWRVLPASTGRVAQLADLSLEISGIIPTDGGRYQCVASNANGVTRASVWLLVREAPQVSIHTSSQHFSQGVEVKVSCSASGYPTPHISWSRESQALQEDSRIHVDAQGTLIIQGVAPEDAGNYSCQATNEVGTDQETVTLYYTDPPSVSAVNAVVLVAVGEEAVLVCEASGVPPPRVIWYRGGLEMILAPEGSSSGKLRIPAAQERDAGTYTCRAVNELGDASAEIQLAVGHAPQLTELPRDVTVELGRSALLACRATGRPPPTVTWRRGDGQPLGLRLGAGRGSRSRQPDSGVLFFESVAPEDQAPYVCEARNVFGKVQAEARLIVTGHAPPQIASSAPTVRVLEGQPVSLPCIVLAGRPLPERHWLKDGRPLPPGSRHSIRADGSLHLDRALQEHAGRYSCVATNTAGSQHRDVELVVQVPPRIHPTATHHITNEGVAASLPCVASGVPAPTITWTKETNALTSRGPHYNVSKEGTLLIAQPSAQDAGAYVCTATNTVGFSSQEMRLSVNTKPRIHMNGSRNADVPLQVTAKAGEEVTLDCEAKGSPPPLVTWTKDSRPVPPITNRYGLLPSGSLRLAQVQVGDSGHYECTASNPAGSASHRYVLGVQVPPQVQPGPRVLKVLVGEALDLNCVAEGNPEPQLSWSKDGVVLQGRGPQGSVHFAAIRTSDAGRYRCEASNSAGVDAWEVELRVLEPPHWGADETSGLLERVAGENASLPCPARGTPKPQVTWRKGPSSEPLHGQPGVAVLEEGSLFLASVSPADSGDYECQATNEVGSTSRRAKLVVYVPPSIREDGRKANVSGMAGQSLTLECDANGFPVPEIVWLKDAQLIPKVGGHRLLDEGQSLHFPRIQEGDSGLYSCRAENQAGTAQRDFHLLVLTPPSVLGAGAAQEVLGLAGADVELQCWTSGVPTPQVEWTKDRQPVLPGGPHLQVQEDGQVLRITGSHVGDEGRYQCVAFSPAGQQARDFQLRVHAPPTIWGSNETGEVAVMEDHLVQLLCEARGVPTPNITWFKDGALLPTSTKVVYTRGGRQLQLGRAQSSDAGVYTCKASNAVGAAEKATRLDVYVPPTIEGAGGRPYVVKAVAGRPVALECVARGHPSPTLSWHHEGLPVAESNESRLETDGSVLRLESPGEASSGLYSCVASSPAGEAVLQYSVEVQVPPQLLVAEGLGQVTTIVGQPLELPCQASGSPVPTIQWLQNGRPAEELAGVQVASQGTTLHIDHVELDHSGLFACQATNEAGTAGAEVEVSVHEFPSVSIIGGENITAPFLQPVTLQCIGDGVPTPSLRWWKDGVALAAFGGNLQIEKVDLRDEGIYTCAATNLAGESKREVALKVLVPPNIEPGPVNKAVLENASVTLECLASGVPPPDVSWFKGHQPVSSWMGVTVSVDGRVLRIEQAQLSDAGSYRCVASNVAGSTELRYGLRVNVPPRITLPPSLPGPVLVNTPVRLTCNATGAPSPTLMWLKDGNPVSPAGTPGLQVFPGGRVLTLASARASDSGRYSCVAVSAVGEDRQDVVLQVHMPPSILGEELNVSVVANESVALECQSHAMPPPVLSWWKDGRPLEPRPGVHLSADKALLQVDRADVWDAGHYTCEALNQAGHSEKHYNLNVWVAPVFPLRESHTLTVREGHPTRLSCECRGVPFPKISWRKDGQPLPGEGAGLQHVSAVGRLLYLGQAQLAQEGTYTCECSNVVGNSSQDLQLEVHVPPQIAGPREPPTQVSVVQDGVATLECNATGKPPPTVTWERDGQPVGAELGLQLQNQGQSLHVERAQAAHTGRYSCVAENLAGRAERKFELSVLVPPELIGDLDPLTNITAALHSPLTLLCEAMGIPPPAIRWFRGEEPVSPGEDTYLLAGGWMLKMTQTQEQDSGLYSCLASNEAGEARRNFSVEVLVPPSIENEDLEEVIKVLDGQTAHLMCNVTGHPQPKLTWFKDGRPLARGDAHHISPDGVLLQVLQANLSSAGHYSCIAANAVGEKTKHFQLSVLLAPTILGGAEDSADEEVTVTVNNPISLICEALAFPSPNITWMKDGAPFEASRNIQLLPGTHGLQILNAQKEDAGQYTCVVTNELGEAVKNYHVEVLIPPSISKDDPLAEVGVKEVKTKVNSTLTLECESWAVPPPTIRWYKDGQPVTPSSRLQVLGEGRLLQIQPTQVSDSGRYLCVATNVAGEDDQDFNVLIQVPPMFQKVGDFSAAFEILSREEEARGGVTEYREIVENNPAYLYCDTNAIPPPDLTWYREDQPLSAGDEVSVLQGGRVLQIPLVRAENAGRYSCKASNEVGEDWLHYELLVLTPPVILGDTEELVEEVTVNASSTVSLQCPALGNPVPTISWLQNGLPFSPSPRLQVLEDGQVLQVSTAEVADAASYMCVAENQAGSAEKLFTLRVQVPPRIAGLDLEQVTAILNSSVSLPCDVHAHPNPEVTWYKDSQALSLGEEVFLLPGTHTLQLGRARLSDSGMYTCEALNAAGRDQKLVQLSVLVPPAFRQAPRGPQDAVLVRVGDKAVLSCETDALPEPTVTWYKDGQPLVLAQRTQALRGGQRLEIQEAQVSDKGLYSCKVSNVAGEAVRTFTLTVQVPPTFENPKTETVSQVAGSPLVLTCDVSGVPAPTVTWLKDRMPVESSAVHGVVSRGGRLQLSRLQPAQAGTYTCVAENTQAEARKDFVVAVLVAPRIRSSGVAREHHVLEGQEVRLDCEADGQPPPDVAWLKDGSPLGQDMGPHLRFYLDGGSLVLKGLRASDAGAYTCVAHNPAGEDARLHTVNVLVPPTIKQGADGSGTLVSRPGELVTMVCPVRGSPPIHVSWLKDGLPLPLSQRTLLHGSGHTLRISKVQLADAGIFTCVAASPAGVADRNFTLQVQVPPVLEPVEFQNDVVVVRGSLVELPCEARGVPLPLVSWMKDGEPLLSQSLEQGPSLQLEAVGAGDSGTYSCVAVSEAGEARRHFQLTVMEPPHIEDSGQPTELSLTPGAPMELLCDAQGTPQPNITWHKDGQALTRLENNSRATRVLRVENVQVRDAGLYTCLAESPAGAIEKSFRVRVQAPPNIVGPRGPRFVVGLAPGQLVLECSVEAEPAPKITWHRDGIVLQEDAHTQFPERGRFLQLQALSTADSGDYSCTARNAAGSTSVAFRVEIHTVPTIRSGPPAVNVSVNQTALLPCQADGVPAPLVSWRKDRVPLDPRSPRFEILPEGSLRIQPVLAQDAGHYLCLASNSAGSDRQGRDLRVLEPPAIAPSPSNLTLTAHTPALLPCEASGSPKPLVVWWKDGQKLDFRLQQGAYRLLPSNALLLTAPGPQDSAQFECVVSNEVGEAHRLYQVTVHVPPTIADDQTDFTVTMMAPVVLTCHSTGIPAPTVSWSKAGAQLGARGSGYRVSPSGALEIGQALPIHAGRYTCSARNSAGVAHKHVFLTVQASPVVKPLPSVVRAVAEEEVLLPCEASGIPRPTITWQKEGLNVATGVSTQVLPGGQLRIAHASPEDAGNYLCIAKNSAGSAMGKTRLVVQVPPVIENGLPDLSTTEGSHAFLPCKARGSPEPNITWDKDGQPVSGAEGKFTIQPSGELLVKNLEGQDAGTYTCTAENAVGRARRRVHLTILVLPVFTTLPGDRSLRLGDRLWLRCAARGSPTPRIGWTVNDRPVTEGVSEQDGGSTLQRAAVSREDSGTYVCWAENRVGRTQAVSFVHVKEAPVLQGEAFSYLVEPVGGSIQLDCVVRGDPVPDIHWIKDGLPLRGSHLRHQLQNGSLTIRRTERDDAGRYQCLAENEMGVAKKVVILVLQSAPVFQVEPQDMTVRSGDDVALRCQATGEPTPTIEWLQAGQPLRASRRLRTLPDGSLWLENVETGDAGTYDCVAHNLLGSATARAFLVVRGEPQGSWGSMTGVINGRKFGVATLNTSVMQEAHSGVSSIHSSIRHVPANVGPLMRVLVVTIAPIYWALARESGEALNGHSLTGGRFRQESHVEFATGELLTMTQVARGLDPDGLLLLDVVVNGVVPESLADADLQVQDFEEHYVQTGPGQLFVGSTQRFFQGGLPSFLRCNHSIQYNAARGPQPQLVQHLRASAISSAFDPEAEALRFQLATALQAEENEVGCPEGFELDSQGAFCVDRDECSGGPSPCSHACLNAPGRFSCTCPTGFALAWDDRNCRDVDECAWDAHLCREGQRCVNLLGSYRCLPDCGPGFRVADGAGCEDVDECLEGLDDCHYNQLCENTPGGHRCSCPRGYRMQGPSLPCLDVNECLQLPKACAYQCHNLQGSYRCLCPPGQTLLRDGKACTSLERNGQNVTTVSHRGPLLPWLRPWASIPGTSYHAWVSLRPGPMALSSVGRAWCPPGFIRQNGVCTDLDECRVRNLCQHACRNTEGSYQCLCPAGYRLLPSGKNCQDINECEEESIECGPGQMCFNTRGSYQCVDTPCPATYRQGPSPGTCFRRCSQDCGTGGPSTLQYRLLPLPLGVRAHHDVARLTAFSEVGVPANRTELSMLEPDPRSPFALRPLRAGLGAVYTRRALTRAGLYRLTVRAAAPRHQSVFVLLIAVSPYPY

SEQ ID NO: 96211 - protein, 67 aa, Homo sapiens
MGTPASGRKRTPVKDRFSAEDEALSNIAREAEARLAAKRAARAEARDIRMRELERQQKEEDSERARY

SEQ ID NO: 96212 - protein, 170 aa, Homo sapiens
MLGGRVKTLHPAVHAGILARNIPEDNADMARLDFNLIRVVACNLYPFVKTVASPGVTVEEAVEQIDIGGVTLLRAAAKNHARVTVVCEPEDYVVVSTEMQSSESKDTSLETRRQLALKAFTHTAQYDEAISDYFRKQYSKGVSQMPLRYGMNPHQTPAQLYTLQPKLPIT

SEQ ID NO: 96213 - protein, 164 aa, Homo sapiens
MPAFNRLFPLASLVLIYWVSVCFPVCVEVPSETEAVQGNPMKLRCISCMKREEVEATTVVEWFYRPEGGKDFLIYEYRNGHQEVESPFQGRLQWNGSKDLQDVSITVLNVTLNDSGLYTCNVSREFEFEAHRPFVKTTRLIPLRVTEEVITRATSSPSVASLIT

SEQ ID NO: 96214 - protein, 43 aa, Homo sapiens
  MOD_RES (1)..(1): Any amino acid
XFGLSLVYFLSSTFKQSVQHENTYRDPIAKYCYGESPPELFPA

SEQ ID NO: 96215 - protein, 476 aa, Homo sapiens
TLPVAAGPGQDTDKTPGHAPAQDKVLSAARDPTLLPPETGGAGGEAPSKPKDSSFFDKFFKLDKGQEKVPGDSQQEAKRAEHQDKVDEVPGLSGQSDDVPAGKDIVDGKEKEGQELGTADCSVPGDPEGLETAKDDSQAAAIAENNNSIMSFFKTLVSPNKAETKKDPEDTASKAESVCDGQAGQKTSEIQARGTKKKHLDSPRLGLAFRKFFRHKGAEKSPTTSADLKSDKANFTSQETQGAGKNSKGCNPSGHTQSVTTPEPAKEGTKEKSGPTSLPLGKLFWKKVVCESPVEIIKSKEVESALQTVDLNEGDAAPEPTEAKLKREESKPRTSLMAFLRQMTSDSTEKTITPPEPEPTGAPQKGKEGSSKDKKSAAEMNKQKSNKQEAKEPAQCTEQATVDTNSLQNGDKLQKRPEKRQQSLGGFFKGLGPKRMLDAQVQTDPVSIGPVGKSKYTGKCVFSHVKKKWPFQEWSY

SEQ ID NO: 96216 - protein, 61 aa, Homo sapiens
MDSVAFEDVAVNFTQEEWALLDSSQKNLYREVMQETCRNLASEANGKTRILKITSKNLGKI

SEQ ID NO: 96217 - protein, 306 aa, Homo sapiens
MSELEQLRQEAEQLRNQIQDARKACNDATLVQITSNMDSVGRIQMRTRRTLRGHLAKIYAMHWGYDSRLLVSASQDGKLIIWDSYTTNKMHAIPLRSSWVMTCAYAPSGNYVACGGLDNICSIYNLKTREGNVRVSRELPGHTGYLSCCRFLDDSQIVTSSGDTTCALWDIETAQQTTTFTGHSGDVMSLSLSPDMRTFVSGACDASSKLWDIRDGMCRQSFTGHVSDINAVSFFPNGYAFATGSDDATCRLFDLRADQELLLYSHDNIICGITSVAFSKSGRLLLAGYDDFNCNVWDTLKGDRAG

SEQ ID NO: 96218 - protein, 115 aa, Homo sapiens
MPWGKNSSPHWGHHLGCLPSAPACRIWRPHSRPAWEPPRPSPLLCQDMALQNALYTGDLARLQELFPPHSTADLLLESRAAEPRWSSHQRGEGHLGVAENQGAGLTASATEVLRA

SEQ ID NO: 96219 - protein, 137 aa, Homo sapiens
MAANWTLSWGQGGPCNSPGSDTPRSVASPETQLGNHDRNPETWHMNFRMFSCPEESDPIQALRKLTELCHLWLRPDLHTKEQILDMLVMEQFMISMPQELQVLVKVNGVQSCKDLEDLLRNNRRPKKWSIVNLLGKE

SEQ ID NO: 96220 - protein, 126 aa, Homo sapiens
ENEELDWNLLKPDIYATIMDFFASGLPLVTEETPSGEAGSEEDDEVVAMIKELLDTRIRPTVQEDGGDVIYKGFEDGIVQLKLQGSCTSCPSSIITLKNGIQNMLQFYIPEVEGVEQEYNTAPCHQ

SEQ ID NO: 96221 - protein, 212 aa, Homo sapiens; identical to SEQ ID NO: 81738

SEQ ID NO: 96222 - protein, 483 aa, Homo sapiens
MDDIFTQCREGNAVAVRLWLDNTENDLNQGDDHGFSPLHWACREGRSAVVEMLIMRGARINVMNRGDDTPLHLAASHGHRDIVQKLLQYKADINAVNEHGNVPLHYACFWGQDQVAEDLVANGALVSICNKYGEMPVDKAKAPLRELLRGPSPHPLACVLSSLPTCLLPLYHSLGCFSSLERAEKMGQNLNRIPYKDTFWKGTTRTRPRNGTLNKHSGIDFKQLNFLTKLNENHSGELWKGRWQGNDIVVKVLKVRDWSTRKSRDFNEECPRLRIFSHPNVLPVLGACQSPPAPHPTLITHWMPYGSLYNVLHEGTNFVVDQSQAVKFALDMARGMAFLHTLEPLIPRHALNSRSVMIDEDMTARISMADVKFSFQCPGRMYAPAWVAPEALQKKPEDTNRRSADMWSFAVLLWELVTREVPFADLSNMEIGMKVALEGLRPTIPPGISPHVCKLMKICMNEDPAKRPKFDMIVPILEKMQDK

SEQ ID NO: 96223 - protein, 316 aa, Homo sapiens
MGSAEDAVKEKLLWNVKKEVKQIMEEAVTRKFVHEDSSHIIALCGAVEACLLHQLRRRAAGFLRSDKMAALFTKVGKTCPVAGEICHKVQELQQQAEGRKPSGVSQEALRRQGSASGKAPALSPQALKHVWVRTALIEKVLDKVVQYLAENCSKYYEKEALLADPVFGPILASLLGEPESTGTVGTGQVLREHRLGWLSLSPQWDPVPWNTLSSRQPITTGLTPLLMSWSSGTASGVHLLARTPLQSAQPWGSGNGTQAAARRRTGWLPVPASVWSPCTRTHGRGCSMARTTCWCSRRRIWRRSLATSPCTSLQRA

SEQ ID NO: 96224 - protein, 119 aa, Homo sapiens
MGKSESQMDITDINTPKPKKKQRWTPLEISLSVLVLLLTIIAVTMIALYATYDDGICKSSDCIKSAARLIQNMDATTEPCTDFFKYACGGWLKRNVIPETSSRYGNFDILRDELEVVLK

SEQ ID NO: 96225 - protein, 609 aa, Homo sapiens
SSVSTGDTTPLPVTSPSSASTGHATPLLVTDTSSASTGHATPLPVTDASSVSTDHATSLPVTIPSAASTGHTTPLPVTDTSSASTGQATSLLVTDTSSVSTGDTTPLPVTSTSSASTGHVTPLHVTSPSSASTGHATPLPVTSLSSASTGDTMPLPVTSPSSASTGDTTPLPVTDASSVSTGHTTPLPVTSPSSASTGHTTPLPVTDTSSASKGDTTPLPVTSPSSASTGHTTPLPVTDTSSASTGDTTPLPVTNASSLSTGHATPLHVTSPSSASTGHATPLPVTSTSSASTGHATPLPVTGLSSASTGQATPLPVTSLSSVSTGDTTPLPVTSPSSASTGHASPLLVTDASSASTGQATPLPVTDTSSVSTAHATPLPVTGLSSASTDDTTRLPVTDVSSASTGQAIPLPVTSPSSASTGDTTPLPVTDASSASTGDTTSLPVTIPSSASSGHTTSLPVTDASSVSTGHATSLLVTDASSVSTGDTTPLPVTDTNSASTGDTTPLHVTDASSVSTGHATSLPVTSLSSASTGDTTPLPVTSPSSASSGHTTPLPVTDASSVPTGHATSLPVTDASSVSTGHATPLPVTDASSVSTGHATPLPVTDTS

SEQ ID NO: 96226 - protein, 94 aa, Homo sapiens
MESSKKMDSPGALQTNPPLKLHTDRSAGTPVFVPEQGGYKEKFVKTVEDKYKCEKCHLVLCSPKQTECGHRFCESCMAALLSSSSPKCTACQES

SEQ ID NO: 96227 - protein, 333 aa, Homo sapiens
MQTDSLSPSPNPVSPVPLNNPTSAPRYGTVIPNRIFVGGIDFKTNESDLRKFFSQYGSVKEVKIVNDRAGVSKGYGFVTFETQEDAQKILQEAEKLNYKDKKLNIGPAIRKQQVGIPRSSIMPAAGTMYLTTSTGYPYTYHNGVAYFHTPEVTSVPPPWPSRSVCSSPVMVAQPIYQQPAYHYQGIKQCHTRRWMDSLLPFTKCDEATTQYLPGQWQWSVPQPSASSAPFLYLQPSEVIYQPVEIAQDGGCVPPPLSLMETSVPEPYSDHGVQATYHQVYAPSAITMPAPVMQPEPIKCGAFIIKTIGQLYSSSTDFLSNDPCVAEIQLQRTS

SEQ ID NO: 96228 - protein, 504 aa, Homo sapiens
MARRCGPVALLLGFGLLRLCSGVWGTDTEERLVEHLLDPSRYNKLIRPATNGSELVTVQLMVSLAQLISVHEREQIMTTNVWLTQVSEWEDYRLTWKPEEFDNMKKVRLPSKHIWLPDVVLYNNADGMYEVSFYSNAVVSYDGSIFWLPPAIYKSACKIEVKHFPFDQQNCTMKFRSWTYDRTEIDLVLKSEVASLDDFTPSGEWDIVALPGRRNENPDDSTYVDITYDFIIRRKPLFYTINLIIPCVLITSLAILVFYLPSDCGEKMTLCISVLLALTVFLLLISKIVPPTSLDVPLVGKYLMFTMVLVTFSIVTSVCVLNVHHRSPTTHTMAPWVKVVFLEKLPALLFMQQPRHHCARQRLRLRRRQREREGAGALFFREAPGADSCTCFVNRASVQGLAGAFGAEPAPVAGPGRSGEPCGCGLREAVDGVRFIADHMRSEDDDQSVSEDWKYVAMVIDRLFLWIFVFVCVFGTIGMFLQPLFQNYTTTTFLHSDHSAPSSK

SEQ ID NO: 96229 - protein, 136 aa, Homo sapiens
MLSSFNEWFWQDRFWLPPNVTWTELEDRDGRVYPHPQDLLAALPLALVLLAMRLAFERFIGLPLSRWLGVRDQTRRQVKPNATLEKHFLTEGHRPKEPQLSLLAAQCGLTLQQTQRWFRRRRNQDRPQLTKKFCEA

SEQ ID NO: 96230 - protein, 273 aa, Homo sapiens
MNRFDRPDRNVRQPQEGFWKRPPQRWSGQEHYHLSHPDHYHHHGKSDLSRGSPYRESPLGHFESYGGMPFFQAQKMFVDVPENTVILDEMTLRHMVQDCTAVKTQLLKLKRLLHQHDGSGSLHDIQLSLPSSPEPEDGDKVYKNEDLLNEIKQLKDEIKKKDEKIQLLELQLATQHICHQKCKEEKCTYADKYTQTPWRRIPPQVLQPSSSLPRPTDHTQGKLIKPQRIEARSECSIQDMHQGGAHPEESFTHVLHQESNYGLEEQPFSSGPQ

SEQ ID NO: 96231 - protein, 412 aa, Homo sapiens
  MOD_RES (1)..(1): Any amino acid
XREPSISSDTRTDSSTESYPYKHSHHESVVSHFSSDSQGTVIYNVENDSMSQSSRDTGETLKEKQAPRNASKPSSSTNRLRDFKETVSNMIHNRPSLASQTNVGSHCRGRGGDQPDKKPPRTLPLHSRDWEIESTSSESKSSSSSKYRPTWRPKRESLNIDSIFSKDKRKHCGYTQLSPFSEDSAKEFIPDEPSKPPSYDIKFGGPSPQYKRWGPARPGSHLLEQHPRLIQRMESGYESSERNSSSPVSLDAALPESSNVYRDPSAKRSAGLVPSWRHIPKSHSSSILEVDSTASMGGWTKSQPFSGEEISSKSELDELQEEVARRAQEQELRRKREKELEAAKGFNPHPSRFMDLDELQNQGRSDGFERSLQEAESVFEESLHLEQKGDCAAALALCNEAILNSLSRSKYC

SEQ ID NO: 96232 - protein, 81 aa, Homo sapiens
MLVGNKSDLRHLRAVPTDEARAFAEKNGLSFIETSALDSTNVEAAFQTILTEIYRIVSQKQMSDRRENDMSPSNNVVPIHV

SEQ ID NO: 96233 - protein, 576 aa, Homo sapiens
MPTESASCSTARQTKQKRKSHSLSIRRTNSSEQERTGLPRDMLEGQDSKLPSSVRSTLLELFGQIEREFENLYIENLELRREIDTLNERLAAEGQAIDGAELSKGQLKTKASHSTSQLSQKLKTTYKASTSKIVSSFKTTTSRAACQLVKEYIGHRDGIWDVSVAKTQPVVLGTASADHTALLWSIETGKCLVKYAGHVGSVNSIKFHPSEQLALTASGDQTAHIWRYAVQLPTPQPVADTSAVQEAWHQHLLGFWGGFRELGAFTHSRRRSGRRRHVMETGNRSSLRAGALPGVLTPEFLPARLSVVLHVCMSEAVCPLLHCQISGEDEVECSDKDEPDLDGDVSSDCPTIRVPLTSLKSHQGVVIASDWLVGGKQAVTASWDRTANLYDVETSELVHSLTGHDQELTHCCTHPTQRLVVTSSRDTTFRLWDFRDPSIHSVNVFQGHTDTVTSAVFTVGDNVVSGSDDRTVKVWDLKNMRSPIATIRTDSAINRINVCVGQKIIALPHDNRQVRLFDMSGVRLARLPRSSRQGHRRMVCCSAWSEDHPVCNLFTCGFDRQAIGWNINIPALLQEK

SEQ ID NO: 96234 - protein, 24 aa, Homo sapiens
MQVKITSPGLFRIVYIAERHNCQY

SEQ ID NO: 96235 - protein, 153 aa, Homo sapiens
MIGRCFVLSQDLAIRDELDGGEWKFCEGRPQGHEQFGFCQQGTAAAFSPDSHYLLFGAPGTYNWKGLLFVTNIDSSDPDQLVYKTLDPADRLPGPAGDLALNSYLGFSIDSGKGLVRAEELSFVAGAPRANHKGAVVILRKDSASRLVPEVML

SEQ ID NO: 96236 - protein, 235 aa, Homo sapiens; identical to SEQ ID NO: 80121
  MOD_RES (1)..(1): Any amino acid

SEQ ID NO: 96237 - protein, 188 aa, Homo sapiens
MLELQYHNEDLEKDKTSQNCLGRGMEQVAKKLGVAHEEIQRLTDELQVKEKEQCKLDSALKKAQLEIDKLKENLVKLKENDAADLQKAKEQNQRLDEEILALRNRVRSLDSEKKVLGEMVERLKGEVCESQENKQLGNHSPGKTVGGEQREQMEFCSCCPGWSAMVQSQLTATSASQIRVILLPQPPK

SEQ ID NO: 96238 - protein, 213 aa, Homo sapiens
YWMHFCGGSLIHPQWVLTAAHCVGPVQLREQHLYYQDQLLPVSRIIVHPQFYTAQIGADIALLELEEPVNVSSHVHTVTLPPASETFPPGMPCWVTGWGDVDNDERLPPPFPLKQVKVPIMENHICDAKYHLGAYTGDDVRIVRDDMLCAGNTRRDSCQGDSGGPLVCKVNGTWLQAGVVSWGEGCAQPNRPGIYTRVTYYLDWIHHYVPKKP

SEQ ID NO: 96239 - protein, 121 aa, Homo sapiens
MGLLAFRDVALEFSPEEWECLDPAQRSLYRDVMLENYRNLISLGLAMSKPELIICLEARKEPWNVNTEKTARHSVLSSYLTEDILPEQGLQVSFQKVMLRRYERCCLEKLRLRNDWEIVAM

SEQ ID NO: 96240 - protein, 192 aa, Homo sapiens
YPLASLYVGDLHPDVTEAMLYEKFSPAGPILSIRVCRDVATRRSLGYAYINFQQPADAERALDTMNFEMLKGQPIRIMWSQRDPGLRKSGVGNIFIKNLEDSIDNKALYDTFSTFGNILSCKLCGSLQVSTGAGGGAGGAGPGVHQHLREEPPGGCGRARPAGPLLPVWENAECEGDEGQQRPLAVLWLCQL

SEQ ID NO: 96241 - protein, 326 aa, Homo sapiens
MPDNRQPRNRQPRIRSGNEPRSAPAMEPDGRGAWAHSRAALDRLEKLLRCSRCTNILREPVCLGGCEHIFCSNIFGLRPVDYTDDESMKSLLLLPEKNESSSASHCSVMNTGQRRDGPLVLIGSGLSSEQQKMLSELAVILKAKKYTEFDSTVTHVVVPGDAVQSTLKCMLGILNGCWILKFEWVKACLRRKVCEQEEKYEIPEGPRRSRLNREQLLPKLFDGCYFYLWGTFKHHPKDNLIKLVTAGGGQILSRKPKPDSDVTQTINTVAYHARPDSDQRFCTQYIIYEDLCNYHPERVRQGKVWKAPSSWFIDCVMSFELLPLDS

SEQ ID NO: 96242 - protein, 114 aa, Homo sapiens
  MOD_RES (1)..(1): Any amino acid
XPFLAMAGPEFVEVIGGLGAARVRSLFKEARARAPCIVYIDEIDAVGKKRSTTMSGFSNTEEEQTLNQLLVEMDGQCSCAPHPHCTIRGGFPMSFRTGCGEPRSCHCTPAWVTE

SEQ ID NO: 96243 - protein, 79 aa, Homo sapiens
KDVALKPQERVEKRQTPLTKKKREALTNGLSFHSKKSRLSHPHHYSSDRENDRNLCQHLGKRKKMPKALRQGSISRLGS

SEQ ID NO: 96244 - protein, 165 aa, Homo sapiens
MAEDKTKPSELDQGKYDADDNVKIICLGDSAVGKSKLMERFLMDGFQPQQLSTYALTLYKHTATVDGRTILVADINVTQKSFNFAKKFSLPLYFVSAADGTNVVKLFNDAIRLAVSYKQNSQDFMDEIFQELENFSLEQEEEDVPDQEQSSSIETPSEEAASPHS

SEQ ID NO: 96245 - protein, 57 aa, Homo sapiens
  MOD_RES (1)..(1): Any amino acid
XMAQCRDLENHHHEKLLEISISTLEKIVEGDLDEDLPNDLRAGRFQKFNYVEASGTF

SEQ ID NO: 96246 - protein, 324 aa, Homo sapiens
QMEKVKTWFMAQRLRCGISWSSEEIEETRARVVYRRDQLHFKSLLSFTHHAGRPPEEVPPPPVPAPEQVGIGIGTASWNHSTTVPQPQARDKPPPIALIASSCKEESASSVTPSSSSTSSSFQVLANGATAASKPLQPLGCVPQSVSPSEQALPPHLEPAWPQGLRHNSVPGRVGPTEYLSPDMQRQRKTKRKTKEQLAILKSFFLQCQWARREDYQKLEQITGLPRPEIIQWFGDTRYALKHGQLKWFRDNAVPGAPSFQDPAIPTPPPSTRSLNERAETPPLPIPPPPPDIQPLERYWAAHQQLRETDIPQLSQASRLSTQQ

SEQ ID NO: 96247 - protein, 165 aa, Homo sapiens
MTFDDLKIQTVKDQPDEKSNGKKAKGLQFLYSPWWCLAAATLGVLCLGLVVTIMVLGMQLSQVSDLLTQEQANLTHQKKKLEGQISARQQAEEASQESENELKEMIETLARKLNEKSKEQMELHHQNLNLQETLKRVANCSAVYAENCILAAFSICQKKANLRAQ

SEQ ID NO: 96248 - protein, 169 aa, Homo sapiens
  MOD_RES (1)..(1): Any amino acid
XAALGHRTAALHRRLDALQAAAARLDHRRVKIPVSNLDEESRWTVHYTAPWHQQENVFLPTTRPPCVEDLHRQAKLNLKSVLRECDKLRHDGYRSSQYYSQGPTFAANASPFCDDYQDEDEETDQKCSLSSSEEERFISIRRPKTPASSDFSDLNTQTNWTKSLPLPTP

SEQ ID NO: 96249 - protein, 82 aa, Homo sapiens
MKKMSNIYESAANTLGIFNSPCLTKVELRVACKGISDRDALSKPDPCVILKMQSHGQWFEVDRTEVIRTCINPVYSKLFTVD

SEQ ID NO: 96250 - protein, 53 aa, Homo sapiens
MLSSAYISDHMKVHSQGPHHVCELCNKGTCRGLPGGPGAEGGRLARRLATDTG

SEQ ID NO: 96251 - protein, 157 aa, Homo sapiens
MAMPHWLRHLVPGPWGRLCRDWDQMFAFAQRHVERREAEAAMRNGGQPEKDLESGAHLTHFLFREELPAQSILGNVTELLLAGVDTVSNTLSWALYELSRHPEVQTALHSEITAALSPGSSAYPSATVLSQLPLLKAVVKEVLRLYPVVPGNSRVPD

SEQ ID NO: 96252 - protein, 195 aa, Homo sapiens
MESMFEDDISILTQEALGPSEVWLDSPGDPSLGGDMCSASHFALITAYGDIKERLGGLERENATLRRRLKVYEIKYPLISDFGEEHGFSLYEIKDGSLLEVEKVSLQQRLNQFQHELQKNKEQEEQLGEMIQAYEKLCVEKSDLETELREMRALVETHLRQICGLEQQLRQQQGLQDAAFSNLSPPPAPAPPCTD

SEQ ID NO: 96253 - protein, 152 aa, Homo sapiens
MGKEKTHINIVVIGHVDSGKSTTTGHLIYKCGGIDKRTIEKFEKEAAEMGKGSFKYAWVLDKLKAERERGITIDISLWKFETTKYYITIIDAPGHRDFIKNMITGTSQADCAVLIVAAGVGEFEAGISKNGQTREHALLAYTLGVKQLIVGV

SEQ ID NO: 96254 - protein, 316 aa, Homo sapiens
MSKKPPNRPGITFEIGARLEALDYLQKWYPSRIEKIDYEEGKMLVHFERWSHRYDEWIYWDSNRLRPLERPALRKEGLKDEEDFFDFKAGEEVLARWTDCRYYPAKIEAINKEGTFTVQFYDGVIRCLKRMHIKAMPEDAKGQFLFQVKSQHPLSWCCPIDPAGSCNQSMGSEDWIALVKAAAAAAAKNKTGSKPRTSANSNKDKDKDERKWFKVPSKKEETSTCIATPDVEKKEDLPTSSETFVGLHVENVPKMVFPQPESTLSNKRKNNQGNSFQAKRARLNKITGLLASKAVGVDGAEKKEDYNETAPMLEQV

SEQ ID NO: 96255 - protein, 118 aa, Homo sapiens
TLVDRILEPQDVVRFGVFLYTLGCVCAACLYYLSPLKLEHLALIYFGGLSGSFLYTGGIGFKYVALGDLIILITFGPLAVMFAYAIQAGVQWCNLSSLQPLPPGFKRFSCLSLLSSWD

SEQ ID NO: 96256 - protein, 136 aa, Homo sapiens
  MOD_RES (1)..(1): Any amino acid
XLLGLLGYLHFVKIDQETLLIIDSLGIQMTSSYASGKESTTFIEMGKVKDIVINEAIYMQKVIYYLCILLKDPVEPHGISQVVPVFQRQSLTLSPRLECSDNHHSLQPPPPRLKKSSCLSLLRTWDYRVPSPGWTA

SEQ ID NO: 96257 - protein, 1063 aa, Homo sapiens
LGKNDGAVAGTRYFQCQPKYGLFAPVHKVTKIGFPSTTPAKAKANAVRRVMATTSASLKRSPSASSLSSMSSVASSVSSRPSRTGLLTETSSRYARKISGTTALQEALKEKQQHIEQLLAERDLERAEVAKATSHVGEIEQELALARDGHDQHVLELEAKMDQLRTMVEAADREKVELLNQLEEEKRKVEDLQFRVEEESITKGDLETQTKLEHARIKELEQSLLFEKTKADKLQRELEDTRVATVSEKSRIMELEKDLALRVQEVAELRRRLESNKPAGDVDMSLSLLQEISSLQEKLEVTRTDHQREITSLKEHFGAREETHQKEIKALYTATEKLSKENESLKSKLEHANKENSDVIALWKSKLETAIASHQQAMEELKVSFSKGLGTETAEFAELKTQIEKMRLDYQHEIENLQNQQDSERAAHAKEMEALRAKLMKVIKEKENSLEAIRSKLDKAEDQHLVEMEDTLNKLQEAEIKKEKFAEASEEAVSVQRSMQETVNKLHQKEEQFNMLSSDLEKLRENLADMEAKFREKDEREEQLIKAKEKLENDIAEIMKMSGDNSSQLTKMNDELRLKERDVEELQLKLTKANENASFLQKSIEDMTVKAEQSQQEAAKKHEEEKKELERKLSDLEKKMETSHNQCQELKARYERATSETKTKHEEILQNLQKTLLDTEDKLKGAREENSGLLQELEELRKQADKAKAAQTAEDAMQIMEQMTKEKTETLASLEDTKQTNAKLQNELDTLKENNLKNVEELNKSKELLTVENQKMEEFRKEIETLKQAAAQKSQQLSALQEENVKLAEELGRSRDEVTSHQKLEEERSVLNNQLLEMKKRESKFIKDADEEKASLQKSISITSALLTEKDAELEKLRNEVTVLRGENASAKSLHSVVQTLESDKVKLELKVKNLELQLKENKRQLSSSSGNTDTQADEDERAQESQIDFLNSVIVDLQRKNQDLKMKVEMMSEAALNGNGDDLNNYDSDDQEKQSKKKPRLFCDICDCFDLHDTEDCPTQAQMSEDPPHSTHHGSRGEERPYCEICEMFGHWATNCNDDETF

SEQ ID NO: 96258 - protein, 145 aa, Homo sapiens
MLQKISPLQKCQEELGSLKAELEEKKSSLKLYQDTHQEYARVKEECLKSDAQKKKLEAKVKKLQEAAVKQTQDFKQLRNEKKILEKEFKKTQERLDEFSKQKNEKELRHIGTQISSDSYGSIDKRKVKLLLKELWLCVNTTHRLP

SEQ ID NO: 96259 - protein, 225 aa, Homo sapiens
MNPTLILAAFCLGIASATLTFDHSLEAQWTKWKAMHNRLYGMNEEGWRRAVWEKNMKMIELHNQEYREGKHSFTMAMNAFGDMTSEEFRQVMNGFQNRKPRKGKVFQEPLFYEAPRSVDWREKGYVTPVKNQGQCGSCWAFSATGALEGQMFRKTGRLISLSEQNLVDCSGPQGNEGCNGGLMDYAFQYVQDNGGLDSEESYPYEATVSGAPCHHSSSAFGRWTL

SEQ ID NO: 96260 - protein, 150 aa, Homo sapiens
MEVLESGEQGVLQWDRKLSELSEPGDGEALMYHTHFSELLDEFSQNVLGQLLNDPFLSEKSVSMEVEPSPTSPAPLIQAEHSYSLCEEPRAQSPFTHITTSDSFNDDEVESEKWYLSTDFPSTSICHSDHHSHLHPVGKGGTSSGNEHWG

SEQ ID NO: 96261 - protein, 89 aa, Homo sapiens
  MOD_RES (1)..(1): Any amino acid
XPVGRCLSRTCIELSLVQLCLQQDPEKRPSASSLLSHVFFKQMKEESQDSILSLLPPAYNKPSISLPPVLPWTEPECDFPDEKDSYWEF

SEQ ID NO: 96262 - protein, 178 aa, Homo sapiens
MYPQGRHPTPLQSGQPFKFSILEICDRIKEEFQFLQAQYHSLKLECEKLASEKTEMQRHYVMYYEMSYGLNIEMHKQAEIVKRLSGICAQIIPFLTQEHQQQVLQAVERAKQVTVGELNSLIGQQQLQPLSHHAPPVPLTPRPAGLVGGSATGLLALSGALAAQAQLAAAVKEDRAGV

SEQ ID NO: 96263 - protein, 50 aa, Homo sapiens
MSRCHQDHWSQLPPSQLQWGLGLGASQGGFLYEPVSQCWVFGGGTKLTVL

SEQ ID NO: 96264 - protein, 454 aa, Homo sapiens
MAQMGGKVGDPLWILRKWGLGGCSLELVPGSRTQQASKPASLLPLPQAAPSPPTRLPGSPSLPPRPGSRCPSPAPPEPAREPERKGGGGGRVAAARSPAGASQTTLECTLKPGLVYNKVNPIFHHWSLGDCKFGLTFQSPAEADEFQKSLLAALAALGRGSLTPSSSSSSSSPSQDTAETPCPLTSHVDSDSSSSHSRQETPPSAAAAPIITMESASGFGPTTPPQRRRSSAQSYPPLLPFTGIPEPSEPLAGAGGLGWGGRGYEDYRRSGPPAPLALSTCVVRFAKTGALRGAALGPPAALPAPLTEAAPPAPPARPPPGPGPSSAPAKASPEAEEAARCVHCRALFRRRADGRGGRCAEAPDPGRLLVRRLSCLWCAESLLYHCLSDAEGDFSDPCACEPGHPRPAARWAALAALSLAVPCLCCYAPLRACHWVAARCGCAGCGGRHEEAAR

SEQ ID NO: 96265 - protein, 176 aa, Homo sapiens
MISAHCNPHLLDSGDPPASASQVAGTTDSSEEAPPATQNFIIPKKEIHTVPDMGKWKRSQVPFGTVAYADYIGFILTLNEGVKGKKLTFEYRVSEAIEKLVALLNTLDRWIDETPPVDQPSRFGNKAYRTWYAKLDEEAENLVATVVPTHLAAAVPEVAVYLKESVGNSTRIDYGT

SEQ ID NO: 96266 - protein, 182 aa, Homo sapiens
MIQSQEKPDRVLVRVRDLTIQKADEVVWVRARVHTSRAKGKQCFLVLRQQQFNVQALVAVGDHASKQMVKFAANINKESIVDVEGVVRKVNQKIGSCTQQDVELHVQKIYVISLAEPRLPLQLDDAVRPEAEGEEEGRATVNQDTRLDNRVIDLRTSTSQAVFRLQSGICHLFRETLINKGF

SEQ ID NO: 96267 - protein, 584 aa, Homo sapiens
MPQLNGGGGDDLGANDELISFKDEGEQEEKSSENSSAERDLADVKSSLVNESETNQNSSSDSEAERRPPPRSESFRDKSRESLEEAAKRQDGGLFKGPPYPGYPFIMIPDLTSPYLPNGSLSPTARTYLQMKWPLLDVQAGSLQSRQALKDARSPSPAHIVSNKVPVVQHPHHVHPLTPLITYSNEHFTPGNPPPHLPADVDPKTGIPRPPHPPDISPYYPLSPGTVGQIPHPLGWLVPQQGQPVYPITTGGFRHPYPTALTVNASMSSFLSSRFPPHMVPPHHTLHTTGIPHPAIVTPTVKQESSQSDVGSLHSSKHQDSKKEEEKKKPHIKKPLNAFMLYMKEMRAKVVAECTLKESAAINQILGRRWHALSREEQAKYYELARKERQLHMQLYPGWSARDNYGKKKKRKRDKQPGETNDANTPKKCRALFGLDRQTLWCKPCRRKKKCVRYIQGEGSCLSPPSSDGSLLDSPPPSPNLLGSPPRDAKSQTEQTQPLSLSLKPDPLAHLSMMPPPPALLLAEATHKASALCPNGALDLPPAALQPAAPSSSIAQPSTSSLHSHSSLAGTQPQPLSLVTKSLE

SEQ ID NO: 96268 - protein, 39 aa, Homo sapiens
MNDRSSRRRTMKDDETFEISIPFDEAPHLDPQIFYSLSP

SEQ ID NO: 96269 - protein, 152 aa, Homo sapiens
  MOD_RES (1)..(1): Any amino acid
XFPSNQLREGNVIDFIRNNRRVGELCPAQTRSSVTRLRYLHAPGPTTAVSYMSVKCVDARKNHHKTKWFVPWGPNHCDKIRDIEEAIPREIEANDIVFSVHIPLPHMEMSPWFQFMLFILQLDIAFKLNNQITMNRTSEKSLGVWQTRSYYT

SEQ ID NO: 96270 - protein, 278 aa, Homo sapiens
  MOD_RES (1)..(1): Any amino acid
XRSLWRGNGINVLKIAPESAIKFMAYEQIKRAILGQQETLHVQERFVAGSLAGATAQTIIYPMEVLKTRLTLRRTGQYKGLLDCARRILEREGPRAFYRGYLPNVLGIIPYAGIDLAVYETLKNWWLQQYSHDSADPGILVLLACGTISSTCGQIASYPLALVRTRMQAQASIEGGPQLSMLGLLRHILSQEGMRGLYRGIAPNFMKVIPAVSISYVVYENMKQALGVTSRSTDSLYLNTQTLPPSGTRSSVLVKRWILDPQPQIPMPRALDLQAQLL

SEQ ID NO: 96271 - protein, 265 aa, Homo sapiens
GDVAALGLSAVPPTRVPGPLAPRRRRYTLTPARLRWDHFNLTYRLLPDQPHGLPGLRAAPLLRRPHGGAGPRLLPPARRHPLRRQRVLGPGPHALQLEERRVAHGPGARGGPRDRPRAGPDALTTRPGAHAPERHAARLEGVVPGRAVGAAPALRMPRQAVRVRVLGAEGLLRRSPAAHEEALPQQLRLLLRIPLPHGGHHPTAPQDQNQAGARGQERDLPLRPEDPPQERESVLVQGPGAPGVLLPRLPGPGRGAPEHHRQRRQ

SEQ ID NO: 96272 - protein, 97 aa, Homo sapiens
  MOD_RES (1)..(1): Any amino acid
XDNQAQEIIKKLEKSIKFLSQCAARVASRAEMLGAINQESRVSKAVEVMIQHVENLKRMYAKEHAELEELKQVLLQNERSFNPLEDDADTHVVPTLC

SEQ ID NO: 96273 - protein, 435 aa, Homo sapiens
MLQQVPENINFPAEEEKILEFWTEFNCFQECLKQSKHKPKFTFYDGPPFATGLPHYGHILAGTIKDIVTRYAHQSGFHVDRRFGWDCHGLPVEYEIDKTLGIRGPEDVAKMGITEYNNQCRAIVMRYSAEWKSTVSRLGRWIDFDNDYKTLYPQFMESVWWVFKQLYDKGLVYRGVKVMPFSTACNTPLSNFESHQNYKDVQDPSVFVTFPLEEDETVSLVAWTTTPWTLPSNLAVCVNPEMQYVKIKDVARGRLLILMEARLSALYKLESDYEILERFPGAYLKGKKYRPLFDYFLKCKENGAFTVLVDNYVKEEEGTGVVHQAPYFGAEDYRVCMDFNIIRKDSLPVCPVDASGCFTTEVTDFAGQYVKDADKSIIRTLKEQGRLLVATTFTHSYPFCWRSDTPLIYKAVPSWFVRVENMVDQLLRNNDLCYW

SEQ ID NO: 96274 - protein, 37 aa, Homo sapiens
METKVHLFCQAEENIDLLDDGSNSFATDLSSGTINHK

SEQ ID NO: 96275 - protein, 677 aa, Homo sapiens
GEQRRTHPVACSFCPEFSHHVEFTCNLVTQHCSGEACFLAELLEFAEVIFAVYHENTKSASDIISIESCKEYLLGVVKVPTKELLIKRSGITGWYPIILPEDGGLPHGLELMQKIVGGLELSISFTHRGDRERVLEAAEHLGWSFENSLKDFVRMDEGEPATVTISTPRLWLPIHCVLLAGHNHIHKNTYCYLRYKFYDHEAFWTPLKKPKESVNKKQIMVTFKASKRAEVTRGPSLLWYFREERLEIQVWRAYGNDSVERPHQTDSWIGSAYVDLARLGERSARTLTVSGVYPLFGRNASNLSGAALRVHVVLSSLSSHLEPTHELDSMDCSSHSESEQLPRRNDEVQLSPPEVISCHQKSPASTQVPCSSTTAEVRLTQEGPADLDGTFAVSILVERAMHLSLKGSPLTERKVSIPSCCVSFATADESSPVYTQVVENTDSPIWNFQQQSRLSKELLLDPQQTLVFKVWHKGDEERVIGFASVDLSPLLSGFQFVCGWYNITDFSGECQGQIKVAVSPLESLIHFKEERQARRGVETSKSLIPIYSPFSFPASDTYAAFSSHMARQTLDQLAHASSKELDFSSPGRSDTTRSQASRHEEHVQNIRRFHESLHLQGEAPLPCDDKLTTSPLSSQTSILTSLRSSPSLSYPSALRLKRPSHSTRRAVGTILGQVPAA

SEQ ID NO: 96276 - protein, 724 aa, Homo sapiens
IAENMADLIDGYCRLVNGTSQSFIIRPQKEGERALPSIPKLANSEKQGMRTHAVSVSETDDYAEIIDEEDTYTMPSKSYGIDEARDYEIQRERIELGRCIGEGQFGDVHQGIYMSPENPALAVAIKTCKNCTSDSVREKFLQEALTMRQFDHPHIVKLIGVITENPVWIIMELCTLGELRSFLQVRKYSLDLASLILYAYQLSTALAYLESKRFVHRDIAARNVLVSSNDCVKLGDFGLSRYMEDSTYYKASKGKLPIKWMAPESINFRRFTSASDVWMFGVCMWEILMHGVKPFQGVKNNDVIGRIENGERLPMPPNCPPTLYSLMTKCWAYDPSRRPRFTELKAQLSTILEEEKAQQEERMRMESRRQATVSWDSGGSDEAPPKPSRPGYPSPRSSEGFYPSPQHMVQTNHYQVSGYPGSHGITAMAGSIYPGQASLLDQTDSWNHRPQEIAMWQPNVEDSTVLDLRGIGQVLPTHLMEERLIRQQQEMEEDQRWLEKEERFLKPDVRLSRGSIDREDGSLQGPIGNQHIYQPVGKPDPAAPPKKPPRPGAPGHLGSLASLSSPADSYNEGVKLQPQEISPPPTANLDRSNDKVYENVTGLVKAVIEMSSKIQPAPPEEYVPMVKEVGLALRTLLATVDETIPLLPASTHREIEMAQKLLNSDLGELINKMKLAQQYVMTSLQQEYKKQMLTAAHALAVDAKNLLDVIDQARLKMLGQTRPH

SEQ ID NO: 96277 - protein, 564 aa, Homo sapiens
MRTLRRLKFMSSPSLSDLGKREPAAAADERGTQQRRACANATWNSIHNGVIAVFQRKGLPDQELFSLNEGVRQLLKTELGSFFTEYLQNQLLTKGMVILRDKIRFYEELQRDKAAAAAVLGAVRKRPSVVPMAGQDPALSTSHPFYDVARHGILQVAGDDRFGRRVVTFSCCRMPPSHELDHQRLLEYLKYTLDQYVENDYTIVYFHYGLNSRNKPSLGWLQSAYKEFDRKYKKNLKALYVVHPTSFIKVLWNILKPLISHKFGKKVIYFNYLSELHEHLKYDQLVIPPEVLRYDEKLQSLHEGRTPPPTKTPPPRPPLPTQQFGVSLQYLKDKNQGELIPPVLRFTVTYLREKGLRTEGLFRRSASVQTVREIQRLYNQGKPVNFDDYGDIHIPAVILKTFLRELPQPLLTFQAYEQILGITCVESSLRVTGCRQILRSLPEHNYVVLRYLMGFLHAVSRESIFNKMNSSNLACVFGLNLIWPSQGVSSLSALVPLNMFTELLIEYYEKIFSTPEAPGEHGLAPWEQGSRAAPLQEAVPRTQATGLTKPTLPPSPLMAARRRL

SEQ ID NO: 96278 - protein, 208 aa, Homo sapiens
MKCVNHKNIISLLNVFTPQKTLEEFQDVYLVMELMDANLCQVIQMELDHERMSYLLYQMLCGIKHLHSAGIIHRDLKPSNIVVKSDCTLKILDFGLARTAGTSFMMTPYVVTRYYRAPEVILGMGYKENDIDQWNKVIEQLGTPCPEFMKKLQPTVRNYVENRPKYAGLTFPKLFPDSLFPADSEHNKLKASQARDLLSKMLVIDPAK

SEQ ID NO: 96279 - protein, 694 aa, Homo sapiens
MFHSSAMVNSHRKPMFNIHRGFYCLTAILPQICICSQFSVPSSYHFTEDPGAFPVATNGERFPWQELRLPSVVIPLHYDLFVHPNLTSLDFVASEKIEVLVSNATQFIILHSKDLEITNATLQSEEDSRYMKPGKELKVLSYPAHEQIALLVPEKLTPHLKYYVAMDFQAKLGDGFEGFYKSTYRTLGGETRILAVTDFEPTQARMAFPCFDEPLFKANFSIKIRRESRHIALSNMPKVKTIELEGGLLEDHFETTVKMSTYLVAYIVCDFHSLSGFTSSGVKVSIYASPDKRNQTHYALQASLKLLDFYEKYFDIYYPLSKLDLIAIPDFAPGAMENWGLITYRETSLLFDPKTSSASDKLWVTRVIAHELAHQWFGNLVTMEWWNDIWLKEGFAKYMELIAVNATYPELQFDDYFLNVCFEVITKDSLNSSRPISKPAETPTQIQEMFDEVSYNKGACILNMLKDFLGEEKFQKGIIQYLKKFSYRNAKNDDLWSSLSNSCLESDFTSGGVCHSDPKMTSNMLAFLGENAEVKEMMTTWTLQKGIPLLVVKQDGCSLRLQQERFLQGVFQEDPEWRALQERYLWHIPLTYSTSSSNVIHRHILKSKTDTLDLPEKTSWVKFNVDSNGYYIVHYEGHGWDQLITQLNQNHTLLRPKDRVGLIHDVFQLVGAGRLTLDKALDMTYYLQHETSSP

SEQ ID NO: 96280 - protein, 146 aa, Homo sapiens
MLHTTQLYQHVPETRWPIVYSPRYNITFMGLEKLHPFDAGKWGKVINFLKEEKLLSDSMLVEAREASEEDLLVVHTRRYLNELKRPSGGRWSWSGAQRMMSTWIRWRGTSRNPSRSTCPTWWYTMQAPTSSRGTALGGCPSAQRAS

SEQ ID NO: 96281 - protein, 296 aa, Homo sapiens
MSQDGASQFQEVIRQELELSVKKELEKILTTASSHEFEHTKKDLDGFRKLFHRFLQEKGPSVDWGKIQRPPEDSIQPYEKIKARGLPDNISSVLNKLVVVKLNGGLGTSMGCKGPKSLIGVRNENTFLDLTVQQIEHLNKTYNTDVPLVLMNSFNTDEDTKKILQKYNHCRVKIYTFNQSRYPRINKESLLPVAKDVSYSGENTEAWYPPGHGDIYASFYNSGLLDTFIGEGKEYIFVSNIDNLGATVDLYILNHLMNPPNGKRCEFVMEVTNKTRADVKQLKDCRSKMPLTWKSL

SEQ ID NO: 96282 - protein, 74 aa, Homo sapiens
MLFPLQVAAVTSSVRDDPLEHCVSPRTRARSPEICKMADNLDEFIEEQKARLAEDKAELESDPPYMEMKELIMD

SEQ ID NO: 96283 - protein, 844 aa, Homo sapiens
MIFWSFVAGVVTFYCSLGPDSLLPNIFFTIKYKPKQLGLQELFPQGHSCAVCGKVKCKRHRPSLLLENYQPWLDLKISSKVDASLSEVLELVLENFVYPWYRDVTDDESFVDELRITLRFFASVLIRRIHKVDIPSIITKKLLKAAMKHIEVIVKARQKVKNTEFLQQAALEEYGPELHVALRSRRDELHYLRKLTELLFPYILPPKATDCRSLTLLIREILSGSVFLPSLDFLADPDTVNHLLIIFIDDSPPEKATEPASPLVPFLQKFAEPRNKKPSVLKLELKQIREQQDLLFRFMNFLKQEGAVHVLQFCLTVEEFNDRILRPELSNDEMLSLHEELQKIYKTYCLDESIDKIRFDPFIVEEIQRIAEGPYIDVVKLQTMRCLFEAYEHVLSLLENVFTPMFCHSDEYFRQLLRGAESPTRNSKLNRGSLSLDDFRNTQKRGESFGISRIGSKIKGVFKSTTMEGAMLPNYGVAEGEDDFIEEGIVVMEDDSPVEAVSTPNTPRNLAAWKISIPYVDFFEDPSSERKEKKERIPVFCIDVERNDRRAVGHEPEHWSVYRRYLEFYVLESKLTEFHGAFPDAQLPSKRIIGPKNYEFLKSKREEFQEYLQKLLQHPELSNSQLLADFLSPNGGETQFLDKILPDVNLGKIIKSVPGKLMKEKGQHLEPFIMNFINSCESPKPKPSRPELTILSPTSENNKKLFNDLFKNNANRAENTERKQNQNYFMEVMTVEGVYDYLMYVGRVVFQVPDWLHHLLMGTRILFKNTLEMYTDYYLQCKLEQLFQEHRLVSLITLLRDAIFCENTEPRSLQDKQKGAKQTFEEMMNYIPAFLRVCIMPCAL

SEQ ID NO: 96284 - protein, 248 aa, Homo sapiens
SSIHTQDPYLDKFFALVNALDEHLFPVRIGDMRIMENNLENELKSSISALNSSQLEPVVRFLHLLLDKLILLVIRPPVIAGQIVNLGQASFEAMASIINRLHKNLEGNHDQHGRNSLLASYIHYVFRLPNTYPNSSSPGPGGLGGSVHYATMARSAVRPASLNLNRSRSLSNSNPDISGTPTSPDDEVRSIIGSKGLDRSNSWVNTGGPKAAPWGSNPSPSAESTQLFHEELALQWVVCSGSVRESAL

SEQ ID NO: 96285 - protein, 208 aa, Homo sapiens
MESMFEDDISILTQEALGPSEVWLDSPGDPSLGGDMCSASHFALITAYGDIKERLGGLERENATLRRRLKVYEIKYPLISDFGEEHGFSLYEIKDGSLLEVEKVSLQQRLNQFQHELQKNKEQEEQLGEMIQAYEKLCVEKSDLETELREMRALVETHLRQICGLEQQLRQQQGLQDAAFSNLSPPPAPAPPCTDLDLHYLALRGGSG

SEQ ID NO: 96286 - protein, 161 aa, Homo sapiens
MTRLDRSSHSGGGHAKGSRPLNSLLAGHRVAQPASAPGSRASVQDIDLGAGREVFDYSHRQKEQDVEKELRDGGEQDTWAGEGAEALARNLLVDGETGESFPAQFPADISSITEAVPSESEPPALQNNLLSPLLTGTESPFDLEQQWQDLMSIMEMQAMEV

SEQ ID NO: 96287 - protein, 78 aa, Homo sapiens
MANETQKVGAIHFPFPFTPYSIQEDFMAELYRVLEAGKIGIFESPTGTGLQAPRGLLENRPGLLSLCRRKKRGTWWTD

SEQ ID NO: 96288 - protein, 196 aa, Homo sapiens
MSFIHQTNDASSESIASFSKQEVMSSFLPEGGCYELLTVIGKGFEDLMTVNLARYKPTGEYVTVRRINLEACSNEMVTFLQGELHVSKLFNHPNIVPYRATFIADNELWVVTSFMAYGSAKDLICTHFMDGMNELAIAYILQGVLKALDYIHHMGYVHRISRVMMPSLTSTVWESQPVNWPTAMSPLRICLPPRCC

SEQ ID NO: 96289 - protein, 129 aa, Homo sapiens
MVRPGYSHRVSLPTSPGILATSPYPETDSAFFEPSHLTSAADEGAVQVSRRTISSNSFSPEVFVLPVDVEKENAHFYVADMIISAMEKMKCNILSQQQTESWSKEVSGLLGSDQPDSEMTFDTNIKQES

SEQ ID NO: 96290 - protein, 292 aa, Homo sapiens
MGRRSSDTEEESRSKRKKKHRRRSSSSSSSDSRTYSRKKGGRKSRSKSRSWSRDLQPRSHSYDRRSRSRPRLRSHSRSSERSSHRRTRSRSRDRERRKGRDKEKREKEKDKGKDKELHNIKRGESGNIKAGLEHLPPAEQAKARLQLVLEAAAKADEALKAKERNEEEAKRRKEEDQATLVEQVKRVKEIEAIESDSFVQQTFRSSKEVKKSVEPSEVKQATSTSGPASAVADPPSTEKEIDPTSIPTAIKYQDDNSLAHPNLFIEKADAEEKWFKRLIALRQERLMGSPVA

SEQ ID NO: 96291 - protein, 35 aa, Homo sapiens
  MOD_RES (1)..(1): Any amino acid
XVRASSLRVETSLHCAESPTPRAKPAARQNEKTAR

SEQ ID NO: 96292 - protein, 171 aa, Homo sapiens
MNILAPVRRDRVLAELPQCLRKEAALHGHKDFHPRVTCACQEHRTGTVGFKISKVIVVGDLSVGKTCLINRFCKDTFDKNYKATIGVDFEMERFEVLGIPFSLQLWDTAGQERFKCIASTYYRGAQAIIIVFNLNDVASLEHTKFQEGSEYPCSVCADGERRPPGGPGDEG

SEQ ID NO: 96293 - protein, 200 aa, Homo sapiens
MAYQSLRLEYLQIPPVSRAYTTACVLTTAAVQLELITPFQLYFNPELIFKHFQIWRLITNFLFFGPVGFNFLFNMIFLYRYCRMLEEGSFRGRTADFVFMFLFGGFLMTQSDRMSKSKELLTQAFTIMLVYVWSRRNPYVRMNFFGLLNFQAPFLPWVLMGFSLLLGNSIIVDLLGIAVGHIYFFLEDVFPNQPGGIRIL

SEQ ID NO: 96294 - protein, 204 aa, Homo sapiens
SDTKSIRAFAKGFLAEEKHLHVLINNAGVMMCPYSKTADGFEMHIGVNHLGHFLLTHLLLEKLKESAPSRIVNVSSLAHHLGRIHFHNLQGEKFYNAGLAYCHSKLANILFTQELARRLKVQSELVRHSSFMRWMWWLFSFFIKTPQQGAQTSLHCALTEGLEILSGNHFSDCHVAWVSAQARNETIARRLWDVSCDLLGLPID

SEQ ID NO: 96295 - protein, 147 aa, Homo sapiens
MSRQSSVSFRSGGSRSFSTASAITPSVSRTSFTSVSRSGGGGGGGFGRVSLAGACGVGGYGFGGGAGSGFGFGGGAGGGFGLGGGAGFGGGFGGPGFPVCPPGGIQEVTVNQSLLTPLNLQIDPSIQRVRTEEREQIKTLNNKFASF

SEQ ID NO: 96296 - protein, 279 aa, Homo sapiens
RRNSEAAMLQELNFGAYLGLPAFLLPLNQEDNTNLARVLTNHIHTGHHSSMFWMRVPLVAPEDLRDDIIENAPTTHTEEYSGEEKTWMWWHNFRTLCDYTLEIGADLPSNHVIDRWLGEPIKAAILPTSIFLTNKKGFPVLSKMHQRLIFRLLKLEVQFIITGTNHHSEKEFCSYLQYLEYLSQNRPPPNAYELFAKGYEDYLQSPLQPLMDNLESQTYEVFEKDPIKYSQYQQAIYKCLLDRVPEEEKDTNVQVLMVLGAGRGPLVNASLRAAKQADR

SEQ ID NO: 96297 - protein, 40 aa, Homo sapiens
MDDLKYGVYPLKEASGCPGAERNLLVYSYFEKARSGGSHL

SEQ ID NO: 96298 - protein, 72 aa, Homo sapiens
  MOD_RES (1)..(1): Any amino acid
XHLSPGSKGQEDSEDMDSLLLHHRSMESANILLYEVGGNINEHRLDPDAYLLDLYRANPHVQCSVGVVLPAS

SEQ ID NO: 96299 - protein, 214 aa, Homo sapiens
MDPTISTLDTELTPINGTEETLCYKQTLSLTVLTCIVSLVGLTGNAVVLWLLGCRMRRNAFSIYILNLAAADFLFLSGRLIYSLLSFISIPHTISKILYPVMMFSYFAGLSFLSAVSTERCLSVLWPIWYRCHRPTHLSAVVCVLLWALSLLRSILEWMLCGFLFSGADSAWCQTSDFITVAWLIFLCVVLCGSSLVLLIRILCGSRKIPLTRL

SEQ ID NO: 96300 - protein, 155 aa, Homo sapiens
MFSYCRRKKKDLDVPEMPSIPNPFPELCCSPFTSVLSADLFPKANSRKKQVIKVYSEDETSRALDVPSDITARDVCQLLILKNHYIDDHSWTLFEHLPHIGVERTIEDHELVIEVLSNWGIEEENKLYFRKNYAKYEFFKNPMYFFPEHMVSFAT

SEQ ID NO: 96301 - protein, 190 aa, Homo sapiens
MNPQIRNPMEAMYPHIFYFHFKNLLKACGRNESWLCFTMEVTKHHSAVFRKRGVFRNQVDPETHCHAERCFLSWFCDDILSPNTNYEVTWYTSWSPCPECAGEVAEFLARHSNVNLTIFTARLCYFWDTDYQEGLCSLSQEGASVKIMGYKDFVSCWKNFVYSDDEPFKPWKGLQTNFRLLKRRLREILQ

SEQ ID NO: 96302 - protein, 61 aa, Homo sapiens
PPPQIYDKQLDEREHTIEEWKELIYKEVMNSEEKTKNGVVKGQPSPSVDVATAHSGSMLLL

SEQ ID NO: 96303 - protein, 173 aa, Homo sapiens
MRDAGDPSPPNKMLRRSDSPENKYSDSTGHSKAKNVHTHRVRERDGGTSYSPQENSHNHSALHSSNSHSSNPSNNPSKTSDAPYDSADDWSEHISSSGKKYYYNCRTEVSQWEKPKEWLEREQRQKEANKMAVNSFPKDRDYRREVMQATATSGFASGMEDKHSSDASSLLPQ

SEQ ID NO: 96304 - protein, 456 aa, Homo sapiens
  MOD_RES (1)..(1): Any amino acid
XSKHGWRDTDLFSQPTYCCVCAQHILQGAFCDCCGLRVDEGCLRKADKRFQCKEIMLKNDTKVLDAMPHHWIRGNVPLCSYCMVCKQQCGCQPKLCDYRCIWCQKTVHDECMKNSLKNEKCDFGEFKNLIIPPSYLTSINQMRKDKKTDYEVLASKLGKQWTPLIILANSRSGTNMGEGLLGEFRILLNPVQVFDVTKTPPIKALQLCTLLPYYSARVLVCGGDGTVGWVLDAVDDMKIKGQEKYIPQVAVLPLGTGNDLSNTLGWGTGYAGEIPVAQVLRNVMEADGIKLDRWKVQVTNKGYYNLRKPKEFTMNNYFSVGPDALMALNFHAHREKAPSLFSSRILNKAVYLFYGTKDCLVQECKDLNKKVELELDGERVALPSLEGIIVLNIGYWGGGCRLWEGMGDETYPLARHDDGLLEVVGVYGSFHCAQIQVKLANPFRIGQAHTVRVGEI

SEQ ID NO: 96305 - protein, 122 aa, Homo sapiens
MWLAREGIVAPLPGEWKPCQDITGDIYYFNFANGQSMWDHPCDEHYRSLVIQERAKLSTSGAIKKKKKKKEKKDKKDRDPPKSSLALGSSLAPVHVPLGGLAPLRGLVDTPPSALRGSQSVS

SEQ ID NO: 96306 - protein, 7 aa, Homo sapiens
MGRKDAA

SEQ ID NO: 96307 - protein, 40 aa, Homo sapiens
MDDIFTQCREGNAVAVRLWLDNTENDLNQGYCSTRQTSMQ

SEQ ID NO: 96308 - protein, 89 aa, Homo sapiens
DVPNHGFRVGMKLEAVDLMEPRLICVATVTRIIHRLLRIHFDGWEEEYDQWVDCESPDLYPVGWCQLTGYQLQPPASQCKLVYRKGVLL

SEQ ID NO: 96309 - protein, 84 aa, Homo sapiens
MRTLFNLLWLALACSPVHTTLSKSDAKKAASKTLLEKAGAQWRDLGSPQPLPPRFKRFSCFSLPSSWDYRVSFQISRCKTGVWW

SEQ ID NO: 96310 - protein, 75 aa, Homo sapiens
MARYEEVSVSGFEEFHRAVEQHNGKTIFAYFTGSKDAGGKSWCPDCVQAEPVVREGLKHISEGCVFIYCQVGEKP

SEQ ID NO: 96311 - protein, 120 aa, Homo sapiens
MLGLRPPLLALVGLLSLGCVLSQECTKFKVSSCRECIESGPGCTWCQKLNFTGPGDPDSIRCDTRPQLLMRGCAADDIMDPTSLAETQEDHNGGQKQLSPQKVTLYLRPGQAAAFNVTFR

SEQ ID NO: 96312 - protein, 200 aa, Homo sapiens
MEDFNMESDSFEDFWKGEDLSNYSYSSTLPPFLLDAAPCEPESLEINKYFVVIIYALVFLLSLLGNSLVMLVILYSRVGRSVTDVYLLNLALADLLFALTLPIWAASKVNGWIFGTFLCKVVSLLKEVNFYSGILLLACISVDRYLAIVHATRTLTQKRYLVKFICLSIWGLSLLLALPVLLFRRTVYSSNVSPACYEDM

SEQ ID NO: 96313 - protein, 375 aa, Homo sapiens
MNPAAEAEFNILLATDSYKVTHYKQYPPNTSKVYSYFECREKKTENSKLRKVKYEETVFYGLQYILNKYLKGKVVTKEKIQEAKDVYKEHFQDDVFNEKGWNYILEKYDGHLPIEIKAVPEGFVIPRGNVLFTVENTDPECYWLTNWIETILVQSWYPITVATNSREQKKILAKYLLETSGNLDGLEYKLHDFGYRGVSSQETAGIGASAHLVNFKGTDTVAGLALIKKYYGTKDPVPGYSVPAAEHSTITAWGKDHEKDAFEHIVTQFSSVPVSVVSDSYDIYNACEKIWGEDLRHLIVSRSTQAPLIIRPDSGNPLDTVLKVLEILGKKFPVTENSKGYKLLPPYLRVIQGDGVDINTLQEALPQSPQNLQQP

SEQ ID NO: 96314 - protein, 144 aa, Homo sapiens
MSLWGLVSKMPPEKVQRLYVDFPQHLRHLLGDWLESQPWEFLVGSDAFCCNLASALLSDTVQHLQASVGEQGEGSTILQHISTLESIYQRDPLKLVATFRQILQGEKKAVMEQFRHLPMPFHWKQEELKFKTGLRRLQHRVGEI

SEQ ID NO: 96315 - protein, 414 aa, Homo sapiens
MSTKQITCRYFMHGVCREGSQCLFSHDLANSKPSTICKYYQKGYCAYGTRYDHTRPSAAAGGAVGTMAHSVPSPAFHSPHPPSEVTASIVKTNSHEPGKREKRTLVLRDRNLSGMAERKTQPSMVSNPGSCSDPQPSPEMKPHSYLDAIRSGLDDVEASSSYSNEQQLCPYAAAGECRFGDACVYLHGEVCEICRLQVLHPFDPEQRKAHEKICMLTFEHEMEKAFAFQASQDKVCSICMEVILEKASASERRFGILSNCNHTYCLSCIRQWRCAKQFENPIIKSCPECRVISEFVIPSVYWVEDQNKKNELIEAFKQGMGKKACKYFEQGKGTCPFGSKCLYRHAYPDGRLAEPEKPRKQLSSQGTVRFFNSVRLWDFIENRESRHVPNNEDVDMTELGDLFMHLSGVESSEP

SEQ ID NO: 96316 - protein, 239 aa, Homo sapiens
MPHIDNDVKLDFKDVLLRPKRSTLKSRSEVDLTRSFSFRNSKQTYSGVPIIAANMDTVGTFEMAKVLCKVPGSFWDVPQMGCVFLIYKLFTLKWKMLLLSVLLPASILVAEKFSLFTAVHKHYSLVQWQEFAGQNPDCLEHLAASSGTGSSDFEQLEQILEAIPQVKYICLDVANGYSEHFVEFVKDVRKRFPQHTIMAGNVVTGEMVEELILSGADIIKVGIGPGSVCTTRKKTGVGY

SEQ ID NO: 96317 - protein, 137 aa, Homo sapiens
MSVTDQAFVTLATNDIYCQGALVLGQSLRRHRLTRKLVVLITPQVSSLLRVILSKVFDEVIEVNLIDSADYIHLAFLKRPELGLTLTKLHCWTLTHYSKCVFLDADTLVLSNVDELFDRGEFSAAPDPGWPDCFNSG

SEQ ID NO: 96318 - protein, 744 aa, Homo sapiens
MYAFYSLLIYIFYSLFRRDGGAAAAAEPGDPAQRARKPRGRRRPDLPAPELWTELTGLAASSEPEDGSEGAAEGRAAAVSLEEALLRLAEFLSVQLGAEESCGGPADLGQSGEVPSLLTVTSQLLALLAWLRSPRGRQALLQGTQPAPRVRPPSPDGSTSQEESPSHFTAVPGEPLGDETQGQQPLQLEEDQRAWQRLEQLILGQLEELKQQLEQQEEELGRLRLGVGATDSEKRVQHLTLENEALKQSLSLMRDLLLHWGPGPPIRAPQEEAEALLELQGRLQEAQDTTEALRAQLQQETEQNCRRELQQMHGQLAGLRARMASLRQGCGDLRGLVSTFTQSCQGSLSEARGQVSWALGALSSGGPGTQLPEGQQGPPAGCPGRLPELKGNIRVLCRLRPGTSSSLVSVEPGPGGTVTTCYRGRHRRFRLDWVFPPDASQEEVFRELEPAVLSCLRGYSVCIFTYGQTGTGKTYSMEGPPEDPGIVPRALQSLFREMGAGRQHRVTLSMVEIYNEAVRDLLAPGPPERLAVRQGPEGQGGIQVAGLTHWDVPNLETLHQMLKLGRSNRATAATAMNQRSSRSHALVTLTLRAASPPRAPGTAGTLHLVDLAGSERARKAGAAGPPRGDPDGARRLREAQTINRSLLALGGVMAALRAHRPHVPFRDSQLTRLLQPALGPGTTAVLLLQISTRPEDLGETVCSLKFADRVGQVELGPARRRRVPRSSGTPSSLSTDTPLTGTPC

SEQ ID NO: 96319 - protein, 94 aa, Homo sapiens
MILSIIFCVIALLVFVFQLFTMEKGNRFFLSGATTLVCCEYLMGRLQFTLLSPSYHGCFWQLEQISTWFSETSLCNFLLWLFVLLWRTLDCCLG

SEQ ID NO: 96320 - protein, 146 aa, Homo sapiens
MSDQEAKPSTEDLGDKKEGEYIKLKVIGQDSSEIHFKVKMTTHLKKLKESYCQRQGVPMNSLRFLFEGQRIADNHTPKEAQWPTPAILALWEAEAGWITAGQELRPAWATWRNLISTKNRKSSQLGMEEEDVIEVYQEQTGGHSTV

SEQ ID NO: 96321 - protein, 46 aa, Homo sapiens
  MOD_RES (1)..(1): Any amino acid
XLMPASLRQELEDTISSLKSQVNFLQKRASILQEELTTYQGRRYSP

SEQ ID NO: 96322 - protein, 945 aa, Homo sapiens
MVPWVRTMGQKLKQRLRLDVGREICRQYPLFCFLLLCLSAASLLLNRYIHILMIFWSFVAGVVTFYCSLGPDSLLPNIFFTIKYKPKLGLQELFPQGHSCAVCGKVKCKRHRPSLLLENYQPWLDLKISSKVDASLSEVLELVLENFVYPWYRDVTDDESFVDELRITLRFFASVLIRRIHKVDIPSIITKKLLKAAMKHIEVIVKARQKVKNTEFLQQAALEEYGPELHVALRSRRDELHYLRKLTELLFPYILPPKATDCRSLTLLIREILSGSVFLPSLDFLADPDTVNHLLIIFIDDSPPEKATEPASPLVPFLQKFAEPRNKKPSVLKLELKQIREQQDLLFRFMNFLKQEGAVHVLQFCLTVEEFNDRILRPELSNDEMLSLHEELQKIYKTYCLDESIDKIRFDPFIVEEIQRIAEGPYIDVVKLQTMRCLFEAYEHVLSLLENVFTPMFCHSDEYFRQLLRGAESPTRNSKLNRGSLSLDDFRNTQKRGESFGISRIGSKIKGVFKSTTMEGAMLPNYGVAEGEDDFIEEGIVVMEDDSPVEAVSTPNTPRNLAAWKISIPYVDFFEDPSSERKEKKERIPVFCIDVERNDRRAVGHEPEHWSVYRRYLEFYVLESKLTEFHGAFPDAQLPSKRIIGPKNYEFLKSKREEFQEYLQKLLQHPELSNSQLLADFLSPNGGETQFLDKILPDVNLGKIIKSVPGKLMKEKGQHLEPFIMNFINSCESPKPKPSRPELTILSPTSENNKKLFNDLFKNNANRAENTERKQNQNYFMEVMTVEGVYDYLMYVGRVVFQVPDWLHHLLMGTRILFKNTLEMYTDYYLQCKLEQLFQEHRLVSLITLLRDAIFCENTEPRSLQDKQKGAKQTFEEMMNYIPDLLVKCIGEETKYESIRLLFDGLQQPVLNKQLTYVLLDIVIQELFPELNKVQKEVTSVTSWM

SEQ ID NO: 96323 - protein, 754 aa, Homo sapiens
MAFASWWYKTHVSEKTSESPSKPGEKKGSDEKKAASLGSSQSSRTYAGGTASATKVSASSGATSKSSSMNPTETKAVKTEPEKKSQSTKLSVVHEKKSQEGKPKEHTEPKSLPKQASDTGSNDAHNKKAVSRSAEQQPSEKSTEPKTKPQDMISAGGESVAGITAISGKPGDKKKEKKSLTPAVPVESKPDKPSGKSGMDAALDDLIDTLGGPEETEEENTTYTGPEVSDPMSSTYIEELGKREVTIPPKYRELLAKKEGITGPPADSSKPIGPDDAIDALSSDFTCGSPTAAGKKTEKEESTEVLKAQSAGTVRSAAPPQEKKRKVEKDTMSDQALEALSASLGTRQAEPELDLRSIKEVDEAKAKEEKLEKCGEDDETIPSEYRLKPATDKDGKPLLPEPEEKPKPRSESELIDELSEDFDRSECKEKPSKPTEKTEESKAAAPAPVSEAVCRTSMCSIQSAPPEPATLKGTVPDDAVEALADSLGKKEADPEDGKPVMDKVKEKAKEEDREKLGEKEETIPPDYRLEEVKDKDGKPLLPKESKEQLPPMSEDFLLDALSEDFSGPQNASSLKFEDAKLAAAISEVVSQTPASTTQAGAPPRDTSQSDKDLDDALDKLSDSLGQRQPDPDENKPMEDKVKEKAKAEHRDKLGERDDTIPPEYRHLLDDNGQDKPVKPPTKKSEDSKKPADDQDPIDALSGDLDSCPSTTETSQNTAKDKCKKAASSSKAPKNGGKAKDSAKTTEETSKPKDD

SEQ ID NO: 96324 - protein, 75 aa, Homo sapiens
MVRISKPKTFQAYLDDCHRRYSCAHCRAHLANHDDLISKSFQGSQGRAYLFNSVNRPLRAARSTKRGSTSLNSTT

SEQ ID NO: 96325 - protein, 120 aa, Homo sapiens
MRLTRKRLCSFLIALYCLFSLYAAYHVFFGRRRQAPAGSPRGLRKGAAPARERRGREQSTLESEEWNPWEGDEKNEQQHRFKTSLQILDKSTKGKTDLSVQIWGKAAIVQAGSVSAHKTF

SEQ ID NO: 96326 - protein, 169 aa, Homo sapiens
  MOD_RES (1)..(1): Any amino acid
XSNNFMGCLKEVVYKNNDVRLELSRLAKQGDPKMKIHGVVAFKCENVATLDPITFETPESFISLPKWNAKKTGSISFDFRTTEPNGLILFSHGKPRHQKDAKHPQMIKVDFFAIEMLDGHLYLLLDMGSGTIKIKALLKKVNDGEWYHVDFQRDGRSGQMAGDHTRLEF

SEQ ID NO: 96327 - protein, 72 aa, Homo sapiens
EKVFRISSQLIEHQRIHTGEKPYACKECGKAFGVCRELARHQRIHTGYTNQDPNEENSFKYLIKLLTQAMRT

SEQ ID NO: 96328 - protein, 172 aa, Homo sapiens
YTDIIQGKLDQRNQLLEVDFCIGRDIRKKDINNIVKTLHEWCDGCEAVLLGIEQQVLRANQYKENHNRTQQQVEAEVTNIKKTLKATASSSAQEMEQQLAERECPPHAEQRQPTKKMSKVKGPSCPLELPANACSPKIFNSSWLHLGRDGGIDAPLSAEGPVAASVFSPLLG

SEQ ID NO: 96329 - protein, 167 aa, Homo sapiens
  MOD_RES (1)..(1): Any amino acid
XDRHLRTLQISYDALKDENSKLRRKLNEVQSFSEAQTEMVRTLERKLEAKMIKEESDYHDLESVVQQKRAVKAENHVVKLKQEISLLQAQVSNFQRENEALRCGQGASLTVVKQNADVALQNLRVVMNSAQASIKQLVSGAETLNLVAEILKSIDRISEVKDEEEDS

SEQ ID NO: 96330 - protein, 149 aa, Homo sapiens
  MOD_RES (1)..(1): Any amino acid
XNGHVSNKVTKDPGVGMDRDSHLLYSKLHLSVLQVLMTLQLHLTEKNLYGRLGLILFDHMVPLVEEINRLADELNPLNASQEIELSLDRLAQALQVAMASGALLCTRDDLRTLCSRLPHNKTLNFGVVCKASFLGLLLGIQVGRGHSRL

SEQ ID NO: 96331 - protein, 373 aa, Homo sapiens
MTSKGPEEEHPSVTLFRQYLRIRTVQPKPDYGAAVAFFEETARQLGLGCQKVEEHWSHDPFEAFKDSEGYIYARGAQDMKCVSIQYLEAVRRLKVEGHRFPRTIHMTFVPDEEVGGHQGMELFVQRPEFHALRAGFALDEGIANPTDAFTVFYSERSPWWVRVTSTGRPGHASRFMEDTAAEKLHKVVNSILAFREKEWQRLQSNPHLKEGSVTSVNLTKLEGGVAYNVIPATMSASFDFRVAPDVDFKAFEEQLQSWCQAAGEGVTLEFAQKWMHPQVTPTDDSNPWWAAFSRVCKDMNLTLEPEIMPAATDNRYIRAVGVPALGFSPMNRTPVLLHDHDERLHEAVFLRGVDIYTRLLPALASVPALPSDS

SEQ ID NO: 96332 - protein, 218 aa, Homo sapiens
METLESELTCPICLELFEDPLLLPCAHSLCFSCAHRILVSSCSSGESIEPITAFQCPTCRYVISLNHRGLDGLKRNVTLQNIIDRFQKASVSGPNSPSESRRERTYRPTTAMSSERIACQFCEQDPPRDAVKTCITCEVSYCDRCLRATHPNKKPFTSHRLVEPVPDTHLRGITCLDHENEKVNMYCVSDDQLICALCKLVGRHRDHQVASLNDRFEK

SEQ ID NO: 96333 - protein, 408 aa, Homo sapiens
DPASGAALGMVADCGVREARAAVRAAYEAFCRWREVSAKERSSLLRKWYNLMIQNKDDLARIITAESGKPLKEAHGEILYSAFFLEWFSEEARRVYGDIIHTPAKDRRALVLKQPIGVAAVITPWNFPSAMITRKVGAALAAGCTVVVKPAEDTPFSALALAEILLHHAANSVKRVSMELGGLAPFIVFDSANVDQAVAGAMASKFRNTGQTCVCSNQFLVQRGIHDAFVKAFAEAMKKNLRVGNGFEEGTTQGPLINEKAVEKVEKQVNDAVSKGATVVTGGKRHQLGKNFFEPTLLCNVTQDMLCTHEETFGPLAPVIKFDTEEEAIAIANAADVGLAGYFYSQDPAQIWRVAEQLEVGMVGVNEGLISSVECPFGGVKQSGLGREGSKYGIDEYLELKYVCYGGL

SEQ ID NO: 96334 - protein, 1113 aa, Homo sapiens
MSVKSPFNVMSRNNLEAPPCKMTEPFNFEKNENKLPPHESLRSPGTLPNHPNFRLKSSENGNKKNNFLLCEQTKQYLASQEDNSVSSNPNGINGEVVGSKGDRKKLPAGNSVSPPSAESNSPPKEVNIKPGNNVRPAKSKKLNKLVENSLSISNPGLFTSLGPPLRSTTCHRCGLFGSLRCSQCKQTYYCSTACQRRDWSAHSIVCRPVQPNFHKLENKSSIETKDVEVNNKSDCPLGVTKEIAIWAERIMFSDLRSLQLKKTMEIKGTVTEFKHPGDFYVQLYSSEVLEYMNQLSASLKETYANVHEKDYIPVKGEVCIAKYTVDQTWNRAIIQNVDVQQKKAHVLYIDYGNEEIIPLNRIYHLNRNIDLFPPCAIKCFVANVIPAEGNWSSDCIKATKPLLMEQYCSIKIVDILEEEVVTFAVEVELPNSGKLLDHVLIEMGYGLKPSGQDSKKENADQSDPEDVGKMTTENNIVVDKSDLIPKVLTLNVGDEFCGVVAHIQTPEDFFCQQLQSGRKLAELQASLSKYCDQLPPRSDFYPAIGDICCAQFSEDDQWYRASVLAYASEESVLVGYVDYGNFEILSLMRLCPIIPKLLELPMQAIKCVLAGVKPSLGIWTPEAICLMKKLVQNKIITVKVVDKLENSSLVELIDKSETPHVSVSKVLLDAGFAVGEQSMVTDKPSDVKETSVPLGVEGKVNPLEWTWVELGVDQTVDVVVCVIYSPGEFYCHVLKEDALKKLNDLNKSLAEHCQQKLPNGFKAEIGQPCCAFFAGDGSWYRALVKEILPNGHVKVHFVDYGNIEEVTADELRMISSTFLNLPFQGIRCQLADIQSRNKHWSEEAITRFQMCVAGIKLQARVVEVTENGIGVELTDLSTCYPRIISDVLIDEHLVLKSASPHKDLPNDRLVNKHELQVHVQGLQATSSAEQWKTIELPVDKTIQANVLEIISPNLFYALPKGMPENQEKLCMLTAELLEYCNAPKSRPPYRPRIGDACCAKYTSDDFWYRAVVLGTSDTDVEVLYADYGNIETLPLCRVQPITSSHLALPFQIIRCSLEEKMYRMNCCCTELQKQVEKHEHILLFLLNNSTNQNKFIEMKKLLKKTASLGGKPL

SEQ ID NO: 96335 - protein, 91 aa, Homo sapiens
MSRIPLGKVLLRNVIRHTDAHNKIQEESDMWKIRELEKQMEDAYRGTKRKMLPSSSSRMRSDGFDEESQRYYWRPKNEISGTLEDDFLKAK

SEQ ID NO: 96336 - protein, 114 aa, Homo sapiens
MMAAVPPGLEPWNRVRIPKAGNRSAVTVQNPGAALDLCIAAVIKECHLVILSLKSQTLDAETDVLCAVLYSNHNRMGRHKPHLALKQVEQCLKRLKNMNLEGSIQDLFELFSSK

SEQ ID NO: 96337 - protein, 350 aa, Homo sapiens
MVSKSRWKLLAMLALVLVVMVWYSISREDSFYFPIPEKKEPCLQGEAESKASKLFGNYSRDQPIFLRLEDYFWVKTPSAYELPYGTKGSEDLLLRVLAITSSSIPKNIQSLRCRRCVVVGNGHRLRNSSLGDAINKYDVVIRLNNAPVAGYEGDVGSKTTMRLFYPESAHFDPKVENNPDTLLVLVAFKAMDFHWIETILSDKKRVRKGFWKQPPLIWDVNPKQIRILNPFFMEIAADKLLSLPMQQPRKIKQTPTTRSRPFTTMSRSRSSPWRGQAIMSPKRPWPLSGCWRWELSRTSRPSDLGKSCSLSVAYSAVWVTPMRGCGGGWCQYDPLGLTPSWGGSSGPGQV

SEQ ID NO: 96338 - protein, 71 aa, Homo sapiens
MDLVAFEDVAVNFTQEEWSLLDPSQKNLYREVMQETLRNLASIEVFWERELMKIQKKIIVEKLLARFQMTH

SEQ ID NO: 96339 - protein, 151 aa, Homo sapiens
MVMGLLSNNNQALRRFMQTFVLAPEGSVANKFYVHNDIFRYQDEVFGGFVTEPQEESEEEVEEPEERQQTPEVVPDDSGTFYDQAVVSNDMEEHLEEPVAEPEPDPEPEPEQEPVSEIQEEKPEPVLEETAPEDAQKSSSPAPADIAQTVQ

SEQ ID NO: 96340 - protein, 153 aa, Homo sapiens
MALTVDVAGPAPWGFRITGGRDFHTPIMVTKVAERGKAKDADLRPGDIIVAINGESAEGMLHAEAQSKIRQSPSPLRLQLDRSQATSPGQTNGDSSLEVLATRFQGSVRTYTESQSSLRSSYSSPTSLSPRAGSPFSPPPSSSSLTGEAAISR

SEQ ID NO: 96341 - protein, 264 aa, Homo sapiens
MLRLFETFLETAPQLTLVLAIMLQSGRAEYYQWVGICTSFLGISWALLDYHRALRTCLPSKPLLGLGSSVIYFLWNLLLLWPRVLAVALFSALFPSYVALHFLGLWLVLLLWVWLQGTDFMPDPSSEWLYRVTVATILYFSWFNVAEGRTRGRAIIHFAFLLSDSILLVATWVTHSSWLPSGIPLQLWLPVGCGCFFLGLALRLVYYHWLHPSCCWKPDPDQVDGARSLLSPEGYQLPQNRRMTHLAQKFFPKAKDEAASPVKG

SEQ ID NO: 96342 - protein, 212 aa, Homo sapiens
MSDILRELLCVSEKAANIARACRQQEALFQLLIEEKKEGEKNKKFAVDFKTLADVLVQEVIKQNMENKFPGLEKNIFGEESNEFTNDWGEKITLRLCSTEEETAELLSKVLNGNKVASEALARVVHQDVAFTDPTLDSTEINVPQDILGIWVDPIDSTYQYIKGSADIKSNQGIFPCGLQCVTILIGVYDIQTGVPLMGVINQPFVSRDPNT

SEQ ID NO: 96343 - protein, 105 aa, Homo sapiens
  MOD_RES (1)..(1): Any amino acid
XKHEVEVSTLLKEITTRKINFDHSLIRQSRSSRKAVLCVVMESIRTTRQCSLSVHAGIRGEAMRFHFMDEQNPKGRDKAIVFPAHTTIAFSVFELFIYLDGAFGL

SEQ ID NO: 96344 - protein, 1699 aa, Homo sapiens
MAGASVKVAVRVRPFNSREMSRDSKCIIQMSGSTTTIVNPKQPKETPKSFSFDYSYWSHTSPEDINYASQKQVYRDIGEEMLQHAFEGYNVCIFAYGQTGAGKSYTMMGKQEKDQQGIIPQLCEDLFSRINDTTNDNMSYSVEVSYMEIYCERVRDLLNPKNKGNLRVREHPLLGPYVEDLSKLAVTSYNDIQDLMDSGNKARTVAATNMNETSSRSHAVFNIIFTQKRHDAETNITTEKVSKISLVDLAGSERADSTGAKGTRLKEGANINKSLTTLGKVISALAEMDSGPNKNKKKKKTDFIPYRDSVLTWLLRENLGGNSRTAMVAALSPADINYDETLSTLRYADRAKQIRCNAVINEDPNNKLIRELKDEVTRLRDLLYAQGLGDITDTNTVPGGPKLTNALVGMSPSSSLSALSSRAASVSSLHERILFAPGSEEAIERLKETEKIIAELNETWEEKLRRTEAIRMEREALLAEMGVAMREDGGTLGVFSPKKTPHLVNLNEDPLMSECLLYYIKDGITRVGREDGERRQDIVLSGHFIKEEHCVFRSDSRGGSEAVVTLEPCEGADTYVNGKKVTEPSILRSGNRIIMGKSHVFRFNHPEQARQERERTPCAETPAEPVDWAFAQRELLEKQGIDMKQEMEQRLQELEDQYRREREEATYLLEQQRLDYESKLEALQKQMDSRYYPEVNEEEEEPEDEVQWTERECELALWAFRKWKWYQFTSLRDLLWGNAIFLKEANAISVELKKKVQFQFVLLTDTLYSPLPPDLLPPEAAKDRETRPFPRTIVAVEVQDQKNGATHYWTLEKLRQRLDLMREMYDRAAEVPSSVIEDCDNVVTGGDPFYDRFPWFRLVGRAFVYLSNLLYPVPLVHRVAIVSEKGEVKGFLRVAVQAISADEEAPDYGSGVRQSGTAKISFDDQHFEKFQSESCPVVGMSRSGTSQEELRIVEGQGQGADVGPSADEVNNNTCSAVPPEGLLLDSSEKAALDGPLDAALDHLRLGNTFTFRVTVLQASSISAEYADIFCQFNFIHRHDEAFSTEPLKNTGRGPPLGFYHVQNIAVEVTKSFIEYIKSQPIVFEVFGHYQQHPFPPLCKDVLSPLRPSRRHFPRVMPLSKPVPATKLSTLTRPCPGPCHCKYDLLVYFEICELEANGDYIPAVVDHRGGMPCMGTFLLHQGIQRRITVTLLHETGSHIRWKEVRELVVGRIRNTPETDESLIDPNILSLNILSSGYIHPAQDDRTFYQFEAAWDSSMHNSLLLNRVTPYREKIYMTLSAYIEMENCTQPAVVTKDFCMVFYSRDAKLPASRSIRNLFGSGSLRASESNRVTGVYELSLCHVADAGSPGMQRRRRRVLDTSVAYVRGEENLAGWRPRSDSLILDHQWELEKLSLLQEVEKTRHYLLLREKLETAQRPVPEALSPAFSEDSESHGSSSASSPLSAEGRPSPLEAPNERQRELAVKCLRLLTHTFNREYTHSHVCVSASESKLSEMSVTLLRDPSMSPLGVATLTPSSTCPSLVEGRYGATDLRTPQPCSRPASPEPELLPEADSKKLPSPARATETDKEPQRLLVPDIQEIRVSPIVSKKGYLHFLEPHTSGWARRFVVVRRPYAYMYNSDKDTVERFVLNLATAQVEYSEDQQAMLKTPNTFAVCTEHRGILLQAASDKDMHDWLYAFNPLLAGTIRSKLSRRRSAQMRV

SEQ ID NO: 96345 - protein, 195 aa, Homo sapiens
MEWFTVIEHYHRTSATITELVIGNEYYFRVFSENMCGLSEDATMTKESAVIARDGKIYKNPVYEDFDFSEAPMFTQPLVNTYAIAGYNATLNCSVRGNPKPKITWMKNKVAIVDDPRYRMFSNQGVCTLEIRKPSPYDGGTYCCKAVNDLGTVEIECKLEVKGGLSFCRLLLQGVPPNIIDSYLRDLHSSNPEEY

SEQ ID NO: 96346 - protein, 79 aa, Homo sapiens
MADPRVRQIKIKTGVVKRLVKEKVMYEKEAKQQEEKIEKMRAEDGENYDIKKQENEKDLEEAEEYKEARLVLDSVKLEA

SEQ ID NO: 96347 - protein, 435 aa, Homo sapiens
MNDISQKAEILLSSSKPVPKTYVPKLGKGDVKDKFEAMQRAREERNQRRSRDEKQRRKEQYIREREWNRRKQEIKEMLASDDEEDVSSKVEKAYVPKLTGTVKGRFAEMEKQRQEEQRKRTEEERKRRIEQDMLEKRKIQRELAKRAEQEGDDSLLITVVPVKSYKTSGKMKKNFEDLEKEREEKERIKYEEDKRIRYEEQRPSLKEAKCLSLVMDDEIESEAKKESLSPGKLKLTFEELERQRQENRKKQAEEEARKRLEEEKRAFEEARRQMVNEDEENQDTAKIFKGYRPGKLKLSFEEMERQRREDEKRKAEEEARRRIEEEKKAFAEARRNMVVDDDSPEMYKTISQEFLTPGKLEINFEELLKQKMEEEKRRTEEERKHKLEMEKQEFEQLRQEMGEEEEENETFGLSREYEELIKLKRSGSIQAKNLK

SEQ ID NO: 96348 - protein, 144 aa, Homo sapiens
MAEPLKEEDGEDGSAEPPGPVKAEPAHTAASVAAKNLALLKARSFDVTFDVGDEYEIIETIGNGAYGVVSSARRRLTGQQVAIKKIPNAFDVVTNAKRTLRELKILKHFKHDNIIAIKDILRPTVPYGEFKSVPYGVPGYVVLD

SEQ ID NO: 96349 - protein, 170 aa, Homo sapiens
MEEMSGESVVSSAVPAAATRTTSFKGTSPSSKYVKLNVGGALYYTTMQTLTKQDTMLKAMFSGRMEVLTDSEGWILIDRCGKHFGTILNYLRDGAVPLPESRREIEELLAEAKYYLVQGLVEECQAALQPAVKLLYNRSNNKYSYTSNSDDNMLKNIELFDKLSLRFNGR

SEQ ID NO: 96350 - protein, 35 aa, Homo sapiens
MAEFRFLKSGALPILSLLCLQALKFSLGCSRGSSE

SEQ ID NO: 96351 - protein, 76 aa, Homo sapiens
MRITAAILTARSRWRLRNSISAFLFTVTFAWCPPGLSNLTILSCPDWESHINTKWSAPQQNFLQGKTSSVVEMGWV

SEQ ID NO: 96352 - protein, 552 aa, Homo sapiens
MWTDGRYFLQAAKQMDSNWTLMKMGLKDTPTQEDWLVSVLPEGSRVGVDPLIIPTDYWKKMAKVLRSAGHHLIPVKENLVDKIWTDRPERPCKPLLTLGLDYTGISWKDKVADLRLKMAERNVMWFVVTALDEIAWLFNLRGSDVEHNPVFFSYAIIGLETIMLFIDGDRIDAPSVKEHLLLDLGLEAEYRIQVHPYKSILSELKALCADLSPREKVWVSDKASYAVSETIPKDHRCCMPYTPICIAKAVKNSAESEGMRRAHIKDAVALCELFNWLEKEVPKGGVTEISAADKAEEFRRQQADFVDLSFPTISSTGPNGAIIHYAPVPETNRTLSLDEVYLIDSGAQYKDGTTDVTRTMHFGTPTAYEKECFTYVLKGHIAVSAAVFPTGTKGHLLDSFARSALWDSGLDYLHGTGHGVGSFLNVHEGPCGISYKTFSDEPLEAGMIVTDEPGYYEDGAFGIRIENVVLVVPVKTKYNFNNRGSLTFEPLTLVPIQTKMIDVDSLTDKECDWLNNYHLTCRDVIGKELQKQGRQEALEWLIRETQPISKQH

SEQ ID NO: 96353 - protein, 66 aa, Homo sapiens
MLRWLIGGGREPQGLAEKSPLQTIGEEQTQNPYTELLVLKAHHDIVRFLVQLDDYSLSSTCCFLTF

SEQ ID NO: 96354 - protein, 85 aa, Homo sapiens
MTHLLLTATVTPSEQNSSREPGWETAMAKDILGEAGLHFDELNKLRVLDPEVTQQTIELKEECKDFVDKIGQFQKIVGGLIELVD

SEQ ID NO: 96355 - protein, 325 aa, Homo sapiens
MAQFNKNQLIACRRNGTTTSDFNQTEVAEFFLMGFSNSWDIQIVHAALFFLVYLAAVIGNLLIIILTTLDVHLQTPMYFFLRNLSFLDFCYISVTIPKSIVSSLTHDTSISFFGCALQAFFFMDLATTEVAILTVMSYDRYMAICRPLHYEVIINQGVCLRMMAMSWLSGVICGFMHVIATFSLPFCGRNRIRQFFCNIPQLLSLLDPKVITIEIGVMVFGTSLVIISFVVITLSYMYIFSVIMRIPSKEGRSKTFSTCIPHLVVVTLFMISGSIAYVKPISNSPPVLDVFLSAFYTVVPPTLNPVIYSLRNRDMKAALRRQCGP

SEQ ID NO: 96356 - protein, 36 aa, Homo sapiens
MGNVLAASSPPAGPPPPPAPALVGLPPPPPSPPGFT

SEQ ID NO: 96357 - protein, 162 aa, Homo sapiens
MDPFVVLVLCLSCLLLLSIWRQSSGRGKLPPGPTPLPVIGNILQIDIKDVSKSLTNLSKIYGPVFTLYFGLERMVVLHGYEVVKEALIDLGEEFSGRGHFPLAERANRGFGIVFSNGKRWKEIRRFSLMTLRNFGMGKRSIEDRVQEEARCLVEELRKTKGG

SEQ ID NO: 96358 - protein, 56 aa, Homo sapiens
MELLSFEDVAMYFTREEWGHLNWGQKDLYRDVMLENYRNMVLLDAAISQQFLPSRL

SEQ ID NO: 96359 - protein, 76 aa, Homo sapiens
MDDDIHQLEDPSVFPAVIVEQVPYPDLLHLYSGLELDDVHNGIITDGTLCMTQDQILEGSFLLTDDNEATSHTMST

SEQ ID NO: 96360 - protein, 74 aa, Homo sapiens
MPSVRSLLRLLAAAAACGAFAFLGYCIYLNRKRRGDPAFKRRLRDKRRAEPQKAEEQGTQESTEWGFNTSAMPF

SEQ ID NO: 96361 - protein, 56 aa, Homo sapiens
MAEPDLECEQIRLKCIHRGWMTTGATLYSSRRAAGAHRVESRVLDSGVKYWDDAGV

SEQ ID NO: 96362 - protein, 38 aa, Homo sapiens
MAEGGFDPCECVCSHEHAMRRLINLYRDPLVIMASVLQ

SEQ ID NO: 96363 - protein, 92 aa, Homo sapiens
MAAAGLVAVAAAAEYSGTVASGGNLPGVHCGPSSGAGPGFGPGSWSRSLDRALEEAAVTGVLSLSGRKLREFPRGAANHDLTDTTRAGCELQ

SEQ ID NO: 96364 - protein, 38 aa, Homo sapiens
  MOD_RES (1)..(1): Any amino acid
XEIAEQEGNQKGEQATSLAILRVIRLACTPTPGFQNWM

SEQ ID NO: 96365 - protein, 104 aa, Homo sapiens
MMMVRRGLLAWISRVVVLLVLLCCAISVLYMLACTPKGDEEQLALPRANSPTGKEGYQAVLQEWEEQHRNYVSSLKRQIAQLKEELQERSEQLRNGQYQASDAA

SEQ ID NO: 96366 - protein, 68 aa, Homo sapiens
MTIMVEDIMKLLCSLSGERKMKAAVKHSGKGALVTGAMAFVGGLVGGPPGLAVGSSLRHRIALNRLLS

SEQ ID NO: 96367 - protein, 307 aa, Homo sapiens
MSGRRTRSGGAAQRSGPRAPSPTKPLRRSQRKSGSELPSILPEIWPKTPSAAAVRKPIVLKRIVAHAVEVPAVQSPRRSPRISFFLEKENEPPGRELTKEDLFKTHSVPATPTSTPVPNPEAESSSKEGELDARDLEMSKKVRRSYSRLETLGSASTSTPGRRSCFGFEGLLGAEDLSGVSPVVCSKLTEVPRVCAKPWAPDMTLPGISPPPEKQKRKKKKMPEILVSERQGFFSAVCSGRRAGLGLWLFWGIGSTCRVWVRCSSHHVPFSLTCSSFLFPQKTELDEWAAAMNAEFEAAEQFDLLVE

SEQ ID NO: 96368 - protein, 165 aa, Homo sapiens
MSWIKEGELSLWERFCANIIKAGPMPKHIAFIMDGNRRYAKKCQVERQEGHSQGFNKLAETLRWCLNLGILEVTVYAFSIENFKRSKSEVDGLMDLARQKFSRLMEEKEKLQKHGVCIRVLGDLHLLPLDLQELIAQAVQATKNYNKCFLNVCFAYTSRHEISNA

SEQ ID NO: 96369 - protein, 250 aa, Homo sapiens
  MOD_RES (1)..(1): Any amino acid
XYSIKLTEKLNMVTLHSDKESEEVCHLTSGVRLKNLSPPTSLKEISLIQLDSMRLSHQMLVRCAAIIGLTFTTELLFEILPCWNMKMMIKTLATLVESNIFYCFRNGKELQKALKQNDPSFEVHYRSLSLKPSEGMDHGEEEQLRELENEVIECHRIRFCNPMMQKTAYELWLKDQRKAMHLKCARFLEEDAHRCDHCRGRDFIPYHHFTVNIRLNALDMDAIKKMAMSHGFKRCMRLGDTASPYYILQV

SEQ ID NO: 96370 - protein, 78 aa, Homo sapiens
MIARQQCVRGGPRGFSCGSAIVGGGKRGAFSSVSMSGGAGRCSSGGFGSRSLYNLRGNKSISMSVAGSRQGAVLRATE

SEQ ID NO: 96371 - protein, 1251 aa, Homo sapiens
  MOD_RES (1)..(1): Any amino acid
XSLQVSPQEMVQEIHQVLMDREDTCHRTCFSLHLDGNVLDHFSELRSVEGLQEGSVLRVVEEPYTVREARIHVRHVRDLLKSLDPSDAFNGVDCNSLSFLSVFTDGDLGDSGKRKKGLEMDPIDCTPPEYILPGSRERPLCPLQPQNRDWKPLQCLKVLTMSGWNPPPGNRKMHGDLMYLFVITAEDRQVSITASTRGFYLNQSTAYHFNPKPASPRFLSHSLVELLNQISPTFKKNFAVLQKKRVQRHPFERIATPFQVYSWTAPQAEHAMDCVRAEDAYTSRLGYEEHIPGQTRDWNEELQTTRELPRKNLPERLLRERAIFKVHSDFTAAATRGAMAVIDGNVMAINPSEETKMQMFIWNNIFFSLGFDVRDHYKDFGGDVAAYVAPTNDLNGVRTYNAVDVEGLYTLGTVVVDYRGYRVTAQSIIPGILERDQEQSVIYGSIDFGKTVVSHPRYLELLERTSRPLKILRHQVLNDRDEEVELCSSVECKGIIGNDGRHYILDLLRTFPPDLNFLPVPGEELPEECARAGFPRAHRHKLCCLRQELVDAFVEHRYLLFMKLAALQLMQQNASQLETPSSLENGGPSSLESKSEDPPGQEAGSEEEGSSASGLAKVKELAETIAADDGTADPRSREVIRNACKAVGSISSTAFDIRFNPDIFSPGVRFPESCQDEVRDQKQLLKDAAAFLLSCQIPGLVKDCMEHAVLPVDGATLAEVMRQRGINMRYLGKVLELVLRSPARHQLDHVFKIGIGELITRSAKHIFKTYLQGVELSGLSAAISHFLNCFLSSYPNPVAHLPADELVSKKRNKRRKNRPPGAADNTAWAVMTPQELWKNICQEAKNYFDFDLECETVDQAVETYGLQKITLLREISLKTGIQVLLKEYSFDSRHKPAFTEEDVLNIFPVVKHVNPKASDAFHFFQSGQAKVQQGFLKEGCELINEALNLFNNVYGAMHVETCACLRLLARLHYIMGDYAEALSNQQKAVLMSERVMGTEHPNTIQEYMHLALYCFASSQLSTALSLLYRARYLMLLVFGEDHPEMALLDNNIGLVLHGVMEYDLSLRFLENALAVSTKYHGPKALKVALSHHLVARVYESKAEFRSALQHEKEGYTIYKTQLGEDHEKTKESSEYLKCLTQQAVALQRTMNEIYRNGSSANIPPLKFTAPSMASVLEQLNVINGILFIPLSQKDLENLKAEVARRHQLQEASRNRDRAEEPMATEPAPAGAPGDLGSQPPAAKDPSPSVQG

SEQ ID NO: 96372 - protein, 169 aa, Homo sapiens
MLLFVEQVASKGTGLNPNAKVWQEIAPGNTDATPVTHGTESSWHEIAATSGAHPEGNAELSEDICKEYEVMYSSSCETTRNTTGIEESTDGMILGPEDLSYQIYDVSESNSAVSTEDLKECLKKQLEFCFSRENLSKDLYLISQMDSDQFIPIWTVANMEEIKKLTTDP

SEQ ID NO: 96373 - protein, 1682 aa, Homo sapiens
MFRQFYLWTCLASGIILGSLFEICLGQYDDDWQYEDCKLARGGPPATIVAIDEESRNGTILVDNMLIKGTAGGPDPTIELSLKDNVDYWVLMDPVKQMLFLNSTGRVLDRDPPMNIHSIVVQVQCINKKVGTIIYHEVRIVVRDRNDNSPTFKHESYYATVNELTPVGTTIFTGFSGDNGATDIDDGPNGQIEYVIQYNPDDPTSNDTFEIPLMLTGNIVLRKRLNYEDKTRYFVIIQANDRAQNLNERRTTTTTLTVDVLDGDDLGPMFLPCVLVPNTRDCRPLTYQAAIPELRTPEELNPIIVTPPIQAIDQDRNIQPPSDRPGILYSILVGTPEDYPRFFHMHPRTAELSLLEPVNRDFHQKFDLVIKAEQDNGHPLPAFAGLHIEILDENNQSPYFTMPSYQGYILESAPVGATISDSLNLTSPLRIVALDKDIEDTKDPELHLFLNDYTSVFTVTQTGITRYLTLLQPVDREEQQTYTFSITAFDGVQESEPVIVNIQVMDANDNTPTFPEISYDVYVYTDMRPGDSVIQLTAVDADEGSNGEITYEILVGAQGDFIINKTTGLITIAPGVEMIVGRTYALTVQAADNAPPAERRNSICTVYIEVLPPNNQSPPRFPQLMYSLEISEAMRVGAVLLNLQATDREGDSITYAIENGDPQRVFNLSETTGILTLGKALDRESTDRYILIITASDGRPDGTSTATVNIVVTDVNDNAPVFDPYLPRNLSVVEEEANAFVGQVKATDPDAGINGQVHYSLGNFNNLFRITSNGSIYTAVKLNREVRDYYELVVVATDGAVHPRHSTLTLAIKVLDIDDNSPVFTNSTYTVLVEENLPAGTTILQIEAKDVDLGANVSYRIRSPEVKHFFALHPFTGELSLLRSLDYEAFPDQEASITFLVEAFDIYGTMPPGIATVTVIVKDMNDYPPVFSKRIYKGMVAPDAVKGTPITTVYAEDADPPGLPASRVRYRVDDVQFPYPASIFEVEEDSGRVITRVNLNEEPTTIFKLVVVAFDDGEPVMSSSATVKILVLHPGEIPRFTQEEYRPPPVSELATKGTMVGVISAAAINQSIVYSIVSGNEEDTFGINNITGVIYVNGPLDYETRTSYVLRVQADSLEVVLANLRVPSKSNTAKVYIEIQDENNHPPVFQKKFYIGGVSEDARMFTSVLRVKATDKDTGNYSVMAYRLIIPPIKEGKEGFVVETYTGLIKTAMLFHNMRRSYFKFQVIATDDYGKGLSGKADVLVSVVNQLDMQVIVSNVPPTLVEKKIEDLTEILDRYVQEQIPGAKVVVESIGARRHGDAFSLEDYTKCDLTVYAIDPQTNRAIDRNELFKFLDGKLLDINKDFQPYYGEGGRILEIRTPEAVTSIKKRGESLGYTEGALLALAFIIILCCIPAILVVLVSYRQFKVRQAECTKTARIQAALPAAKPAVPAPAPVAAPPPPPPPPPGAHLYEELGDSSMHKYEMPQYGSRRRLLPPAGQEEYGEVVGEAEEEYEEEEWARKRMIKLVVDREYETSSTGEDSAPECQRNRLHHPSIHSNINGNIYIAQNGSVVRTRRACLTDNLKVASPVRLGGPFKKLDKLAVTHEENVPLNTLSKGPFSTEKMNARPTLVTFAPCPVGTDNTAVKPLRNRLKSTVEQESMIDSKNIKEALEFHSDHTQSDDEELWMGPWNNLHIPMTKL

SEQ ID NO: 96374 - protein, 157 aa, Homo sapiens
MAALTTLFKYIDENQDRYIKKLAKWVAIQSVSAWPEKRGEIRRMMEVAAADVKQLGGSVELVDIGKQKLPDGSEIPLPPILLGRLGSDPQKKTVCIYGHLDVQPAALEDGWDSEPFTLVERDGKLYGRGSTDDKGPVAGWINALEAYQKTGQVCPPR

SEQ ID NO: 96375 - protein, 193 aa, Homo sapiens
SKNPKGTWKDWAQTAFDESINLSAVGYFRGYESDMNWEKGEGQPFEYFVYGAACSEVEIDCLTGDHKNIRTDIVMDVGCSINPAIDIGQGILHTRGPDQYKIPAICDMPTELHIALLPPSQNSNTLYSSKGLGESGVFLGCSVFFAIHDAVSAARQERGLHGPLTLNSPLTPEKIRMACEDKFTKMIPRDEPG

SEQ ID NO: 96376 - protein, 197 aa, Homo sapiens
MDVAESPERDPHSPEDEEQPQGLSDDDILRDSGSDQDLDGAGVRASDLEDEESAARGPSQEEEDNHSDEEDRASEPKSQDQDSEDDDLEEGEVKDPSDRKVRPRPTCRFFMKGNCTWGMNCRFIHPGVNDKGNYSLITKADPFPPNGAPPLGPHPLMPANPWGGPVVDEILPPPPPEPPTESAWERGLRHAKEVLKK

SEQ ID NO: 96377 - protein, 547 aa, Homo sapiens
MSDNPPRMEVCPYCKKPFKRLKSHLPYCKMIGPTIPTDQKVYQSKPATLPRAKKMKGPIKDLIKAKGKELETENEERNSKLVVDKPEQTVKTFPLPAVGLERAATTKADKDIKNPIQPSFKMLKNTKPMTTFQEETKAQFYASEKTSPKRELAKDLPKSGESRCNPSEAGASLLVGSIEPSLSNQDRKYSSTLPNDVQTTSGDLKLDKIDPQRQELLVKLLDVPTGDCHISPKNVSDGVKRVRTLLSNERDSKGRDHLSGVPTDVTVTETPEKNTESLILSLKMSSLGKIQVMEKQEKGLTLGVETCGSKGNAEKSMSATEKQERTVMSHGCENFNTRDSVTGKESQGERPHLSLFIPRETTYQFHSVSQSSSQSLASLATTFLQEKKAEAQNHHCVPDVKALMESPEGQLSLEPKSDSQFQASHTGCQSPLCSAQRHTPQSPFTNHAAAAGRKTLRSCMGLEWFPELYPGYLGLGVLPGKPQCWNAMTQKPQLISPQGERLSQGWIRCNTTIRKSGFGGITMLFTGYFVLCCSWSFRRLKLQRWRK

SEQ ID NO: 96378 - protein, 168 aa, Homo sapiens
MADGQVAELLLRRLEASDGGLDSAELAAELGMEHQAVVGAVKSLQALGEVIEAELRSTKHWELTAEGEEIAREGSHEARVFRSIPPEGLAQSELMRLPSGKVGFSKAMSNKWIRVDKSAADGPRVFRVVRSCGLVRGQVDGHMGPWPSYPSHSLSWQVDSMEDEVQRR

SEQ ID NO: 96379 - protein, 139 aa, Homo sapiens
MTSTPTQPIVIWKYKSFCRDRIADAFSPASVDNQLNAQLAAGNPGYNPYVECQDSVRTVRVVATKQGNAVTLGDYYQGRRITITGNADLTFDQTAWGDSGVYYCSVVSAQDLQGNNEAYAELIVLDWLFVVVVCLAAFL

SEQ ID NO: 96380 - protein, 138 aa, Homo sapiens
MDQDGDQQLGPSRILAPQTLKEIDDVYEKYKKEDDLNQKKRLQQLLQRALINSQELGDEKIQIVTQMLELVENRARQMELHSQCFQDPAESERASDKAKMDSSQPERSSRRPRRQRTSESRDLCHMANGIEDCDDQPP

SEQ ID NO: 96381 - protein, 167 aa, Homo sapiens
MRTADREARPGLPSLLLLLLAGAGLSAASPPAAPRFNVSLDSVPELRWLPVLRHYDLDLVRAAMAQVIGDRVPKWVHVLIGKVVLELERFLPQPFTGEIRGMCDFMNLSLADCLLVNLAYESSVFCTSIVAQDSRGHIYHGRNLDYPFGNVLRKLTVDVQFLKNGQV

SEQ ID NO: 96382 - protein, 774 aa, Homo sapiens
MSGGHQLQLAALWPWLLMATLQAGFGRTGLVLAAAVESERSAEQKAIIRVIPLKMDPTGKLNLTLEGVFAGVAEITPAEGKLMQSHPLYLCNASDDDNLEPGFISIVKLESPRRAPRPCLSLASKARMAGERGASAVLFDITEDRAAAEQLQQPLGLTWPVVLIWGNDAEKLMEFVYKNQKAHVRIELKEPPAWPDYDVWILMTVVGTIFVIILASVLRIRCRPRHSRPDPLQQRTAWAISQLATRRYQASCRQARGEWPDSGSSCSSAPVCAICLEEFSEGQELRVISCLHEFHRNCVDPWLHQHRTCPLCMFNITEGDSFSQSLGPSRSYQEPGRRLHLIRQHPGHAHYHLPAAYLLGPSRSAVARPPRPGPFLPSQEPGMGPRHHRFPRAAHPRAPGEQQRLAGAQHPYAQGWGLSHLQSTSQHPAACPVPLRRARPPDSSGSGESYCTERSGYLADGPASDSSSGPCHGSSSDSVVNCTDISLQGVHGSSSTFCSSLSSDFDPLVYCSPKGDPQRVDMQPSVTSRPRSLDSVVPTGETQVSSHVHYHRHRHHHYKKRFQWHGRKPGPETGVPQSRPPIPRTQPQPEPPSPDQQVTRSNSAAPSGRLSNPQCPRALPEPAPGPVDASSICPSTSSLFNLQKSSLSARHPQRKRRGGPSEPTPGSRPQDATVHPACQIFPHYTPSVAYPWSPEAHPLICGPPGLDKRLLPETPGPCYSNSQPVWLCLTPRQPLEPHPPGEGPSEWSSDTAEGRPCPYPHCQVLSAQPDYRPV

SEQ ID NO: 96383 - protein, 191 aa, Homo sapiens
MSQTSSIGSAESLISLERKKEKNINRDITSRKDLPSRTSNVERKASQQQWGRGNFTEGKVPHIRIENGAAIEEIYTFGRILGKGSFGIVIEATDKETETKWAIKKVNKEKAGSSAVKLLEREVNILKSVKHEHIIHLEQVFETPKKMYLVMELCEDGELKEILDRKGHFSENETRWIIQSLASAIAYLHNN

SEQ ID NO: 96384 - protein, 74 aa, Homo sapiens
  MOD_RES (1)..(1): Any amino acid
XATLENRKLKRELPFSFRSINTRENLYLVTETLETVKEETLKSDRQYKFWSQISQGHLSYKHKESLWVRRIPET

SEQ ID NO: 96385 - protein, 264 aa, Homo sapiens [sequence omitted]

SEQ ID NO: 96386 - protein, 109 aa, Homo sapiens
MLSYGERLGSPAVSPLPVRGGHVMRGTAFAYVPSPQVLHRIPGTSAYAFPSLGPVALAEHTCPCGEVLERHEPLPAKLALEEEQKPESRLVPKLRQAGAMLLKVPLMLT

SEQ ID NO: 96387 - protein, 63 aa, Homo sapiens
MVEKYRPQTLNDLISHQDILSTIQKFINEDRLPHLLLYGPPGTGKTSTILACAKQLYKDKEFG

SEQ ID NO: 96388 - protein, 94 aa, Homo sapiens
  MOD_RES (1)..(1): Any amino acid
XIKDFLLLCGRILLLLALLTLTISVTTSWLNSFKSPQVYLKEEEEKNEKRQKLVRKKQQEAQGEKASRYIENVLKPHQEMKLRKLEERFYQMTG

SEQ ID NO: 96389 - protein, 110 aa, Homo sapiens
MEVGGDTAAPAPGGAEDLEDTQFPSEEAREGGGVHAVPPDPEDEGLEETGSKDKDQPPSPSPPPQSEALSSTSRLWSPAAPENSPTCSPESSSGGQGGDPSDEEWRSQRK

SEQ ID NO: 96390 - protein, 330 aa, Homo sapiens
MEEPAAPSEAHEAAGAQAGAEAAREGVSGPDLPVCEPSGESAAPDSALPHAARGWAPFPVAPVPAHLRRGGLRPAPASGGGAWPSPLPSRSSGIWTKQIICRYYIHGQCKEGENCRYSHDLSGRKMATEGGVSPPGASAGGGPSTAAHIEPPTQEVAEAPPAASSLSLPVIGSAAERGFFEAERDNADRGAAGGAGVESWADAIEFVPGQPYRGRWVASAPEAPLQSSETERKQMAVGSGLRFCYYASRGVCFRGESCMYLHGDICDMCGLQTLHPMDAAQREEHMRACIEAHEKDMELSFAVQRGMDKVNGMDSENQEESQVIKGSVPE

SEQ ID NO: 96391 - protein, 260 aa, Homo sapiens
MIRAAPPPLFLLLLLLLLLVSWASRGEAAPDQDEIQRLPGLAKQPSFRQYSGYLKGSGSKHLHYWFVESQKDPENSPVVLWLNGGPGCSSLDGLLTEHGPFLVQPDGVTLEYNPYSWNLIANVLYLESPAGVGFSYSDDKFYATNDTEVAQSNFEALQDFFRLFPEYKNNKLFLTGESYAGIYIPTLAVLVMQDPSMNLQGLAVGNGLSSYEQNDNSLVYFAYYHGLLGNRLWSSLQTHCCSQNKCNFYDNKDLECVTNV

SEQ ID NO: 96392 - protein, 225 aa, Homo sapiens
RGAAGWSHCHHAHGGRRRGRDPGALRDVPHRLRQGAAGCVATLLHDAAMNPAEVVKQRMQMYNSPYHRVTDCVRAVWQNEGAGAFYRSYTTQLTMNVPFQAIHFMTYEFLQEHFNPQRRYNPSSHVLSGACAGAVAAAATTPLDVCKTLLNTQESLALNSHITGHITGMASAFRTVYQVGGVTAYFRGVQARVIYQIPSTAIAWSVYEFFKYLITKRQEEWRAGK

SEQ ID NO: 96393 - protein, 1160 aa, Homo sapiens
MKKLGQAMEEDLIVGLQGMDLNLEAEALAGTGLVLDEQLNEFHCLWDDSFPEGPERLHAIKEQLIQEGLLDRCVSFQARFAEKEELMLVHSLEYIDLMETTQYMNEGELRVLADTYDSVYLHPNSYSCACLASGSVLRLVDAVLGAEIRNGMAIIRPPGHHAQHSLMDGYCMFNHVAVAARYAQQKHRIRRVLIVDWDVHHGQGTQFTFDQDPSVLYFSIHRYEQGRFWPHLKASNWSTTGFGQGQGYTINVPWNQVGMRDADYIAAFLHVLLPVALEFQPQLVLVAAGFDALQGDPKGEMAATPAGFAQLTHLLMGLAGGKLILSLEGGYNLRALAEGVSASLHTLLGDPCPMLESPGAPCRSAQASVSCALEALEPFWEVLVRSTETVERDNMEEDNVEESEEEGPWEPPVLPILTWPVLQSRTGLVYDQNMMNHCNLWDSHHPEVPQRILRIMCRLEELGLAGRCLTLTPRPATEAELLTCHSAEYVGHLRATEKMKTRELHRESSNFDSIYICPSTFACAQLATGAACRLVEAVLSGEVLNGAAVVRPPGHHAEQDAACGFCFFNSVAVAARHAQTISGHALRILIVDWDVHHGNGTQHMFEDDPSVLYVSLHRYDHGTFFPMGDEGASSQIGRAAGTGFTVNVAWNGPRMGDADYLAAWHRLVLPIAYEFNPELVLVSAGFDAARGDPLGGCQVSPEGYAHLTHLLMGLASGRIILILEGGYNLTSISESMAACTRSLLGDPPPLLTLPRPPLSGALASITETIQVHRRYWRSLRVMKVEDREGPSSSKLVTKKAPQPAKPRLAERMTTREKKVLEAGMGKVTSASFGEESTPGQTNSETAVVALTQDQPSEAATGGATLAQTISEAAIGGAMLGQTTSEEAVGGATPDQTTSEETVGGAILDQTTSEDAVGGATLGQTTSEEAVGGATLAQTTSEAAMEGATLDQTTSEEAPGGTELIQTPLASSTDHQTPPTSPVQGTTPQISPSTLIGSLRTLELGSESQGASESQAPGEENLLGEAAGGQDMADSMLMQGSRGLTDQAIFYAVTPLPWCPHLVAVCPIPAAGLDVTQPCGDCGTIQENWVCLSCYQVYCGRYINGHMLQHHGNSGHPLVLSYIDLSAWCYYCQAYVHHQALLDVKNIAHQNKFGEDMPHPH

SEQ ID NO: 96394 - protein, 126 aa, Homo sapiens
  MOD_RES (1)..(1): Any amino acid
XGDMDILKHKWWPKNGQCDLYSSVDTKQKGGALDIKSFAGVFCILAAGIVLSCFIAMLETWWNKRKGSRVPSKEASSLQNETTISERRNAWPLRPCLKLGSNTWRSQASSHSLHQSSQMGGPLDDP

SEQ ID NO: 96395 - protein, 135 aa, Homo sapiens
MSEEIITPVYCTGVSAQVQKQRARELGLGRHENAIKYLGQDYEQLRVRCLQSGTLFRDEAFPPVPQSLGYKDLGPNSSKTYGIKWKRPTELLSNPQFIVDGATRTDICQGALGDCWLLAAIASLTLNDTLLHRVV

SEQ ID NO: 96396 - protein, 139 aa, Homo sapiens
MEKKLHAVPAAKTVKFKCPSSGTPNPTLRWLKNGKEFKPDHRIGGYKVRYATWSIIMDSVVPSDKGNYTCIVENEYGSINHTYQLDVVERSPHRPILQAGLPANKTVALGSNVEFMCKVYSDPQPHIQWLKHIEVNGSK

SEQ ID NO: 96397 - protein, 290 aa, Homo sapiens
MKMRFLGLVVCLVLWTLHSEGSGGKLTAVDPETNMNVSEIISYWGFPSEEYLVETEDGYILCLNRIPHGRKNHSDKGPKPVVFLQHGLLADSSNWVTNLANSSLGFILADAGFDVWMGNSRGNTWSRKHKTLSVSQDEFWAFSYDEMAKYDLPASINFILNKTGQEQVYYVGHSQGTTIGFIAFSQIPELAKRIKMFFALGPVASVAFCTSPMAKLGRLPDHLIKDLFGDKEFLPQSAFLKWLGTHVCTHVILKELCGNLCFLLCGFNERNLNMSRVDVYTTHSPAGTSV

SEQ ID NO: 96398 - protein, 56 aa, Homo sapiens
  MOD_RES (1)..(1): Any amino acid
XSSVASGTEYTGPKLYKEPSAKSNKHIIQNALAHCCLAGKVNEGQKKKILEVSMFA

SEQ ID NO: 96399 - protein, 376 aa, Homo sapiens
MALRSAQGDGPTSGHWDGGAEKADFNAKRKKKVAEIHQALNSDPTDVAALRRMAISEGGLLTDEIRRKVWPKLLNVNANDPPPISGMPEEQREGLQEELIDIILLILERNPQLHYYQGYHDIVVTFLLVVGERLATSLVEKLSTHHLRDFMDPTMDNTKHILNYLMPIIDQVNPELHDFMQSAEVGTIFALSWLITWFGHVLSDFRHVVRLYDFFLACHPLMPIYFAAVIVLYREQEVLDCDCDMASVHHLLSQIPQDLPYETLISRAGDLFVQFPPSELAREAAAQQQAERTAASTFKDFELASAQQRPDMVLRQRFRGLLRPEDRTKDVLTKPRTNRFVKLAVMGLTVALGAAALAVVKSALEWAPKFQLQLFP

SEQ ID NO: 96400 - protein, 64 aa, Homo sapiens
MSSEDREAQEDELLALASIYDGDEFRKAESVQGGETRIYLDLPQNFKIFVSGQRVSGSRVICPL

SEQ ID NO: 96401 - protein, 24 aa, Homo sapiens
  MOD_RES (1)..(1): Any amino acid
XEEWISLAYRPFLDASRVSLCCPG

SEQ ID NO: 96402 - protein, 20 aa, Homo sapiens
GQELGKKIKVFGPGTKLIIT

SEQ ID NO: 96403 - protein, 181 aa, Homo sapiens
MGTRRRGRTFHCQPSTAEVLCRGQPEIPLGSWNPATMAQGVLWILLGLLLWSDPGTASLPLLMDSVIQALAELEQKVPAAKTRHTASAWLMSAPNSGPHNRLYHFLLGAWSLNATELDPCPLSPELLGLTKEVARHDVREGKEYGVVLAPDGSTVAVEPLLAGLEAGLQGRRVINLPLDSM

SEQ ID NO: 96404 - protein, 161 aa, Homo sapiens
MEDLCVANTLFALNLFKHLAKASPTQNLFLSPWSISSTMAMVYMGSRGSTEDQMAKVLQFNEVGANAVTPMTPENFTSCGFMQQIQKGSYPDAILQAQAADKIHSSFRSLSSAINASTGNYLLESVNKLFGEKSASFREEYIRLCQKYYSSEPQAVDFLEC

SEQ ID NO: 96405 - protein, 250 aa, Homo sapiens
  MOD_RES (1)..(1): Any amino acid
XRTAGKELALAPLQDWGEETEDGAVYSVSLRRQRSQRRSPAEGPGGSQAPSPIANTFLHYRTSKVRVLRAARLERLVGELVFGDREQDPSFMPAFLATYRTFVPTACLLGFLLPPMPPPPPPGVEIKKTAVQDLSFNKNLRAVVSVLGSWLQDHPQDFRDHPAHSDLGSVRTFLGWAAPGSAEAQKAEKLLEDFLEEAEREQEEEPPQDLPELPKLLTQTLQRPARRKRKGSCLKVPSSWTSAWTRWPSS

SEQ ID NO: 96406 - protein, 49 aa, Homo sapiens
  MOD_RES (1)..(1): Any amino acid
XAAALVAMLLEHYGLAGQPSPLPRPAPPRRPHPAPGPGDSNIFWGLQET

SEQ ID NO: 96407 - protein, 465 aa, Homo sapiens
MSQSGCPSGLLADKNISSSATRVIVKTAGNQKDFMVADDISVRQFKEMLLAHFQCQMDQLVLVFMGCLLKDHDTLSQRGIMDGHTIYLVIKSKQGSRSLAHSFRDLPTNDPCHRDRNTKGNSSRVHQPTGMNQAPVELAHFVGSDAPKVHTQNLEVSHPECKAQMLENPSIQRLLSNMEFMWQFISEHLDTQQLMQQNPEVSRLLLDNSEILLQTLELARNLAMIQEIMQIQQPSQNLEYPLNPQPYLGLETMPGGNNALGQNYADINDQMLNSMQDPFGGNPFTALLAGQVLEQVQSSPPPPPPSQEQQDQLTQHPATRVIYNSSGGFSSNTSANDTLNKVNHTSKANTAMISTKGQSHICATRQPAWIPALPSIELTQQLQEEYKDATVSLSSSRQTLKGDLQLSDEQSSSQITGGMMQLLMNNPYLAAQIMLFTSMPQLSEQWRQQLPTFLQQTQISDLLSA

SEQ ID NO: 96408 - protein, 4242 aa, Homo sapiens
MMPAQYALTSSLVLLVLLSTARAGPFSSRSNVTLPAPRPPPQPGGHTVGAGVGSPSSQLYEHTVEGGEKQVVFTHRINLPPSTGCGCPPGTEPPVLASEVQALRVRLEILEELVKGLKEQCTGGCCPASAQAGTGQTDVRTLCSLHGVFDLSRCTCSCEPGWGGPTCSDPTDAEIPPSSPPSASGSCPDDCNDQGRCVRGRCVCFPGYTGPSCGWPSCPGDCQGRGRCVQGVCVCRAGFSGPDCSQRSCPRGCSQRGRCEGGRCVCDPGYTGDDCGMRSCPRGCSQRGRCENGRCVCNPGYTGEDCGVRSCPRGCSQRGRCKDGRCVCDPGYTGEDCGTRSCPWDCGEGGRCVDGRCVCWPGYTGEDCSTRTCPRDCRGRGRCEDGECICDTGYSGDDCGVRSCPGDCNQRGRCEDGRCVCWPGYTGTDCGSRACPRDCRGRGRCENGVCVCNAGYSGEDCGVRSCPGDCRGRGRCESGRCMCWPGYTGRDCGTRACPGDCRGRGRCVDGRCVCNPGFTGEDCGSRRCPGDCRGHGLCEDGVCVCDAGYSGEDCSTRSCPGGCRGRGQCLDGRCVCEDGYSGEDCGVRQCPNDCSQHGVCQDGVCICWEGYVSEDCSIRTCPSNCHGRGRCEEGRCLCDPGYTGPTCATRMCPADCRGRGRCVQGVCLCHVGYGGEDCGQEEPPASACPGGCGPRELCRAGQCVCVEGFRGPDCAIQTCPGDCRGRGECHDGSCVCKDGYAGEDCGEEVPTIEGMRMHLLEETTVRTEWTPAPGPVDAYEIQFIPTTEGASPPFTARVPSSASAYDQRGLAPGQEYQVTVRALRGTSWGLPASKTITTMIDGPQDLRVVAVTPTTLELGWLRPQAEVDRFVVSYVSAGNQRVRLEVPPEADGTLLTDLMPGVEYVVTVTAERGRAVSYPASVRANTGSSPLGLLGTTDEPPPSGPSTTQGAQAPLLQQRPQELGELRVLGRDETGRLRVVWTAQPDTFAYFQLRMRVPEGPGAHEEVLPGDVRQALVPPPPPGTPYELSLHGVPPGGKPSDPIIYQGIMDKDEEKPGKSSGPPRLGELTVTDRTSDSLLLRWTVPEGEFDSFVIQYKDRDGQPQVVPVEGPQRSAVITSLDPGRKYKFVLYGFVGKKRHGPLVAEAKILPQSDPSPGTPPRLGNLWVTDPTPDSLHLSWTVPEGQFDTFMVQYRDRDGRPQVVPVEGPERSFVVSSLDPDHKYRFTLFGIANKKRYGPLTADGTTAPERKEEPPRPEFLEQPLLGELTVTGVTPDSLRLSWTVAQGPFDSFMVQYKDAQGQPQAVPVAGDENEVTVPGLDPDRKYKMNLYGLRGRQRVGPESVVAKTAPQEDVDETPSPTELGTEAPESPEEPLLGELTVTGSSPDSLSLFWTVPQGSFDSFTVQYKDRDGRPRAVRVGGKESEVTVGGLEPGHKYKMHLYGLHEGQRVGPVSAVGVTAPQQEETPPATESPLEPRLGELTVTDVTPNSVGLSWTVPEGQFDSFIVQYKDKDGQPQVVPVAADQREVTVYNLEPERKYKMNMYGLHDGQRMGPLSVVIVTAPLPPAPATEASKPPLEPRLGELTVTDITPDSVGLSWTVPEGEFDSFVVQYKDRDGQPQVVPVAADQREVTIPDLEPSRKYKFLLFGIQDGKRRSPVSVEAKTVARGDASPGAPPRLGELWVTDPTPDSLRLSWTVPEGQFDSFVVQFKDKDGPQVVPVEGHERSVTVTPLDAGRKYRFLLYGLLGKKRHGPLTADGTTEARSAMDDTGTKRPPKPRLGEELQVTTVTQNSVGLSWTVPEGQFDSFVVQYKDRDGQPQVVPVEGSLREVSVPGLDPAHRYKLLLYGLHHGKRVGPISAVAITAGREETETETTAPTPPAPEPHLGELTVEEATSHTLHLSWMVTEGEFDSFEIQYTDRDGQLQMVRIGGDRNDITLSGLESDHRYLVTLYGFSDGKHVGPVHVEALTVPEEEKPSEPPTATPEPPIKPRLGELTVTDATPDSLSLSWTVPEGQFDHFLVQYRNGDGQPKAVRVPGHEEGVTISGLEPDHKYKMNLYGFHGGQRMGPVSVVGVTAAEEETPSPTEPSMEAPEPAEEPLLGELTVTGSSPDSLSLSWTVPQGRFDSFTVQYKDRDGRPQVVRVGGEESEVTVGGLEPGRKYKMHLYGLHEGRRVGPVSAVGVTAPEEESPDAPLAKLRLGQMTVRDITSDSLSLSWTVPEGQFDHFLVQFKNGDGQPKAVRVPGHEDGVTISGLEPDHKYKMNLYGFHGGQRVGPVSAVGLTAPGKDEEMAPASTEPPTPEPPIKPRLEELTVTDATPDSLSLSWTVPEGQFDHFLVQYKNGDGQPKATRVPGHEDRVTISGLEPDNKYKMNLYGFHGGQRVGPVSAIGVTAAEEETPSPTEPSMEAPEPPEEPLLGELTVTGSSPDSLSLSWTVPQGRFDSFTVQYKDRDGRPQVVRVGGEESEVTVGGLEPGRKYKMHLYGLHEGRRVGPVSTVGVTAPQEDVDETPSPTEPGTEAPEPPEEPLLGELTVTGSSPDSLSLSWTVPQGRFDSFTVQYKDRDGRPQAVRVGGQESKVTVRGLEPGRKYKMHLYGLHEGRRLGPVSAVGVTEDEAETTQAVPTMTPEPPIKPRLGELTMTDATPDSLSLSWTVPEGQFDHFLVQYRNGDGQPKAVRVPGHEDGVTISGLEPDHKYKMNLYGFHGGQRVGPISVIGVTAAEEETPSPTELSTEAPEPPEEPLLGELTVTGSSPDSLSLSWTIPQGHFDSFTVQYKDRDGRPQVMRVRGEESEVTVGGLEPGRKYKMHLYGLHEGRRVGPVSTVGVTEDEAETTQAVPTTTPEPPNKPRLGELTVTDATPDSLSLSWMVPEGQFDHFLVQYRNGDGQPKVVRVPGHEDGVTISGLEPDHKYKMNLYGFHGGQRVGPISVIGVTAAEEETPAPTEPSTEAPEPPEEPLLGELTVTGSSPDSLSLSWTIPQGRFDSFTVQYKDRDGRPQVVRVRGEESEVTVGGLEPGCKYKMHLYGLHEGQRVGPVSAVGVTAPKDEAETTQAVPTMTPEPPIKPRLGELTVTDATPDSLSLSWMVPEGQFDHFLVQYRNGDGQPKAVRVPGHEDGVTISGLEPDHKYKMNLYGFHGGQRVGPVSAIGVTEEETPSPTEPSTEAPEAPEEPLLGELTVTGSSPDSLSLSWTVPQGRFDSFTVQYKDRDGQPQVVRVRGEESEVTVGGLEPGRKYKMHLYGLHEGQRVGPVSTVGITAPLPTPLPVEPRLGELAVAAVTSDSVGLSWTVAQGPFDSFLVQYRDAQGQPQAVPVSGDLRAVAVSGLDPARKYKFLLFGLQNGKRHGPVPVEARTAPDTKPSPRLGELTVTDATPDSVGLSWTVPEGEFDSFVVQYKDKDGRLQVVPVAANQREVTVQGLEPSRKYRFLLYGLSGRKRLGPISADSTTAPLEKELPPHLGELTVAEETSSSLRLSWTVAQGPFDSFVVQYRDTDGQPRAVPVAADQRTVTVEDLEPGKKYKFLLYGLLGGKRLGPVSALGMTAPEEDTPAPELAPEAPEPPEEPRLGVLTVTDTTPDSMRLSWSVAQGPFDSFVVQYEDTNGQPQALLVDGDQSKILISGLEPSTPYRFLLYGLHEGKRLGPLSAEGTTGLAPAGQTSEESRPRLSQLSVTDVTTSSLRLNWEAPPGAFDSFLLRFGVPSPSTLEPHPRPLLQRELMVPGTRHSAVLRDLRSGTLYSLTLYGLRGPHKADSIQGTARTLSPVLESPRDLQFSEIRETSAKVNWMPPPSRADSFKVSYQLADGGEPQSVQVDGQARTQKLQGLIPGARYEVTVVSVRGFEESEPLTGFLTTVPDGPTQLRALNLTEGFAVLHWKPPQNPVDTYDIQVTAPGAPPLQAETPGSAVDYPLHDLVLHTNYTATVRGLRGPNLTSPASITFTTGLEAPRDLEAKEVTPRTALLTWTEPPVRPAGYLLSFHTPGGQTQEILLPGGITSHQLLGLFPSTSYNARLQAMWGQSLLPPVSTSFTTGGLRIPFPRDCGEEMQNGAGASRTSTIFLNGNRERPLIVFCDMETDGGGWLVFQRRMDGQTDFWRDWEDYAHGFGNISGEFWLGNEALHSLTQAGDYSMRVDLRAGDEAVFAQYDSFHVDSAAEYYRLHLEGYHGTAGDSMSYHSGSVFSARDRDPNSLLISCAVSYRGAWWYRNCHYANLNGLYGSTVDHQGVSWYHWKGFEFSVPFTEMKLRPRNFRSPAGGG

SEQ ID NO: 96409 - protein, 151 aa, Homo sapiens
MSPSLQEGAQLGENKPSTCSFSIERILGLDQKKDCVPLMKPHRPWADTCSSSGKDGNLCLHVPNPPSGISFPSVVDHPMPEERASKYENYFSASERLSLKRELSWYRGRRPRTAFTQNQIWFQNRRAKLKRSHRESQFLMAKKNFNTNLLE

SEQ ID NO: 96410 - protein, 151 aa, Homo sapiens
MAASQAVEEMRSRVVLGEFGVRNVHTTDFPGNYSGYDDAWDQDRFEKNFRVDVVHMDENSLEFDMVGIDAAIANAFRRILLAEVPTMAVEKVLVYNNTSIVQDEILAHRLGLIPIHADPRLFEYRNQGEKMKFWEKWTIWVQILVDCDVGR

SEQ ID NO: 96411 - protein, 551 aa, Homo sapiens
MSLHFLYYCSEPTLDVKIAFCQGFDKQVDVSYIAKHYNMSKSKVDNQFYSVEVGDSTFTVLKRYQNLKPIGSGAQGIVCAAYDAVLDRNVAIKKLSRPFQNQTHAKRAYRELVLMKCVNHKNIISLLNVFTPQKTLEEFQDVYLVMELMDANLCQVIQMELDHERMSYLLYQMLCGIKHLHSAGIIHRDLKPSNIVVKSDCTLKILDFGLARTAGTSFMMTPYVVTRYYRAPEVILGMGYKENVDIWSVGCIMGEMVRHKILFPGRDYIDQWNKVIEQLGTPCPEFMKKLQPTVRNYVENRPKYAGLTFPKLFPDSLFPADSEHNKLKASQARDLLSKMLVIDPAKRISVDDALQHPYINVWYDPAEVEAPPPQIYDKQLDEREHTIEEWKELIYKEVMNSEEKTKNGVVKGQPSPSGAAVNSSESLPPSSSVNDISSMSTDQTLASDTDSSLEASAGPLGCCRSILHWRYALRIWQGRQWASERDFLMESQSSYVKSPRKSKTEWCQGKNFKSSSKVPGDSTVFYKTIYISLFGHDKVYWHKQHSHKVFF

SEQ ID NO: 96412 - protein, 110 aa, Homo sapiens
MDVDSTISSGRSTPAMMNGQGSTTSSSKNIAYNCCWDQCQACFNSSPDLADHIRSIHVDGQRGGVFVCLWKGCKVYNTPSTSQSWLQRHMLTHSGDKPFKCVVGGCNASF

SEQ ID NO: 96413 - protein, 114 aa, Homo sapiens
MNGEEEFFDAVTGFDSDNSSGEFSEANQKVTGMIDLDTSKNNRIGKTGERPSQENGIQKHRTSLPAPMFSRSDFSVWTILKKCVGLGRFRIQIYIGTGQSPPPHQCVPLGRSQP

SEQ ID NO: 96414 - protein, 110 aa, Homo sapiens
MAEAGTGEPSPSVEGEHGTEYDTLPSDTVSLSDSDSDLSLPGGAEVEALSPMGLPGEEDSGPDEPPSPPSGLLPATVQPFHLRGMSSTFSQRSRDIFDCLEGAARRAPSS

SEQ ID NO: 96415 - protein, 584 aa, Homo sapiens
MRLLPLAPGRLRRGSPRHLPSCSPALLLLVLGGCLGVFGVAAGTRRPNVVLLLTDDQDEVLGGMAFSEYSTTNCQTGLQGEELGQEHLRTYLEPSRTPLKKTKALIGEMGMTFSSAYVPSALCCPSRASILTGKYPHNHHVVNNTLEGNCSSKSWQKIQEPNTFPAILRSMCGYQTFFAGKYLNEYGAPDAGGLEHVPLGWSYWYALEKNSKYYNYTLSINGKARKHGENYSVDYLTDVLANVSLDFLDYKSNFEPFFMMIATPAPHSPWTAAPQYQKAFQNVFAPRNKNFNIHGTNKHWLIRQAKTPMTNSSIQFLDNAFRKRWQTLLSVDDLVEKLVKRLEFTGELNNTYIFYTSDNGYHTGQFSLPIDKRQLYEFDIKVPLLVRGPGIKPNQTSKMLVANIDLGPTILDIAGYDLNKTQMDGMSLLPILRGASNLTWRSDVLVEYQGEGRNVTDPTCPSLSPGVSQCFPDCVCEDAYNNTYACVRTMSALWNLQYCEFDDQEVFVEVYNLTADPDQITNIAKTIDPELLGKMNYRLMMLQSCSGPTCRTPGVFDPGYRFDPRLMFSNRGSVRTRRFSKHLL

SEQ ID NO: 96416 - protein, 548 aa, Homo sapiens
MATITCTRFTEEYQLFEELGKGAFSVVRRCVKVLAGQEYAAKIINTKKLSARDHQKLEREARICRLLKHPNIVRLHDSISEEGHHYLIFDLVTGGELFEDIVAREYYSEADASHCIQQILEAVLHCHQMGVVHRDLKPENLLLASKLKGAAVKLADFGLAIEVEGEQQAWFGFAGTPGYLSPEVLRKDPYGKPVDLWACGVILYILLVGYPPFWDEDQHRLYQQIKAGAYDFPSPEWDTVTPEAKDLINKMLTINPSKRITAAEALKHPWISHRSTVASCMHRQETVDCLKKFNARRKLKGAILTTMLATRNFSGGKSGGNKKSDGVKESSESTNTTIEDEDTKVRKQEIIKVTEQLIEAISNGDFESYTVVPEQQARAHHHPESPHPPDGRRVSLHRLHPHHAVPGRWRHPTHRPVGGDPCLAPPGWQMADRPLPQIWGALRPAPLRDQAGVAALLCRRDPLCPWSGAAGSPRWILLEFSHVITPPPSLLYLHQENLLVHKSHRNFRANGHISPPLTPTLSPARLGLPQAWVSTALAPSPQPQLLSA

SEQ ID NO: 96417 - protein, 127 aa, Homo sapiens
  MOD_RES (1)..(1): Any amino acid
XLDDMAIAHHYRDSYRHPSHRDLRDRNRPMGLHGTRQEEMIDHRLTDREWAEEWKHLDHLLNCIMDMVEKTRRSLTVLRRCQEADREELNYWIRRYSDAEDLKKGGGSSSSHSRQQSPVNPDPVALG

SEQ ID NO: 96418 - protein, 39 aa, Homo sapiens
MTRTQKGKTFLPHCFYQSLPPRLGWGMILNYSKLKGKEE

SEQ ID NO: 96419 - protein, 1039 aa, Homo sapiens
MEVTAVATQGGYGSSDWVTSYLLMFSDGGRNWKQYRREESIWGFPGNTNADSVVHYRLQPPFEARFLRFLPLAWNPRGRIGMRIEVYGCAYKSEVVYFDGQSALLYRLDKKPLKPIRDVISLKFKAMQSNGILLHREGQHGNHITLELIKGKLVFFLNSGNAKLPSTIAPVTLTLGSLLDDQHWHSVLIELLDTQVNFTVDKHTHHFQAKGDSSYLDLNFEISFGGIPTPGRSRAFRRKSFHGCLENLYYNGVDVTELAKKHKPQILMMGNVSFSCPQPQTVPVTFLSSRSYLALPGNSGEDKVSVTFQFRTWNRAGHLLFGELRRGSGSFVLFLKDGKLKLSLFQPGQSPRNVTAGAGLNDGQWHSVSFSAKWSHMNVVVDDDTAVQPLVAVLIDSGDTYYFGGCLDNSSGSGCKSPLGGFQGCLRLITIGDKAVDPILVQQGALGSFRDLQIDSCGITDRCLPSYCEHGGECSQSWDTFSCDCLGTGYTGETCHSSLYEQSCEAHKHRGNPSGLYYIDADGSGPLGPFLVYCNMTADAAWTVVQHGGPDAVTLRGAPSGHPRSAVSFAYAAGAGQLRSAVNLAERCEQRLALRCGTARRPDSRDGTPLSWWVGRTNETHTSWGGSLPDAQKCTCGLEGNCIDSQYYCNCDAGRNEWTSDTIVLSQKEHLPVTQIVMTDAGRPHSEAAYTLGPLLCRGDQSFWNSASFNTETSYLHFPAFHGELTADVCFFFKTTVSSGVFMENLGITDFIRIELRAPTEVTFSFDVGNGPCEVTVQSPTPFNDNQWHHVRAERNVKGASLQVDQLPQKMQPAPADGHVRLQLNSQLFIGGTATRQRGFLGCIRSLQLNGVALDLEERATVTPGVEPGCAGHCSTYGHLCRNGGRCREKRRGVTCDCAFSAYDGPFCSNEISAYFATGSSMTYHFQEHYTLSENSSSLVSSLHRDVTLTREMITLSFRTTRTPSLLLYVSSFYEEYLSVILANNGSLQIRYKLDRHQNPDAFTFDFKNMADGQLHQVKINREEAVVMVEVIPQMQKSN

SEQ ID NO: 96420 - protein, 116 aa, Homo sapiens
MQLITDIPLLDITYEISVEAISTMVVFLSCQLFHKEVLRQSISHKYLMRGPCLPYTSKLVKTLLYNFIRQEKPPPPGAHVFPQQSDGGGLLYGLASGVANLKGRLMASFMLQIVEE

SEQ ID NO: 96421 - protein, 33 aa, Homo sapiens
IIASCVINLGDFSSCWELPWAHPSPGGSPTDGP

SEQ ID NO: 96422 - protein, 218 aa, Homo sapiens
MFRMLNSSFEDDPFFSESILAHRENMRQMIRSFSEPFGRDLLSISDGRGRAHNRRGHNDGEDSLTHTDVSSFQTMDQMVSNMRNYMQKLERNFGQLSVDPNGHSFCSSSVMTYSKIGDEPPKVFQASTQTRRAPGGIKETRKAMRDSDSGLEKMAIGHHIHDRAHVIKKSKNKKTGDEEVNQEFINMNERRNLNKVQPLNMEGDQMFWGTNSTSKAHL

SEQ ID NO: 96423 - protein, 92 aa, Homo sapiens
MTLRPSLLPLHLLLLLLLSAAVCRAEAGLETESPVRTLQVETLGRERDLWKSIRDPCSPIVGGAPRTMCRARCFWRHASHTLHGKLGRWTYY

SEQ ID NO: 96424 - protein, 78 aa, Homo sapiens
GEGTAAASAGGFGFGSSSNTTSFGTLASQNAPTFGSLSQQTSGFGTQSSGFSGFGSGTGGFSFGSNNSSVQGFGGWRS

SEQ ID NO: 96425 - protein, 67 aa, Homo sapiens
  MOD_RES (1)..(1): Any amino acid
XPTSAGKTLVAELLILKRVLEMRKKALFILPFVSVAKEKKYYLQLFQRHSSQQSWSYMVTSLNLDPK

SEQ ID NO: 96426 - protein, 117 aa, Homo sapiens
LLITGTEQFNQKPKKGIQFLQEKGLLTIPMDNTEVAQWLRENPRLDKKMIGEFVSDRKNIDLLESFVSLFFLSFPIAPSVFRVCDWTKPSASTWKPSVCLGKHQSSRGCWRHSQSVG

SEQ ID NO: 96427 - protein, 178 aa, Homo sapiens
MQRRWVFVLLDVLCLLVGFSSPPASLPFAILTLVNAPYKRGFYCGDDSIRYPYRPDTITHGLMAGVTITATVILVSAGEAYLVYTDRLYSRSDFNNYVAAVYKVLGTFLFGAAVSQSLTDLAKYMIGRLRPNFLAVCDPDWSRVNCSVYVQLEKVCRGNPADVTEARLSFYSGHSSFG

SEQ ID NO: 96428 - protein, 446 aa, Homo sapiens
MGLEALVPLAVIVAIFLLLVDLMHRRQRWAARYSPGPLPLPGLGNLLHVDFQNTPYCFDQLRRRFGDVFSLQLAWTPVVVLNGLAAVREAMVTRGEDTADRPPVPITQILGFGPRSQGRPFRPNGLLDKAVSNVIASLTCGRRFEYDDPRFLRLLDLAQEGLKEESGFLREVLNAVPVLLHIPALAGKVLRFQKAFLTQLDELLTEHRMTWDPAQPPRDLTEAFLAEMEKAKGNPESSFNDENLRIVVADLFSAGMVTTSTTLAWGLLLMILHPDVQRRVQQEIDDVIGQVRRPEMGDQAHMPYTTAVIHEVQRFGDIVPLGVTHMTSRDIEVQGFRIPKGTTLITNLSSVLKDEAVWEKPFRFHPEHFLDAQGHFVKPEAFLPFSAGRRACLGEPLARMELFLFFTSLLQHFSFSVPTGQPRPSHHGVFAFLVTPSPYELCAVPR

SEQ ID NO: 96429 - protein, 128 aa, Homo sapiens
MEKKVDVTSKAVTEVLARTIEYLQPNPASRAKLTMLNTVSKIRGQVKNPGYPQSEGLLGECMIRHGKELGGESNFGDALLDAGESMKRLAEVKDSLDIEVKQNFIDPLQNLCEKDLKEIQHHLKKLEG

SEQ ID NO: 96430 - protein, 145 aa, Homo sapiens
MTTNAGPLHPYWPQHLRLDNFVPNDRPTWHILAGLFSVTGVLVVTTWLLSGRAAVVPLGTWRRLSLCWFAVCGFIHLVIEGWFVLYYEDLLGDQAFLSQLWKEYAKGDSRYILGDNFTVCMETITACLWGPLSLWVVIAFLRQHP

SEQ ID NO: 96431 - protein, 468 aa, Homo sapiens
  MOD_RES (1)..(1): Any amino acid
XSPAPAQAQTPTPAPAPASSQAPLRPEDDILYQWRQRRKLEQAQGSKGDRAWVPPLTPALRTLTSPAPVETLSSLGTQPNHVPLWSSVAQPGPPEAFYVERPPFPSVSSPHIFWAPSSHGFFWAPQSGPWVSLGAVPPTQQASTLAHLGSTLAPPASLASTLEPPASTPAPLASTLAPPASTPAPLACTPAPPASTLASPAVPQGLPIPDPSSCAQPKSLGPKSRRSRAPRPEAAEQVPAAGQGPGPQLRGVLGQVVAARLFPDSLEDTPPHFEGPPPPKAGSPKVQATQPQTKVTPPPSESQCRAKAESLKAKALPPAAGSVIRKSEATPSPGACLQPEVPLSPAEQATTVKASPPAFQVGSPEALAPPPPAADHAPSEALLAQAALLLQAAEDSDGSEFQDDPVLQVLRAHRAELSRQKREADARLSFLLDQAEDLGSWSPPAGSPPRSPRRLLRREGDSLEARRL

SEQ ID NO: 96432 - protein, 123 aa, Homo sapiens
TLSGLLGVAWGASSLGAHHIHHFHGSSKHHSVPIAIYRSPASLRGGHAGTTYIFSKGGGQITYKWPPNDRPSTRADRLAIGFSTVQKEAVLVRVDSSSGLGDYLELHIAFESFTASRSSASRC

SEQ ID NO: 96433 - protein, 834 aa, Homo sapiens
MSLQVLNDKNVSNEKNTENCDFLFSPPEVTGRSSVLRVSQKENVPPKNLAKAMKVTFQTPLRDPQTHRILSPSMASKLEAPFTQDDTLGLENSHPVWTQKENQQLIKEVDAKTTHGILQKPVEADTDLLGDASPAFGSGSSSESGPGALADLDCSSSSQSPGSSENQMVSPGKVSGSPEQAVEENLSSYSLDRRVTPASETLEDPCRTESQHKAETPHGAEEECKAETPHGAEEECRHGGVCAPAAVATSPPGAIPKEACGGAPLQGLPGEALGCPAGVGTPVPADGTQTLTCAHTSAPESTAPTNHLVAGRAMTLSPQEEVAAGQMASSSRSGPVKLEFDVSDGATSKRAPPPRRLGERSGLKPPLRKAAVRQQKAPQEVEEDDGRSGAGEDPPMPASRGSYHLDWDKMDDPNFIPFGGDTKSGCSEAQPPESPETRLGQPAAEQLHAGPATEEPGPCLSQQLHSASAEDTPVVQLAAETPTAESKERALNSASTSLPTSCPGSEPVPTHQQGQPALELKEESFRDPAEGTGAEVDYLEQFGTSSESALRKQSLYLKFDPLLRDSPGRPVPVATETSSMHGANETPSGRPREAKLVEFDFLGALDIPVPGPPPGVPAPGGPPLSTGPIVDLLQYSQKDLDAVVKATQEENRELRSRCEELHGKNLELGKIMDRFEEVVYQAMEEVQKQKELSKAEIQKVLKEKDQLTTDLNSMEKSFSDLFKRFEKQKEVIEGYRKNEESLKKCVEDYLARITQEGQRYQALKAHAEEKLQLANEEIAQVRSKAQAEALALQASLRKEQMRIQSLEKTVEQKTKENEELTRICDDLISKMEKI

SEQ ID NO: 96434 - protein, 252 aa, Homo sapiens
MRSHPLLLETLQTICFYKNGKGRHVRNLHKTVMQNGAGGALFVHRDTPENNPDTPFDFTPENYKRIEAIVKNYPEGHKAAAVLPVLDLAQRQNGWLPISAMNKVAEVLQVPPMRVYEVATFYTMYNRKPVGKYHIQVCTTTPCMLRNSDSILEAIQKKLGIKVGETTPDKLFTLIEVECLGACVNAPMVQINDNYYEDLTAKDIEEIIDELKAGKIPKPGPRSGRFSCEPAGGLTSLTEPPKGPGFGVQAGL

SEQ ID NO: 96435 - protein, 85 aa, Homo sapiens
  MOD_RES (1)..(1): Any amino acid
XLPPSDSKKTVESKETVMMGDSMVKINGIYLTKSNAICHLKSHPLQLTDDGGFSEIKEQEMFKGTTSLPSHLKNGGPHCRLWNDD

SEQ ID NO: 96436 - protein, 924 aa, Homo sapiens
MEDGKPVWAPHPTDGFQMGNIVDIGPDSLTIEPLNQKGKTFLALINQVFPAEEDSKKDVEDNCSLMYLNEATLLHNIKVRYSKDRIYTYVANILIAVNPYFDIPKIYSSEAIKSYQGKSLGTRPPHVFAIADKAFRDMKVLKMSQSIIVSGESGAGKTENTKFVLRYLTESYGTGQDIDDRIVEANPLLEAFGNAKTVRNNNSSRFGKFVEIHFNEKSSVVGGFVSHYLLEKSRICVQGKEERNYHIFYRLCAGASEDIREKLHLSSPDNFRYLNRGCTRYFANKETDKQILQNRKSPEYLKAGSMKDPLLDDHGDFIRMCTAMKKIGLDDEEKLDLFRVVAGVLHLGNIDFEEAGSTSGGCNLKNKSAQSLEYCAELLGLDQDDLRVSLTTRVMLTTAGGTKGTVIKVPLKVEQANNARDALAKTVYSHLFDHVVNRVNQCFPFETSSYFIGVLDIAGFEYFEHNSFEQFCINYCNEKLQQFFNERILKEEQELYQKEGLGVNEVHYVDNQDCIDLIEAKLVGILDILDEENRLPQPSDQHFTSAVHQKHKDHFRLTIPRKSKLAVHRNIRDDEGFIIRHFAGAVCYETTQFVEKNNDALHMSLESLICESRDKFIRELFESSTNNNKDTKQKAGKLSFISVGNKFKTQLNLLLDKLRSTGASFIRCIKPNLKMTSHHFEGAQILSQLQCSGMVSVLDLMQGGYPSRASFHELYNMYKKYMPDKLARLDPRLFCKALFKALGLNENDYKFGLTKVFFRPGKFAEFDQIMKSDPDHLAELVKRVNHWLTCSRWKKVQWCSLSVIKLKNKIKYRAEACIKMQKTIRMWLCKRRHKPRIDGLVKVGTLKKRLDKFNEVVSVLKDGKPEMNKQIKNLEISIDTLMAKIKSTMMTQEQIQKEYDALVKSSEELLSALQKKKQQEEEAE

SEQ ID NO: 96437 - protein, 136 aa, Homo sapiens
MPPPQGDVTALFLGPPGLGKSALIAALCDKDVETLEAPEGRPDSGVPSLRAAGPGLFLGELSCPPAAPGPWAAEANVLVLVLPGPEGNGEPLAPALGEAALAALARGTPLLAVRNLRPGDSQTAAQARDQTAALLN

SEQ ID NO: 96438 - protein, 62 aa, Homo sapiens
MAKYNTGGNPTEDVSVNSRPFRVTGPNSSSGIQARKNLFNNQGNASPPAGPSNVPKFGSPKP

SEQ ID NO: 96439 - protein, 96 aa, Homo sapiens
MSGASSSEQNNNSYETKTPNLRMSEKKCSWASYMTNSPTLIVMIGLPARGKTYVSKKLTRYLNWIGVPTKGQETSPIWWGHHIILLLKDLGVFYSV

SEQ ID NO: 96440 - protein, 209 aa, Homo sapiens
  MOD_RES (1)..(1): Any amino acid
XGLTCQHVSHAISVNHVKRAIAENLWSVCSECLKERRFYDGQLVLTSDIWLCLKCGFQGCGKNSESQHSLKHFKSSRTEPHCIIINLSTWIIWCYECDEKLSTHCNKKVLAQIVDFLQKHASKTQTSAFSRIMKLCEEKCETDEIQKGGKCRNLSVRGITNLGNTCFFNAVMQNLAQTYTLTDLMNEIKESSTKLKIFPSSDSQLGTSI

SEQ ID NO: 96441 - protein, 194 aa, Homo sapiens
  MOD_RES (1)..(1): Any amino acid
XRLPEYPQVDDLLLRRLVKKPERQQVPTRKDYGSKVSLFSHLPQYSRQNSLTQFMSIPSSVIHPAMVRLGLQYSQGLVSGSNARCIALLRALQQVIQDYTTPPNEELSRDLVNKLKPYMSFLTQCRPLSASMHNAIKFLNKEITSVGSSKREEEACHHTHIQAPGMIIRGIKVSISCSLRILLHLGQVRTSSSH

SEQ ID NO: 96442 - protein, 835 aa, Homo sapiens
MSLKPQQQQQQQQQQQQQQQQQQQQQQQPPPAAANVRKPGGSGLLASPAAAPSPSSSSVSSSSATAPSSVVAATSGGGRPGLGRGRNSNKGLPQSTISFDGIYANMRMVHILTSVVGSKCEVQVKNGGIYEGVFKTYSPKCDLVLDAAHEKSTESSSGPKREEIMESILFKCSDFVVVQFKDMDSSYAKRDAFTDSAISAKVNGEHKEKDLEPWDAGELTANEELEALENDVSNGWDPNDMFRYNEENYGVVSTYDSSLSSYTVPLERDNSEEFLKREARANQLAEEIESSAQYKARVALENDDRSEEEKYTAVQRNSSEREGHSINTRENKYIPPGQRNREVISWGSGRQNSPRMGQPGSGSMPSRSTSHTSDFNPNSGSDQRVVNGGVPWPSPCPSPSSRPPSRYQSGPNSLPPRAATPTRPPSRPPSRPSRPPSHPSAHGSPAPVSTMPKRMSSEGPPRMSPKAQRHPRNHRVSAGRGSISSGLEFVSHNPPSEAATPPVARTSPSGGTWSSVVSGVPRLSPKTHRPRSPRQNSIGNTPSGPVLASPQAGIIPTEAVAMPIPAASPTPASPASNRAVTPSSEAKDSRLQDQRQNSPAGNKENIKPNETSPSFSKAENKGISPVVSEHRKQIDDLKKFKNDFRLQPSSTSESMDQLLNKNREGEKSRDLIKDKIEPSAKDSFIENSSSNCTSGSSKPNSPSISPSILSNTEHKRGPEVTSQGVQTSSPACKQEKDDKEEKKDAAEQVRKSTLNPNAKEFNPRSFSQPKPSTTPTSPRPQAQPSPSMVGHQQPTPVYTQPVCFAPNMMYPVPVSPGVQYQICPNSGKTSIIRVP

SEQ ID NO: 96443 - protein, 51 aa, Homo sapiens
MDNKKRLAYAIIQFLHDQLRHGGLSSDAQESLEGSRHPVPGDCVWGDGRRQ

SEQ ID NO: 96444 - protein, 108 aa, Homo sapiens
MAAAAAATAAAAASIRERQTVALKRMLNFNVPHIKNSTGEPVWKVLIYDRFGQDIISPLLSVKELRDMGITLHLLLHSDRDPIPDVPAVYFVMPTEENIDRMCQFSLY

SEQ ID NO: 96445 - protein, 472 aa, Homo sapiens
MAMEESKLTKNVHNEAVSADVSDKKKGGKFQPFKKLFGKRKKKDPSLFRVPSLGKKSYSHQSVSNGTFSSDEETLEDNLRSFNYSMGTRAFSHDSIFIPDGGAESEQTVQAMSQDNILGKVKTLQQQLGKNIKFGQRSPNAIPMNKANSGEASLEEDLFLTSPMEIVTQQDIVLSDAENKSSDTPSSLSPLNLPGAGSEMEEKVAPVKPSRPKRHFSSAGTIESVNLDAIPLAIARLDNSAAKHKLAVKPKKQRVSKKHRRLAQDPQHEQGGLESRPCLDQNGHPGEDKPTWHEEEPNPLDSEEERRRQEDYWRELEAKCKRQKAEAAEKRRLEEQRLQALERRLWEENRRQELLEEEGEGQEPPLEAERAPREEQQRSLEAPGWEDAERREREERERLEAEEERRRLQAQAQAEERRRLEEDARLEERRRQEEEEGRCAEELKRQEEEEAEGWEELEQQEAEVQGPPEALE

SEQ ID NO: 96446 - protein, 165 aa, Homo sapiens
  MOD_RES (1)..(1): Any amino acid
XVRNLLLALCLFLVLGFLYYSAWKLHLLQWEEDSKYDRLGFLLNLDSKLPAELATKYANFSEGACKPGYASALMTAIFPRFSKPAPMFLDDSFRKWARIREFVPPFGIKGQDNLIKAILSVTKEYRLTPALDSLRCRRCIIVGNGGVLANKSLGSRIDDYDIVVR

SEQ ID NO: 96447 - protein, 257 aa, Homo sapiens
MVARVSGLIVTLLSSSFPGGPLQNGQPSAEIQEEVALTSLGSGPAATNKRHSTSDKMHFPRSSLQPITTLGKSEFGEVFLAKAQGLEEGVAETLVLVKSLQSKDEQQQLDFRRELEMFGKLNHANVVRLLGLCREAEPHYMVLEYVDLGDLKQFLRISKSKDEKLKSQPLSTKQKVALCTQVALGMEHLSNNRFVHKDLAARNCLVSAQRQVKVSALGLSKDVYNSEYYHFRQAWVPLRWMSPEAILEGDFSTKSDV

SEQ ID NO: 96448 - protein, 150 aa, Homo sapiens
  MOD_RES (1)..(1): Any amino acid
XPVMPDGSVLLVDNVCHQSGEVSMGSFCRLPGTSGCFPCPLNALEEHNFLFQLRGGEQPPPGAKEGLEVPLIAVVQWSTPKLPFTQSIYTHYRLPSVRLDRPCFVMTASCKSPVRTYERFTVTYTLLNNLQDFLAVRLVWTPEHAQAEWL

SEQ ID NO: 96449 - protein, 26 aa, Homo sapiens
  MOD_RES (1)..(1): Any amino acid
XITEEAALSKKRATKAKNTGQRGLKM

SEQ ID NO: 96450 - protein, 117 aa, Homo sapiens
  MOD_RES (1)..(1): Any amino acid
XYGIDAMNPSSRDDFTEFGKLLKDKITQYEKSLYYASFLEVLVRDVCISLEIDDLKKITNSLTVLCSEKQKQEKQSKAKKKKKGVVPGGGLKATMKDDLADYGGYDGGYVQDYEDFM

SEQ ID NO: 96451 - protein, 351 aa, Homo sapiens
MNESKPGDSQNLACVFCRKHDDCPNKYGEKKTKEKWNLTVHYYCLLMSSGIWQRGKEEEGVYGFLIEDIRKEVNRASKLKCCVCKKNGASIGCVAPRCKRSYHFPCGLQRECIFQFTGNFASFCWDHRPVQIITSNNYRESLPCTICLEFIEPIPSYNILRSPCCKNAWFHRDCLQVQAINAGVFFFRCTICNNSDIFQKEMLRMGIHIPEKDASWELEENAYQELLQHYERCDVRRCRCKEGRDYNAPDSKWEIKRCQCCGSSGTHLACSSLRSWEQNWECLECRGIIYNSGEFQKAKKHVLPNSNNVGITDCLLEESSPKLPRQSPGSQSKDLLRNKVSLCYPGWSTVA

SEQ ID NO: 96452 - protein, 176 aa, Homo sapiens
MSLNCGQMWLLAPRGLARVTLAWSPWGCLGNLTTGHLALLTQNCYNPKALAPQGPKASGDQPVTQLLPANPACRCTCLPLQETFLSVLHLPGWQQWRCAASPGPRGAAALGPEQQEGPSVERPPSAPGWFSHCLLTSTWQLHSCGLGPCELPCGLVGCQDNEILQHLWLTNLFLQK

SEQ ID NO: 96453 - protein, 1147 aa, Homo sapiens
  MOD_RES (1)..(1): Any amino acid
XFATGCVVNGGDVRCSCKAGYTGTQCERCAPGYFGNPQKFGGSCQPCSCNSNGQLGSCHPLTGDCINQEPKDSSPAEECDDCDSCVMTLLNDLATMGEQLRLVKSQLQGLSASAGLLEQMRHMETQAKDLRNQLLNYRSAISNHGSKIEGLERELTDLNQEFETLQEKAQVNSRKAQTLNNNVNRATQSAKELDVKIKNVIRNVHILLKQISGTDGEGNNVPSGDFSREWAEAQRMMRELRNRNFGKHLREAEADKRESQLLLNRIRTWQKTHQGENNGLANSIRDSLNEYEAKLSDLRARLQEAAAQAKQANGLNQENERALGAIQRQVKEINSLQSDFTKYLTTADSSLLQTNIALQLMEKSQKEYEKLAASLNEARQELSDKVRELSRSAGKTSLVEEAEKHARSLQELAKQLEEIKRNASGDELVRCAVDAATAYENILNAIKAAEDAANRAASASESALQTVIKEDLPRKAKTLSSNSDKLLNEAKMTQKKLKQEVSPALNNLQQTLNIVTVQKEVIDTNLTTLRDGLHGIQRGDIDAMISSAKSMVRKANDITDEVLDGLNPIQTDVERIKDTYGRTQNEDFKKALTDADNSVNKLTNKLPDLWRKIESINQQLLPLGNISDNMDRIRELIQQARDAASKVAVPMRFNGKSGVEVRLPNDLEDLKGYTSLSLFLQRPNSRENGGTENMFVMYLGNKDASRDYIGMAVVDGQLTCVYNLGDREAELQVDQILTKSETKEAVMDRVKFQRIYQFARLNYTKGATSSKPETPGVYDMDGRNSNTLLNLDPENVVFYVGGYPPDFKLPSRLSFPPYKGCIELDDLNENVLSLYNFKKTFNLNTTEVEPCRRRKEESDKNYFEGTGYARVPTQPHAPIPTFGQTIQTTVDRGLLFFAENGDRFISLNIEDGKLMVRYKLNSELPKERGVGDAINNGRDHSIQIKIGKLQKRMWINVDVQNTIIDGEVFDFSTYYLGGIPIAIRERFNISTPAFRGCMKNLKKTSGVVRLNDTVGVTKKCSEDWKLVRSASFSRGGQLSFTDLGLPPTDHLQASFGFQTFQPSGILLDHQTWTRNLQVTLEDGYIELSTSDSGGPIFKSPQTYMDGLLHYVSVISDNSGLRQEGCLRPRVRDQSWKHSETMSLRKLK

SEQ ID NO: 96454 - protein, 79 aa, Homo sapiens
MGILKLQVFLIVLSVALNHLKATPIESHQVEKRKCNTATCATQRLANFLVHSSNNFGAILSSTNVGSNTYGKRNAVEVL

SEQ ID NO: 96455 - protein, 7 aa, Homo sapiens
  MOD_RES (1)..(1): Any amino acid
XKKVEFL

SEQ ID NO: 96456 - protein, 60 aa, Homo sapiens
MRLTGPWKLWLWMSIFLLPASTSVTVRDKTGIQANSLPNHQMLFIAFKSLKQILLRLKRP

SEQ ID NO: 96457 - protein, 122 aa, Homo sapiens
KPEPTNQGQDSLKKRLQAKVKVIGVHSSLAGSILSALSALVGFILLSVNPAALNPASLQCKLDEKDIPTRLLLSYDYHSPYTMDCHRAKASLAGTLSLMLVSTVLEFCLAVLTAVLQWKQTV

SEQ ID NO: 96458 - protein, 170 aa, Homo sapiens
MSAHLQWMVVRNCSSFLIKRNKQTYSTEPNNLKARNSFRYNGLIHRKTVGVEPAADGKGVVVVIKRRSGQRKPATSYVRTTINKNARATLSSIRHMIRKNKYRPDLRMLAGRVGRQQAVSSLEHQPRPGRLHLSNTAARSFCVMEPSRTLQDLGSTLGLHPLDASGTPEL

SEQ ID NO: 96459 - protein, 761 aa, Homo sapiens [sequence omitted]

SEQ ID NO: 96460 - protein, 173 aa, Homo sapiens
MAAAALRDPAQVPVAADLLTDHEEGYVTFEDVAVYFSQEEWRLLDDAQRLLYRNVMLENFTLLASLGCWHGAEAEEAPEQIASVGLLSSNIQQHQKQHCGEKPLKRQEGRVPVLRSCKVHLSEKSLQSREVGKALLISSGVLKHQVTHTGEKSHRSSKSREAFHAGKRHYKCS

SEQ ID NO: 96461 - protein, 1130 aa, Homo sapiens
ARIKFLQAQLCNLPQSSLQNKTKLLPSIEEAWSLPIPAELTSRQGAMNTAQQAYRAHDPNTEHVLNHSQTPILQQSLSLHMITSSQVEGLSSPAKKKRTSSPTKNGSDNWNGGQSLSHHPVQQVYSLCLTPQKLQHLEQLRANRDNLNPAQKHQLEQLESQFVLMQQMRHKEVAQVRTTGIHNGAITDSSLPTNSVSNRQPHGALTRVSSVSQPGVRPACVEKLLSSGAFSAGCIPCGTSKILGSTDTILLGSNCIAGSESNGNVPYLQQNTHTLPHNHTDLNSSTEEPWRKQLSNSAQGLHKSQSSCLSGPNEEQPLFSTGSAQYHQATSTGIKKANEHLTLPSNSVPQGDADSHLSCHTATSGGQQGIMFTKESKPSKNRSLVPETSRHTGDTSNGCADVKGLSNHVHQLIADAVSSPNHGDSPNLLIADNPQLSALLIGKANGNVGTGTCDKVNNIHPAVHTKTDHSVASSPSSAISTATPSPKSTEQRSINSVTSLNSPHSGLHTVNGEGLGKSQSSTKVDLPLASHRSTSQILPSMSVSICPSSTEVLKACRNPGKNGLSNSCILLDKCPPPRPPTSPYPPLPKDKLNPPTPSIYLENKRDAFFPPLHQFCTNPKNPVTVIRGLAGALKLDLGLFSTKTLVEANNEHMVEVRTQLLQPADENWDPTGTKKIWRCESNRSHTTIAKYAQYQASSFQESLREENEKRTQHKDHSDNESTSSENSGRRRKGPFKTIKFGTNIDLSDNKKWKLQLHELTKLPAFARVVSAGNLLTHVGHTILGMNTVQLYMKVPGSRTPGHQENNNFCSVNINIGPGDCEWFVVPEDYWGVLNDFCEKNNLNFLMSSWWPNLEDLYEANVPVYRFIQRPGDLVWINAGTVHWVQAVGWCNNIAWNVGPLTACQYKLAVERYEWNKLKSVKSPVPMVHLSWNMARNIKVSDPKLFEMIKYCLLKILKQYQTLREALVAAGKEVIWHGRTNDEPAHYCSICEVEVFNLLFVTNESNTQKTYIVHCHDCARKTSKSLENFVVLEQYKMEDLIQVYDQFTLASPWPPMDQSAFTSSLLRPIKALGSGRAEQTSGDQLQKGATHSRASSLLRAAEMTRRPASREELPDPGLFCHSIKLLFVLFS

SEQ ID NO: 96462 - protein, 144 aa, Homo sapiens
  MOD_RES (1)..(1): Any amino acid
XYVSGYGLQKGELSTLLYNTHPYRAFPVLLLDTVPWYLRLYVHTLTITSKGKENKPSYIHYQPAQDRLQPHLLEMLIQLPANSVTKVSIQFERALLKWTEYTPDPNHGFYVSPSVLSALVPSMVAAKPVDWEESPLFNSLLPWT

SEQ ID NO: 96463 - protein, 140 aa, Homo sapiens
TEQPVTTTFPVTTGLKPTVALCQQKCRRTGTLEGNYCSSDFVLAGTVITTITRDGSLHATVSIINIYKEGNLAIQQAGKNMSARLTVVCKQCPLLRRGLNYIIMGQVGEDGRGKIMPNSFIMMFKTKNQKLLDALKNKQC

SEQ ID NO: 96464 - protein, 78 aa, Homo sapiens
  MOD_RES (1)..(1): Any amino acid
XLQPHLLEMLIQLPANSVTKVSIQFERALLKWTEYTPDPNHGFYVSPSVLSALVPSMVAAKPVDWEESPLFNSLLPWT

SEQ ID NO: 96465 - protein, 963 aa, Homo sapiens
MWRLRRAAVACEVCQSLVKHSSGIKGSLPLQKLHLVSRSIYHSHHPTLKLQRPQLRTSFQQFSSLTNLPLRKLKFSPIKYGYQPRRNFWPARLATRLLKLRYLILGSAVGGGYTAKKTFDQWKDMIPDLSEYKWIVPDIVWEIDEYIDFEKIRKALPSSEDLVKLAPDFDKIVESLSLLKDFFTSGSPEETAFRATDRGSESDKHFRKVSDKEKIDQLQEELLHTQLKYQRILERLEKENKELRKLVLQKDDKGIHHRKLKKSLIDMYSEVLDVLSDYDASYNTQDHLPRVVVVGDQSAGKTSVLEMIAQARIFPRGSGEMMTRSPVKVTLSEGPHHVALFKDSSREFDLTKEEDLAALRHEIELRMRKNVKEGCTVSPETISLNVKGPGLQRMVLVDLPGVINTVTSGMAPDTKETIFSISKAYMQNPNAIILCIQDGSVDAERSIVTDLVSQMDPHGRRTIFVLTKVDLAEKNVASPSRIQQIIEGKLFPMKALGYFAVVTGKGNSSESIEAIREYEEEFFQNSKLLKTSMLKAHQVTTRNLSLAVSDCFWKMVRESVEQQADSFKATRFNLETEWKNNYPRLRELDRNELFEKAKNEILDEVISLSQVTPKHWEEILQQSLWERVSTHVIENIYLPAAQTMNSGTFNTTVDIKLKQWTDKQLPNKAVEVAWETLQEEFSRFMTEPKGKEHDDIFDKLKEAVKEESIKRHKWNDFAEDSLRVIQHNALEDRSISDKQQWDAAIYFMEEALQARLKDTENAIENMVGPDWKKRWLYWKNRTQEQCVHNETKNELEKMLKCNEEHPAYLASDEITTVRKNLESRGVEVDPSLIKDTWHQVYRRHFLKTALNHCNLCRRGFYYYQRHFVDSELECNDVVLFWRIQRMLAITANTLRQQLTNTEVRRLEKNVKEVLEDFAEDGEKKIKLLTGKRVQLAEDLTMIPARLYENQMKRQIWKYIVDTS

SEQ ID NO: 96466 - protein, 494 aa, Homo sapiens
MIASAADIKQENGMESASEGQEAHREVAGGAAVGLSPPAPAPFPLEPGDAATAAARVSGEEGAVAAAAAGAAADQVQLHSELLGRHHHAAAAAAQTPLAFSPDHVACVCEALQQGGNLDRLARFLWSLPQSDLLRGNESLLKARALVAFHQGIYPELYSILESHSFESANHPLLQQLWYKARYTEAERARGRPLGAVDKYRLRRKFPLPRTIWDGEETVYCFKEKSRNALKELYKQNRYPSPAEKRHLAKITGLSLTQVSNWFKNRRQRDRNPSETQSKSESDGNPSTEDESSKGHEDLSPHPLSSSSDGITNLSLSSHMEPVYMQQIGNAKISLSSSGVLLNGSLVPASTSPVFLNGNSFIQGPSGVILNGLNVGNTQAVALNPPKMSSNIVSNGISMTDILGSTSQDVKEFKVLQSSANSATTTSYSPSVPVSFPGLIPSTEVKREGIQTVASQDGGSVVTFTTPVQINQYGIVQIPNSGANSQFLNGSIGF

SEQ ID NO: 96467 - protein, 87 aa, Homo sapiens
MRRRVHQINGHKFMATYLRQPTYCSHCREFIWGVFGKQGYQCQVCTCVVHKRCHHLIVTACTCQNNINKVDSKIAEQRFGINIPHKF

SEQ ID NO: 96468 - protein, 158 aa, Homo sapiens
AVKGEVLKVGNKSCENIHLHSEAVLCTVPNDLLKLNSELNIEWKQAISSTVLGKVIVQPDQNFTGLIAGVVSISTALLLLLGFFLWLKKRKQIKDQFPNSSQNGSCRQVQYPLTDMSPILTSGDSDISSPLLQNTVHIDLSALNPELVQAVQHVVIGP

SEQ ID NO: 96469 - protein, 233 aa, Homo sapiens
MSRRALRRLRGEQRGQEPLGPGALHFDLRDDDDAEEEGPKRELGVRRPGGAGKEGVRVNNRFELINIDDLEDDPVVNGERSGCALTDAVAPGNKGRGQRGNTESKTDGDDTETVPSEQSHASGKLRKKKKKQKNKKSSTGEASENGLEDIDRILERIEDSTGLNRPGPAPLSSRKHVLYVEHRHLNPDTELKRPRQRQRVYPKCTWLTTPKSTWPRYSKPGLSMRLLESKKGL

SEQ ID NO: 96470 - protein, 498 aa, Homo sapiens
MGCSAKARWAAGALGVAGLLCAVLGAVMIVMVPSLIKQQVLKNVRIDPSSLSFNMWKEIPIPFYLSVYFFDVMNPSEILKGEKPQVRERGPYVYREFRHKSNITFNNNDTVSFLEYRTFQFQPSKSHGSESDYIVMPNILVLGAAVMMENKPMTLKLIMTLAFTTLGERAFMNRTVGEIMWGYKDPLVNLINKYFPGMFPFKDKFGLFAELNNSDSGLFTVFTGVQNISRIHLVDKWNGLSKCNMINGTSGQMWPPFMTPESSLEFYSPEACRSMKLMYKESGVFEGIPTYRFVAPKTLFANGSIYPPNEGFCPCLESGIQNVSTCRFSAPLFLSHPHFLNADPVLAEAVTGLHPNQEAHSLFLDIHPVTGIPMNCSVKLQLSLYMKSVAGIGQTGKIEPVVLPLLWFAESGAMEGETLHTFYTQLVLMPKVMHYAQYVLLALGCVLLLVPVICQIRSQGPEDTVSQPGLAAGPDRPPSPYTPLLPDSPSGQPPSPTA

SEQ ID NO: 96471 - protein, 60 aa, Homo sapiens
  MOD_RES (1)..(1): Any amino acid
XYGVYVYPNSFFRYEGEWKAGRKHGHGKLLFKDGSYYEGAFVDGEITGEGRRHWAWSGEL

SEQ ID NO: 96472 - protein, 426 aa, Homo sapiens
MAATEISVLSEQFTKIKELELMPEKGLKEEEKDGVCREKDHRSPSELEAERTSGAFQDSVLEEEVELVLAPSEESEKYILTLQTVHFTSEAVELQDMSLLSIQQQEGVQVVVQQPGPGLLWLEEGPRQSLQQCVAISIQQELYSPQEMEVLQFHALEENVMVASEDSKLAVSLAETTGLIKLEEEQEKNQLLAERTKEQLFFVETMSGDERSDEIVLTVSNSNVEEQEDQPTAGQADAEKAKSTKNQRKTKGAKGTFHCDVCMFTSSRMSSFNRHMKTHTSEKPHLCHLCLKTFRTVTLLRNHVNTHTGTRPYKCNDCNMAFVTSGELVRHRRYKHTHEKPFKCSMCKYASVEASKLKRHVRSHTGERPFQCCQCSYASRDTYKLKRHMRTHSGKGSGAEGLIPTVLTLKASFKKLLFIGTIKVQR

SEQ ID NO: 96473 - protein, 597 aa, Homo sapiens
MERGLPLLCAVLALVLAPAGAFRNDKCGDTIKIESPGYLTSPGYPHSYHPSEKCEWLIQAPDPYQRIMINFNPHFDLEDRDCKYDYVEVFDGENENGHFRGKFCGKIAPPPVVSSGPFLFIKFVSDYETHGAGFSIRYEIFKRGPECSQNYTTPSGVIKSPGFPEKYPNSLECTYIVFVPKMSEIILEFESFDLEPDSNPPGGMFCRYDRLEIWDGFPDVGPHIGRYCGQKTPGRIRSSSGILSMVFYTDSAIAKEGFSANYSVLQSSVSEDFKCMEALGMESGEIHSDQITASSQYSTNWSAERSRLNYPENGWTPGEDSYREWIQVDLGLLRFVTAVGTQGAISKETKKKYYVKTYKIDVSSNGEDWITIKEGNKPVLFQGNTNPTDVVVAVFPKPLITRFVRIKPATWETGISMRFEVYGCKITDYPCSGMLGMVSGLISDSQITSSNQGDRNWMPENIRLVTSRSGWALPPAPHSYINEWLQIDLGEEKIVRGIIIQGGKHRENKVFMRKFKIGYSNNGSDWKMIMDDSKRKAKVRAGDWEEVIPYVLDFNQGPLAFSRGRASYFLPAMTLEEVCDGVSKTLDSRKTGIWHEK

SEQ ID NO: 96474 - protein, 351 aa, Homo sapiens
MESIFHEKQEGSLCAQHCLNNLLQGEYFSPVELSSIAHQLDEEERMRMAEGGVTSEDYRTFLQQPSGNMDDSGFFSIQVISNALKVWGLELILFNSPEYQRLRIDPINERSFICNYKEHWFTVRKLGKQWFNLNSLLTGPELISDTYLALFLAQLQQEGYSIFVVKGDLPDCEADQLLQMIRVQQMHRPKLIGEELAQLKEQRVHKTDLERVLEANDGSGMLDEDEEDLQRALALSRQEIDMEDEEADLRRAIQLSMQGSSRNISQDMTQTSGTNLTSEELRKRREAYFEKQQQKQQQQQQQQQQGDLSGQSSHPCERPATSSGALGSDLVPATQEAEAGGLLEPRSSRLQ

SEQ ID NO: 96475 - protein, 368 aa, Homo sapiens
MPSIRESLKERGVDMARLGPEWSQPMKRLTLGNTTSSVILTNYMDTQYYGEIGIGTPPQTFKVVFDTGSSNVWVPSSKCSRLYTACVYHKLFDASDSSSYKHNGTELTLRYSTGTVSGFLSQDIITVGGITVTQMFGEVTEMPALPFMLAEFDGVVGMGFIEQAIGRVTPIFDNIISQGVLKEDVFSFYYNRDSENSQSLGGQIVLGGSDPQHYEGNFHYINLIKTGVWQIQMKGVSVGSSTLLCEDGCLALVDTGASYISGSTSSIEKLMEALGAKKRLFDYVVKCNEGPTLPDISFHLGGKEYTLTSADYVFQESYSSKKLCTLAIHAMDIPPPTGPTWALGATFIRKFYTEFDRRNNRIGFALAR

SEQ ID NO: 96476 - protein, 409 aa, Homo sapiens
MKNASPETREGVIRESYLKGHDQLVPVTLLAIAVILAFVMGAVFSGITVYCVCDHRRKDVAVVQRKEKELTHSRRGSMSSVTKLSGLFGDTQSKDPKPEAILTPLMHNGKLATPGNTAKMLIKADQHHLDLTALPTPESTPTLQQKRKPSRGSREWERNQNLINACTKDMPPMGSPVIPTDLPLRASPSHIPSVVVLPITQQGYQHEYVDQPKMSEVAQMALEDQAATLEYKTIKEHLSSKSPNHGVNLVENLDSLPPKVPQREASLGPPGASLSQTGLSKRLEMHHSSSYGVDYKRSYPTNSLTRSHQATTLKRNNTNSSNSSHLSRNQSFGRGDNPPPAPQRVDSIQVHSSQPSGQAVTVSRQPSLNAYNSLTRSGLKRTPSLKPDVPPKPSFAPLSTSMKPNDACT

SEQ ID NO: 96477 - protein, 1234 aa, Homo sapiens
MANGGGGGGGSSGGGGGGGGSSLRMSSNIHANHLSLDASSSSSSSSSSSSSSSSSSSSSSVHEPKMDALIIPVTMEVPCDSRGQRMWWAFLASSMVTFFGGLFIILLWRTLKYLWTVCCHCGGKTKEAQKINNGSSQADGTLKPVDEKEEAVAAEVGWMTSVKDWAGVMISAQTLTGRVLVVLVFALSIGALVIYFIDSSNPIESCQNFYKDFTLQIDMAFNVFFLLYFGLRFIAANDKLWFWLEVNSVVDFFTVPPVFVSVYLNRSWLGLRFLRALRLIQFSEILQFLNILKTSNSIKLVNLLSIFISTWLTAAGFIHLVENSGDPWENFQNNQALTYWECVYLLMVTMSTVGYGDVYAKTTLGRLFMVFFILGGLAMFARYVPEIAALILSRNKFGGTFNKHGGRKHIVVCGHITLESVSNFLKDFLHKDRDDVNVEIVFLHNISPNLELEALFKRHFTQVEFYQGSVLNPHDLARVKIESADACLILANKYCADPDAEDASNIMRVISIKNYHPKIRIITQMLQYHNKAHLLNIPSWNWKEGDDAICLAELKLGFIAQSCLAQGLSTMLANLFSMRSFIKIEEDTWQKYYLEGVSNEMYTEYLSSAFVGLSFPTVCELCFVKLKLLMIAIEYKSANRESRSRKRILINPGNHLKIQEGTLGFFIASDAKEVKRAFFYCKACHDDITDPKRIKKCGCKRLEDEQPSTLSPKKKQRNGGMRNSPNTSPKLMRHDPLLIPGNDQIDNMDSNVKKYDSTGMFHWCAPKEIEKVILTRSEAAMTVLSGHVVVCIFGDVSSALIGLRNLVMPLRASNFHYHELKHIVFVGSIEYLKREWETLHNFPKVSILPGTPLSRADLRAVNINLCDMCVILSANQNNIDDTSLQDKECILASLNIKSMQFDDSIGVLQANSQGFTPPGMDRSSPDNSPVHGMLRQPSITTGVNIPIITELVNDTNVQFLDQDDDDDPDTELYLTQPFACGTAFAVSVLDSLMSATYFNDNILTLIRTLVTGGATPELEALIAEENALRGGYSTPQTLANRDRCRVAQLALLDGPFADLGDGGCYGDLFCKALKTYNMLCFGIYRLRDAHLSTPSQCTKRYVITNPPYEFELVPTDLIFCLMQFDHNAGQSRASLSHSSHSSQSSSKKSSSVHSIPSTANRQNRPKSRESRDKQNATRMNRMGQEKKWFTDEPDNAYPRNIQIKPMSTHMANQINQYKSTSSLIPPIREVEDEC

SEQ ID NO: 96478 - protein, 118 aa, Homo sapiens
MGSKRRRATSPSSSVSGDFDDGHHSVSTPGPSRKRRRLSNLPTVDPIAVCHELYNTIRDYKDEQGRLLCELFIRAPKRRNQPDYYEVVSQPIDLMKIQQKLKMEEYDDVNLLTADFQL

SEQ ID NO: 96479 - protein, 238 aa, Homo sapiens
  MOD_RES (1)..(1): Any amino acid
XGEVKDPSDRKVRPRPTCRFFMKGNCTWGMNCRFIHPGVNDKGNYSLITKADPFPPNGAPPLGPHPLMPANPWGGPVVDEILPPPPPEPPTESAWERGLRHAKEVLKKATIRKEQEPDFEEKRFTVTIGEDEREFDKENEVFRDWNSRIPRDVRDTVRQAEPPKKEAATTGPQVKRADEWKDPWRRSKSPKKKLGVSVSPSRARRRRKTSASSASASNSSRSSSRSSSYSGSGSSRSR

SEQ ID NO: 96480 - protein, 111 aa, Homo sapiens
MMASFQRSNSHDKVRRIVAEEGRTARNLIAWSVPLESKDDDGKPKCQTGGKSKRTIQGTHKTTKQSTAVDCKITSSTTGDKHFDKSPTKTRHPRKIDLRARYWAFLFDNLR

SEQ ID NO: 96481 - protein, 54 aa, Homo sapiens
  MOD_RES (1)..(1): Any amino acid
XEELDTLLNHPDIKHRRIPILFFANKMDLRDAVTSVKVSQLLCLENIKDKPWHI

SEQ ID NO: 96482 - protein, 84 aa, Homo sapiens
SHPAMSPGTPGPTMGRSQGSPMDPMVMKRPQLYGMGSNPHSQPQQSSPYPGGSYGPPGPQRYPIGIQGRTPGAMAGMQYPQQQF

SEQ ID NO: 96483 - protein, 166 aa, Homo sapiens
VSIGYLLVKHSQTDQEPMCPVGMNKLWSGYSLLYFEGQEKAHNQDLGLAGSCLARFSTMPFLYCNPGDVCYYASRNDKSYWLSTTAPLPMMPVAEDEIKPYISRCSVCEAPAIAIAVHSQDVSIPHCPAGWRSLWIGYSFLMVCGICPVPLPNHTLLGTQQEQLPL

SEQ ID NO: 96484 - protein, 72 aa, Homo sapiens
MMMVMQPEGLGAGEGRFAGGGGGGEYMEQEEDWDRDLLLDPAWEKQQRKENESSERERDWPRMHSKSVAELS

SEQ ID NO: 96485 - protein, 131 aa, Homo sapiens
GILLNWTKGFKASDCEGQDVVSLLREAITRRQAVELNVVAIVNDTVGTMMSCGYEDPRCEIGLIVASTLSGLSAGTGTNACYMEELRNVAGVPGDSGRMCINMEWGAFGDDGSLAMLSTRFDASVDQASIN

SEQ ID NO: 96486 - protein, 99 aa, Homo sapiens
LSEMSVTLLRDPSMSPLGVATLTPSSTCPSLVEGRYGATDLSTSLCFPGPRSPAPGQPAQSPSCCQRPTPRSSLPLPGQQRQTRSPSACWSLTSRRSES

SEQ ID NO: 96487 - protein, 25 aa, Homo sapiens
MTSWHHRENRVQAQKLFPHHHLLKN

SEQ ID NO: 96488 - protein, 425 aa, Homo sapiens
MAVAVGRPSNEELRNLSLSGHVGFDSLPDQLVNKSTSQGFCFNILCVGETGIGKSTLMDTLFNTKFESDPATHNEPGVRLKARSYELQESNVRLKLTIVDTVGFGDQINKDDSYKPIVEYIDAQFEAYLQEELKIKRSLFNYHDTRIHACLYFIAPTGHSLKSLDLVTMKKLDSKVNIIPIIAKADTIAKNELHKFKSKIMSELVSNGVQIYQFPTDEETVAEINATMSVHLPFAVVGSTEEVKIGNKMAKARQYPWGVVQVENENHCDFVKLREMLIRVNMEDLREQTHTRHYELYRRCKLEEMGFKDTDPDSKPFSLQETYEAKRNEFLGELQKKEEEMRQMFVMRVKEKEAELKEAEKELHEKFDLLKRTHQEEKKKVEDKKKELEEEVNNFQKKKAAAQLLQSQAQQSGAQQTKKDKDKKK

SEQ ID NO: 96489 - protein, 49 aa, Homo sapiens
MPSPRLQHSKPPRRLSRAQKHSSGSSNTSTANRSTHNELEKNRHFNRLQ

SEQ ID NO: 96490 - protein, 382 aa, Homo sapiens
  MOD_RES (1)..(1): Any amino acid
XFLLVFSCLVLSVFSTIKEYEKSSEGALYILEIVTIVVFGVEYFVRIWAAGCCCRYRGWRGRLKFARKPFCVIDIMVLIASIAVLAAGSQGNVFATSALRSLRFLQILRMIRMDRRGGTWKLLGSVVYAHSKELVTAWYIGFLCLILASFLVYLAEKGENDHFDTYADALWWGLITLTTIGYGDKYPQTWNGRLLAATFTLIGVSFFALPAGILGSGFALKVQEQHRQKHFEKRRNPAAGLIQSAWRFYATNLSRTDLHSTWQYYERTVTVPMYRLIPPLNQLELLRNLKSKSGLAFRKDPPPEPSPSQKVSLKDRVFSSPRGVAAKGKGSPQAQTVRRSPSADQSLEDSPSKVPKSWSFGDRSRARQAFRIKGAASRQNSE

SEQ ID NO: 96491 - protein, 334 aa, Homo sapiens
MASACPGSDFTSIHSEEEQLRGLGFRQTRGYKSLAVSKVPSSISQEQSRQDAIYQNLTQLKAAVGELSEKSKLQEIYQELTQLKAAVGELPEKSKLQEIYQELTRLKAAVGELPEKSKLQEIYQELTWLKAAVGELPEKSKMQEIYQELTRLKAAVGELPEKSKQQEIYQELTRLKAAVERLCHPCPWEWTFFQGNCYFMSNSQRNWHDSITACKEVGAQLVVIKSAEEQNFLQLQSSRSNRFTWMGLSDLNQEGTWQWVDGSPLLPSFKQYWNRGEPNNVGEEDCAEFSGNGWNDDKCNLAKFWICKKSAASCSRDEEQFLSPAPATPNPPPA

SEQ ID NO: 96492 - protein, 69 aa, Homo sapiens
MNSSLPFCSWKKAAAQRPRSSLRAFLDPHRNLEQESLLPNRVLQSVLKQGCPKGYHLLLASATLQPDKR

SEQ ID NO: 96493 - protein, 114 aa, Homo sapiens
MFKVIQRSVGPASLSLLTFKVYAAPKKDSPPKNSVKVDELSLYSVPEGQSKYVEEARSQLEESISQLRHYCEPYTTWCQTAMTISKMHLLDFFRDLVLLVLLALLDSFWLEVQK

SEQ ID NO: 96494 - protein, 37 aa, Homo sapiens
MEAAVKEEISLEDEAVDKNIFRDCNKIAFYRKKSVLC

SEQ ID NO: 96495 - protein, 143 aa, Homo sapiens
MRPSVWAAVAAGLWVLCTVIAEGPPALPALALPLAGAPDAGGCQGAEGPLRGRGAELGAAQLLLPPQEGSSAAIASLHPQAHGEPQRFANLSCLAEKPIQTGVGSSGCPEIRARVCGWEGHGQMQRGASSFAFSICLMSHLQL

SEQ ID NO: 96496 - protein, 84 aa, Homo sapiens
IRSCAERETKKKDDIPEEDKGNVKQCEINYVWSLALSPRLECHGAISAHRNLRFPGSCDSPASASRVAGTTERNFRASKTTNLK

SEQ ID NO: 96497 - protein, 625 aa, Homo sapiens
MPGTKRFQHVIETPEPGKWELSGYEAAVPITEKSNPLTQDLDKADAENIVRLLGQCDAEIFQEEGQALSTYQRLYSESILTTMVQVAGKVQEVLKEPDGGLVVLSGGGTSGRMAFLMSVSFNQLMKGLGQKPLYTYLIAGGDRSVVASREGTEDSALHGIEELKKVAAGKKRVIVIGISVGLSAPFVAGQMDCCMNNTAVFLPVLVGFNPVSMARNDPIEDWSSTFRQVAERMQKMQEKQKAFVLNPAIGPEGLSGSSRMKGGSATKILLETLLLAAHKTVDQGIAASQRCLLEILRTFERAHQVTYSQSPKIATLMKSVSTSLEKKGHVYLVGWQTLGIIAIMDGVECIHTFGADFRDVRGFLIGDHSDMFNQKAELTNQGPQFTFSQEDFLTSILPSLTEIDTVVFIFTLDDNLTEVQTIVEQVKEKTNHIQALAHSTVGQTLLIPLKKLFPSIISITWPLLFFEYEGNFIQKFQRELSTKWVLNTVSTGAHVLLGKILQNHMLDLRISNSKLFWRALAMLQRFSGQSKARCIESLLRAIHFPQPLSDDIRAAPISCHVQVAHEKEQVIPIALLSLLFRCSITEAQAHLAAAPSVCEAVRSALAGPGQKRTADPLEILEPDVQ

SEQ ID NO: 96498 - protein, 608 aa, Homo sapiens
MVTEGFIKDVHEDSLTVVFENNWQPERQVPFNEVRLPPPPDIKKEISEGDEVEVYSRANDQEPCGWWLAKVRMMKGEFYVIEYAACDATYNEIVTFERLRPVNQNKTVKKNTFFKCTVDVPEDLREACANENAHKDFKKAVGACRIFYHPETTQLMILSASEATVKRVNILSDMHLRSIRTKLMLMSRNEEATKHLECTKQLAAAFHEEFVVREDLMGLAIGTHGSNIQQARKVPGVTAIELDEDTGTFRIYGESADAVKKARGFLEFVEDFIQVPRNLVGKVIGKNGKVIQEIVDKSGVVRVRIEGDNENKLPREDGMVPFVFVGTKESIGNVQVLLEYHIAYLKEVEQLRMERLQIDEQLRQIGSRSYSGRGRGRRGPNYTSGYGTNSELSNPSETESERKDELSDWSLAGEDDRDSRHQRDSRRRPGGRGRSVSGGRGRGGPRGGKSSISSVLKDPDSNPYSLLDNTESDQTADTDASESHHSTNRRRRSRRRRTDEDAVLMDGMTESDTASVNENGLVTVADYISRAESQSRQRNLPRETLAKNKKEMAKDVIEEHGPSEKAINGPTSASGDDISKLQRTPGEEKINTLKEENTQEAAVLNGVS

SEQ ID NO: 96499 - protein, 377 aa, Homo sapiens
MAAAAGPGAALSPRPCDSDPATPGAQSPKDDNEDNSNDGTQPSKRRRMGSGDSSRSCETSSQDLGFSYYPAENLIEYKWPPDETGEYYMLQEQVSEYLGVTSFKRKYPDLERRDLSHKEKLYLRELNVITETQCTLGLTALRSDEVIDLMIKEYPAKHAEYSVILQEKERQRITDHYKEYSQMQQQNTQKVEASKVPEYIKKAAKKAAEFNSNLNRERMEERRAYFDLQTHVIQVPQGKYKVLPTERTKVSSYPVALIPGQFQEYYKRYSPDELRYLPLNTALYEPPLDPELPALDSDGDSDDGEDGRGDEKRKNKGTSDSSSGNVSEGESPPDSQEDSFQGRQKSKDKAATPRKDGPKRSVLSKSVPGYKVEEKSP

SEQ ID NO: 96500 - protein, 90 aa, Homo sapiens
MVHGSVTFRDVAIDFSQEEWECLQPDQRTLYRDVMLENYSHLISLGSSISKPDVITLLEQEKEPWMVVRKETSRRYPDLELKYGPEKVSP

SEQ ID NO: 96501 - protein, 672 aa, Homo sapiens
MEALEVDDISPALEVTEEFFSTLDSNLEKAVQQAEVYGIQEVPELVGHEVLSNITDNGAMRNVTSLGKGGMIWDHCKSRLLETKAQNVFPAKEQFMVQRGTTPDNLSWMEQKEASTFNFFNICQRRRDRPRSVNDLLDETSTFKPGHARSRSDITQVDWRVVLKTTPLQQQQQQQPLLQGPHVTRPSFLLPSPNKIEDAQGNTEHKQTFPNILKKGYLEIRKDHDSYWQSCYAELSPYNLYFYSLDSSGNQNLYATYQLSHFQSISVLGNLEARMVDTVLYDNTQLQLKAESPWEALDWGQKLWEVVHAAVPGYMGRQNELTISPGLGHHDDYTQNHSFQKKTSGLLPPSPVLDSSKQYQNILKSGTLYRLTVQNNWKAFTFVLSRAYLMAFQPGKLDEDPLLSYNVDVCLAVQMDNLDGCDSCFQVIFPQDVLRLRAETRQRAQEWMEALKIAANVARSSEQNLQVTLRNKPKDQMGGHELRKNKRQSVTTSFLSILTTLSLERGLTAQSFKCAGCQRSIGLSNGKAKVCNYSGWYYCSSCHVDDSFLIPARIVHNWDTSKYKVSKQAKEFLEYVYEEPLIDIQQENAMLYHHAEPLAAVLRLRQRLKSLRAYLFSCRAAVAEDLRRRNDQQHALVMLNVFGEFSPENTSFNRSTCIHLPTCSRPRHYSQI

SEQ ID NO: 96502 - protein, 60 aa, Homo sapiens
MVKKIEISQHAKYTCSFCGKTKMKRRAVGIWHCGSCMKTVAGGAWTYKDAKMEPNLHELC

SEQ ID NO: 96503 - protein, 708 aa, Homo sapiens
MRVLGGRCGALLACLLLVLPVSEANFCLYFRNDFIYNRACISVLVGLSGCNFFYSICFLSKQQASQVLVRKRRANSLLEETKQGNLERECIEELCNKEEAREVFENDPETDYFYPKYLVCLRSFQTGLFTAARQSTNAYPDLRSCVNAIPDQCSPLPCNEDGYMSCKDGKASFTCTCKPGWQGEKCEFDINECKDPSNINGGCSQICDNTPGSYHCSCKNGFVMLSNKKDCKDVDECSLKPSICGTAVCKNIPGDFECECPEGYRYNLKSKSCEDIDECSENMCAQLCVNYPGGYTCYCDGKKGFKLAQDQKSCEVVSVCLPLNLDTKYELLYLAEQFAGVVLYLKFRLPEISRFSAEFDFRTYDSEGVILYAESIDHSAWLLIALRGGKIEVQLKNEHTSKITTGGDVINNGLWNMVSVEELEHSISIKIAKEAVMDINKPGPLFKPENGLLETKVYFAGFPRKVESELIKPINPRLDGCIRSWNLMKQGASGIKEIIQEKQNKHCLVTVEKGSYYPGSGIAQFHIDYNNVSSAEGWHVNVTLNIRPSTGTGVMLALVSGNNTVPFAVSLVDSTSEKSQDILLSVENTVIYRIQALSLCSDQQSHLEFRVNRNNLELSTPLKIETISHEDLQRQLAVLDKAMKAKVATYLGGLPDVPFSATPVNAFYNGCMEVNINGVQLDLDEAISKHNDIRAHSCPSVWKKTKNS

SEQ ID NO: 96504 - protein, 145 aa, Homo sapiens
MADTIFGSGNDQWVCPNDRQLALRAKLQTGWSVHTYQTEKQRRKQHLSPAEVEAILQVIQRAERLDVLEQQRIGRLVERLETMRRNVMGNGLSQCLLCGEVLGFLGSSSVFCKDCRKKVCTKCGIEASPGQKRPLWLCKICSEQR

SEQ ID NO: 96505 - protein, 166 aa, Homo sapiens
MAALTRDPQFQKLQQWYREHRSELNLRRLFDANKDRFNHFSLTLNTNHGHILVDYSKNLVTEDVMRMLVDLAKSRGVEAARERMFNGEKINYTEGRAVLHVALRNRSNTPILVDGKDVMPEVNKVLDKMKSFCQGPLMVTEALKPYSSGGPRVWYVSNIDGTHIAK

SEQ ID NO: 96506 - protein, 347 aa, Homo sapiens
MLWFGQPGPGGWNRKCLRPFTLPRGQHPQPSYGFPQVNEVVFSPGESHCATCSEDGSVRVWALASMELVIQFQVLNQSCLCLAWSPPCCGRPEQQRLAAGYGDGSLRIFSVSRTAMELKMHPHPVALTTVAFSTDGQTVLSGDKDGLVAVSHPCTGTTFRVLSDHQGAPISTICVTCKECEDLGVEGTDLWLAASGDQRVSVWASDWLRNHCELVDWLSFPMPATTETQGHLPPSLAAFCPWDGALLMYVGPGVYKEVIIYNLCQKQVVEKIPLPFFAMSLSLSPGTHLLAVGFAECMLRLVDCAMGTAQDFAGHDNAVHLCRFTPSARLLFTAARNEILVWEVPGL

SEQ ID NO: 96507 - protein, 50 aa, Homo sapiens
MADEALFLLLHNEMVSGVYKSAEQGEVENGRCITKLENMGFRVGQGLIER

SEQ ID NO: 96508 - protein, 478 aa, Homo sapiens
MAGAGERKGKKDDNGIGTAIDFVLSNARLVLGVGGAAMLGIATLAVKRMYDRAISAPTSPTRLSHSGKRSWEEPNWMGSPRLLNRDMKTGLSRSLQTLPTDSSTFDTDTFCPPRPKPVARKGQVDLKKSRLRMSLQEKLLTYYRNRAAIPAGEQARAKQAAVDICAELRSFLRAKLPDMPLRDMYLSGSLYDDLQVVTADHIQLIVPLVLEQNLWSCIPGEDTIMNVPGFFLVRRENPEYFPRGSSYWDRCVVGGYLSPKTVADTFEKVVAGSINWPAIGSLLDYVIRPAPPPEALTLEVQYERDKHLFIDFLPSVTLGDTVLVAKPHRLAQYDNLWRLSLRPAETARLRALDQADSGCRSLCLKILKAICKSTPALGHLTASQLTNVILHLAQEEADWSPDMLADRFLQALRGLISYLEAGVLPSALNPKDKALKERSLRHQVRMMEVDSRLNVSWKIQSLVGVWWPCFLPRQALLF

SEQ ID NO: 96509 - protein, 204 aa, Homo sapiens
EKAAATAEEPDPKGIPEFWFTIFRNVDMLSELVQEYDEPILKHLQDIKVKFSDPGQPMSFVLEFHFEPNDYFTNSVLTKTYKMKSEPDKADPFSFEGPEIVDCDGCTIDWKKGKNVTVKTIKKKQKHKGRGTVRTITKQVPNESFFNFFNPLKASGDGESLDEDSEFTLASDFEIGHFFRERIVPRAVLYFTGEAIEDDDNPDM

SEQ ID NO: 96510 - protein, 393 aa, Homo sapiens
MATATRLLGWRVASWRLRPPLAGFVSQRAHSLLPVDDAINGLSEEQRQEFWKQLGNLGVLGITAPVQYGGSGLGYLEHVLVMEEISRASGAVGLSYGAHSNLCINQLVRNGNEAQKEKYLPKLISGEYIGALAMSEPNAGSDVVSMKLKAEKKGNHYILNGNKFWITNGPDADVLIVYAKTDLAAVPASRGITAFIVEKGMPGFSTSKKLDKLGMRGSNTCELIFEDCKIPAANILGHENKGVYVLMSGLDLERLVLAGGPLGLMQAVLDHTIPYLHVREAFGQKIGHFQLMQGKMADMYTRLMACRQYVYNVAKACDEGHCTAKDCAGVILYSAECATQVALDGIQCFGGNGYINDFPMGRFLRDAKLYEIGAGTSEVRRLVIGRAFNADFH

SEQ ID NO: 96511 - protein, 898 aa, Homo sapiens
MASEGTNIPSPVVRQIDKQFLICSICLERYKNPKVLPCLHTFCERCLQNYIPAHSLTLSCPVCRQTSILPEKGVAALQNNFFITNLMDVLQRTPGSNAEESSILETVTAVAAGKPLSCPNHDGNVMEFYCQSCETAMCRECTEGEHAEHPTVPLKDVVEQHKASLQVQLDAVNKRLPEIDSALQFISEIIHQLTNQKASIVDDIHSTFDELQKTLNVRKSVLLMELEVNYGLKHKVLQSQLDTLLQGQESIKSCSNFTAQALNHGTETEVLLVKKQMSEKLNELADQDFPLHPRENDQLDFIVETEGLKKSIHNLGTILTTNAVASETVATGEGLRQTIIGQPMSVTITTKDKDGELCKTGNAYLTAELSTPDGSVADGEILDNKNGTYEFLYTVQKEGDFTLSLRLYDQHIRGSPFKLKVIRSADVSPTTEGVKRRVKSPGSGHVKQKAVKRPASMYSTGKRKENPIEDDLIFRVGTKGRNKGEFTNLQGVAASTNGKILIADSNNQCVQIFSNDGQFKSRFGIRGRSPGQLQRPTGVAVHPSGDIIIADYDNKWVSIFSSDGKFKTKIGSGKLMGPKGVSVDRNGHIIVVDNKACCVFIFQPNGKIVTRFGSRGNGDRQFAGPHFAAVNSNNEIIITDFHNHSVKVFNQEGEFMLKFGSNGEGNGQFNAPTGVAVDSNGNIIVADWGNSRIQSKKKGLSAEEKRTRMMEIFSETKDVFQLKDLEKIAPKEKGITAMSVKEVLQSLVDDGMVDCERIGTSNYYWAFPSKALHARKHKLEVLESQLSEGSQKHASLQKSIEKAKIGRCETEERTRLAKELSSLRDQREQLKAEVEKYKDCDPQVVEEIRQANKVAKEAANRWTDNIFAIKSWAKRKFGFEENKIDRTFGIPEDFDYID

SEQ ID NO: 96512 - protein, 490 aa, Homo sapiens
MVRGARQPQQPRSRLAPRLTGTVEKPPRKRRSRTEFALKEIMSSGGAEDDIPQGERKTVTDFCYLLDKSKQLFNGLRDLPQYGQKQWQSYFGRTFDVYTKLWKFQQQHRQVLDNRYGLKRWQIGEIASKIGQLYYHYYLRTSETSYLNEAFSFYSAIRQRSYYSQVNKEDRPELVVKKLRYYARFIVVCLLLNKMDVVKDLVKELSDEIEDYTHRFNTEDQVEWNLVLQEVAAFIEADPVMVLNDDNTIVITSNRLAETGAPLLEQGMIVGQLSLADALIIGNCNNQVKFSELTVDMFRMLQALEREPMNLASQMNKPGMQESADKPTRRENPHKYLLYKPTFSQLYTFLAASFKELPANSVLLIYLSATGVFPTGRSDSEGPYDFGGVLTNSNRDIINGDAIHKRNQSHKEMHCLHPGDLYPFTRKPLFIIVDSSNSVAYKNFTNLFGQPLVCLLSPTAYPKALQACAEAYGKSVKNIFEKSTVILPSY

SEQ ID NO: 96513 - protein, 91 aa, Homo sapiens
MAAAATLRLSAQGTVTFEDVAVNFTWEEWNLLSEAQRCLYRDVTLENLALISSLGMTFLHVCQALDSLRQVIHPPTSASQSAGITGVSHCA

SEQ ID NO: 96514 - protein, 117 aa, Homo sapiens
MRRISLTSSPVRLLLFLLLLLIALEIMVGGHSLCFNFTIKSLSRPGQPWCEAQVFLNKNLFLQYNSDNNMVKPLGLLGKKILPLCKSRCFVNVKQNGALVHPGSSPPMERNPSSLTQ

SEQ ID NO: 96515 - protein, 294 aa, Homo sapiens
MRPEGSLTYRVPERLRQGFCGVGRAAQALVCASAKEGTAFRMEAVQEGAAGVESEQAALGEEAVLLLDDIMAEVEVVAEEEGLVERREEAQRAQQAVPGPGPMTPESALEELLAVQVELEPVNAQARKAFSRQREKMERRRKPHLDRRGAVIQSVPGFWANVIANHPQMSALITDEDEDMLSYMVSLEVEEEKHPVHLCKIMLFFRSNPYFQNKVITKEYLVNITEYRASHSTPIEWYPDYEVEAYRRRHHNSSLNFFNWFSDHNFAGSNKIAESPDRSYVRTCGAIPCNTTRG

SEQ ID NO: 96516 - protein, 572 aa, Homo sapiens
MSGPLEGADGGGDPRPGESFCPGGVPSPGPPQHRPCPGPSLADDTDANSNGSSGNESNGHESRGASQRSSHSSSSGNGKDSALLETTESSKSTNSQSPSPPSSSIAYSLLSASSEQDNPSTSGCSSEQSARARTQKELMTALRELKLRLPPERRGKGRSGTLATLQYALACVKQVQANQEYYQQWSLEEGEPCSMDMSTYTLEELEHITSEYTLQNQDTFSVAVSFLTGRIVYISEQAAVLLRCKRDVFRGTRFSELLAPQDVGVFYGSTAPSRLPTWGTGASAGSGLRDFTQEKSVFCRIRGGPDRDPGPRYQPFRLTPYVTKIRVSDGAPAQPCCLLIAERIHSGYEAPRIPPDKRIFTTRHTPSCLFQDVDERAAPLLGYLPQDLLGAPVLLFLHPEDRPLMLAIHKKILQLAGQPFDHSPIRFCARNGEYVTMDTSWAGFVHPWSRKVAFVLGRHKVRTAPLNEDVFTPPAPSPAPSLDTDIQELSEQIHRLLLQPVHSPSPTGLCGVGAVTSPGPLHSPGSSSDSNGGDAEGPGPPAPLQARSRPRPFPANPQTQSWRRVLLPSRPH

SEQ ID NO: 96517 - protein, 274 aa, Homo sapiens
MARRGPGWRPLLLLVLLAGAAQGGLYFRRGQTCYRPLRGDGLAPLGRSTYPRPHEYLSPADLPKSWDWRNVDGVNYASITRNQHIPQYCGSCWAHASTSAMADRINIKRKGAWPSTLLSVQNVIDCGNAGSCEGGNDLSVWDYAHQHGIPDETCNNYQAKDQECDKFNQCGTCNEFKECHAIRNYTLWRVGDYGSLSGREKMMAEIYANGPISCGIMATERLANYTGGIYAEYQDTTYINHVVSVAGWGISDGTEYWIVRNSWGEPWGHARLPF

SEQ ID NO: 96518 - protein, 76 aa, Homo sapiens
MSNPFLKQVFNKDKTFRPKRKFEPGTQRFELHKKAQASLNAGLDLRLAVQLPPGEDLNDWVAVHVVDFFNRVNLIY

SEQ ID NO: 96519 - protein, 277 aa, Homo sapiens
MGADGMYDKLRMLNGQTGSWGTRPGWYPGTSVPGQPTQDGCQQQEGGGENTNSISSNGEDSDEAQMRLQLKRKLQRNRTSFTQEQIEALEKEFERTHYPDVFARERLAAKIDLPEARIQVWFSNRRAKWRREEKLRNQRRQASNTPSHIPISSSFSTSVYQPIPQPTTPVSSFTSGSMLGRTDTALTNTYSALPPMPSFTMANNLPMQPPVPSQTSSYSCMLPTSPSVNGRSYDTYTPPHMQTHMNSQPMGTSGTTSTGLISPGVSVPVQVPGSEPD

SEQ ID NO: 96520 - protein, 248 aa, Homo sapiens
MDSSLTRRGQICWYQKPGVGLDAINDANLLEACIYRLLKLYCREQPYYLNLIELFLQSSYQTEIGQTLDLLTAPQGNVDLVRFTEKRYKSIVKYKTAFYSFYLPIAAAMYMAGIDGEKEHANAKKILLEMGEFFQIQDDYLDLFGDPSVTGKIGTDIQDNKCSWLVVQCLQRATPEQYQILKENYGQKEAEKVARVKALYEELDLPAVFLQYEEDSYSHIMALIEQYAAPLPPAVFLGLARKIYKRRK

SEQ ID NO: 96521 - protein, 933 aa, Homo sapiens
MFGPRGSTSAGAGRKEILSRSSVMGVRGLQGFVGSTCPHICTVVNFKELAEHHRSKYPGCTPTIVVDAMCCLRYWYTPESWICGGQWREYFSALRDFVKTFTAAGIKLIFFFDGMVEQDKRDEWVKRRLKNNREISRIFHYIKSHKEQPGRNMFFIPSGLAVFTRFALKTLGQETLCSLQEADYEVASYGLQHNCLGILGEDTDYLIYDTCPYFSISELCLESLDTVMLCREKLCESLGLCVADLPLLACLLGNDIIPEGMFESFRYKCLSSYTSVKENFDKKGNIILAVSDHISKVLYLYQGEKKLEEILPLGPNKALFYKGMASYLLPGQKSPWFFQKPKGVITLDKQVISTSSDAESREEVPMCSDAESRQEVPMCTGPESRREVPVYTDSEPRQEVPMCSDPEPRQEVPTCTGPESRREVPMCSDPEPRQEVPMCTGPEARQEVPMYTDSEPRQEVPMYTDSEPRQEVPMYTGSEPRQEVPMYTGPESRQEVPMYTGPESRQEVLIRTDPESRQEIMCTGHESKQEVPICTDPISKQEDSMCTHAEINQKLPVATDFEFKLEALMCTNPEIKQEDPTNVGPEVKQQVTMVSDTEILKVARTHHVQAESYLVYNIMSSGEIECSNTLEDELDQALPSQAFIYRPIRQRVYSLLLEDCQDVTSTCLAVKEWFVYPGNPLRHPDLVRPLQMTIPGGTPSLKILWLNQEPEIQVRRLDTLLACFNLSSSREELQAVESPFQALCCLLIYLFVQVDTLCLEDLHAFIAQALCLQGKSTSQLVNLQPDYINPRAVQLGSLLVRGLTTLVLVNSACGFPWKTSDFMPWNVFDGKLFHQKYLQSEKGYAVEVLLEQNRSRLTKFHNLKAVVCKACMKENRRITGRAHWGSHHAGRWGRQGSSYHRTGSGYSRSSQGQPWRDQGPGSRQYEHDQWRRY

SEQ ID NO: 96522 - protein, 75 aa, Homo sapiens
MATAGNPWGWFLGYLILGVAGSLVSGSCSQIINGEDCSPHSQPWQAALVMENELFCSGVLVHPQWVLSAAHCFQK

SEQ ID NO: 96523 - protein, 35 aa, Homo sapiens
MMQESGTETKSNGSAIQNGSGGSNHLLECGGLREG

SEQ ID NO: 96524 - protein, 143 aa, Homo sapiens
MIVFVRFNSSHGFPVEVDSDTSIFQLKEVVAKRQGVPADQLRVIFAGKELRNDWTVQNCDLDQQSIVHIVQRPWRKGQEMNATGGDDPRNAAGGCEREPQSLTRVDLSSSVLPGDSVGLAVILHTDSRKDSPPAGSPGSILLG

SEQ ID NO: 96525 - protein, 822 aa, Homo sapiens
MRLHLLLLLALCGAGTTAAELSYSLRGNWSICNGNGSLELPGAVPGCVHSALFQQGLIQDSYYRFNDLNYRWVSLDNWTYSKEFKIPFEISKWQKVNLILEGVDTVSKILFNEVTIGETDNMFNRYEQCSFSWDWGPSFPTQGIWKDVRIEAYNICHLNYFTFSPIYDKSAQEWNLEIESTFDVVSSKPVGGQVIVAIPKLQTQQTYSIELQPGKRIVELFVNISKNITVETWWPHGHGNQTGYNMTVLFELDGGLNIEKSAKVYFRTVELIEEPIKGSPGLSFYFKINGFPIFLKGSNWIPADSFQDRVTSELLRLLLQSVVDANMNTLRVWGGGIYEQDEFYELCDELGIMVWQDFMFACALYPTDQGFLDSVTAEVAYQIKRLKSHPSIIIWSGNNENEEALMMNWYHISFTDRPIYIKDYVTLYVKNIRELVLAGDKSRPFITSSPTNGAETVAEAWVSQNPNSNYFGDVHFYDYISDCWNWKVFPKARFASEYGYQSWPSFSTLEKVSSTEDWSFNSKFSLHRQHHEGGNKQMLYQAGLHFKLPQSTDPLRTFKDTIYLTQVMQAQCVKTETEFYRRSRSEIVDQQGHTMGALYWQLNDIWQAPSWASLEYGGKWKMLHYFAQNFFAPLLPVGFENENTFYIYGVSDLHSDYSMTLSVRVHTWSSLEPVCSRVTERFVMKGGEAVCLYEEPVSELLRRCGNCTRESCVVSFYLSADHELLSPTNYHFLSSPKEAVGLCKAQITAIISQQGDIFVFDLETSAVAPFVWLDVGSIPGRFSDNGFLMTEKTRTILFYPWEPTSKNELEQSFHVTSLTDIY

SEQ ID NO: 96526 - protein, 163 aa, Homo sapiens
  MOD_RES (1)..(1): Any amino acid
XISALVEIPKNCVVAAVGKELIIFRLVAPTEGSLEWDILEVKRLLDHQDNILSLINVNDLSFVTGSHVGELIIWDALDWTMQAYERNFWDPSPQLDTQQEIKLCQKSNDISIHHFTCDEENVFAAVGRGLYVYSLQMKRVIACQKTAHDSNVLHVARLPNRFF

SEQ ID NO: 96527 - protein, 230 aa, Homo sapiens
MHDKGITTAAVCVYPARVCDAVKALKAAGCNIPVASVAAGFPAGQTHLKTRLEEIRLAVEDGATEIDVVINRSLVLTGQWEALYDEIRQFRKACGEAHLKTILATGELGTLTNVYKASMIAMMAGSDFIKTSTGKETVNATFPVAIVMLRAIRDFFWKTGNKIGFKPAGGIRSAKDSLAWLSLVKEELGDEWLKPELFRIGASTLLSDIERQIYHHVTGRYAAYHDLPMS

SEQ ID NO: 96528 - protein, 140 aa, Homo sapiens
GPPLGGQQSQPSAGDGNQDDGPQQGPPQQGGQQQQGPPPPQGKPQGPPQQGGQQQQGPPPPQGKPQGPPQQGGHPPPPQGRPQGPPQQGGHPRPPRGRPQGPPQQGGHQQGPPPPPPGKPQGPPPQGGRPQGPPQGQSPQ

SEQ ID NO: 96529 - protein, 873 aa, Homo sapiens
MLRPQGLLWLPLLFTSVCVMLNSNVLLWITALAIKFTLIDSQAQYPVVNTNYGKIQGLRTPLPSEILGPVEQYLGVPYASPPTGERRFQPPESPSSWTGIRNATQFSAVCPQHLDERFLLHDMLPIWFTTSLDTLMTYVQDQNEDCLYLNIYVPMEDGTNIKRNADDITSNDHGEDKDIHEQNSKKPVMVYIHGGSYMEGTGNMIDGSILASYGNVIVITINYRLGILAQNTLAHGNCKHRCQLHLQAPRDCKSAYPFRNEDEIRGFLSTGDQAAKGNYGLLDQIQALRWIEENVGAFGGDPKRVTIFGSGAGASCVSLLTLSHYSEGLFQKAIIQSGTALSSWAVNYQPAKYTRILADKVGCNMLDTTDMVECLKNKNYKELIQQTITPATYHIAFGPVIDGDVIPDDPQILMEQGEFLNYDIMLGVNQGEGLKFVDGIVDNEDGVTPNDFDFSVSNFVDNLYGYPEGKDTLRETIKFMYTDWADKENPETRRKTLVALFTDHQWVAPAVATADLHAQYGSPTYFYAFYHHCQSEMKPSWADSAHGDEVPYVFGIPMIGPTELFSCNFSKNDVMLSAVVMTYWTNFAKTGDPNQPVPQDTKFIHTKPNRFEEVAWSKYNPKDQLYLHIGLKPRVRDHYRATKVAFWLELVPHLHNLNEIFQYVSTTTKVPPPDMTSFPYGTRRSPAKIWPTTKRPAITPANNPKHSKDPHKTGPEDTTVLIETKRDYSTELSVTIAVGASLLFLNILAFAALYYKKDKRRHETHRHPSPQRNTTNDITHIQNEEIMSLQMKQLEHDHECESLQAHDTLRLTCPPDYTLTLRRSPDDIPFMTPNTITMIPNTLMGMQPLHTFKTFSGGQNSTNLPHGHSTTRV

SEQ ID NO: 96530 - protein, 130 aa, Homo sapiens
MASDLIRTILAVALISKLGTAVDAELMPSGAILQNKRENLPRVCHALAFLGMARCQDLFLVRLQGWKLGTRFQDGPRSTPQEEGGSPQRKRGMPVQIHFLLKSFLSSPITFAFISLARTVSLATAICKIV

SEQ ID NO: 96531 - protein, 780 aa, Homo sapiens
MSARTPLPTVNERDTENHTSVDGYTEPHIQPTKSSSRQNIPRCRNSITSATDEQPHIGNYRLQKTIGKGNFAKVKLARHVLTGREVAVKIIDKTQLNPTSLQKLFREVRIMKILNHPNIVKLFEVIETEKTLYLVMEYASGGEVFDYLVAHGRMKEKEARAKFRQIVSAVQYCHQKYIVHRDLKAENLLLDGDMNIKIADFGFSNEFTVGNKLDTFCGSPPYAAPELFQGKKYDGPEVDVWSLGVILYTLVSGSLPFDGQNLKELRERVLRGKYRIPFYMSTDCENLLKKLLVLNPIKRGSLEQIMKDRWMNVGHEEEELKPYTEPDPDFNDTKRIDIMVTMGFARDEINDALINQKYDEVMATYILLGRKPPEFEGGESLSSGNLCQRSRPSSDLNNSTLQSPAHLKVQRSISANQKQRRFSDHAGPSIPPAVSYTKRPQANSVESEQKEEWDKDVARKLGSTTVGSKSEMTASPLVGPERKKSSTIPSNNVYSGGSMARRNTYVCERTTDRYVALQNGKDSSLTEMSVSSISSAGSSVASAVPSARPRHQKSMSTSGHPIKVTLPTIKDGSEAYRPGTTQRVPAASPSAHSISTATPDRTRFPRGSSSRSTFHGEQLRERRSVAYNGPPASPSHETGAFAHARRGTSTGIISKITSKFVRRSTSGEPKERDKEEGKDSKPRSLRFTWSMKTTSSMDPNDMMREIRKVLDANNCDYEQKERFLLFCVHGDARQDSLVQWEMEVCKLPRLSLNGVRFKRISGTSIAFKNIASKIANELKL

SEQ ID NO: 96532 - protein, 136 aa, Homo sapiens
MMPQLQFKDAFWCRDFTAHTGYEVLLQRLLDGRKMCKDMEELLRQRAQAEERYGKELVQIARKAGGQTEINSLRASFDSLKQQMENVGSSHIQLALTLREELRSLEEFRERQKEQRKKGSLPRPRPSAQNLVSPAV

SEQ ID NO: 96533 - protein, 115 aa, Homo sapiens
NLERVCLLGCGFSTGYGAAINNAKVTPGSTCAVFGLGGVGLSAVMGCKAAGASRIIGIDINSEKFVKAKALGATDCLNPRDLHKPIQEVIIELTKGGVDFALDCAGGSETMVGKV

SEQ ID NO: 96534 - protein, 833 aa, Homo sapiens
MEEKRRKYSISSDNSDTTDSHATSTSASRCSKLPSSTKSGWPRQNEKKPSEVFRTDLITAMKIPDSYQLSPDDYYILADPWRQEWEKGVQVPAGAEAIPEPVVRILPPLEGPPAQASPSSTMLGEGSQPDWPGGSRYDLDEIDAYWLELINSELKEMERPELDELTLERVLEELETLCHQNMARAIETQEGLGIEYDEDVVCDVCRSPEGEDGNEMVFCDKCNVCVHQACYGILKVPTGSWLCRTCALGVQPKCLLCPKRGGALKPTRSGTKWVHVSCALWIPEVSIGCPEKMEPITKISHIPASRWALSCSLCKECTGTCIQCSMPSCVTAFHVTCAFDHGLEMRTILADNDEVKFKSFCQEHSDGGPRNEPTSEPTEPSQAGEDLEKVTLRKQRLQQLEEDFYELVEPAEVAERLDLAEALVDFIYQYWKLKRKANANQPLLTPKTDEVDNLAQQEQDVLYRRLKLFTHLRQDLERVRNLCYMVTRRERTKHAICKLQEQIFHLQMKLIEQDLCRERSGRRAKGKKSDSKRKGCEGSKGSTEKKEKVKAGPDSVLGQLGLSTSFPIDGTFFNSWLAQSVQITAENMAMSEWPLNNGHREDPAPGLLSEELLQDEETLLSFMRDPSLRPGDPARKARGRTRLPAKKKPPPPPPQDGPGSRTTPDKAPKKTWGQDAGSGKGGQGPPTRKPPRRTSSHLPSSPAAGDCPILATPESPPPLAPETPDEAASVAADSDVQVPGPAASPKPLGRLRPPRESKVTRRLPGARPDAGMGPPSAVAERPKVSLHFDTETDGYFSDGEMSDSDVEAEDGGVQRGPREAGAEEVVRMGVLAS

SEQ ID NO: 96535 - protein, 83 aa, Homo sapiens
  MOD_RES (1)..(1): Any amino acid
XRSGSGNFGGGRGGGFGGNDNFGRGGNFSGRGSNFGGGGSYNDFGNYNNQSSNFGPMKGGNFGGRSSGPYGGGGQYFAKPRNQ

SEQ ID NO: 96536 - protein, 45 aa, Homo sapiens
MAEKVNNFPPLPKFIPLKPCFYQDFEADIPPQHVSMTKRLYYLWM

SEQ ID NO: 96537 - protein, 37 aa, Homo sapiens
MVVDRLFLWTFIIFTSVGTLVIFLDATYHLPPPDPFP

SEQ ID NO: 96538 - protein, 360 aa, Homo sapiens
MTSSRLWFSLLLAAAFAGRATALWPWPQNFQTSDQRYVLYPNNFQFQYDVSSAAQPGCSVLDEAFQRYRDLLFGSGSWPRPYLTGKRHTLEKNVLVVSVVTPGCNQLPTLESVENYTLTINDDQCLLLSETVWGALRGLETFSQLVWKSAEGTFFINKTEIEDFPRFPHRGLLLDTSRHYLPLSSILDTLDVMAYNKLNVFHWHLVDDPSFPYESFTFPELMRKGSYNPVTHIYTAQDVKEVIEYARLRGIRVLAEFDTPGHTLSWGPGIPGLLTPCYSGSEPSGTFGPVNPSLNNTYEFMSTFFLEVSSVFPDFYLHLGGDEVDFTCWKSNPEIQDFMRKKGFGEDFKQLESFYIQTYP

SEQ ID NO: 96539 - protein, 526 aa, Homo sapiens
MPLELTQSRVQKIWVPVDHRPSLPRSCGPKLTNSPTVIVMVGLPARGKTYISKKLTRYLNWIGVPTKVFNVGEYRREAVKQYSSYNFFRPDNEEAMKVRKQCALAALRDVKSYLAKEGGQIAVFDATNTTRERRHMILHFAKENDFKAFFIESVCDDPTVVASNIMEVKISSPDYKDCNSAEAMDDFMKRISCYEASYQPLDPDKCDRDLSLIKVIDVGRRFLVNRVQDHIQSRIVYYLMNIHVQPRTIYLCRHGENEHNLQGRIGGDSGLSSRGKKFASALSKFVEEQNLKDLRVWTSQLKSTIQTAEALRLPYEQWKALNEIDAGVCEELTYEEIRDTYPEEYALREQDKYYYRYPTGESYQDLVQRLEPVIMELERQENVLVICHQAVLRCLLAYFLDKSAEEMPYLKCPLHTVLKLTPVAYGCRVESIYLNVESVCTHRERSEDAKKGPNPLMRRNSVTPLASPEPTKKPRINSFEEHVASTSAALPSCLPPEVPTQLPGQPLLGQACLRTVCHIFSKFSPY

SEQ ID NO: 96540 - protein, 111 aa, Homo sapiens
MGPIWSSYYGNCRSLLFVMDASDPTQLSASCVQLLGLLSAEQLAEASVLILFNKIDLPCYMSTEEMKSLIRLPDIIACAKQNITTAEISAREGTGLAGVLAWLQATHRAND

SEQ ID NO: 96541 - protein, 56 aa, Homo sapiens
MAADGVDERSPLLSASHSGNVTPTAPPYLQESSPRGLLTVESPELQVPYKRRWSYK

SEQ ID NO: 96542 - protein, 1126 aa, Homo sapiens
MEPNDSTSTAVEEPDSLEVLVKTLDSQTRTFIVGAQMNVKEFKEHIAASVSIPSEKQRLIYQGRVLQDDKKLQEYNVGGKVIHLVERAPPQTHLPSGASSGTGSASATHGGGSPPGTRGPGASVHDRNANSYVMVGTFNLPSDGSAVDVHINMEQAPIQSEPRVRLVMAQHMIRDIQTLLSRMECRGGPQPQHSQPPPQPPAVTPEPVALSSQTSEPVESEAPPREPMEAEEVEERAPAQNPELTPGPAPAGPTPAPETNAPNHPSPAEYVEVLQELQRLESRLQPFLQRYYEVLGAAATTDYNNNHEGREEDQRLINLVGESLRLLGNTFVALSDLRCNLACTPPRHLHVVRPMSHYTTPMVLQQAAIPIQINVGTTVTMTGNGTRPPPTPNAEAPPPGPGQASSVAPSSTNVESSAEGAPPPGPAPPPATSHPRVIRISHQSVEPVVMMHMNIQDSGTQPGGVPSAPTGPLGPPGHGQTLGQQVPGFPTAPTRVVIARPTPPQARPSHPGGPPVSGTLQGAGLGTNASLAQMVSGLVGQLLMQPVLVAQGTPGMAPPPAPATASASAGTTNTATTAGPAPGGPAQPPPTPQPSMADLQFSQLLGNLLGPAGPGAGGPGVASPTITVAMPGVPAFLQGMTDFLQATQTAPPPPPPPPPPPPAPEQQTMPPPGSPSGGAGSPGGLGLESLSPEFFTSVVQGVLSSLLGSLGARAGSSESIAAFIQRLSGSSNIFEPGADGALGFFGALLSLLCQNFSMVDVVMLLHGHFQPLQRLQPQLRSFFHQHYLGGQEPTPSNIRMATHTLITGLEEYVRESFSLVQVQPGVDIIRTNLEFLQEQFNSIAAHVLHCTDSGFGARLLELCNQGLFECLALNLHCLGGQQMELAAVINGRIRRMSRGVNPSLVSWLTTMMGLRLQVVLEHMPVGPDAILRYVRRVGDPPQPLPEEPMEVQGAERASPEPQRENASPAPGTTAEEAMSRGPPPAPEGGSRDEQDGASAETEPWAAAVPPEWVPIIQQDIQSQRKVKPQPPLSDAYLSGMPAKRRKTMQGEGPQLLLSEAVSRAAKAAGARPLTSPESLSRDLEAPEVQESYRQQLRSDIQKRLQEDPNYSPQRFPNAQRAFADDP

SEQ ID NO: 96543 - protein, 163 aa, Homo sapiens
MELQDPKMNGALPSDAVGYRQEREGFLPSRGPAPGSKPVQFMDFEGKTSFGMSVFNLSNAIMGSGILGLAYAMAHTGVIFFLALLLCIALLSSYSIHLLLTCAGIAGIRAYEQLGQRAFGPAGKVVVATVICLHNVGAMSSYLFIIKSELPLVIGTFLYMDPE

SEQ ID NO: 96544 - protein, 342 aa, Homo sapiens
METKHLGRGGAGRAGPHLWRGPRPNCSAGAGGGEPTHSPNSRAVTHQRAPAARECVCENYKLAVNCFVNNNRQCQCTSVGAQNTVICSKLAAKCLVMKAEMNGSKLGRRAKPEGALQNNDGLYDPDCDESGLFKAKQCNGTSMCWCVNTAGVRRTDKDTEITCSERVRTYWIIIELKHKAREKPYDSKSLRTALQKEITTRYQLDPKFITSILYENNVITIDLVQNSSQKTQNDVDIADVAYYFEKDVKGESLFHSKKMDLTVNGEQLDLDPGQTLIYYVDEKAPEFSMQGLKAGVIAVIVVVVIAVVAGIVVLVISRKKRMAKYEKAEIKEMGEMHRELNA

SEQ ID NO: 96545 - protein, 388 aa, Homo sapiens
MLLMVVSMACVGLFLVQRAGPHMGGQDKPFLSAWPSAVVPRGGHVTLRCHYRHRFNNFMLYKEDRIHVPIFHGRIFQEGFNMSPVTTAHAGNYTCRGSHPHSPTGWSAPSNPMVIMVTGNHRKPSLLAHPGPLVKSGERVILQCWSDIMFEHFFLHKEWISKDPSRLVGQIHDGVSKANFSIGSMMRALAGTYRCYGSVTHTPYQLSAPSDPLDIVVTGLYEKPSLSAQPGPKVQAGESVTLSCSSRSSYDMYHLSREGGAHERRLPAVRKVNRTFQADFPLGPATHGGTYRCFGSFRHSPYEWSDPSDPLLVSVTGNPSSSWPSPTEPSSKSGNLRHLHILIGTSVVKIPFTILLFFLLHRWCSNKKKNAAVMDQEPAGNRSEQRGF

SEQ ID NO: 96546 - protein, 957 aa, Homo sapiens
MEGAKPTLQLVYQAVQALYHDPDPSGKERASFWLGELQRSVHAWEISDQLLQIRQDVESCYFAAQTMKMKIQTSFYELPTDSHASLRDSLLTHIQNLKDLSPVIVTQLALAIADLALQMPSWKGCVQTLVEKYSNDVTSLPFLLEILTVLPEEVHSRSLRIGANRRTEIIEDLAFYSSTVVSLLMTCVEKAGTDEKMLMKVFRCLGSWFNLGVLDSNFMANNKLLALLFEVLQQDKTSSNLHEAASDCVCSALYAIENVETNLPLAMQLFQGVLTLETAYHMAVAREDLDKVLNYCRIFTELCETFLEKIVCTPGQGLGDLRTLELLLICAGHPQYEVVEISFNFWYRLGEHLYKTNDEVIHGIFKAYIQRLLHALARHCQLEPDHEGVPEETDDFGEFRMRVSDLVKDLIFLIGSMECFAQLYSTLKEGNPPWEVTEAVLFIMAAIAKSVDPKKPFSNAVCRHSLLFGQNITSEISNCEYLPPVLRENNPTLVEVLEGVVRLPETVHTAVRYTSIELVGEMSEVVDRNPQFLDPVLGYLMKGLCEKPLASAAAKAIHNICSVCRDHMAQHFNGLLEIARSLDSFLLSPEAAVGLLKGTALVLARLPLDKITECLSELCSVQVMALKKLLSQEPSNGISSDPTVFLDRLAVIFRHTNPIVENGQTHPCQKVIQEIWPVLSETLNKHRADNRIVERCCRCLRFAVRCVGKGSAALLQPLVTQMVNVYHVHQHSCFLYLGSILVDEYGMEEGCRQGLLDMLQALCIPTFQLLEQQNGLQNHPDTVDDLFRLATRFIQRSPVTLLRSQVVIPILQWAIASTTLDHRDANCSVMRFLRDLIHTGVANDHEEDFELRKELIGQVMNQLGQQLVSQLLHTCCFCLPPYTLPDVAEVLWEIMQVDRPTFCRWLENSLKGLPKETTVGAVTVTHKQLTDFHKQVTSAEECKQVCWALRDFTRLFR

SEQ ID NO: 96547 - protein, 204 aa, Homo sapiens
MSSPPEGKLETKAGHPPAVKAGGMRIVQKHPHTGDTKEEKDKDDQEWESPRVTKISPRRLRRWLTRSRMPPWTSILPQEPSTSSSHASEPGVHQPAPWPRLCCTWYFPDRENQQFRPNPTLLGNLRQNQVLCPLPYISIFKTRNSSSPNLVYGESGWMSFEDHCAPRGAISRICQDPRKILALVLFQQSPDVLVYGLKNKKAHI

SEQ ID NO: 96548 - protein, 1508 aa, Homo sapiens
MAEGFRKNDEMKAMDVLPILKEKVAYLSGGRDKRGGPILTFPARSNHDRIRQEDLRRLISYLACIPSEEVCKRGFTVIVDMRGSKWDSIKPLLKILQESFPCCIHVALIIKPDNFWQKQRTNFGSSKFEFETNMVSLEGLTKVVDPSQLTPEFDGCLEYNHEEWIEIRVAFEDYISNATHMLSRLEELQDILAKKELPQDLEGARNMIEEHSQLKKKVIKAPIEDLDLEGQKLLQRIQSSESFPKKNSGSGNADLQNLLPKVSTMLDRLHSTRQHLHQMWHVRKLKLDQCFQLRLFEQDAEKMFDWITHNKGLFLNSYTEIGTSHPHAMELQTQHNHFAMNCMNVYVNINRIMSVANRLVESGHYASQQIRQIASQLEQEWKAFAAALDERSTLLDMSSIFHQKAEKYMSNVDSWCKACGEVDLPSELQDLEDAIHHHQGIYEHITLAYSEVSQDGKSLLDKLQRPLTPGSSDSLTASANYSKAVHHVLDVIHEVLHHQRQLENIWQHRKVRLHQRLQLCVFQQDVQQVLDWIENHGEAFLSKHTGVGKSLHRARALQKRHEDFEEVAQNTYTNADKLLEAAEQLAQTGECDPEEIYQAAHQLEDRIQDFVRRVEQRKILLDMSVSFHTHVKELWTWLEELQKELLDDVYAESVEAVQDLIKRFGQQQQTTLQVTVNVIKEGEDLIQQLRDSAISSNKTPHNSSINHIETVLQQLDEAQSQMEELFQERKIKLELFLQLRIFERDAIDIISDLESWNDELSQQMNDFDTEDLTIAEQRLQHHADKALTMNNLTFDVIHQGQDLLQYVNEVQASGVELLCDRDVDMATRVQDLLEFLHEKQQELDLAAEQHRKHLEQCVQLRHLQAEVKQVLGWIRNGESMLNAGLITASSLQEAEQLQREHEQFQHAIEKTHQSALQVQQKAEAMLQANHYDMDMIRDCAEKVASHWQQLMLKMEDRLKLVNASVAFYKTSEQVCSVLESLEQEYKREEDWCGGADKLGPNSETDHVTPMISKHLEQKEAFLKACTLARRNADVFLKYLHRNSVNMPGMVTHIKAPEQQVKNILNELFQRENRVLHYWTMRKRRLDQCQQYVVFERSAKQALEWIHDNGEFYLSTHTSTGSSIQHTQELLKEHEEFQITAKQTKERVKLLIQLADGFCEKGHAHAAEIKKCVTAVDKRYRDFSLRMEKYRTSLEKALGISSDSNKSSKSLQLDIIPASIPGSEVKLRDAAHELNEEKRKSARRKEFIMAELIQTEKAYVRDLRECMDTYLWEMTSGVEEIPPGIVNKELIIFGNMQEIYEFHNNIFLKELEKYEQLPEDVGHCFVTWADKFQMYVTYCKNKPDSTQLILEHAGSYFDEIQQRHGLANSISSYLIKPVQRITKYQLLLKELLTCCEEGKGEIKDGLEVMLSVPKRANDAMHLSMLEGFDENIESQGELILQESFQVWDPKTLIRKGRERHLFLFEMSLVFSKEVKDSSGRSKYLYKSKLFVSIGVQNCKSKGNTIAVFL

SEQ ID NO: 96549 - protein, 98 aa, Homo sapiens
MTDPLLDSQPASSTGEMDGLCPELLLIPPPLSNRGILGPVQSPCPSRDPAPIPTEPGCLLVEATATEEGPGNMEIIVETVAGTLTPGAPGETPATAAS

SEQ ID NO: 96550 - protein, 723 aa, Homo sapiens
MPRVRYYAGDERRALSFFHQKGLQDFDTLLLSGDGNTLYVGAREAILALDIQDPGVPRLKNMIPWPASDRKKSECAFKKKSNETQCFNFIRVLVSYNVTHLYTCGTFAFSPACTFIELQDSYLLPISEDKVMEGKGQSPFDPAHKHTAVLVDGMLYSGTMNNFLGSEPILMRTLGSQPVLKTDNFLRWLHHDASFVAAIPSTQVVYFFFEETASEFDFFERLHTSRVARVCKNDVGGEKLLQKKWTTFLKAQLLCTQPGQLPFNVIRHAVLLPADSPTAPHIYAVFTSQWQVGGTRSSAVCAFSLLDIERVFKGKYKELNKETSRWTTYRGPETNPRPGSCSVGPSSDKALTFMKDHFLMDEQVVGTPLLVKSGVEYTRLAVETAQGLDGHSHLVMYLGTTTGSLHKAVVSGDSSAHLVEEIQLFPDPEPVRNLQLAPTQGAVFVGFSGGVWRVPRANCSVYESCVDCVLARDPHCAWDPESRTCCLLSAPNLNSWKQDMERGNPEWACASGPMSRSLRPQSRPQIIKEVLAVPNSILELPCPHLSALASYYWSHGPAAVPEASSTVYNGSLLLIVQDGVGGLYQCWATENGFSYPVISYWVDSQDQTLALDPELAGIPREHVKVPLTRVSGGAALAAQQSYWPHFVTVTVLFALVLSGALIILVASPLRALRARGKVQGCETLRPGEKAPLSREQHLQSPKECRTSASDVDADNNCLGTEVA

SEQ ID NO: 96551 - protein, 444 aa, Homo sapiens
MLLMVVSMACVGFFLVQRAGPHVGGQDKPFLSAWPSAVVPRGGHVTLRCHYHHRFNNFMLYKEDRIHVPIFHGRLFQESFNMSPVTTAHAGNYTCRGSHPHSPTGWSAPSNPVVIMVTGNHRKPSLLAHPGPLVKSGERVILQCWSDIMFEHFFLHKEGISKDPSRLVGQIHDGVSKANFSIGPMMLALAGTYRCYGSVTHTPYQLSAPSDPLDIVVTGPYEKPSLSAQPGPKVQAGESVTLSCSSRSSYDMYHLSREGGAHERRLPAVRKVNRTFQADFPLGPATHGGTYRCFGSFRHSPYEWSDPSDPLLVSVTGNPSSSWPSPTEPSSKSGNPRHLHILIGTSVVIILFILLLFFLLHLWCSNKKNAAVMDQEPAGNRTANSEDSDEQDPEEVTYAQLDHCVFTQRKITRPSQRPKTPPTDTILYTELPNAKPRSKVVSCP

SEQ ID NO: 96552 - protein, 46 aa, Homo sapiens
MEAAAQFFVESPDVVYGPEAIEAQYEYRTTRVSREGGVLKAGTSRR

SEQ ID NO: 96553 - protein, 284 aa, Homo sapiens
MSLADELLADLEEAAEEEEGGSYGEEEEEPAIEDVQEETQLDLSGDSVKTIAKLWDSKMFAEIMMKIEEYISKQAKASEVMGPVEAAPEYRVIVDANNLTVEIENELNIIHKFIRDKYSKRFPELESLVPNALDYIRTVKELGNSLDKCKNNENLQQILTNATIMVVSVTASTTQGQQLSEEELERLEEACDMALELNASKHRIYEYVESRMSFIAPNLSIIIGASTAAKIMGVAGGLTNLSKMPACNIMLLGAQRKTLSGFSSTSVLPHTGYIYHSDIVQSLP

SEQ ID NO: 96554 - protein, 152 aa, Homo sapiens
MLSVVENGLDPQAAIPVIKKKLVGSVKALQKQHIISELEHLTFVNTDVGRCRAWLRLALNDGLMECYLKLLLQEQARLHEYYQPTALLRDAEEGEFLLSFLQGLTSLSFELSYKSAILNEWTLTPLALSGLCPLSELDPLSTSGAELQRKES

SEQ ID NO: 96555 - protein, 43 aa, Homo sapiens
MLSKVLPVLLGILLILQSRTCIQRSAQIISVQLMSCQNMTTAV

SEQ ID NO: 96556 - protein, 450 aa, Homo sapiens
MTVEQNVLQQSAAQKHQQTFLNQLREITGINDTQILQQALKDSNGNLELAVAFLTAKNAKTPQQEETTYYQTALPGNDRYISVGSQADTNVIDLTGDDKDDLQRAIALSLAESNRAFRETGITDEEQAISRVLEASIAENKACLKRTPTEVWRDSRNPYDRKRQDKAPVGLKNVGNTCWFSAVIQSLFNLLEFRRLVLNYKPPSNAQDLPRNQKEHRNLPFMRELRYLFALLVGTKRKYVDPSRAVEILKDAFKSNDSQQEWHQDYRKFRETTMYLIIGLENFQRESYIDSLLFLICAYQNNKELLSKGLYRGHDEELISHYRRECLLKLNEQAAELFESGEDREVNNGLIIMNEFIVPFLPLLLVDEMEEKDILAVEDMRNRWCSYLGQEMEPHLQEKLTDFLPKLLDCSMEIKSFHEPPKLPSYSTHELCERFARIMLSLSRTPADGR

SEQ ID NO: 96557 - protein, 202 aa, Homo sapiens
  MOD_RES (1)..(1): Any amino acid
XCVLYLWSLKINHPKTLFLLRGNHECRHLTDYFTFKQECRIKYSEQVYDACMETFDCLPLAALLNQQFLCVHGGMSPEITSLDDIRKLDRFTEPPAFGPVCDLLWSDPSEDYGNEKTLEHYTHNTVRGCSYFYSYPAVCEFLQNNNLLSIIRAHEAQDAGYRMYRKSQATGFPSLITIFSAPNYLDVYNNKESATHSFDYPQ

SEQ ID NO: 96558 - protein, 368 aa, Homo sapiens
MFLSSVGFSVVMMSIWPYLQKIDPTADTSFLGWVIASYSLGQMVASPIFGLWSNYRPRKEPLIVSILISVAANCLYAYLHIPASHNKYYMLVARGLLGIGAASTDEAQVPQGNIDQVAVVAINVLFFVTLFIFALFETIITPLTMDMYAWTQEQAVLYNGIILAALGVEAVVIFLGVKLLSKKIGERAILLGGLIVVWVGFFILLPWGNQFPKIQWEDLHNNSIPNTTFGEIIIGLWKSPMEDDNERPTGCSIEQAWCLYTPVIHLAQFLTSAVLIGLGYPVCNLMSYTLYSKILGPKPQGVYMGWLTASGSGARILGPMFISQVYAHWGPRWAFSLVCGIIVLTITLLGVVYKRLIALSVRYGRIQE

SEQ ID NO: 96559 - protein, 39 aa, Homo sapiens
MIEDSGKRGNTMAERRQLFAEMKMCLECLGEFQPGLPIS

SEQ ID NO: 96560 - protein, 214 aa, Homo sapiens
  MOD_RES (1)..(1): Any amino acid
XRGGYRGRGGFQGRGGDPKSGDWVCPNPSCGNMNFARRNSCNQCNEPRPEDSRPSGGDFRGRGYGGERGYRGRGGRGGDRGGYGGDRSGGGYGGDRSSGGGYSGDRSGGGYGGDRSGGGYGGDRGGGYGGDRGGGYGGDRGGGYGGDRSRGGYGGDRGGGSGYGGDRSGGYGGDRSGGGYGGDRGGGYGGDRGGYGGKMGGRNDYRNDQRNRPY

SEQ ID NO: 96561 - protein, 776 aa, Homo sapiens
MAEPRQEFEVMEDHAGTYGLGDRKDQGGYTMHQDQEGDTDAGLKESPLQTPTEDGSEEPGSETSDAKSTPTAEDVTAPLVDEGAPGKQAAAQPHTEIPEGTTAEEAGIGDTPSLEDEAAGHVTQEPESGKVVQEGFLREPGPPGLSHQLMSGMPGAPLLPEGPREATRQPSGTGPEDTEGGRHAPELLKHQLLGDLHQEGPPLKGAGGKERPGSKEEVDEDRDVDESSPQDSPPSKASPAQDGRPPQTAAREATSIPGFPAEGAIPLPVDFLSKVSTEIPASEPDGPSVGRAKGQDAPLEFTFHVEITPNVQKEQAHSEEHLGRAAFPGAPGEGPEARGPSLGEDTKEADLPEPSEKQPAAAPRGKPVSRVPQLKARMVSKSKDGTGSDDKKAKTSTRSSAKTLKNRPCLSPKHPTPGSSDPLIQPSSPAVCPEPPSSPKHVSSVTSRTGSSGAKEMKLKGADGKTKIATPRGAAPPGQKGQANATRIPAKTPPAPKTPPSSATKQVQRRPPPAGPRSERGEPPKSGDRSGYSSPGSPGTPGSRSRTPSLPTPPTREPKKVAVVRTPPKSPSSAKSRLQTAPVPMPDLKNVKSKIGSTENLKHQPGGGKVQIINKKLDLSNVQSKCGSKDNIKHVPGGGSVQIVYKPVDLSKVTSKCGSLGNIHHKPGGGQVEVKSEKLDFKDRVQSKIGSLDNITHVPGGGNKKIETHKLTFRENAKAKTDHGAEIVYKSPVVSGDTSPRHLSNVSSTGSIDMVDSPQLATLADEVSASLAKQGL

SEQ ID NO: 96562 - protein, 86 aa, Homo sapiens
MFLSVLVDWMIPDIPTDISDQIKKEKSLLVDFFLKEEHEKLKLMDEPALRSPGGGDRSRSRAASSAPSGQSQLGSMMSSGSQHTNV

SEQ ID NO: 96563 - protein, 135 aa, Homo sapiens
MNLRKSGTLGHPGSLDETTYERLAEETLDSLAEFFEDLADKPYTFEDYDVSFGSGVLTVKLGGDLGTYVINKQTPNKQIWLSSPSSGPKRYDWTGKNWVYSHDGVSLHELLAAELTKALKTKLDLSSLAYSGKDA

SEQ ID NO: 96564 - protein, 556 aa, Homo sapiens
MRMMAAGAVHGLFTASAAPQPPPPPPPPPPQPQPPQQPSPPPQQPPPPPPQPPQQQQPPPQAPPMEPEAPDSRKRPLETPPEVVCTKRSNTGEEGEYFLKVLIPSYAAGSIIGKGGQTIVQLQKETGATIKLSKSKDFYPGTTERVCLVQGTAEALNAVHSFIAEKVREIPQAMTKPEVVNILQPQTTMNPDRAKQAKLIVPNSTAGLIIGKGGATVKAVMEQSGAWVQLSQKPEGINLQERVVTVSGEPEQVHKAVSAIVQKVQEDPQSSSCLNISYANVAGPVANSNPTGSPYASPADVLPAAAAASAAAASGLLGPAGLAGVGAFPAALPAFSGTDLLAISTALNTLASYGYNTNSLGLGLNSAAASGVLAAVAAGANPAAAAAANLLASYAGEAGAGPAGGAAPPPPPPPGALGSFALAAAANGYLGAGAGGGAGGGGGPLVAAAAAAGAAGGFLTAEKLAAESAKELVEIAVPENLVGAILGKGGKTLVEYQELTGARIQISKKGEFLPGTRNRRVTITGSPAATQAAQYLISQRVTYEQGVRASNPQKVG

SEQ ID NO: 96565 - protein, 242 aa, Homo sapiens
MMPSPSDSSRSLTSRPSTRGLTHLRLHRPWLQALLTLGLVQVLLGILVVTFSMVASSVTTTESIKRSCPSWAGFSNLLFSVCGLTICAAIICTLSAIVCCIQIFSLDLVHTLAPERSVSGPLGPLGCTSPPPAPLLHTMLDLEEFVPPVPPPPYYPPEYTCSSETDAQSITYNGSMDSPVPLYPTDCPPSYEAVMGLRGGKQILVPLRMRVALSDLQGHYGQGKGMAQVFKYRVTCAYAMGW

SEQ ID NO: 96566 - protein, 42 aa, Homo sapiens
MAAMAVGGAGGSRVSSGRDLNCVPEIADTLGAVAKQGFPAAP

SEQ ID NO: 96567 - protein, 109 aa, Homo sapiens
MEEPQKSYVNTMDLERDEPLKSTGPQISVSEFSCHCCYDILVNPTTLNCGHSFCRHCLALWWASSKKTECPECREKWEGFPKVSILLRDAIEKLFPDAIRLRFEDIQQN

SEQ ID NO: 96568 - protein, 59 aa, Homo sapiens
MSEFRIHHDVNELLSLLRVHGGDGAEVYIDLLQKNRTPYVTTTVSAHSAKSFLVLQKTF

SEQ ID NO: 96569 - protein, 60 aa, Homo sapiens
MAWIKRKFGERPPPKRLTREAMRNYLKERGDQTVLILHAKVAQKSYGNEKRDGVSLCRPG

SEQ ID NO: 96570 - protein, 108 aa, Homo sapiens
MVQIIKDTNEFKTFLTAAGHKLAVVQFSSKRCGPCKRMFPVFHELAETCHIKTIPTFQMFKKSQKGSISRPTPTSELHPHQKWTLDSSQANPSQTRANFRTLLKQLGK

SEQ ID NO: 96571 - protein, 310 aa, Homo sapiens
MGGNQTSITEFLLLGFPIGPRIQMLLFGLFSLFYIFILLGNGTILGLISLDSRLHTPMYFFLSHLAVVDIACACNTVPQMLVNLLHPAKPISFAGCMTQMFLFLSFAHTECLLLVVMSYDRYVAICHPLRYSTIMTWKVCITLALTSWILGVLLALVHLVLLLPLSFCGPQKLNHFFCEIMAVLKLACADTHINEVMVLAGAVSVLVGPFFSTVISYVHILCAILKIQSGEGCQKAFSICSSHLCVVGLFYGTAIIMYVEPQYESPKEQKKYLLLFHSLFNPMLNPLIYSLRNKEVQGTLKRMLEKKRTS

SEQ ID NO: 96572 - protein, 971 aa, Homo sapiens
MGAAGLLGVFLALVAPGVLGISCGSPPPILNGRISYYSTPIAVGTVIRYSCSGTFRLIGEKSLLCITKDKVDGTWDKPAPKCEYFNKYSSCPEPIVPGGYKIRGSTPYRHGDSVTFACKTNFSMNGNKSVWCQANNMWGPTRLPTCVSVFPLECPALPMIHNGHHTSENVGSIAPGLSVTYSCESGYLLVGEKIINCLSSGKWSAVPPTCEEARCKSLGRFPNGKVKEPPILRVGVTANFFCDEGYRLQGPPSSRCVIAGQGVAWTKMPVCEEIFCPSPPPILNGRHIGNSLANVSYGSIVTYTCDPDPEEGVNFILIGESTLRCTVDSQKTGTWSGPAPRCELSTSAVQCPHPQILRGRMVSGQKDRYTYNDTVIFACMFGFTLKGSKQIRCNAQGTWEPSAPVCEKECQAPPNILNGQKEDRHMVRFDPGTSIKYSCNPGYVLVGEESIQCTSEGVWTPPVPQCKVAACEATGRQLLTKPQHQFVRPDVNSSCGEGYKLSGSVYQECQGTIPWFMEIRLCKEITCPPPPVIYNGAHTGSSLEDFPYGTTVTYTCNPGPERGVEFSLIGESTIRCTSNDQERGTWSGPAPLCKLSLLAVQCSHVHIANGYKISGKEAPYFYNDTVTFKCYSGFTLKGSSQIRCKADNTWDPEIPVCEKETCQHVRQSLQELPAGSRVELVNTSCQDGYQLTGHAYQMCQDAENGIWFKKIPLCKVIHCHPPPVIVNGKHTGMMAENFLYGNEVSYECDQGFYLLGEKKLQCRSDSKGHGSWSGPSPQCLRSPPVTRCPNPEVKHGYKLNKTHSAYSHNDIVYVDCNPGFIMNGSRVIRCHTDNTWVPGVPTCIKKEVNCSSPADMDGIQKGLEPRKMYQYGAVVTLECEDGYMLEGSPQSQCQSDHQWNPPLAVCRSRSLAPVLCGIAAGLILLTFLIVITLYVISKHRARNYYTDTSQKEAFHLEAREVYSVDPYNPAS

SEQ ID NO: 96573 - protein, 138 aa, Homo sapiens
MGPEALSSLLLLLLVASGDADMKGHFDPAKCRYALGMQDRTIPDSDISASSSWSDSTAARHSRLESSDGDGAWCPAGSVFPKEEEYLQVDLQRLHLVALVGTQGRHAGGLGKEFSRSYRLRYSRDGRRWMGWKDRWGQ

SEQ ID NO: 96574 - protein, 667 aa, Homo sapiens
MIDLFKAEWVSSVCVQVSRNGRTDQVWVPQDEWTGYTPRGKDDEIPCRRMRSGSYIKAMGDEDSGDSDTSPKPSPKVAARRESYLKATQPSLTELTTLKISNEHSPKLQIRSHSYLRAVSEVSINRSLDSLDPAGLLTSPKFRSRNESYMRAMSTISQVSEMEVNGQFESVCESVFSELESQAVEALDLPMPGCFRMRSHSYVRAIEKGCSQDDECVSLRSSSPPRTTTTVRTIQSSTGVIKLSSAVEAQSSTESAQDAYMDGQGQRGDIISQSGLSNSTESLDSMKALTAAIEAANAQIHGPASQHMGNNTATVTTTTTIATVTTEDRKKDHFKKNRCLSIGIQVDDAEEPDKTGENKAPSKFQSVGVQVEEEKCFRRFTRSNSVTTAVQADLDFHDNLENSLESIEDNSCPGPMARQFSRDASTSTVSIQGSGNHYHACAADDDFDTDFDPSILPPPDPWIDSITEDPLEAVQRSVCHRDGHWFLKLLQAERDRMEGWCQQMEREERENNLPEDILGKIRTAVGSAQLLMAQKFYQFRELCEENLNPNAHPRPTSQDLAGFWDMLQLSIENISMKFDELHQLKANNWKQMDPLDKKERRAPPPVPKKPAKGPAPLIRERSLESSQRQEARKRLMAAKRAASVRQNSATESAESIEIYIPEAQTRL

SEQ ID NO: 96575 - protein, 151 aa, Homo sapiens
MSDIGDWFRSIPAITRYWFAATVAVPLVGKLGLISPAYLFLWPEAFLYRFQACYLPWVILGFNYIIGGSVINELIGNLVGHLYFFLMFRYPMDLGGRNFLSTPQFLYRWLPSRRGGVSGFGVPPASMRRAADQNGGGGRHNWGQGFRLGDQ

SEQ ID NO: 96576 - protein, 95 aa, Homo sapiens
  MOD_RES (1)..(1): Any amino acid
XAQGAQESIKAMWRVPGTTRRPVTGESPGMHRPEAMLLLLTLALLGGPTWAGKMYGPGGGKYFSTTEDYDHEITGLRVSVGLLLVKRFLEGVIYE

SEQ ID NO: 96577 - protein, 91 aa, Homo sapiens
MAGRGGAARPNGPAAGNKICQFKLVLLGESAVGKSSLVLRFVKGQFHEYQESTIGAAFLTQTVCLDDTTVKFEIWDTAGQERYHSLAPMYY

SEQ ID NO: 96578 - protein, 166 aa, Homo sapiens
MMEGLKKRTRKAFGIRKKEKDTDSTGSPDRDGIQGKKKTQKTQLLLTSCFWLRALSLTLSQKKSNGAPNGFYAEIDWERYNSPELDEEGYSIRPEEPGSTKGKHFYSSSESEEEEESHKKFNIKIKPLQSKDILKNAATVDELKASIGNIALSPSPVCLFLILGCN

SEQ ID NO: 96579 - protein, 604 aa, Homo sapiens
GHATPLLVTDASSISTGHATSLLVTDASSVSTGHATALHDTDASSLSTGDTTPLPVTSPSSTSTGDTTPLPVTETSSVSTGHATSLPVTDTSSASTGHATSLPVTDTSSASTGHATPLPVTDTSSASTGQATPLPVTSPSSASTGHAIPLLVTDTSSASTGQATPLPVTSLSSASTGDTTPLPVTDASSVSTGDTTPLPVTSPSSASTGHATPLHVTDASSASTGHATPLPVTSLSSASTGDTTPLPVTSPSSASTGHATPLHVTDASSVSTGDTTPLPVTSSSSASSGHTTPLPVTDASSASTGDTTPLPVTDTSSASTGHATHLPVTGLSSASTGDTTRLPVTNVSSASTGHATPLPVTSTSSASTGDTTPLPGTDTSSVSTGHTTPLLVTDASSVSTGDTTRLPVTSPSSASTGHTTPLPVTDTPSASTGDTTPLPVTNASSLSTRHATSLHVTSPSSASTGHATSLPVTDTSAASTGHATPLPVTSTSSASTGDTTPLPVTDTYSASTGQATPLPVTSLSSVSTGDTTPLPVTSPSSASTGHATPLLVTDASSASTGQATPLPVTSLSSVSTGDTTPLPVTSPSSASTGHATSLPVTDTS

SEQ ID NO: 96580 - protein, 212 aa, Homo sapiens
MAAALQVLPRLARAPLHPLLWRGSVARLASSMALAEQARQLFESAVGAVLPGPMLHRALSLDPGGRQLKVRDRNFQLRQNLYLVGFGKAVLGMAAAAEELLGQHLVQGVISVPKGIRAAMERAGKQEMLLKPHSRVQVFEGAEDNLPDRDALRAALAIQQLAEGLTADDLLLVLISEVGVQLCCLPPSHLSHWRRSRHSLDCWQPVEPPSRS

SEQ ID NO: 96581 - protein, 101 aa, Homo sapiens
MACAAARSPADQDRFICIYPAYLNNKKTIAEGRRIPISKAVENPTATEIQDVCSAVGLNVFLEKNKMYSREWNRDVQYRGRVRVQLKQEDGSLCLVQFPSR

SEQ ID NO: 96582 - protein, 85 aa, Homo sapiens
MVQASGHRRSTRGSKMVSWSVIAKIQEILQRKMVREFLAEFMSTYVMMREGDDWFGVGEESTCLRGLWKTESGRLCQQKMWAKRR

SEQ ID NO: 96583 - protein, 144 aa, Homo sapiens
MPGFDYKFLEKPKRRLLCPLCGKPMREPVQVSTCGHRFCDTCLQEFLSEGVFKWPFARRVTFSLLDQSDPGLAKPQHVTETFHPDPNWKNFQKPGTWRGSLDESSLGFGYPKFISHQDIRKRNYVRDDAVFIRAAVELPRKILS

SEQ ID NO: 96584 - protein, 229 aa, Homo sapiens
MRKWTKKGNCKRPVLVLQNEALYPQRRSYTSEDEAWKSFLENPLTAATKAMMSINGDEDSAAALGLLYDYYKVPRERRSSTAKPEVEHPEPDHSKRNSIPIVTEQPLISAGENRVQVLKNVPFNIVLPHGNQLGIDKRGHLTAPDTTVTVSIATMPTHSIKTETQPHGFAVGIPPAVYHPEPTERVVVFDRNLNTDQFSSGAQAPNAQRRTPDSTFSETFKEGVQEEQL

SEQ ID NO: 96585 - protein, 77 aa, Homo sapiens
MLSAAHDILSHKRTSGNQSHVDPGPTPIPHNSSSRFDCNSVSTAPPGSRQWDLCCWKLRPGCLFSFCGDQPVWCGLR

SEQ ID NO: 96586 - protein, 236 aa, Homo sapiens
MGTPGEGLGRCSHALIRGVPESLASGEGAGAGLPALDLAKAQREHGVLGGKLRQRLGLQLLELPPEESLPLGPLLGDTAVIQGDTALITRPWSPARRPEVDGVRKALQDLGLRIVEIGDENATLDGTDVLFTGREFFVGLSKWTNHRGAEIVADTFRDFAVSTVPVSGPSHLRGLCGMGGPRTVVAGSSDAAQKAVRAMAVLTDHPYASLTLPDDAAADCLFLRPGLPGVPPFLLH

SEQ ID NO: 96587 - protein, 142 aa, Homo sapiens
MNIRNARPEDLMNMQHCNLLCLPENYQMKYYFYHGLSWPQLSYIAEDENGKIVGEEDPDDVPHGHITSLAVKRSHRRLGLAQKLMDQASRAMIENFNAKYVSLHVRKRISEVEPKYYADGEDAYAMKRDLTQMADELRRHLE

SEQ ID NO: 96588 - protein, 12 aa, Homo sapiens
MVNLDQGEDKAK

SEQ ID NO: 96589 - protein, 617 aa, Homo sapiens
MNRKDSKRKSHQECTGKIGGRGRPRQVRRHKTCPSPREISKVMASMNLGLLSEGGCSEDELLEKCIQSFDSAGSLCHEDHMLNMVLAMHSWVLPSADLAARLLTSYQKATGDTQELRRLQICHLVRYWLMRHPEVMHQDPQLEEVIGRFWATVAREGNSAQRRLGDSSDLLSPGGPGPPLPMSSPGLGKKRKVSLLFDHLETGELAQHLTYLEFRSFQAITPQDLRSYVLQGSVRGCPALEGSVGLSNSVSRWVQVMVLSRPGPLQRAQVLDKFIHVAQRLHQLQNFNTLMAVTGGLCHSAISRLKDSHAHLSPDSTKALLELTELLASHNNYARYRRTWAGCAGFRLPVLGVHLKDLVSLHEAQPDRLPDGRLHLPKLNNLYLRLQELVALQGQHPPCSANEDLLHLLTLSLDLFYTEDEIYELSYAREPRCPKSLPPSPFNAPLVVEWAPGVTPKPDRVTLGRHVEQLVESVFKNYDPEGRGTISQEDFERLSGNFPFACHGLHPPPRQGRGSFSREELTGYLLRASAICSKLGLAFLHTFHEVTFRKPTFCDSCSGFLWGVTKQGYRCRGEWGVSEWEGSLGPQAGRMDDTDRTPAAAFPQSAGCVATNTAETR

SEQ ID NO: 96590 - protein, 43 aa, Homo sapiens
MKFKLHVNSARQYKDLWNMSDDKPFLCTAPGCGQIRPQHQQDS

SEQ ID NO: 96591 - protein, 211 aa, Homo sapiens
MALNNFLFAQCACYFLAFLFSFVVVVPLSENGHDFRGRCLLFTEGMWLSANLTVQERERFTVQEWGPPAACRFSLLASLLSLLLAAAHAWRTLFFLCKGHEGSFFSAFLNLLVSAFVVFLVFIASTIVSVGFTMWCDTITEKGTVPHSCEELQDIDLELGVDNSAFYDQFAIAQVQFRTPGWPLKALAGRGWPEDASPGQEPSKGAGHGWA

SEQ ID NO: 96592 - protein, 68 aa, Homo sapiens
MCNTNMSVPTDGAVTTSQIPASEQETLDLVQELQEEKPSSSHLVSRPSTSSRRRAISETGLLEMHFMQ

SEQ ID NO: 96593 - protein, 185 aa, Homo sapiens
RELGGIPIVANKINHSNQSIKEKALNALNNLSVNVENQIKIKIYISQVCEDVFSGPLNSAVQLAGLTLLTNMTVTNDHQHMLHSYITDLFQVLLTGNGNTKVDSSFLSLYDSHVAKEILLRVLTLFQNIKNCLKIEGHLAVQPTFTEGSLFFLLHGEECAQKIRALVDHHDAEVKEKVVTIIPKI

SEQ ID NO: 96594 - protein, 66 aa, Homo sapiens
MFEEKASSPSGKMGGEEKPIGAGEEKQKEGGKKKNKEGSGDGGRAEGNLQVLFISAITETDTEGIC

SEQ ID NO: 96595 - protein, 285 aa, Homo sapiens
MFNTGIGQHILKNPLIINSIIDKAALRPTDVVLEVGPGTGNMTVKLLEKAKKVVACELDPRLVAELHKRVQGTPVASKLQVLVGDVLKTDLPFFDTCVANLPYQISSPFVFKLLLHRPFFRCAILMFQREFALRLVAKPGDKLYCRLSINTQLLARVDHLMKVGKNNFRPPPKVESSVVRIEPKNPPPPINFQEWDGLVRITFVRKNKTLSAAFKSSAVQQLLEKNYRIHCSVHNIIIPEDFSIADKIQQILTSTGFSDKRARSMDIDDFIRLLHGFNAEGIHFS

SEQ ID NO: 96596 - protein, 1601 aa, Homo sapiens
MDSKKRSSTEAEGSKERGLVHIWQAGSFPITPERLPGWGGKTVLQAALGVKHGVLLTEDGEVYSFGTLPWRSGPVEICPSSPILENALVGQYVITVATGSFHSGAVTDNGVAYMWGENSAGQCAVANQQYVPEPNPVSIADSEASPLLAVRILQLACGEEHTLALSISREIWAWGTGCQLGLITTAFPVTKPQKVEHLAGRVVLQVACGAFHSLALVQCLPSQDLKPVPERCNQCSQLLITMTDKEDHVIISDSHCCPLGVTLTESQAENHASTALSPSTETLDRQEEVFENTLVANDQSVATELNAVSAQITSSDAMSSQQNVMGTTEISSARNIPSYPDTQAVNEYLRKLSDHSVREDSEHGEKPVPSQPLLEEAIPNLHSPPTTSTSALNSLVVSCASAVGVRVAATYEAGALSLKKVMNFYSTTPCETGAQAGSSAIGPEGLKDSREEQVKQESMQGKKSSSLVDIREEETEGGSRRLSLPGLLSQVSPRLLRKAARVKTRTVVLTPTYSGEADALLPSLRTEVWTWGKGKEGQLGHGDVLPRLQPLCVKCLDGKEVIHLEAGGYHSLALTAKSQVYSWGSNTFGQLGHSDFPTTVPRLAKISSENGVWSIAAGRDYSLFLVDTEDFQPGLYYSGRQDPTEGDNLPENHSGSKTPVLLSCSKLGYISRVTAGKDSYLALVDKNIMGYIASLHELATTERRFYSKLSDIKSQILRPLLSLENLGTTTTVQLLQEVASRFSKLCYLIGQHGASLSSFLHGVKEARSLVILKHSSLFLDSYTEYCTSITNFLVMGGFQLLAKPAIDFLNKNQELLQDLSEVNDENTQLMEILNTLFFLPIRRLHNYAKVLLKLATCFEVASPEYQKLQDSSSCYECLALHLGRKRKEAEYTLGFWKTFPGKMTDSLRKPERRLLCESSNRALSLQHAGRFSVNWFILFNDALVHAQFSTHHVFPLATLWAEPLSEEAGGVNGLKITTPEEQFTLISSTPQEKTKWLRAISQAVDQALRGMSDLPPYGSGSSVQRQEPPISRSAKYTFYKDPRLKDATYDGRWLSGKPHGRGVLKWPDGKMYSGMFRNGLEDGYGEYRIPNKAMNKEDHYVGHWKEGKMCGQGVYSYASGEVFEGCFQDNMRHGHGLLRSGKLTSSSPSMFIGQWVMDKKAGYGVFDDITRGEKYMGMWQDDVCQGNGVVVTQFGLYYEGNFHLNKMMGNGVLLSEDDTIYEGEFSDDWTLSGKGTLTMPNGDYIEGYFSGEWGSGIKITGTYFKPSLYESDKDRPKVFPEILSRSQTQTLESLEFIPQHVGAFSVEKYDDIRKYLIKACDTPLHPLGRLVETLVAVYRMTYVGVGANRRLLQEAVKEIKSYLKRIFQLVRFLFPELPEEGSTIPLSAPLPTERKSFCTGKSDSRSESPEPGYVVTSSGLLLPVLLPRLYPPLFMLYALDNDREEDIYWECVLRLNKQPDIALLGFLGVQRKFWPATLSILGESKKVLPTTKDACFASAVECLQQISTTFTPSDKLKVIQQTFEEISQSVLASLHEDFLWSMDDLFPVFLYVVLRARIRNLGSEVHLIEDLMDPYLQHGEQGIMFTTLKACYYQIQREKLN

SEQ ID NO: 96597 - protein, 75 aa, Homo sapiens
MQLFVRAQELHTFEVTGQETVAQIKAHVASLEGIAPEDQVVLLAGAPLEDEATLGQCGVEALTTLEVAGRMLGGE

SEQ ID NO: 96598 - protein, 154 aa, Homo sapiens
MKQLPVLEPGDKPRKATWYTLTVPGDSPCARVGHSCSYLPPVGNAKRGKVFIVGGANPNRSFSDVHTMDLGKHQWDLDTCKGLLPRYEHASFIPSCTPDRIWVFGGANQSGNRNCLQVLNPAFKSWGFWTVLANPKYHLHSSLMFKPGRGPRQK

SEQ ID NO: 96599 - protein, 117 aa, Homo sapiens
MERAGATSRGGQAPGFLLRLHTEGRAEAARVQEQDLRQWGLTGIHLRSYQLEGVNWLAQRFHCQNGCILGDEMGLGKTCQICSRSFLCNICRRQGGKSLPSARPETGVTFSCATDYL

SEQ ID NO: 96600 - protein, 1479 aa, Homo sapiens
MPPQPPGSQSESSSHPALSQSPMPQERGNYSRPPAYSGVPSASYSGPGPGMGISANNQMHGQGPSQPCGAVPLGRMPSAGMQNRPFPGNMSSMTPSSPGMSQQGGPGMGPPMPTVNRKAQEAAAAVMQAAANSAQSRQGSFPGMNQSGLMASSSPYSQPMNNSSSLMNTQAPPYSMAPAMVNSSAASVGLADMMSPGESKLPLPLKADGKEEGTPQPESKSKDSYSSQGISQPPTPGNLPVPSPMSPSSASISSFHGDESDSISSPGWPKTPSSPKSSSSTTTGEKITKVYELGNEPERKLWVDRYLTFMEERGSPVSSLPAVGKKPLDLFRLYVCVKEIGGLAQVNKNKKWRELATNLNVGTSSSAASSLKKQYIQYLFAFECKIERGEEPPPEVFSTGDTKKQPKLQPPSPANSGSLQGPQTPQSTGSNSMAEVPGDLKPPTPASTPHGQMTPMQGGRSSTISVHDPFSDVSDSSFPKRNSMTPNAPYQQGMSMPDVMGRMPYEPNKDPFGGMRKVPGSSEPFMTQGQMPNSSMQDMYNQSPSGAMSNLGMGQRQQFPYGASYDRRHEPYGQQYPGQGPPSGQPPYGGHQPGLYPQQPNYKRHMDGMYGPPAKRHEGDMYNMQYSSQQQEMYNQYGGSYSGPDRRPIQGQYPYPYSRERMQGPGQIQTHGIPPQMMGGPLQSSSSEGPQQNMWAARNDMPYPYQNRQGPGGPTQAPPYPGMNRTDDMMVPDQRINHESQWPSHVSQRQPYMSSSASMQPITRPPQPSYQTPPSLPNHISRAPSPASFQRSLENRMSPSKSPFLPSMKMQKVMPTVPTSQVTGPPPQPPPIRREITFPPGSVEASQPVLKQRRKITSKDIVTPEAWRVMMSLKSGLLAESTWALDTINILLYDDSTVATFNLSQLSGFLELLVEYFRKCLIDIFGILMEYEVGDPSQKALDHNAARKDDSQSLADDSGKEEEDAECIDDDEEDEEDEEEDSEKTESDEKSSIALTAPDAAADPKEKPKQASKFDKLPIKIVKKNNLFVVDRSDKLGRVQEFNSGLLHWQLGGGDTTEHIQTHFESKMEIPPRRRPPPPLSSAGRKKEQEGKGDSEEQQEKSIIATIDDVLSARPGALPEDANPGPQTESSKFPFGIQQAKSHRNIKLLEDEPRSRDETPLCTIAHWQDSLAKRCICVSNIVRSLSFVPGNDAEMSKHPGLVLILGKLILLHHEHPERKRAPQTYEKEEDEDKGVACSKDEWWWDCLEVLRDNTLVTLANISGQLDLSAYTESICLPILDGLLHWMVCPSAEAQDPFPTVGPNSVLSPQRLVLETLCKLSIQDNNVDLILATPPFSRQEKFYATLVRYVGDRKNPVCREMSMALLSNLAQGDALAARAIAVQKGSIGNLISFLEDGVTMAQYQQSQHNLMHMQPPPLEPPSVDMMCRAAKALLAMARVDENRSEFLLHEGRLLDISISAVLNSLVASVICDVLFQIGQL

SEQ ID NO: 96601 - protein, 188 aa, Homo sapiens
MRECISIHVGQAGVQIGNACWELYCLEHGIQPDGQMPSDKTIGGGDDSFNTFFSETGAGKHVPRAVFVDLEPTVIGELTSVTQMKFALAPTASSSTLSNLSQAKKMLPITMPEGTTPLARRSLTSCWTEFASWPTSARVSRASWFSTALVGELVLGSPRCSWNVSQLIMARSPSWSSLFTRRPRFPQL

SEQ ID NO: 96602 - protein, 184 aa, Homo sapiens
MLLFFTLGLLIHFVFFASIFDIYFTSPLVHGMTPQFTPLPPPARRLVLFVADGLRADALYELDENGNSRAPFIRNIIMHEGSWGISHTRVPTESRPGHVALIAGFYEDVSAVAKGWKENPVEFDSLFNESKYTWSWGSPDILPMFAKGASGDHVYTYSYDAKREDFGAQDATKLDTWVFDNVKE

SEQ ID NO: 96603 - protein, 127 aa, Homo sapiens
MALVPYEETTEFGLQKFHKPLATFSFANHTIQIRQDWRHLGVAAVVWDAAIVLSTYLEMGAVELRGRSAVELGAGTGLVGIVAALLENTGQMQTEGYSKRKQITTLQKLQGHQRQGNKLSQTEGDYN

SEQ ID NO: 96604 - protein, 163 aa, Homo sapiens
MDPAARVVRALWPGGCALAWRLGGRPQPLLPTQSRAGFAGAAGGPSPVAAARKGSPRLLGAAALALGGALGLYHTARWHLRAQDLHAERSAAQLSLSSRLQLTLYQYKTCPFCSKVRAFLDFHALPYQVVEVNPVRRAEIKFSSYRKVPILVAQEGESSGRQI

SEQ ID NO: 96605 - protein, 111 aa, Homo sapiens
MKENVASATVFTLLLFLNTCLLNGQLPPGKPEIFKCRSPNKETFTCWWRPGTDGGLPTNYSLTYHREGETLMHECPDYITGGPNSCHFGKQYTSMWRTYIMMVNATNQMGS

SEQ ID NO: 96606 - protein, 156 aa, Homo sapiens
MATPMHRLIARRQAEANKQHVRCQKCLEFGHWTYECTGKRKYLHRPSRTAELKKALKEKENRLLLQQRSKSVTSSSSSSSDSSASDSSSESEETSTSSSSEDSDTDESSSSSSSSASSTTSSSSSDSDSDSSSSSSSSTSTDSSSDDEPPKKKKKK

SEQ ID NO: 96607 - protein, 59 aa, Homo sapiens
MPLCPLAHAMQPQSVLHSGYFHPLLRAWQTATTTLNASNLIYPIFVTDVPDDIQPITSL

SEQ ID NO: 96608 - protein, 241 aa, Homo sapiens
  MOD_RES (1)..(1): Any amino acid
XRGIFPEVEPPEAIPEIPEHPPTEEFEVFKEVIPEGETPIVKRRKTPSPTAPEAMKEVVPEMKIFEDVPEEPETPRMKTPEAPQEIIPAKTVPSKKREPPSVKVPEALQEIVPEKKTLVVPLRKPEVLPDEVPEALREVVPEKKVHPPQRAEVVPVKVHEAPKEIIPEKKVSVVPPKKPEVPPVKVPEASKEVIREEKVPLAPPKEPEVPPVKVPEPPKEVVPEKKAPVAPPKEPEVPPVK

SEQ ID NO: 96609 - protein, 90 aa, Homo sapiens
MDRLKSHLTVCFLPSVPFLILVSTLATAKSVTNSTLNGTNVVLGSVPVIIARTDHIIVKEGNSALINCSVYGIPDPQFKWYNSIGKLLKE

SEQ ID NO: 96610 - protein, 257 aa, Homo sapiens
  MOD_RES (1)..(1): Any amino acid
XAASAAVFSRLRSGLRLGSRGLCTRLATPPRRAPDQAAEIGSRGSTKAQGPQQQPGSEGPSYAKKVALWLAGLLGAGGTVSVVYIFGNNPVDENGAKMIIEPTSPCLLPDPLQEPYYQPPYTLVLELTGVLLHPEWSLATGWRFKKRPGIETLFQQLAPLYEIVIFTSETGMTAFPLIDSVDPHGFISYRLFRDATRYMDGHHVKDISCLNRDPARVVVVDCKKEAFRLQPYNGVALRPWDGNSDDRVLLDLSAFLK

SEQ ID NO: 96611 - protein, 108 aa, Homo sapiens
MTQKPHKKPGPGEPLVFGKTFTDHMLMVEWNDKGWGQPRIQPFQNLTLHPASSSLHYSLQLFEGMKAFKGKDQQVRLFRPWLNMDRMLRSAMRLCLPSFDKLELLECI

SEQ ID NO: 96612 - protein, 266 aa, Homo sapiens
MLASFLRTNRQAAKLSKPTLENLTPVVLRPEIRKPEVLRPETPRPVDIGSGGFGDVGALESLRGNADLAYILSMEPCGHCLIINNVNFCRESGLRTRTGSNIDCEKLRRRFSSLHFMVEVKGDLTAKKMVLALLELAQQDHGALDCCVVVILSHGCQASHLQFPGAVYGTDGCPVSVEKIVNIFNGTSCPSLGGKPKLFFIQACGGEQKDHGFEVASTSPEDESPGSNPEPDATPFQEGLRTFDQLDAISSLPTPSDIFVSYSTFP

SEQ ID NO: 96613 - protein, 336 aa, Homo sapiens
MPRYTVHVRGEWLAVPCQDAQLTVGWLGREAVRRYIKNKPDNGGFTSVDDAHFLVRRCKGLGLLDNEDRLEVALENNEFVEVVIEGDAMSPDFIPSQPEGVYLYSKYREPEKYIELDGDRLTTEDLVNLGKGRYKIKLTPTAEKRVQKSREVIDSIIKEKTDQRMRLGLPCMELQVNLVRSHSSGVGKPLSPERCRMLLALRINVLAKGYSGISLETLKQVIEMFNASCLPYVPEKGTVGASGDLAPLSHLALGLVGEGKMWSPKSGWADAKYVLEAHGLKPVILKPKEGLALINGTQMITSLGCEAVERASAIARQADIVAALTLEVLKGTTKAF

SEQ ID NO: 96614 - protein, 217 aa, Homo sapiens
SKAHTRKSGATGGSRSQKRKRTESSCVKSGSGSESTGAEERSAKPTKLASKSATSAKAGCSTITDSSSAASTSSSSSAVASASSTVPPGARVKQGKDQNKARRSRSASSPSPRRSSREKEQRSSKSETSKPGPSGLQAKLASLRKSTKKRSESPPAELPSLRRSTRQKTTGSCASTSRRGSGLGKRGAAEARRQEKMADPESNQEAVNSSAARTDEA

SEQ ID NO: 96615 - protein, 34 aa, Homo sapiens
MTFYLFGIRSFPKLWKSPYLGLGPGHSYVSLFLA

SEQ ID NO: 96616 - protein, 416 aa, Homo sapiens
MSPSHVVVNVSTARSGPLTTSSAPVSRAESLRPGSRSCTMSMSPTVIILACLGFFLDQSVWAHVGGQDKPFCSAWPSAVVPQGGHVTLRCHCRRGFNIFTLYKKDGVPVPELYNRIFWNSFLISPVTPAHAGTYRCRGFHPHSPTEWSAPSNPLVIMVTGLYEKPSLTARPGPTVRAGENVTLSCSSQSSFDIYHLSREGEAHELRLPAVPSINGTFQADFPLGPATHGETYRCFGSFHGSPYEWSDPSDPLPVSVTGNPSSSWPSPTEPSFKTGIARHLHAVIRYSVAIILFTILPFFLLHRWCSKKKDAAVMNQEPAGHRTVNREDSDEQDPQEVTYAQLDHCIFTQRKITGPSQRSKRPSTDTSVCIELPNAEPRALSPAHEHHSQALMGSSRETTALSQTQLASSNVPAAGI

SEQ ID NO: 96617 - protein, 196 aa, Homo sapiens
MNIKGSPWKGSLLLLLVSNLLLSHYIHNLSSEMFSEFDKRYTHGRGFITKAINSCHTSSLATPEDKEQAQQMNQKDFLSLIVSILRSWNEPLYHLVTEVRGMQEAPEAILSKAVEIEEQTKRLLEGMELIVSQVHPETKENEIYPVWSGLPSLQMADEESRLSAYYNLLHCLRRDSHKIDNYLKLLKCRIIHNNNC

SEQ ID NO: 96618 - protein, 487 aa, Homo sapiens
MMYSPICLTQDEFHPFIEALLPHVRAIAYTWFNLQARKRKYFKKHEKRMSKDEERAVKDELLSEKPEIKQKWASRLLAKLRKDIRQEYREDFVLTVTGKKHPCCVLSNPDQKGKIRRIDCLRQADKVWRLDLVMVILFKGIPLESTDGERLMKSPHCTNPALCVQPHHITVSVKELDLFLAYYVQEQDSGQSGSPSHNDPAKNPPGYLEDSFVKSGVFNVSELVRVSRTPITQGTGVNFPIGEIPSQPYYHDMNSGVNLQRSLSSPPSSKRPKTISIDENMEPSPTGDFYPSPSSPAAGSRTWHERDQDMSSPTTMKKPEKPLFSSASPQDSSPRLSTFPQHHHPGIPGVAHSVISTRTPPPPSPLPFPTQAILPPAPSSYFSHPTIRYPPHLNPQDTLKNYVPSYDPSSPQTSQLRICDWTMNQNGRHLYPSTSEDTLGITWQSPGTWASLVPFQVSNRTPILPANVQNYGLNIIGEPFLQAETSN

SEQ ID NO: 96619 - protein, 276 aa, Homo sapiens
MYEGDLEGQSMNWTSEEGRGDIIRSGTNIDRAWQCQNTKRESGRKVQSGNINAAKTIADIIRTCLGPKSMMKMLLDPMGGIVMTNDGNAILREIQVQHPAAKSMIEISRTQDEEVGDGTTSVIILAGEMLSVAEHFLEQQMHPTVVISAYRKALDDMISTLKKISIPVDISDSDMMLNIINSSITTKAISRWSSLACNIALDAVKMVQFEENGRKEIDIKKYARVEKIPGGIIEDSCVLRGVMINKDVTHPRMRRYIKNPRIVLLDSSLEYKKGES

SEQ ID NO: 96620 - protein, 605 aa, Homo sapiens
MMNKLYIGNLSPAVTADDLRQLFGDRKLPLAGQVLLKSGYAFVDYPDQNWAIRAIETLSGKVELHGKIMEVDYSVSKKLRSRKIQIRNIPPHLQWEVLDGLLAQYGTVENVEQVFAFSLVNTDTETAVVNVTYATREEAKIAMEKLSGHQFENYSFKISYIPDEEVSSPSPPQRAQRGDHSSREQGHAPGGTSQARQIDFPLRILVPTQFVGAIIGKEGLTIKNITKQTQSRVDIHRKENSGAAEKPVTIHATPEGTSEACRMILEIMQKEADETKLAEEIPLKILAHNGLVGRLIGKEGRNLKKIEHETGTKITISSLQDLSIYNPERTITVKGTVEACASAEIEIMKKLREAFENDMLAVNQQANLIPGLNLSALGIFSTGLSVLSPPAGPRGAPPAAPYHPFTTHSGYFSSLYPHHQFGPFPHHHSYPEQEIVNLFIPTQAVGAIIGKKGAHIKQLARFAGASIKIAPAEGPDVSERMVIITGPPEAQFKAQGRIFGKLKEENFFNPKEEVKLEAHIRVPSSTAGRVIGKGGKTVNELQNLTSAEVIVPRDQTPDENEEVIVRIIGHFFASQTAQRKIREIVQQVKQQEQKYPQGVASQRSK

SEQ ID NO: 96621 - protein, 455 aa, Homo sapiens
MVRELLREPAGLSLVLKKIPIPETPPQTPPQVLDSPHQRSPSLSLAPLSPRAPSEDVFAFDLSSNPSPGPSPAWTDSASLGPEPLPIPPEPPAILPAGVAGTPGLPESPDKSPVGRKKSKGLATRLSRRRVSCRELGRPDCDGWLLLRKAPGGFMGPRWRRRWFVLKGHTLYWYRQPQDEKAEGLINVSNYSLESGHDQKKKYVFQLTHDVYKPFIFAADTLTDLSMWVRHLITCISKYQSPGRAPPPREEDCYSETEAEDPDDEAGSHSASPSPAQAGSPLHGDTSPAATPTQRSPRTSFGSLTDSSEEALEGMVRGLRQGGVSLLGQPQPLTQEQWRSSFMRRNRDPQLNERVHRVRALQSTLKAKLQELQVLEEVLGDPELTGEKFRQWKEQNRELYSEGLGAWGVAQAEGSSHILTSDSTEQSPHSLPSDPEEHSHLCPLTSESSLRPPDL

SEQ ID NO: 96622 - protein, 778 aa, Homo sapiens
MSSAMLVTCLPDPSSSFREDAPRPPVPGEEGETPPCQPGVGKGQVTKPMPVSSNTRRNEDGLGEPEGRASPDSPLTRWTKSLHSLLGDQDGAYLFRTFLEREKCVDTLDFWFACNGFRQMNLKDTKTLRVAKAIYKRYIENNSIVSKQLKPATKTYIRDGIKKQQIDSIMFDQAQTEIQSVMEENAYQMFLTSDIYLEYVRSGGENTAYMSNGGLGSLKVVCGYLPTLNEEEEWTCADFKCKLSPTVVGLSSKTLRATASVRSTETVDSGYRSFKRSDPVNPYHIGSGYVFAPATSANDSEISSDALTDDSMSMTDSSVDGIPPYRVGSKKQLQREMHRSVKANGQVSLPHFPRTHRLPKEMTPVEPATFAAELISRLEKLKLELESRHSLEERLQQIREDEEREGSELTLNSREGAPTQHPLSLLPSGSYEEDPQTILDDHLSRVLKTPGCQSPGVGRYSPRSRSPDHHHHHHSQYHSLLPPGGKLPPAAASPGACPLLGGKGFVTKQTTKHVHHHYIHHHAVPKTKEEIEAEATQRVHCFCPGGSEYYCYSKCKSHSKAPETMPSEQFGAQSTKKAYPLESARSSPGERASRHHLWGGNSGHPRTTPRAHLFTQDPAMPPLTPPNTLAQLEEACRRLAEVSKPPKQRCCVASQQRDRNHSATVQTGATPFSNPSLAPEDHKEPKKLAGVHALQASELVVTYFFCGEEIPYRRMLKAQSLTLGHFKEQLSKKGNYRYYFKKASDEFACGAVFEEIWEDETVLPMYEGRILGKVERID

SEQ ID NO: 96623 - protein, 101 aa, Homo sapiens
MPRVKAAQAGRQSSAKRHLAEQFAVGEIITDMAKKEWKVGLPIGQGGFGCIYLADMNSSESVGSDAPCVVKVEPSDNGPLFTELKFYQRAAKPEQKMDSYP

SEQ ID NO: 96624 - protein, 134 aa, Homo sapiens
MNFFKVGKHFTVVDMPGYGFRAPEDFVDMVETYLKERRNLKRTFLLVDSVVGIQKTDNIAIEMCEEFALPYVIVLTKIDKSSKGHLLKQVLQIQKFVNMKTQGCFPQLFPVSAVTFSGIHLLRCFIASVTGSLD

SEQ ID NO: 96625 - protein, 103 aa, Homo sapiens
MAVGNNTQRSYSIIPCFIFVELVIMAGTVLLAYYFECTDTFQVHIQGFFCQDGDLMKPYPGTEEESFITPLVLYCVLAATPTAIIFIGEISMYFIKSTRESLI

SEQ ID NO: 96626 - protein, 92 aa, Homo sapiens
MELGGHWDMNSAPRLVSETAERKQEQKTGTEAEAADSGAVGARRFLLCLYLVGFLDLFGVSMVVPLLSLHVKSLGASPTVAGIVDDVCSKRF

SEQ ID NO: 96627 - protein, 599 aa, Homo sapiens
MRRARSREGMAGAVPGAIMDEDYYGSAAEWGDEADGGQQEDDSGEGEDDAEVQQECLHKFSTRDYIMEPSIFNTLKRYFQAGGSPENVIQLLSENYTAVAQTVNLLAEWLIQTGVEPVQVQETVENHLKSLLIKHFDPRKADSIFTEEGETPAWLEQMIAHTTWRDLFYKLAEAHPDCLMLNFTVKLISDAGYQGEITSVSTACQQLEVFSRVLRTSLATILDGGEENLEKNLPEFAKMVCHGEHTYLFAQAMMSVLAQEEQGGSAVRRIAQEVQRFAQEKGHDASQITLALGTAASYPRACQALGAMLSKGALNPADITVLFKMFTSMDPPPVELIRVPAFLDLFMQSLFKPGARINQDHKHKYIHILAYAASVVETWKKNKRVSINKDELKSTSKAVETVHNLCCNENKGASELVAELSTLYQCIRFPVVAMGVLKWVDWTVSEPRYFQLQTDHTPVHLALLDEISTCHQLLHPQVLQLLVKLFETEHSQLDVMEQLELKKTLLDRMVHLLSRGYVLPVVSYIRKCLEKLDTDISLIRYFVTEVLDVIAPPYTSDFVQLFLPILENDSIAGTIKTEGEHDPVTEFIAHCKSNFIMVN

SEQ ID NO: 96628 - protein, 151 aa, Homo sapiens
MLDVLQELRGTVAQQVTGSSGTVKVVVVDSVTAVVSPLLGGQQREGLALMMQLARELKTLARDLGMAVVVTNHITRDRDSGRLKPALGRSWSFVPSTRILLDTIEGAGASGGRRMACLAKSSRQPTGFQEMVDIGTWGTSEQSATLQGDQT

SEQ ID NO: 96629 - protein, 431 aa, Homo sapiens
VEFFVTVAFGFIGLMIILIESFPKSLVWLFSPFCHCTFVIGIAQVMHLEDFNEGASFSNLTAGPYPLIITIIMLTLNSIFYVLLAVYLDQVIPGEFGLRRSSLYFLKPSYWSKSKRNYEELSEGNVNGNISFSEIIEPVSSEFVGKEAIRISGIQKTYRKKGENVEALRNLSFDIYEGQITALLGHSGTGKSTLMNILCGLCPPSDGFASIYGHRVSEIDEMFEARKMIGICPQLDIHFDVLTVEENLSILASIKGIPANNIIQEVQKVLLDLDMQTIKDNQAKKLSGGQKRKLSLGIAVLGNPKILLLDEPTAGMDPCSRHIVWNLLKYRKANRVTVFSTHFMDEADILADRKAVISQGMLKCVGSSMFLKSKWGIGYRLSMYIDKYCATESLSSLVKQHIPGATLLQQNDQQLVYSLPFKDMDKFSGIA

SEQ ID NO: 96630 - protein, 178 aa, Homo sapiens
MLLILLSVALLALSSAQNLNEDVSQEESPSLIAGNPQGPSPQGGNKPQGPPPPPGKPQGPPPQGGNKPQGPPPPGKPQGPPPQGDKSRSPRSPPGKPQGPPPQGGKPQGPPAQGGSKSQSARSPPGKPQGPPQQEGNNPQGPPPPAGGNPQQPQAPPAGQPQGPPRPPQGGRPSRPPQ

SEQ ID NO: 96631 - protein, 177 aa, Homo sapiens
MGRLETADKQSVHIVENEIQASIDQIFSRLERLEILSSKEPPNKRQNARLRVDQLKYDVQHLQTALRNFQHRRHAREQQERQREELLSRTFTTNDSDTTIPMDESLQFNSSLQKVHNGMDDLILDGHNILDGLRTQRLTLKVGSLLGDREKASCFSLIQQFSNCVYILITCPQIVIF

SEQ ID NO: 96632 - protein, 166 aa, Homo sapiens
MMNFRQRMGWIGVGLYLLASAAAFYYVFEISETYNRLALEHIQQHPEEPLEGTTWTHSLKAQLLSLPFWGSVKRQALYACSTCTPEGEEPAGICLACSYECHGSHKLFELYTKRNFRCDCGNSKFKNLECKLLPDKAKVNSGNKYNDNFFGLYCICKRPYPDPEDE

SEQ ID NO: 96633 - protein, 79 aa, Homo sapiens
MSELEQLRQEAEQLRNQIQDARKACNDATLVQITSNMDSVGRIQMRTRRTLRGHLAKIYAMHWGYDSRLLVSASQDGKL

SEQ ID NO: 96634 - protein, 396 aa, Homo sapiens
MLNRKTSHFLGMRVQSELEHLSELRREAGKDRSSVHGSAARTRASVRTQWTTAAAAKADEDPGANLFPPPLPRPRICMWKYLDVHSMHQLEKTTNAEMREVLAELLELGCPEQSLRDAITLDLFCHALIFCRQQGFSLEQTSAACALLQDLHKACIATPLGNVEECYRYFTSVLFCHGVRVSSPGTFWKLYPSPDKVSPSLSHIHHPYLLVKTPVGSPCSCCWAFGGKARAPEGSQGSNSESPPQRPPFSIDLFKEEQLLALEDYVVNTYFRHFKLYKYVFTPQVRLDLSLTYMGLQPPKLWPESETEKEESKEMEEQAVTPQKEELETVAPPEPEPSHIHVLRAYIKTQVNKELEQLQGLVEERLKASEERLSSKLTALERPFQLPPGKGKSKTK

SEQ ID NO: 96635 - protein, 837 aa, Homo sapiens
MFSQQQQQQLQQQQQAPLPMAVSRGLPPQQPQQPLLNLQGTNSASLLNGSMLQRALLLQQLQGLDQFAMPPATYDTAGLTMPTATLGNLRGYGMASPGLAAPSLTPPQLATPNLQQFFPQATRQSLLGPPPVGVPMNPSQFNLSGRNPQKQARTSSSTTPNRKDSSSQTMPVEDKSDPPEGSEEAAEPRMDTPEDQDLPPCPEDIAKEKRTPAPEPEPCEASELPAKRLRSSEEPTEKEPPGQLQVKAQPQARMTVPKQTQTPDLLPEALEAQVLPRFQPRVLQVQAQVQSQTQPRIPSTDTQVQPKLQKQAQTQTSPEHLVLQQKQVQPQLQQEAEPQKQVQPQVQPQAHSQGPRQVQLQQEAEPLKQVQPQVHTQAQPSVQPQEHPPAQVSVQPPEQTHEQPHTQPQVSLLAPEQTPVVVHVCGLEMPPDAVEAGGGMEKTLPEPVGTQVSMEEIQNESACGLDVGECENRAREMPGVWGAGGSLKVTILQSSDSRAFSTVPLTPVPRPSDSVSSTPAATSTPSKQALQFFCYICKASCSSQQEFQDHMSEPQHQQRLGEIQHMSQACLLSLLPVPRDVLETEDEEPPPRRWCNTCQLYYMGDLIQHRRTQDHKIAKQSLRPFCTVCNRYFKTPRKFVEHVKSQGHKDKAKELKSLEKEIAGQDEDHFITVDAVGCFEGDEEEEEDDEDEEEIEVEEELCKQVRSRDISREEWKGSETYSPNTAYGVDFLVPVMGYICRICHKFYHSNSGAQLSHCKSLGHFENLQKYKAAKNPSPTTRPVSRRCAINARNALTALFTSSGRPPSQPNTQDKTPSKVTARPSQPPLPRRSTRLKT

SEQ ID NO: 96636 - protein, 314 aa, Homo sapiens
MASPSNSSTVPVSEFLLICFPNFQSWQHWLSLPLSLLFLLAMGANTTLLITIQLEASLHQPLYYLLSLLSLLDIVLCLTVIPKVLAIFWYDLRSISFPACFLQMFIMNSFLPMESCTFMVMAYDRYVAICHPLRYPSIITNQFVAKASVFIVVRNALLTAPIPILTSLLHYCGENVIENCICANLSVSRLSCDNFTLNRIYQFVAGWTLLGSDLFLIFLSYTFILRAVLRFKAEGAAVKALSTCGSHFILILFFSTILLVVVLTNVARKKVPMDILILLNVLHHLIPPALNPIVYGVRTKEIKQGIQKLLQRGR

SEQ ID NO: 96637 - protein, 304 aa, Homo sapiens
MSSSEEVSWISWFCGLRGNEFFCEVDEDYIQDKFNLTGLNEQVPHYRQALDMILDLEPDEELEDNPNQSDLIEQAAEMLYGLIHARYILTNRGIAQMLEKYQQGDFGYCPRVYCENQPMLPIVPVPDIRTCHFCLVEDPSVGCISGSEKCTISSSSLCMVITIYYDVKVRFIVRGCGQYISYRCQEKRNTYFAEYWYQAQCCQYDYCNSWSSPQLQSSLPEPHDRPLALPLSDSQIQWFYQALNLSLPLPNFHAGTEPDGLDPMVTLSLNLGLSFAELCRMYLFLNSSGLLVLPQAGLLTPHPS

SEQ ID NO: 96638 - protein, 109 aa, Homo sapiens
MSESSSKSSQPLASKQKKDGTEKRGRGRPRKQPPRQERQVRDRGVTRSKAEKVRPPTVPVPQVDIVPGRLSEAEWMALTALEEGEDVVGDILADLLARVMDSAFKVYLT

SEQ ID NO: 96639 - protein, 69 aa, Homo sapiens
MGSGARFPSGTLRVRWLLLLGLVGPVLGAARPGFQQTSHLSSYEIITPWRLTRERREAPRPYSKQRPFA

SEQ ID NO: 96640 - protein, 241 aa, Homo sapiens
  MOD_RES (1)..(1): Any amino acid
XDELELSVLERQPEENTPLNGADKVFPSLDEEVPPAEANKESPWSSCNKNVVGRCKLWMIITSIFLGVITVIIIGLCLAAVTYVDEDENEILELSSNKTFFIMLKIPEECVAEEELPHLLTERNEVMEAGLCLKAVLYQVLEMKGIHSVLQKRFCGLIQKHQQHQRGGDSFLSRFYSLALSPVKQLPSTASAGSSLDKGRKPARVGAIGSAGMSHCWRSLVFCLFLFCFVLFFETGSRSVA

SEQ ID NO: 96641 - protein, 183 aa, Homo sapiens
MPTWFCSRAWFSHVGPFNEGGQGVPEDLLFFYEHLRKGGGVIRVDQSLLLYRHHPQAATHCVLETTIWTHRVRFLEEQALPRWAAFTIWNAGKQGRRLYRSLTAGSQRKVVAFCDVDENKIRKGFYCHEDSQERPKPRIPILHFRAARPPFVICVKLDLTGGAFEDNLRSLHLQEGQDFLHFS

SEQ ID NO: 96642 - protein, 50 aa, Homo sapiens
MLARARGCPRGPRLLRIAPRPARPPPVFADSPFQRRSVAGRWGCSGPRRA

SEQ ID NO: 96643 - protein, 282 aa, Homo sapiens
MWTLRSPLTRSLYVKENHQWYVCNREKLCESLQAVFVQSYLDQGTQIFLNNSIEKSGWLFIQLYHSFVSSVFSLFMSRTSINGLLGRGSMFVFSPDQFQRLLKINPDWKTHRLLDLGAGDGEVTKIMSPHFEEIYATELSETMIWQLQKKKYRVLGINEWQNTGFQYDVISCLNLLDRCDQPLTLLKDIRSVLEPTRGRVILALVLPFHPYVENVGGKWEKPSEILEIKGQNWEEQVNSLPEVFRKAGFVIEAFTRLPYLCEGDMYNDYYVLDDAVFVLKPV

SEQ ID NO: 96644 - protein, 25 aa, Homo sapiens
MTRAGDHNRQRGCCGSLADYLTSAK

SEQ ID NO: 96645 - protein, 45 aa, Homo sapiens
MYALWRTGMKDSADNLALKLPSSLSPLGPEAATSQTATLSLTALL

SEQ ID NO: 96646 - protein, 228 aa, Homo sapiens
MDAILNYRSEDTEDYYTLLGCDELSSVEQILAEFKVRALECHPDKHPENPKADPGVKSECLARLPASFAPISLQNEISLPRTVETFQKLQKAKEILTNEESRARYDHWRRSQMSMPFQQWEALNDSVKTSMHWVVRGKKDLMLEESDKTHTTKMENEECNEQRERKKEELASTAEKTEQKEPKPLEKSVSPQNSDSSGFADVNGWHLRFRWSKDAPSELLRKFRNYEI

SEQ ID NO: 96647 - protein, 83 aa, Homo sapiens
MADQLTEEQIAEFKEAFSLFDKDGDGTITTKELGTVMRSLGQNPTEAELQDMINEVDEMIREADIDGDGQVNYEEFVQMMTAK

SEQ ID NO: 96648 - protein, 37 aa, Homo sapiens
MADLEEQLSDEEKTKSVLHFEDFESRGPGKLANFFLK

SEQ ID NO: 96649 - protein, 153 aa, Homo sapiens; identical to SEQ ID NO: 27634

SEQ ID NO: 96650 - protein, 220 aa, Homo sapiens
MDSSLPECRHIGKGIRAKVERNFLFSRDLKAGLPRPSKPGKERIPEPALGATVLISAAPFFVLFLIPVESNSPRHRSLLQILLSFASGGLLGDAFLHLIPHALEPHSHHTLEQPGHGHSHSGQGPILSVGLWVLSGIVAFLVVEKFVRHVKGGHGHSHGHGHAHSHTRGSHGHGRQERSTKEKQSSEEEEKETRGVQKRRGGSTVPKDGPVRPQNAEEEK

SEQ ID NO: 96651 - protein, 1864 aa, Homo sapiens
MSQKSWIESTLTKRECVYIIPSSKDPHRCLPGCQICQQLVRCFCGRLVKQHACFTASLAMKYSDVKLGDHFNQAIEEWSVEKHTEQSPTDAYGVINFQGGSHSYRAKYVRLSYDTKPEVILQLLLKEWQMELPKLVISVHGGMQKFELHPRIKQLLGKGLIKAAVTTGAWILTGGVNTGVAKHVGDALKEHASRSSRKICTIGIAPWGVIENRNDLVGRDVVAPYQTLLNPLSKLNVLNNLHSHFILVDDGTVGKYGAEVRLRRELEKTINQQRIHARIGQGVPVVALIFEGGPNVILTVLEYLQESPPVPVVVCEGTGRAADLLAYIHKQTEEGGNLPDAAEPDIISTIKKTFNFGQNEALHLFQTLMECMKRKELITVFHIGSDEHQDIDVAILTALLKGTNASAFDQLILTLAWDRVDIAKNHVFVYGQQWLVGSLEQAMLDALVMDRVAFVKLLIENGVSMHKFLTIPRLEELYNTKQGPTNPMLFHLVRDVKQGNLPPGYKITLIDIGLVIEYLMGGTYRCTYTRKRFRLIYNSLGGNNRRSGRNTSSSTPQLRKSHESFGNRADKKEKMRHNHFIKTAQPYRPKIDTVMEEGKKKRTKDEIVDIDDPETKRFPYPLNELLIWACLMKRQVMARFLWQHGEESMAKALVACKIYRSMAYEAKQSDLVDDTSEELKQYSNDFGQLAVELLEQSFRQDETMAMKLLTYELKNWSNSTCLKLAVSSRLRPFVAHTCTQMLLSDMWMGRLNMRKNSWYKVILSILVPPAILLLEYKTKAEMSHIPQSQDAHQMTMDDSENNFQNITEEIPMEVFKEVRILDSNEGKNEMEIQMKSKKLPITRKFYAFYHAPIVKFWFNTLAYLGFLMLYTFVVLVQMEQLPSVQEWIVIAYIFTYAIEKVREIFMSEAGKVNQKIKVWFSDYFNISDTIAIISFFIGFGLRFGAKWNFANAYDNHVFVAGRLIYCLNIIFWYVRLLDFLAVNQQAGPYVMMIGKMVANMFYIVVIMALVLLSFGVPRKAILYPHEAPSWTLAKDIVFHPYWMIFGEVYAYEIDVCANDSVIPQICGPGTWLTPFLQAVYLFVQYIIMVNLLIAFFNNVYLQVKAISNIVWKYQRYHFIMAYHEKPVLPPPLIILSHIVSLFCCICKRRKKDKTSDGPKLFLTEEDQKKLHDFEEQCVEMYFNEKDDKFHSGSEERIRVTFERVEQMCIQIKEVGDRVNYIKRSLQSLDSQIGHLQDLSALTVDTLKTLTAQKASEASKVHNEITRELSISKHLAQNLIDDGPVRPSVWKKHGVVNTLSSSLPQGDLESNNPFHCNILMKDDKDPQCNIFGQDLPAVPQRKEFNFPEAGSSSGALFPSAVSPPELRQRLHGVELLKIFNKNQKLGSSSTSIPHLSSPPTKFFVSTPSQPSCKSHLETGTKDQETVCSKATEGDNTEFGAFVGHRDSMDLQRFKETSNKIKILSNNNTSENTLKRVSSLAGFTDCHRTSIPVHSKQEKISRRPSTEDTHEVDSKAALIPDWLQDRPSNREMPSEEGTLNGLTSPFKPAMDTNYYYSAVERNNLMRLSQSIPFTPVPPRGEPVTVYRLEESSPNILNNSMSSWSQLGLCAKIEFLSKEEMGGGLRRAVKVQCTWSEHDILKSGHLYIIKSFLPEVVNTWSSIYKEDTVLHLCLREIQQQRAAQKLTFAFNQMKPKSIPYSPRFLEVFLLYCHSAGQWFAVEECMTGEFRKYNNNNGDEIIPTNTLEEIMLAFSHWTYEYTRGELLVLDLQGVGENLTDPSVIKAEEKRSCDMVFGPANLGEDAIKNFRAKHHCNSCCRKLKLPDLKRNDYTPDKIIFPQDEPSDLNLQPGNSTKESESTNSVRLML

SEQ ID NO: 96652 - protein, 1093 aa, Homo sapiens
MGGKAWPRRAVGTAGGPCAEQISAPFQTLLMPHLPLASFRPPFWGLRHSRGLPRFHSVSTQSEPHGSPISRRNREAKQKRLREKQATLEAEIAGESKSPAESIKAWRPKELVLYEIPTKPGEKKDVSGPLPPAYSPRYVEAAWYPWWVREGFFKPEYQARLPQATGETFSMCIPPPNVTGSLHIGHALTVAIQDALVRWHRMRGDQVLWVPGSDHAGIATQAVVEKQLWKERGVRRHELSREAFLREVWQWKEAKGGEICEQLRALGASLDWDRECFTMDVGSSVAVTEAFVRLYKAGLLYRNHQLVNWSCALRSAISDIEVENRPLPGHTQLRLPGCPTPVSFGLLFSVAFPVDGEPDAEVVVGTTRPETLPGDVAVAVHPDDSRYTHLHGRQLRHPLMGQPLPLITDYAVQPHVGTGAVKVTPAHSPADAEMGARHGLSPLNVIAEDGTMTSLCGDWLQGLHRFVAREKIMSVLSERGLFRGLQNHPMVLPICSRSGDVIEYLLKNQWFVRCQEMGARAAKAVESGALELSPSFHQKNWQHWFSHIGDWCVSRQLWWGHQIPAYLVVEDHAQGEEDCWVVGRSEAEAREVAAELTGRPGAELTLERDPDVLDTWFSSALFPFSALGWPQETPDLARFYPLSLLETGSDLLLFWVGRMVMLGTQLTGQLPFSKVLLHPMVRDRQGRKMSKSLGNVLDPRDIISGVEMQLLQEKLRSGNLDPAELAIVAAAQKKDFPHGIPECGTDALRFTLCSHGVQAGDLHLSVSEVQSCRHFCNKIWNALRFILNALGEKFVPQPAEELSPSSPMDAWILSRLALAAQECERGFLTRELSLVTHALHHFWLHNLCDVYLEAVKPVLWHSPRPLGPPQVLFSCADLGLRLLAPLMPFLAEELWQRLPPRPGCPPAPSISVAPYPSACSLEHWRQPELERRFSRVQEVVQVLRALRATYQLTKARPRVLLQSSEPGDQGLFEAFLEPLGTLGYCGAVGLLPPGTAAPSGWAQAPLSDTAQVYMELQGLVDPQIQLPLLAARRYKLQKQLDSLTARTPSEGEAGTQRQQKLSSLQLELSKLDKAASHLRQLMDEPPAPGSPEL

SEQ ID NO: 96653 - protein, 345 aa, Homo sapiens
MAKNTWPILKGFQEGPLNFAPTFKFDVGTNKYDTSAKKRKPAWTDRILWKVKAPGGGPSPSGRKSHRLQVTQHSYRSHMEYTVSDHKPVAAQFLLQFAFRDDMPLVRLEVADEWVRPEQAVVRYRMETVFARSSWDWIGLYRVTFSEESLPKGHGDFILGYYSHNHSILIGITEPFQISLPSSELASSSTDSSGTSSEGEDDSTLELLAPKSRSPSPGKSKRHRSRSPGLARFPGLALRPSSRERRGASRSPSPQSRRLSRVAPDRSSNGSSRGSSEEGPSGLPGPWAFPPAVPRSLGLLPALRLETVDPGGGGSWGPDREALAPNSLSPSPQGHRGLEEGGLGP

SEQ ID NO: 96654 - protein, 43 aa, Homo sapiens
MAAVWQQVLAVDASFGRSISAGAASCCGRMPRLGTPQRCVGST

SEQ ID NO: 96655 - protein, 416 aa, Homo sapiens
MSGYSSDRDRGRDRGFGAPRFGGSRAGPLSGKKFGNPGEKLVKKKWNLDELPKFEKNFYQEHPDLARRTAQEVETYRRSKEITVRGHNCPKPVLNFYEANFPANVMDVIARQNFTEPTAIQAQGWPVALSGLDMVGVAQTGSGKTLSYLLPAIVHINHQPFLERGDGPICLVLAPTRELAQQVQQVAAEYCRACRLKSTCIYGGAPKGPQIRDLERGVEICIATPGRLIDFLECGKTNLRRTTYLVLDEADRMLDMGFEPQIRKIVDQIRPDRQTLMWSATWPKEVRQLAEDFLKDYIHINIGALELSANHNILQIVDVCHDVEKDEKLIRLMEEIMSEKENKTIVFVETKRRCDELTRKMRRDGWPAMGIHGDKSQQERDWVLNEFKHGKAPILIATDVASRGLGPQNEHMKRLL

SEQ ID NO: 96656 - protein, 99 aa, Homo sapiens
MQFFGRLVNTFSGVTNLFSNPFRVKEVAVADYTSSDRVREEGQLILFQNTPNRTWDCVLVNPRNSQSGFRRLGSSPCVLSPMRLLLVLLVCPSSPVTAT

SEQ ID NO: 96657 - protein, 50 aa, Homo sapiens
MATEGAAQLGNRVAGMVCSLWVLLLVSSVLALEVGRGECSGRPATPDSDL

SEQ ID NO: 96658 - protein, 464 aa, Homo sapiens
MSKLWFKQDDKFFLPKACLNFEFFSRYIYADPLHCNMTYLFIRLLKDDLKEYTYAARLSGLSYGIASGMNAILLSVKGYNDKQPILLKKIIEKMATFEIDEKRFEIIKEAYMRSLNNFRAEQPHQHAMYYLRLLMTEVAWTKDELKEALDDVTLPRLKAFIPQLLSRLHIEALLHGNITKQAALGIMQMVEDTLIEHAHTKPLLPSQLVRYREVQLPDRGWFVYQQRNEVHNNCGIEIYYQTDMQSTSENMFLELFCQIISEPCFNTLRTKEQLGYIVFSGPRRANGIQGLRFIIQSEKPPHYLESRVEAFLITMEKSIEDMTEEAFQKHIQALAIRRLDKPKKLSAECAKYWGEIISQQYNFDRDNTEVAYLKTLTKEDIIKFYKEMLAVDAPRRHKVSVHVLAREMDSCPVVGEFPCQNDINLSQAPALPQPEVIQNMTEFKRGLPLFPLVKPHINFMAAKL

SEQ ID NO: 96659 - protein, 304 aa, Homo sapiens
MWLGRRALCALVLLLACASLGLLYASTRDAPGLRLPLAPWAPPQSPRRPELPDLAPEPRYAHIPVRIKEQVVGLLAWNNCSCESSGGGLPLPFQKQVRAIDLTKAFDPAELRAASATREQEFQAFLSRSQSPADQLLIAPANSPLQYPLQGVEVQPLRSILVPGLSLQAASGQEVYQVNLTASLGTWDVAGEVTGVTLTGEGQADLTLVSPGLDQLNRQLQLVTYSSRSYQTNTADTAQYNISALVTIATKTFLRYDRLRALITSIRRFYPTVTVVIADDSDKPERVSGPYVEHYLMPFGKVCS

SEQ ID NO: 96660 - protein, 183 aa, Homo sapiens
MEPPGDWGPPPWRSTPKTDVLRLVLYLTFLGAPCYAPALPSCKEDEYPVGSECCPKCSPGYRVKEACGELTGTVCEPCPPGTYIAHLNGLSKCLQCQMCDPAMGLRASRNCSRTENAVCGCSPGHFCIVQDGDHCAACRAYATSSPGQRVQKGGTESQDTLCQNCPPGTFSPNGTLEECQHQT

SEQ ID NO: 96661 - protein, 39 aa, Homo sapiens
MPPKDDKKKKDAGKSAKKDKDPVNKSGGKAKKKLWSLRD

SEQ ID NO: 96662 - protein, 74 aa, Homo sapiens
MTMTANKNSSITHGAGGTKAPRGTLSRSQSVSPPPVLSPPRSPIYPLSDSETSACRYPSHSSSRVLLKDRHPPA

SEQ ID NO: 96663 - protein, 126 aa, Homo sapiens
MNAIMGSGILGLAYVLANTGVFGFSFLLLTVALLASYSVHLLLSMCIQTAVTSYEDLGLFAFGLPGKLVVAGTIIIQNIGAMSSYLLIIKTELPAAIAEFLTGDYSRYWYLDGQTLLIIICVGIVF

SEQ ID NO: 96664 - protein, 152 aa, Homo sapiens
MSEVQKAVAEAEQKAFEVIATERARMEQTIADVKRQAAEDAFLVINEQEESTENCWNCGRKASETCSGCNIARYCGSFCQHKDWERHHRLCGQNLHGQSPHGQGRPLLPVGRGSSARSADCSVPSPALDKTSATTSRSSTPASVTAIDTNGL

SEQ ID NO: 96665 - protein, 374 aa, Homo sapiens
MSLLVVSMACVGFFLLQGAWPHEGVHRKPSLLAHPGRLVKSEETVILQCWSDVMFEHFLLHREGMFNDTLRLIGEHHDGVSKANFSISRMTQDLAGTYRCYGSVTHSPYQVSAPSDPLDIVIIGLYEKPSLSAQPGPTVLAGENVTLSCSSRSSYDMYHLSREGEAHERRLPAGTKVNGTFQANFPLGPATHGGTYRCFGSFRDSPYEWSKSSDPLLVSVTGNPSNSWPSPTEPSSETERMFHHVGQACLKLPTSSDPTVSACQSNPRHLHILIGTSVVIILFILLFFLLHCWCSNKKNAAVMDQESAGNRTANSEDSDEQDPQEVTYTQLNHCVFTQRKITRPSQRPKTPPTDIIVYTELPNAESRSKVVSCP

SEQ ID NO: 96666 - protein, 165 aa, Homo sapiens
MLELQYHNEDLEKDKTSQNCLGRGMEQVAKKLGVAHEEIQRLTDELQVKEKEQCKLDSALKKAQLEIDKLKENLVKLKENDAADLQKAKEQNQRLDEEILALRNRVRSLDSEKKVLGEMVERLKGEVCESQENKQLGNHSPGKTVGGEQREQIEASMLEPELSVT

SEQ ID NO: 96667 - protein, 128 aa, Homo sapiens
MFDVTSRVTYKNVPNWHRDLVRVCENIPIVLCGNKVDIKDRKVKAKSIVFHRKKNLQYYDISAKSNYNFEKPFLWLARKLIGDPNLEFVAMPALAPPEVVMDPALAAQYEHDLEVAQTTALPDEDDDL

SEQ ID NO: 96668 - protein, 139 aa, Homo sapiens
MAAMAPALTDAAAEAHHIRFKLAPPSSTLSPGSAENNGNANILIAANGTKRKAIAAEDPSLDFRNNPTKEDLGKLQPLVASYLCSDVTSVPSKESLKLQGVFSKQTVLKSHPLLSQSYELRAELLGRQPVLEFSLENLR

SEQ ID NO: 96669 - protein, 145 aa, Homo sapiens
MEGASFGAGRAGAALDPVSFARRPQTLLRVASWVFSIAVFGPIVNEGYVNTDSGPELRCVFNGNAGACRFGVALGLGAFLACAAFLLLDVRFQQSGGRGKTPPSPQDWGSWPLFPSHVPVGSDCLVSVMVVRPVRSHSPLSLTGC

SEQ ID NO: 96670 - protein, 1143 aa, Homo sapiens
MEVDTEEKRHRTRSKGVRVPVEPAIQELFSCPTPGCDGSGHVSGKYARHRSVYGCPLAKKRKTQDKQPQEPAPKRKPFAVKADSSSVDECDDSDGTEDMDEKEEDEGEEYSEDNDEPGDEDEEDEEGDREEEEEIEEEDEDDDEDGEDVEDEEEEEEEEEEEEEEEENEDHQMNCHNTRIMQDTEKDDNNNDEYDNYDELVAKSLLNLGKIAEDAAYRARTESEMNSNTSNSLEDDSDKNENLGRKSELSLDLDSDVVRETVDSLKLLAQGHGVVLSENMNDRNYADSMSQQDSRNMNYVMLGKPMNNGLMEKMVEESDEEVCLSSLECLRNQCFDLARKLSETNPQERNPQQNMNIRQHVRPEEDFPGRTPDRNYSDMLNLMRLEEQLSPRSRVFASCAKEDGCHERDDDTTSVNSDRSEEVFDMTKGNLTLLEKAIALETERAKAMREKMAMEAGRRDNMRSYEDQSPRQLPGEDRKPKSSDSHVKKPYYGKDPSRTEKKESKCPTPGCDGTGHVTGLYPHHRSLSGCPHKDRVPPEILAMHESVLKCPTPGCTGRGHVNSNRNSHRSLSGCPIAAAEKLAKAQEKHQSCDVSKSSQASDRVLRPMCFVKQLEIPQYGYRNNVPTTTPRSNLAKELEKYSKTSFEYNSYDNHTYGKRAIAPKVQTRDISPKGYDDAKRYCKDPSPSSSSTSSYAPSSSSNLSCGGGSSASSTCSKSSFDYTHDMEAAHMAATAILNLSTRCREMPQNLSTKPQDLCATRNPDMEVDENGTLDLSMNKQRPRDSCCPILTPLEPMSPQQQAVMNNRCFQLGEGDCWDLPVDYTKMKPRRIDEDESKDITPEDLDPFQEALEERRYPGEVTIPSPKPKYPQCKESKKDLITLSGCPLADKSIRSMLATSSQELKCPTPGCDGSGHITGNYASHRSLSGCPRAKKSGIRIAQSKEDKEDQEPIRCPVPGCDGQGHITGKYASHRSASGCPLAAKRQKDGYLNGSQFSWKSVKTEGMSCPTPGCDGSGHVSGSFLTHRSLSGCPRATSAMKKAKLSGEQMLTIKQRASNGIENDEEIKQLDEEIKELNESNSQMEADMIKLRTQITTMESNLKTIEEENKVIEQQNESLLHELANLSQSLIHSLANIQLPHMVSD

SEQ ID NO: 96671 - protein, 161 aa, Homo sapiens
MPPLKSPAAFHEQRRSLERARTEDYLKRKIRSRPERSELVRMHILEETSAEPSLQAKQLKLKRARLADDLNEKIAQRPGPMELVEKNILPVESSLKEAIIGEEDPATLCERQLRCRRGGSARLKQNWAEALDFLIFDFLLSLGRTKAQSLRASCTGCMNLG

SEQ ID NO: 96672 - protein, 413 aa, Homo sapiens
MSVQSSSGSLEGPPSWSQLSTSPTPGSAAAARSLLNHTPPSGRPREGAMDELHSLDPRRQELLEARFTGVASGSTGSTGSCSVGAKASTNNESSNHSFGSLGSLSDKESETPEKKQSESSRGRKRKAENQNESSQGKSIGGRGHKISDYFEYQGGNGSSPVRGIPPAIRSPQNSHSHSTPSSSVRPNSPSPTALAFGDHPIVQPKQLSFKIIQTDLTMLKLAALESNKIQDLEKKEGRIDDLLRANCDLRRQIDEQQKLLEKYKERLNKCISMSKKLLIEKSTQEKLSSREKSMQDRLRLGHFTTVRHGASFTEQWTDGFAFQNLVKQQEWVNQQREDIERQRKLLAKRKPPTANNSQAPSTNSEPKQRKNKAVNGAENDPFVRPNLPQLLTLAEYHEQEEIFKLRLGHLKKR

SEQ ID NO: 96673 - protein, 418 aa, Homo sapiens
MPSSVSWGILLLAGLCCLVPVSLAEDPQGDAAQKTDTSHHDQDHPTFNKITPNLAEFAFSLYRQLAHQSNSTNIFFSPVSIATAFAMLSLGTKADTHDEILEGLNFNLTEIPEAQIHEGFQELLRTLNQPDSQLQLTTGNGLFLSEGLKLVDKFLEDVKKLYHSEAFTVNFGDTEEAKKQINDYVEKGTQGKIVDLVKELDRDTVFALVNYIFFKGKWERPFEVKDTEEEDFHVDQATTVKVPMMKRLGMFNIQHCKKLSSWVLLMKYLGNATAIFFLPDEGKLQHLENELTHDIITKFLENEDRRSASLHLPKLSITGTYDLKSVLGQLGITKVFSNGADLSGVTEEAPLKLSKAVHKAVLTIDEKGTEAAGAMFLEAIPMSIPPEVKFNKPFVFLMIEQNTKSPLFMGKVVNPTQK

SEQ ID NO: 96674 - protein, 190 aa, Homo sapiens
MPKDRVTGQHQGYGFVEFLSEEDADYAIKIMNMIKLYGKPIRVNKASAHNKNLDVGANIFIGNLDPEIDEKLLYDTFSAFGVILQTPKIMRDPDTGNSKGYAFINFASFDASDAAIEAMNGQYLCNRPITVSYAFKKDSKGERHGSAAERLLAAQNPLSQADRPHQLFADAPPPPSAPNPVVSSLGSGLP

SEQ ID NO: 96675 - protein, 215 aa, Homo sapiens
MAASVLNTVLRRLPMLSLFRGSHRVQVPLQTLCTKAPSEEDSLSSVPISPYKDEPWKYLESEEYQERYGSRPVWADYRRNHKGGVPPQRTRKTCINVKLLEQFVCAHTGIIFYAPYTGLLIYHIPQVEPRDLDFSTSHGAVSATPPAPTLVSGDPWYPWYNWKQPPERELSRLRRLYQGHLQEESGPPPESMPKMPPRTPAEASSTGQTGPQSAL

SEQ ID NO: 96676 - protein, 57 aa, Homo sapiens
KHSIEVPIPRDGEYVVEVRAHSDGGDGVVSQVKISEGKSTSLRSKTAKDHRSIRTMS

SEQ ID NO: 96677 - protein, 59 aa, Homo sapiens
MALVLEIFTLLASICWVSANIFEYQVDAQPLRPCELQRETAFLKQADYVPQCAEDGSFQ

SEQ ID NO: 96678 - protein, 162 aa, Homo sapiens
MEDTQAIDWDVEEEEETEQSSESLRCNVEPVGRLHIFSGAHGPEKDFPLHLGKNVVGRMPDCSVALPFPSISKQHAEIEILAWDKAPILRDCGSLNGTQILRPPKVLSPGVSHRLRDQELILFADLLCQYHRLDVSLPFVSRGPLTVEETPRVQGETQPQRL

SEQ ID NO: 96679 - protein, 642 aa, Homo sapiens
GMAKAAAIGIDLGTTYSCVGVFQHGKVEIIANDQGNRTTPSYVAFTDTERLIGDAAKNQVALNPQNTVFDAKRLIGRKFGDPVVQSDMKHWPFQVINDGDKPKVQVSYKGETKAFYPEEISSMVLTKMKEIAEAYLGYPVTNAVITVPAYFNDSQRQATKDAGVIAGLNVLRIINEPTAAAIAYGLDRTGKGERNVLIFDLGGGTFDVSILTIDDGIFEVKATAGDTHLGGEDFDNRLVNHFVEEFKRKHKKDISQNKRAVRRLRTACERAKRTLSSSTQASLEIDSLFEGIDFYTSITRARFEELCSDLFRSTLEPVEKALRDAKLDKAQIHDLVLVGGSTRIPKVQKLLQDFFNGRDLNKSINPDEAVAYGAAVQAAILMGDKSENVQDLLLLDVAPLSLGLETAGGVMTALIKRNSTIPTKQTQIFTTYSDNQPGVLIQVYEGERAMTKDNNLLGRFELSGIPPAPRGVPQIEVTFDIDANGILNVTATDKSTGKANKITITNDKGRLSKEEIERMVQEAEKYKAEDEVQRERVSAKNALESYAFNMKSAVEDEGLKGKISEADKKKVLDKCQEVISWLDANTLAEKDEFEHKRKELEQVCNPIISGLYQGAGGPGPGGFGAQGPKGGSGSGPTIEEVD

SEQ ID NO: 96680 - protein, 350 aa, Homo sapiens
MIFDTRKTARQPNCYLFFCPNEEACPLKPAKGLMSYRIITDFPSLTRNLPSQELPQEDSLLHGQFSQAVTPLAHHHTDYSKPTDISWRDTLSQKFGSSDHLEKLFKMDEASAQLLAYKEKGHSQSSQFSSDQEIAHLLPENVSALPATVAVASPHTTSATPKPATLLPTNASVTPSGTSQPQLATTAPPVTTVTSQPPTTLISTVFTRAAATLQAMATTAVLTTTFQAPTDSKGSLETIPFTEISNLTLNTGNVYNPTALSMSNVESSTMNKTASWEGREASPGSSSQGSVPENQYGLPFEKWLLIGSLLFGVLFLVIGLVLLGRILSESLRRKRYSRLDYLINGIYVDI

SEQ ID NO: 96681 - protein, 248 aa, Homo sapiens
MAGSSSLEAVRRKIRSLQEQADAAEERAGTLQRELDHERKLRETAEADVASLNRRIQLVEEELDRAQERLATALQKLEEAEKAADESERGMKVIESRAQKDEEKMEIQEIQLKEAKHIAEDADRKYEEVARKLVIIESDLERAEERAELSEGQVRQLEEQLRIMDQTLKALMAAEDKYSQKEDRYEEEIKVLSDKLKEAETRAEFAERSVTKLEKSIDDLEEKVAHAKEENLSMHQMLDQTLLELNNM

SEQ ID NO: 96682 - protein, 39 aa, Homo sapiens
MATVTATTKVPEIRDVTRIERIEMEFPRVSQDGLDLLTS

SEQ ID NO: 96683 - protein, 130 aa, Homo sapiens
  MOD_RES (1)..(1): Any amino acid
XTYNLLSERWFTHASPTLFNAGTNRPQLSSCFLLSMKDDSIEGIYDTLKQCALISKSAGGIGVAVSCIRATGSYIAGTNGNSNGLVPMLRVYNNTARYVDQGGNKRIMIYLPLASWGICYLPGALAFRHL

SEQ ID NO: 96684 - protein, 552 aa, Homo sapiens
MPVAATNSETAMQQVLDNLGSLPSATGAAELDLIFLRGIMESPIVRSLAKAHERLEETKLEAVRDNNLELVQEILRDLAQLAEQSSTAAELAHILQEPHFQSLLETHDSVASKTYETPPPSPGLDPTFSNQPVPPDAVRMVGIRKTAGEHLGVTFRVEGGELVIARILHGGMVAQQGLLHVGDIIKEVNGQPVGSDPRALQELLRNASGSVILKILPSYQEPHLPRQVFVKCHFDYDPARDSLIPCKEAGLRFNAGDLLQIVNQDDANWWQACHVEGGSAGLIPSQLLEEKRKAFVKRDLELTPNSGTLCGSLSGKKKKRMMYLTTKNAEFDRHELLIYEEVARMPPFRRKTLVLIGAQGVGRRSLKNKLIMWDPDRYGTTVPYTSRRPKDSEREGQGYSFVSRGEMEADVRAGRYLEHGEYEGNLYGTRIDSIRGVVAAGKVCVLDVNPQAVKVLRTAEFVPYVVFIEAPDFETLRAMNRAALESGISTKQLTEADLRRTVEESSRIQRGYGHYFDLCLVNSNLERTFRELQTAMEKLRTEPQWVPVSWVY

SEQ ID NO: 96685 - protein, 12 aa, Homo sapiens
MESTDTKRQKPS

SEQ ID NO: 96686 - protein, 39 aa, Homo sapiens
MNDLPDTQVFICTSPLLKYHHCVGEKVWLPRPYSARGAA

SEQ ID NO: 96687 - protein, 267 aa, Homo sapiens
MPKGGCPKAPQQEELPLSSDMVEKQTGKKDKDKVSLTKTPKLERGDGGKEVRERASKRKLPFTAGANGEQKDSDTEKQGPERKRIKKEPVTRKAGLLFGMGLSGIRAGYPLSERQQVALLMQMTAEESANSPVDTTPKHPSQSTVCQKGTPNSASKTKDKVNKRNERGETRLHRAAIRGDARRIKELISEGADVNVKDFAGWTALHEACNRGYYDVAKQLLAAGAEVNTKGLDDDTPLHDAANNGHYKVGIPPFFTHPACPGIWVVL

SEQ ID NO: 96688 - protein, 35 aa, Homo sapiens
MKPVSRRTLDWIYSVVPGPEEEPALPVTVGVDGVS

SEQ ID NO: 96689 - protein, 35 aa, Homo sapiens
MALKRINKELSDLARDPPAQCSAGPVGDDKFFFFF

SEQ ID NO: 96690 - protein, 114 aa, Homo sapiens
MTIRLLCYMGFYFLGAGLMEADIYQTPRYLVIGTGKKITLECSQTMGHDKMYWYQQDPGMELHLIHYSYGVNSTEKGDLSSESTVSRIRTEHFPLTLESARPSHTSQYLCASSE

SEQ ID NO: 96691 - protein, 84 aa, Homo sapiens
MSRSGTDPQQRQQASEADAAAATFRANDHQHIRYNPLQDEWVLVSAHRMKRPWQGQVEPQLLKTVPRHDPLNPLCPGAIRANGE

SEQ ID NO: 96692 - protein, 41 aa, Homo sapiens
PPATMRIWLLGGLLPFLLLLSGLQRPTEGSELPARNASLIL

SEQ ID NO: 96693 - protein, 88 aa, Homo sapiens
MAAAATMAAAARELVLRAGTSDMEEEEGPLVRARSCFSSVVPVLLASERPELGLGTRVGTWLLPVILPVWLPVPFPVIRPDPERDPSG

SEQ ID NO: 96694 - protein, 155 aa, Homo sapiens
MASEGTNIPSPVVRQIDKQFLICSICLERYKNPKVLPCLHTFCERCLQNYIPAHSLTLSCPVCRQTSILPEKGVAALQNNFFITNLMDVLQRTPGSNAEESSILETVTAVAAGKPLSCPNHDGNIVEVHCCCFETEVFIAYSSQIHAMFQINCCS

SEQ ID NO: 96695 - protein, 103 aa, Homo sapiens
MARHGPPWSRLDAQQERDVRELVRGVAGLQDEADPNFQLALNFAWSNFRFHRFLDVNSHKIEKTIEGIYEKFVIHSDLSKAASWKRLTEEFLNAPLPSIKEIK

SEQ ID NO: 96696 - protein, 747 aa, Homo sapiens
LLQRRIRTGEEITDRTLRTPTRIILDESIIPKKYATVILHCMYTDVVDLSVLHCSPSVGSLSEVQALVAGKPNMTRAEEAMELYHIALFLEFNMLAQEPNLLSGTAHSVNKRGVKRRDLDMEELREILSSLLPFVRIEHILPINSEVLSDAMKRGLISTPPSDMLPTTEGGKSNAWLRQKNAGIYVRPRLFSPYVEEAKSVLDEMMVEQTDLVRLRMVRMSNVPDTLYMVNNAVPQCCHMISHQQISSNQSSPPSVVANEIPVPRLLIMKDMVRRLQELRHTEQVQRAYALNCGEGATVSYEIQIRVLREFGLADAAAELLQNPHKFFPDERFGDESPLLTMRQPGRCRVNSTPPAETMFTDLDSFVAFHPPLPPPPPPYHPPATPIHNQLKAGWKQRPPSQHPSRSFSYPCNHSLFHSRTAPKAGPPPVYLPSVKAAPPDCTSTAGLGRQTVAAAAATTTSTATAAAAAASEKQVRTQPVLNDLMPDIAVGVSTLSLKDRRLPELAVDTELSQSVSEAGPGPPQHLSCIPQRHTHTSRKKHTLEQKTDTRENPQEYPDFYDFSNAACRPSTPALSRRTPSPSQGGYFGPDLYSHNKASPSGLKSAYLPGQTSPKKQEEARREYPLSPDGHLHRQKNEPIHLDVVEQPPQRSDFPLAAPENASTGPAHVRGRTAVETDLTFGLTPNRPSLSACSSEAPEERSGRRLADSESLGHGAQRNTDLEREDSISRGRRSPSKPDFLYKKSAL

SEQ ID NO: 96697 - protein, 101 aa, Homo sapiens
MDYYRKYAAIFLVTLSVFLHVLHSAPDVQDCPECTLQENPFFSQPGAPILQCMGCCFSRAYPTPLRSKKTMLVQKNVTSESTCCVAKSYNRVRTSRSPEAF

SEQ ID NO: 96698 - protein, 146 aa, Homo sapiens
MSAESGPGTRLRNLPVMGDGLETSQMSTTQAQAQPQPANAASTNPPPPETSNPNKPKRQTNQLQYLLRVVLKTLWKHQFAWPFQQPVDAVKLNLPDYYKIIKTPMDMGTIKKRLENNYYWNAQECIQDFNTMFTNCYIYNKFRPQM

SEQ ID NO: 96699 - protein, 160 aa, Homo sapiens
MDSERQVKVKDTDDIESPKRSIRDSGYIDCWDSERSDSLSPPRHGRDDSFDSLDSFGSRSRQTPSPDVVLRGSSDGRGSDSESDLPHRKLPDVKKDDMSARRTSHGEPKSAVPFNQYLPNKSNQTAYVPAPLRKKKAEREEYRKSWSTATSPLGGERPFR

SEQ ID NO: 96700 - protein, 736 aa, Homo sapiens
MQLRAARSRCTNLLAASYIENQQHLQHLELRDLRGLGELRNLTIVKSGLRFVAPDAFHFTPRLSRLNLSFNALESLSWKTVQGLSLQELVLSGNPLHCSCALRWLQRWEEEGLGGVPEQKLQCHGQGPLAHMPNASCGVPTLKVQVPNASVDVGDDVLLRCQVEGRGLEQAGWILTELEQSATVMKSGGLPSLGLTLANVTSDLNRKNVTCWAENDVGRAEVSVQVNVSFPASVQLHTAVEMHHWCIPFSVDGQPAPSLRWLFNGSVLNETSFIFTEFLEPAANETVRHGCLRLNQPTHVNNGNYTLLAANPFGQASASIMAAFMDNPFEFNPEDPIPDTNSTSGDPVEKKDETPFGVSVAVGLAVFACLFLSTLLLVLNKCGRRNKFGINRPAVLAPEDGLAMSLHFMTLGGSSLSPTEGKGSGLQGHIIENPQYFSDACVHHIKRRDIVLKWELGEGAFGKVFLAECHNLLPEQDKMLVAVKALKEASESARQDFQREAELLTMLQHQHIVRFFGVCTEGRPLLMVFEYMRHGDLNRFLRSHGPDAKLLAGGEDVAPGPLGLGQLLAVASQVAAGMVYLAGLHFVHRDLATRNCLVGQGLVVKIGDFGMSRDIYSTDYYRVGGRTMLPIRWMPPESILYRKFTTESDVWSFGVVLWEIFTYGKQPWYQLSNTEAIDCITQGRELERPRACPPEVYAIMRGCWQREPQQRHSIKDVHARLQALAQAPPVYLDVLG

SEQ ID NO: 96701 - protein, 334 aa, Homo sapiens
  MOD_RES (1)..(1): Any amino acid
XGEAQKVERLIEAFSQRYCVCNPALVRQFRNPDTIFILAFAIILLNTDMYSPSVKAERKMKLDDFIKNLRGVDNGEDIPRDLLVGIYQRIQGRELRTNDDHVSQVQAVERMIVGKKPVLSLPHRRLVCCCQLYEVPDPNRPQRLGLHQREVFLFNDLLVVTKIFQKKKILVTYSFRQSFPLVEMHMQLFQNSYYQFGIKLLSAVPGGERKVLIIFNAPSLQDRLRFTSDLRESIAEVQEMEKYRVESELEKQKGMMRPNASQPGGAKDSVNGTMARSSLEDTYGAGDGLKRGALSSSLRDLSDAGKRGRRNSVGSLDSTIEDGCVWAKGPQRRL

SEQ ID NO: 96702 - protein, 51 aa, Homo sapiens
MHPDLSPHLHTEECNVLINLLKECHKNGTRTVIFSADTSDYNGIILKVSAL

SEQ ID NO: 96703 - protein, 70 aa, Homo sapiens
MWQLWASLCCLLVLANARSRPSFHPLSDELVNYVNKRNTTWQAGHNFYNVDMSYLKRLCGTFLGGPKPPQ

SEQ ID NO: 96704 - protein, 541 aa, Homo sapiens
MDMGNPGTLSPTKPGSQYYQYSSNNPRRRPLHSSAMEVQTKKVRKVPPGLPSSVYAPSASTADYNRDSPGYPSSKPATSTFPSSFFMQDGHHSSDPWSSSSGMNQPGYAGMLGNSSHIPQSSSYCSLHPHERLSYPSHSSADINSSLPPMSTFHRSGTNHYSTSSCTPPANGTDSIMANRGSGAAGSSQTGDALGKALASIYSPDHTNNSFSSNPSTPVGSPPSLSAGTAVWSRNGGQASSSPNYEGPLHSLQSRIEDRLERLDDAIHVLRNHAVGPSTAMPGGHGDMHGIIGPSHNGAMGGLGSGYGTGLLSANRHSLMVGTHREDGVALRGSHSLLPNQVPVPQLPVQSATSPDLNPPQDPYRGMPPGLQGQSVSSGSSEIKSDDEGDENLQDTKSSEDKKLDDDKKDIKSITRSRSSNNDDEDLTPEQKAEREKERRMANNARERLRVRDINEAFKELGRMVQLHLKSDKPQTKLLILHQAVAVILSLEQQVRERNLNPKAACLKRREEEKVSSEPPPLSLAGPHPGMGDASNHMGQM

SEQ ID NO: 96705 - protein, 199 aa, Homo sapiens
MNYSKIPAQVDLRRQTERDCRVSSFRVKENFDKARFSGTWYAMAKKDPEGLFLQDNIVAEFSVDETGQMSATAKGRVRLLNNWDVCADMVGTFTDTEDPAKFKMKYWGVASFLQKGNDDHWIVDTDYDTYAVQYSCRLLNLDGTCADSYSFVFSRDPNGLPPEAQKIVRQRQEELCLARQYRLIVHNGYCDGRSERNLL

SEQ ID NO: 96706 - protein, 147 aa, Homo sapiens
MGRLETADKQSVHIVENEIQASIDQIFSRLERLEILSSKEPPNKRQNARLRVDQLKYDVQHLQTALRNFQHRRHAREQQERQREELLSRTFTTNGTQKKILDIANMLGLSNTVMRLIEKRAFQDKYFMIGGMLLTCVVMFLVVQYLT

SEQ ID NO: 96707 - protein, 3924 aa, Homo sapiens
MMNEDAAQKSDSGEKFNGSSQRRKRPKKSDSNASFLRAARAGNLDKVVEYLKGGIDINTCNQNGLNALHLAAKEGHVGLVQELLGRGSSVDSATKKGNTALHIASLAGQAEVVKVLVKEGANINAQSQNGFTPLYMAAQENHIDVVKYLLENGANQSTATEDGFTPLAVALQQGHNQAVAILLENDTKGKVRLPALHIAARKDDTKSAALLLQNDHNADVQSKMMVNRTTESGFTPLHIAAHYGNVNVATLLLNRGAAVDFTARNGITPLHVASKRGNTNMVKLLLDRGGQIDAKTRDGLTPLHCAARSGHDQVVELLLERGAPLLARTKNGLSPLHMAAQGDHVECVKHLLQHKAPVDDVTLDYLTALHVAAHCGHYRVTKLLLDKRANPNARALNGFTPLHIACKKNRIKVMELLVKYGASIQAITESGLTPIHVAAFMGHLNIVLLLLQNGASPDVTNIRGETALHMAARAGQVEVVRCLLRNGALVDARAREEQTPLHIASRLGKTEIVQLLLQHMAHPDAATTNGYTPLHISAREGQVDVASVLLEAGAAHSLATKKGFTPLHVAAKYGSLDVAKLLLQRRAAADSAGKNGLTPLHVAAHYDNQKVALLLLEKGASPHATAKNGYTPLHIAAKKNQMQIASTLLNYGAETNIVTKQGVTPLHLASQEGHTDMVTLLLDKGANIHMSTKSGLTSLHLAAQEDKVNVADILTKHGADQDAHTKLGYTPLIVACHYGNVKMVNFLLKQGANVNAKTKNGYTPLHQAAQQGHTHIINVLLQHGAKPNATTANGNTALAIAKRLGYISVVDTLKVVTEEVTTTTTTITEKHKLNVPETMTEVLDVSDEEGDDTMTGDGGEYLRPEDLKELGDDSLPSSQFLDGMNYLRYSLEGGRSDSLRSFSSDRSHTLSHASYLRDSAVMDDSVVIPSHQVSTLAKEAERNSYRLSWGTENLDNVALSSSPIHSGFLVSFMVDARGGAMRGCRHNGLRIIIPPRKCTAPTRVTCRLVKRHRLATMPPMVEGEGLASRLIEVGPSGAQFLGPVIVEIPHFAALRGKERELVVLRSENGDSWKEHFCDYTEDELNEILNGMDEVLDSPEDLEKKRICRIITRDFPQYFAVVSRIKQDSNLIGPEGGVLSSTVVPQVQAVFPEGALTKRIRVGLQAQPMHSELVKKILGNKATFSPIVTLEPRRRKFHKPITMTIPVPKASSDVMLNGFGGDAPTLRLLCSITGGTTPAQWEDITGTTPLTFVNECVSFTTNVSARFWLIDCRQIQESVTFASQVYREIICVPYMAKFVVFAKSHDPIEARLRCFCMTDDKVDKTLEQQENFAEVARSRDVEVLEGKPIYVDCFGNLVPLTKSGQHHIFSFFAFKENRLPLFVKVRDTTQEPCGRLSFMKEPKSTRGLVHQAICNLNITLPIYTKESESDQEQEEEIDMTSEKNDETESTETSVLKSHLVNEVPVLASPDLLSEVSEMKQDLIKMTAILTTDVSDKAGSIKVKELVKAAEEEPGEPFEIVERVKEDLEKVNEILRSGTCTRDESSVQSSRSERGLVEEEWVIVSDEEIEEARQKAPLEITEYPCVEVRIDKEIKGKVEKDSTGLVNYLTDDLNTCVPLPKEQLQTVQDKAGKKCEALAVGRSSEKEGKDIPPDETQSTQKQHKPSLGIKKPVRRKLKEKQKQKEEGLQASAEKAELKKGSSEESLGEDPGLAPEPLPTVKATSPLIEETPIGSIKDKVKALQKRVEDEQKGRSKLPIRVKGKEDVPKKTTHRPHPAASPSLKSERHAPGSPSPKTERHSTLSSSAKTERHPPVSPSSKTEKHSPVSPSAKTERHSPASSSSKTEKHSPVSPSTKTERHSPVSSTKTERHPPVSPSGKTDKRPPVSPSGRTEKHPPVSPGRTEKRLPVSPSGRTDKHQPVSTAGKTEKHLPVSPSGKTEKQPPVSPTSKTERIEETMSVRELMKAFQSGQDPSKHKTGLFEHKSAKQKQPQEKGKVRVEKEKGPILTQREAQKTENQTIKRGQRLPVTGTAESKRGVRVSSIGVKKEDAAGGKEKVLSHKIPEPVQSVPEEESHRESEVPKEKMADEQGDMDLQISPDRKTSTDFSEVIKQELEDNDKYQQFRLSEETEKAQLHLDQVLTSPFNTTFPLDYMKDEFLPALSLQSGALDGSSESLKNEGVAGSPCGSLMEGTPQISSEESYKHEGLAETPETSPESLSFSPKKSEEQTGETKESTKTETTTEIRSEKEHPTTKDITGGSEERGATVTEDSETSTESFQKEATLGSPKDTSPKRQDDCTGSCSVALAKETPTGLTEEAACDEGQRTFGSSAHKTQTDSEVQESTATSDETKALPLPEASVKTDTGTESKPQGVIRSPQGLELALPSRDSEVLSAVADDSLAVSHKDSLEASPVLEDNSSHKTPDSLEPSPLKESPCRDSLESSPVEPKMKAGIFPSHFPLPAAVAKTELLTEVASVRSRLLRDPDGSAEDDSLEQTSLMESSGKSPLSPDTPSSEEVSYEVTPKTTDVSTPKPAVIHECAEEDDSENGEKKRFTPEEEMFKMVTKIKMFDELEQEAKQKRDYKKEPKQEESSSSSDPDADCSVDVDEPKHTGSGEDESGVPVLVTSESRKVSSSSESEPELAQLKKGADSGLLPEPVIRVQPPSPLPSSMDSNSSPEEVQFQPVVSKQYTFKMNEDTQEEPGKSEEEKDSESHLAEDRHAVSTEAEDRSYDKLNRDTDQPKICDGHGCEAMSPSSSAAPVSSGLQSPTGDDVDEQPVIYKESLALQGTHEKDTEGEELDVSRAESPQADCPSESFSSSSSLPHCLVSEGKELDEDISATSSIQKTEVTKTDETFENLPKDCPSQDSSITTQTDRFSMDVPVSDLAENDEIYDPQITSPYENVPSQSFFSSEESKTQTDANHTTSFHSSEVYSVTITSPVEDVVVASSSSGTVLSKESNFEGQDIKMESQQESTLWEMQSDSVSSSFEPTMSATTTVVGEQISKVIITKTDVDSDSWSEIREDDEAFEARVKEEEQKIFGLMVDRQSQGTTPDTTPARTPTEEGTPTSEQNPFLFQEGKLFEMTRSGAIDMTKRSYADESFHFFQIGQESREETLSEDVKEGATGADPLPLETSAESLALSESKETVDDEADLLPDDVSEEVEEIPASDAQLNSQMGISASTETPTKEAVSVGTKDLPTVQTGDIPPLSGVKQISCPDSSEPAVQVQLDFSTLTRSVYSDRGDDSPDSSPEEQKSVIEIPTAPMENVPFTESKSKIPVRTMPTSTPAPPSAEYESSVSEDFLSSVDEENKADEAKPKSKLPVKVPLQRVEQQLSDLDTSVQKTVAPQGQDMASIAPDNRSKSESDASSLDSKTKCPVKTRSYTETETESRERAEELELESEEGATRPKILTSRLPVKSRSTTSSCRGGTSPTKESKEHFFDLYRNSIEFFEEISDEASKLVDRLTQSEREQEIVSDDESSSALEVSVIENLPPVETEHSVPEDIFDTRPIWDESIETLIERIPDENGHDHAEDPQDEQERIEERLAYIADHLGFSWTELARELDFTEEQIHQIRIENPNSLQDQSHALLKYWLERDGKHATDTNLVECLTKINRMDIVHLMETNTEPLQERISHSYAEIEQTITLDHSEGFSVLQEELCTAQHKQKEEQAVSKESETCDHPPIVSEEDISVGYSTFQDGVPKTEGDSSATALFPQTHKEQVQQDFSGKMQDLPEESSLEYQQEYFVTTPGTETSETQKAMIVPSSPSKTPEEVSTPAEEEKLYLQTPTSSERGGSPIIQEPEEPSEHREESSPRKTSLVIVESADNQPETCERLDEDAAFEKGDDMPEIPPETVTEEEYIDEHGHTVVKKVTRKIIRRYVSSEGTEKEEIMVQGMPQEPVNIEEGDGYSKVIKRVVLKSDTEQSEDNNE

SEQ ID NO: 96708 - protein, 346 aa, Homo sapiens
MVLLHVKRGDESQFLLQAPGSTELEELTVQVARVYNGRLKVQRLCSEMEELAEHGIFLPPNMQGLTDDQIEELKLKDEWGEKCVPSGGAVFKKDDIGRRNGQAPNEKMKQVLKKTIEEAKAIISKKQVEAGVCVTMEMVKDALDQLRGAVMIVYPMGLPPYDPIRMEFENKEDLSGTQAGLNVIKEAEAQLWWAAKELRRTKKLSDYVGKNEKTKIIAKIQQPLQQQIIRLHQELGRQKSLWADVHGKLRSHIDALREQNMELREKLRALQLQRWKARKKSAASPHAGQESHTLALEPAFGKISPLSADEETIPKYAGHKNQSATLLGQRSSSNNSAPPKTEAPQS

SEQ ID NO: 96709 - protein, 202 aa, Homo sapiens
MATRRLTDAFLLLRNNSIQNRQLLAEQELDELADDRMALVSGISLDPEAAIGVTKRPPPKWVDGVDEIQYDVGRIKQKMKELASLHDKHLNRPTLDDSSEEEHAIEITTQEITQLFHRCQRAVQALPSRARACSEQEGRLLGNVVASLAQALQELSTSFRHAQSGYLKRMKNREERSQHFFDTSVPLMDDGDDNTLYHRRTS

SEQ ID NO: 96710 - protein, 194 aa, Homo sapiens
MENSSAASASSEAGSSRSQEIEELERFIDSYVLEYQVQGLLADKTEGDGESERTQSHISQWTADCSEPLDSSCSFSRGRAPPQQNGSKDNSLDMLGTDIWAANTFDSFSGATWDLQPEKLDFTQFHRKVRHTPKQPLPHIDREGCGKGKLEDGDGINLNDIEKVLPAWQGYHPMPHEVEIAHTKKLFRRRRNDR

SEQ ID NO: 96711 - protein, 801 aa, Homo sapiens
MFAPPTALPPPPPLTSGSLQVAGHPAGSTYSEQDILRQELNTRFLASQSADRGASLGPPPYLRTEFHQHQHQHQHTHQHTHQHTFTPFPHAIPPTAIMPTPAPPMFDKYPTKVDPFYRHSLFHSYPPAVSGIPPMIPPTGPFGSLQGAFQPKTSNPIDVAARPGTVPHTLLQKDPRLTDPFRPMLRKPGKWCAMHVHIAWQIYHHQQKVKKQMQSDPHKLDFGLKPEFLSRPPGPSLFGAIHHPHDLARPSTLFSAAGAAHPTGTPFGPPPHHSNFLNPAAHLEPFNRPSTFTGLAAVGGNAFGGLGNPSVTPNSMFGHKDGPSVQNFSNPHEPWNRLHRTPPSFPTPPPWLKPGELERSASAAAHDRDRDVDKRDSSVSKDDKERESVEKRHSSHPSPAPVLPVNALGHTRSSTEQIRAHLNTEAREKDKPKERERDHSESRKDLAADEHKAKEGHLPEKDGHGHEGRAAGEEAKQLARVPSPYVRTPVVESARPNSTSSREAEPRKGEPAYENPKKSSEVKVKEERKEDHDLPPEAPQTHRASEPPPPNSSSSVHPGPLASMPMTVGVTGIHPMNSISSLDRTRMMTPFMGISPLPGGERFPYPSFHWDPIRDPLRDPYRELDIHRRDPLGRDFLLRNDPLHRLSTPRLYEADRSFRDREPHDYSHHHHHHHHPLSVDPRREHERGGHLDERERLHMLREDYEHTRLHSVHPASLDGHLPHPSLITPGLPSMHYPRISPTAGNQNGLLNKTPPTAALSAPPPLISTLGGRPVSPRRTTPLSAEIRERPPSHTLKDIEAR

SEQ ID NO: 96712 - protein, 810 aa, Homo sapiens
MLERKYGGRLVTRHAARTIQTAFRQYQMNKNFERLRSSMSENRMSRRIVLSNMRMQFSFEGPEKVHSSYFEGKQVSVTNDGSQLGALVSPECGDLSEPTTLKSPAPSSDFADAITELEDAFSRQVKSLAESIDDALNCRSLHTEEAPALDAARARDTEPQTALHGMDHRKLDEMTASYSDVTLYIDEEELSPPLPLSQAGDRPSSTESDLRLRAGGAAPDYWALAHKEDKADTDTSCRSTPSLERQEQRLRVEHLPLLTIEPPSDSSVDLSDRSERGSLKRQSAYERSLGGQQGSPKHGPHSGAPKSLPREEPELRPRPPRPLDSHLAINGSANRQSKSESDYSDGDNDSINSTSNSNDTINCSSESSSRDSLREQTLSKQTYHKEARNSWDSPAFSNDVIRKRHYRIGLNLFNKKPEKGVQYLIERGFVPDTPVGVAHFLLQRKGLSRQMIGEFLGNRQKQFNRDVLDCVVDEMDFSTMELDEALRKFQAHIRVQGEAQKVERLIEAFSQRYCICNPGVVRQFRNPDTIFILAFAIILLNTDMYSPNVKPERKMKLEDFIKNLRGVDDGEDIPREMLMGIYERIRKRELKTNEDHVSQVQKVEKLIVGKKPIGSLHPGLGCVLSLPHRRLVCYCRLFEVPDPNKPQKLGLHQREIFLFNDLLVVTKIFQKKKNSVTYSFRQSFSLYGMQVLLFENQYYPNGIRLTSSVPGADIKVLINFNAPNPQDRKKFTDDLRESIAEVQEMEKHRIESELEKQKGVVRPSMSQCSSLKKESGNGTLSRACLDDSYASGEGLKRSALSSSLRDLSEA

SEQ ID NO: 96713 - protein, 650 aa, Homo sapiens
MGVPGGDTVSQPQAAPSPLEKSPSTAILCNTCGNVCKGEVLRVQDKYFHIKCFVCKACGCDLAEGGFFVRQGEYICTLDYQRLYGTRCFSCDQFIEGEVVSALGKTYHPDCFVCAVCRLPFPPGDRVTFNGKECMCQKCSLPVSVGSSAHLSQGLRSCGGCGTEIKNGQALVALDKHWHLGCFKCKSCGKLLNAEYISKDGLPYCEADYHAKFGIRCDSCEKYITGRVLEAGEKHYHPSCALCVRCGQMFAEGEEMYLQGSSIWHPACRQAARTEDRNKETRTSSESIISVPASSTSGSPSRVIYAKLGGEILDYRDLAALPKSKAIYDIDRPDMISYSPYISHSAGDRQSYGEGDQDDRSYKQCRTSSPSSTGSVSLGRYTPTSRSPQHYSRPAGTVSVGTSSCLSLSQHPSPTSVFRHHYIPYFRGSESGRSTPSLSVLSDSKPPPSTYQQAPRHFHVPDTGVKDNIYRKPPIYRQHAARRSDGEDGSLDQDNRKQKSSWLMLKGDADTRTNSPDLDTQSLSHSSGTDRDPLQRMAGDSFHSRFPYSKSDPLPGHGKNGLDQRNANLAPCGADPDASWGMREYKIYPYDSLIVTNRIRVKLPKDVDRTRLERHLSPEEFQEVFGMSIEEFDRLALWKRNDLKKKALLF

SEQ ID NO: 96714 - protein, 408 aa, Homo sapiens
MATLNSASTTGTTPSPGHNAPSLPSDTFSSSTPSDPVTKDPPAASSTSENMRSSEPGGQLLESGCGLVPPKEIGEPQEGPDCGHFPPNDPGVEKDKEQEEEEEGLPPMDLSNHLFFTAGGEAYLVAKLSLPGGSELLLPKGFPWGEAGIKEEPSLPFLAYPPPSHLTALHIQHGFDPIQGFSSSDQILSHDTSAPSPAACEERHGAFWSYQLAPNPPGDPKDGPMGNSGGNHVAVFWLCLLCRLGFSKPQAFMDHTQSHGVKLTPAQYQGLSGSPAVLQEGDEGCKALISFLEPKLPARPSSDIPLDNSSTVNMEANVAQTEDGPPEAEVQALILLDEEVMALSPPSPPTATWGYTTACCVRGRHPPAWLCCNTCAHLPTAMPRPRGVCSCYRMAQPLRKDSQLFRAS

SEQ ID NO: 96715 - protein, 94 aa, Homo sapiens
MASVVLALRTRTAVTSLLSPTPATALAVRYASKKSGGSSKNLGGKSSGRRQGIKKMEGHYVHAGNIIATQRHFRWHPGAHVSCSVAAPLFPFLG

SEQ ID NO: 96716 - protein, 681 aa, Homo sapiens
MSKTFLRPKVSSTKVTDWVDPSFDDFLECSGVSTITATSLGVNNSSHRRKNGPSTLESSRFPARKRGNLSSLEQIYGLENSKEYLSENEPWVDKYKPETQHELAVHKKKIEEVETWLKAQVLERQPKQGGSILLITGPPGCGKTTTLKILSKEHGIQVQEWINPVLPDFQKDDFKGMFNTESSFHMFPYQSQIAVFKEFLLRATKYNKLQMLGDDLRTDKKIILVEDLPNQFYRDSHTLHEVLRKYVRIGRCPLIFIISDSLSGDNNQRLLFPKEIQEECSISNISFNPVAPTIMMKFLNRIVTIEANKNGGKITVPDKTSLELLCQGCSGDIRSAINSLQFSSSKGENNLRPRKKGMSLKSDAVLSKSKRRKKPDRVFENQEVQAIGGKDVSLFLFRALGKILYCKRASLTELDSPRLPSHLSEYERDTLLVEPEEVVEMSHMPGDLFNLYLHQNYIDFFMEIDDIVRASEFLSFADILSGDWNTRSLLREYSTSIATRGVMHSNKARGYAHCQGGGSSFRPLHKPQWFLINKKYRENCLAAKALFPDFCLPALCRQTQLLPYLALLTIPMRNQAQISFIQDIGRLPLKRHFGRLKMEALTDREHGMIDPDSGDEAQLNGGHSAEESLGEPTQATVPETWSLPLSQNSASELPASQPQPFSAQGDMEENIIIEDYESDGT

SEQ ID NO: 96717 - protein, 435 aa, Homo sapiens
MRVKLASRNVESYTKLGNPTRSEDLLDYGPFRDVPAYSQDTFKVHYENNSPFLTITSMTRVIEVSHWGNIAVEENVDLKHTGAVLKGPFSRYDYQRQPDSGISSIRSFKTILPAAAQDVYYRDEIGNVSTSHLLILDDSVEMEIRPRFPLFGGWKTHYIVGYNLPSYEYLYNLGDQYALKMRFVDHVFDEQVIDSLTVKIILPEGAKNIEIDSPYEISRAPDELHYTYLDTFGRPVIVAYKKNLVEQHIQDIVVHYTFNKVLMLQEPLLVVAAFYILFFTVIIYVRLDFSITKDPAAEARMKVACITEQVLTLVNKRIGLYRHFDETVNRYKQSRDISTLNSGKKSLETEHKALTSEIALLQSRLKTEGSDLCDRVSEMQKLDAQVKELVLKSAVEAERLVAGKLKKDTYIENEKLISGKRQELVTKIDHILDAL

SEQ ID NO: 96718 - protein, 251 aa, Homo sapiens
MSRLGALGGARAGLGLLLGTAAGLGFLCLLYSQRWKRTQRHGRSQSLPNSLDYTQTSDPGRHVMLLRAVPGGAGDASVLPSLPREGQEKVLDRLDFVLTSLVALRREVEELRSSLRGLAGEIVGEVRPLMRSSSKRHPMVSRKTSWMGPNGTLRDGACFPDATWKRTREWLGGEGFRLSGRGVTPLAPALSTSRPPREPRSQMLRVKGGKEEAEAALEKGDESADCHLWYAVLCGQLAEHESIQRRIQSGF

SEQ ID NO: 96719 - protein, 415 aa, Homo sapiens
MITEGAQAPRLLLPPLLLLLTLPATGSDPVLCFTQYEESSGKCKGLLGGGVSVEDCCLNTAFAYQKRSGGLCQPCRSPRWSLWSTWAPCSVTCSEGSQLRYRRCVGWNGQCSGKVAPGTLEWQLQACEDQQCCPEMGGWSGWGPWEPCSVTCSKGTRTRRRACNHPAPKCGGHCPGQAQESEACDTQQVCPTHGAWATWGPWTPCSASCHGGPHEPKETRSRKCSAPEPSQKPPGKPCPGLAYEQRRCTGLPPCPVAGGWGPWGPVSPCPVTCGLGQTMEQRTCNHPVPQHGGPFCAGDATRTHICNTAVPCPVDGEWDSWGEWSPCIRRNMKSISCQEIPGQQSRGRTCRGRKFDGHRCAGQQQDIRHCYSIQHCPLKGSWSEWSTWGLCMPPCGPNPTRARQRLCTPLLPKYP

SEQ ID NO: 96720 - protein, 61 aa, Homo sapiens
MAETLFWTPLLVVLLAGLGDTEAQQTTLHPLVGRVFVHTLDHETFLSLPEHVGHSLQSGQL

SEQ ID NO: 96721 - protein, 163 aa, Homo sapiens
MQVPRERIKIAFRLWIPILVIRIVVAGTWPQAPGLSTLGLNIIILPDCLGIGMMLTFNAEALSVEANEQLFKKILEMWKDIPSSIAFECTQRTTGWGQKAIEVRSLQSRVLESELKRRSIKKLRFLCTRGDKLFFTSTLRNHHSRVYFMTLGKLEELQSNYDV

SEQ ID NO: 96722 - protein, 63 aa, Homo sapiens
MASQPPPPPKPWETRRIPGAGPGPGPGPTFQMASLSLKRRLWSVAVESGICPATASTGSKVSP

SEQ ID NO: 96723 - protein, 36 aa, Homo sapiens
MDDIFTQCREGNAVAVRLWLDNTENDLNQGIVLDAL

SEQ ID NO: 96724 - protein, 1403 aa, Homo sapiens
MATQQKASDERISQFDHNLLPELSALLGLDAVQLAKELEEEEQKERAKMQKGYNSQMRSEAKRLKTFVTYEPYSSWIPQEMAAAGFYFTGVKSGIQCFCCSLILFGAGLTRLPIEDHKRFHPDCGFLLNKDVGNIAKYDIRVKNLKSRLRGGKMRYQEEEARLASFRNWPFYVQGISPCVLSEAGFVFTGKQDTVQCFSCGGCLGNWEEGDDPWKEHAKWFPKCEFLRSKKSSEEITQYIQSYKGFVDITGEHFVNSWVQRELPMASAYCNDSIFAYEELRLDSFKDWPRESAVGVAALAKAGLFYTGIKDIVQCFSCGGCLEKWQEGDDPLDDHTRCFPNCPFLQNMKSSAEVTPDLQSRGELCELLETTSESNLEDSIAVGPIVPEMAQGEAQWFQEAKNLNEQLRAAYTSASFRHMSLLDISSDLATDHLLGCDLSIASKHISKPVQEPLVLPEVFGNLNSVMCVEGEAGSGKTVLLKKIAFLWASGCCPLLNRFQLVFYLSLSSTRPDEGLASIICDQLLEKEGSVTEMCMRNIIQQLKNQVLFLLDDYKEICSIPQVIGKLIQKNHLSRTCLLIAVRTNRARDIRRYLETILEIKAFPFYNTVCILRKLFSHNMTRLRKFMVYFGKNQSLQKIQKTPLFVAAICAHWFQYPFDPSFDDVAVFKSYMERLSLRNKATAEILKATVSSCGELALKGFFSCCFEFNDDDLAEAGVDEDEDLTMCLMSKFTAQRLRPFYRFLSPAFQEFLAGMRLIELLDSDRQEHQDLGLYHLKQINSPMMTVSAYNNFLNYVSSLPSTKAGPKIVSHLLHLVDNKESLENISENDDYLKHQPEISLQMQLLRGLWQICPQAYFSMVSEHLLVLALKTAYQSNTVAACSPFVLQFLQGRTLTLGALNLQYFFDHPESLSLLRSIHFPIRGNKTSPRAHFSVLETCFDKSQVPTIDQDYASAFEPMNEWERNLAEKEDNVKSYMDMQRRASPDLSTGYWKLSPKQYKIPCLEVDVNDIDVVGQDMLEILMTVFSASQRIELHLNHSRGFIESIRPALELSKASVTKCSISKLELSAAEQELLLTLPSLESLEVSGTIQSQDQIFPNLDKFLCLKELSVDLEGNINVFSVIPEEFPNFHHMEKLLIQISAEYDPSKLVKLIQNSPNLHVFHLKCNFFSDFGSLMTMLVSCKKLTEIKFSDSFFQAVPFVASLPNFISLKILNLEGQQFPDEETSEKFAYILGSLSNLEELILPTGDGIYRVAKLIIQQCQQLHCLRVLSFFKTLNDDSVVEIAKVAISGGFQKLENLKLSINHKITEEGYRNFFQALDNMPNLQELDISRHFTECIKAQATTVKSLSQCVLRLPRLIRLNMLSWLLDADDIALLNVMKERHPQSKYLTILQKWILPFSPIIQK

SEQ ID NO: 96725 - protein, 119 aa, Homo sapiens
SSCDADDEGVRGTCEDASLCKRFAVSIGYWHDPYIQHFVRLSKERKAPEINRGYFARVHGVSQLIKAFLRKTECHCQIVNLGAGMDTTFWRLKDEDLLPSKYFEVDFPMIVTRKLHSIK

SEQ ID NO: 96726 - protein, 417 aa, Homo sapiens
MAWNTNLRWRLPLTCLLLQVIMVILFGVFVRYDFEADAHWWSERTHKNLSDMENEFYYRYPSFQDVHVMVFVGFGFLMTFLQRYGFSAVGFNFLLAAFGIQWALLMQGWFHFLQDRYIVVGVENLINADFCVASVCVAFGAVLGKVSPIQLLIMTFFQVTLFAVNEFILLNLLKVKDAGGSMTIHTFGAYFGLTVTRILYRRNLEQSKERQNSVYQSDLFAMIGTLFLWMYWPSFNSAISYHGDSQHRAAINTYCSLAACVLTSVAISSALHKKGKLDMVHIQNATLAGGVAVGTAAEMMLMPYGALIIGFVCGIISTLGFVYLTPFLESRLHIQDTCGINNLHGIPGIIGGIVGAVTAASASLEVYGKEGFQRGLDRKNTGKVPDLWSLGDPGHGPDGWHHCGAHFEITILGTTFR

SEQ ID NO: 96727 - protein, 78 aa, Homo sapiens
MDLCKNRLVSGGRDCQVKVWDVDTGKCLKTFRHKDPILATRINDTYIVSSCERGLVKVWHIAMAQLVKNFSLPHQHIC

SEQ ID NO: 96728 - protein, 522 aa, Homo sapiens
MWGRLWPLLLSILTATAVPGPSLRRPSRELDATPRMTIPYEELSGTRHFKGQAQNYSTLLLEEASARLLVGARGALFSLSANDIGDGAHKEIHWEASPEMQSKCHQKGKNNQTECFNHVRFLQRLNSTHLYACGTHAFQPLCAAIDAEAFTLPTSFEEGKEKCPYDPARGFTGLIIDGGLYTATRYEFRSIPDIRRSRHPHSLRTEETPMHWLNDAEFVFSVLVRESKASAVGDDDKVYYFFTERATEEGSGSFTQSRSSHRVARVARVCKGDLGGKKILQKKWTSFLKARLICHIPLYETLRGVCSLDAETSSRTHFYAAFTLSTQWKTLEASAICRYDLAEIQAVFAGPYMEYQDGSRRWGRYEGGVPEPRPGSCITDSLRSQGYNSSQDLPSLVLDFVKLHPLMARPVVPTRGRPLLLKRNIRYTHLTGTPVTTPAGPTYDLLFLGTADGWIHKAVVLGSGMHIIEETQVFRESQSVENLVISLLQHSLYVGAPSGVIQLPLSSCSRYRSCYDCILARD

SEQ ID NO: 96729 - protein, 165 aa, Homo sapiens
MDDDIAALVVDNGSGMCKAGFAGDDAPRAVFPSIVGRPRHQGVMVGMGQKDSYVGDEAQSKRGILTLKYPIEHGIVTNWDDMEKIWHHTFYNELRVAPEEHPVLLTEAPLNPKANREKMTQIMFETFNTPAMYVAIQAVLSLYASGRTTGIVMDSGDGVTHTVPI

SEQ ID NO: 96730 - protein, 120 aa, Homo sapiens
  MOD_RES (1)..(1): Any amino acid
XLLGPSLEDLFNFCSRKFSLKTVLLLADQMISRIEYIHSKNFIHRDVKPDNFLMGLGKKGNLVYIIDFGLAKKYRDARTHQHIPYRENKNLTGTARYASINTHLGIGAEGCHQETEIRKD

SEQ ID NO: 96731 - protein, 38 aa, Homo sapiens
MAWVPAESAVEELMPRLLPVEPCDLTEGSKQLNVQMLW

SEQ ID NO: 96732 - protein, 388 aa, Homo sapiens
MEFLLGNPFSTPVGQCLEKATDGSLQSEDWTLNMEICDIINETEEGPKDAIRALKKRLNGNRNYREVMLALTIARLRSELDVVRGNTKVMSEMLTEMVPGQEDSSDLELLQELNRTCRAMQQRIVELISRVSNEEVTEELLHVNDDLNNVFLRYERFERYRSGRSVQNASNGVLNEVTEDNLIDLGPGSPAVVSPMVGNTAPPSSLSSQLAGLDLGTESVSGTLSSLQQCNPRDGFDMFAQTRGNSLAEQRKTVTYEDPQAVGGLASALDNRKQSSEGTFLSSAQKRGRGGESDLEPIDSWLITQGMIPVAQPSVMDDIEVWLRTDLKGDDLEEGVTSEEFDKFLEERAKAAEMVPDLPSPPMEAPAPASNPSGRKKPERSEDALFAL

SEQ ID NO: 96733 - protein, 59 aa, Homo sapiens
MVHAFLIHTLRAPNTEDTGLCRVLYSCVFGAEKSPDDPRPHGAERDRLLRKEQILAVAR

SEQ ID NO: 96734 - protein, 169 aa, Homo sapiens
MLERPPALAMPMPTEGTPPPLSGTPIPVPAYFRHAEPGFSLKRPRGLSRSLPPPPPAKGSIPISRLFPPRTPGWHQLQPRRVSFRGEASETLQSPGYDPSRPESFFQQSFQRLSRLGHGSYGEVFKVRSKEDGRLYAVKRSMSPFRGPKDRARKLAEVGSHEKVGQHPC

SEQ ID NO: 96735 - protein, 635 aa, Homo sapiens
MGAAGLQGAPGGAEHPGRCGPGAVPRIRGSVVLAPRWRSSPAGGWSDPLFFGGADPEPELYLDPFCPPGFSSQKFPMQHVLCNHPPWIFTCLCAEGNIQPGDPGPGDQEKQQQASEGRPWSDQAEGPEGEGAMPLFGRTKKRTLGAFSRPPQRQPVSSRNGLRGVELEASPAQSGNPEETDKLLKRIEVLGFGTVNCGECGLSFSKMTNLLSHQRIHSGEKPYVCGVCEKGFSLKKSLARHQKAHSGEKPIVCRECGRGFNRKSTLIIHERTHSGEKPYMCSECGRGFSQKSNLIIHQRTHSGEKPYVCRECGKGFSQKSAVVRHQRTHLEEKTIVCSDCGLGFSDRSNLISHQRTHSGEKPYACKECGRCFRQRTTLVNHQRTHSKEKPYVCGVCGHSFSQNSTLISHRRTHTGEKPYVCGVCGRGFSLKSHLNRHQNIHSGEKPIVCKDCGRGFSQQSNLIRHQRTHSGEKPMVCGECGRGFSQKSNLVAHQRTHSGERPYVCRECGRGFSHQAGLIRHKRKHSREKPYMCRQCGLGFGNKSALITHKRAHSEEKPCVCRECGQGFLQKSHLTLHQMTHTGEKPYVCKTCGRGFSLKSHLSRHRKTTSVHHRLPVQPDPEPCAGQPSDSLYSL

SEQ ID NO: 96736 - protein, 328 aa, Homo sapiens
MLIQVCLYFYCKFLWRCLKFVMRKLTGRCELQRICYNTKPGASRTMKIETSLRDSKSKLLQTSVSVHPDAIEKTIEDIMELKKINPDVNPQLGISLQACLLQIVGYRNLIADVEKLRREAYDSDNPQHEEMLLKLWKFLKPNTPLESRISKQWCEIGFQGDDPKTDFRGMGLLGLYNLQYFAERDATAAQQVLSDSLHPKCRDITKEEISKFSKAEWEKKRMDKAIGYSFAIVGINITDLAYNLLVSGALKTHFYNIAPEAPTLSHFQQTFCYLMHEFHKFWIEEDPMDIMEFNRVREKFRKRIIKQLQNPDMALCPHFAASEGLINM

SEQ ID NO: 96737 - protein, 314 aa, Homo sapiens
  MOD_RES (1)..(1): Any amino acid
XKMSGQEQDWQKMLDRLLTEMDNKLDRLELDPVKQLLEDRWKSLRQQLRERPPLYQADEAAAMRRQLLAHFHCLSCDRPLETPVTGHAIPVTPAGPGLPGHHSIRPYTVFELEQVRQHSRNLKLGSAFPRGDLAQMEQSVGRLRSMHSKMLMNIEKVQIHFGGSTKASSQIIRELLHAQCLGSPCYKRMMRWTSWAWMATFTRDGWTQGCQASSEKTAQGPQSASPSSPGPTCTGRHPSAAMASCPLGHRAPRFRLATPQKDRPSSEGRLSQPNTAHPPSSAAVANRGLERHVDMPPGEGLEEPTRGPRSSTAQ

SEQ ID NO: 96738 - protein, 97 aa, Homo sapiens
MELSDVTLIEGVGNEVMVVAGVVVLILALVLAWLSTYVADSGSNQLLGAIVSAGDTSVLHLGHVDHLVAGQGNPEPTELPHPSEDKQVQAAAVQRPP

SEQ ID NO: 96739 - protein, 44 aa, Homo sapiens
MALLVRVLRNQTSISQWVPVCSRLIPVSPTQGQGDRALSRTSQG

SEQ ID NO: 96740 - protein, 82 aa, Homo sapiens
MMQESATETISNSSMNQNGMSTLSSQLDAGSRDGRSSGDTSSEVSTVELLHLQQQQAGVQWCNHNSLQPGTPGLKQSSDLSL

SEQ ID NO: 96741 - protein, 104 aa, Homo sapiens
MIKVEHLKEKLISQAQEVSRLRSELHRDLLMVENERLRQEMRRCEAELQELRTKPAGPCPGCEHSQESAQLRDKLSQLQLEMAESKGMLSELNLEVQQKTDRLA

SEQ ID NO: 96742 - protein, 46 aa, Homo sapiens
MAVSDVPSLSVGKEVQWEKLIAKAASIRDICHINMVQICWQLFLKC

SEQ ID NO: 96743 - protein, 143 aa, Homo sapiens
MPGVCDRAPDFLSPSEDQVLRPALGSSVALNCTAWVVSGPHCSLPSVQWLKDGLPLGIGGHYSLHEYSWPYKPRGCGAGLPPGPAGPAAGRPALCQVPSQRAALVPGRVWGGGDKRDCPEDRKFVNFILKPQLERRRGYKLFL

SEQ ID NO: 96744 - protein, 119 aa, Homo sapiens
MRTLFNLLWLALACSPVHTTLSKSDAKKAASKTLLEKSQFSDKPVQDRGLVVTDLKAESVVLEHRSYCSAKARDRHFAGDVLGYVTPWNSHGYDVTKVFGSKFTQISPVWLQLKRRGRE

SEQ ID NO: 96745 - protein, 94 aa, Homo sapiens
MPGPPESLDMGPLTFRDVAIEFSLEEWQCLDTAQQDLYRKVMLENYRNLVFLGIAVSKPDLVTCLEQGKDPWNMKGHSTVVKPPGFLPPSVTAS

SEQ ID NO: 96746 - protein, 93 aa, Homo sapiens
HLDPSQRALYRDVMLENYSNLVSVGYCAHKPEVIFRLEQGEEPWRLEEEFPSQSFPEVWTADHLKERSQENQSKHLWEVVFINNEMLTKEQGP

SEQ ID NO: 96747 - protein, 166 aa, Homo sapiens
MLPVFCVVEHYENAIEYDCKEEHAEFVLVRKDMLFNQLIEMALLSLGYSHSSAAQAKGLIQVGKWNPVPLSYVTDAPDATVADMLQDVYHVVTLKIQLHSCPKLEDLPPEQWSHTTVRNALKDLLKDMNQSSLAKECPLSQSMISSIVNSTYYANVSAAKCQEFGR

SEQ ID NO: 96748 - protein, 184 aa, Homo sapiens
NSRLDVFLRRHLPPEVYDAVRAYEPCIVVSNSENHILKYVVLSDRLVYLTENPPKSIRRVVALRDVVAIDLIDDYPEFLSSPDREISQHIRIIYSSTVLKKECKKSNSVRKFLFPFHHTKANNKKVKEEKNGLAFWRSKESRSLKESPLRKLLFYKIPSMLVSSVLLLEVKSHIGLRRKLSTSV

SEQ ID NO: 96749 - protein, 1239 aa, Homo sapiens
MDEIEKYQEVEEDQDPSCPRLSRELLDEKEPEVLQDSLDRCYSTPSGYLELPDLGQPYSSAVYSLEEQYLGLALDVDRIKKDQEEEEDQGPPCPRLSRELLEVVEPEVLQDSLDRCYSTPSSCLEQPDSCQPYGSSFYALEEKHVGFSLDVGEIEKKGKGKKRRGRRSKKERRRGRKEGEEDQNPPCPRLSRELLDEKGPEVLQDSLDRCYSTPSGCLELTDSCQPYRSAFYVLEQQHVGLAVDMDEIEKYQEVEEDQDPSCPRLSRELLDEKEPEVLQDSLDRCYSTPSGYLELPDLGQPYSSAVYSLEEQYLGLALDVDRIKKDQEEEEDQGPPCPRLSRELLEVVEPEVLQDSLDRCYSTPSSCLEQPDSCQPYGSSFYALEEKHVGFSLDVGEIEKKGKGKKRRGRRSKKERRRGRKEGEEDQNPPCPRLSRELLDEKGPEVLQDSLDRCYSTPSGCLELTDSCQPYRSAFYVLEQQHVGLAVDMDEIEKYQEVEEDQDPSCPRLSRELLDEKEPEVLQDSLDRCYSTPSGYLELPDLGQPYSSAVYSLEEQYLGLALDVDRIKKDEEEEEDQDPPCPRLSRELLEVVEPEVLQDSLDRCYSTPSSCLEQPDSCQPYGSSFYALEEKHVGFSLDVGEIEKKGKGKKRRGRRSKKERRRGRKEGEEDQNPPCPRVSFDSLTSMSPGQFTRSLSLCLCLCLCLSFSFIVFYLALFCPNIKAIISGAVWFLIPPGLFFTFSHFSRLSRELLDEKGPEVLQDSLDRCYSTPSGYLELTDSCQPYRSAFYVLEQQHVGLAVDMDEIEKYQEVEEDQDPSCPRLSRELLDEKEPEVLQDSLDRCYSTPSGYLELPDLGQPYSSAVYSLEEQYLGLALDVDRIKKDQEEEEDQGPPCPRLSRELLEVVEPEVLQDSLDRCYSTPSSCLEQPDSCQPYGSSFYALEEKHVGFSLDVGEIEKKGKGKKRRGRRSKKERRRGRKEGEEDQNPPCPRLSRELLDEKGPEVLQDSLDRCYSTPSGCLELCDSCQPYRSAFYVLEQQRVGLAVDMDEIEKYQEVEEDQDPSCPRLSRELLDEKEPEVLQDSLDRCYSTPSGYLELPDLGQPYSSAVYSLEEQYLGLALDVDKIEKKGKGKKRRGRRSKKERRRGRKEGEEDQNPPCPRLNGVLMEVEEREVLQDSLDRCYSTPSMYFELPDSFQHYRSVFYSFEEQHISFALYVDNRFFTLTVTSLHLVFQMGVIFPQ

SEQ ID NO: 96750 - protein, 94 aa, Homo sapiens
MRYNEKELQALSRQPAEMAAELGMRGPKKGSVLKRRLVKLVVNFLFYFRTDEAEPVGALLLERCRVVREEPGTFSITTSSCGEASSSTGTKSGR

SEQ ID NO: 96751 - protein, 57 aa, Homo sapiens
VHRITDRGDVRVQFNHETRWTFHPGALTKLPRASHLGFTPAQSWLLSAWTLLPWLWG

SEQ ID NO: 96752 - protein, 209 aa, Homo sapiens
  MOD_RES (1)..(1): Any amino acid
XVNEPYEKDGEKGQYTHKIYHLQSKVPTFVRMLAPEGALNIHEKAWNAYPYCRTVITNEYMKEDFLIKIETWHKPDLGTQENVHKLEPEAWKHVEAVYIDIADRSQVLSKVFPGDLDAHPRLKVSVFNTDYKAEEDPAKFKSIKTGRGPLGPNWKQELVNQKDCPYMCAYKLVTVKFKWWGLQNKVENFIHKQERRLFTNFHRQLFCWL

SEQ ID NO: 96753 - protein, 4873 aa, Homo sapiens
MAEGGEGGEDEIQFLRTEDEVVLQCIATIHKEQRKFCLAAEGLGNRLCFLEPTSEAKYIPPDLCVCNFVLEQSLSVRALQEMLANTGENGGEGAAQGGGHRTLLYGHAVLLRHSFSGMYLTCLTTSRSQTDKLAFDVGLREHATGEACWWTIHPASKQRSEGEKVRIGDDLILVSVSSERYLHLSVSNGNIQVDASFMQTLWNVHPTCSGSSIEEGYLLGGHVVRLFHGHDECLTIPSTDQNDSQHRRIFYEAGGAGTRARSLWRVEPLRISWSGSNIRWGQAFRLRHLTTGHYLALTEDQGLILQDRAKSDTKSTAFSFRASKELKEKLDSSHKRDIEGMGVPEIKYGDSVCFVQHIASGLWVTYKAQDAKTSRLGPLKRKVILHQEGHMDDGLTLQRCQREESQAARIIRNTTALFSQFVSGNNRTAAPITLPIEEVLQTLQDLIAYFQPPEEEMRHEDKQNKLRSLKNRQNLFKEEGMLALVLNCIDRLNVYNSVAHFAGIAREESGMAWKEILNLLYKLLAALIRGNRNNCAQFSNNLDWLISKLDRLESSSGILEVLHCILTESPEALNLIAEGHIKSIISLLDKHGRNHKVLDILCSLCLCNGVAVRANQNLICDNLLPRRNLLLQTRLINDVTSIRPNIFLGVAEGSAQYKKWYFELIIDQVDPFLTAEPTHLRVGWASSSGYAPYPGGGEGWGGNGVGDDLYSYGFDGLHLWSGRIPRAVASINQHLLRSDDVVSCCLDLGVPSISFRINGQPVQGMFENFNTDGLFFPVMSFSAGVKVRFLMGGRHGEFKFLPPSGYAPCYEALLPKEKMRLEPVKEYKRDADGIRDLLGTTQFLSQASFIPCPVDTSQVILPPHLEKIRDRLAENIHELWGMNKIELGWTFGKIRDDNKRQHPCLVEFSKLPETEKNYNLQMSTETLKTLLALGCHIAHVNPAAEEDLKKVKLPKNYMMSNGYKPAPLDLSDVKLLPPQEILVDKLAENAHNVWAKDRIKQGWTYGIQQDLKNKRNPRLVPYALLDERTKKSNRDSLREAVRTFVGYGYNIEPSDQELADSAVEKVSIDKIRFFRVERSYAVRSGKWYFEFEVVTGGDMRVGWARPGCRPDVELGADDQAFVFEGNRGQRWHQGSGYFGRTWQPGDVVGCMINLDDASMIFTLNGELLITNKGSELAFADYEIENGFVPICCLGLSQIGRMNLGTDASTFKFYTMCGLQEGFEPFAVNMNRDVAMWFSKRLPTFVNVPKDHPHIEVMRIDGTMDSPPCLKVTHKTFGTQNSNADMIYCRLSMPVECHSSFSHSPCLDSEAFQKRKQMQEILSHTTTQCYYAIRIFAGQDPSCVWVGWVTPDYHLYSEKFDLNKNCTVTVTLGDERGRVHESVKRSNCYMVWGGDIVASSQRSNRSNVDLEIGCLVDLAMGMLSFSANGKELGTCYQVEPNTKVFPAVFLQPTSTSLFQFELGKLKNAMPLSAAIFRSEEKNPVPQCPPRLDVQTIQPVLWSRMPNSFLKVETERVSERHGWVVQCLEPLQMMALHIPEENRCVDILELCEQEDLMRFHYHTLRLYSAVCALGNSRVAYALCSHVDLSQLFYAIDNKYLPGLLRSGFYDLLISIHLASAKERKLMMKNEYIIPITSTTRNIRLFPDESKRHGLPGVGLRTCLKPGFRFSTPCFVVTGEDHQKQSPEIPLESLRTKALSMLTEAVQCSGAHIRDPVGGSVEFQFVPVLKLIGTLLVMGVFDDDDVRQILLLIDPSVFGEHSAGTEEGAEKEEVTQVEEKAVEAGEKAGKEAPVKGLLQTRLPESVKLQMCELLSYLCDCELQHRVEAIVAFGDIYVSKLQANQKFRYNELMQALNMSAALTARKTKEFRSPPQEQINMLLNFQLGENCPCPEEIREELYDFHEDLLLHCGVPLEEEEEEEEDTSWTGKLCALVYKIKGPPKPEKEQPTEEEERCPTTLKELISQTMICWAQEDQIQDSELVRMMFNLLRRQYDSIGELLQALRKTYTISHTSVSDTINLLAALGQIRSLLSVRMGKEEELLMINGLGDIMNNKVFYQHPNLMRVLGMHETVMEVMVNVLGTEKSQIAFPKMVASCCRFLCYFCRISRQNQKAMFEHLSYLLENSSVGLASPSMRGSTPLDVAASSVMDNNELALSLEEPDLEKVVTYLAGCGLQSCPMLLAKGYPDVGWNPIEGERYLSFLRFAVFVNSESVEENASVVVKLLIRRPECFGPALRGEGGNGLLAAMQGAIKISENPALDLPSQGYKREVSTGDDEEEEEIVHMGNAIMSFYSALIDLLGRCAPEMHLIQTGKGEAIRIRSILRSLVPTEDLVGIISIPLKLPSLNKDGSVSEPDMAANFCPDHKAPMVLFLDRVYGIKDQTFLLHLLEVGFLPDLRASASLDTVSLSTTEAALALNRYICSAVLPLLTRCAPLFAGTEHCTSLIDSTLQTIYRLSKGRSLTKAQRDTIEECLLAICNHLRPSMLQQLLRRLVFDVPQLNEYCKMPLKLLTNHYEQCWKYYCLPSGWGSYGLAVEEELHLTEKLFWGIFDSLSHKKYDPDLFRMALPCLSAIAGALPPDYLDTRITATLEKQISVDADGNFDPKPINTMNFSLPEKLEYIVTKYAEHSHDKWACDKSQSGWKYGISLDENVKTHPLIRPFKTLTEKEKEIYRWPARESLKTMLAVGWTVERTKEGEALVQQRENEKLRSVSQANQGNSYSPAPLDLSNVVLSRELQGMVEVVAENYHNIWAKKKKLELESKGGGSHPLLVPYDTLTAKEKFKDREKAQDLFKFLQVNGIIVSRGMKDMELDASSMEKRFAYKFLKKILKYVDSAQEFIAHLEAIVSSGKTEKSPRDQEIKFFAKVLLPLVDQYFTSHCLYFLSSPLKPLSSSGYASHKEKEMVAGLFCKLAALVRHRISLFGNDSTTMVSCLHILAQTLDTRTVMKSGSELVKAGLRAFFENAAEDLEKTSENLKLGKFTHSRTQIKGVSQNINYTTVALLPILTSIFEHVTQHQFGMDLLLGDVQISCYHILCSLYSLGTGKNIYVERQRPALGECLASLAAAIPVAFLEPTLNRYNPLSVFNTKTPRERSILGMPDTVEDMCPDIPQLEGLMKEINDLAESGARYTEMPHVIEVILPMLCNYLSYWWERGPENLPPSTGPCCTKVTSEHLSLILGNILKIINNNLGIDEASWMKRIAVYAQPIISKARPDLLRSHFIPTLEKLKKKAVKTVQEEEQLKADGKGDTQEAELLILDEFAVLCRDLYAFYPMLIRYVDNNRSNWLKSPDADSDQLFRMVAEVFILWCKSHNFKREEQNFVIQNEINNLAFLTGDSKSKMSKAMQVKSGGQDQERKKTKRRGDLYSIQTSLIVAALKKMLPIGLNMCTPGDQELISLAKSRYSHRDTDEEVREHLRNNLHLQEKSDDPAVKWQLNLYKDVLKSEEPFNPEKTVERVQRISAAVFHLEQVEQPLRSKKAVWHKLLSKQRKRAVVACFRMAPLYNLPRQHMHRSINLFLHGYQRFWIETEEYSFEEKLVQDLAKSPKVEEEEEEETEKQPDPLHQIILYFSRNALTERSKLEDDPLYTSYSSMMAKSCQSGEDEEEDEDKEKTFEEKEMEKQKTLYQQARLHERGAAEMVLQMISASKGEMSPMVVETLKLGIAILNGGNAGVQQKMLDYLKEKKDAGFFQSLSGLMQSCSVLDLNAFERQNKAEGLGMVTEEGTLIVRERGEKVLQNDEFTRDLFRFLQLLCEGHNSDFQNFLRTQMGNTTTVNVIISTVDYLLRLQESISDFYWYYSGKDIIDESGQHNFSKALAVTKQIFNSLTEYIQGPCIGNQQSLAHSRLWDAVVGFLHVFANMQMKLSQDSSQIELLKELLDLLQDMVVMLLSLLEGNVVNGTIGKQMVDTLVESSTNVEMILKFFDMFLKLKDLTSSDTFKEYDPDGKGIISKKEFQKAMEGQKQYTQSEIDFLLSCAEADENDMFNYVDFVDRFHEPAKDIGFNVAVLLTNLSEHMPNDSRLKCLLDPAESVLNYFEPYLGRIEIMGGAKKIERVYFEISESSRTQWEKPQVKESKRQFIFDVVNEGGEQEKMELFVNFCEDTIFEMQLASQISESDSADRPEEEEEDEDSSYVLEIAGEEEEDGSLEPASAFAMACASVKRNVTDFLKRATLKNLRKQYRNVKKMTAKELVKVLFSFFWMLFVGLFQLLFTILGGIFQILWSTVFGGGLVEGAKNIRVTKILGDMPDPTQFGIHDDTMEAERAEVMEPGITTELVHFIKGEKGDTDIMSDLFGLHPKKEGSLKHGPEVGLGDLSEIIGKDEPPTLESTVQKKRKAQAAEMKAANEAEGKVESEKADMEDGEKEDKDKEEEQAEYLWTEVTKKKKRRCGQKVEKPEAFTANFFKGLEIYQTKLLHYLARNFYNLRFLALFVAFAINFILLFYKVTEEPLEEETEDVANLWNSFNDEEEEEAMVFFVLQESTGYMAPTLRALAIIHTIISLVCVVGYYCLKVPLVVFKREKEIARKLEFDGLYITEQPSEDDIKGQWDRLVINTPSFPNNYWDKFVKRKVINKYGDLYGAERIAELLGLDKNALDFSPVEETKAEAASLVSWLSSIDMKYHIWKLGVVFTDNSFLYLAWYTTMSVLGHYNNFFFAAHLLDIAMGFKTLRTILSSVTHNGKQLVLTVGLLAVVVYLYTVVAFNFFRKFYNKSEDDDEPDMKCDDMMTCYLFHMYVGVRAGGGIGDEIEDPAGDPYEMYRIVFDITFFFFVIVILLAIIQGLIIDAFGELRDQQEQVREDMETKCFICGIGNDYFDTTPHGFETHTLQEHNLANYLFFLMYLINKDETEHTGQESYVWKMYQERCWDFFPAGDCFRKQYEDQLG

SEQ ID NO: 96754 - protein, 226 aa, Homo sapiens
MEFLKTCVLRRNACTAVCFWRSKVVQKPSVRRISTTSPRSTVMPAWVIDKYGKNEVLRFTQNMMMPIIHYPNEVIVKVHAASVNPIDVNMRSGYGATALNMKRDPLHVKIKGEEFPLTLGRDVSGVVMECGLDVKYFKPGDEVWAAVPPWKQGTLSEFVVVSGNEVSHKPKSLTHTQAASLPYVALTAWSAINKVGGLNDKNCTGKRISGKESIIAGHFSWPVAHV

SEQ ID NO: 96755 - protein, 83 aa, Homo sapiens
MLLFFTLGLLIHFVFFASIFDIYFTSPLVHGMTPQFTPLPPPARRLVLFVADGLRADALYELDENGNSRAPFIRNIIMHEGSW

SEQ ID NO: 96756 - protein, 151 aa, Homo sapiens
MEGSADSYTSRPSLDSDVSLEEDRESARREVESQAQQQLERAKHKPVAFAVRTNVSYCGVLDEECPVQGSGVNFEAKDFLHIKEKYSNDWWIGRLVKEGGDIAFIPSPQRLESIRLKQEQKARRSGNPSSLSDIGNRRSPPPSLGGTCSPI

SEQ ID NO: 96757 - protein, 262 aa, Homo sapiens
MLCSLLLCECLLLVAGYAHDDDWIDPTDMLNYDAASGTMRKSQAKYGISGEKDVSPDLSCADEISECYHKLDSLTYKIDECEKKKREDYESQSNPVFRRYLNKILIEAGKLGLPDENKGDMHYDAEIILKRETLLEIQKFLNGEDWKPGALDDALSDILINFKFHDFETWKWRFEDSFGVDPYNVLMVLLCLLCIVVLVATELWTYVRWYTQLRRVLIISCAQSEASRVKQVGNLFQAWAFAVCDPVLLQVPVCPILVFCYS

SEQ ID NO: 96758 - protein, 59 aa, Homo sapiens
MDGPMRPRSASLVDFQFGVVATETIEDALLHLAQQNEQAVREASGRLGRFREPQIVGLW

SEQ ID NO: 96759 - protein, 283 aa, Homo sapiens
MAMQKIFAREILDSRGNPTVEVDLHTAKGRFRAAVPSGASTGIYEALELRDGDKGRYLGKGVLKAVENINNTLGPALLQKKLSVVDQEKVDKFMIELDGTENKSKFGANAILGVSLAVCKAGAAEKGVPLYRHIADLAGNPDLILPVPAFNVINGGSHAGNKLAMQEFMILPVGASSFKEAMRIGAEVYHHLKGVIKAKYGKDATNVGDEGGFAPNILENNEALELLKTAIQAAGYPDKVVIGMDVAASEFYRNGKYDLDFKSPDDPARHITGEKLGELYKSF

SEQ ID NO: 96760 - protein, 82 aa, Homo sapiens
MSKPHSEAGTAFIQTQQLHAAMADTFLEHMCRLDIDSPPITARNTGIICTIGPASRSVETLKEMIKSGMNVARLNFSHGTHE

SEQ ID NO: 96761 - protein, 1380 aa, Homo sapiens
MSGKRSRVRKPRARRAGRAQPAAGQQGPEVEPPPPTPGGPQGEAGVAPTGHVTSIEPAPQGHPRVARPEQPQAASRPVPATAPGSELVLVLAGHMEGCGAGDPMPALGPELLRLHEVQLCLAQEQLLLEDRWRQVQLQMQLWREEQLWLQQLQEEQLWLQQLQEEQAWVHVEGLQLAVALEQLRSEGFEALQTQGQAPGPNMARRSQSSSQGDNPLAPGYLPPHYKEYYRLAVDALAEGGSEAYSRFLATEGAPDFLCPEELEHVSRHLRPPQYVTREPPEGSLLDVDMDGSSGTYWPVNSDQAVPELDLGWPLTFGFQGTEVTTLVQPPPPDSPSIKDEARRMIRSAQQVVAVVMDMFTDVDLLSEVLEAAARRVPVYILLDEMNAQHFLDMADKCRVNLQHVDFLRVRTVAGPTYYCRTGKSFKGHVKEKFLLVDCAVVMSGSYSFMWSFEKIHRSLAHVFQGELVSSFDEEFRILFAQSEPLVPSAAALARMDAYALAPYAGAGPLVGVPGVGAPTPFSFPKRAHLLFPPPREEGLGFPSFLDPDRHFLSAFRREEPPRMPGGALEPHAGLRPLSRRLEAEAGPAGELAGARGFFQARHLEMDAFKRHSFATEGAGAVENFAAARQVSRQTFLSHGDDFRFQTSHFHRDQLYQQQYQWDPQLTPARPQGLFEKLRGGRAGFADPDDFTLGAGPRFPELGPDGHQRLDYVPSSASREVRHGSDPAFAPGPRGLEPSGAPRPNLTQRFPCQAAARPGPDPAPEAEPERRGGPEGRAGLRRWRLASYLSGCHGEDGGDDGLPAPMEAEAYEDDVLAPGGRAPAGDLLPSAFRVPAAFPTKVPVPGPGSGGNGPEREGPEEPGLAKQDSFRSRLNPLVQRSSRLRSSLIFSTSQAEGAAGAAAATEKVQLLHKEQTVSETLGPGGEAVRSAASTKVAELLEKYKGPARDPGGGAGAITVASHSKAVVSQAWREEVAAPGAVGGERRSLESCLLDLRDSFAQQLHQEAERQPGAASLTAAQLLDTLGRSGSDRLPSRFLSAQSHSTSPQGLDSPLPLEGSGAHQVLHNESKGSPTSAYPERKGSPTPGFSTRRGSPTTGFIEQKGSPTSAYPERRGSPVPPVPERRSSPVPPVPERRGSLTLTISGESPKAGPAEEGPSGPMEVLRKGSLRLRQLLSPKGERRMEDEGGFPVPQENGQPESPRRLSLGQGDSTEAATEERGPRARLSSATANALYSSNLRDDTKAILEQISAHGQKHRAVPAPSPGPTHNSPELGRPPAAGVLAPDMSDKDKCSAIFRSDSLGTQGRLSRTLPASAEERDRLLRRMESMRKEKRVYSRFEVFCKKEEASSPGAGEGPAEEGTRDSKVGKFVPKILGTFKSKK

SEQ ID NO: 96762 - protein, 230 aa, Homo sapiens
  MOD_RES (1)..(1): Any amino acid
XVSCGMMEALLKVIKFLGDEQDQITFVTRAVRVVDLITNLDMAAFQSHSGLSIFIYRLEHEVDLCRKECPFVIKPKIQRPNTTQEGEEMETDMDVADVAMESSPGSSISMEHRLDVELRASGSSSSTNISSGPSPGPSPGPGTGPGPGPGPGPGPGPGPGPGPGPGPGPGPGPGPRPGVQCIPQRAALLKSMLNFLKKAIQDPAFSDGIRHVMDGSLPTSLKHIISNAEY

SEQ ID NO: 96763 - protein, 236 aa, Homo sapiens
  MOD_RES (1)..(1): Any amino acid
XCSLDNGGCTHYCLEEVGWRRCSCAPGYKLGDDLLQCHPAGEYDLRRWEKWELDLDIKEVFVHPNYSKSTTDNDIALLHLAQPATLSQTIVPICLPDSGLAERELNQAGQETLVTGWGYHSSREKEAKRNRTFVLNFIKIPVVPHNECSEVMSNMVSENMLCAGILGDRQDACEGDSGGPMVASFHGTWFLVGLVSWGEGCGLLHNYGVYTKVSRYLDWIHGHIRDKEAPQKSWAP

SEQ ID NO: 96764 - protein, 204 aa, Homo sapiens
MAEKFDCHYCRDPLQGKKYVQKDGHHCCLKCFDKFCANTCVECRKPIGADSKEVHYKNRFWHDTCFRCAKCLHPLANETFVAKDNKILCNKCTTREDSPKCKGCFKAIVAGDQNVEYKGTVWHKDCFTCSNCKQVIGTGSFFPKGEDFYCVTCHETKFAKHCVKCNKAITSGGITYQDQPWHADCFVCVTCSKKLAGQRFTAVE

SEQ ID NO: 96765 - protein, 298 aa, Homo sapiens
CAIAVGIMSYYMADRKHRKAFLEARQSLEVKMNLEEQSQQQHVADEMLKDMKKDESQKDQQQFNTMYMYRHENVSILFADIVGFTQLSSACSAQELVKLLNELFARFDKLAAKYHQLRIKILGDCYYCICGLPDYREDHAVCSILMGLAMVEAISYVREKTKTGVDMRVGVHTGTVLGGVLGQKRWQYDVWSTDVTVANKMEAGGIPGRVHISQSTMDCLKGEFDVEPGDGGSRCDYLEEKGIETYLIIASKPEVKKTATQNGLNGSALPNGAPASSKSSSPALIETKEPNGSAHSSG

SEQ ID NO: 96766 - protein, 165 aa, Homo sapiens
MLEREGVKERVRMFSPPVSSGKNGPTSLASGHFTGSNVEDRSSSGSWGNGGHPSPSRNYGDGTPYDHMTSRDLGSHDNLSPPFVNSRIQSKTERGSYSSYGRESNLQGCHQQSLLGGDMDMGNPGTLSPTKPGSQYYQYSSNNPRRRPLHSSAMEVQTKKVRKVP

SEQ ID NO: 96767 - protein, 255 aa, Homo sapiens
MEVGGDTAAPAPGGAEDLEDTQFPSEEAREGGGVHAVPPDPEDEGLEETGSKDKDQPPSPSPPPQSEALSSTSRLWSPAAPENSPTCSPESSSGGQGGDPSDEEWRSQRKHVFVLSEAGKPIYSRYGSVEALSATMGVMTALVSFVQSAGDAIRAIYAEDHKLVFLQQGPLLLVAMSRTSQSAAQLRGELLAVHAQIVSTLTRASVARIFAHKQNYDLRRLLAGSERTLDRLLDSMEQDPGALLLGAVRCVPLAR

SEQ ID NO: 96768 - protein, 1341 aa, Homo sapiens
MMNRTTPDQELVPASEPVWERPWSVEEIRRSSQSWSLAADAGLLQFLQEFSQQTISRTHEIKKQVDGLIRETKATDCRLHNVFNDFLMLSNTQFIENRVYDEEVEEPVLKAEAEKTEQEKTREQKEVDLIPKVQEAVNYGLQVLDSAFEQLDIKAGNSDSEEDDANGRVELILEPKDLYIDRPLPYLIGSKLFMEQEDVGLGELSSEEGSVGSDRGSIVDTEEEKEEEESDEDFAHHSDNEQNQHTTQMSDEEEDDDGCDLFADSEKEEEDIEDIEENTRPKRSRPTSFADELAARIKGDAMGRVDEEPTTLPSGEAKPRKTLKEKKERRTPSDDEEDNLFAPPKLTDEDFSPFGSGGGLFSGGKGLFDDEDEESDLFTEASQDRQAGASVKEESSSSKPGKKIPAGAVSVFLGDTDVFGAASVPSLKEPQKPEQPTPRKSPYGPPPTGLFDDDDGDDDDDFFSAPHSKPSKTRKVQSTADIFGDEEGDLFKEKAVASPEATVSQTDENKARAEKKVTLSYSKNLKPSSETKTQKGLFSDEEDSEDLFSSQSASNLKGASLLPGKLPTSVSLFDDEDEEDNLFGGTAAKKQTLSLQAQREEKAKASELSKKKASALLFSSDEEDQWNIPASQTHLASDSRSKGEPRDSGTLQSQEAKAVKKTSLFEEDKEDDLFAIAKDSQKKTQRVSLLFEDDVDSGGSLFGSPPTSVPPATKKKETVSEAPPLLFSDEEEKEAQLGVKSVDKKVESAKESLKFGRTDVAESEKEGLLTRSAQETVKHSDLFSSSSPWDKGTKPRTKTVLSLFDEEEDKMEDQNIIQAPQKEVGKGCDPDAHPKSTGVFQDEELLFSHKLQKDNDPDVDLFAGTKKTKLLEPSVGSLFGDDEDDDLFSSAKSQPLVQEKKRVVKKDHSVNSFKNQKHPESIQGSKEKGIWKPETPQDSSGLAPFKTKEPSTRIGKIQANLAINPAALLPTAASQISEVKPVLPELAFPSSEHRRSHGLESVPVLPGSGEAGVSFDLPAQADTLHSANKSRVKMRGKRRPQTRAARRLAAQESSEAEDMSVPRGPIAQWADGAISPNGHRPQLRAASGEDSTEEALAAAAAPWEGGPVPGVDTSPFAKSLGHSRGEADLFDSGDIFSTGTGSQSVERTKPKAKIAENPANPPVGGKAKSPMFPALGEASSDDDLFQSAKPKPAKKTNPFPLLEDEDDLFTDQKVKKNETKSSSQQDVILTTQDIFEDDIFATEAIKPSQKTREKEKTLESNLFDDNIDIFADLTVKPKEKSKKKVEAKSIFDDDMDDIFSTGIQAKTTKPKSRSAQAAPEPRFEHKVSNIFDDPLNAFGGQ

SEQ ID NO: 96769 - protein, 109 aa, Homo sapiens
MIHSLFLINSSGDIFLEKHWKSVVSRSVCDYFFEAQERATEAENVPPVIPTPHHYLLSVYRHKIFFVAVIQTEVPPLFVIEFLHRVVDTFQYYCSGISVLMQHTGPFAQ

SEQ ID NO: 96770 - protein, 328 aa, Homo sapiens
IKLTQELAQKLGFKIRKAYVRAEALNHSVEDIEPDLLTPRQEAVPVVSLPAPSFSHEVGSELASVPVMPLTSILPLQVEESALPSAVLANGGKMPFTMPEAFLDDGDMVLGDELDDLLDSAPETNETVMPSALVRGPLQTASVSPSMPFSASLLGTLPIGARYAPPPSFSEFYPPLTSSLEDFCSSLNSFSMSESKRDLSTSTSREGTPLNNSNSSLLLMNGPGSLFASENFLGISSQPRNDFGNFFGSAVTKPSSSVTPRHPLEGTHELRQACQICFVKSGPKLMDFTYHANIDHKCKKDILIGRIKNVEDKSWKKIRPRPTKTNYE

SEQ ID NO: 96771 - protein, 645 aa, Homo sapiens
MEDSQDLNEQSVKKTCTESDVSQSQNSRSMEMQDLASPHTLVGGGDTPGSSKLEKSNLSSTSVTTNGTGGENMTVLNTADWLLSCNTPSSATMSLLAVKTEPLNSSETTATTGDGALDTFTGSVITSSGYSPRSAHQYSPQLYPSKPYPHILSTPAAQTMSAYAGQTQYSGMQQPAVYTAYSQTGQPYSLPTYDLGVMLPAIKTESGLSQTQSPLQSGCLSYSPGFSTPQPGQTPYSYQMPGSSFAPSSTIYANNSVSNSTNFSGSQQDYPSYTAFGQNQYAQYYSASTYGAYMTSNNTADGTPSSTSTYQLQESLPGLTNQPGTDLHPGEFDTMQSPSTPIKDLDERTCRSSGSKSRGRGRKNNPSPPPDSDLERVFVWDLDETIIVFHSLLTGSYAQKYGKDPPMAVTLGLRMEEMIFNLADTHLFFNDLEECDQVHIDDVSSDDNGQDLSTYSFATDGFHAAASSANLCLPTGVRGGVDWMRKLAFRYRRVKELYNTYKNNVGGLLGPAKRDAWLQLRAEIEGLTDSWLTNALKSLSIISTRSNCINVLVTTTQLIPALAKVLLYSLGGAFPIENIYSATKIGKESCFERIMQRFGRKVVYVVIGDGVEEEQAAKKHNMPFWRISSHSDLLALHQALELEYL

SEQ ID NO: 96772 - protein, 562 aa, Homo sapiens
MGGRPSSPLDKQQRQHLRGQVDTLLRNFLPCYRGQLAASVLRQISRELGPQEPTGSQLLRSKKLPRVREHRGPLTQLRGHPPRWQPIFCVLRGDGRLEWFSHKEEYENGGHCLGSTALTGYTLLTSQREYLRLLDALCPESLGDHTQEEPDSLLEVPVSFPLFLQHPFRRHLCFSAATREAQHAWRLALQGGIRLQGIVLQRSQAPAARAFLDAVRLYRQHQGHFGDDDVTLGSDAEVLTAVLMREQLPALRAQTLPGLRGAGRARAWAWTELLDAVHAAVLAGASAGLCAFQPEKDELLASLEKTIRPDVDQLLRQRARVAGRLRTDIRGPLESCLRREVDPQLPRVVQTLLRTVEASLEAVRTLLAQGMDRLSHRLRQSPSGTRLRREVYSFGEMPWDLALMQTCYREAERSRGRLGQLAAPFGFLGMQSLVFGAQDLAQQLMADAVATFLQLADQCLTTALNCDQAAQRLERVRGRVLKKFKSDSGLAQRRFIRGWGLCIFLPFVLSQLEPGCKKTESHSVAQAVVQWCDLGSLQPPPPRFKRSSHLSLPSSWDYRHPL

SEQ ID NO: 96773 - protein, 252 aa, Homo sapiens
MFSQQQQQQLQQQQQQLQQLQQQQLQQQQLQQQQLLQLQQLLQQSPPQAPLPMAVSRGLPPQQPQQPLLNLQGTNSASLLNGSMLQRALLLQQLQGLDQFAMPPATYDTAGLTMPTATLGNLRGYGMASPGLAAPSLTPPQLATPNLQQFFPQATRQSLLGPPPVGVPMNPSQFNLSGRNPQKQARTSSSTTPNRKDSSSQTMPVEDKSDPPEGSEEAAEPRMDTPEDQDLPPCPEDIAKEKRTPAPEPEPC

SEQ ID NO: 96774 - protein, 139 aa, Homo sapiens
MDTMMLNVRNLFEQLVRRVEILSEGNEVQFIQLAKDFEDFRKKWQRTDHELGKYKDLLMKAETERSALDVKLKHARNQVDVEIKRRQRAEADCEKLERQIQLIREMLMCDTSGSIQLSEEQKSALAFLNRGQPSSSNAG

SEQ ID NO: 96775 - protein, 79 aa, Homo sapiens
MSQGSVTFRDVAIDFSQEEWKWLQPAQRDLYRCVMLENYGHLVSLGLSISKPDVVSLLEQGKEPWLGKREVKRDLFSGN

SEQ ID NO: 96776 - protein, 213 aa, Homo sapiens
MPLNFRQIGGPAPKTERSRPNASGAEVEKPPRRRRFATSGFPSYGGRLLPEALCRLTFSRSGSRVAVQTPALPPHPFPHPLRGGGAAATPPDSDDPSARRITTWTSGSLALTKNSAAAQPATPVPQSRAGKALPEEGFSRRPPRPEIRNMVAVLEVISSLEKYPITKEALEETRLGKLINDVRKKTKNEELAKRAKKLLRSWQKLIEPAHQHE

SEQ ID NO: 96777 - protein, 219 aa, Homo sapiens
  MOD_RES (1)..(1): Any amino acid
XSIINQYIACQGPLPHTCTDFWQMTWEQGSSMVVMLTTQVERGRVKCHQYWPEPTGSSSYGCYQVTCHSEEGNTAYIFRKMTLFNQEKNESRPLTQIQYIAWPDHGVPDDSSDFLDFVCHVRNKRAGKEEPVVVHCSAGIGRTGVLITMETAMCLIECNQPVYPLDIVRTMRDQRAMMIQTPFCFLYFIFQSQYRFVCEAILKVYEEGFVKPLTTSTNK

SEQ ID NO: 96778 - protein, 56 aa, Homo sapiens
  MOD_RES (1)..(1): Any amino acid
XLDVDGIYRVSGNLATIQKLRFIVNQVVSGIPALLSELDGDLWTPLVSCRFFTVVI

SEQ ID NO: 96779 - protein, 544 aa, Homo sapiens
MEEMHQVAIAAKDPANGRQFSSQVSILSAMELIWNLCEILFIEVAPAGPLLLHLLDWVRLHVCEVDSLSADVLGSENPSKHDSFWNLVTILVLQGRLDEARQMLSKEADASPASAGICRIMGDLMRTMPILSPGNTQTLTELELKWQHWHEECERYLQDSTFATSPHLESLLKIMLGDEAALLEQKELLSNWYHFLVTRLLYSNPTVKPIDLHYYAQSSLDLFLGGESSPEPLDNILLAAFEFDIHQVIKECSIALSNWWFVAHLTDLLDHCKLLQSHNLYFGSNMREFLLLEYASGLFAHPSLWQLGVDYFDYCPELGRVSLELHIERIPLNTEQKALKVLRICEQRQMTEQVRSICKILAMKAVRNNRLGSALSWSIRAKDAAFATLVSDRFLRDYCERGCFSDLDLIDNLGPAMMLSDRLTFLGKYREFHRMYGEKRFADAASLLLSLMTSRIAPRSFWMTLLTDALPLLEQKQVIFSAEQTYELMRCLEDLTSRRPVHGESDTEQLQDDDIETTKVEMLRLSLARNLARAIIREGSLEGS

SEQ ID NO: 96780 - protein, 71 aa, Homo sapiens
MSAEVKVTGQNQEQFLLLAKSAKGAALATLIHQVLEAPGVYVFGELLDMPNVREGRNWMTYGARGHCGLGE

SEQ ID NO: 96781 - protein, 156 aa, Homo sapiens
MATKRLARQLGLIRRKSIAPANGNLGRSKSKQLFDYLIVIDFESTCWNDGKHHHSQEIIEFPAVLLNTSTGQIDSEFQAYVQPQEHPILSEFCMELTGIKQAQVDEGVPLKICLSQFCKWIHKIQQQKNIIFATGISEPSASEVKLCAFVTWSAFL

SEQ ID NO: 96782 - protein, 77 aa, Homo sapiens
MPVARSWVCRKTYVTPRRPFEKSRLDQELKLIGEYGLRNKREVWRVKFTLAKIRKAARELLTLDEKDPRRLFEGGSL

SEQ ID NO: 96783 - protein, 181 aa, Homo sapiens
MSQDGASQFQEVIRQELELSVKKELEKILTTASSHEFEHTKKDLDGFRKLFHRFLQEKGPSVDWGKIQRPPEDSIQPYEKIKARGLPDNISSVLNKLVVVKLNGGLGTSMGCKGPKSLIGVRNENTFLDLTVQQIEHLNKTYNTDVPLVLMNSFNTDEDTKKILQKYNHCRVKIYTFNQSR

SEQ ID NO: 96784 - protein, 47 aa, Homo sapiens
  MOD_RES (1)..(1): Any amino acid
XPPGEPGFRGAPGKAGPQGRGGVSAVPGFRGDEGPIGHQGPIGQEGE

SEQ ID NO: 96785 - protein, 192 aa, Homo sapiens
MRLGSPGLLFLLFSSLRAANFSVPVVSAPHSPSQDELTFTCTSINGYPRPNVYWINKTDNSLLDQALQNDTVFLNMRGLYDVVSVLRIARTPSVNIGCCIENVLLQQNLTVGSQTGNDIGERDKITENPVSTGEKNAATWSILAVLCLLVVVAVAIGWVCRDRCLQHSYAGAWAVSPETELTESWNLLLLLS

SEQ ID NO: 96786 - protein, 170 aa, Homo sapiens
MSNLTPESSPELAKKSWFGNFISLEKEEQIFVVIKDKPLSSIKADIVHAFLSIPSLSHSVISQTSFRAEYKATGGPAVFQKPVKFQVDITYTEGGEAQKENGIYSVTFTLLSGPSRRFKRVVETIQAQLLSTHDPPAAQHLSEPPPPAPGLSWGAGLKGQKVATSYESSL

SEQ ID NO: 96787 - protein, 68 aa, Homo sapiens
MVWQQKTKAVVMLNRIVEKESVKCAQYWPTDDQEMLFKETGFSVKLLSEDVKSYYTVHLLQLENINVR

SEQ ID NO: 96788 - protein, 63 aa, Homo sapiens
  MOD_RES (1)..(1): Any amino acid
XGGMNHLRENGIVHRDIKPGNIMRVIGEDGQSVYKLTDFGAARELEDDEQFVSLYGTEEYLMQ

SEQ ID NO: 96789 - protein, 576 aa, Homo sapiens
MAAAARPRGRALGPVLPPTPLLLLVLRVLPACGATARDPGAAAGLSLHPTYFNLAEAARIWATATCGERGPGEGRPQPELYCKLVGGPTAPGSGHTIQGQFCDYCNSEDPRKAHPVTNAIDGSERWWQSPPLSSGTQYNRVNLTLDLGQLFHVAYILIKFANSPRPDLWVLERSVDFGSTYSPWQYFAHSKVDCLKEFGREANMAVTRDDDVLCVTEYSRIVPLENGEVVVSLINGRPGAKNFTFSHTLREFTKATNIRLRFLRTNTLLGHLISKAQRDPTVTRRYYYSIKDISIGGQCVCNGHAEVCNINNPEKLFRCECQHHTCGETCDRCCTGYNQRRWRPAAWEQSHECEACNCHGHASNCYYDPDVERQQASLNTQGIYAGGGVCINCQHNTAGVNCEQCAKGYYRPYGVPVDAPDGCIPCSCDPEHADGCEQGSGRCHCKPNFHGDNCEKCAIGYYNFPFCLRIPIFPVSTPSSEDPVAGDIKGCDCNLEGVLPEICDAHGRCLCRPGVEGPRCDTCRSGFYSFPICQGPSEKVAIYKPESRPSAETEPASTWILDFPASRTGEINFYCL

SEQ ID NO: 96790 - protein, 138 aa, Homo sapiens
MAAPPKAPIRVRNLTIRAGALTGKENNMLQPETHIFTAPEEGSSQGALLLGQAPEPLSLPCTPVTLEQQLVSPSGDPHRAPALPSICSTLILQPCATLDPLLLQPQVPKVSDQALVSAHSEWQRKLEAAEALLTLRNS

SEQ ID NO: 96791 - protein, 9 aa, Homo sapiens
MRHAKGLDQ

SEQ ID NO: 96792 - protein, 351 aa, Homo sapiens
MTRLLDAEWWRRSEAGHLRRQVAAVLFFPEGTCSNKKALLKFKPGAFIAGVPVQPVLIRYPNSLDTTSWAWRGPGVLKVLWLTASQPCSIVDVEFLPVYHPSPEESRDPTLYANNVQRVMAQALGIPATECEFVGSLPVIVVGRLKVALEPQLWELGKVLRKAGLSAGYVDAGAEPGRSRMISQEEFARQLQLSDPQTVAGAFGYFQQDTKGLVDFRDVALALAALDGGRSLEELTRLAFELFAEEQAEGPNRLLYKDGFSTILHLLLGSPHPAATALHAELCQAGSSQGLSLCQFQNFSLHDPLYGKLFSTYLRPPHTSRGTSQTPNASSPGNPTALANGTVQAPKQKGD

SEQ ID NO: 96793 - protein, 90 aa, Homo sapiens
MEPLAAYPLKCSGPRAKVFAVLLSIVLCTVTLFLLQLKFLKPKINSFYAFEVKDAKGRTVSLEKYKGKILQRRNQGGIFGSILSTLRVKL

SEQ ID NO: 96794 - protein, 38 aa, Homo sapiens
MFQAGNRRKKERHKSTSKQRRKKRKNQVLPMQNLRRLS

SEQ ID NO: 96795 - protein, 127 aa, Homo sapiens
MSTAIREVGVWRQTRTLLLKNYLIKCRTKKSSVQEILFPLFFLFWLILISMMHPNKKYEEVPNIELNPMDKFTLSNLILGYTPVTNITSSIMQKVSTDHLPDVIITEEYTNEKEMLTSSLSKPSNFV

SEQ ID NO: 96796 - protein, 65 aa, Homo sapiens
MVSHGSSPSLLEALSSDFLACKICLEQLRAPKTLPCLHTYCQDCLAQLADGGRVRCPECRETVPV

SEQ ID NO: 96797 - protein, 1240 aa, Homo sapiens
MRSRSNSGVRLDGYARLVQQTILCHQNPVTGLLPASYDQKDAWVRDNVYSILAVWGLGLAYRKNADRDEDKAKAYELEQSVVKLMRGLLHCMIRQVDKVESFKYSQSTKDSLHAKYNTKTCATVVGDDQWGHLQLDATSVYLLFLAQMTASGLHIIHSLDEVNFIQNLVFYIEAAYKTADFGIWERGDKTNQGISELNASSVGMAKAALEALDELDLFGVKGGPQSVIHVLADEVQHCQSILNSLLPRASTSKEVDASLLSVVSFPAFAVEDSQLVELTKQEIITKLQGRYGCCRFLRDGYKTPKEDPNRLYYEPAELKLFENIECEWPLFWTYFILDGVFSGNAEQVQEYKEALEAVLIKGKNGVPLLPELYSVPPDRVDEEYQNPHTVDRVPMGKLPHMWGQSLYILGSLMAEGFLAPGEIDPLNRRFSTVPKPDVVVQVSILAETEEIKTILKDKGIYVETIAEVYPIRVQPARILSHIYSSLGCNNRMKLSGRPYRHMGVLGTSKLYDIRKTIFTFTPQFIDQQQFYLALDNKMIVEMLRTDLSYLCSRWRMTGQPTITFPISHSMLDEDGTSLNSSILAALRKMQDGYFGGARVQTGKLSEFLTTSCCTHLSFMDPGPEGKLYSEDYDDNYDYLESGNWMNDYDSTSHARCGDEVARYLDHLLAHTAPHPKLAPTSQKGGLDRFQAAVQTTCDLMSLVTKAKELHVQNVHMYLPTKLFQASRPSFNLLDSPHPRQENQVPSVRVEIHLPRDQSGEVDFKALVLQLKETSSLQEQADILYMLYTMKGPDWNTELYNERSATVRELLTELYGKVGEIRHWGLIRYISGILRKKVEALDEACTDLLSHQKHLTVGLPPEPREKTISAPLPYEALTQLIDEASEGDMSISILTQEIMVYLAMYMRTQPGLFAEMFRLRIGLIIQVMATELAHSLRCSAEEATEGLMNLSPSAMKNLLHHILSGKEFGVERSVRPTDSNVSPAISIHEIGAVGATKTERTGIMQLKSEIKQVEFRRLSISAESQSNGGHPLGIDLMSPSFMSPGTSMTPSSGSFPSAYDQQSSKDSRQGQWQRRRRLDGALNRVPVGFYQKVWKVLQKCHGLSVEGFVLPSSTTREMTPGEIKFSVHVESVLNRVPQPEYRQLLVEAILVLTMLADIEIHSIGSIIAVEKIVHIANDLFLQEQKTLGADDTMLAKDPASGICTLLYDSAPSGRFGTMTYLSKAAATYVQEFLPHSICAMQ

SEQ ID NO: 96798 - protein, 434 aa, Homo sapiens
MRNYLKERGDQTVLILHAKVAQKSYGNEKRFFCPPPCVYLMGSGWKKKKEQMERDGCSEQESQPCAFIGIGNSDQEMQQLNLEGKNYCTAKTLYISDSDKRKHFMLSVKMFYGNSDDIGVFLSKRIKVISKPSKKKQSLKNADLCIASGTKVALFNRLRSQTVSTRYLHVEGGNFHASSQQWGAFFIHLLDDDESEGEEFTVRDGYIHYGQTVKLVCSVTGMALPRLIIRKVDKQTALLDADDPVSQLHKCAFYLKDTERMYLCLSQERIIQFQATPCPKEPNKEMINDGASWTIISTDKAEYTFYEGMGPVLAPVTPVPVVESLQLNGGGDVAMLELTGQNFTPNLRVWFGDVEAETMYRCGESMLCVVPDISAFREGWRWVRQPVQVPVTLVRNDGIIYSTSLTFTYTPEPGPRPHCSAAGAILRANSSQVP

SEQ ID NO: 96799 - protein, 204 aa, Homo sapiens
MFSPPVSSGKNGPTSLASGHFTGSNVEDRSSSGSWGNGGHPSPSRNYGDGTPYDHMTSRDLGSHDNLSPPFVNSRIQSKTERGSYSSYGRESNLQGCHQQSLLGGDMDMGNPGTLSPTKPGSQYYQYSSNNPRRRPLHSSAMEVQTKKVRKVPPGLPSSVYAPSASTADYNRDSPGYPSSKPATSTFPSSFFMQDGHHSSDPWS

SEQ ID NO: 96800 - protein, 48 aa, Homo sapiens
  MOD_RES (1)..(1): Any amino acid
XGVKLEIFRMIIYLTFPVAMFWVSNQAEWFEDDVIQRKRELWPPEKKF

SEQ ID NO: 96801 - protein, 68 aa, Homo sapiens
MSSRKVLAIQARKRRPKREKHPKKWSTSCCFKGRRLLTAFLHEISKEVLVFFLPGSSIDQEDDSDVVS

SEQ ID NO: 96802 - protein, 416 aa, Homo sapiens
  MOD_RES (1)..(1): Any amino acid
XHPVAVASKKRKKPSRPAKTRKRQVGPQSGEVRKEAPRDETKADTDTAPASFPAPGCCENCGISFSGDGTQRQRLKTLCKDCRAQRIAFNREQRMFKSRGCGVCRGCQTQEDCGHCPICLRPPRPGLRRQWKCVQRRCLRHLAHRLRRRHQRCQRRTPLAVAPPTGKHARRKGGCDSKMAARRRPGAQPLPPPPPSQSPEPTEPHPRALAPSPPAEFIYYCVDEDELKRLLPSVWSESEDGAGSPPPYRRRKRPSSARRHHLGPTLKPTLATRTAQPDHTQAPTKQEAGGGFVLPPPGTDLVFLREGASSPVQVPGPVAASTEALLQAVDPGLPSVKQEPPDPEEDKEENKDDSASKLAPEEEAGGAGTPVITEIFSLGGTRFRDTAVWLPRYYHLALDWKCNCGYHLCCRSVLVP

SEQ ID NO: 96803 - protein, 95 aa, Homo sapiens
MATGSAQGNFTGHTKKTNGNNGTNGALVQSPSNQSALGAGGANSNGSAARVWGVATGSSSGLAHCSVSGGDGKMDTMIGDGRSQNCWGASNSNAG

SEQ ID NO: 96804 - protein, 223 aa, Homo sapiens
MPGCELPVGTCPDMCPAAERAQREREHRLHRLEVVPGCRQDPPRADPQRAVKEYSRPAAGKPRPPPSQLRPPSVLLATVRYLAGEVAESADIARAEVASFVADRLRAVLLDLALQGAGDAEAAVVLEAALATLLTVVARLGPDAARGPADPVLLQAQVQEGFGSLRRCYARGAGPHPRQPAFQGLFLLYNLEMGSRMLPLEFLGSSDPPAPPSQVAGCGHHAQ

SEQ ID NO: 96805 - protein, 80 aa, Homo sapiens
MAGQQFQYDDSGNTFFYFLTSFVGLIVIPATYYLWPRDQNAAGRVSFTQAGLELASSHPPASAPRVAGLTDLSHCVRMDF

SEQ ID NO: 96806 - protein, 16 aa, Homo sapiens
MSNPFLKQVFNKDKTF

SEQ ID NO: 96807 - protein, 147 aa, Homo sapiens
MEKQCCSHPVICSLSTMYTFLLGAIFIALSSSRILLVKYSANEENKYDYLPTTVNVCSELVKLVFCVLVSFCVIKKDHQSRNLKYASWKEFSDFMKWSIPAFLYFLDNLIVFYVLSYLQPAMAVIFSNFSIITTALLFRIVLKRRLN

SEQ ID NO: 96808 - protein, 87 aa, Homo sapiens
MQYLNIKEDCNAMAFCAKMRSSKKTEVNLEAPEPGVEVIFYLSDREPLRLGSGEYTAEELCIRAAQACQWLLSAPSLMNYKIPGDDA

SEQ ID NO: 96809 - protein, 74 aa, Homo sapiens
MSDNEDNFDGDDFDDVEEDEGLDDLENAEEVSIQPQAPTSAAQAAKSSDRMCAPVMVELEGETDPLLIAMKELK

SEQ ID NO: 96810 - protein, 1032 aa, Homo sapiens
MELLPPLPQSFLLLLLLPAKPAAGEDWQCPRTPYAASRDFDVKYVVPSFSAGGLVQAMVTYEGDRNESAVFVAIRNRLHVLGPDLKSVQSLATGPAGDPGCQTCAACGPGPHGPPGDTDTKVLVLDPALPALVSCGSSLQGRCFLHDLEPQGTAVHLAAPACLFSAHHNRPDDCPDCVASPLGTRVTVVEQGQASYFYVASSLDAAVAASFSPRSVSIRRLKADASGFAPGFVALSVLPKHLVSYSIEYVHSFHTGAFVYFLTVQPASVTDDPSALHTRLARLSATEPELGDYRELVLDCRFAPKRRRRGAPEGGQPYPVLRVAHSAPVGAQLATELSIAEGQEVLFGVFVTGKDGGPGVGPNSVVCAFPIDLLDTLIDEGVERCCESPVHPGLRRGLDFFQSPSFCPNPPGLEALSPNTSCRHFPLLVSSSFSRVDLFNGLLGPVQVTALYVTRLDNVTVAHMGTMDGRILQVELVRSLNYLLYVSNFSLGDSGQPVQRDVSRLGDHLLFASGDQVFQVPIQGPGCRHFLTCGRCLRAWHFMGCGWCGNMCGQQKECPGSWQQDHCPPKLTEFHPHSGPLRGSTRLTLCGSNFYLHPSGLVPEGTHQVTVGQSPCRPLPKDSSKLRPVPRKDFVEEFECELEPLGTQAVGPTNVSLTVTNMPPGKHFRVDGTSVLRGFSFMEPVLIAVQPLFGPRAGGTCLTLEGQSLSVGTSRAVLVNGTECLLARVSEGQLLCATPPGATVASVPLSLQVGGAQVPGSWTFQYREDPVVLSISPNCGYINSHITICGQHLTSAWHLVLSFHDGLRAVESRCERQLPEQQLCRLPEYVVRDPQGWVAGNLSARGDGAAGFTLPGFRFLPPPHPPSANLVPLKPEEHAIKFEYIGLGAVADCVGINVTVGGESCQHEFRGDMVVCPLPPSLQLGQDGAPLQVCVDGECHILGRVVRPGPDGVPQSTLLGILLPLLLLVAALATALVFSYWWRRKQLAPHSLSPQHSLPLMVWIPPLVSMEHPSPIVKMNPVCHCCGKSPSS

SEQ ID NO: 96811 - protein, 837 aa, Homo sapiens
MSWKRNYFSGGRGSVQGMFAPRSSTSIAPSKGLSNEPGQNSCFLNSALQVLWHLDIFRRSFRQLTTHKCMGDSCIFCALKGIFNQFQCSSEKVLPSDTLRSALAKTFQDEQRFQLGIMDDAAECFENLLMRIHFHIADETKEDICTAQHCISHQKFAMTLFEQCVCTSCGATSDPLPFIQMVHYISTTSLCNQAICMLERREKPSPSMFGELLQNASTMGDLRNCPSNCGERIRIRRVLMNAPQIITIGLVWDSDHSDLAEDVIHSLGTCLKLGDLFFRVTDDRAKQSELYLVGMICYYGKHYSTFFFQTKIRKWMYFDDAHVKEIGPKWKDVVTKCIKGHYQPLLLLYADPQGTPVSTQDLPPQAEFQSYSRTCYDSEDSGREPSISSDTRTDSSTESYPYKHSHHESVVSHFSSDSQGTVIYNVENDSMSQSSRDTGHLTDSECNQKHTSKKGSLIERKRSSGRVRRKGDEPQASGYHSEGETLKEKQAPRNASKPSSSTNRLRDFKETVSNMIHNRPSLASQTNVGSHCRGRGGDQPDKKPPRTLPLHSRDWEIESTSSESKSSSSSKYRPTWRPKRESLNIDSIFSKDKRKHCGYTQLSPFSEDSAKEFIPDEPSKPPSYDIKFGGPSPQYKRWGPARPGSHLLEQHPRLIQRMESGYESSERNSSSPVSLDAALPESSNVYRDPSAKRSAGLVPSWRHIPKSHSSSILEVDSTASMGGWTKSQPFSGEEISSKSELDELQEEVARRAQEQELRRKREKELEAAKGFNPHPSRFMDLDELQNQGRSDGFERSLQEAESVFEESLHLEQKGDCAAALALCNEAILNSLSRSKYC

SEQ ID NO: 96812 - protein, 946 aa, Homo sapiens
MADNLDPSMFPMQKGSLNLLRQKWESCDYQRSECHPRDSHCTIFQPQESKLLAPEGEVVSAPQSLDPTSLPYSTGEEMWSSKPEEKDSVDKSNNTREYGRPEVLKEDSLSSRRRIERFSIALDELRSVFEAPKSGNKPAEYGGKEVEIERSLCSPAFKSHPGSQLEDSVKDSDKKGKETSFDKMSPESGHSRIFEATAGPNKPESGFAEDSAARGEGVSDLHEVVSLKERMARYQAAVSRGDCRSFSANMMEESEMCAVPGGLAKVKKQFEDEITSSRNTFAQYQYQHQNRSEQEAIHSSQVGTSRSSQEMARNEQEGSKVQKIDVHGTEMVSHLEKHTEEVNQASQFHQYVQETVIDTPEDEEIPKVSTKLLKEQFEKSAQEKILYSDKEMTTPAKQIKKLLLQDKEICILCQKTVYPMECLVADKQNFHKSCFRCHHCNSKLSLGNYASLHGQIYCKPHFKQLFKSKGNYDEGFGHKQHKDRWNCKNQSRSVDFIPNEEPNMCKNIAENTLVPGDRNEHLDAGNSEGQRNDLRKLGERGKLKVIWPPSKEIPKKTLPFEEELKMSKPKWPPEMTTLLSPEFKSESLLEDVRTPENKGQRQDHFPFLQPYLQSTHVCQKEDVIGIKEMKMPEGRKDEKKEGRKNVQDRPSEAEDTKSNRKSAMDLNDNNNVIVQSAEKEKNEKTNQTNGAEVLQVTNTDDEMMPENHKENLNKNNNNNYVAVSYLNNCRQKTSILEFLDLLPLSSEANDTANEYEIEKLENTSRISELLGIFESEKTYSRNVLAMALKKQTDRAAAGSPVQPAPKPSLSRGLMVKGGSSIISPDTNLLNIKGSHSKSKNLHFFFSNTVKITAFSKKNENIFNCDLIDSVDQIKNMPCLDLREFGKDVKPWHVETTEAARNNENTGFDALSHECTAKPLFPRVEVQSEQLTVEEQIKRNRCYSDTE

SEQ ID NO: 96813 - protein, 59 aa, Homo sapiens
MEEGGRDKAPVQPQQSPAAAPGGTDEKPSGKERRDAGDKDKEQELVRRDPESRRRRLRG

SEQ ID NO: 96814 - protein, 201 aa, Homo sapiens
LQESAAVGREELDWTTNELRNGLRSIEWDLEDLEETIGIVEANPGKFKLPAGDLQERKVFVERMREAVQEMKDHMVSPTAVAFLERNNREILAGKPAAQKSPSDLLDASAVSATSRYIEEQQATQQLIMDEQDQQLEMVSGSIQVLKHMSGRVGEELDEQGIMLDAFAQEMDHTQSRMDGVLRKLAKVSHMTSALPGRLVP

SEQ ID NO: 96815 - protein, 102 aa, Homo sapiens
MAYYQEPSVETSIIKFKDQDFTTLRDHCLSMGRTFKDETFPAADSSIGQKLLQEKRLSNVIWKRPQDLPGGPPHFILDDISRFDIQQGGAVLAMWPVGGSGD

SEQ ID NO: 96816 - protein, 440 aa, Homo sapiens
MLHLHHSWTPNIDRLAEDGVKLTQHISAASLCTPSRAAFLTGRYPVRSGMVSSIGYRVLQWTGASGGLPTNETTFAKILKEKGYATGLIGKWHLGLNCESASDHCHHPLHHGFDHFYGMPFSLMGDCARWELSEKRVNLEQKLNFLFQVLALVALTLVAGKLTHLIPVSWMPVIWSALSAVLLLASSYFVGALIVHADCFLMRNHTITEQPMCFQRTTPLILQEVASFLKRNKHGPFLLFVSFLHVHIPLITMENFLGKSLHGLYGDNVEEMDWMVGRILDTLDVEGLSNSTLIYFTSDHGGSLENQLGNTQYGGWNGIYKGGTMWKVHFVTPVFQPEGAGACYGRKVCPCFGEKVVHHDPPLLFDLSRDPSETHILTPASEPVFYQVMERVQQAVWEHQRTLSPVPLQLDRLGNIWRPWLQPCCGPFPLCWCLREDDPQ

SEQ ID NO: 96817 - protein, 172 aa, Homo sapiens
MLGITSCSDQQAKEGEGLEGSSTGSSSGNHGGSGGGNGHKPGNSETSPGMFNFDTFWKNFKSKLGFINWDAINKNQVPPPSTRALLYFSRLWEDFKQNTPFLNWKAIIEGADASSLQKRAGRDDQNYNYNQHAYPTAYGGKYSVKTPAKGGVSPSSSASRVQPGLLQWVKFW

SEQ ID NO: 96818 - protein, 25 aa, Homo sapiens
MATVPGLQPLPTLEQDLEQEEILIV

SEQ ID NO: 96819 - protein, 265 aa, Homo sapiens
MEYFGTIGIGTPAQDFTVVFDTGSSNLWVPSVYCSSLACTNHNRFNPEDSSTYQSTSETVSITYGTGSMTGILGYDTVQVGGISDTNQIFGLSETEPGSFLYYAPFDGILGLAYPSISSSGATPVFDNIWNQGLVSQDLFSVYLSADDQSGSVVIFGGIDSSYYTGSLNWVPVTVEGYWQITVDSITMNGEAIACAEGCQAIVDTGTSLLTGPTSPIANIQSDIGASENSDGDMVVSCSAISSLPDIVFTINGVQYPVPPSAYIL

SEQ ID NO: 96820 - protein, 460 aa, Homo sapiens
MVLDFVTPTPLGTRWGLGGTCVNVGCIPKKLMHQAALLGQALQDSRNYGWKVEETVKHDWDRMIEAVQNHIGSLNWGYRVALREKKVVYENAYGQFIGPHRIKATNNKGKEKIYSAERFLIATGERPRYLGIPGDKEYCISSDDLFSLPYCPGKTLVVGASYVALECAGFLAGIGLDVTVMVRSILLRGFDQDMANKIGEHMEEHGIKFIRQFVPIKVEQIEAGTPGRLRVVAQSTNSEEIIEGEYNTVMLAIGRDACTRKIGLETVGVKINEKTGKIPVTDEEQTNVPYIYAIGDILEDKVELTPVAIQAGRLLAQRLYAGSTVKCDYENVPTTVFTPLEYGACGLSEEKAVEKFGEENIEVYHSYFWPLEWTIPSRDNNKCYAKIICNTKDNERVVGFHVLGPNAGEVTQGFAAALKCGLTKKQLDSTIGIHPVCAEVFTTLSVTKRSGASILQAGCG

SEQ ID NO: 96821 - protein, 214 aa, Homo sapiens
MAFQQLSGVNAVMFYAETIFEEAKFKDSSLASVVVGVIQVLFTAVAALIMDRAGRRLLLVLSGVVMVFSTSAFGAYFKLTQGGPGNSSHVAISAPVSAQPVDASVGLAWLAVGSMCLFIAGFAVGWGPIPWLLMSEIFPLHVKGVATGICVLTNWLMAFLVTKEFSSLMEVLRPYGAFWLASAFCIFSVLFTLFCVPETKGKTLEQITAHFEGR

SEQ ID NO: 96822 - protein, 751 aa, Homo sapiens
PAAAASSLERETERFRELLLYGRKKDALESAMKNGLWGHALLLASKMDSRTHARVMTRFANSLPINDPLQTVYQLMSGRMPAASTCCGDEKWGDWRPHLAMVLSNLNNNMDVESRTMATMGDTLASRGLLDAAHFCYLMAQAGFGVYTKKTTKLVLIGSNHSLPFLKFATNEAIQRTEAYEYAQSLGAETCPLPSFQVFKFIYSCRLAEMGLATQAFHYCEAIAKSILTQPHLYSPVLISQLVQMASQLRLFDPQLKEKPEEESLAAPTWLVHLQQVERQIKEGAGVWHQDGALPQQCPGTPSSEMEQLDRPGLSQPGALGIANPLLAVPAPSPEHSSPSVRLLPSAPQTLPDGPLASPARVPMFPVPLPPGPLEPGPGCVTPGPALGFLEPSGPGLPPGVPPLQERRHLLQEARSPDPGIVPQEAPVGNSLSELSEENFDGKFANLTPSRTVPDSEAPPGWDRADSGPTQPPLSLSPAPETKRPGQAAKKETKEPKKGESWFFRWLPGKKKTEAYLPDDKNKSIVWDEKKNQWVNLNEPEEEKKAPPPPPTSMPKTVQAAPPALPGPPGAPVNMYSRRAAGTRARYVDVLNPSGTQRSEPALAPADFVAPLAPLPIPSNLFVPTPDAEEPQLPDGTGREGPAAARGLANPEPAPEPKVLSSAASLPGSELPSSRPEGSQGGELSRCSSMSSLSREVSQHFNQAPGDLPAAGGPPSGAMPFYNPAQLAQACATSGSSRLGRIGQRKHLVLN

SEQ ID NO: 96823 - protein, 251 aa, Homo sapiens [sequence omitted]

SEQ ID NO: 96824 - protein, 137 aa, Homo sapiens
  MOD_RES (1)..(1): Any amino acid
XEQHSQYSKLLLASKEQVLHRVVLEEKVALEQQLAEEKHTPESCFIEAAIQELKTREEALSGLAGSRREVTGVVAALEQLVLMAPLAKESVFQPRKSLLQQGVLEYLSAFDEETTEVCSLDTPSRPLALPLVEEEEA

SEQ ID NO: 96825 - protein, 85 aa, Homo sapiens
MTAKNVGLTSTNAEVRGFIDQNLSPTKGNISFVAFPVSNTNSPTKILPKTLGPINVNVGPQMIISTPQRLTSSGSVLIGSPYTPA

SEQ ID NO: 96826 - protein, 90 aa, Homo sapiens
MLIGPDGRLIRSLGQASEADPSGVASIACSSCVRAVDGKAVCGQCERALCGQCVRTCWGCGSVACTLCGLVDCSDMYEKVLCTSCAMFET

SEQ ID NO: 96827 - protein, 107 aa, Homo sapiens
MEYDEKLARFRQAHLNPFNKQSGPRQHEQGPGEEVPDVTPEEALPELPPGEPEFRCPERVMDLGLSEDHFSRPVDGPLTAPAPNLGRVCSWPLTSSSCGRRSRSASR

SEQ ID NO: 96828 - protein, 68 aa, Homo sapiens
MAAAATLRLSAQGTVTFEDVAVNFTWEEWNLLSEAQRCLYRDVTLENLALISSLVYATRSSQMKPVAR

SEQ ID NO: 96829 - protein, 62 aa, Homo sapiens
MFCTLNTHKVDMDKLLGGQIGLEDFIFAHVKGQRKEVEVFKSEDALGLTITDNGAGYAFIKT

SEQ ID NO: 96830 - protein, 65 aa, Homo sapiens
MNFADEFAKLQDYRQAEVERLEAKVVEPLKTYGTIVKMKRDDLKATLTARNREAKQLTQLERTRQ

SEQ ID NO: 96831 - protein, 81 aa, Homo sapiens
MMEEEELEFVEELEAVLQLTPEVQLAIEQVFPSQDPLDRADFNAVEYINTLFPTEQVSRVSGFLPFSSFWHILGVMLRVLH

SEQ ID NO: 96832 - protein, 153 aa, Homo sapiens
  MOD_RES (1)..(1): Any amino acid
XKKLDCEREESTTDLPKAFHVCAAILECLEKRKISWLALFQLTESDLRLGRLLLRVAPDQHTRLLPFAFYSLLSYFHEDAAIREEAFLHVAVDMYLKLVQLFVAGDTSTVSPPAGRSLELKGQGNPVELITKARLFLLQLIPRCPKKSFSHVA

SEQ ID NO: 96833 - protein, 51 aa, Homo sapiens
MKGGNLDLNGLDHLTTARVTTAFVADGVLLCCPGWSTMARSPLTATSTSWI

SEQ ID NO: 96834 - protein, 206 aa, Homo sapiens
MYNTVWSMDRDDADWREVMMPYSTELIFYIEMDPPALPPKPPKPMTSAVPNGMKDSSVSLQDAEWYWGDISREEVNDKLRDMPDGTFLVRDASTKMQGDYTLTLRKGGNNKLIKIYHRDGKYGFSDPLTFNSVVELINHYHHESLAQYNPKLDVKLMYPVSRYQQDQLVKEDNIDAVGKKLQEYHSQYQEKSKEYDRLYEEYTRTS

SEQ ID NO: 96835 - protein, 66 aa, Homo sapiens
MSEKKQPVDLGLLEEDDEFEEFPAEDWAGLDEDEDAHVWEDNWDDDNVEDDFSNQLRDMGNVSISV

SEQ ID NO: 96836 - protein, 100 aa, Homo sapiens
MDFSSVVCLPPSVIAVNGLDGGGAGENDDEPVLVSLSAAPSPQSEAVANELQELSLQPELTLGLHPGRNPNLPPLSERKNVLQLKLQQRRTREELVSQGI

SEQ ID NO: 96837 - protein, 125 aa, Homo sapiens
MVWQIPENGLTLSLTEPVVILEGHSKRVGIVAWHPTARNVLLSAGCDNAIIIWNVGTGEALINLDDMHSDMIYNVSWNRNGSLICTASKDKKVRVIDPRKQEIVAEKEKAHEGARPMRAIFLADG

SEQ ID NO: 96838 - protein, 131 aa, Homo sapiens
MGPLQFRDVAIEFSLEEWHCLDTAQRNLYRNVMLENYRNLVFLGIVVSKPDLITCLEQGKKPLTMKKHEMVANPSETGFHHVGKGGLKLLTSDDLPASASQSTGITGMRHPARPNCVGFYVGRTDHKLWLR

SEQ ID NO: 96839 - protein, 92 aa, Homo sapiens
  MOD_RES (1)..(1): Any amino acid
XCMQPLLNYRKTFDVIVIDPPWQNKSVKRSNRYSYLSPLQIQQIPIPKLAAPNCLLVTWVTNRQKHLRFIKEELYPSWSVEVVAEWHWVKRF

SEQ ID NO: 96840 - protein, 56 aa, Homo sapiens
MDHFFIKRKRNSEVKYTEACSSSSVESGIVNSDNIEKNTDSNLQTSTSFEPHFKKK

SEQ ID NO: 96841 - protein, 37 aa, Homo sapiens
MLSRSRCVSRAFSRSLSAFQKGSPYARDQVTLTAGRL

SEQ ID NO: 96842 - protein, 115 aa, Homo sapiens
  MOD_RES (1)..(1): Any amino acid
XLALDASQHSRFGTVAVPNILLFQGAKPMARFNHTDRTLETLKIFIFNQTGIEAKKNVVVTQADQIGPLPSTLIKSVDWLLVFSLFFLISFIMYATIRTESIRWLIPGQEQEHVE

SEQ ID NO: 96843 - protein, 212 aa, Homo sapiens
MVAFLGASAVTASTGLLWKRAHAESPPCVDNLKSDIGDKGKNKDEGDVCNHEKKTADLAPHPEEKKKKRSGFRDRKVMEYENRIRAYSTPDKIFRYFATLKVISEPGEAEVFMTPEDFVRSITPNEKQPEHLGLDQYIIKRFDGKKISQEREKFADEGSIFYTLGECGLISFSDYIFLTTVLSTPQRNFEIAFKMFDLNGDGEVDMEEFEQA

SEQ ID NO: 96844 - protein, 624 aa, Homo sapiens
MGKGRAGRVGTTALPPRLKEMKSQESAAGSKLVLRCETSSEYSSLRFKWFKNGNELNRKNKPQNIKIQKKPGKSELRINKASLADSGEYMCKVISKLGNDSASANITIVESNEIITGMPASTEGAYVSSESPIRISVSTEGANTSSSTSTSTTGTSHLVKCAEKEKTFCVNGGECFMVKDLSNPSRYLCKCPNEFTGDRCQNYVMASFYKHLGIEFMEAEELYQKRVLTITGICIALLVVGIMCVVAYCKTKKQRKKLHDRLRQSLRSERNNMMNIANGPHHPNPPPENVQLVNQYVSKNVISSEHIVEREAETSFSTSHYTSTAHHSTTVTQTPSHSWSNGHTESILSESHSVIVMSSVENSRHSSPTGGPRGRLNGTGGPRECNSFLRHARETPDSYRDSPHSERYVSAMTTPARMSPVDFHTPSSPKSPPSEMSPPVSSMTVSMPSMAVSPFMEEERPLLLVTPPRLREKKFDHHPQQFSSFHHNPAHDSNSLPASPLRIVEDEEYETTQEYEPAQEPVKKLANSRRAKRTKPNGHIANRLEVDSNTSSQSSNSESETEDERVGEDTPFLGIQNPLAASLEATPAFRLADSRTNPAGRFSTQEEIQARLSSVIANQDPIAV

SEQ ID NO: 96845 - protein, 302 aa, Homo sapiens
  MOD_RES (1)..(1): Any amino acid
XYFSLSLLQIMDVDEKNQVLTTNIWLQMSWTDHYLQWNVSEYPGVKTVRFPDGQIWKPDILLYNSADERFDATFHTNVLVNSSGHCQYLPPGIFKSSCYIDVRWFPFDVQHCKLKFGSWSYGGWSLDLQMQEADISGYIPNGEWDLVGIPGKRSERFYECCKEPYPDVTFTVTMRRRTLYYGLNLLIPCVLISALALLVFLLPADSGEKISLGITVLLSLTVFMLLVAEIMPATSDSVPLIAQYFASTMIIVGLSVVVTVIVLQYHHHDPDGGKMPKWGTLKNSFAKWSRHHKRCGNLMLEA

SEQ ID NO: 96846 - protein, 55 aa, Homo sapiens
MRRGRLLEIALGFTVLLASYTSHGADANLEAGNVKETRASRAKRRGGGGHDALKG

SEQ ID NO: 96847 - protein, 919 aa, Homo sapiens
MDPDPQAGVQVGMRVVRGVDWKWGQQDGGEGGVGTVVELGRHGSPSTPDRTVVVQWDQGTRTNYRAGYQGAHDLLLYDNAQIGVRHPNIICDCCKKHGLRGMRWKCRVCLDYDLCTQCYMHNKHELAHAFDRYETAHSRPVTLSPRQGLPRIPLRGIFQGAKVVRGPDWEWGSQDGGEGKPGRVVDIRGWDVETGRSVASVTWADGTTNVYRVGHKGKVDLKCVGEAAGGFYYKDHLPRLGKPAELQRRVSADSQPFQHGDKVKCLLDTDVLREMQEGHGGWNPRMAEHHSFWVGDVVRVIGDLDTVKRLQAGHGEWTDDMAPALGRVGKVVKVFGDGNLRVAVAGQRWTFSPSCLVAYRPEEDANLDVAERARENKSSLSVALDKLRAQKSDPEHPGRLVVEVALGNAARALDLLRRRPEQVDTKNQGRTALQVAAYLGQVELIRLLLQARAGVDLPDDEGNTALHYAALGNQPEATRVLLSAGCRADAINSTQSTALHVAVQRGFLEVVRALCERGCDVNLPDAHSDTPLHSAISAGTGASGIVEVLTEVPNIDVTATNSQGFTLLHHASLKGHALAVRKILARARQLVDAKKEDGFTALHLAALNNHREVAQILIREGRCDVNVRNRKLQSPLHLAVQQAHVGLVPLLVDAGCSVNAEDEEGDTALHVALQRHQLLPLVADGAGGDPGPLQLLSRLQASGLPGSAELTVGAAVACFLALEGADVSYTNHRGRSPLDLAAEGRVLKALQGCAQRFRERQAGGGAAPGPRQTLGTPNTVTNLHVGAAPGPEAAECLVCSELALLVLFSPCQHRTVCEECARRMKKCIRCQVVVSKKLRPDGSEVASAAPAPGPPRQLVEELQSRYRQMEERITCPICIDSHIRLVFQCGHGACAPCGSALSACPICRQPIRDRIQIFV

SEQ ID NO: 96848 - protein, 120 aa, Homo sapiens
MARTKQTARKSTGGKAPRKQLATKAARKSAPSTGGVKKPHRYRPGTVALREIRRYQKSTELLIRKLPFQRLVREIAQDFKTDLRFQSAAIGALQVKWRQVRPIWLAFLKTPTCVLSMPNV

SEQ ID NO: 96849 - protein, 56 aa, Homo sapiens
MNEAMATDSPRRPSRCTGGVVVRPQAVTEQSYMESVVTFLQDVVPQASRKQLIGWV

SEQ ID NO: 96850 - protein, 113 aa, Homo sapiens
MSPESKKLFNIIILGVAFMFMFTAFQTCGNVAQTVIRSLNRTDFHGSGYTSMAIIYGVFSASNLITPSVVAIVGPQLSMFASGLFYSMYIAVFIQPFPWSFYTASVFIGIAAA

SEQ ID NO: 96851 - protein, 259 aa, Homo sapiens
MAILVGTDQDFYSLLGVSKTASSREIRQAFKKLALKLHPDKNPNNPNAHGDFLKINRAYEVLKDEDLRKKYDKYGEKGLEDNQGGQYESWNYYRYDFGIYDDDPEIITLERREFDAAVNSGELWFVNFYSPGCSHCHDLAPTWRDFAKEVDGLLRIGAVNCGDDRMLCRMKGVNSYPSLFIFRSGMAPVKYHGDRSKESLVSFAMQHVRSTVTELWTGNFVNSIQTAFAAGIGWLITFCSKGGGFFVPRLFDFTDTTQA

SEQ ID NO: 96852 - protein, 223 aa, Homo sapiens
MNPDLRRERDSASFNPELLTHILDGSPEKTRRRREIENMILNDPDFQHEDLNFLTRSQRYEVAVRKSAIMVKKMREFGIADPDEIMWFKKLHLVNFVEPVGLNYSMFIPTLLNQGTTAQKEKWLLSSKGLQIIGTYAQTEMGHVLCTEGGLSLWIFTWACSCPPCFTRQLRSSRSASSCPPGTWRSLALMPRQRWVMELTFEAWKPQPRMTLKPRSSFSTVLL

SEQ ID NO: 96853 - protein, 209 aa, Homo sapiens; identical to SEQ ID NO: 43167

SEQ ID NO: 96854 - protein, 70 aa, Homo sapiens
MEDFRGIAEESFPSFLTNSLFGNSGILENVTLSSNLGLPVAVSTLARDRSSTDNRIWQHRFSKDIYELHF

SEQ ID NO: 96855 - protein, 66 aa, Homo sapiens
  MOD_RES (1)..(1): Any amino acid
XVEGHEPGCRSIGALMAHVDAVIRHCAGRLGSYVINGRTKLREKYSPVFTVYMGPGQWWFYVDTKQ

SEQ ID NO: 96856 - protein, 648 aa, Homo sapiens
MSGSRKEFDVKQILKIRWRWFGHQASSPNSTVDSQQGEFWNRGQTGANGGRKFLDPCSLQLPLASIGYRRSSQLDFQNSPSWPMASTSEVPAFEFTAEDCGGAHWLDRPEVDDGTSEEENESDSSSCRLVLSSVSDYFAAMFTNDVREARQEEIKMEGVEPNSLWSLIQYAYTGRLELKEDNIECLLSTACLLQLSQVVEACCKFLMKQLHPSNCLGIRSFADAQGCTDLHKVAHNYTMEHFMEVIRNQEFVLLPASEIAKLLASDDMNIPNEETILNALLTWVRHDLEQRRKDLSKLLAYIRLPLLAPQFLADMENNVLFRDDIECQKLIMEAMKYHLLPERRPMLQSPRTKPRKSTVGTLFAVGGMDSTKGATSIEKYDLRTNMWTPVANMNGRRLQFGVAVLDDKLYVVGGRDGLKTLNTVECYNPKTKTWSVMPPMSTHRHGLGVAVLEGPMYAVGGHDGWSYLNTVERWDPQARQWNFVATMSTPRSTVGVAVLSGKLYAVGGRDGSSCLKSVECFDPHTNKWTLCAQMSKRRGGVGVTTWNGLLYAIGGHDAPASNLTSRLSDCVERYDPKTDMWTAVASMSISRDAVGVCLLGDKLYAVGGYDGQAYLNTVEAYDPQTNEWTQVAPLCLGRAGACVVTVKL

SEQ ID NO: 96857 - protein, 138 aa, Homo sapiens
MAEEQGRERDSVPKPSVLFLHPDLGVGGAERLVLDAALALQARGCSVKIWTAHYDPGHCFAESRELPVRCAGDWLPRGLGWGGRGAAVCAYVRMVFLALYVLFLADEEFDVVVCDQAICIPLSLCSEPGHTVLSSVMC

SEQ ID NO: 96858 - protein, 212 aa, Homo sapiens
  MOD_RES (1)..(1): Any amino acid
XSAPNDILDLRLPPEPVLNANTVCLTLPGLSRRQMEVCVRHPDVAASAIQGIQIAIHECQHQFRDQRWNCSSLETRNKIPYESPIFSRGSDGEHAAEVQVPRHVRQLPAQDVLAGDARVPHRGGAAAQPLPPRHAHPAAQPQRRPAGAGPSGGTLAGSGRSRAAPTGQPRRPGLLRKVSRLLRARAAPGLGGHRGPPVQQEQRRLGWLRQHV

SEQ ID NO: 96859 - protein, 201 aa, Homo sapiens
  MOD_RES (1)..(1): Any amino acid
XAVCVPHVGPPPACHLNALHGPVCGTGGQVQLSCGATIPGSSAAMVPHFGVINGKLAHSPRLIMSGVLSSIGKIFKEEGLLGFFVGLIPHLLGDVVFLWGCNLLAHFINAYLVDDSFSQALAIRSYTKFVMGIAVSMLTYPFLLVGDLMAVNNCGLQAGLPPYSPVFKSWIHCWKYLSVQGQLFRGSSLLFRRVSSGSCFA

SEQ ID NO: 96860 - protein, 454 aa, Homo sapiens
MNRIRIHVLPTNRGRITPVPRSQEPLSCAFTHRPCSHPRLEGQEFCIKHILEDKNAPFKQCSYISTKNGKRCPNAAPKPEKKDGVSFCAEHVRRNALALHAQMKKTNPGPVGETLLCQLSSYAKTELGSQTPESSRSEASRILDEDSWSDGEQEPITVDQTWRGDPDSEADSIDSDQEDPLKHAGVYTAEEVALIMREKLIRLQSLYIDQFKRLQHLLKEKKRRYLHNRKVEHEALGSSLLTGPEGLLAKERENLKRLKCLRRYRQRYGVEALLHRQLKERRMLATDGAAQQAHTTRSSQRCLAFVDDVRCSNQSLPMTRHCLTHICQDTNQVLFKCCQGSEEVPCNKPVPVSLSEDPCCPLHFQLPPQMYKPEQDLDVVGDGMQCPPSPLLFDPSLTLEDHLVKEIAEDPGQMQMAGDGCRSQGSRNSEKASAPLSQSGLATANGKPEPTSIS

SEQ ID NO: 96861 - protein, 108 aa, Homo sapiens
MRQRLLPSVTSLLLVALLFPGSSQARHVNHSATEALGELRERAPGQGTNGFQLLRHAVKRDLLPPRTPPYQGDVPPGIRNTICHMQQGICRLFFCHSGTGQQHRQRCG

SEQ ID NO: 96862 - protein, 137 aa, Homo sapiens
  MOD_RES (1)..(1): Any amino acid
XWESGCTVIVMLTPLVEDGVKQCDRYWPDEGASLYHVYEVNLVSEHIWCEDFLVRSFYLKNVQTQETRTLTQFHFLSWPAEGTPASTRPLLDFRRKVNKCYRGRSCPIIVHCSDGAGRTGTYILIDMVLNRMAKGPV

SEQ ID NO: 96863 - protein, 116 aa, Homo sapiens
  MOD_RES (1)..(1): Any amino acid
XSELMDFFTISEVCLHQFQYMGKRYIARNQEGLGPIVHDRKSQTLPVSRNRTGMMHARLQQLGSLDNSLTFNHSYGHSDADVLHQSLLEANIATEVCLTALDTLSLFTLAFKNQLL

SEQ ID NO: 96864 - protein, 147 aa, Homo sapiens
  MOD_RES (1)..(1): Any amino acid
XYILSGSRDATLLLWYWNGKCSGIGDNPGSETAAPRAILTGHDYEVTCAAVCAELGLVLSGSQEGPCLIHSMNGDLLRTLEGPENCLKPKLIQASREGHCVIFYENGLFCTFSVNGKLQATMETDDNIRVHHFWHGFRKHCAILQRL

SEQ ID NO: 96865 - protein, 150 aa, Homo sapiens
MDRFLVKGAQGGLLRKQEEQEPTGEEPAVLGGDKESTRKRPRREAPGNGGHSAGPSWRHIRAEGLDCSYTVLFGKAEADEIFQELEKEVEYFTGALARVQVFGKWHSVPRKQATYGDAGLTYTFSGLTLSPKPWIPVLERIRDHVSGVTG

SEQ ID NO: 96866 - protein, 383 aa, Homo sapiens
MDSKKRSSTEAEGSKERGLVHIWQAGSFPITPERLPGWGGKTVLQAALGVKHGVLLTEDGEVYSFGTLPWRSGPVEICPSSPILENALVGQYVITVATGSFHSGAVTDNGVAYMWGENSAGQCAVANQQYVPEPNPVSIADSEASPLLAVRILQLACGEEHTLALSISREIWAWGTGCQLGLITTAFPVTKPQKVEHLAGRVVLQVACGAFHSLALVQCLPSQDLKPVPERCNQCSQLLITMTDKEDHVIISDSHCCPLGVTLTESQAENHASTALSPSTETLDRQEEVFENTLVANDQSVATELNAVSAQITSSDAMSSQQNVMGTTEISSARNIPSYPDTQAVNEYLRKLSDHSVREDSEHGEKPVPSQMGSCSVTQAGVQ

SEQ ID NO: 96867 - protein, 234 aa, Homo sapiens
MGLSAVVPAAGYTFAVWSAMLSVAANVCGWVYNNVGGRLHLRLALYVYEYLLHIGAQKSAQTFLSEIRWEKNITLGEPPGFLHSWWCVFWDLYCAAPDRREACEHSGEAKAFQDYSAAAAPSPVMGSMAPGDTMAAGSMAAGFFQPFMSPRFPGGPRPTLRMPSQPPAGLPGSQPLLPGAMEPSPRAQGHPSMGGPMQRVTPPRGMASVGPQSYGGGMRPPPNSLAGPGLPAMN

SEQ ID NO: 96868 - protein, 369 aa, Homo sapiens
MYGKGKSNSSAVPSDSQAREKLALYVYEYLLHVGAQKSAQTFLSEIRWEKNITLGEPPGFLHSWWCVFWDLYCAAPERRETCEHSSEAKAFHDYSAAAAPSPVLGNIPPGDGMPVGPVPPGFFQPFMSPRYPGGPRPPLRIPNQALGGVPGSQPLLPSGMDPTRQQGHPNMGGPMQRMTPPRGMVPLGPQSDPWLSLQNYGGAMRPPLNALGGPGMPGMNMGPGGGRPWPNPTNANSIPYSSASPGNYVGPPGGGGPPGTPIMPSPADSTNSGDNMYTLMNAVPPGPNRPNFPMGPGSDGPMGGLGGMESHHMNGSLGSGDMDSISKNSPNNMSLSNQPGTPRDDGEMGGNFLNPFQSESYSPSMTMSV

SEQ ID NO: 96869 - protein, 100 aa, Homo sapiens
MALPALGLDPWSLLGLFLFQLLQLLLPTTTAGGGGQGPMPRVRYYAGDERRALSFFHQKGLQDFDTLLLSGDGNTLYVGAREAILALDIQDPGVPRLKNM

SEQ ID NO: 96870 - protein, 198 aa, Homo sapiens
  MOD_RES (1)..(1): Any amino acid
XAEQQSKAVFGRSVSTGKLSDQQGKTPICRHQGSTDSLNTERPMDIGSPPHSAAAPTCTHMFLRTRTTSVGPSNSGGSLCAMSGRVCVGSPPGPGFGSSPPGAEAAPSLRYVPYGASPPSLEGLITFEAPELPEETLMEREHTDTLRHLNVMLMFTECVLDLTAMRGGNPELCTSAVSLYQIQESVVVDQISQLSKDW

SEQ ID NO: 96871 - protein, 97 aa, Homo sapiens
HGPLGAPEGDHDLLTCGQCQMNFPLGDILIFIEHKRKQCNGSLCLEKAVDKPPSPSPIEMKKASNPVEVGIQVTPEDDDCLSTSSRGICPKQEHIAD

SEQ ID NO: 96872 - protein, 53 aa, Homo sapiens
MESETEPEPVTLLVKSPNQRHRDLELSGDRGWSVGHLKAHLSRVYPERPRTRG

SEQ ID NO: 96873 - protein, 161 aa, Homo sapiens
KDPILHVLRQYLDPAQRGVRVLEVASGSGQHAAHFARAFPLAEWQPSDVDQRCLDSIAATTQAQGLTNVKAPLHLDVTWGWEHWGGILPQSLDLLLCINMAHVSPLRCTEVCGEPSMGVCRGTTHPAWGQLGCQICPHHSRGTQNGGFGTQPSWRTWERPV

SEQ ID NO: 96874 - protein, 335 aa, Homo sapiens
MACLNPVPKLYRSVIEDVIEGVRNLFAEEGIEEQVLKDLKQLWETKVLQSKATEDFFRNSIQSPLFTLQLPHSLHQTLQSSTGWIPLVNEYSSLVIPAGRTLPSFTTAELGTSNSSANFTFPGYPIHVPAGVTLQTVSGHLYKVNVPIMVTETSGRAGILQHPIQQVFQQLGQPSVIQTSVPQLNPWSLQATTEKSQRIETVLQQPAILPSGPVDRKHLENATSDILVSPGNEHKIVPEALLCHQESSHYISLPGVVFSPQVSQTNSNVESVLSGSASMAQNLHDESLSTSPHGALHQHVTDIQLHILKNRMYGCDSVKQPRNIEEPSNIPVSEK

SEQ ID NO: 96875 - protein, 56 aa, Homo sapiens
MQPRTPLVLCVLLSQVLLLTSAEDLDCTPGFQQKVFHINQPAEFIEDQSILNYVFY

SEQ ID NO: 96876 - protein, 75 aa, Homo sapiens
MSVIFFACVVRVRDGLPLSASTDFYHTQDFLEWRRRLKSLALRLAQYPGRGSAEGCDFSIQLLDILKEAEERQSQ

SEQ ID NO: 96877 - protein, 251 aa, Homo sapiens
MCRLISDFQRHSISDDDSGCASEEYAWVPPGLKPEQVYQFFSCLPEDKVPYVNSPGEKYRIKQLLHQLPPHDSEAQYCTALEEEEKKELRAFSQQRKRENLGRGIVRIFPVTITGAICEECGKQIGGGDIAVFASRAGLGACWHPQCFVCTTCQELLVDLIYFYHVGKVYCGRHHAECLRPRCQACDEIIFSPECTEAEGRHWHMDHFCCFECEASLGGQRYVMRQSRPHCCACYEARHAEYCDGCGEHIG

SEQ ID NO: 96878 - protein, 264 aa, Homo sapiens
MTSTFNPRECKLSKQEGQNYGFFLRIEKDTEGHLVRVVEKCSPAEKAGLQDGDRVLRINGVFVDKEEHMQVVDLVRKSGNSVTLLVLDGDSYEKAVKTRVDLKELGQSQKEQGLSDNILSPVMNGGVQTWTQPRLCYLVKEGGSYGFSLKTVQGKKGVYMTDITPQGVAMRAGVLADDHLIEVNGENVEDASHEEVVEKVKKSGSRVMFLLVDKETDKRHVEQKIQFKRETASLKLLPHQPRIVEMKKGSNGYGFYLRAGSEQK

SEQ ID NO: 96879 - protein, 111 aa, Homo sapiens
MPIESDDMEHKTLKITDFGLAREWHKTTQMSAAGTYAWMAPEVIKASTFSKGSDVWSFGVLLWELLTGEVPYRGIDCLAVAYGVAVNKLTLPIPSTCPEPFAQLMADCWAQ

SEQ ID NO: 96880 - protein, 584 aa, Homo sapiens
MELPNYSRQLLQQLYTLCKEQQFCDCTISIGTIYFRAHKLVLAAASLLFKTLLDNTDTISIDASVVSPEEFALLLEMMYTGKLPVGKHNFSKIISLADSLQMFDVAVSCKNLLTSLVNCSVQGQVVRDVSAPSSETFRKEPEKPQVEILSSEGAGEPHSSPELAATPGGPVKAETEEAAHSVSQEMSVNSPTAQESQRNAETPAETPTTAEACSPSPAVQTFSEAKKTSTEPGCERKHYQLNFLLENEGVFSDALMVTQDVLKKLEMCSEIKGPQKEVILNCCEGRTPKETIENLLHRMTEEKTLTAEGLVKLLQAVKTTFPNLGLLLEKLQKSATLPSTTVQPSPDDYGTELLRRYHENLSEIFTDNQILLKMISHMTSLAPGEREVMEKLVKRDSGSGGFNSLISAVLEKQTLSATAIWQLLLVVQETKTCPLDLLMEEIRREPGADAFFRAVTTPEHATLETILRHNQLILEAIQQKIEYKLFTSEEEHLAETVKEILSIPSETASPEASLRAVLSRAMEKSVPAIEICHLLCSVHKSFPGLQPVMQELAYIGVLTKEDGEKETWKVSNKFHLEANNKEDE

SEQ ID NO: 96881 - protein, 9 aa, Homo sapiens
MRKTLASVI

SEQ ID NO: 96882 - protein, 101 aa, Homo sapiens
MRGYLVAIFLSAVFLYYVLHCILWGTNVYWVAPVEMKRRNKIQPCLSKPAFASLLRFHQFHPFLCAADFRKIASLYGSDKFDLPYGMRTSAYPVKSVWWLV

SEQ ID NO: 96883 - protein, 96 aa, Homo sapiens
MSGSQNNDKRQFLLERLLDAVKQCQIRFGGRKEIASDSDSRVTCLCAQFEAVLQHGLKRSRGLALTAAAIKQAAGFASKTETDGASLCCPVWSAVA

SEQ ID NO: 96884 - protein, 780 aa, Homo sapiens
MEPWSSRWKTKRWLWDFTVTTLALTFLFQAREVRGAAPVDVLKALDFHNSPEGISKTTGFCTNRKNSKGSDTAYRVSKQAQLSAPTKQLFPGGTFPEDFSILFTVKPKKGIQSFLLSIYNEHGIQQIGVEVGRSPVFLFEDHTGKPAPEDYPLFRTVNIADGKWHRVAISVEKKTVTMIVDCKKKTTKPLDRSERAIVDTNGITVFGTRILDEEVFEGDIQQFLITGDPKAAYDYCEHYSPDCDSSAPKAAQAQEPQIDEYAPEDIIEYDYEYGEAEYKEAESVTEGPTVTEETIAQTEKKKSNFKKKMRTVATKSKEKSKKFTPPKSEKFSSKKKKSYQASAKAKLGVKANIVDDFQEYNYGTMESYQTEAPRHVSGTNEPNPVEEIFTEEYLTGEDYDSQRKNSEDTLYENKEIDGRDSDLLVDGDLGEYDFYEYKEYEDKPTSPPNEEFGPGVPAETDITETSINGHGAYGEKGQKGEPAVVEPGMLVEGPPGPAGPAGIMGPPGLQGPTGPPGDPGDRGPPGRPGLPGADGLPGPPGTMLMLPFRYGGDGSKGPTISAQEAQAQAILQQARIALRGPPGPMGLTGRPGPVGGPGSSGAKGESGDPGPQGPRGVQGPPGPTGKPGKRGRPGADGGRGMPGEPGAKGDRGFDGLPGLPGDKGHRGERGPQGPPGPPGDDGMRGEDGEIGPRGLPGEAGPRGLLGPRGTPGAPGQPGMAGVDGPPGPKGNMGPQGEPGPPGQQGNPGPQGLPGPQGPIGPPGEKMCCNLSFGILIPLQK

SEQ ID NO: 96885 - protein, 243 aa, Homo sapiens
MATGQKLMRAVRVFEFGGPEVLKLRSDIAVPIPKDHQVLIKVHACGVNPVETYIRSGTYSRKPLLPYTPGSDVAGVIEAVGDNASAFKKGDRVFTSSTISGGYAEYALAADHTVYKLPEKLDFKQGAAIGIPYFTAYRALIHSACVKAGESVLVHGASGGVGLAACQIARAYGLKILGTAGTEEGQKIVLQNGAHEVFNHREVNYIDKIKKYVGEKGIDIIIEMLANVNLSKDLSLLSHGGRV

SEQ ID NO: 96886 - protein, 53 aa, Homo sapiens
MQESQTKSMFVSRALEKILADKEVKRPQHSQLRRACQVALETHRIRAHHWQRP

SEQ ID NO: 96887 - protein, 481 aa, Homo sapiens
MTTEEAMPEKAKCPTLEITKQDFFQEAKTLIAQHYEKINENKVQGTSINVFRKKHQKPKSGKYIPLEIDKKVTRDVVQEHRAALRRICFPKELSKSEHLQEPPQRISFKEPHIFSRRERCRPIDLITKGQVKLDKIMTIIEPVSKKMETAKQQHFEESRNRMLELLYPFPVHLYLQPGTSNLELLKEPDKAFYDWRGFVLTRSFRLACDSRRVSFSQSSSIFRDYYSKTFKTLIKKERQPIKPEPKSQPRIKGTPNKTDKLDSKVKRIGPHIEIFQVFRERKKFMITPKLIRMVTVMQAHVRGWLERKRLQRVMTKALDHGPDMKAVINMYGRLIHRVRYRRGLWRTRQILNLAELEEWMDRKKFYEIMFAKREDWPKIERNELPNFFSDCGHFPTQKQVDDTWDLVHQDGKEKYSELIKKSKAIEMLFTLYPPEGAHVPDSTLLKSTWLRPIVNGEEGYRYIVFHLKLSEGDLYLFVFVV

SEQ ID NO: 96888 - protein, 521 aa, Homo sapiens
MANLLKTVVTGCSCPLLSNLGSCKGLRVKKDFLRTFYTHQELWCKAPVKPGIPYKQLTVGVPKEIFQNEKRVALSPAGVQNLVKQGFNVVVESGAGEASKFSDDHYRVAGAQIQGAKEVLASDLVVKVRAPMVNPTLGVHEADLLKTSGTLISFIYPAQNPELLNKLSQRKTTVLAMDQVPRVTIAQGYDALSSMANIAGYKAVVLAANHFGRFFTGQITAAGKVPPAKILIVGGGVAGLASAGAAKSMGAIVRGFDTRAAALEQFKSLGAEPLEVDLKESGEGQGGYAKEMSKEFIEAEMKLFAQQCKEVDILISTALIPGKKAPVLFNKEMIESMKEGSVVVDLAAEAGGNFETTKPGELYIHKGITHIGYTDLPSRMATQASTLYSNNITKLLKAISPDKDNFYFDVKDDFDFGTMGHVIRGTVVMKDGKVIFPAPTPKNIPQGAPVKQKTVAELEAEKAATITPFRKTMSTASAYTAETGLHRVAQAGLELLSSSDPPALASHSAEITFIYIKCIEK

SEQ ID NO: 96889 - protein, 707 aa, Homo sapiens
MTERRRDELSEEINNLREKVMKQSEENNNLQSQVQKLTEENTTLREQVEPTPEDEDDDIELRGAAAAAAPPPPIEEECPEDLPEKFDGNPDMLAPFMAQCQIFMEKSTRDFSVDRVRVCFVTSMMTGRAARWASAKLERSHYLMHNYPAFMMEMKHVFEDPQRREVAKRKIRRLRQGMGSVIDYSNAFQMIAQDLDWNEPALIDQYHEGLSDHIQEELSHLEVAKSLSALIGQCIHIERRLARAAAARKPRSPPRALVLPHIASHHQVDPTEPVGGARMRLTQEEKERRRKLNLCLYCGTGGHYADNCPAKASKSSPGKLPGPAVEGPSATGPEIIRSPQDDASSPHLQVMLQIHLPGRHTLFVRAMIDSGASGNFIDHEYVAQNGIPLRIKDWPILVEAIDGRPIASGPVVHETHDLIVDLGDHREVLSFDVTQSPFFPVVLGVRWLSTHDPNITWSTRSIVFDSEYCRYHCRMYSPIPPSLPPPAPQPPLYYPVDGYRVYQPVRYYYVQNVYTPVDEHVYPDHRLVDPHIEMIPGAHSIPSGHVYSLSEPEMAALRDFVARNVKDGLITPTIAPNGAQVLQVKRGWKLQVSYDCRAPNNFTIQNQYPRLSIPNLEDQAHLATYTEFVPQIPGYQTYPTYAAYPTYPVGFAWYPVGRDGQGRSLYVPVMITWNPHWYRQPPVPQYPPPQPPPPPPPPPPPPSYSTL

SEQ ID NO: 96890 - protein, 807 aa, Homo sapiens
MDDVLPLMPWETLLAQGSPQGSPDLPAGQRKQQPQGDRAQGLASESWKLLEVPIIHITPSSDGESPACTPTPRRRQQQRMPDPQSLSQDSTTPHSGRSTPSSSPSLRKRLQLLPPSRPPPEPEPGTMVEKGSDSSSEKGGVPGTPSTQSLGSRNFIRNSKKMQSWYSMLSPTYKQRNEDFRKLFSKLPEAERLIVDYSCALQREILLQGRLYLSENWICFYSNIFRWETTISIQLKEVTCLKKEKTAKLIPNAIQICTESEKHFFTSFGARDRCFLLIFRLWQNALLEKTLSPRELWHLVHQCYGSELGLTSEDEDYVSPLQLNGLGTPKEVGDVIALSDITSSGAADRSQEPSPVGSRRGHVTPNLSRASSDADHGAEEDKEEQVDSQPDASSSQTVTPVAEPPSTEPTQPDGPTTLGPLDLLPSEELLTDTSNSSSSTGEEADLAALLPDLSGRLLINSVFHVGAERLQQMLFSDSPFLQGFLQQCKFTDVTLSPWSGDSKCHQRRVLTYTIPISNPLGPKSASVVETQTLFRRGPQAGGCVVDSEVLTQGIPYQDYFYTAHRYCILGLARNKARLRVSSEIRYRKQPWSLVKSLIEKNSWSGIEDYFHHLERELAKAEKLSLEEGGKDARGLLSGLRRRKRPLSWRAHGDGPQHPDPDPCARAGIHTSGSLSSRFSEPSVDQGPGAGIPSALVLISIVLIILIALNVLLFYRLWSLERTAHTFESWHSLALAKGKFPQTATEWAEILALQKQFHSVEVHKWRQILRASVELLDEMKFSLEKLHQGITVSDPPFDTQPRPDDSFS

SEQ ID NO: 96891 - protein, 93 aa, Homo sapiens
MTSLTQRSSGLVQRRTEASRNAADKERAAGGGAGSSEDDAQSRRDEQDDDDKGDSKETRLTLMEEVLLLGLKDREVRARRAGRGAAARGPGAR

SEQ ID NO: 96892 - protein, 112 aa, Homo sapiens
MNVTSLFSFTSPAVKRLLGWKQGDEEEKWAEKAVDALVKKLKKKKGAMEELEKALSCPGQPSNCVTIPRSLDGRLQVSHRKGLPHVIYCRVWRWPDLQSHHELKPLECCEFP

SEQ ID NO: 96893 - protein, 144 aa, Homo sapiens
MEPITFTARKHLLSNEVSVDFGLQLVGSLPVHSLTTMPMLPWVVAEVRRLSRQSTRKEPVTKQVRLCVSPSGLRCEPEPGRSQQWDPLIYSSIFECKPQRVHKLIHNSHDPSYFACLIKEDAVHRQSICYVFKADDQTKCSSSL

SEQ ID NO: 96894 - protein, 140 aa, Homo sapiens
  MOD_RES (1)..(1): Any amino acid
XFKLVLLGSGSVGAFFTKVVDVGATSLKLEIWDTAGQEKYHSVCHLYFRGANAALLVYDITRKDSFLKAQQWLKDLEEELHPGEVLVMLVGNKTDLSQEREVTFQDEDRVNSCRQVADGETPHTLEAGAGEDPTQGLDRR

SEQ ID NO: 96895 - protein, 36 aa, Homo sapiens
MLEGAELYFNVDHGYLEGLVRGCKASLLTQQDYINL

SEQ ID NO: 96896 - protein, 1100 aa, Homo sapiens
MARFAFFKVLPGDYEILATHPTWALKEASTTVRVTNSNANAASPLIVAGYNVSGSVRSDGEPMKGVKFLLFSSLVTKEDVLGCNVSPVPGFQPQDESLVYLCYTVSREDGSFSFYSLPSGGYTVIPFYRGERITFDVAPSRLDFTVEHDSLKIEPVFHVMGFSVTGRVLNGPEGDGVPEAVVTLNNQIKVKTKADGSFRLENITTGTYTIHAQKEHLYFETVTIKIAPNTPQLADIIATGFSVCGQISIIRFPDTVKQMNKYKVVLSSQDKDKSLVTVETDAHGSFCFKAKPGTYKVQVMVPEAETRAGLTLKPQTFPLTVTNRPMMDVAFVQFLASVSGKVSCLDTCGDLLVTLQSLSRQGEKRSLQLSGKVNAMTFTFDNVLPGKYKISIMHEDWCWKNKSLEVEVLEDDMSAVEFRQTGYMLRCSLSHAITLEFYQDGNGRENVGIYNLSKGVNRFCLSKPGVYKVTPRSCHRFEQAFYTYDTSSPSILTLTAIRHHVLGTITTDKMMDVTVTIKSSIDSEPALVLGPLKSVQELRREQQLAEIEARRQEREKNGNEEGEERMTKPPVQEMVDELQGPFSYDFSYWARSGEKITVTPSSKELLFYPPSMEAVVSGESCPGKLIEIHGKAGLFLEGQIHPELEGVEIVISEKGASSPLITVFTDDKGAYSVGPLHSDLEYTVTSQKEGYVLTAVEGTIGDFKAYALAGVSFEIKAEDDQPLPGVLLSLSGGLFRSNLLTQDNGILTFSNLSPGQYYFKPMMKEFRFEPSSQMIEVQEGQNLKITITGYRTAYSCYGTVSSLNGEPEQGVAMEAVGQNDCSIYGEDTVTDEEGKFRLRGLLPGCVYHVQLKAEGNDHIERALPHHRVIEVGNNDIDDVNIIVFRQINQFDLSGNVITSSEYLPTLWVKLYKSENLDNPIQTVSLGQSLFFHFPPLLRDGENYVVLLDSTLPRSQYDYILPQVSFTAVGYHKHITLIFNPTRKLPEQDIAQGSYIALPLTLLVLLAGYNHDKLIPLLLQLTSRLQGVRALGQAASDNSGPEDAKRQAKKQKTRRTLRLQGEFQLTWCLVPWRGTLGIHLFSSLPFASEILLETTATCIHY

SEQ ID NO: 96897 - protein, 58 aa, Homo sapiens
MAPAGRPGAKKGILERLESGEVVIGDGSDRTPRRSSSTSHGILESRIKCHADFYLFCQ

SEQ ID NO: 96898 - protein, 156 aa, Homo sapiens
MIQDKEVTLEYVSSLDFWYCKRCKANIGGHRSSCSFCKNPREVTEAKQELITYPQPQKTSIPAPLEKQPNQPLRPADKEPEPRKREEGQESRLGHQKREAERYLPPSRREGPTFRRDRERESWSGETRQDGESKTIMLKRIYRSTPPEVIVEVLEP

SEQ ID NO: 96899 - protein, 103 aa, Homo sapiens
MWCIVLFSLLAWVYAEPTMYGEILSPNYPQAYPSEVEKSWDIEVPEGYGIHLYFTHLDIELSENCAYDSVQIISGDTEEGRLCGQRSSNNPHSPIVEEFQVPY

SEQ ID NO: 96900 - protein, 203 aa, Homo sapiens [sequence omitted]

SEQ ID NO: 96901 - protein, 642 aa, Homo sapiens
MLWDKVLPSGIGHTTNCFLRVEGTDGHEAFLLTEGSEEKRSAKTVNQLAHALHQDKQLHAGSLVSVMWPNSKCPLLKDDLVLMDSPGIDVTTELDSWIDKFCLDADVFVLVANSESTLMQTEKHFFHKVSERLSRPNIFILNNRWDASASEPEYMEEVRRQHMERCTSFLVDELGVVDRSQAGDRIFFVSAKEVLNARIQKAQGMPEGGGALAEGFQVRMFEFQNFERRFEECISQSAVKTKFEQHTVRAKQIAEAVRLIMDSLHMAAREQQVYCEEMREERQDRLKFIDKQLELLAQDYKLRIKQITEEVERQVSTAMAEEIRRLSVLVDDYQMDFHPSPVVLKVYKNELHRHIEEGLGRNMSDRCSTAITNSLQTMQQDMIDGLKPLLPVSVRSQIDMLVPRQCFSLNYDLNCDKLCADFQEDIEFHFSLGWTMLVNRFLGPKNSRRALMGYNDQVQRPIPLTPANPSMPPLPQGSLTQEEFMVSMVTGLASLTSRTSMGILVVGGVVWKAVGWRLIALSFGLYGLLYVYERLTWTTKAKERAFKRQFVEHASEKLQLVISYTGSNCSHQVQQELSGTFAHLCQQVDVTRENLEQEIAAMNKKIEVLDSLQSKAKLLRNKAGWLDSELNMFTHQYLQPSR

SEQ ID NO: 96902 - protein, 80 aa, Homo sapiens
MPRNSGAGYGCPHGDPSMLDSRETPQESRQDMIVRTTQEKLKTRGGAVDDSGRWAGAPAHRPQLPTASLHCASDVLRGPG

SEQ ID NO: 96903 - protein, 752 aa, Homo sapiens
MELDMAMEPDRKAAVSHWQQQSYLDSGIHSGATTTAPSLSGKGNPEEEDVDTSQVLYEWEQGFSQSFTQEQVADIDGQYAMTRAQRVRAAMFPETLDEGMQIPSTQFDAAHPTNVQRLAEPSQMLKHAVVNLINYQDDAELATRAIPELTKLLNDEDQVVVNKAAVMVHQLSKKEASRHAIMRSPQMVSAIVRTMQNTNDVETARCTAGTLHNLSHHREGLLAIFKSGGIPALVKMLGSPVDSVLFYAITTLHNLLLHQEGAKMAVRLAGGLQKMVALLNKTNVKFLAITTDCLQILAYGNQESKLIILASGGPQALVNIMRTYTYEKLLWTTSRVLKVLSVCSSNKPAIVEAGGMQALGLHLTDPSQRLVQNCLWTLRNLSDAATKQEGMEGLLGTLVQLLGSDDINVVTCAAGILSNLTCNNYKNKMMVCQVGGIEALVRTVLRAGDREDITEPAICALRHLTSRHQEAEMAQNAVRLHYGLPVVVKLLHPPSHWPLIKGAIPRLVQLLVRAHQDTQRRTSMGGTQQQFVEGVRMEEIVEGCTGALHILARDVHNRIVIRGLNTIPLFVQLLYSPIENIQRVAAGVLCELAQDKEAAEAIEAEGATAPLTELLHSRNEGVATYAAAVLFRMSEDKPQDYKKRLSVELTSSLFRTEPMAWNETADLGLDIGAQGEPLGYRQDDPSYRSFHSGGYGQDALGMDPMMEHEMGGHHPGADYPVDGLPDLGHAQDLMDGLPPGDSNQLAWFDTDL

SEQ ID NO: 96904 - protein, 624 aa, Homo sapiens
MAEAAAAAGGTGLGAGASYGSAADRDRDPDPDRAGRRLRVLSGHLLGRPREALSTNECKARRAASAATAAPTATPAAQESGTIPKKRQEVMKWNGWGYNDSKFIFNKKGQIELTGKRYPLSGMGLPTFKEWIQNTLGVNVEHKTTSKASLNPSDTPPSVVNEDFLHDLKETNISYSQEADDRVFRAHGHCLHEIFLLREGMFERIPDIVLWPTCHDDVVKIVNLACKYNLCIIPIGGGTSVSYGLMCPADETRTIISLDTSQMNRILWVDENNLTAHVEAGITGQELERQLKESGYCTGHEPDSLEFSTVGGWVSTRASGMKKNIYGNIEDLVVHIKMVTPRGIIEKSCQGPRMSTGPDIHHFIMGSEGTLGVITEATIKIRPVPEYQKYGSVAFPNFEQGVACLREIAKQRCAPASIRLMDNKQFQFGHALKPQVSSIFTSFLDGLKKFYITKFKGFDPNQLSVATLLFEGDREKVLQHEKQVYDIAAKFGGLAAGEDNGQRGYLLTYVIAYIRDLALEYYVLGESFETSAPWDRVVDLCRNVKERITRECKEKGVQFAPFSTCRVTQTYDAGACIYFYFAFNYRGISDPLTVFEQTEAAAREEILANGGSLSHHHGGILFWE

SEQ ID NO: 96905 - protein, 222 aa, Homo sapiens
MDSAGQDINLNSPNKGLLSDSMTDVPVDTGVAARTPAVEGLTEAEEEELRAELTKVEEEIVTLRQVLAAKERHCGELKRRLGLSTLGELKQNLSRSWHDVQVSSAYVKTSEKLGEWNEKVTQSDLYKKTQETLSQAGQKTSAALSTVGSAISRKLGDMSLRLWVTERTAVTTSLPQRGVVTSPCRIPHLSKPVVASPAAEHTQPSLSITAAALFSGAASQGG

SEQ ID NO: 96906 - protein, 1277 aa, Homo sapiens
  MOD_RES (1)..(1): Any amino acid
XHSIISEPAEQSPKVLLVPQTAPADPSLGQNIANPLIPFSDEMDHTASQNAQDLIGIPHLGVSGSSTKWHSELSPTEGPHSAGSSTPGFLSPMAELSHPSPPPPALGSLLQLPDGSPSWSMLEVASGPASTQQIKAGVPGRVHNGVSLPTFKNTETATHEAEPPLFQTAESGAIEMTSRKLASATANDSANPLHLSAAPENSRGPALSAEHTSSLVPSLHITTLGQEQAILSGAVPASPSTGTADFPSILTFLQPTENHASPSPVPEMPTLPAEGSDGSPPATRDLLLSSKVPNLLSTSWTFPRWKKDSVTAILGKNEEANVTIPLQAFPRKEVLSLHTVNGFVSDFSTGSVSSPIITAPRTNPLPSGPPLPSILSIQATQTVFPSLGFSSTKPEAYAAAVDHSGLPASASKQVRASPSSMDVYDSLTIGDMKKPATTDVFWSSLSAETGSLSTESIISGLQQQTNYDLNGHTISTTSWETHLAPTAPPNGLTSAADAIKSQDFKDTAGHSVTAEGFSIQDLVLGTSIEQPVQQSDMTMVGSHIDLWPTSNNNHSRDFQTAEVAYYSPTTRHSVSHPQLQLPNQPAHPLLLTSPGPTSTGSLQEMLSDGTDTGSEISSDINSSPERNASTPFQNILGYHSAAESSISTSVFPRTSSRVLRASQHPKKWTGAATNAADTVSSKVQPTAAAAVTLFLRKSSPPALSAALVAKGTSSSPLAVASGPAKSSSMTTLAKNVTNKAASGPKRTPGAVHTAFPFTPTYMYARTGHTTSTHTAMQGNMDTASGLLSTTYLPRKPQAMHTGLPNPTNLEMPRASTPRPLTVTAALTSITASVKATRLPPLRAENTDAVLPAASAAVVTTGKMASNLECQMSSKLLVKTVLFLTQRRVQISESLKFSIAKGLTQALRKAFHQNDVSAHVDILEYSHNVTVGYYATKGKLVYLPAVVIEMLGVYGVSNVTADLKQHTPHLQSVAVLASPWNPQPAGYFQLKTVLQFVSQADNIQSCKFAQTMEQRLQKAFQDAERKVLNTKSNLTIQIVSTSNASQAVTLVYVVGNQSTFLNGTVASSLLSQLSAELVGFYLTYPPLTIAEPLEYPNLDISETTRDYWVITVLQGVDNSLVGLHNQSFARVMEQRLAQLFMMSQQQGRRFKRATTLGSYTVQMVKMQRVPGPKDPAELTYYTLYNGKPLLGTAAAKILSTIDSQRMALTLHHVVLLQADPVVKNPPNNLWIIAAVLAPIAVVTVIIIIITAVLCRKNKNDFKPDTMINLPQRAKQVAQ

SEQ ID NO: 96907 - protein, 437 aa, Homo sapiens
MSDVTIVKEGWVQKRECQLMKTERPKPNTFIIRCLQWTTVIERTFHVDTPEEREEWTEAIQAVADRLQRQEEERMNCSPTSQIDNIGEEEMDASTTHHKRKTMNDFDYLKLLGKGTFGKVILVREKASGKYYAMKILKKEVIIAKDEVAHTLTESRVLKNTRHPFLTSLKYSFQTKDRLCFVMEYVNGGELFFHLSRERVFSEDRTRFYGAEIVSALDYLHSGKIVYRDLKLENLMLDKDGHIKITDFGLCKEGITDAATMKTFCGTPEYLAPEVLEDNDYGRAVDWWGLGVVMYEMMCGRLPFYNQDHEKLFELILMEDIKFPRTLSSDAKSLLSGLLIKDPNKRLGGGPDDAKEIMRHSFFSGVNWQDVYDKKLVPPFKPQVTSETDTRYFDEEFTAQTITITPPEKYDEDGMDCMDNERRPHFPQFSYSASGRE

SEQ ID NO: 96908 - protein, 77 aa, Homo sapiens
MFQRLSSLFFSTPSPPEDPDCPRAFVSEEDEVDGWLIIDLPDSYAAPPSPGAAPAPAGRPPPAPSLMDESWFVTPPA

SEQ ID NO: 96909 - protein, 165 aa, Homo sapiens
  MOD_RES (1)..(1): Any amino acid
XPRALCHTNQSLGRGLATTRGRGSDGNGPTGNGDHPNFSLSEGRAFGSLAAQPITSCLSVPAPPFSLGKLQDGLLHITTCSFVAPWNSLSLAQRRGFTKTYTVGCEECTVFPCLSIPCKLQSGTHCLWTDQLLQGSEKGFQSRHLACLPREPGLCTWQSLRSQIA

SEQ ID NO: 96910 - protein, 332 aa, Homo sapiens
REGGDVGAMGLGPVFLLLAGIFPFAPPGAAAEPHSLRYNLTVLSWDGSVQSGFLAEVHLDGQPFLRYDRQKCRAKPQGQWAEDVLGNKTWDRETRDLTGNGKDLRMTLAHIKDQKEGLHSLQEIRVCEIHEDNSTRSSQHFYYDGELFLSQNVETEEWTVPQSSRAQTLAMNVRNFLKEDAMKTKTHYHAMHADCLQELRRYLESSVVLRRRVPPMVNVTRSEASEGNITVTCRASSFYPRNITLTWRQDGVSLSHDTQQWGDVLPDGNGTYQTWVATRICQGEEQRFTCYMEHSGNHSTHPVPSGKVLVLQSHWQTFHVSAVAACCCYFCY

SEQ ID NO: 96911 - protein, 133 aa, Homo sapiens
EQCPLQLNNPFNEYSKFDGKHCSSLCRIIMNKCFLQSLALNSSLQRKSLKTLQKSMKPPRNVANSEKGHVGTTATKKIDVYLPLHSSQDRLLPMTVVTMASARVQDLIGLICWQYTSEGREPKLNDNVSAYCL

SEQ ID NO: 96912 - protein, 375 aa, Homo sapiens
  MOD_RES (1)..(1): Any amino acid
XSAVDNILLKLAKFKIGFLRLGQIQKVHPAIQQFTEQEICRSKSIKSLALLEELYNSQLIVATTCMGINHPIFSRKIFDFCIVDEASQISQPICLGPLFFSRRFVLVGDHQQLPPLVLNREARALGMSESLFKRLEQNKSAVVQLTVQYRMNSKIMSLSNKLTYEGKLECGSDKVANAVINLRHFKDVKLELEFYADYSDNPWLMGVFEPNNPVCFLNTDKVPAPEQVEKGGVSNVTEAKLIVFLTSIFVKAGCSPSDIGIIAPYRQQLKIINDLLARSIGMVEVNTVDKYQGRDKSIVLVSFVRSNKDGTVGELLKDWRRLNVAITRAKHKLILLGCVPSLNCYPPLEKLLNHLNSEKLISFFFCIWSHLIALL

SEQ ID NO: 96913 - protein, 76 aa, Homo sapiens
MPVRPGQLFSATLLLRHNFTASLLTLRIKVKKGLHVTAARPAQPTLWTAKLDRFKGSRHHTTLITCHRAGLTEPDS

SEQ ID NO: 96914 - protein, 509 aa, Homo sapiens
MWELVALLLLTLAYLFWPKRRCPGAKYPKSLLSLPLVGSLPFLPRHGHMHNNFFKLQKKYGPIYSVRMGTKTTVIVGHHQLAKEVLIKKGKDFSGRPQMATLDIASNNRKGIAFADSGAHWQLHRRLAMATFALFKDGDQKLEKIICQEISTLCDMLATHNGQSIDISFPVFVAVTNVISLICFNTSYKNGDPELNVIQNYNEGIIDNLSKDSLVDLVPWLKIFPNKTLEKLKSHVKIRNDLLNKILENYKEKFRSDSITNMLDTLMQAKMNSDNGNAGPDQDSELLSDNHILTTIGDIFGAGVETTTSVVKWTLAFLLHNPQVKKKLYEEIDQNVGFSRTPTISDRNRLLLLEATIREVLRLRPVAPMLIPHKANVDSSSIGEFAVDKGTEVIINLWALHHNEKEWHQPDQFMPERFLNPAGTQLISPSVSYLPFGAGPRSCIGEILARQELFLIMAWLLQRFDLEVPDDGQLPSLEGIPKVVFLIDSFKVKIKVRQAWREAQAEGST

SEQ ID NO: 96915 - protein, 112 aa, Homo sapiens
MNGRADFREPNAEVPRPIPHIGPDYIPTEEERRVFAECNDESFWFRSVPLAATSMLITQGLISKGILSSHPKYGSIPKLILACIMGYFAGKLSYVKTCQEKFKKLENSPLGE

SEQ ID NO: 96916 - protein, 110 aa, Homo sapiens
GSYCVFSNQGGLVHPKTSIEDQDELSSLLQVPLVAGTVNRGSEVIAAGMVVNDWCAFCGLDTTSTELSVVESVFKLNEAQPSTIATSMRDSLIDRLGNSRRPWSTLRISV

SEQ ID NO: 96917 - protein, 100 aa, Homo sapiens
  MOD_RES (1)..(1): Any amino acid
XTHGGLGLRMELLGCEVEAPTAGPTTPNGNLVDECDDDQANCHSGTGDDFQLTGGTTVLATEKPTVIDSTIQSGSRFFKHHHKQQSMRPQNLHHNSILLL

SEQ ID NO: 96918 - protein, 54 aa, Homo sapiens
MGPVMPPSKKPESSGISVSSGLSQCYGGSGFSKALQEDDDLDFSLPDIRLEEGA

SEQ ID NO: 96919 - protein, 321 aa, Homo sapiens
MTEQMTLRGTLKGHNGWVTQIATTPQFPDMILSASRDKTIIMWKLTRDETNYGIPQRALRGHSHFVSDVVISSDGQFALSGSWDGTLRLWDLTTLSLDLEIKPSSYGIPWVCANTLSSLILSPRLECSSAISAHCKLCFPGSRHSPASASRVAGTTGACHQDESHSEWVSCVRFSPNSSNPIIVSCGWDKLVKVWNLANCKLKTNHIGHTGYLNTVTVSPDGSLCASGGKDGQAMLWDLNEGKHLYTLDGGDIINALCFSPNRYWLCAATGPSIKIWDLEGKIIVDELKQEVISTSSKAEPPQCTSLAWSADGQTLFAGYT

SEQ ID NO: 96920 - protein, 217 aa, Homo sapiens
MMPAERRLPLSFVLDVLEGRAQHPGVLYVQKQCSNLPSELPQLLPDLESHVPWASEALGKMPDAVNFWLGEAAAVTSLHKDHYENLYCVVSGEKHFLFHPPSDRPFIPYELYTPATYQLTEEGTFKVVDEEAMEKVPWIPLDPLAPDLARYPSYSQAQALRCTVRAGEMLYLPALWFHHVQQSQGCIAVNFWYDMEYDLKYSYFQLLDSLTKASGLD

SEQ ID NO: 96921 - protein, 141 aa, Homo sapiens
MAVLAALLRSGARSRSPLLRRLVQEIRYVERSYVSKPTLKEVVIVSATRTPIGSFLGSLSLLPATKLGSIAIQGAIEKAGIPKEEVKEAYMGNVLQGGEGQAPTRQAVLGAGCDGGRWDGEHVQCSICNEQRINTIWWGKA

SEQ ID NO: 96922 - protein, 68 aa, Homo sapiens
MFRKKKKKRPEISAPQNFQHRVHTSFDPKEGKFVGLPPQWQNILDTLRRPKPVVDPSRITRVQLQPMK

SEQ ID NO: 96923 - protein, 872 aa, Homo sapiens
MSSMWSEYTIGGVKIYFPYKAYPSQLAMMNSILRGLNSKQHCLLESPTGSGKSLALLCSALAWQQSLSGKPADEGVSEKAEVQLSCCCACHSKDFTNNDMNQGTSRHFNYPSTPPSERNGTSSTCQDSPEKTTLAAKLSAKKQASIYRDENDDFQVEKKRIRPLETTQQIRKRHCFGTEVHNLDAKVDSGKTVKLNSPLEKINSFSPQKPPGHCSRCCCSTKQGNSQESSNTIKKDHTGKSKIPKIYFGTRTHKQIAQITRELRRTAYSGVPMTILSSRDHTCVHPEVVGNFNRNEKCMELLDGKNGKSCYFYHGVHKISDQHTLQTFQGMCKAWDIEELVSLGKKLKACPYYTARELIQDADIIFCPYNYLLDAQIRESMDLNLKEQVVILDEAHNIEDCARESASYSVTEVQLRFARDELDSMVNNNIRKKDHEPLRAVCCSLINWLEANAEYLVERDYESACKIWSGNEMLLTLHKMGITTATFPILQGHFSAVLQKEEKISPIYGKEEAREVPVISASTQIMLKGLFMVLDYLFRQNSRFADDYKIAIQQTYSWTNQIDISDKNGLLVLPKNKKRSRQKTAVHVLNFWCLNPAVAFSDINGKVQTIVLTSGTLSPMKSFSSELGVTFTIQLEANHIIKNSQIMSSKFIIYVVACARVSSLKVWVGTIGSGPKGRNLCATFQNTETFEFQDEVGALLLSVCQTVSQGILCFLPSYKLLEKLKERWLSTGLWHNLELVKTVIVEPQGGEKTNFDELLQVYYDAIKYKGEKDGALLVAVCRGKVSEGLDFSDDNARAVITIGIPFPNVKDLQLTSATAEGTNGYAQSWVSYSKMADAALTTATDETVDIYPRNLLSPSTALVLHSTEVECY

SEQ ID NO: 96924 - protein, 243 aa, Homo sapiens
MPVWGGGNKCGACGRTVYHAEEVQCDGRSFHRCCFLCMVCRKNLDSTTVAIHDEEIYCKSCYGKKYGPKGYGYGQGAGTLNMDRGERLGIKPESIPSCIKESCSQKQVICIYFNFTAPWRPDVMKLNGREMCCVNHERCFSCAIVQPHRPTTNPNTSKFAQKYGGAEKCSRCGDSVYAAEKIIGAGKPWHKNCFRCAKCGKSLESTTLTEKEGEIYCKGCYAKNFGPKGFGYGQGAGALVHAQ

SEQ ID NO: 96925 - protein, 171 aa, Homo sapiens
  MOD_RES (1)..(1): Any amino acid
XGVAKGGKEILLSADHIIIATGGRPRYPTHIEGALEYGITSDDIFWLKESPGKTLVVGASYVALECAGFLTGIGLDTTIMMRSIPLRGFDQQMSSMVIEHMASHGTRFLRGCAPSRVRRLPDGQLQVTWEDSTTGKEDTGTFDTVLWAIGLPHPAGCQAGWPLPSAPREQP

SEQ ID NO: 96926 - protein, 1232 aa, Homo sapiens
PKMDALIIPVTMEVPCDSRGQRMWWAFLASSMVTFFGGLFIILLWRTLKYLWTVCCHCGGKTKEAQKINNGSSQADGTLKPVDEKEEAVAAEVGWMTSVKDWAGVMISAQTLTGRVLVVLVFALSIGALVIYFIDSSNPIESCQNFYKDFTLQIDMAFNVFFLLYFGLRFIAANDKLWFWLEVNSVVDFFTVPPVFVSVYLNRSWLGLRFLRALRLIQFSEILQFLNILKTSNSIKLVNLLSIFISTWLTAAGFIHLVENSGDPWENFQNNQALTYWECVYLLMVTMSTVGYGDVYAKTTLGRLFMVFFILGGLAMFASYVPEIIELIGNRKKYGGSYSAVSGRKHIVVCGHITLESVSNFLKDFLHKDRDDVNVEIVFLHNISPNLELEALFKRHFTQVEFYQGSVLNPHDLARVKIESADACLILANKYCADPDAEDASNIMRVISIKNYHPKIRIITQMLQYHNKAHLLNIPSWNWKEGDDAICLAELKLGFIAQSCLAQGLSTMLANLFSMRSFIKIEEDTWQKYYLEGVSNEMYTEYLSSAFVGLSFPTVCELCFVKLKLLMIAIEYKSANRESRSRKRILINPGNHLKIQEGTLGFFIASDAKEVKRAFFYCKACHDDITDPKRIKKCGCKRLIYSKMSIYKRMRRACCFDCGRSERDCSCMSGRVRGNVDTLERAFPLSSVSVNDCSTSFRAFEDEQPSTLSPKKKQRNGGMRNSPNTSPKLMRHDPLLIPGNDQIDNMDSNVKKYDSTGMFHWCAPKEIEKVILTRSEAAMTVLSGHVVVCIFGDVSSALIGLRNLVMPLRASNFHYHELKHIVFVGSIEYLKREWETLHNFPKVSILPGTPLSRADLRAVNINLCDMCVILSANQNNIDDTSLQDKECILASLNIKSMQFDDSIGVLQANSQGFTPPGMDRSSPDNSPVHGMLRQPSITTGVNIPIITELVNDTNVQFLDQDDDDDPDTELYLTQPFACGTAFAVSVLDSLMSATYFNDNILTLIRTLVTGGATPELEALIAEENALRGGYSTPQTLANRDRCRVAQLALLDGPFADLGDGGCYGDLFCKALKTYNMLCFGIYRLRDAHLSTPSQCTKRYVITNPPYEFELVPTDLIFCLMQFDHNAGQSRASLSHSSHSSQSSSKKSSSVHSIPSTANRQNRPKSRESRDKQNATRMNRMGQEKKWFTDEPDNAYPRNIQIKPMSTHMANQINQYKSTSSLIPPIREVEDEC

SEQ ID NO: 96927 - protein, 219 aa, Homo sapiens
  MOD_RES (1)..(1): Any amino acid
XLINIESFSSRVVSLSEYRQSLHTYLRSKMSQVAPSLSALIGEAVGARLIAHAGSLTNLAKYPASTVQILGAEKALFRALKTRGNTPKYGLIFHSTFIGRAAAKNKGRISRYLANKCSIASRIDCFSEVPTSVFGEKLREQVEERLSFYETGEIPRKNLDVMKEAMVQAEEAAAEITRKLEKQEKKRLKKEKKRLAALALASSENSSSTPEECEEGDRC

SEQ ID NO: 96928 - protein, 287 aa, Homo sapiens
  MOD_RES (1)..(1): Any amino acid
XLEKFKALRIIVRIGSGFDNIDIKSAGDLGRVGQAVALRAKAFGFNVLFYDPYLSDGVERALGLQRVSTLQDLLFHSDCVTLHCGLNEHNHHLINDFTVKQMRQGAFLVNTARGGLVDEKALAQALKEGRIRGAALDVHESEPFSFSQGPLKDAPNLICTPHAAWYSEQASIEMREEAAREIRRAITGRIPDSLKNCVNKDHLTAATHWASMDPAVVHPELNGAAYRYPPGVVGVAPTGIPAAVEGIVPSAMSLSHGLPPVAHPPHAPSPGQTVKPEADRDHASDQL

SEQ ID NO: 96929 - protein, 59 aa, Homo sapiens
MRDAGDPSPPNKMLRRSDSPENKYSDSTGHSKAKNVHTHRVRERDGGTSYSPQENSHNH

SEQ ID NO: 96930 - protein, 65 aa, Homo sapiens
MNPSMKQKQEEIKENIKNSSVPRRTLKMIQPSASGSLVGRENELSAGLSKRKHRNDHLTSTTSSP

SEQ ID NO: 96931 - protein, 124 aa, Homo sapiens
ILEVGCGSGAISLSLLSQLPQSRVIAVDKREAAISLTHENAQSYEDPAALDGGEEGMDIITHILALAPRLLKDSGSIFLEVDPRHPELVSSWLQSRPDLYLNLVAVRRDFCGRPRFLHIRRSGP

SEQ ID NO: 96932 - protein, 102 aa, Homo sapiens
MKENVASATVFTLLLFLNTCLLNGQLPPGKPEIFKCRSPNKETFTCWWRPGTDGGLPTNYSLTYHREGETLMHECPDYITGGPNSCHFGKQYTSMWRTYIMM

SEQ ID NO: 96933 - protein, 249 aa, Homo sapiens
RIKKEKEKPNSAHRNSSASYGDDPTAQSLQDVSDEQVLVLFEQMLLDMNLNEEKQQPLREKDIIIKREMVSQYLYTSKAGMSQKESSKSAMMYIQELRSGLRDMPLLSCLESLRVSLNNNPVSWVQTFGAEGLASLLDILKRLHDEKEETAGSYDSRNKHEIIRCLKAFMNNKMESRSVAQAGVLWLDLGSLQAPHPGFMPFSCLSLPSSWDYRHPPPRPVWNQDHVGDRRRNPTAGQSHGSCCSQHDD

SEQ ID NO: 96934 - protein, 165 aa, Homo sapiens
MKTGRPELTPIAIMAGRLLVQRLFGGSSDLMDYDNVPTTVFTPLEYGCVGLSEEEAVARHGQEHVEVYHAHYKPLEFTVAGRDASQCYVKMVCLREPPQLVLGLHFLGPNAGEVTQGFALGIKCGASYAQVMRTVGIHPTCSEEVVKLRISKRSGLDPTVTGCCG

SEQ ID NO: 96935 - protein, 255 aa, Homo sapiens
  MOD_RES (1)..(1): Any amino acid
XDRNKLAQTLPPTQLPPSGTKCLESLLGSVPPPCPGLHSLRELPDPVLSEEVVEGIAAGIEAALWDLTQGTNGRYKTKYRSLLFNLRDPRNLDLFLKVVHGDVTPYDLVRMSSMQLAPQELARWRDQEEKRGPQMFMDCSPQALPIASEDTTGQHDHHFLDPNCHICKDWEPSNELLGSFEAAKSCGDNIFQKALSQTPMPAPEMPKTRELSPTEPQDRVPPSGLHVPAAPTKALPCLPPWEGVLDMFSIKRFRA

SEQ ID NO: 96936 - protein, 122 aa, Homo sapiens
MKASGRGRWPGRAPQSSTGRHGVGVSGRGPGCWVLRPTAQWSVEDEEEAVHEQCQHERDRQLQAQDEEGGGHVPERPKQEMLLSLKPSEAPELDEDEGFGDWSQRPEQRQQHEGAQGALDSG

SEQ ID NO: 96937 - protein, 25 aa, Homo sapiens
MTQESFASASSTEPSPAGRERSSSC

SEQ ID NO: 96938 - protein, 115 aa, Homo sapiens
QAAHEQNQVLNTNSRYLHDNIVDYAQRLSETLPEQLCVFYFLNSGSEANDLALRLARHYTGHQDVVVLDHAYHGHLSSLIDISPYKFRNLDGQKEWVHVVCTAQLNNSDMLSSLG

SEQ ID NO: 96939 - protein, 152 aa, Homo sapiens
MMAAAPIQQNGTHTGVPIDLDPPDSRKRPLEAPPEAGSTKRTNTGEDGQYFLKVLIPSYAAGSIIGKGGQTIVQLQKETGATIKLSKSKDFYPGTTERVCLIQGTVEALNAVHGFIAEKIREMPQNVAKTEPVSILQPQTTVNPDRIKQVSV

SEQ ID NO: 96940 - protein, 93 aa, Homo sapiens
MVGAGISTPSGIPDFRSPGSGLYSNLQQYDLPYPEAIFELPFFFHNPKPFFTLAKELYPGNYKPNVTHYFLRLLHDKGLLLRLYTQNIDGLER

SEQ ID NO: 96941 - protein, 14 aa, Homo sapiens
MTCCEGWTSCNGFS

SEQ ID NO: 96942 - protein, 531 aa, Homo sapiens
MNKNTSTVVSPSLLEKDPAFQMITIAKETGLGLKVLGGINRNEGPLVYIQEIIPGGDCYKDGRLKPGDQLVSVNKESMIGVSFEEAKSIITGAKLRLESAWEIAFIRQKSDNIQPENLSCTSLIEASGEYGPQASTLSLFSSPPEILIPKTSSTPKTNNDILSSCEIKTGYNKTVQIPITSENSTVGLSNTDVASAWTENYGLQEKISLNPSVRFKAEKLEMALNYLGIQPTKEQHQALRQQVQADSKGTVSFGDFVQVARNLFCLQLDEVNVGAHEISNILDSQLLPCDSSEADEMERLKCERDDALKEVNTLKEAKAVVEETRALRSRIHLAEAAQRQAHGMEMDYEEVIRLLEAKITELKAQLADYSDQNKESVQDLKKRIMVLDCQLRKSEMARKTFEASTEKLLHFVEAIQEVFSDNSTPLSNLSERRAVLASQTSLTPLGRNGRSIPATLALESKELVKSVRALLDMDCLPYGWEEAYTADGIKYFINHVTQTTSWIHPVMSVLNLSRSEENEEDCSRELPNQKS

SEQ ID NO: 96943 - protein, 129 aa, Homo sapiens
MRRRVHQINGHKFMATYLRQPTYCSHCREFIWGVFGKQGYQCQVCTCVVHKRCHHLIVTACTCQNNINKVDSKIAEQRFGINIPHKFSIHNYKVPTFCDHCGSLLWGIMRQGLQCKICKMNVHIRCQAN

SEQ ID NO: 96944 - protein, 1532 aa, Homo sapiens
MSLSFCGNNISSYNINDGVLQNSCFVDALNLVPHVFLLFITFPILFIGWGSQSSKVQIHHNTWLHFPGHNLRWILTFALLFVHVCEIAEGIVSDSRRESRHLHLFMPAVMGFVATTTSIVYYHNIETSNFPKLLLALFLYWVMAFITKTIKLVKYCQSGLDISNLRFCITGMMVILNGLLMAVEINVIRVRRYVFFMNPQKVKPPEDLQDLGVRFLQPFVNLLSKATYWWMNTLIISAHKKPIDLKAIGKLPIAMRAVTNYVCLKDAYEEQKKKVADHPNRTPSIWLAMYRAFGRPILLSSTFRYLADLLGFAGPLCISGIVQRVNETQNGTNNTTGISETLSSKEFLENAYVLAVLLFLALILQRTFLQASYYVTIETGINLRGALLAMIYNKILRLSTSNLSMGEMTLGQINNLVAIETNQLMWFLFLCPNLWAMPVQIIMGVILLYNLLGSSALVGAAVIVLLAPIQYFIATKLAEAQKSTLDYSTERLKKTNEILKGIKLLKLYAWEHIFCKSVEETRMKELSSLKTFALYTSLSIFMNAAIPIAAVLATFVTHAYASGNNLKPAEAFASLSLFHILVTPLFLLSTVVRFAVKAIISVQKLNEFLLSDEIGDDSWRTGESSLPFESCKKHTGVQPKTINRKQPGRYHLDSYEQSTRRLRPAETEDIAIKVTNGYFSWGSGLATLSNIDIRIPTGQLTMIVGQVGCGKSSLLLAILGEMQTLEGKVHWSNVNESEPSFEATRSRNRYSVAYAAQKPWLLNATVEENITFGSPFNKQRYKAVTDACSLQPDIDLLPFGDQTEIGERGINLSGGQRQRICVARALYQNTNIVFLEGILKFLQDDKRTLVLVTHKLQYLTHADWIIAMKDGSVLREGTLKDIQTKDVELYEHWKTLMNRQDQELEKDMEADQTTLERKTLRRAMYSREAKAQMEDEDEEEEEEEDEDDNMSTVMRLRTKMPWKTCWRYLTSGGFFLLILMIFSKLLKHSVIVAIDYWLATWTSEYSINNTGKADQTYYVAGFSILCGAGIFLCLVTSLTVEWMGLTAAKNLHHNLLNKIILGPIRFFDTTPLGLILNRFSADTNIIDQHIPPTLESLTRSTLLCLSAIGMISYATPVFLVALLPLGVAFYFIQKYFRVASKDLQELDDSTQLPLLCHFSETAEGLTTIRAFRHETRFKQRMLELTDTNNIAYLFLSAANRWLEVRTDYLGACIVLTASIASISGSSNSGLVGLGLLYALTITNYLNWVVRNLADLEVQMGAVKKVNSFLTMESENYEGTMDPSQVPEHWPQEGEIKIHDLCVRYENNLKPVLKHVKAYIKPGQKVGICGRTGSGKSSLSLAFFRMVDIFDGKIVIDGIDISKLPLHTLRSRLSIILQDPILFSGSIRFNLDPECKCTDDRLWEALEIAQLKNMVKSLPGGLDAVVTEGGENFSVGQRQLFCLARAFVRKSSILIMDEATASIDMATENILQKVVMTAFADRTVVTIAHRVHTILTADLVIVMKRGNILEYDTPESLLAQENGVFASFVRADM

SEQ ID NO: 96945 - protein, 653 aa, Homo sapiens
MSSETPTSRQLSEYLKHAKGRTRTAIRNGQVWEESLKRLRQKASLTNVTDPSLDLTSLSLEVGCGAPAPVVRCDPCSPYRTITGDCNNRRKPALGAANRALARWLPAEYEDGLSLPFGWTPGKTRNGFPLPLAREVSNKIVGYLNEEGVLDQNRSLLFMQWGQIVDHDLDFAPDTELGSSEYSKAQCDEYCIQGDNCFPIMFPPNDPKAGTQGKCMPFFRAGFVCPTPPYKSLAREQINALTSFLDASFVYSSEPSLASRLRNLSSPLGLMAVNQEVSDHGLPYLPYDSKKPSPCEFINTTARVPCFLAGDSRASEHILLATSHTLFLREHNRLARELKRLNPQWDGEKLYQEARKILGAFVQIITFRDYLPILLGDHMQKWIPPYQGYSESVDPRISNVFTFAFRFGHLEVPSSMFRLDENYQPWGPEPELPLHTLFFNTWRMVKDGGIDPLVRGLLAKKSKLMKQNKMMTGELRNKLFQPTHRIHGFDLAAINTQRCRDHGQPGYNSWRAFCDLSQPQTLEELNTVLKSKMLAKKLLGLYGTPDNIDIWIGAIAEPLVERGRVGPLLACLLGKQFQQIRDGDRFWWENPGVFTNEQKDSLQKMSFSRLVCDNTRITKVPRDPFWANSYPYDFVDCSAIDKLDLSPWASVKN

SEQ ID NO: 96946 - protein, 176 aa, Homo sapiens
MLSLKLPQLLQVHQVPRVFWEDGIMSGYRRPTSSALDCVLSSFQMTNETVNIWTHFLPTWYFLWRLLALAGGPGFRAEPYHWPLLVFLLPACLYPFASCCAHTFSSMSPRMRHICYFLDYGALSLYSLVSWSWKALGSVRSSAQEPSPIHSCSTTSHSFIGSGCAGAGATAVGRRP

SEQ ID NO: 96947 - protein, 137 aa, Homo sapiens
MRLTRCQAALAAAITLNLLVLFYVSWLQHQPRNSRARGPRRASAAGPRVTVLVREFEAFDNAVPELVDSFLQQDPAQPVVVAADTLPYPPLALPRIPNVRLALLQPALDRPAAASRPETYVATEFVALVPDGARAEA

SEQ ID NO: 96948 - protein, 145 aa, Homo sapiens
MSGRSGKKKMSKLSRSARAGVIFPVGRLMRYLKKGTFKYRISVGAPVYMAAVIEYLAAPCSEKSCWASPDHQRDSQHQQGIAPLQEGESWKHRDKEPGGKAEPPGSPELAGGLGPSGNSRIGRQCREGQQEGPDSPETHLAGSCQ

SEQ ID NO: 96949 - protein, 139 aa, Homo sapiens
MSALGSPVRAYDFLLKFLLVGDSDVGKGEILASLQDGAAESPYGHPAGIDYKTTTILLDGRRVKLQLWDTSGQGRFCTIFRSYSRGAQGVILVYDIANRWSFDGIDRWIKEIDESRSRSWPGSCCCGMGWTGSGGRARC

SEQ ID NO: 96950 - protein, 69 aa, Homo sapiens
MTMLQESFSFDDLSVDFTQKEWQLLDPSQKNLYKDVMLENYSSLVSLGYEVMKPDVIFKLEQGEEPWVG

SEQ ID NO: 96951 - protein, 195 aa, Homo sapiens
MADTPRDAGLKQAPASRNEKAPVDFGYVGIDSILEQMRRKAMKQGFEFNIMVVGQSGLGKSTLINTLFKSKISRKSVQPTSEERIPKTIEIKSITHDIEEKGVRMKLTVIDTPGFGDHINNENCWQPIMKFINDQYEKYLQEEVNINRKKRIPDTRVHCCLYFIPATGHSLRPLDIEFMKRLSKVVNIVPVIAKA

SEQ ID NO: 96952 - protein, 629 aa, Homo sapiens
MSHVAVENALGLDQQFAGLDLNSSDNQSGGSTASKGRYIPPHLRNREATKGFYDKDSSGWSSSKDKDAYSSFGSRSDSRGKSSFFSDRGSGSRGRFDDRGRSDYDGIGSRGDRSGFGKFERGGNSRWCDKSDEDDWSKPLPPSERLEQELFSGGNTGINFEKYDDIPVEATGNNCPPHIESFSDVEMGEIIMGNIELTRYTRPTPVQKHAIPIIKEKRDLMACAQTGSGKTAAFLLPILSQIYSDGPGEALRAMKFSYRSRVRPCVVYGGADIGQQIRDLERGCHLLVATPGRLVDMMERGKIGLDFCKYLVLDEADRMLDMGFEPQIRRIVEQDTMPPKGVRHTMMFSATFPKEIQMLARDFLDEYIFLAVGRVGSTSENITQKVVWVEESDKRSFLLDLLNATGKDSLTLVFVETKKGADSLEDFLYHEGYACTSIHGDRSQRDREEALHQFRSGKSPILVATAVAARGLDISNVKHVINFDLPSDIEEYVHRIGRTGRVGNLGLATSFFNERNINITKDLLDLLVEAKQEVPSWLENMAYEHHYKGSSRGRSKSSRFSGGFGARDYRQSSGASSSSFSSSRASSSRSGGGGHGSSRGFGGGGYGGFYNSDGYGGNYNSQGVDWWGN

SEQ ID NO: 96953 - protein, 472 aa, Homo sapiens
MADTRSVHETRFEAAVKVIQSLPKNGSFQPTNEMMLKFYSFYKQATEGPCKLSRPGFWDPIGRYKWDAWSSLGDMTKEEAMIAYVEEMKKIIETMPMTEKVEELLRVIGPFYEIVEDKKSGRSSDITSAESSDSGAESEEEEAQEEVKGAEQSDNDKKMMKKSADHKNLEVIVTNGYDKDGFVQDIQNDIHASSSLNGRSTEEVKPIDENLGQTGKSAVCIHQDINDDHVEDVTGIQHLTSDSDSEVYCDSMEQFGQEESLDSFTSNNGPFQYYLGGHSSQPMENSGFREDIQVPPGNGNIGNMQVVAVEGKGEVKHGGEDGRNNSGAPHREKRGGETDEFSNVRRGRGHRMQHLSEGTKGRQVGSGGDGERWGSDRGSRGSLNEQIALVLMRLQEDMQNVLQRLQKLETLTALQAKSSTSTLQTAPQPTSQRPSWWPFEMSPGVLTFAIIWPFIAQWLVYLYYQRRRRKLN

SEQ ID NO: 96954 - protein, 3426 aa, Homo sapiens
VLPSHTCGNPGEILKGVLHGTRFNIGDKIRYSCLPGYILEGHAILTCIVSPGNGASWDFPAPFCRAEGACGGTLRGTSSSISSPHFPSEYENNADCTWTILAEPGDTIALVFTDFQLEEGYDFLEISGTEAPSIWLTGMNLPSPVISSKNWLRLHFTSDSNHRRKGFNAQFQVKKAIELKSRGVKMLPSKDGSHKNSVLSQGGVALVSDMCPDPGIPENGRRAGSDFRVGANVQFSCEDNYVLQGSKSITCQRVTETLAAWSDHRPICRARTCGSNLRGPSGVITSPNYPVQYEDNAHCVWVITTTDPDKVIKLAFEEFELERGYDTLTVGDAGKVGDTRSVLYVLTGSSVPDLIVSMSNQMWLHLQSDDSIGSPGFKAVYQEIEKGGCGDPGIPAYGKRTGSSFLHGDTLTFECPAAFELVGERVITCQQNNQWSGNKPSCVFSCFFNFTASSGIILSPNYPEEYGNNMNCVWLIISEPGSRIHLIFNDFDVEPQFDFLAVKDDGISDITVLGTFSGNEVPSQLASSGHIVRLEFQSDHSTTGRGFNITYTTFGQNECHDPGIPINGRRFGDRFLLGSSVSFHCDDGFVKTQGSESITCILQDGNVVWSSTVPRCEAPCGGHLTASSGVILPPGWPGYYKDSLHCEWIIEAKPGHSIKITFDRFQTEVNYDTLEVRDGPASSSPLIGEYHGTQAPQFLISTGNFMYLLFTTDNSRSSIGFLIHYESVTLESDSCLDPGIPVNGHRHGGDFGIRSTVTFSCDPGYTLSDDEPLVCERNHQWNHALPSCDALCGGYIQGKSGTVLSPGFPDFYPNSLNCTWTIEVSHGKGVQMIFHTFHLESSHDYLLITEDGSFSEPVARLTGSVLPHTIKAGLFGNFTAQLRFISDFSISYEGFNITFSEYDLEPCDDPGVPAFSRRIGFHFGVGDSLTFSCFLGYRLEGATKLTCLGGGRRVWSAPLPRCVAECGASVKGNEGTLLSPNFPSNYDNNHECIYKIETEAGKGIHLRTRSFQLFEGDTLKVYDGKDSSSRPLGTFTKNELLGLILNSTSNHLWLEFNTNGSDTDQGFQLTYTSFDLVKCEDPGIPNYGYRIRDEGHFTDTVVLYSCNPGYAMHGSNTLTCLSGDRRVWDKPLPSCIAECGGQIHAATSGRILSPGYPAPYDNNLHCTWIIEADPGKTISLHFIVFDTEMAHDILKVWDGPVDSDILLKEWSGSALPEDIHSTFNSLTLQFDSDFFISKSGFSIQFSTSIAATCNDPGMPQNGTRYGDSREAGDTVTFQCDPGYQLQGQAKITCVQLNNRFFWQPDPPTCIAACGGNLTGPAGVILSPNYPQPYPPGKECDWRVKVNPDFVIALIFKSFNMEPSYDFLHIYEGEDSNSPLIGSYQGSQAPERIESSGNSLFLAFRSDASVGLSGFAIEFKEKPREACFDPGNIMNGTRVGTDFKLGSTITYQCDSGYKILDPSSITCVIGADGKPSWDQVLPSCNAPCGGQYTGSEGVVLSPNYPHNYTAGQICLYSITVPKEFVVFGQFAYFQTALNDLAELFDGTHAQARLLSSLSGSHSGETLPLATSNQILLRFSAKSGASARGFHFVYQAVPRTSDTQCSSVPEPRYGRRIGSEFSAGSIVRFECNPGYLLQGSTALHCQSVPNALAQWNDTIPSCVVPCSGNFTQRRGTILSPGYPEPYGNNLNCIWKIIVTEGSGIQIQVISFATEQNWDSLEIHDGGDVTAPRLGSFSGTTVPALLNSTSNQLYLHFQSDISVAAAGFHLEYKTVGLAACQEPALPSNSIKIGDRYMVNDVLSFQCEPGYTLQGRSHISCMPGTVRRWNYPSPLCIATCGGTLSTLGGVILSPGFPGSYPNNLDCTWRISLPIGYGAHIQFLNFSTEANHDFLEIQNGPYHTSPMIGQFSGTDLPAALLSTTHETLIHFYSDHSQNRQGFKLAYQAYELQNCPDPPPFQNGYMINSDYSVGQSVSFECYPGYILIGHPVLTCQHGINRNWNYPFPRCDAPCGYNVTSQNGTIYSPGFPDEYPILKDCIWLITVPPGHGVYINFTLLQTEAVNDYIAVWDGPDQNSPQLGVFSGNTALETAYSSTNQVLLKFHSDFSNGGFFVLNFHAFQLKKCQPPPAVPQAEMLTEDDDFEIGDFVKYQCHPGYTLVGTDILTCKLSSQLQFEGSLPTCEAQCPANEVRTGSSGVILSPGYPGNYFNSQTCSWSIKVEPNYNITIFVDTFQSEKQFDALEVFDGSSGQSPLLVVLSGNHTEQSNFTSRSNQLYLRWSTDHATSKKGFKIRYAAPYCSLTHPLKNGGILNRTAGAVGSKVHYFCKPGYRMVGHSNATCRRNPLGMYQWDSLTPLCQAVSCGIPESPGNGSFTGNEFTLDSKVVYECHEGFKLESSQQATAVCQEDGLWSNKGKPPTCKPVACPSIEAQLSEHVIWRLVSGSLNEYGAQVLLSCSPGYYLEGWRLLRCQANGTWNIGDERPSCRVISCGSLSFPPNGNKIGTLTVYGATAIFTCNTGYTLVGSHVRECLANGLWSGSETRCLAGHCGSPDPIVNGHISGDGFSYRDTVVYQCNPGFRLVGTSVRICLQDHKWSGQTPVCVPITCGHPGNPAHGFTNGSEFNLNDVVNFTCNTGYLLQGVSRAQCRSNGQWSSPLPTCRVVNCSDPGFVENAIRHGQQNFPESFEYGMSILYHCKKGFYLLGSSALTCMANGLWDRSLPKCLAISCGHPGVPANAVLTGELFTYGAVVHYSCRGSESLIGNDTRVCQEDSHWSGALPHCTGNNPGFCGDPGTPAHGSRLGDDFKTKSLLRFSCEMGHQLRGSPERTCLLNGSWSGLQPVCEAVSCGNPGTPTNGMIVSSDGILFSSSVIYACWEGYKTSGLMTRHCTANGTWTGTAPDCTIISCGDPGTLANGIQFGTDFTFNKTVSYQCNPGYVMEAVTSATIRCTKDGRWNPSKPVCKAVLCPQPPPVQNGTVEGSDFRWGSSISYSCMDGYQLSHSAILSCEGRGVWKGEIPQCLPVFCGDPGIPAEGRLSGKSFTYKSEVFFQCKSPFILVGSSRRVCQADGTWSGIQPTCIDPAHNTCPDPGTPHFGIQNSSRGYEVGSTVFFRCRKGYHIQGSTTRTCLANLTWSGIQTECIPHACRQPETPAHADVRAIDLPTFGYTLVYTCHPGFFLAGGSEHRTCKADMKWTGKSPVCKSKGVREVNETVTKTPVPSDVFFVNSLWKGYYEYLGKRQPATLTVDWFNATSSKVNATFSEASPVELKLTGIYKKEEAHLLLKAFQIKGQADIFVSKFENDNWGLDGYVSSGLERGGFTFQGDIHGKDFGKFKLERQDPLNPDQDSSSHYHGTSSGSVAAAILVPFFALILSGFAFYLYKHRTRPKVQYNGYAGHENSNGQASFENPMYDTNLKPTEAKAVRFDTTLNTVCTVV

SEQ ID NO: 96955 - protein, 452 aa, Homo sapiens
  MOD_RES (1)..(1): Any amino acid
XPPTLCCLKLAFIDPATGKLMDKSFSIRYHDMPDVIDFLVLRQFYDEARQRNWQSCDRFRSIIDDAWWFGTVLSQEPYQPQYPDSHFQCYIVRWDNTEIEKLSPWDMEPIPDNVDPPEELGASISVTTDELEKLLYKPQAGEWGQKSRDEECDRIISGIDQLLNLDIAAAFAGPVDLCTYPKYCTVVAYPTDLYTIRMRLVNRFYRRLSALVWEVRYIEHNARTFNEPESVIARSAKKITDQLLKFIKNQHCTNISELSNTSENDEQNAEDLDDSDLPKTSSGRRRDYRDIIDTPMDFGTVRETLDAGNYDSPLEFCKDIRLIFSNAKAYTPNKRSKIYSMTLRLSALFEEKMKKISSDFKIGQKFNEKLRRSQRFKQRQNCKGDSQPNKSIRNLKPKRLKSQTKIIPELVGSPTQSTSSRTAYLGTHKTSAGISSGVTSGDSSDSAESSER

SEQ ID NO: 96956 - protein, 304 aa, Homo sapiens
MTRHGKNCTAGAVYTYHEKKKDTAASGYGTQNIRLSRDAVKDFDCCCLSLQPCHDPVVTPDGYLYEREAILEYILHQKKEIARQMKAYEKQRGTRREEQKELQRAASQDHVRGFLEKESAIVSRPLNPFTAKALSGTSPGDSDDVQPGPSVGPPSKDKDKVLPSFWIPSLTPEAKATKLEKPSRTVTCPMSGKPLRMSDLTPVHFTPLDSSVDRVGLITRSERYVCAVTRDSLSNATPCAVLRPSGAVVTLECVEKLIRKDMVDPVTGDKLTDRDIIVLQRGGTGFAGSGVKLQAEKSRPVMQA

SEQ ID NO: 96957 - protein, 62 aa, Homo sapiens
  MOD_RES (1)..(1): Any amino acid
XQGRPSSSCLLHQKPPVLRACNTNFCPAPEKRDSAGSQLPCCDGPQAVHEEGLRFPDNHWAM

SEQ ID NO: 96958 - protein, 604 aa, Homo sapiens
  MOD_RES (1)..(1): Any amino acid
XQSELQFKDAEMNELRTKLQTSERANKLAAPSVSHVSPRKNPSVVIKPEACSPQFGKTSFPTKESFSANMSLPHPCQTESGYKPLVGREDSKPHSLRGDSIKQEEAQKSFVDSWRQRSNTQGSILINLLLKQPLIPGSSLSLCHLLSSSSESPAGTPLQPPGFGSTLAGMSGLRTTGSYDGSFSLSALREAQNLAFTGLNLVARNECSRDGDPAEGGRRAFPLCQLPGAVHFLPLVQFFIGLHCQALQDLAAAKRSGAPGDSPTHSSCVSSGVETNPEDSVCILEGFSVTALSILQHLVCHSGAVVSLLLSGVGADSAAGEGNRSLVHRLSDGDMTSALRGVADDQGQHPLLKMLLHLLAFSSAATGHLQASVLTQCLKVLVKLAENTSCDFLPRFQCVFQVLPKCLSPETPLPSVLLAVELLSLLADHDQLAPQLCSHSEGCLLLLLYMYITSRPDRVALETQWLQLEQEVVWLLAKLGVQSPLPPVTGSNCQCNVEVVRALTVMLHRQWLTVRRAGGPPRTDQQRRTVRCLRDTVLLLHGLSQKDKLFMMHCVEVLHQFDQVMPGVSMLIRGLPDVTDCEEAALDDLCAAETDVEDPEVECG

SEQ ID NO: 96959 - protein, 84 aa, Homo sapiens
MSKTMAMNLLEDWCRGMEVDIHRSLLVTGIPEDCGQAEIEETLNGVLSPLGPYRVLNKIFVREENVKAALIENPERFDLGDHPY

SEQ ID NO: 96960 - protein, 196 aa, Homo sapiens
  MOD_RES (1)..(1): Any amino acid
XAEPSGRALRLSTPGPRPSGARDRAPGAAGPPSGQIGNRALRLGERTPAAVEKRGPYMVTRAPSIQAKLQKHRDLAKAVLRRKGMLGASPNRPDSSGKRSVKFNKGYTALSQSPDENLVSLDSDSDGELGSRYSSGYSSAEQVNQDVSRQLLQDGYHLDEIPDDEDLDLIPPKPMASSTCSCCWCCLGDSSSCTLQ

SEQ ID NO: 96961 - protein, 524 aa, Homo sapiens
MAGVVHVSLAALLLLPMAPAMHSDCIFKKEQAMCLEKIQRANELMGFNDSSPGCPGMWDNITCWKPAHVGEMVLVSCPELFRIFNPDQVWETETIGESDFGDSNSLDLSDMGVVSRNCTEDGWSEPFPHYFDACGFDEYESETGDQDYYYLSVKALYTVGYSTSLVTLTTAMVILCRFRKLHCTRNFIHMNLFVSFMLRAISVFIKDWILYAEQDSNHCFISTVECKAVMVFFHYCVVSNYFWLFIEGLYLFTLLVETFFPERRYFYWYTIIGWGTPTVCVTVWATLRLYFDDTGCWDMNDSTALWWVIKGPVVGSIMVNFVLFIGIIVILVQKLQSPDMGGNESSIYLTNLSPRVPKKAREDPLPVPSDQHSLPFLSCVQKCYCKPQRAQQHSCKMSELSTITLRLARSTLLLIPLFGIHYTVFAFSPENVSKRERLVFELGLGSFQGFVVAVLYCFLNGEVQAEIKRKWRSWKVNRYFAVDFKHRHPSLASSGVNGGTQLSILSKSSSQIRMSGLPADNLAT

SEQ ID NO: 96962 - protein, 123 aa, Homo sapiens
  MOD_RES (1)..(1): Any amino acid
XCPYLAVKITPAIPAVAGILFFFVMGTLLRTSFSDPGVLPRATPDEAADLERQIDIANGTSSGGYRPPPRTKEVIINGQTVKLKYCFTCKIFRPPRASHCSLCDNCVERFDHHCPWVHSKQDS

SEQ ID NO: 96963 - protein, 87 aa, Homo sapiens
MRNSILAQVLDQSARARLSNLALVKPEKTKAVENYLIQMARYGQLSEKVSEQGLIEILKKVSQQTEKTTTVKFNRRKVMDSDEDDDY

SEQ ID NO: 96964 - protein, 547 aa, Homo sapiens
MSSDEEKYSLPVVQNDSSRGSSVSSNLQEEYEELLHYAIVTPNIEPCASQSSHPKGELVPDVRISTIHDILHSQESSPVLSPRKPSHPVMDFFSSHLLADSSSPATNSSHTDAHEILVSDFLVSDENLQKMENVLDLWSSGLKTNIISELSKWRLNFIDWHRMEMRKEKEKHAAHLKQLCNQINELKELQKTFEISIGRKDEVISSLSHAIGKQKEKIELMRTFFHWRIGHVRARQDVYEGKLADQYYQRTLLKKVWKVWRSVVQKQWKDVVERACQARAEEVCIQISNDYEAKVAMLSGALENAKAEIQRMQHEKEHFEDSMKKAFMRGVCALNLEAMTIFQNRNDAGIDSTNNKKEEYGPGVQGKEHSAHLDPSAPPMPLPVTSPLLPSPPAAVGGASATAVPSAASMTSTRAASASSVHVPVSALGAGSAATAASEEMYVPRVVTSAQQKAGRTITARITGRCDFASKNRISSSLAIMGVSPPMSSVVVEKHHPVTVQTIPQATAAKYPRTIHPESSTSASRSLGTRSAHTQSLTSVHSIKVVD

SEQ ID NO: 96965 - protein, 1239 aa, Homo sapiens
  MOD_RES (1)..(1): Any amino acid
XARTWVTGLRYLMAGISDEDSLARRQRTRDQWLKQTFDEADKNGDGSLSIGEVLQLLHKLNVNLPRQRVKQMFREADTDDHQGTLGFEEFCAFYKMMSTRRDLYLLMLTYSNHKDHLDAASLQRFLQVEQKMAGVTLESCQDIIEQFEPCPENKSKGLLGIDGFTNYTRSPAGDIFNPEHHHVHQDMTQPLSHYFITSSHNTYLVGDQLMSQSRVDMYAWVLQAGCRCVEVDCWDGPDGEPIVHHGYTLTSKILFKDVIETINKYAFIKNEYPVILSIENHCSVIQQKKMAQYLTDILGDKLDLSSVSSEDATTLPSPQMLKGKILVKGKKLPANISEDAEEGEVSDEDSADEIDDDCKLLNGDASTNRKRVENTAKRKLDSLIKESKIRDCEDPNNFSVSTLSPSGKLGRKSKAEEDVESGEDAGASRRNGRLVVGSFSRRKKKGSKLKKAASVEEGDEGQDSPGGQSRGATRQKKTMKLSRALSDLVKYTKSVATHDIEMEAASSWQVSSFSETKAHQILQQKPAQYLRFNQQQLSRIYPSSYRVDSSNYNPQPFWNAGCQMGVFNPNSEDPLPGQLKKQLVLRIISGQQLPKPRDSMLGDRGEIIDPFVEVEIIGLPVDCSREQTRVVDDNGFNPTWEETLVFMVHMPEIALVRFLVWDHDPIGRDFIGQRTLAFSSMMPGYRHVYLEGMEEASIFVHVAVSDISGKVKQALGLKGLFLRGPKPGSLDSHAAGRPPARPSVSQRILRRTASAPTKSQKPGRRGFPELVLGTRDTGSKGVADDVVPPGPGPAPEAPAQEGPGSGSPRDTRPLSTQRPLPPLCSLETIAEEPAPGPGPPPPAAVPTSSSQGRPPYPTGPGANVASPLEDTEEPRDSRPRPCNGEGAGGAYERAPGSQTDGRSQPRTLGHLPVIRRVKSEGQVPTEPLGGWRPLAAPFPAPAVYSDATGSDPLWQRLEPCGHRDSVSSSSSMSSSDTVIDLSLPSLGLGRSRENLAGAHMGRLPPRPHSASAARPDLPPVTKSKSNPNLRATGQRPPIPDELQPRSLAPRMAGLPFRPPWGCLSLVGVQDCPVAAKSKSLGDLTADDFAPSFEGGSRRLSHSLGLPGGTRRVSGPGVRRDTLTEQLRWLTVFQQAGDITSPTSLGPAGEGVAGGPGFVRRSSSRSHSRVRAIASRARQAQERQQRLQGLGRQGPPEEERGTPEGACSVGHEGSVDAPAPSKGALGPASAAAENLVLLRL

SEQ ID NO: 96966 - protein, 334 aa, Homo sapiens
MMQESGTETKSNGSAIQNGSGGSNHLLECGGLREGRSNGETPAVDIGAADLAHAQQQQQQALQVARQLLLQQQQQQQVSGLKSPKRNDKQPALQVPVSVAMMTPQVITPQQMQQILQQQVLSPQQLQVLLQQQQALMLQQQLQEFYKKQQEQLQLQLLQQQHAGKQPKEQQQVATQQLAFQQQLLQMQQLQQQHLLSLQRQGLLTIQPGQPALPLQPLAQGMIPTELQQLWKEVTSAHTAEETTGNNHSSLDLTTTCVSSSAPSKTSLIMNPHASTNGQLSVHTPKRESLSHEEHPHSHPLYGHGVCKWPGCEAVCEDFQSFLNLQKTKNACKP

SEQ ID NO: 96967 - protein, 247 aa, Homo sapiens
MGQRDQGLDRERKGPQDDPGSYQGPERRNFLKEDAMKTKTHYHAMHADCLQELRRYLESSVVLRRRVPPMVNVTRSEASEGNITVTCRASSFYPRNITLTWRQDGVSLSHDTQQWGDVLPDGNGTYQTWVATRICQGEEQRFTCYMEHSGNHSTHPVPSGKVLVLQSHWQTFHVSAVAAAAAAIFVIIIFYVRCCKKKTSAAEGPELVSLQVLDQHPVGTSDHRDATQLGFQPLMSALGSTGSTEGA

SEQ ID NO: 96968 - protein, 236 aa, Homo sapiens
HTVSFTCESHGFSPRDITLKWFKNGNELSDFQTNVDPAGDSVSYSIHSTAKVVLTREDVHSQVICEVAHVTLQGDPLRGTANLSETIRVPPTLEVTQQPVRAENQVNVTCQVRKFYPQRLQLTWLENGNVSRTETASTLTENKDGTYNWMSWLLVNVSAHRDDVKLTCQVEHDGQPAVSKSHDLKVSAHPKEQGSNTAPGPALASAAPLLIAFLLGPKVLLVVGVSVIYVYWKQKA

SEQ ID NO: 96969 - protein, 123 aa, Homo sapiens
MAEKVNNFPPLPKFIPLKPCFYQDFEADIPPQHVSMTKRLYYLWMLNSVTLAVNLVGCLAWLIGGGGATNFGLAFLWLILFTPCSYVCWFRPIYKAFKTDSSFSFMAFFFTFMAQLVISIIQA

SEQ ID NO: 96970 - protein, 724 aa, Homo sapiens
MFQDPVAFEDVAVNFTQEEWTLLDISQKNLFREVMLETFRNLTSIGKKWSDQNIEYEYQNPRRSFRSLIEEKVNEIKEDSHCGETFTQVPDDRLNFQEKKASPEVKSCDSFVCAEVGIGNSSFNMSIRGDTGHKAYEYQEYGPKPYKCQQPKNKKAFRYRPSIRTQERDHTGEKPYACKVCGKTFIFHSSIRRHMVMHSGDGTYKCKFCGKAFHSFSLYLIHERTHTGEKPYECKQCGKSFTYSATLQIHERTHTGEKPYECSKCDKAFHSSSSYHRHERSHMGEKPYQCKECGKAFAYTSSLRRHERTHSGKKPYECKQYGEGLSYLISFQTHIRMNSGERPYKCKICGKGFYSAKSFQTHEKTHTGEKRYKCKQCGKAFNLSSSFRYHERIHTGEKPYECKQCGKAFRSASQLRVHGGTHTGEKPYECKECGKAFRSTSHLRVHGRTHTGEKPYECKECGKAFRYVKHLQIHERTEKHIRMPSGERPYKCSICEKGFYSAKSFQTHEKTHTGEKPYECNQCGKAFRCCNSLRYHERTHTGEKPYECKQCGKAFRSASHLRMHERTHTGEKPYECKQCGKAFSCASNLRKHGRTHTGEKPYECKQCGKAFRSASNLQMHERTHTGEKPYECKECEKAFCKFSSFQIHERKHRGEKPYECKHCGNGFTSAKILQIHARTHIGEKHYECKECGKAFNYFSSLHIHARTHMGEKPYECKDCGKAFS

SEQ ID NO: 96971 - protein, 47 aa, Homo sapiens
MAQGLVTFADVAIDFSQEEWACLNSAQRDLYWDVMLENYSNLVSLDL

SEQ ID NO: 96972 - protein, 753 aa, Homo sapiens
MPKDSGALLGLKVVGGKMTDLGRLGAFITKVKKGSLADVVGHLRAGDEVLEWNGKPLPGATNEEVYNIILESKSEPQVEIIVSRPIGDIPRIPESSHPPLESSSSSFESQKMERPSISVISPTSPGALKDAPQVLPGQLSVKLWYDKVGHQLIVNVLQATDLPARVDGRPRNPYVKMYFLPDRSDKSKRRTKTVKKILEPKWNQTFVYSHVHRRDFRERMLEITVWDQPRVQEEESEFLGEILIELETALLDDEPHWYKLQTHDESSLPLPQPSPFMPRRHIHGESSSKKLQRSQRISDSDISDYEVDDGIGVVPPVGYRSSARESKSTTLTVPEQQRTTHHRSRSVSPHRGNDQGKPRSRLPNVPLQRSLDEIHPTRRSRSPTRHHDASRSPVDHRTRDVDSQYLSEQDRMHRQRSPTQSPPADTSFSSRRGRQLPQVPVRSGSIEQASLVVEERTRQMKMKVHRFKQTTGSGSSQELDREQYSKYNIHKDQYRSCDNVSAKSSDSDVSDVSAISRTSSASRLSSTSFMSEQSERPRGRISSFTPKMQGRRMGTSGRSIMKSTSVSGEMYTLEHNDGSQSDTAVGTVGAGGKKRRSSLSAKVVAIVSRRSRSTSQLSQTESGHKKLKSTIQRSTETGMAAEMRKMVRQPSRESTDGSINSYSSEGNLIFPGVRLGADSQFSDFLDGLGPAQLVGRQTLATPAMGDIQIGMEDKKGQLEVEVIRARSLTQKPGSKSTPAPYVKVYLLENGACI

SEQ ID NO: 96973 - protein, 61 aa, Homo sapiens
MEPLTFRDVAIEFSPEEWKCLDPAQQNLYRDVMLENYRNLVSLEEGTEPQRKMTCSQQKSQ

SEQ ID NO: 96974 - protein, 268 aa, Homo sapiens
MSTEKVDQKEEAGEKEVCGDQIKGPDKEEEPPAAASHGQGWRPGGRAARNARPEPGARHPALPAMVNDPPVPALLWAQEVGQVLAGRARRLLLQFGVLFCTILLLLWVSVFLYGSFYYSYMPTVSHLSPVHFYYRTDCDSSTTSLCSFPVANVSLTKGGRDRVLMYGQPYRVTLELELPESPVNQDLGMFLVTISCYTRGGRIISTSSRSSRSSCWRWNSTQTIERTRTCRPLERSLRSTASASSCMEPTSASTRTSLGSDTCYTTSR

SEQ ID NO: 96975 - protein, 709 aa, Homo sapiens
MKGGDRAYTRGPSLGWLFAKCCCCFPCRDAYSHSSSENGGKSESVANLQAQPSLNSIHSSPGPKRSTNTLKKWLTSPVRRLNSGKADGNIKKQKKVRDGRKSFDLGSPKPGDETTPQGDSADESKKGWGEDEPDEESHTPLPPPMKIFDNDPTQDEMSSSLLAARQASTEVPTAADLVNAIEKLVKNKLSLEGSSYRGSLKDPAGCLNEGMAPPTPPKNPEEEQKAKALRGRMFVLNELVQTEKDYVKDLGIVVEGFMKRIEEKGVPEDMRGKDKIVFGNIHQIYDWHKDFFLAELEKCIQEQDRLAQLFIKHERKLHIYVWYCQNKPRSEYIVAEYDAYFEEVKQEINQRLTLSDFLIKPIQRITKYQLLLKGPYWISFSRGEKIVSGGPWIQVDPSQTKAVELMCLVPKRCNDMMNLGRLQGFEGTLTAQGKLLQQDTFYVIELDAGMQSRTKERRVFLFEQIVIFSELLRKGSLTPGYMFKRSIKMNYLVLEENVDNDPCKFALMNRETSERVVLQAANADIQQAWVQDINQVLETQRDFLNALQSPIEYQRKERSTAVMRSQPARLPQASPRPYSSVPAGSEKPPKGSSYNPPLPPLKISTSNGSPGFEYHQPGDKFEASKNDLGGCNGTSSMAVIKDYYALKENEICVSQGEVVQVLAVNQQNMCLVYQPASDHSPAAEGWVPGSILAPLTKATAAESSDGSIK

SEQ ID NO: 96976 - protein, 136 aa, Homo sapiens
  MOD_RES (1)..(1): Any amino acid
XNCTSDMEINPLRIKISSLQTTEKNDTVAGQGERDHLITKRDLALSEGDIHTLGCGVAQCLKIVCQVGRLDRGKSAILYVKSLLWTETFMNKENQNHSYSLKSSASFNVIEFPYKNLPIEDITNSTLVSHWFRQIE

SEQ ID NO: 96977 - protein, 67 aa, Homo sapiens
MLGARAWLGRVLLLPRAGAGLAASRRCPGVWPRTWPHRSPSRWALSEGVPMSGFLCLSLTWSSPRPY

SEQ ID NO: 96978 - protein, 351 aa, Homo sapiens
MCDEDETTALVCDNGSGLVKAGFAGDDAPRAVFPSIVGRPRHQGVMVGMGQKDSYVGDEAQSKRGILTLKYPIEHGIITNWDDMEKIWHHTFYNELRVAPEEHPTLLTEAPLNPKANREKMTQIMFETFNVPAMYVAIQAVLSLYASGRTTGIVLDSGDGVTHNVPIYEGYALPHAIMRLDLAGRDLTDYLMKILTERGYSFVTTAEREIVRDIKEKLCYVALDFENEMATAASSSSLEKSYELPDGQVITIGNERFRCPETLFQPSFIGMESAGIHETTYNSIMKCDIDIRKDLYANNVMSGGTTMYPGIADRMQKEITALAPSTMKIKMWITKQEYDEAGPSIVHRKCF

SEQ ID NO: 96979 - protein, 38 aa, Homo sapiens
MHCTAFATADEYHLGNLSQDLASHGYVEVTSLPRGTSS

SEQ ID NO: 96980 - protein, 121 aa, Homo sapiens
MLLLHRAVVLRLQQACRLKSIPSRICIQACSTNDSFQPQRPSLTFSGDNSSTQGWRVMGTLLGLGAVLAYQDHRCRAAQESTHIYTKEEVSSHTSPETGIWVTLGSEVFDVTEFVDLHPGG

SEQ ID NO: 96981 - protein, 193 aa, Homo sapiens
MCQLGLLQKPHVYEFASDIAPFLCHPNLWIRYGAVGFITVVARQISTADVYCKLMPYLDPYITQPIIQIERKLVLLSVLKEPVSRSIFDYALRSKDITSLFRHLHMRQKKRNGSLPDCPPPEDPAIAQLLKKLLSQGMTEEEEDKLLALKDFMMKSNKAKANIVDQSHLHDSSQKGVIDLAALGITGRQVDLV

SEQ ID NO: 96982 - protein, 670 aa, Homo sapiens
MTSVWKRLQRVGKRAAKFQFVACYHELVLECTKKWQPDKLVVVWTRRNRRICSKAHSWQPGIQNPYRGTVVWMVPENVDISVTLYRDPHVDQYEAKEWTFIIENESKGQRKVLATAEVDLARHAGPVPVQVPVRLRLKPKSVKVVQAELSLTLSGVLLREGRATDDDMQSLASLMSVKPSDVGNLDDFAESDEDEAHGPGAPEARARVPQPDPSRELKTLCEEEEEGQGRPQQAVASPSNAEDTSPAPVSAPAPPARTSRGQGSERANEAGGQVGPEAPRPPETSPEMRSSRQPAQDTAPTPAPRLRKGSDALRPPVPQGEDEVPKASGAPPAGLGSARETQAQACPQEGTEAHGARLGPSIEDKGSGDPFGRQRLKAEEMDTEDRPEASGVDTEPRSGGREANTKRSGVRAGEAEESSAVCQVDAEQRSKVRHVDTKGPEATGVMPEAPPALVSSSQSLLEWCQEVTTGYRGVRITNFTTSWRNGLAFCAILHRFYPDKIDYASLDPLNIKQNNKQAFDGFAALGVSRLLEPADMVLLSVPDKLIVMTYLCQIRAFCTGQELQLVQLEGGGGAGTYRVGSAQPSPPDDLDAGGLAQRLRGHGAEGPQEPKEAADRADGAAPGVASRNAVAGRASKDGGAEAPRESRPAEVPAEGLVNGAGAPGGGGVRL

SEQ ID NO: 96983 - protein, 613 aa, Homo sapiens
MGEAFYTVKLERLESCDTVGLSFQEVQKNTYDFECQWKDDEGNYKTVLMLQKENLPGRRAQRDRRAAGNRHIENQLGVSFQSHLPELQQFQHEGKIYEYNQVEKSPNNRGKHYKCDECGKVFSQNSRLTSHKRIHTGEKPYQCNKCGKAFTVRSNLTIHQVIHTGEKPYKCNECGKVFSQPSNLAGHQRIHTGEKPYKCNECGKAFRAHSKLTTHQVIHTGEKPYKCKECGKCFTQNSHLASHRRIHTGEKPYKCNECGKAFSVRSSLTTHQTIHTGEKPYKCNECGKVFRHNSYLAKHRRIHTGEKPYKCNECGKAFSMHSNLTKHQIIHTGEKPFKCNECVKVFTQYSHLANHRRIHTGEKPYRCDECGKAFSVRSSLTTHQAIHTGEKPYKCNDCGKVFTQNSHLASHRGIHSGEKPYKCDECGKAFSQTSQLARHWRVHTGEKPYKCNECGKAFSVHSSLTIHQTIHTGQKPYKCNDCGKVFRHNSYLAIHQRIHTGEKPYKCNECGKAFSVHSNLATHQVIHTGEKPYKCNECGKVFTQNSHLANHRRIHTGEKPYRCNECGKAFSVRSTLTTHMAVHTGDKPYKCNQCGKVFTQNSNLAKHRRIHSG

SEQ ID NO: 96984 - protein, 63 aa, Homo sapiens
  MOD_RES (1)..(1): Any amino acid
XIVQPELKALAIGFHSMIMRSLGGILVPIYFGALIDTTCMKWSTNSCGARGACRIYNSTYLGY

SEQ ID NO: 96985 - protein, 117 aa, Homo sapiens
MALSGSTPAPCWEEDECLDYYGMLSLHRMFEVVGGQLTECELELLAFLLDEAPGAAGGLARARSGLELLLELERRGQCDESNLRLLGQLLRVLARHDLLPHLARKRRRPVSPERYSY

SEQ ID NO: 96986 - protein, 140 aa, Homo sapiens
MVPLVAVVSGPRAQLFACLLRLGTQQVGPLQLHTGASHAARNHYEVLVLGGGSGGITMAARMKRKVGAENVAIVEPSERHFYQPIWTLVGAGAKQLSSSGRPTASVIPSGVEWIKARVTELNPDKNCIHTDDDEKISYRY

SEQ ID NO: 96987 - protein, 161 aa, Homo sapiens
MSRLFQWKQLENLYFREKKFAVEVHDPRRISVSRRTFGQSGLFVQTWYANSSLIKSIWVMAISQHQFYLDRKQSKAKIPSARSLDEIAMDLTETGTQRASKLVTLETKSQFIMASNGSLISSGSQDSEVSEEQKREKILELKKKEKLLQEKLLKKVEELKK

SEQ ID NO: 96988 - protein, 310 aa, Homo sapiens
NQLEAEIHLHRHKTVIRACRGRNDLKRPMQAPPGHDQDSLKKSQGVGPIRKVLLLKEDHEGLGISITGGKEHGVPILISEIHPGQPADRCGGLHVGDAILAVNGVNLRDTKHKEAVTILSQQRGEIEFEVVYVAPEVDSDDENVEYEDESGHRYRLYLDELEGGGNPGASCKDTSGEIKVLQVWHRRLKNQKSAKEGVTVLINEDKELAELRGLAAGVGLANACYAIQYVALAIIMEHLGKGTLPTQEEIENLPAFPREKLTLRLLLGSGAFGEVYEGTAVDILGVGSGEIKVAVKTLKKGSTDQEKIEF

SEQ ID NO: 96989 - protein, 57 aa, Homo sapiens
MAASRSTRVTRSTVGLNGLDESFCGRTLRNRSIAHPEEISSNSQVRSRSPKKRPEPV

SEQ ID NO: 96990 - protein, 147 aa, Homo sapiens
MIALFNKLLDWFKALFWKEEMELTLVGLQYSGKTTFVNVIASGQFNEDMIPTVGFNMRKITKGNVTIKLWDIGGQPRFRSMWERYCRGVSAIVYMVDAADQEKIEASKNELHNLLDKPQLQGIPESVCHPGPRDLLLLHLLQRKGQH

SEQ ID NO: 96991 - protein, 210 aa, Homo sapiens
MSQDNDTLMRDILGHELAAMRLQKLEQQRRLFEKKQRQKRQELLMVQANPDASPWLWRSCLREERLLGLGNPFLRKKVSEAHLPSGIHSALGTVSCGGDGRGERGLPTPRTEAVFRNLGLQSPFLSWLPDNSDAELEEVSVENGSVSPPPFKQSPRIRRKGWQAHQRPGTRAEGESDSQDMGDAHKSPNMGPNPGMDGDCVYENLAFQKE

SEQ ID NO: 96992 - protein, 1411 aa, Homo sapiens
MGAGNLPPITQEEALHILGFQPPFEDIRFGPFTGNTTLMRWFRQINDHFHVKGCSYVLYKPHGKNKTAGETASGALSKLTRGLKDESLAYIYHCQNHYFCPIGFEATPVKANKAFSRGPLSPQEVEYWILIGESSRKHPAIHCKKWADIVTDLNTQNPEYLDIRHLERGLQYRKTKKVGGNLHCIIAFQRLNWQRFGLWNFPFGTIRQESQPPTHAQGIAKSESEDNISKKQHGRLGRSFSASFHQDSAWKKMSNISIWLNQALKGVRDRHGNSIENPHLLTLFHRLCKLLFFRIRPIFVFDGDAPLLKKQTLVKRRQRKDLASSDSRKTTEKLLKTFLKRQAIKTAFRSKRDEALPSLTQVRRENDLYVLPPLQEEEKHSSEEEDEKEWQERMNQKQALQEEFFHNPQAIDIESEDFSSLPPEVKHEILTDMKEFTKRRRTLFEAMPEESDDFSQYQLKGLLKKNYLNQHIEHVQKEMNQQHSGHIRRQYEDEGGFLKEVESRRVVSEDTSHYILIKGIQAKTVAEVDSESLPSSSKMHGMSFDVKSSPCEKLKTEKEPDATPPSPRTLLAMQAALLGSSSEEELESENRRQARGRNAPAAVDEGSISPRTLSAIKRALDDDEDVKVCAGDDVQTGGPGAEEMRINSSTENSDEGLKVRDGKGIPFTATLASSSVNSAEEHVASTNEGREPTDSVPKEQMSLVHVGTEAFPISDESMIKDRKDRLPLESAVVRHSDAPGLPNGRELTPASPTCTNSVSKNETHAEVLEQQNELCPYESKFDSSLLSSDDETKCKPNSASEVIGPVSLQETSSIVSVPSEAVDNVENVVSFNAKEHENFLETIQEQQTTESAGQDLISIPKAVEPMEIDSEESESDGSFIEVQSVISDEELQAEFPETSKPPSEQGEEELVGTREGEAPAESESLLRDNSERDDVDGEPQEAEKDAEDSLHEWQDINLEELETLESNLLAQQNSLKAQKQQQERIAATVTGQMFLESQELLRLFGIPYIQAPMEAEAQCAILDLTDQTSGTITDDSDIWLFGARHVYRNFFNKNKFVEYYQYVDFHNQLGLDRNKLINLAYLLGSDYTEGIPTVGCVTAMEILNEFPGHGLEPLLKFSEWWHEAQKNPKIRPNPHDTKVKKKLRTLQLTPGFPNPAVAEAYLKPVVDDSKGSFLWGKPDLDKIREFCQRYFGWNRTKTDESLFPVLKQLDAQQTQLRIDSFFRLAQQEKEDAKRIKSQRLNRAVTCMLRKEKEAAASEIEAVSVAMEKEFELLDKAKGKTQKRGITNTLEESSSLKRKRLSDSKGKNTCGGFLGETCLSESSDGSSSEDAESSSLMNVQRRTAAKEPKTSASDSQNSVKEAPVKNGGATTSSSSDSDDDGGKEKMVLVTARSVFGKKRRKLRRARGRKRKT

SEQ ID NO: 96993 - protein, 186 aa, Homo sapiens
  MOD_RES (1)..(1): Any amino acid
XEDAGVICSVSQSRPTPSPDTWPTSHASTAGSESSLALRLVNGGDRCQGRVEVLYRGSWGTVCDDYWDTNDANVVCRQLGCGWATSAPGNARFGQGSGPIVLDDVRCSGHESYLWSCPHNGWLSHNCGHHEDAGVICSASQSQPTPSPDTWPTSRASTAGSESTLALRLVNGGDRCRGRVEVLYQG

SEQ ID NO: 96994 - protein, 251 aa, Homo sapiens
MVSWMICRLVVLVFGMLCPAYASYKAVKTKNIREYVRWMMYWIVFALFMAAEIVTDIFISWFPFYYEIKMAFVLWLLSPYTKGASLLYRKFVHPSLSRHEKEIDAYIVQAKERSYETVLSFGKRGLNIAASAAVQAATKSQGALAGRLRSFSMQDLRSISDAPAPAYHDPLYLEDQVSHRRPPIGHLALPEGSDEEKDCALRRGQLGSAASAPFLPRALQGSRAIWRDLGLHIWPACTSCLGPTLLTPADG

SEQ ID NO: 96995 - protein, 105 aa, Homo sapiens
  MOD_RES (1)..(1): Any amino acid
XQDLEKKRKLRKIEWMRQMYYSGSLEAKSTHHETLGLIHTATKGLIRAFEDGGIDSVMEWEVDEVLNWTNTLNFDEDTKKMEKSLVLENNAFLLYKSSSFVYLHY

SEQ ID NO: 96996 - protein, 1177 aa, Homo sapiens
MANGGGGGGGSSGGGGGGGGSSLRMSSNIHANHLSLDASSSSSSSSSSSSSSSSSSSSSSVHEPKMDALIIPVTMEVPCDSRGQRMWWAFLASSMVTFFGGLFIILLWRTLKYLWTVCCHCGGKTKEAQKINNGSSQADGTLKPVDEKEEAVAAEVGWMTSVKDWAGVMISAQTLTGRVLVVLVFALSIGALVIYFIDSSNPIESCQNFYKDFTLQIDMAFNVFFLLYFGLRFIAANDKLWFWLEVNSVVDFFTVPPVFVSVYLNRSWLGLRFLRALRLIQFSEILQFLNILKTSNSIKLVNLLSIFISTWLTAAGFIHLVENSGDPWENFQNNQALTYWECVYLLMVTMSTVGYGDVYAKTTLGRLFMVFFILGGLAMFASYVPEIIELIGNRKKYGGSYSAVSGRKHIVVCGHITLESVSNFLKDFLHKDRDDVNVEIVFLHNISPNLELEALFKRHFTQVEFYQGSVLNPHDLARVKIESADACLILANKYCADPDAEDASNIMRVISIKNYHPKIRIITQMLQYHNKAHLLNIPSWNWKEGDDAICLAELKLGFIAQSCLAQGLSTMLANLFSMRSFIKIEEDTWQKYYLEGVSNEMYTEYLSSAFVGLSFPTVCELCFVKLKLLMIAIEYKSANRESRILINPGNHLKIQEGTLGFFIASDAKEVKRAFFYCKACHDDITDPKRIKKCGCKRLEDEQPSTLSPKKKQRNGGMRNSPNTSPKLMRHDPLLIPGNDQIDNMDSNVKKYDSTGMFHWCAPKEIEKVILTRSEAAMTVLSGHVVVCIFGDVSSALIGLRNLVMPLRASNFHYHELKHIVFVGSIEYLKREWETLHNFPKVSILPGTPLSRADLRAVNINLCDMCVILSANQNNIDDTSLQDKECILASLNIKSMQFDDSIGVLQANSQGFTPPGMDRSSPDNSPVHGMLRQPSITTGVNIPIITELVNDTNVQFLDQDDDDDPDTELYLTQPFACGTAFAVSVLDSLMSATYFNDNILTLIRTLVTGGATPELEALIAEENALRGGYSTPQTLANRDRCRVAQLALLDGPFADLGDGGCYGDLFCKALKTYNMLCFGIYRLRDAHLSTPSQCTKRYVITNPPYEFELVPTDLIFCLMQFDHNAGQSRASLSHSSHSSQSSSKKSSSVHSIPSTANRQNRPKSRESRDKQKKEMVYR

SEQ ID NO: 96997 - protein, 723 aa, Homo sapiens
  MOD_RES (1)..(1): Any amino acid
XKTAFADKETQAIYLLTDGRPDQPPETVIDQVKRFQEIPIYTISFNYNDEIANRFLKEVAALTGGEFHFYNFGCKDPTPPEAVQNEDLTLLVKEMEQGHSDLEKMQDLYSESLIMDWWYNAEKDGDSKHQKEICSMISTPEKCAKPQSDVDSTQTSSLNMLKGPWGLSDQKVQKKKVLHAESTKTSLLRSQMSSLRSSACSERKDGLSNASSRRTALSDKEMSILLAEEWLDDKSSEKVTREGSQVYDHDSSDVSSENWLKTYGLVAKKLTLMDALSVAAVPHSSTYVPVLDKHVVSKVFDEVFPLAHVCNDTNKMTLINPQGAKLNIYKRKVEQAIQSYEKRLNKIVWRALSQEEKEKLDANKPIQYLENKTVLNQALERLNWPISLKELSMLESEILAGKMYIQQAMELQEAAKKNYANKAPGEQQKLQGNPTKKTKSKRPDPLKGQKVIARCDENGFYFPGVVKKCVSRTQALVGFSYGDTKVVSTSFITPVGGAMPCPLLQVGDYVFAKIVIPKGFDFYVPAIVIALPNKHVATEKFYTVLKCNNRREFCPRSALIKISQNKYALSCSHIKSPPIPEDPEVEDVEARNSAFLFWPLKEADTQDSREPRREKPRRKKRPAKQPLQQAAPSDSDGSSHGISSHGSCQGTHPEPRVWVMGGEHNIAYLRNTLKSLSRIVHLTSSFRFWACLGSSAAKTLTSLSNAELCFPRQPTSTSPRPGV

SEQ ID NO: 96998 - protein, 112 aa, Homo sapiens
  MOD_RES (1)..(1): Any amino acid
XDVDCKQSMRSEDEAKFPTMNRRGAIKQAKIHYIKNHEFIATFFGQPTFCSVCKDFVWGLNKQGYKCRQCNAAIHKKCIDKIIGRCTGTAANSRDTIWSSLGMLLCPGLGES

SEQ ID NO: 96999 - protein, 154 aa, Homo sapiens
MGSGWVPWVVALLVNLTRLDSSMTQGTDSPEDFVIQAKADCYFTNGTEKVQFVVRFIFNLEEYVRFDSDVGMFVALTKLGQPDAEQWNSRLDLLERSRQAVDGVCRHNYRLGAPFTVGRKGFYPGDIKIKWFLNGQEERAGVMSTGPIRNGDWT

SEQ ID NO: 97000 - protein, 143 aa, Homo sapiens
MAQPLAFILDVPETPGDQGQGPSPYDESEVHDSFQQLIQEQSQCTAQEGLELQQREREVTGSSQQTLWRPEGTQSTATLRILASMPSRTIGRSRGAIISQYYNRTVQLRCRSSRPLLGNFVRSAWPSLRLYDLELDPTALEEE

SEQ ID NO: 97001 - protein, 393 aa, Homo sapiens
MDMHCKADPFSAMHRHGGVNQLGGVFVNGRPLPDVVRQRIVELAHQGVRPCDISRQLRVSHGCVSKILGRYYETGSIKPGVIGGSKPKVATPKVVDKIAEYKRQNPTMFAWEIRDRLLAEGICDNDTVPSVSSINRIIRTKVQQPFHPTPDGAGTGVTAPGHTIVPSTASPPVSSASNDPVGSYSINGILGIPRSNGEKRKRDEDVSEGSVPNGDSQSGVDSLRKHLRADTFTQQQLEALDRVFERPSYPDVFQASEHIKSEQGNEYSLPALTPGLDEVKSSLSASTNPELGSNVSGTQTYPVVTGRDMASTTLPGYPPHVPPTGQGSYPTSTLAGMVPGSEFSGNPYSHPQYTAYNEAWRFSNPALLSSPYYYSAAPRGSAPAAAAAAYDRH

SEQ ID NO: 97002 - protein, 53 aa, Homo sapiens
MPPLLAPLLCLALLPALAARGPRCSQPGETCLNGGKCEAANGTEACVLHRPEL

SEQ ID NO: 97003 - protein, 222 aa, Homo sapiens
MDFPDQRRGAPEPRPRPPRTAPPVSNRPAHKFPGGNDNYLTITGPSHPFLSGAETFHTPSLGDEEFEIPPISLDSDPSLAVSDVVGHFDDLADPSSSQDGSFSAQYGVQTLDMPVGMTHGLMEQGGGLLSGGLTMDLDHSIGTQYSANPPVTIDVPMTDMTSGLMGHSQLTTIDQSELSSQLGLSLGGGTILPPAQSPEDRLSTTPSPTSSLHEDGVEDFRR

SEQ ID NO: 97004 - protein, 37 aa, Homo sapiens
  MOD_RES (1)..(1): Any amino acid
XTLVKKKIPIISNAMLVGDKLKFLSMLLTLKPGIHRD

SEQ ID NO: 97005 - protein, 774 aa, Homo sapiens
MKKQFNRMRQLANQTVGRAEKTEVLSEDLLQVEKRLELVKQVSHSTHKKLTACLQGQQGAEADKRSKKLPLTTLAQCLMEGSAILGDDTLLGKMLKLCGETEDKLAQELIHFELQVERDVIEPLFLLAEVEIPNIQKQRKHLAKLVLDMDSSRTRWQQTSKSSGLSSSLQPAGAKADALREEMEEAANRVEICRDQLSADMYSFVAKEIDYANYFQTLIEVQAEYHRKSLTLLQAVLPQIKAQQEAWVEKPSFGKPLEEHLTISGREIAFPIEACVTMLLECGMQEEGLFRVAPSASKLKKLKAALDCCVVDVQEYSADPHAIAGALKSYLRELPEPLMTFELYDEWIQASNVQEQDKKLQALWNACEKLPKANHNNIRYLIKFLSKLSEYQDVNKMTPSNMAIVLGPNLLWPQAEGNITEMMTTVSLQIVGIIEPIIQHADWFFPGEIEFNITGNYGSPVHVNHNANYSSMPSPDMDPADRRQPEQARRPLSVATDNMMLEFYKKDGLRKIQSMGVRVMDTNWVARRGSSAGRKVSCAPPSMQPPAPPAELAAPLPSPLPEQPLDSPAAPALSPSGLGLQPGPERTSTTKSKELSPGSAQKGSPGSSQGTACAGTQPGAQPGAQPGASPSPSQPPADQSPHTLRKVSKKLAPIPPKVPFGQPGAMADQSAGQPSPVSLSPTPPSTPSPYGLSYPQGYSLASGQLSPAAAPPLASPSVFTSTLSKSRPTPKPRQRPTLPPPQPPTVNLSASSPQSTEAPMLDGMSPGESMSTAV

SEQ ID NO: 97006 - protein, 68 aa, Homo sapiens
  MOD_RES (1)..(1): Any amino acid
XEAILDTVDPNRDGHVSLQEYMAFMISRETENVKSSEEIESAFRALSSEGKPYVTKEELYQVWASGGG

SEQ ID NO: 97007 - protein, 106 aa, Homo sapiens
MLIPFSMKNCFQLLCNCQVPAAGFKKTVKNGLILQSISNDVYQNLAVEDWIHDHMNLEGKPILFFWQNSPSVVIGRHQNPWQECNLNLMREEGIKLARRRSGGGTV

SEQ ID NO: 97008 - protein, 986 aa, Homo sapiens
MSNGYSTDENFRYLISCFRARVKMYIQVEPVLDYLTFLPAEVKEQIQRTVATSGNMQAVELLLSTLEKGVWHLGWTREFVEALRRTGSPLAARYMNPELTDLPSPSFENAHDEYLQLLNLLQPTLVDKLLVRDVLDKCMEEELLTIEDRNRIAAAENNGNESGVRELLKRIVQKENWFSAFLNVLRQTGNNELVQELTGSDCSESNAEIENLSQVDGPQVEEQLLSTTVQPNLEKEVWGMENNSSESSFADSSVVSESDTSLAEGSVSCLDESLGHNSNMGSDSGTMGSDSDEENVAARASPEPELQLRPYQMEVAQPALEGKNIIICLPTGSGKTRVAVYIAKDHLDKKKKASEPGKVIVLVNKVLLVEQLFRKEFQPFLKKWYRVIGLSGDTQLKISFPEVVKSCDIIISTAQILENSLLNLENGEDAGVQLSDFSLIIIDECHHTNKEAVYNNIMRHYLMQKLKNNRLKKENKPVIPLPQILGLTASPGVGGATKQAKAEEHILKDPFKEKLLEIMTRIQTYCQMSPMSDFGTQPYEQWAIQMEKKAAKEGNRKERVCAEHLRKYNEALQINDTIRMIDAYTHLETFYNEEKDKKFAVIEDDSDEGGDDEYCDGDEDEDDLKKPLKLDETDRFLMTLFFENNKMLKRLAENPEYENEKLTKLRNTIMEQYTRTEESARGIIFTKTRQSAYALSQWITENEKFAEVGVKAHHLIGAGHSSEFKPMTQNEQKEVISKFRTGKINLLIATTVAEEGLDIKECNIVIRYGLVTNEIAMVQARGRARADESTYVLVAHSGSGVIEHETVNDFREKMMYKAIHCVQNMKPEEYAHKILELQMQSIMEKKMKTKRNIAKHYKNNPSLITFLCKNCSVLACSGEDIHVIEKMHHVNMTPEFKELYIVRENKALQKKCADYQINGEIICKCGQAWGTMMVHKGLDLPCLKIRNFVVVFKNNSTKKQYKKWVELPITFPNLDYSECCLFSDED

SEQ ID NO: 97009 - protein, 124 aa, Homo sapiens
MAGRGGAARPNGPAAGNKICQFKLVLLGESAVGKSSLVLRFVKGQFHEYQESTIGAAFLTQTVCLDDTTVKFEIWDTAGQERYHSLAPMYYRGAQAAIVVYDITNTDTFARAKNWVKELQRQAS

SEQ ID NO: 97010 - protein, 337 aa, Homo sapiens
MPALGWAVAAILMLQTAMAEPSPGTLPRKAGVFSDLSNQELKAVHSFLWSKKELRLQPSSTTTMAKNTVFLIEMLLPKKYHVLRFLDKGERHPVREARAVIFFGDQEHPNVTEFAVGPLPGPCYMRALSPRPGYQSSWASRPISTAEYALLYHTLQEATKPLHQFFLNTTGFSFQDCHDRCLAFTDVAPRGVASGQRRSWLIIQRYVEGYFLHPTGLELLVDHGSTDAGHWAVEQVWYNGKFYGSPEELARKYADGEVDVVVLEDPLPGGKGHDSTEEPPLFSSHKPRGDFPSPIHVSGPRLVQPHGPRFRLEGNAVLYGGWSFAFRLRSSSGLQVL

SEQ ID NO: 97011 - protein, 97 aa, Homo sapiens
MVALENPECGPEAAEGTPGGRRLLPLPSCLPALASSQVKRLSASRRKQHFINQAVRNSDLVPKAKGRKSLQRLENSLERFHEPLRGGAGAGSSLPGG

SEQ ID NO: 97012 - protein, 609 aa, Homo sapiens
MTEGSMGVTLEASAEADLKAGNSCPELVPSRRSKLRKPKPVPLRKKAIGGEFSDTNAAVEGTPLPKASYHFSPEELDENTSPLLGDARFQKSPPDLKETPGTLSSDTNDSGVELGEESRSSPLKLEFDFTEDTGNIEARKALPRKLGRKLGSTLTPKIQKDGISKSAGLEQPTDPVARDGPLSQTSSKPDPSQWESPSFNPFGSHSVLQNSPPLSSEGSYHFDPDNFDESMDPFKPTTTLTSSDFCSPTGNHVNEILESPKKAKSRLITGCKVKKHETQSLALDACSRDEGAVISQISDISNRDGHATDEEKLASTSCGQKSAGAEVKGEPEEDLEYFECSNVPVSTINHAFSSSEAGIEKETCQKMEEDGSTVLGLLESSAEKAPVSVSCGGESPLDGICLSESDKTAVLTLIREEIITKEIEANEWKKKYEETRQEVLEMRKIVAEYEKTIAQMIEDEQRTSMTSQKSFQQLTMEKEQALADLNSVERSLSDLFRRYENLKGVLEGFKKNEEALKKCAQDYLARVKQEEQRYQALKIHAEEKLDKANEEIAQVRTKAKAESAALHAGLRKEQMKVESLERALQQKNQEIEELTKICDELIAKLGKTD

SEQ ID NO: 97013 - protein, 53 aa, Homo sapiens
VTGHVTESSCMAQPGTDATSRERTHSFADHSGTIDDREPLANAIKSDSAVIGG

SEQ ID NO: 97014 - protein, 112 aa, Homo sapiens
MEPEEEPGGAAVREVYEEAGVKGKLGRLLGIFENQDRKHRTYVYVLTVTEILEDWEDSVNIGRKREWFKVEDAIKVLQCHKPVHAEYLEKLKLGCSPANGNSTVPSLPDNNA

SEQ ID NO: 97015 - protein, 63 aa, Homo sapiens
  MOD_RES (1)..(1): Any amino acid
XKEAAERLSKTVDEACLLLAEYNGRLAAELEDRRQLARMLVEYTQNQKDVLSEKEKKLELVTH

SEQ ID NO: 97016 - protein, 48 aa, Homo sapiens
MMKLIINSLYKNKEIFLRELISNASDALDKIRLISLTDENALSGNEEL

SEQ ID NO: 97017 - protein, 46 aa, Homo sapiens
MLLLWVSVVAALALAVLAPGAGEQRRRAAKAPNVVLVVSDSFIPDD

SEQ ID NO: 97018 - protein, 769 aa, Homo sapiens
MLGLRPPLLALVGLLSLGCVLSQECTKFKVSSCRECIESGPGCTWCQKLNFTGPGDPDSIRCDTRPQLLMRGCAADDIMDPTSLAETQEDHNGGQKQLSPQKVTLYLRPGQAAAFNVTFRRAKGYPIDLYYLMDLSYSMLDDLRNVKKLGGDLLRALNEITESGRIGFGSFVDKTVLPFVNTHPDKLRNPCPNKEKECQPPFAFRHVLKLTNNSNQFQTEVGKQLISGNLDAPEGGLDAMMQVAACPEEIGWRNVTRLLVFATDDGFHFAGDGKLGAILTPNDGRCHLEDNLYKRSNEFDYPSVGQLAHKLAENNIQPIFAVTSRMVKTYEKLTEIIPKSAVGELSEDSSNVVHLIKNAYNKLSSRVFLDHNALPDTLKVTYDSFCSNGVTHRNQPRGDCDGVQINVPITFQVKVTATECIQEQSFVIRALGFTDIVTVQVLPQCECRCRDQSRDRSLCHGKGFLECGICRCDTGYIGKNCECQTQGRSSQELEGSCRKDNNSIICSGLGDCVCGQCLCHTSDVPGKLIYGQYCECDTINCERYNGQVCGGPGRGLCFCGKCRCHPGFEGSACQCERTTEGCLNPRRVECSGRGRCRCNVCECHSGYQLPLCQECPGCPSPCGKYISCAECLKFEKGPFGKNCSAACPGLQLSNNPVKGRTCKERDSEGCWVAYTLEQQDGMDRYLIYVDESRECVAGPNIAAIVGGTVAGIVLIGILLLVIWKALIHLSDLREYRRFEKEKLKSQWNNDNPLFKSATTTVMNPKFAES

SEQ ID NO: 97019 - protein, 1226 aa, Homo sapiens
MGEQKVSRQFKQCHRTTSWAKSKLFSRLSSMFLQQLGKNIKFGQRSPNAIPMNKANSGEASLEEDLFLTSPMEIVTQQDIVLSDAENKSSDTPSSLSPLNLPGAGSEMEEKVAPVKPSRPKRHFSSAGTIESVNLDAIPLAIARLDNSAAKHKLAVKPKKQRVSKKHRRLAQDPQHEQGGLESRPCLDQNGHPGEDKPTWHEEEPNPLDSEEERRRQEDYWRELEAKCKRQKAEAAEKRRLEEQRLQALERRLWEENRRQELLEEEGEGQEPPLEAERAPREEQQRSLEAPGWEDAERREREERERLEAEEERRRLQAQAQAEERRRLEEDARLEERRRQEEEEGRCAEELKRQEEEEAEGWEELEQQEAEVQGPPEALEETGEGRRGAEEEDLGEEEEEGQAHLEDWRGQLSELLNDFEERLEDQERLKPEGQREHSEEPGICEEQNPEAERRREQQGRSGDFQGADRPGPEEKREEGDTEPLLKQEGPVEAAQPPVERKEAAALEQGRKVEELRWQEVDERQTMPRPYTFQVSSGGKQILFPKVNLSPVTPAKDTGLTAAPQEPKAPKASPVQHALPSSLSVPHTAILVTGAQLCGPAVNLSQIKDTACKSLLGLEEKKHAEAPAGENPPRGPGDARAGSGKAKPRQESPSSASALAEWASIRSRILKNAESDPRSSERDQLRPGDESTPRGRCDSRGNQRKTPPVNAKFSIMPAWQKFSDGGTETSKQSTEAESIRKRPMLGPSEETAPQPPPAGVRELGKGPEKSEMHREPADTTEGCKFAKDLPSFLVPSLPYPPQKVVAHTEFTTSSDSETANGIAKPDPVMPGGEEKASPFGIKLRRTNYSLRFNCDQQAEQKKKKRHSSTGDSADAGPPAAGSARGEKEMEGVALKHGPSLPQERKQAPSTRRDSAEPSSSRSVPVAHPGPPPASSQTPAPEHDKAANKMPLAQKPALAPKPTSQTPPASPLSKLSRPYLVELLSRRAGRPDPEPSEPSKEDQESSDRRPPSPPGPEERKGQKRDEEEEATERKPASPPLPATQQEKPSQTPEAGRKEKPMLQSRHSLDGSKLTEKVETAQPLWITLALQKQKGFREQQATREERKQAREAKQAEKLSKENVSVSVQPGSSSVSRAGSLHKSTALPEEKRPETAVSRLERREQLKKANTLPTSVTVEISDSAPPAPLVKEVTKRFSTPDAAPVSTEPAWLALAKRKAKAWSDCPQIIK

SEQ ID NO: 97020 - protein, 126 aa, Homo sapiens
  MOD_RES (1)..(1): Any amino acid
XISSEDSEGSTDVDEPLEVFISAPRSEPEPMDFRKLSTFRESFKKRVIGQDHDFSESSEEEAPAEASSGALRSKHGEKAPMTSRSTSTWRIPSRKRRFSSSDFSDLSNGEELQETCSSSLRRGSGK

SEQ ID NO: 97021 - protein, 228 aa, Homo sapiens
MAQKENSYPWPYGRQTAPSGLSTLPQRVLRKEPVTPSALVLMSRSNVQPTAAPGQKVMENSSGTPDILTRHFTIDDFEIGRPLGKGKFGNVYLAREKKSHFIVALKVLFKSQIEKEGVEHQLRREIEIQAHLHHPNILRLYNYFYDRRRIYLILEYAPRGELYKELQKSCTFDEQRTATIMEELADALMYCHGKKVIHRDIKPENLLLGLKGELKIADFGWSVHAPSL

SEQ ID NO: 97022 - protein, 76 aa, Homo sapiens
MGNGMTKMPKTWISWAEIRSHTSSLSMSHPSLCCRISPTFASRSLIPLRYPSKSTSKNVSTSSTAAALMGGTALCT

SEQ ID NO: 97023 - protein, 171 aa, Homo sapiens
MASKIGSRRWMLQLIMQLGSVLLTRCPFWGCFSQLMLYAERAEARRKPDIPVPYLYFDMGAAVLCASFMSFGVKRRWFALGAALQLAISTYAAYIGGYVHYGDWLKVRMYSRTVAIIGGFLVLASGAGELYRRKPRSRSLQSTGQVFLGIYLICVVCWGTVGWRCLAGSEL

SEQ ID NO: 97024 - protein, 71 aa, Homo sapiens
MHKEEHEVAVLGPPPSTILPRSTVINIHSETSVPDHVVWSLFNTLFLNWCCLGFIAFAYSVKVRTGRWLAT

SEQ ID NO: 97025 - protein, 53 aa, Homo sapiens
MWTNFFKLRLFCCLLAVLMVVVLVINVTQVEYLDHETVSATFIDSSGQFVSSQ

SEQ ID NO: 97026 - protein, 660 aa, Homo sapiens
MSGGGGGGGSAPSRFADYFVICGLDTETGLEPDELSALCQYIQASKARDGASPFISSTTEGENFEQTPLRRTFKSKVLARYPENVEWNPFDQDAVGMLCMPKGLAFKTQADPREPQFHAFIITREDGSRTFGFALTFYEEVTSKQICSAMQTLYHMHNAEYDVLHAPPADDRDQSSMEDGEDTPVTKLQRFNSYDISRDTLYVSKCICLITPMSFMKACRSVLEQLHQAVTSPQPPPLPLESYIYNVLYEVPLPPPGRSLKFSGVYGPIICQRPSTNELPLFDFPVKEVFELLGVENVFQLFTCALLEFQILLYSQHYQRLMTVAETITALMFPFQWQHVYVPILPASLLHFLDAPVPYLMGLHSNGLDDRSKLELPQEANLCFVDIDNHFIELPEDLPQFPNKLEFVQEVSEILMAFGIPPEGNLHCSESASKLKRLRASELVSDKRNGNIAGSPLHSYELLKENETIARLQALVKRTGVSLEKLEVREDPSSNKDLKVQCDEEELRIYQLNIQIREVFANRFTQMFADYEVFVIQPSQDKESWFTNREQMQNFDKASFLSDQPEPYLPFLSRFLETQMFASFIDNKIMCHDDDDKDPVLRVFDSRVDKIRLLNVRTPTLRTSMYQKCTTVDEAGGRKGMPLPSGGGKIGRSSTQNTCV

SEQ ID NO: 97027 - protein, 176 aa, Homo sapiens
  MOD_RES (1)..(1): Any amino acid
XTAAAPASPEQIIVHALSPEHLLNTSDNVTVQCHTPRVIIQTVATEDITSSISQAELTVDSDIQSSDFPEPPDALEADTFPDEIHHPKMTVEPSFNDAHVSKFSDQNSTELMNSVMVRTEEEISDTDLKQEESPSDLASAYVTEIPYSNIIRKNQISLDHPWAVLFQKIQRMSKIW

SEQ ID NO: 97028 - protein, 169 aa, Homo sapiens
MAGNSLVLPIVLWGRKAPTHCISAVLLTDDGATIVTGCHDGQICLWDLSVELQINPRALLFGHTASITCLSKACASSDKQYIVSASESGEMCLWDVSDGRCIEFTKLACTHTGIQFYQFSVGNQREGRLLCHGHYPEILVVDATSLEVLYSLVSKISPDWISSMSIIRS

SEQ ID NO: 97029 - protein, 153 aa, Homo sapiens
MAARTLGRGVGRLLGSLRGLSGQPARPPCGVSAPRRAASGPSGSAPAVAAAAAQPGSYPALSAQAAREPAAFWGPLARDTLVWDTPYHTVWDCDFSTGKIGWFLGGQLNVSVNCLDQHVRKSPESVALIWERDEPGTEVRITYSPWLQMPCGP

SEQ ID NO: 97030 - protein, 312 aa, Homo sapiens
MAAFLKMSVSVNFFRPFTRFLVPFTLHRKRNNLTILQRYMSSKIPAVTYPKNESTPPSEELELDKWKTTMKSSVQEECVSTISSSKDEDPLAATREFIEMWRLLGREVPEHITEEELKTLMECVSNTAKKKYLKYLYTKEKVKKARQIKKEMKAAAREEAKNIKLLETTEEDKQKNFLFLRLWDRNMDIAMGWKGAQAMQFGQPLVFDMAYENYMKRKELQNTVSQLLESEGWNRRNVDPFHIYFCNLKIDGALHRELVKRYQEKWDKLLLTSTEKSHVDLFPKDSIIYLTADSPNVMTTFRHDKVYVIGSF

SEQ ID NO: 97031 - protein, 84 aa, Homo sapiens
  MOD_RES (1)..(1): Any amino acid
XTTLQVLTLLLNKFRVEDGPSEFALYIVHESGERTKLKDCEYPLISRILHGPCEKIARIFLMEADLGVEVPHEVSGGQGWGGLL

SEQ ID NO: 97032 - protein, 129 aa, Homo sapiens
MEEIPAQEAAGSPRVQFQSLETQSECLSPEPQFVQDTDMEQGLTGAPPVPQVPALPREGSPGDQAAALLTARYQPGCVISGVCDIRGCGCAPYSRGMGIPGPCSEGPLQRSDVRELWERGLTGISNFQA

SEQ ID NO: 97033 - protein, 1598 aa, Homo sapiens
MDSKKRSSTEAEGSKERGLVHIWQAGSFPITPERLPGWGGKTVLQAALGVKHGVLLTEDGEVYSFGTLPWRSGPVEICPSSPILENALVGQYVITVATGSFHSGAVTDNGVAYMWGENSAGQCAVANQQYVPEPNPVSIADSEASPLLAVRILQLACGEEHTLALSISREIWAWGTGCQLGLITTAFPVTKPQKVEHLAGRVVLQVACGAFHSLALVQCLPSQDLKPVPERCNQCSQLLITMTDKEDHVIISDSHCCPLGVTLTESQAENHASTALSPSTETLDRQEEVFENTLVANDQSVATELNAVSAQITSSDAMSSQQNVMGTTEISSARNIPSYPDTQAVNEYLRKLSDHSVREDSEHGEKPVPSQPLLEEAIPNLHSPPTTSTSALNSLVVSCASAVGVRVAATYEAGALSLKKVMNFYSTTPCETGAQAGSSAIGPEGLKDSREEQVKQESMQGKKSSSLVDIREEETEGGSRRLSLPGLLSQVSPRLLRKAARVKTRTVVLTPTYSGEADALLPSLRTEVWTWGKGKEGQLGHGDVLPRLQPLCVKCLDGKEVIHLEAGGYHSLALTAKSQVYSWGSNTFGQLGHSDFPTTVPRLAKISSENGVWSIAAGRDYSLFLVDTEDFQPGLYYSGRQDPTEGDNLPENHSGSKTPVLLSCSKLGYISRVTAGKDSYLALVDKNIMGYIASLHELATTERRFYSKLSDIKSQILRPLLSLENLGTTTTVQLLQEVASRFSKLCYLIGQHGASLSSFLHGVKEARSLVILKHSSLFLDSYTEYCTSITNFLVMGGFQLLAKPAIDFLNKNQELLQDLSEVNDENTQLMEILNTLFFLPIRRLHNYAKVLLKLATCFEVASPEYQKLQDSSSCYECLALHLGRKRKEAEYTLGFWKTFPGKMTDSLRKPERRLLCESSNRALSLQHAGRFSVNWFILFNDALVHAQFSTHHVFPLATLWAEPLSEEAGGVNGLKITTPEEQFTLISSTPQEKTKWLRAISQAVDQALRGMSDLPPYGSGSSVQRQEPPISRSAKYTFYKDPRLKDATYDGRWLSGKPHGRGVLKWPDGKMYSGMFRNGLEDGYGEYRIPNKAMNKEDHYVGHWKEGKMCGQGVYSYASGEVFEGCFQDNMRHGHGLLRSGKLTSSSPSMFIGQWVMDKKAGYGVFDDITRGEKYMGMWQDDVCQGNGVVVTQFGLYYEGNFHLNKMMGNGVLLSEDDTIYEGEFSDDWTLSGKGTLTMPNGDYIEGYFSGEWGSGIKITGTYFKPSLYESDKDRPKVFRKLGNLAVPADEKWKAVFDECWRQLGCEGPGQGEVWKAWDNIAVALTTSRRQHRDSPEILSRSQTQTLESLEFIPQHVGAFSVEKYDDIRKYLIKACDTPLHPLGRLVETLVAVYRMTYVGVGANRRLLQEAVKEIKSYLKRIFQLVRFLFPELPEEGSTIPLSAPLPTERKSFCTGKSDSRSESPEPGKFWPATLSILGESKKVLPTTKDACFASAVECLQQISTTFTPSDKLKVIQQTFEEISQSVLASLHEDFLWSMDDLFPVFLYVVLRARIRNLGSEVHLIEDLMDPYLQHGEQGIMFTTLKACYYQIQREKLN

SEQ ID NO: 97034 - protein, 162 aa, Homo sapiens
MDLKALLSSLNDFASLSFAESWDNVGLLVEPSPPHTVNTLFLTNDLTEEVMEEVLQKKADLILSYHPPIFRPMKRITWNTWKERLVIRALENRVGIYSPHTAYDAAPQGVNNWLAKGLGACTSRPIHPSKAPNYPTEGNHRVEFNVNYTQDLDKVMSAVKGI

SEQ ID NO: 97035 - protein, 174 aa, Homo sapiens
MAGRGSLVSWRAFHGCDSAEELPRVSPRFLRAWHPPPVSARMPTRRWAPGTQCITKCEHTRPKPGELAFRKGDVVTILEACENKSWYRVKHHTSGQEGLLAAGALREREALSADPKLSLMPWFHGKISGQEAVQQLQPPEDGLFLVRESARHPGDYVLCVSFGRDVIHYRVLHR

SEQ ID NO: 97036 - protein, 58 aa, Homo sapiens
LRRRGLQKELSLPRRGSLIDSQKWNCLVKRLTPRSLSPTPSSPGSPCSPLLAFHFWRE

SEQ ID NO: 97037 - protein, 62 aa, Homo sapiens
MEAEVDKLELMFQKAESDLDYIQYRLEYEIKTNHPDSASELSPLTKEEKTAAEQFKFHMPDL

SEQ ID NO: 97038 - protein, 64 aa, Homo sapiens
MPFTLHLRSRLPSAIRSLILQKKPNIRNTSSMAGELRPASLVVLPRSLAPAFERFCQVNTGPLP

SEQ ID NO: 97039 - protein, 196 aa, Homo sapiens
MSGRSGKKKMSKLSRSARAGVIFPVGRLMRYLKKGTFKYRISVGAPVYMAAVIEYLAAEILELAGNAARDNKKARIAPRHILLAVANDEELNQLLKGVTIASGGVLPRIHPELLAKKRGTKGKSETILSPPPEKRGRKATSGKKGGKKSKAAKPRTSKKSKPKDSDKEGTSNSTSEDGPGDGFTILSSKSLVLGQK

SEQ ID NO: 97040 - protein, 141 aa, Homo sapiens
MAEVEQKKKRTFRKFTYRGVDLDQLLDMSYEQLMQLYSARQRRRLNRGLRRKQHSLLKRLRKAKKEAPPMEKPEVVKTHLRDMIILPEMVGSMVGVYNGKTFNQPEMIGHYLGEFSITYKPVKHGRPGIGATHSSRFIPLK

SEQ ID NO: 97041 - protein, 142 aa, Homo sapiens
MGPEALSSLLLLLLVASGDADMKGHFDPAKCRYALGMQDRTIPDSDISASSSWSDSTAARHSRLESSDGDGAWCPAGSVFPKEEEYLQVDLQRLHLVALVGTQGRHAGGLGKEFSRSYRLRYSRDGRRWMGWKDRWGQEVIS

SEQ ID NO: 97042 - protein, 171 aa, Homo sapiens
MAPTLQQAYRRRWWMACTAVLENLFFSAVLLGWGSLLIILKNEGFYSSTCPAESSTNTTQDEQRRWPGCDQQDEMLNLGFTIGSFVLSATTLPLGILMDRFGPRPVRLVGSACFTASCTLMALASRDVEALSPLIFLALSLNGFGGICLTFTSLTEEDQAEWAGPGPQGDR

SEQ ID NO: 97043 - protein, 72 aa, Homo sapiens
MTLRPSLLPLHLLLLLLLSAAVCRAEAGLETESPVRTLQVETLSDRRWSPQNHVPSPLLLETRFTYTTREAW

SEQ ID NO: 97044 - protein, 558 aa, Homo sapiens
MSAANPETPNSTISREASTQSSSAAASQGWVLPEGKIVPNTVFVGGIDARMDETEIGSCFGRYGSVKEVKIITNRTGVSKGYGFVSFVNDVDVQKIVGSQIHFHGKKLKLGPAIRKQKLCARHVQPRPLVVNPPPPPQFQNVWRNPNTETYLQPQITPNPVTQHVQAYSAYPHSPGQVITGCQLLVYNYQEYPTYPDSAFQVTTGYQLPVYNYQPFPAYPRSPFQVTAGYQLPVYNYQAFPAYPNSPFQVATGYQFPVYNYQPFPAYPSSPFQVTAGYQLPVYNYQAFPAYPNSPFQVATGYQFPVYNYQAFPAYPNSPVQVTTGYQLPVYNYQAFPAYPNSPFQVATGYQFPVYNYQAFPAYPNSPVQVTTGYQLPVYNYQAFPAYPSSPFQVTTGYQLPVYNYQAFPAYPSSPFQVTTGYQLPVYNYQAFPAYPSSPFQVTTGYQLPVYNYQAFPAYPSSPFQVTTGYQLPVYNYQAFPAYPSSPFQVTTGYQLPVYNYQAFPAYPNSAVQVTTGYQFHVYNYQMPPQCPVGEQRRNLWTEAYKWWYLVCLIQRRD

SEQ ID NO: 97045 - protein, 48 aa, Homo sapiens
MQKALGILSNQEGWKKESQQDNGDKVMSKVVPDVGKVFRLEVVVDQPM

SEQ ID NO: 97046 - protein, 476 aa, Homo sapiens
MKRVLVLLLAVAFGHALERGRDYEKNKVCKEFSHLGKEDFTSLSLVLYSRKFPSGTFEQVSQLVKEVVSLTEACCAEGADPDCYDTRTSALSAKSCESNSPFPVHPGTAECCTKEGLERKLCMAALKHQPQEFPTYVEPTNDEICEAFRKDPKEYANQFMWEYSTNYGQAPLSLLVSYTKSYLSMVGSCCTSASPTVCFLKERLQLKHLSLLTTLSNRVCSQYAAYGEKKSRLSNLIKLAQKVPTADLEDVLPLAEDITNILSKCCESASEDCMAKELPEHTVKLCDNLSTKNSKFEDCCQEKTAMDVFVCTYFMPAAQLPELPDVELPTNKDVCDPGNTKVMDKYTFELSRRTHLPEVFLSKVLEPTLKSLGECCDVEDSTTCFNAKGPLLKKELSSFIDKGQELCADYSENTFTEYKKKLAERLKAKLPDATPTELAKLVNKHSDFASNCCSINSPPLYCDSETRVGATQGNDL

SEQ ID NO: 97047 - protein, 388 aa, Homo sapiens
MVSMTTGLGPSHPPILHKTYCSFSHKYLMKRIPQNPRYQHIKSRLDTGNSMTKYTEKLEEIKKNYRYKKDELFKRLKVTTFAQLIIQVASLSDQTLEVTAEEIQRLEDNDSAASDPDAETTARTNGKGNPGEQSPSPEQFINNAGAGDSSRSTLQSVISGVGELDLDKGPVKKAEPHTKDKPYPDCPFLLLDVRDRDSYQQCHIVGAYSYPIATLSRTMNPYSNDILEYKNAHGKIIILYDDDERLASQAATTMCERGFENLFMLSGGLKVLAQKFPEGLITGSLPASCQQALPPGSARKRSSPKGPPLPAENKWRFTPEDLKKIEYYLEEEQGPADHPSRLNQANSSGRESKVPGARSAQNLPGGGPASHSNPRSLSSGHLQGKPWK

SEQ ID NO: 97048 - protein, 117 aa, Homo sapiens
MMEEEELEFVEELEAVLQLTPEVQLAIEQVFPSQDPLDRADFNAVEYINTLFPTEQSLANIDEVVNKIRLKIRRLDDNIRTVVRGQTNVGQDGRQDKTGQAPTAATCCPSVSLGPGP

SEQ ID NO: 97049 - protein, 119 aa, Homo sapiens
EKTFHRFAAFGESSSSGTEMNNKNFSKLCKDCGIMDGKTVTSTDVDIVFSKVKAKNARTITFQQFKEAVKELGQKRFKGKSPDEVLENIYGLMEGKDPATTGATLLPRTGWKNIFGVKR

SEQ ID NO: 97050 - protein, 221 aa, Homo sapiens
MELIQDISRPPLEYVKGVPLIKYFAEALGPLQSFQARPDDLLISTYPKSGTTWVSQILDMIYQGGDLEKCHRAPIFMRVPFLEFKVPGIPSGVCVLGARGVEEDRAGASAHQTFPDPLLRDGDSEKHTSPTTPEDTPAPGSAPPDSVGSEGQGGLCCPQRKGCGGFLLPLLPHGQSVPSPWDLGKLPGEVHGWRSVLWVLVPARARVVGAEPHPPCSLPLL

SEQ ID NO: 97051 - protein, 57 aa, Homo sapiens
MPTTELGTLRPPLLQLSTLGTAPPTLALHYHPHPFLNSVYIGPAGPFSIFPSSRLKR

SEQ ID NO: 97052 - protein, 768 aa, Homo sapiens
MVSWGRFICLVVVTMATLSLARPSFSLVEDTTLEPEEPPTKYQISQPEVYVAAPGESLEVRCLLKDAAVISWTKDGVHLGPNNRTVLIGEYLQIKGATPRDSGLYACTASRTVDSETWYFMVNVTDAISSGDDEDDTDGAEDFVSENSNNKRAPYWTNTEKMEKRLHAVPAANTVKFRCPAGGNPMPTMRWLKNGKEFKQEHRIGGYKVRNQHWSLIMESVVPSDKGNYTCVVENEYGSINHTYHLDVVERSPHRPILQAGLPANASTVVGGDVEFVCKVYSDAQPHIQWIKHVEKNGSKYGPDGLPYLKVLKHSGINSSNAEVLALFNVTEADAGEYICKVSNYIGQANQSAWLTVLPKQQAPGREKEITASPDYLEIAIYCIGVFLIACMVVTVILCRMKNTTKKPDFSSQPAVHKLTKRIPLRRQVTVSAESSSSMNSNTPLVRITTRLSSTADTPMLAGVSEYELPEDPKWEFPRDKLTLGKPLGEGCFGQVVMAEAVGIDKDKPKEAVTVAVKMLKDDATEKDLSDLVSEMEMMKMIGKHKNIINLLGACTQDGPLYVIVEYASKGNLREYLRARRPPGMEYSYDINRVPEEQMTFKDLVSCTYQLARGMEYLASQKCIHRDLAARNVLVTENNVMKIADFGLARDINNIDYYKKTTNGRLPVKWMAPEALFDRVYTHQSDVWSFGVLMWEIFTLGGSPYPGIPVEELFKLLKEGHRMDKPANCTNELYMMMRDCWHAVPSQRPTFKQLVEDLDRILTLTTNE

SEQ ID NO: 97053 - protein, 156 aa, Homo sapiens
MEELIWEQYTVTLQKDSKRGFGIAVSGGRDNPHFENGETSIVISDVLPGGPADGLLQENDRVVMVNGTPMEDVLHSFAVQQLRKSGKVAAIVVKRPRKVQVAALQASPPLDQDDRAFEVMDEFDGRSFRSGYSERSRLNSHGGRSRSWEDSPERGR

SEQ ID NO: 97054 - protein, 372 aa, Homo sapiens
MSPKRIAKRRSPPADAIPKSKKVKDTRAAASRRVPGARSCQVSHRSHSTEPGLVLTLGQGDVGQLGLGENVMERKKPALVSIPEDVVQAEAGGMHTVCLSKSGQVYSFGCNDEGALGRDTSVEGSEMVPGKVELQEKVVQVSAGDSHTAALTDDGRVFLWGSFRDNNGVIGLLEPMKKSMVPVQVQLDVPVVKVASGNDHLVMLTADGDLYTLGCGEQGQLGRVPELFANRGGRQGLERLLVPKCVMLKSRGSRGHVRFQDAFCGAYFTFAISHEGHVYGFGLSNYHQLGTPGTESCFIPQNLTSFKNSTKSWVGFSGGQHHTVCMDSEGKAYSLGRAEYGRLGLGEGAEEKSIPTLISRLPAVSSVACGAS

SEQ ID NO: 97055 - protein, 133 aa, Homo sapiens
  MOD_RES (1)..(1): Any amino acid
XLPSFCINHFSLPLHSHAFSMGEGVPPGNYGNYGYANSGYSACEEENERLTESLRSKVTAIKSLSIEIGHEVKTQNKLLAEMDSQFDSTTGFLGKTMGKLKILSRGSQTKLLCYMMLFSLFVFFIIYWIIKLR

SEQ ID NO: 97056 - protein, 93 aa, Homo sapiens
MGSRNSSSAGSGSGDPSEGLPRRGAGLRRSEEEEEEDEDVDLAQVLAYLLRRGQVRLVQGGGAANLQFIQALLDSEEENDRAWDGRLGDRYNP

SEQ ID NO: 97057 - protein, 167 aa, Homo sapiens
MSGSRESCTVGCVCVFTRMRVPVCLCVCITNLLLGLTVRLKLALCLYVAGDSRDMSREMQDVDLAEVKPLVEKGETITGLLQEFDVQEQDIETLHGSVHVTLCGTPKGNRPVILTYHDIGMNHKTCYNPLFNYEDMQEITQHFAVCHVDAPGQQDGAASFPAGYMYP

SEQ ID NO: 97058 - protein, 273 aa, Homo sapiens
MPRVYIGRLSYNVREKDIQRFFSGYGRLLEVDLKNGYGFVEFEDSRDADDAVYELNGKELCGERVIVEHARGPRRDRDGYSYGSRSGGGGYSSRRTSGRDKYGPPVRTEYRLIVENLSSRCSWQDLKDFMRQAGEVTYADAHKERTNEGVIEFRSYSDMKRALDKLDGTEINGRNIRLIEDKPRTSHRRSYSGSRSRSRSRRRSRSRSRRSSRSRSRSISKSRSRREPIWRLRAAEGKALMASDRTPITAESRASPLAQGQKDWEANKLHPHL

SEQ ID NO: 97059 - protein, 683 aa, Homo sapiens [sequence omitted]

SEQ ID NO: 97060 - protein, 82 aa, Homo sapiens
MAGQGLPLHVATLLTGLLECLGFAGVLFGWPSLVFVFKNEDYFKDLCGPDAGPIGNATGQAGRLGCMGDLFSTPDCKAQDER

SEQ ID NO: 97061 - protein, 225 aa, Homo sapiens
MEVAEPSSPTEEEEEEEEHSAEPRPRTRSNPEGAEDRAVGAQASVGSRSEGEGEAASADDGSLNTSGAGPKSWQVPPPAPEVQIRTPRVNCPEKVIICLDLSEEMSLPKLESFNGSKTNALNVSQKMIEMFVRTKHKIDKSHEFALVVVNDDTAWLSGLTSDPRELCSCLYDLETASCSTFNLEGLFSLIQQKTELPVTENVQTIPPPYVVRTILVYSRPPCQPQ

SEQ ID NO: 97062 - protein, 242 aa, Homo sapiens
  MOD_RES (1)..(1): Any amino acid
XRHFTIDDFEIGRPLGKGKFGNVYLAREKKSHFIVALKVLFKSQIEKEGVEHQLRREIEIQAHLHHPNILRLYNYFYDRRRIYLILEYAPRGELYKELQKSCTFDEQRTATIMEELADALMYCHGKKVIHRDIKPENLLLGLKGELKIADFGWSVHAPSLRRKTMCGTLDYLPPEMIEGRMHNEKVDLKFPASVPMGAQDLISKLLRHNPSERLPLAQVSAHPWVRANSRRVLPPSALQSVA

SEQ ID NO: 97063 - protein, 96 aa, Homo sapiens
MDFSSNGKYLATCADDRTIRIWSTKDFLQREHRSMRANVELDHATLVRFSPDCRAFIVWLANGDTLRVFKMTKREDGGYTFTATPEDFPKKHKAPV

SEQ ID NO: 97064 - protein, 103 aa, Homo sapiens
MAEETDHLILLAIMTITFAVCSLPFTIFAYMNETSSRKEKWDLQALRFLSINSIIDPWVFAILRPPVLRLMRSVLCCRISLRTQDATQTSCSTQSDASKQADL

SEQ ID NO: 97065 - protein, 253 aa, Homo sapiens
MPPVGGKKAKKGILERLNAGEIVIGDGGFVFALEKRGYVKAGPWTPEAAVEHPEAGASIIGVNCHFDPTISLKTVKLMKEGLEAARLKAHLMSQPLAYHTPDCNKQGFIDLPEFPFGLEPRVATRWDIQKYAREAYNLGVRYIGGCCGFEPYHIRAIAEELAPERGFLPPASEKHGSWGSGLDMHTKPWVRARARKEYWENLRIASGRPYNPSMSKPDGWGVTKGTAELMQQKEATTEQQLKELFEKQKFKSQ

SEQ ID NO: 97066 - protein, 81 aa, Homo sapiens
VSYIFMGDGMITFHISSKKSSTKTDSHRLGQHIEDALLDVASLFQAGQHFKRRFRGSGKENSRHSRQLASPRNKGEIATAG

SEQ ID NO: 97067 - protein, 56 aa, Homo sapiens
MLGQSIRRFTTSVVRRSHYEEGPGKNLPFSVENKWSLLAKMCLYFGSAFATPFLVI

SEQ ID NO: 97068 - protein, 673 aa, Homo sapiens
MMEEEELEFVEELEAVLQLTPEVQLAIEQVFPSQDPLDRADFNAVEYINTLFPTEQSLANIDEVVNKIRLKIRRLDDNIRTVVRGQTNVGQDGRQALEEAQKAIQQLFGKIKDIKDKAEKSEQMVKEITRDIKQLDHAKRHLTTSITTLNHLHMLAGGVDSLEAMTRRRQYGEVANLLQGVMNVLEHFHKYMGIPQIRQLSERVKAAQTELGQQILADFEEAFPSQGTKRPGGPSNVLRDACLVANILDPRIKQEIIKKFIKQHLSEYLVLFQENQDVAWLDKIDRRYAWIKRQLVDYEEKYGRMFPREWCMAERIAVEFCHVTRAELAKIMRTRAKEIEVKLLLFAIQRTTNFEGFLAKRFSGCTLTDGTLKKLESPPPSTNPFLEDEPTPEMEELATEKGDLDQPKKPKAPDNPFHGIVSKCFEPHLYVYIESQDKNLGELIDRFVADFKAQGPPKPNTDEGGAVLPSCADLFVYYKKCMVQCSQLSTGEPMIALTTIFQKYLREYAWKILSGNLPKTTTSSGGLTISSLLKEKEGSEVAKFTLEELCLICNILSTAEYCLATTQQLEEKLKEKVDVSLIERINLTGEMDTFSTVISSSIQLLVQDLDAACDPALTAMSKVRSWEMASYKLTRAAQGGFYWPLSVASPGSSERKGSAEENGEAPEFLKALS

SEQ ID NO: 97069 - protein, 113 aa, Homo sapiens
MCKGLAGLPASCLRSAKDMKHRLGFLLQKSDSCEHNSSHNKKDKVVICQRVSQEEVKKWAESLENLISHECGLAAFKAFLKSEYSEENIDFWISCEEYKKIKSPSKLSPKAKY

SEQ ID NO: 97070 - protein, 109 aa, Homo sapiens
MPQNVAKTEPVSILQPQTTVNPDRIKQVKIIVPNSTAGLIIGKGGATVKAVMEQSGAWVQLSQKPDGINLQERVVTVSGEPEQNRKAVELIIQKIQEDPQSGSCLNISY

SEQ ID NO: 97071 - protein, 628 aa, Homo sapiens
MMQESGTETKSNGSAIQNGSGGSNHLLECGGLREGRSNGETPAVDIGAADLAHAQQQQQQALQVARQLLLQQQQQQQVSGLKSPKRNDKQPALQVPVSVAMMTPQVITPQQMQQILQQQVLSPQQLQVLLQQQQALMLQQQQLQEFYKKQQEQLQLQLLQQQHAGKQPKEQQQVATQQLAFQQQLLQMQQLQQQHLLSLQRQGLLTIQPGQPALPLQPLAQGMIPTELQQLWKEVTSAHTAEETTGNNHSSLDLTTTCVSSSAPSKTSLIMNPHASTNGQLSVHTPKRESLSHEEHPHSHPLYGHGVCKWPGCEAVCEDFQSFLKHLNSEHALDDRSTAQCRVQMQVVQQLELQLAKDKERLQAMMTHLHVKSTEPKAAPQPLNLVSSVTLSKSASEASPQSLPHTPTTPTAPLTPVTQGPSVITTTSMHTVGPIRRRYSDKYNVPISSADIAQNQEFYKNAEVRPPFTYASLIRQAILESPEKQLTLNEIYNWFTRMFAYFRRNAATWKNAVRHNLSLHKCFVRVENVKGAVWTVDEVEFQKRRPQKISGNPSLIKNMQSSHAYCTPLNAALQASMAENSIPLYTTASMGNPTLGNLASAIREELNGAMEHTNSNESDSSPGRSPMQ

SEQ ID NO: 97072 - protein, 488 aa, Homo sapiens
MQFVSWATLLTLLVRDLAEMGSPDAAAAVRKDRLHPRQVKLLETLSEYEIVSPIRVNALGEPFPTNVHFKRTRRSINSATDPWPAFASSSSSSTSSQAHYRLSAFGQQFLFNLTANAGFIAPLFTVTLLGTPGVNQTKFYSEEEAELKHCFYKGYVNTNSEHTAVISLCSGMLGTFRSHDGDYFIEPLQSMDEQEDEEEQNKPHIIYRRSAPQREPSTGRHACDTSEHKNRHSKDKKKTRARKWGERINLAGDVAALNSGLATEAFSAYGNKTDNTREKRTHRRTKRFLSYPRFVEVLVVADNRMVSYHGENLQHYILTLMSIVASIYKDPSIGNLINIVIVNLIVIHNEQDGPSISFNAQTTLKNFCQWQHSKNSPGGIHHDTAVLLTRQDICRAHDKCDTLGLAELGTICDPYRSCSISEDSGLSTAFTIAHELGHVFNMPHDDNNKCKEEGVKSPQHVMAPTLNFYTNPWMWSKCSRKYITEFLE

SEQ ID NO: 97073 - protein, 89 aa, Homo sapiens
MSMPLHQISAIPSQDAISARVYRSKTKEKEREEQNEKTLGHFMSHSSNISKAGSPPSASAPAPVSSFSRTSITPSSQDICRICHCEGDD

SEQ ID NO: 97074 - protein, 114 aa, Homo sapiens
  MOD_RES (1)..(1): Any amino acid
XVSTTGPNPFTTLTDRELEEYRREVERKQKGSEENLDEAREQKEKSPPDQPAVPHPPPSTPIKLEEGKTDLYVSCDQTLCRSRLLEMTVMLPPLSQLSPICPLMNLQKHSASQC

SEQ ID NO: 97075 - protein, 83 aa, Homo sapiens
  MOD_RES (1)..(1): Any amino acid
XFIMGYSVVAGAAGRLLFGYDSFGNMCGKKNSPVEGAPLSGQDMTLKKATYKEDRRRKGDLDAHVLPFHIVFIMQCQQTVIPG

SEQ ID NO: 97076 - protein, 258 aa, Homo sapiens
  MOD_RES (1)..(1): Any amino acid
XYIAGPYECEIRNPVSASRSDPVTLNLLPKLSKPYITINNLNPRENKDVLTFTCEPKSKNYTYIWWLNGQSLPVSPRVKRPIENRILILPNVTRNETGPYQCEIRDRYGGIRSDPVTLNVLYGPDLPSIYPSFTYYRSGENLYLSCFAESNPRAQYSWTINGKFQLSGQKLSIPQITTKHSGLYACSVRNSATGKESSKSITVKVSGHISNHWLYYQGFDWDVIFKNIDRMNQYELQAKSEVSLGLASYSQGFCKSLI

SEQ ID NO: 97077 - protein, 202 aa, Homo sapiens
MHGPRLSWTLFKTSLHLQPPSSLRLKLTILRDLRAAKLRCSNPDSRTGGVPVPRAWSAGGPALGLMAAPVRLGRKRPLPACPNPLFVRWLTEWRDEATRSRRRTRFVFQKALRSLRRYPLPLRSGKEAKILQHFGDGLCRMLDERLQRHRTSGGDHAPDSPSGENSPAPQGRLAEVQDSSMPVPAQPKAGGSGSYWPARHSG

SEQ ID NO: 97078 - protein, 88 aa, Homo sapiens
MSHRELPAWVSFPDVEKAEWLNKIVAQVWPFLGQYMEKLLAETVAPAVRGSNPHLQTFTFTRVELGEKPLRIIGVKVHPGQRKEQILL

SEQ ID NO: 97079 - protein, 121 aa, Homo sapiens
MSDKSELKAELERKKQRLAQIREEKKRKEEERKKKETDQKKEAVAPVQEESDLEKKRREAEALLQSMGLTPESPIDEDLLNLEWLKSRKSTFLLEKLSRIQRKLRLQLWLNPKKMKRKMMM

SEQ ID NO: 97080 - protein, 144 aa, Homo sapiens
MPKNSKVVKRELDDDVTESVKDLLSNEDAADDAFKTSELIVDGQEEKDTDVEEGSEVEDERPAWNSKLQYILAQVGFSVGLGNVWRFPYLCQKNGGGVLFCSSLLQRHHWLEFVLFFSVFSATPALGSVSFGEKCFTHFCRTRM

SEQ ID NO: 97081 - protein, 121 aa, Homo sapiens
MLCSLLLCECLLLVAGYAHDDDWIDPTDMLNYDAASGTMRKSQAKYGISGEKDVSPDLSCADEISECYHKLDSLTYKIDECEKKKREDYESQSNPVFRRYLNKILIEAGKLGLPDENKGDM

SEQ ID NO: 97082 - protein, 115 aa, Homo sapiens
MLLVGCKSDLRTDVSTLVELSNHRQTPVSYDQGANMAKQIGAATYIECSALQSENSVRDIFHVATLACVNKTNKNVKRNKSQRATKRISHMPSRPELSAVATDLRKDKAKSCTVM

SEQ ID NO: 97083 - protein, 93 aa, Homo sapiens
  MOD_RES (1)..(1): Any amino acid
XTQKLEEALKEHKSSVSCIRVKRNNEECVTASTDGTCIIWDLVRLRRNQMILANTLFQCVCYHPEEFQIITSGTDRKVEMTIWSKFGIIMRVK

SEQ ID NO: 97084 - protein, 195 aa, Homo sapiens
MQIIRHSEQTLKTALISKNPVLVSQYEKLNAGEQRLMNEAFQPASDLFGPITLHSPSDWITSHPEAPQDFEQFFSDPYRKTPSPNKRSIYIQSIGSLGNTRIISEEYIKWLTGYCKAYFYGLRVKLLEPVPVSVTRCSFRVNENTHNLQIHAGDILKFLKKKKPEDAFCVVGITMIDLYPRDSWNFVFGQASLTD

SEQ ID NO: 97085 - protein, 92 aa, Homo sapiens
MEALILEPSLYTVKAILILDNDGDRLFAKYYDDTYPSVKEQKAFEKNIFNKTHRTDSEIALLEGLTVVYKSSIDLYFYVIGSSYENELMLMA

SEQ ID NO: 97086 - protein, 143 aa, Homo sapiens
MSEGVDLIDIYADEEFNQDPEFNNTDQIDLYDDVLTATSQPSDDRSSSTEPPPPVRQEPSPKPNNKTPAILYTYSGLRNRRAAVYVGSFSWWTTDQQLIQVIRSIGVYDVVELKFAENRANGQSKGYAEVVVASENSVHKLLE

SEQ ID NO: 97087 - protein, 55 aa, Homo sapiens
  MOD_RES (1)..(1): Any amino acid
XSKIVVEFLQSNSDSTYEDLINKIERTPSCDTRSLWWSRWRVMTRPGTVMSSPSS

SEQ ID NO: 97088 - protein, 153 aa, Homo sapiens
MPLSDFILALKDNPYFGAGFGLVGVGTALALARKGVQLGLVAFRRHYMITLEVPARDRSYAWLLSWLTRHSTRTQHLSVETSYLQHESGRISTKFEFVPSPGNHFIWYRGKWIRVERSREMQMIDLQTGTPWESVTFTALGTDRKVFFNILEE

SEQ ID NO: 97089 - protein, 148 aa, Homo sapiens
FKTNYEKRSFKVPIQANETLVGAVINNVSEAMETLTRITEELVPVPGSVNGVNALGLVVFSMCFGFVIGNMKEQGQALREFFDSLNEAIMRLVAVIMCLVETRLQPCWCCFSPVIVLPLLYFLVTRKNPWVFIGGLLQALITALGTSS

SEQ ID NO: 97090 - protein, 50 aa, Homo sapiens
MYNILKAEHDSILAEKAEKDSKPIKVTLPDGKQVDAESWKTTPYQIACGI

SEQ ID NO: 97091 - protein, 643 aa, Homo sapiens
MNVVFAVKQYISKMIEDSGPGMKVLLMDKETTGIVSMVYTQSEILQKEVYLFERIDSQNREIMKHLKAICFLRPTKENVDYIIQELRRPKYTIYFIYFSNVISKSDVKSLAEADEQEVVAEVQEFYGDYIAVNPHLFSLNILGCCQGRNWDPAQLSRTTQGLTALLLSLKKCPMIRYQLSSEAAKRLAECVKQVITKEYELFEFRRTEVPPLLLILDRCDDAITPLLNQWTYQAMVHELLGINNNRIDLSRVPGISKDLREVVLSAENDEFYANNMYLNFAEIGSNIKNLMEDFQKKKPKEQQKLESIADMKAFVENYPQFKKMSGTVSKHVTVVGELSRLVSERNLLEVSEVEQELACQNDHSSALQNIKRLLQNPKVTEFDAARLVMLYALHYERHSSNSLPGLMMDLRNKGVSEKYRKLVSAVVEYGGKRVRGSDLFSPKDAVAITKQFLKGLKGVENVYTQHQPFLHETLDHLIKGRLKENLYPYLGPSTLRDRPQDIIVFVIGGATYEEALTVYNLNRTTPGVRIVLGGTTVHNTKRDGVSLCSPAWFRTPGLKRSTRLSLPKCWDYSFPRGSSGFWTAQPKQGELSSHIKVSEQKMKRWLGEGHSFLSCPHYRFSLLNKGVGEQLWVLCWLLELISR

SEQ ID NO: 97092 - protein, 105 aa, Homo sapiens
MDPAARVVRALWPGGCALAWRLGGRPQPLLPTQSRAGFAGAAGGPSPVAAARKGSPRLLGAAALALGGALGLYHTARWHLRAQDLHAERSAAQMLICWTRGNRGG

SEQ ID NO: 97093 - protein, 278 aa, Homo sapiens
MAGAQTLLTFRDVAIEFSLEEWKCLDLAQQNLYRDVMLENYRNLFSVGLTVCKPGLITCLEQRKEPWNVKRQEAADGHPALCSPGVLQTVKWFLEFRCIFSLAMSSHFTQDLLPEQGIQDAFPKRILRGYGNCGLDNLYLRKDWESLDECKLQKDYNGLNQCSSTTHSKIFQYNKYVKIFDNFSNLHRRNISNTGEKPFKCQECGKSFQMLSFLTEHQKIHTGKKFQKCGECGKTFIQCSHFTEPENIDTGEKPYKCQECNNVIKTCSVLTKNRIYAG

SEQ ID NO: 97094 - protein, 89 aa, Homo sapiens
MHARGPHGQLSPALPLASSVLMLLMSTLWLVGAGPGLVLAPELLLDPWQETGSMLPRLVLNSWPQVILPSQPPQVLGLYSCEPLRPALR

SEQ ID NO: 97095 - protein, 285 aa, Homo sapiens
MASFSIFRGTCLLAGSLPASAISPVHAAQETEIAVQAKQPDVEEILSKGQHLYKEKPATQPVKRKLEDLSSEWKAVNRLLQELRAKQPDLAPGLTTIGASPTQTVTLVTQPVVTKETAISKLEMPSSLMLEVPALADFNRAWTELTDWLSLLDQVIKSQRVMVGDLEDINEMIIKQKATMQDLEQRRPQLEELITAAQNLKNKTSNQEARTIITDRIERIQNQWDEVQEHLQNRRQQLNEMLKDSTQWLEAKEEAEQVLGQARAKLESWKEGPYTVDAIQKKITE

SEQ ID NO: 97096 - protein, 72 aa, Homo sapiens
MCPTCKEPFPKSDMETHMAAEHCQVTCKCNKKLEKRLLKKHEETECPLRLAVCQHCDLELSILKLKEHEDYC

SEQ ID NO: 97097 - protein, 155 aa, Homo sapiens
  MOD_RES (1)..(1): Any amino acid
XTDGVITVKRPLRFHNPQIHFLVYAWDSTYRKFSTKVTLNTVGHHHRPPPHQASVSGIQAELLTFPNSSPGLRRQKRDWVIPPISCPENEKGPFPKNLVQIKSNKDKEGKVFYSITGQGADTPPVGVFIIERETGWLKVTEPLDRERIATYTEPL

SEQ ID NO: 97098 - protein, 20 aa, Homo sapiens
  MOD_RES (1)..(1): Any amino acid
XYRVNRKLTFGANTRGIMKL

SEQ ID NO: 97099 - protein, 1288 aa, Homo sapiens
MSSEDLAEIPQLQKLSIPHGFQNKEAASSPTPSITLSQVPDLQPGSQLFTEIHLAKIEKMFEEDINSTGALGMDAFIKAMKKVLSSVSDEMLKELFLKVDSDCEGFVTWQKYVDYMMREFQGKEDMRKSQYRLHFYLPMTVVPLNHGCEVVKVVFLIHRFKKIGCFLTVTKDGILQFWSESFSLMSSFRLNQTQQLYNQPMWVIDMVCLHNMNLVAVASTRQKIDFFDISDHKCVRAFTFVDLDSCALVMDYWSDYHRGVFCYGDAKGNVIVFTSENMTSGLFNPRILPRASKWDHWIKVSLQKLLNEKSALHRSYRLKALHPNWCEQVKFIPQMNVVVSCSAIEKSSLVLTILPAKASKKPRLSVLRLRKGILCFDYCPDRNFLVTGGYDAFIRLWNPFVSKRPVWLMKGHQTSVTHILVDSRNNSILISVSKDKNIRVWDMLDYICLQSFCGKFFALGNCPITSAYFFEKDNTLICSTYSIGILKGYLEAQGLIKARKRTTHCSPLCAVLYSKIFKQVVSGCLRGTVSVWEVVTGRKTMEFAVSGGQHVEMTAMALDESERCLLTGLRDGTMKMWNYNIGKCLLTFPSPEQLEISGIIHMNKVFYVTGWSKRITHFLFHKTKPVLLCYHWQTYHTEDILSMAKYRNQFLGTSSYSGDILFWNTGTLKPIFNFNASRSPSPLQPKRVQDVNNCLAESHRPSRPYVEREKWTYKTSRKLSSLSPESVANTNLRRSLVSAPPVMRCPRDKEPDRPVPQQKPSSASGTSRQSSKIHSKQSIYKEDETRKGEWQKNMLVQSSASVEKIIFLQTRPRLPHTAALLSSCMDGYIYAWSLHENGGLLGKFPVDLDNGDVVVGAMATDKNDWILITGDCKGYIKIWDIKDYCALIDKQPFQSSGAKVVSEAHNKFRLLIPQQLGTNFPHYIPLEDKEVVAGHTISLVPPTLLMTWKGHLNSVADILYVDNFQLVISAGQDRDVKAWKLSGDAIGTFGLSVWKRLQDACDGPRENRASLEEDGDSTGTTQKVLHLELQEQRDLAEALIYQRREQAALMALLHGKADKEADTWAKLQKMALMSPWAGERPLEDIEDSWNKWESRDKQVSKVLGAAYKPKERLQNTRFLSTRVPYGWMKHQISPQVYQSLHFSDLMPTQQPDFLTSRGPDQQDQHIRLVAHHVQKDLVPSREQAVLDTTDSTPAAASSPSSLLSVTASASRLLDSSLPTFLTPQFSFLLRPQSASTAHSTPSVPSPVSKSTLQGSVTPKHIVSSFERPPRPLKATFMSSVKGSSHVRF

SEQ ID NO: 97100 - protein, 780 aa, Homo sapiens
MAEESSSSSSSSSPTAATSQQQQLKNKSILISSVASVHHANGLAKSSTTVSSFANSKPGSAKKLVIKNFKDKPKLPENYTDETWQKLKEAVEAIQNSTSIKYNLEELYQAVENLCSYKISANLYKQLRQICEDHIKAQIHQFREDSLDSVLFLKKIDRCWQNHCRQMIMIRSIFLFLDRTYVLQNSMLPSIWDMGLELFRAHIISDQKVQNKTIDGILLLIERERNGEAIDRSLLRSLLSMLSDLQIYQDSFEQRFLEETNRLYAAEGQKLMQEREVPEYLHHVNKRLEEEADRLITYLDQTTQKSLIATVEKQLLGEHLTAILQKGLNNLLDENRIQDLSLLYQLFSRVRGGVQVLLQQWIEYIKAFGSTIVINPEKDKTMVQELLDFKDKVDHIIDICFLKNEKFINAMKEAFETFINKRPNKPAELIAKYVDSKLRAGNKEATDEELEKMLDKIMIIFRFIYGKDVFEAFYKKDLAKRLLVGKSASVDAEKSMLSKLKHECGAAFTSKLEGMFKDMELSKDIMIQFKQYMQNQNVPGNIELTVNILTMGYWPTYVPMEVHLPPEMVKLQEIFKTFYLGKHSGRKLQWQSTLGHCVLKAEFKEGKKELQVSLFQTLVLLMFNEGEEFSLEEIKQATGIEDGELRRTLQSLACGKARVLAKNPKGKDIEDGDKFICNDDFKHKLFRIKINQIQMKETVEEQASTTERVFQDRQYQIDAAIVRIMKMRKTLSHNLLVSEVYNQLKFPVKPADLKKRIESLIDRDYMERDKENPNQYNYIA

SEQ ID NO: 97101 - protein, 199 aa, Homo sapiens
  MOD_RES (1)..(1): Any amino acid
XGRCGPQAARAAGRDVAAEAVARSPKRPAWGSRRFEAVGWWALLALVTLLSFATRFHRLDEPPHICWDETHFGKMGSYYINRTFFFDVHPPLGKMLIGLAGYLSGYDGTFLFQKPGDKYEHHSYMGMRGFCAFLGSWLVPFAYLTVLDLSKSLSAALLTAALLTFVALVTVSSVLPSRPGFQGTTCTMLPSLNTWPTAL

SEQ ID NO: 97102 - protein, 588 aa, Homo sapiens
LHIDCHKSYMESLRNDQVLQGFSVDKGEFTCPLCRQFANSVLPCYPGSNVENNPWQRPSNKSIQDLIKEVEELQGRPGAFPSETNLSKEMESVMKDIKNTTQKKYRDYSKTPGSPDNDFLFMYSVARTNLELELIHRGGNLCSGGASTAGKRSCLNFCFIIFPFTKSEIILCQYRKSHDKVYPKYQLFHVLALHMRLYSIDSEYNPWRKLTQLEEMNPQLGYEEQQPEVPILYHDVTSLLLIQILMMPQPLRKDHFTCIVKVLFTLLYTQALAALSVKCSEEDRSAWKHAGALKKSTCDAEKSYEVLLSFVISELFKGKLYHEEGTQECAMVNPIAWSPESMEKCLQDFCLPFLRITSLLQHHLFGEDLPSCQEEEEFSVLASCLGLLPTFYQTEHPFISASCLDWPVPAFDIITQWCFEIKSFTERHAEQGKALLIQESKWKLPHLLQLPENYNTIFQYYHRKTCSVCTKVPKDPAVCLVCGTFVCLKGLCCKQQSYCECVLHSQNCGAGTGIFLLINASVIIIIRGHRFCLWGSVYLDAHGEEDRDLRRGKPLYICKERYKVLEQQWISHTFDHINKRWGPHYNGL

SEQ ID NO: 97103 - protein, 136 aa, Homo sapiens
MKAQTALSFFLILITSLSGSQGIFPLAFFIYVPMNEQIVIGRLDEDIILPSSFERGSEVVIHWKYQDSYKVHSYYKGSDHLESQDPRYANRTSLFYNEIQNGNASLFFRRVSLLDEGIYTCYVGTAIQVITNKVVL

SEQ ID NO: 97104 - protein, 558 aa, Homo sapiens
MPLAFCGSENHSAAYRVDQGVLNNGCFVDALNVVPHVFLLFITFPILFIGWGSQSSKVHIHHSTWLHFPGHNLRWILTFMLLFVLVCEIAEGILSDGVTESHHLHLYMPAGMAFMAAVTSVVYYHNIETSNFPKLLIALLVYWTLAFITKTIKFVKFLDHAIGFSQLRFCLTGLLVILYGMLLLVEVNVIRVRRYIFFKTPREVKPPEDLQDLGVRFLQPFVNLLSKGTYWWMNAFIKTAHKKPIDLRAIGKLPIAMRALTNYQRLCEAFDAQVRKDIQGTQGARAIWQALSHAFGRRLVLSSTFRILADLLGFAGPLCIFGIVDHLGKENDVFQPKTQFLGVYFVSSQEFLANAYVLAVLLFLALLLQRTFLQASYYVAIETGINLRGAIQTKIYNKIMHLSTSNLSMGEMTAGQICNLVAIDTNQLMWFFFLCPNLWAMPVQIIVGVILLYYILGVSALIGAAVIILLAPVQYFVATKLSQAQRSTLEYSNERLKQTNEMLRGIKLLKLYAWENIFRTRVETTRRKEMTSLRAFAIYTSISIFMNTAIPIAAVLIC

SEQ ID NO: 97105 - protein, 100 aa, Homo sapiens
MGEHGLELASMIPALRELGSATPEEYNTVVQKPRQILCQFIDRILTDVNVVAVELVKKTDSQPTSVMLLDFIQHIMKSSPLMFVNVSGSHEAKGSCIVFP

SEQ ID NO: 97106 - protein, 1008 aa, Homo sapiens
MGGSQSLQPAPASDLNLEASEAMSSDSEEAFETPESTTPVKAPPAPPPPPPEVIPEPEVSTQPPPEEPGCGSETVPVPDGPRSDSVEGSPFRPPSHSFSAVFDEDKPIASSGTYNLDFDNIELVDTFQTLEPRASDAKNQEGKVNTRRKSTDSVPISKSTLSRSLSLQASDFDGASSSGNPEAVALAPDAYSTGSSSASSTLKRTKKPRPPSLKKKQTTKKPTETPPVKETQQEPDEESLVPSGENLASETKTESAKTEGPSPALLEETPLEPAVGPKAACPLDSESAEGVVPPASGGGRVQNSPPVGRKTLPLTTAPEAGEVTPSDSGGQEDSPAKGLSVRLEFDYSEDKSSWDNQQENPPPTKKIGKKPVAKMPLRRPKMKKTPEKLDNTPASPPRSPAEPNDIPIAKGTYTFDIDKWDDPNFNPFSSTSKMQESPKLPQQSYNFDPDTCDESVDPFKTSSKTPSSPSKSPASFEIPASAMEANGVDGDGLNKPAKKKKTPLKTMVEDVMSVCSLFDTFRVKKSPKRSPLSDPPSQDPTPAATPETPPVISAVVHATDEEKLAVTNQKWTCMTVDLEADKQDYPQPSDLSTFVNETKFSSPTEELDYRNSYEIEYMEKIGSSLPQDDDAPKKQALYLMFDTSQESPVKSSPVRMSESPTPCSGSSFEETEALVNTAAKNQHPVPRGLAPNQESHLQVPEKSSQKELEAMGLGTPSEAIEITAPEGSFASADALLSRLAHPVSLCGALDYLEPDLAEKNPPLFAQKLQREAAHPTDVSISKTALYSRIGTAEVEKPAGLLFQQPDLDSALQIARAEIITKEREVSEWKDKYEESRREVMEMRKIVAEYEKTIAQMIEDEQREKSVSHQTVQQLVLEKEQALADLNSVEKSLADLFRRYEKMKEVLEGFRKNEEVLKRCAQEYLSRVKKEEQRYQALKVHAEEKLDRANAEIAQVRGKAQQEQAAHQASLRKEQLRVDALERTLEQKNKEIEELTKICDELIAKMGKS

SEQ ID NO: 97107 - protein, 281 aa, Homo sapiens
MGSDAWVGLWRPHRPRGPIAAHYGGPGPKYKLPPNTGYALHDPSRPRAPAFTFGARFPTQQTTCGPGPGHLVPARMTVRGTDGAPAYSIYGRPRRSAPFLTPGPGSHAVLAPHTLDPPRRQVLPGASGERDVPQCASAHHCSPKLGCPGGTAEPRSRGLYGALALGSARHRQSLRPNLLHLRPQSGWQFLRGPQQDPGPLRLSGRESRGLQVPGPPVHDSGADFAPPRQHSEARARGLQRGSAPEAPRLEFRDPALGLPGPAGDRRGQLTRQAGAAPHVFA

SEQ ID NO: 97108 - protein, 268 aa, Homo sapiens
MGLSSCYCPEYLKDASKKMKNGLMFVKLVNPCSGEGAIYLFNMCLQQLFEVKVFKEKHHSWFINQSVQSGGLLHFATPVDPLFLLLHYLIKADKEGKFQPLDQVVVDNVFPNCILLLKLPGLEKLLHHVTEEKGNPEIDNKKYYKYSKEKTLKWLEKKVNQTVAALKTNNVNVSSRVQSTAFFSGDQASTDKEEDYIRYAHGLISDYIPKELSDDLSKYLKLPEPSASLPNPPSKWKIFSSFILRLLPTAPLQLVCLSPRSREWRSQS

SEQ ID NO: 97109 - protein, 150 aa, Homo sapiens
VEYYRYIRFFPDGHVMMLTTPEEPQSIVPRLRTRNTRTDAILLGHYRLSQDTDNQTKVFAVITKKKEEKPLDYKYRYFRRVPVQEADQSFHVGLQLCSSGHQRFNKLIWIHHSCHITYKSTGETAVSAFEIDKMYTPLFFARIYEQISVT

SEQ ID NO: 97110 - protein, 20 aa, Homo sapiens
MSNRVVCREASHAGSWYTAS

SEQ ID NO: 97111 - protein, 753 aa, Homo sapiens
MDDFTRDPLYILDNNHTHLLLVDNGCHGHPTVEAKLRNQLEKYISERTIQDSNYGGKIPIVCFAQGGGKETLKAINTSIKNKIPCVVVEGSGQIADVIASLVEVEDALTSSAVKEKLVRFLPRTVSRLPEEETESWIKWLKEILECSHLLTVIKMEEAGDEIVSNAISYALYKAFSTSEQDKDNWNGQLKLLLEWNQLDLANDEIFTNDRRWESADLQEVMFTALIKDRPKFVRLFLENGLNLRKFLTHDVLTELFSNHFSTLVYRNLQIAKNSYNDALLTFVWKLVANFRRGFRKEDRNGRDEMDIELHDVSPITRHPLQALFIWAILQNKKELSKVIWEQTRGCTLAALGASKLLKTLAKVKNDINAAGESEELANEYETRAVELFTECYSSDEDLAEQLLVYSCEAWGGSNCLELAVEATDQHFIAQPGVQWYVNGVNYFTDLWNVMDTLGLFYFIAGIVFRLHSSNKSSLYSGRVIFCLDYIIFTLRLIHIFTVSRNLGPKIIMLQRMLIDVFFFLFLFAVWMVAFGVARQGILRQNEQRWRWIFRSVIYEPYLAMFGQVPSDVDGTTYDFAHCTFTGNESKPLCVELDEHNLPRFPEWITIPLVCIYMLSTNILLVNLLVAMFGYTVGTVQENNDQVWKFQRYFLVQEYCSRLNIPFPFIVFAYFYMVVKKCFKCCCKEKNMESSVCCFKNEDNETLAWEGVMKENYLVKINTKANDTSEEMRHRFRQLDTKLNDLKGLLKEIANKIK

SEQ ID NO: 97112 - protein, 129 aa, Homo sapiens
MPASARLAGAGLLLAFLRALGCAGRAPGLSMAEGNTLISVDYEIFGKVQGVFFRKHTQAEGKKLGLVGWVQNTDRGTVQGQLQGPISKVRHMQEWLETRGSPKSHIDKANFNNEKVILKLDYSDFQIVK

SEQ ID NO: 97113 - protein, 166 aa, Homo sapiens
MILEGGGVMNLNPGNNLLHQPPAWTDSYSTCNVSSGFFGGQWHEIHPQYWTKYQVWEWLQHLLDTNQLDANCIPFQEFDINGEHLCSMSLQEFTRAAGTAGQLLYSNLQHLKWNGQCSSDLFQSTHNVIVKTEQTEPSIMNTWKDENYLYDTNYGSTVAESPDMKK

SEQ ID NO: 97114 - protein, 35 aa, Homo sapiens
MKCSCCEMNVHRRCVRSVPSLCGVDHTERRGRLQL

SEQ ID NO: 97115 - protein, 386 aa, Homo sapiens
MQNSHSGVNQLGGVFVNGRPLPDSTRQKIVELAHSGARPCDISRILQVSNGCVSKILGRYYETGSIRPRAIGGSKPRVATPEVVSSINRVLRNLASEKQQMGADGMYDKLRMLNGQTGSWGTRPGWYPGTSVPGQPTQDGCQQQEGGGENTNSISSNGEDSDEAQMRLQLKRKLQRNRTSFTQEQIEALEKEFERTHYPDVFARERLAAKIDLPEARIQVWFSNRRAKWRREEKLRNQRRQASNTPSHIPISSSFSTSVYQPIPQPTTPVSSFTSGSMLGRTDTALTNTYSALPPMPSFTMANNLPMQPPVPSQTSSYSCMLPTSPSVNGRSYDTYTPPHMQTHMNSQPMGTSGTTSTGLISPGVSVPVQVPGSEPDMSQYWPRLQ

SEQ ID NO: 97116 - protein, 176 aa, Homo sapiens
CPATEGIFDYAAAIGGATITAAQCLIDGMCKVAINWSGGWHHAKNVLKEVYQAFNPKAVVLQLGADTIAGDPMCSFNMTPVGIGKCLKYILQWQLATLILGGGGYNLANTARCWTYLTGVILGKTLSSEIPDHEFFTAYGPDYVLEITPSCRPDRNEPHRIQQILNYIKGNLKHVV

SEQ ID NO: 97117 - protein, 1343 aa, Homo sapiens
MRNLKLFRTLEFRDIQGPGNPQCFSLRTEQGTVLIGSEHGLIEVDPVSREVKNEVSLVAEGFLPEDGSGRIVGVQDLLDQESVCVATASGDVILCSLSTQQLECVGSVASGISVMSWSPDQELVLLATGQQTLIMMTKDFEPILEQQIHQDDFGESKFITVGWGRKETQFHGSEGRQAAFQMQMHESALPWDDHRPQVTWRGDGQFFAVSVVCPETGARKVRVWNREFALQSTSEPVAGLGPALAWKPSGSLIASTQDKPNQQDIVFFEKNGLLHGHFTLPFLKDEVKVNDLLWNADSSVLAVWLEDLQREESSIPKTCVQLWTVGNYHWYLKQSLSFSTCGKSKIVSLMWDPVTPYRLHVLCQGWHYLAYDWHWTTDRSVGDNSSDLSNVAVIDGNRVLVTVFRQTVVPPPMCTYQLLFPHPVNQVTFLAHPQKSNDLAVLDASNQISVYKCGDCPSADPTVKLGAVGGSGFKVCLRTPHLEKRYKIQFENNEDQDVNPLKLGLLTWIEEDVFLAVSHSEFSPRSVIHHLTAASSEMDEEHGQLNVSSSAAVDGVIISLCCNSKTKSVVLQLADGQIFKYLWESPSLAIKPWKNSGGFPVRFPYPCTQTELAMIGEEECVLGLTDRCRFFINDIEVASNITSFAVYDEFLLLTTHSHTCQCFCLRDASFKTLQAGLSSNHVSHGEVLRKVERGSRIVTVVPQDTKLVLQMPRGNLEVVHHRALVLAQIRKWLDKLMFKEAFECMRKLRINLNLIYDHNPKVFLGNVETFIKQIDSVNHINLFFTELKEEDVTKTMYPAPVTSSVYLSRDPDGNKIDLVCDAMRAVMESINPHKYCLSILTSHVKKTTPELEIVLQKVHELQGNAPSDPDAVSAEEALKYLLHLVDVNELYDHSLGTYDFDLVLMVAEKSQKDPKEYLPFLNTLKKMETNYQRFTIDKYLKRYEKAIGHLSKCGPEYFPECLNLIKDKNLYNEALKLYSPSSQQYQDISIAYGEHLMQEHMYEPAGLMFARCGAHEKALSAFLTCGNWKQALCVAAQLNFTKDQLVGLGRTLAGKLVEQRKHIDAAMVLEECAQDYEEAVLLLLEGAAWEEALRLVYKYNRLDIIETNVKPSILEAQKNYMAFLDSQTATFSRHKKRLLVVRELKEQAQQAGLDDEVPHGQESDLFSETSSVVSGSEMSGKYSHSNSRISARSSKNRRKAERKKHSLKEGSPLEDLALLEALSEVVQNTENLKDEVYHILKVLFLFEFDEQGRELQKAFEDTLQLMERSLPEIWTLTYQQNSATPVLGPNSTANSIMASYQQQKTSVPVLARPTPPLPPLLQPTQRGDDKDEDLYDDPLPFNE

SEQ ID NO: 97118 - protein, 464 aa, Homo sapiens
SMENNGRAQRIYEDHDATQQLQGFYSQVAKPLLVDVDLQYPQDAVLALTQNHHKQYYEGSEIVVAGRIADNKQSSFKADVQAHGEGQEFSITCLVDEEEMKKLLRERGHMLENHVERLWAYLTIQELLAKRMKVDREERANLSSQALQMSLDYGFVTPLTSMSIRGMADQDGLKPTIDKPSEGIGCREMLGPRRTFVLSALQPSPTHSSSNTQRLPDRVTGVDTDPHFIIHVPQKEDTLCFNINEEPGVILSLVQDPNTGFSVNGQLIGNKARSPGQHDGTYFGRLGIANPATDFQLEVTPQNITLNPGFGGPVFSWRDQAVLRQDGVVVTINKKRNLVVSVDDGGTFEVVLHRVWKGSSVHQDFLGFYVLDSHRMSARTHGLLGQFFHPIGFEVSDIHPGSDPTKPDATMVVRNRRLTVTRGLQKDYSKDPWHGAEVSCWFIHNNGAGLIDGAYTDYIVPDIF

SEQ ID NO: 97119 - protein, 175 aa, Homo sapiens
  MOD_RES (1)..(1): Any amino acid
XVFYVFYEQYLTIIDDTIFNLGVSLGAIFLVTMVLLGCELWSAVIMCATIAMVLVNMFGVMWLWGISLNAVSLVNLVMSCGISVEFCSHITRAFTVSMKGSRVERAEEALAHMGSSVFSGITLTKFGGIVVLAFAKSQIFQIFYFRMYLAMVLLGATHGLIFLPVLLSYIATSLF

SEQ ID NO: 97120 - protein, 492 aa, Homo sapiens
MINQVNGRDLSRATHDQAVEAFKTAKEPIVVQVLRRTPRTKMFTPPSESQLVDTGTQTDITFEHIMALTKMSSPSPPVLDPYLLPEEHPSAHEYYDPNDYIGDIHQEMDREELELEEVDLYRMNSQDKLGLTVCYRTDDEDDIGIYISEIDPNSIAAKDGRIREGDRIIQINGIEVQNREEAVALLTSEENKNFSLLIARPELQLDEGWMDDDRNDFLDDLHMDMLEEQHHQAMQFTASVLQQKKHDEDGGTTDTATILSNQHEKDSGVGRTDESTRNDESSEQENNGDDATASSNPLAGQRKLTCSQDTLGSGDLPFSNESFISADCTDADYLGIPVDECERFRELLELKCQVKSATPYGLYYPSGPLDAGKSDPESVDKELELLNEELRSIELECLSIVRAHKMQQLKEQYRESWMLHNSGFRNYNTSIDVRRHELSDITELPEKSDKDSSSAYNTGESCRSTPLTLEISPDNSLRRAAEGISCPSSEGA

SEQ ID NO: 97121 - protein, 89 aa, Homo sapiens
EELIAAFKEHQQLGKVGRYCCSWLCIQPFPSSPGQRSQSISRVPGRYWVLGARSWESKGAFTFQGSMIDMPLLKQAQNTVTLATSIKEK

SEQ ID NO: 97122 - protein, 1081 aa, Homo sapiens
MAGLRQELRSPDSHSDEGACGQGATEIDRRKKRPLENDGPVKKKVKKVQQKEGGSDLGMSGNSEPKKCLRTRNVSKSLEKLKEFCCDSALPQSRVQTESLQERFAVLPKCTDFDDISLLHAKNAVSSEDSKRQINQKDTTLFDLSQFGSSNTSHENLQKTASKSANKRSKSIYTPLELQYIEMKQQHKDAVLCVECGYKYRFFGEDAEIAARELNIYCHLDHNFMTASIPTHRLFVHVRRLVAKGYKVGVVKQTETAALKAIGDNRSSLFSRKLTALYTKSTLIGEDVNPLIKLDDAVNVDEIMTDTSTSYLLCISENKENVRDKKKGNIFIGIVGVQPATGEVVFDSFQDSASRSELETRMSSLQPVELLLPSALSEQTEALIHRATSVSVQDDRIRVERMDNIYFEYSHAFQAVTEFYAKDTVDIKGSQIISGIVNLEKPVICSLAAIIKYLKEFNLEKMLSKPENFKQLSSKMEFMTINGTTLRNLEILQNQTDMKTKGSLLWVLDHTKTSFGRRKLKKWVTQPLLKLREINARLDAVSEVLHSESSVFGQIENHLRKLPDIERGLCSIYHKKCSTQEFFLIVKTLYHLKSEFQAIIPAVNSHIQSDLLRTVILEIPELLSPVEHYLKILNEQAAKVGDKTELFKDLSDFPLIKKRKDEIQGVIDEIRMHLQEIRKILKNPSAQYVTVSGQEFMIEIKNSAVSCIPTDWVKVGSTKAVSRFHSPFIVENYRHLNQLREQLVLDCSAEWLDFLEKFSEHYHSLCKAVHHLATVDCIFSLAKVAKQGDYCRPTVQEERKIVIKNGRHPVIDVLLGEQDQYVPNNTDLSEDSERVMIITGPNMGGKSSYIKQVALITIMAQIGSYVPAEEATIGIVDGIFTRMGAADNIYKGQSTFMEELTDTAEIIRKATSQSLVILDELGRGTSTHDGIAIAYATLEYFIRDVKSLTLFVTHYPPVCELEKNYSHQVGNYHMGFLVSEDESKLDPGAAEQVPDFVTFLYQITRGIAARSYGLNVAKLADVPGEILKKAAHKSKELEGLINTKRKRLKYFAKLWTMHNAQDLQKWTEEFNMEETQTSLLH

SEQ ID NO: 97123 - protein, 106 aa, Homo sapiens
MGSSEPLPIADGDRRRKKKRRGRATDSLPGKFEDMYKLTSELLGEGAYAKVQGAVSLQNGKEYAVKIIEKQAGHSRSRVFREVETLYQCQGNKFHLSPHPEAKALQ

SEQ ID NO: 97124 - protein, 97 aa, Homo sapiens
  MOD_RES (1)..(1): Any amino acid
XLGQYGFPNPEWSEVSEDAKQLIRLLLKTDPTERLTITQFMNHPWINEEMTSALATMRVDYDQVKIKDLKTSNNRLLNKRRKKQAGSSSASQGCNNQ

SEQ ID NO: 97125 - protein, 13 aa, Homo sapiens
  MOD_RES (1)..(1): Any amino acid
XLGVKLLSKKFAQ

SEQ ID NO: 97126 - protein, 112 aa, Homo sapiens
MVSNPVHGLPFLPGTSFKDSTKTAFHRSQTLSYRNGYAIVRRPTVGIGGDRLQFNQLSQAELDELASKAPVLTYGQPKQAPPADFIPAHVAFDKKFWRLEVQDQGASWFEFW

SEQ ID NO: 97127 - protein, 766 aa, Homo sapiens
  MOD_RES (1)..(1): Any amino acid
XKEVTKHVSDTNYKKKFVKEKGKSNYSIMLEPPEVKHAMEVAKKQSDVAYRKDAKENLHYTTVADRPDIKKATQAAKQASEVEYRAKHRKEGSHGLSMLGRPDIEMAKKAAKLSSQVKYRENFDKEKGKTPKYNPKDSQLYKVMKDANNLASEVKYKADLKKLHKPVTDMKESLIMNHVLNTSQLASSYQYKKKYEKSKGHYHTIPDNLEQLHLKEATELQSIVKYKEKYEKERGKPMLDFETPTYITAKESQQMQSGKEYRKDLEESIRGKGLTEMEDTPDMLRAKNATQILNEKEYKRDLELEVKGRGLNAMANETPDFMRARNATDIASQIKYKQSAEMEKANFTSVVDTPEIIHAQQVKNLSSQKKYKEDAEKSMSYYETVLDTPEIQRVRENQKNFSLVLYKEDVSPGTAIGKTPEMMRVKQTQDHISSVKYKEAIGQGTPIPDLPEVKRVKETQKHISSVLYKENVGKATATPVTPEMQRVKRNQENISSVLYSDSFRKQIQGKAAYVLDTPEMRRVRETQRHISTVKYHEDFEKHKGCFTPVVTDPITERVKKNMQDFSDINYRGIQRKVVEMEQKRNDQDQETITGLRVWRTNPGSVFDYDPAEDNIQSRSLHMINVQAQRRSREQSRSASALSISGGEEKSEHSEAPDHHLSTYSDGGVFAVSTAYKHAKTTELPQQRSSSVATQQTTVSSIPSHPSTAGKIFRAMYDYMAADADEVSFKDGDAIINVQAIDEGWMYGTVQRTGRTGMLPANYVEAI

SEQ ID NO: 97128 - protein, 208 aa, Homo sapiens
MDVCATSRTDREIKVTLVFEHVDQDLRTYLDKAPPPGLPAETIKDLMRQFLRGLDFLHANCIVHRDLKPENILVTSGGTVKLADFGLARIYSYQMALTPVVVTLWYRAPEVLLQSTYATPVDMWSVGCIFAEMFRRKPLFCGNSEADQLGKIFDLIGLPPEDDWPRDVSLPRGAFPPRGPRPVQSVVPEMEESGAQLLLEMLTFNPHK

SEQ ID NO: 97129 - protein, 67 aa, Homo sapiens
MYPESTTGSPARLSLRQTGSPGMIYSTRYGSPKRQLQFYSGSSQARRHHAVHDVQRESAEREQQVPL

SEQ ID NO: 97130 - protein, 563 aa, Homo sapiens
MAPVHGDDCEIGASALSDSGSFVSSRARREKKSKKGRQEALERLKKAKAGEKYKYEVEDFTGVYEEVDEEQYSKLVQARQDDDWIVDDDGIGYVEDGREIFDDDLEDDALDADEKGKDGKARNKDKRNVKKLAVTKPNNIKSMFIACAGKKTADKAVDLSKDGLLGDILQDLNTETPQITPPPVMILKKKRSIGASPNPFSVHTATAVPSGKIASPVSRKEPPLTPVPLKRAEFAGDDVQVESTEEEQESGAMEFEDGDFDEPMEVEEVDLEPMAAKAWDKESEPAEEVKQEADSGKGTVSYLGSFLPDVSCWDIDQEGDSSFSVQEVQVDSSHLPLVKGADEEQVFHFYWLDAYEDQYNQPGVVFLFGKVWIESAETHVSCCVMVKNIERTLYFLPREMKIDLNTGKETGTPISMKDVYEEFDEKIATKYKIMKFKSKPVEKNYAFEIPDVPEKSEYLEVKYSAEMPQLPQDLKGETFSHVFGTNTSSLELFLMNRKIKGPCWLEVKSPQLLNQPVSWCKVEAMALKPDLVNVIKDVSPPPLVVMAFSMKTMQNAKNHQNEV

SEQ ID NO: 97131 - protein, 367 aa, Homo sapiens
MTLIEGVGDEVTVLFSVLACLLVLALAWVSTHTAEGGDPLPQPSGTPTPSQPSAAMAATDSMRGEAPGAETPSLRHRGQAAQPEPSTGFTATPPAPDSPQEPLVLRLKFLNDSEQVARAWPHDTIGSLKRSLSPQDPVSRPGTAGATHLPRAAARRRHPDPGQPSPPSQLRSPLPRVHESRSPKSPLPAGVRARPLRAGNRQPAAAPAAPAVAAALVLPDPVPALLSPDRHSGPGRLHPAPQSPGLCHVPPVVPPRALGSVAGPSGPCSPRRGGSCCLPRPASPACLFPPPWSPALRRRGLPGLAEAPPCDRRGSGPPPGAADPQPALGVGSSGSGICCRCLGPGQSRAAPGARLSVLPEDPAASNP

SEQ ID NO: 97132 - protein, 111 aa, Homo sapiens
MSSTSPNLQKAIDLASKAAQEDKAGNYEEALQLYQHAVQYFLHVVKYEAQGDKAKQSIRAKCTEYLDRAEKLKEYLKNKEKKAQKPVKEGQPSPADEKGCHCYRTTKCEME

SEQ ID NO: 97133 - protein, 137 aa, Homo sapiens
MNVIYCLESVTDSSFPWGAVAVSNLDEESRWTVHYTAPWHQQENVFLPTTRPPCVEDLHRQAKLNLKSVLRECDKLRHDGYRSSQYYSQGPTFAANASPFCDDYQDEDEETDQKCSLSSSEEERFISIRRPKTPASS

SEQ ID NO: 97134 - protein, 318 aa, Homo sapiens
MAGRSLTSKAEPTAGAVDRAEKAGGQDTSSQKIEDLMEMVQKLQKVGSLEPRVEVLINRINEVQQAKKKANKDLGEARTICEALQKELDSLHGEKVHLKEILSKKQETLRILRLHCQEKESEAHRKHTMLQECKERISALNLQIEEEKNKQRQLRLAFEEQLEDLMGQHKDLWDFHMPERLAKEICALDSSKEQLLKEEKLVKATLEDVKHQLCSLCGAEGPSTLDEGLFLRSQEAAATVQLFQEEHRKAEELLAAAAQRHQQLQQKCQQQQQKRQRLKEELEKHGMQVPAQAQSTQEEEAGPGDVAPRPGRPVTWWS

SEQ ID NO: 97135 - protein, 104 aa, Homo sapiens
MANKERKKGQADKKNETLKGIRRLRRRHLMTSTSSLASSSLITLWLSIGSKPWRRTIWISRQERRSQSLMTPMKNGGGGKSGRRSDFSLQTSSFGSGLENVCTA

SEQ ID NO: 97136 - protein, 156 aa, Homo sapiens
  MOD_RES (1)..(1): Any amino acid
XTRGKMAAAVLSGPSAGSAAGVPGGTGGLSAVSSGPRLRLLLLESVSGLLQPRTGSAVAPVHPPNRSAPHLPGLMCLLRLHGSVGGAQNLSALGALVSLSNARLSSIKTRFEGLCLLSLLVGESPTELFQQHCVSWLRSIQQVLQYPCLHTLFSAR

SEQ ID NO: 97137 - protein, 269 aa, Homo sapiens
  MOD_RES (1)..(1): Any amino acid
XVKINGKHYNWAVAAPMILSLQAFQKNLPKRSAQKEKTAAKEQQGEKTEVLSSDDDAPDSPVILEIPSLPPSTPPSTPTYKKSLRLSSDQIRRLNLQEGANDVVFSVTTQYQGTCRCKATIYLWKWDDKVVISDIDGTITKSDALGHILPQLGKDWTHQGITSLYHKIQLNGYKFLYCSARAIGMADLTKGYLQWVSEGGCSLPKGPILLSPSSLFSALHREVIEKKPEVFKVACLSDIQQLFLPHGQPFYAAFGNRPNDVFAYRQVGL

SEQ ID NO: 97138 - protein, 141 aa, Homo sapiens
MDWKLEGSTQKVESPVLQGQEGILEETGEDGLPEGFQLLQIDAEGECQEGEILATGSTAWCSKNVQRKQRHWEKIVAAKKSKRKQEKERRKANRAENPGICPQHSKRFLRALTKDKLLEAKHSGPRLCIDLSMTHYMSKKT

SEQ ID NO: 97139 - protein, 1688 aa, Homo sapiens
MSARAAAAKSTAMEETAIWEQHTVTLHRAPGFGFGIAISGGRDNPHFQSGETSIVISDVLKGGPAEGQLQENDRVAMVNGVSMDNVEHAFAVQQLRKSGKNAKITIRRKKKVQIPVSRPDPEPVSDNEEDSYDEEIHDPRSGRSGVVNRRSEKIWPRDRSASRERSLSPRSDRRSVASSQPAKPTKVTLVKSRKNEEYGLRLASHIFVKEISQDSLAARDGNIQEGDVVLKINGTVTENMSLTDAKTLIERSKGKLKMVVQRDERATLLNVPDLSDSIHSANASERDDISEIQSLASDHSGRSHDRPPRRSRSRSPDQRSEPSDHSRHSPQQPSNGSLRSRDEERISKPGAVSTPVKHADDHTPKTVEEVTVERNEKQTPSLPEPKPVYAQVGQPDVDLPVSPSDGVLPNSTHEDGILRPSMKLVKFRKGDSVGLRLAGGNDVGIFVAGVLEDSPAAKEGLEEGDQILRVNNVDFTNIIREEAVLFLLDLPKGEEVTILAQKKKDVYRRIVESDVGDSFYIRTHFEYEKESPYGLSFNKGEVFRVVDTLYNGKLGSWLAIRIGKNHKEVERGIIPNKNRAEQLASVQYTLPKTAGGDRADFWRFRGLRSSKRNLRKSREDLSAQPVQTKFPAYERVVLREAGFLRPVTIFGPIADVAREKLAREEPDIYQIAKSEPRDAGTDQRSSGIIRLHTIKQIIDQDKHALLDVTPNAVDRLNYAQWYPIVVFLNPDSKQGVKTMRMRLCPESRKSARKLYERSHKLRKNNHHLFTTTINLNSMNDGWYGALKEAIQQQQNQLVWVSEGKADGATSDDLDLHDDRLSYLSAPGSEYSMYSTDSRHTSDYEDTDTEGGAYTDQELDETLNDEVGTPPESAITRSSEPVREDSSGMHHENQTYPPYSPQAQPQPIHRIDSPGFKPASQQVYRKDPYPEEMMRQNHVLKQPAVSHPGHRPDKEPNLTYEPQLPYVEKQASRDLEQPTYRYESSSYTDQFSRNYEHRLRYEDRVPMYEEQWSYYDDKQPYPSRPPFDNQHSQDLDSRQHPEESSERGYFPRFEEPAPLSYDSRPRYEQAPRASALRHEEQPAPGYDTHGRLRPEAQPHPSAGPKPAESKQYFEQYSRSYEQVPPQGFTSRAGHFEPLHGAAAVPPLIPSSQHKPEALPSNTKPLPPPPTQTEEEEDPAMKPQSVLTRVKMFENKRSASLETKKDVNDTGSFKPPEVASKPSGAPIIGPKPTSQNQFSEHDKTLYRIPEPQKPQLKPPEDIVRSNHYDPEEDEEYYRKQLSYFDRRSFENKPPAHIAASHLSEPAKPAHSQNQSNFSSYSSKGKPPEADGVDRSFGEKRYEPIQATPPPPPLPSQYAQPSQPVTSASLHIHSKGAHGEGNSVSLDFQNSLVSKPDPPPSQNKPATFRPPNREDTAQAAFYPQKSFPDKAPVNGTEQTQKTVTPAYNRFTPKPYTSSARPFERKFESPKFNHNLLPSETAHKPDLSSKTPTSPKTLVKSHSLAQPPEFDSGVETFSIHAEKPKYQINNISTVPKAIPVSPSAVEEDEDEDGHTVVATARGIFNSNGGVLSSIETGVSIIIPQGAIPEGVEQEIYFKVCRDNSILPPLDKEKGETLLSPLVMCGPHGLKFLKPVELRLPHCASMTPDGWSFALKSSDSSSGDPKTWQNKCLPGDPNYLVGANCVSVLIDHF

SEQ ID NO: 97140 - protein, 385 aa, Homo sapiens
MRLLAKIICLMLWAICVAEDCNELPPRRNTEILTGSWSDQTYPEGTQAIYKCRPGYRSLGNVIMVCRKGEWVALNPLRKCQKRPCGHPGDTPFGTFTLTGGNVFEYGVKAVYTCNEGYQLLGEINYRECDTDGWTNDIPICEEISCKSPDVINGSPISQKIIYKENERFQYKCNMGYEYSERGDAVCTESGWRPLPSCEEKSCDNPYIPNGDYSPLRIKHRTGDEITYQCRNGFYPATRGNTAKCTSTGWIPAPRCTLKPCDYPDIKHGGLYHENMRRPYFPVAVGKYYSYYCDEHFETPSGSYWDHIHCTQDGWSPAVPCLRKCYFPYLENGYNQNHGRKFVQGKSIDVACHPGYALPKAQTTVTCMENGWSPTPRCIRVSFTL

SEQ ID NO: 97141 - protein, 377 aa, Homo sapiens
MPSGCRCLHLVCLLCILGAPGQPVRADDCSSHCDLAHGCCAPDGSCRCDPGWEGLHCERCVRMPGCQHGTCHQPWQCICHSGWADEHICTTQSPCQNGGQCMYDGGGEYHCVCLPGFHGRDCERKAGPCEQAGSPCRNGGQCQDDQGFALNFTCRCLVGFVGARCEVNVDDCLMRPCANGATCLDGINRFSCLCPEGFAGRFCTINLDDCASRPCQRGARCRDRVHDFDCLCPSGYGGKTCELVLPVPDPPTTVDTPLGPTSAVVVPATGPAPHSAGAGLLRISVKEVVRRQEAGLGEPSLVALVVFGALTAALVLATVLLTLRAWRRGVCPPGPCCYPAPHYAPACQDQECQVSMLPAGLPLPRDLPPEPGKTTAL

SEQ ID NO: 97142 - protein, 28 aa, Homo sapiens
MMEDDGQPRTLHTQAKTYGSIFRKQYGV

SEQ ID NO: 97143 - protein, 432 aa, Homo sapiens
MAVAVGRPSNEELRNLSLSGHVGFDSLPDQLVNKSTSQGFCFNILCVGETGIGKSTLMDTLFNTKFESDPATHNEPGVRLKARSYELQESNVRLKLTIVDTVGFGDQINKDDSYKPIVEYIDAQFEAYLQEELKIKRSLFNYHDTRIHACLYFIAPTGHSLKSLDLVTMKKLDSKVNIIPIIAKADTIAKNELHKFKSKIMSELVSNGVQIYQFPTDEETVAEINATMSVHLPFAVVGSTEEVKIGNKMAKARQYPWGVVQVENENHCDFVKLREMLIRVNMEDLREQTHTRHYELYRRCKLEEMGFKDTDPDSKPFSLQETYEAKRNEFLGELQKKEEEMRQMFVMRVKEKEAELKEAEKELHEKFDLLKRTHQEEKKKVEDKKKELEEEVNNFQKKKAAAQLLQSQAQQSGAQQTKKDKDKKNSPWLCTE

SEQ ID NO: 97144 - protein, 610 aa, Homo sapiens
MRALTVQRVKFAMDLPLLKRAGQDLAEKTKNFVSRSLVIGEVLSMADMATGVKCGIIYWLFGGAIRNLGSPEHVTKWFQPLQEQKYTGMFAMTERGHGSNARGIQTEATFDLSAQEFVIDTPCENAEKMYIGNAMYGNYAAVFAQLIIDGRSQGPHCFIVPVRDENGSLYPGVTAIDMMYKEGLHGVDNGILIFDKVRIPRENLLDKFGSVAPDGQYHSPIRNKSARFNAMLAALTPSRLAVAFQAMGAMKLGLTIAIRYSHSRRQFGPKTKEEVKIIEHQTQTLRLMPHLATALALTFVSRYAGALLDEDVFQGKELVNSRSLQALVAGLKAYSTWENIRCLQDCRECTGGMGYMMENRISGLKCDTDVFATFEGDDVVMLQVVGRELLAQYTKQYEEKPLFGLLQNWAESVGDKLRTSFLAFNMDTVDDLAFLLKAVKFRERVLQRGLVARIYYKVKTKKEDFFHAWNSCLHHVASLSLAHTHRVTLEQFSLAVKSCPDQEDQTLLMKFCLLYGTKLVFQERAWYLEHKYLTPMASTRIRNQLLDLCDSVKDDARRVISTFNIPHTYLHAPIAGISNPRAAWAFYPAPLQPRPREEARSRRPKLGAKL

SEQ ID NO: 97145 - protein, 103 aa, Homo sapiens
MVVPEKEQSWIPKIFKKKTCTTFIVDSTDPGARSLRGTGGAVTRRTGSSFPWTTTTRPSSWWTTAHTAAWGARTASACAWSPTSHSRRRAWEGLELTSLSCSS

SEQ ID NO: 97146 - protein, 137 aa, Homo sapiens
  MOD_RES (1)..(1): Any amino acid
XDGTEIHEASAILVHLSRGGAEVQIFAPDVPQMHVIDHTKGQPSEGESRNVLTESARIARGKITDLANLSAANHDAAIFPGGFGAAKNLSTFAVDGKDCKVNKEVERVLKEFHQAGKPIGGSPYSDPAKHRSLGLQL

SEQ ID NO: 97147 - protein, 180 aa, Homo sapiens
LSGFLSSFLMKPINKCIGRNMTYFSGLLVILAFAAWVALAEGLGVAVYAAAVLLGAGCATILVTSLAMTADLIGPHTNSGAFVYGSMSFLDKVANGLAVMAIQSLHPCPSELCCRACVSFYHWAMVAVTGGVGVAAALCLCSLLLWPTRLRRCESWPTPPSPDTDPHSLMPFPPLPCRGP

SEQ ID NO: 97148 - protein, 66 aa, Homo sapiens
  MOD_RES (1)..(1): Any amino acid
XSPSKMAEEPQSVLQLPTSIAAGGEGLTDVSPETTTPEPPSSAAVSPGTEEPAGDTKKKIGCEFTP

SEQ ID NO: 97149 - protein, 106 aa, Homo sapiens
MSNNGLDIQDKPPAPPMRNTSTMIGAGSKDAGTLNHGSKPLPPNPEEKKKKDRFYRSILPGDKTNKKKEKERPEISLPSDFEHTIHVGFDAVTGEFTGMPEQWARL

SEQ ID NO: 97150 - protein, 174 aa, Homo sapiens
MGVTPHHVCRPPGNVSQVVFHNHSNWSLEDTGALLSSGQKDYVTVQLQNGEIWELSRCSRNKRENTSSLGYEYTGSKKEFPCVDGYIYDQNTWKSTAVTQWNLVCDRKWLAMLIQPLFMFGVLLGSVTFGYFSDRLGRRVVLWATSSSMFLFGIAAAFAVDYYTFMAARFFLAM

SEQ ID NO: 97151 - protein, 146 aa, Homo sapiens
MILNDLLGRKLSIMFSAVPSAAGYALMAGAHGLWMLLLGRTLTGFAGGLTAACIPGLTLPSRPGLGTSIFSKTWCGGCVLQVYVSEIAPPGVRGALGATPQLMAVFGSLSLYALGKDEEALRALAWLRGTDVDVHWEFEQIQDNVR

SEQ ID NO: 97152 - protein, 1299 aa, Homo sapiens
MESSSSDYYNKDNEEESLLANVASLRHELKITEWSLQSLGEELSSVSPSENSDYAPNPSRSEKLILDVQPSHPGLLNYSPYENVCKISGSSTDFQKKPRDKMFSSSAPVDQEIKSLREKLNKLRQQNACLVTQNHSLMTKFESIHFELTQSRAKVSMLESAQQQAASVPILEEQIINLEAEVSAQDKVLREAENKLEQSQKMVIEKEQSLQESKEECIKLKVDLLEQTKQGKRAERQRNEALYNAEELSKAFQQYKKKVAEKLEKVQAEEEILERNLTNCEKENKRLQERCGLYKSELEILKEKLRQLKEENNNGKEKLRIMAVKNSEVMAQLTESRQSILKLESELENKDEILRDKFSLMNENRELKVRVAAQNERLDLCQQEIESSRVELRSLEKIISQLPLKRELFGFKSYLSKYQMSSFSNKEDRCIGCCEANKLVISELRIKLAIKEAEIQKLHANLTANQLSQSLITCNDSQESSKLSSLETEPVKLGGHQVAESVKDQNQHTMNKQYEKERQRLVTGIEELRTKLIQIEAENSDLKVNMAHRTSQFQLIQEELLEKASNSSKLESEMTKKCSQLLTLEKQLEEKIVAYSSIAAKNAELEQELMEKNEKIRSLETNINTEHEKICLAFEKAKKIHLEQHKEMEKQIERLEAQLEKKDQQFKEQEKTMSMLQQDIICKQHHLESLDRLLTESKGEMKKENMKKDEALKALQNQVSEETIKVRQLDSALEICKEELVLHLNQLEGNKEKFEKQLKKKSEEVYCLQKELKIKNHSLQETSEQNVILQHTLQQQQQMLQQETIRNGELEDTQTKLEKQVSKLEQELQKQRESSAEKLRKMEEKCESAAHEADLKRQKVIELTGTARQVKIEMDQYKEELSKMEKEIMHLKRDGENKAMHLSQLDMILDQTKTELEKKTNAVKELEKLQHSTETELTEALQKREVLETELQNAHGELKSTLRQLQELRDVLQKAQLSLEEKYTTIKDLTAELRECKMEIEDKKQELLEMDQALKERNWELKQRAAQVTHLDMTIREHRGEMEQKIIKLEGTLEKSELELKECNKQIESLNDKLQNAKEQLREKEFIMLQNEQEISQLKKEIERTQQRMKEMESVMKEQEQYIATQYKEAIDLGQELRLTREQVQNSHTELAEARHQQVQAQREIERLSSELEDMKQLSKEKDAHGNHLAEELGASKVREAHLEARMQAEIKKLSAEVESLKEAYHMEMISHQENHAKWKISADSQKSSVQQLNEQLEKAKLELEEAQDTVSNLHQQVQDRNEVIEAANEALLTKGENV

SEQ ID NO: 97153 - protein, 182 aa, Homo sapiens
MAAAPALKHWRTTLERVEKFVSPLYFTDCNLRGRLFGASCPVAVLSSFLTPERLPYQEAVQRDFRPAQVGDSFGPTWWTCWFRVELTIPEAWVGQEVHLCWESDGEGLVWRDGEPVQGLTKEGEKTSYVLTDRLGERDPRRFKRFSCLSFPSSRDYSLTLYVEVACNGLLGAGKGSMIAAPD

SEQ ID NO: 97154 - protein, 637 aa, Homo sapiens
  MOD_RES (1)..(1): Any amino acid
XMMSRACWAKSKHLIHSKTFRGMTLLHLAAAQGYATLIQTLIKWRTKHADSIDLELEVDPLNVDHFSCTPLMWACALGHLEAAVVLYKWDRRAISIPDSLGRLPLGIARSRGHVKLAECLEHLQRDEQAQLGQNPRIHCPASEEPSTESWMAQWHSEAISSPEIPKGVTVIASTNPELRRPRSEPSNYYSSESHKDYPAPKKHKLNPEYFQTRQEKLLPTALSLEEPNIRKQSPSSKQSVPETLSPSEGVRDFSRELSPPTPETAAFQASGSQPVGKWNSKDLYIGVSTVQVTGNPKGTSVGKEAAPSQVRPREPMSVLMMANREVVNTELGSYRDSAENEECGQPMDDIQVNMMTLAEHIIEATPDRIKQENFVPMESSGLERTDPATISSTMSWLASYLADADCLPSAAQIRSAYNEPLTPSSNTSLSPVGSPVSEIAFEKPNLPSAADWSEFLSASTSEKVENEFAQLTLSDHEQRELYEAARLVQTAFRKYKGRPLREQQEVAAAVIQRCYRKYKQLTWIALKYALYKKMTQAAILIQSKFRSYYEQKKFQQSRRAAVLIQKYYRSYKKCGKRRQARRTAVIVQQKLRSSLLTKKQDQAARKIMRFLRRCRHRVKELKKAKELEDIQQHPLAM

SEQ ID NO: 97155 - protein, 94 aa, Homo sapiens
  MOD_RES (1)..(1): Any amino acid
XSQGWWDEEQEKAWRKQSRRKTCIRRCPPSSASSRSLWPATCRPTGSTTHWITSISETCSAHPHPSSATPRGSPTLRGAGGPDSTPLSSPVSSL

SEQ ID NO: 97156 - protein, 195 aa, Homo sapiens
MFPQELAQKIKGYQEQIASLNSKCKMLTMKAKHATMLLTVTEVEGLAEGTEDLDGELLPTPSAHPSVVMMTAGRCHTLLSPVTEESGEEGTNSEISSPPACRSPSPVANTDASVNQDIAYYQALSAERLQTDAAKIHPSTSASQEFYEPGLEPSATAKLGDLQRSWETLKNVISEKQRTLYEALERQQKYQDSLQ

SEQ ID NO: 97157 - protein, 150 aa, Homo sapiens
MGGPVREPALSVALWLSWGAALGAVACAMALLTQQTELQSLRREVSRLQGTGGPSQNGEGYPWQSLPEQSSDALEAWENGERSRKRRAVLTQKQKNDSDVTEVMWQPALRRGRGLQAQGYGVRIQDAGVYLLYSQVLFQDVTFTMGQVVS

SEQ ID NO: 97158 - protein, 142 aa, Homo sapiens
  MOD_RES (1)..(1): Any amino acid
XAPQKVIEEFYNQTWVHRYGESILPTTLTTLWSLSVAIFSVGGMIGSFSVGLFVNRFGRRNSMLMMNLLAFVSAVLMGFSKLGKSFEMLILGRFIIGVYCGLTTGFVPMYVGEVSPTALRGALGTLHQLGIVVGILIAQAAG

SEQ ID NO: 97159 - protein, 119 aa, Homo sapiens
  MOD_RES (1)..(1): Any amino acid
XQRAGTVTGLAVNIAALLSVMLQPYMPTVSATIQAQLQLPPPACSILLTNFLCTLPAGHQIGTVSPLFQKLENDQIESLRQRFGGGQAKTSPKPAVVETVTTAKPQQIQALMDEVTKQV

SEQ ID NO: 97160 - protein, 49 aa, Homo sapiens
NEPTFYTSDGVPFTAADPDYQEKYQELLEREDFFPDYEENGTDLSGILG

SEQ ID NO: 97161 - protein, 227 aa, Homo sapiens
MLQGHSSVFQALLGTFFTWGMTAAGAALVFVFSSGQRRILDGSLGFAAGVMLAASYWSLLAPAVEMATSSGGFGAFAFFPVAVGFTLGAAFVYLADLLMPHLGAAEDPQTTLALNFGSTLMKKKSDPEGPALLFPESELSIRIDKSENGEAYQRKKAAATGLPEGPAVPVPSRGNLAQPGGSSWRRIALLILAITIHNVPVETRVLLCWPGWPRTAGLKRTSCFSLP

SEQ ID NO: 97162 - protein, 17 aa, Homo sapiens
  MOD_RES (1)..(1): Any amino acid
XKKWHSDRVLNNDIKTE

SEQ ID NO: 97163 - protein, 82 aa, Homo sapiens
MDGTIKEALSVVSDDQSLFDSAYGAAAHLPKADMTASGSPDYGQPHKINPLPPQQEWINQPVRVNVKREYDHMNGSRRQLPH

SEQ ID NO: 97164 - protein, 322 aa, Homo sapiens
FESQEDEKLLQATEKFQAECALKFPNRQCLTTVIDISGKTVFITRYLKPLNPPQELLNVYPNNLQATAELVARYVSLIPFLPDTVSFGGICDLWSTSDQFLDLLAGDEEEHAVLLCNYFLSLGKKAWLLMGNAIPEGPTAYVLTWEQGRYLIWNPCSGHFYGQFDTFCPLKNVGCLIGPDNPEELIYQRSDKAAAAELQDRIEKILKEKIMDWRPRHLTRWNRYCTSTLRHFLPLLEKSQGEDVEDDHRAELLKQLGDYRFSGFPLHMPYSEVKPLIDAVYSTGVHNIDVPNVEFALAVYIHPYPKNVLSVWIYVASLIRNR

SEQ ID NO: 97165 - protein, 54 aa, Homo sapiens
MMRIEVKVKMMLSGAGSETLKQRRTQIMSRGLPKQKPIEGVKQVIVVASGKGGV

SEQ ID NO: 97166 - protein, 176 aa, Homo sapiens
MRALDPLLYEKETLQYFQTLKAVDPMRATYLDDLRSKFLLENSVLKMEYAEVRVLHLAHKDLTVLCHLEQLLLVTHLDLSHNRLRTLPPALAALRCLEVLQASDNAIESLDGVTNLPRLQELLLCNNRLQQPAVLQPLASCPRLVLLNLQGNPLCQAVGILEQLAELLPSVSSVLT

SEQ ID NO: 97167 - protein, 80 aa, Homo sapiens
MTGIAAASFFSNTCRFGGCGLHFPTLADLIEHIEDNHIDTDPRVLEKQELQQPTYVALSYINRDIGHQMESRLNRSTVAS

SEQ ID NO: 97168 - protein, 174 aa, Homo sapiens
MKKKLVVLGLLAVVLVLVIVGLCLWLPSASKEPDNHVYTRAAVAADAKQCSKIGRDALRDGGSAVDAAIAALLCVGLMNAHSMGIGGGLFLTIYNSTTRKAEVINAREVAPRLAFATMFNSSEQSQKGGLSVAVPGEIRGYELAHQRHGRLPWARLFQPSIQLARQGFPVGKGL

SEQ ID NO: 97169 - protein, 398 aa, Homo sapiens
MATAIQNPLKSLGEDFYREAIEHCRSYNARLCAERSLRLPFLDSQTGVAQNNCYIWMEKTHRGPGLAPGQIYTYPARCWRKKRRLNILEDPRLRPCEYKIDCEAPLKKEGGLPEGPVLEALLCAETGEKKIELKEEETIMDCQKQQLLEFPHDLEVEDLEDDIPRRKNRAKGKAYGIGGLRKRQDTASLEDRDKPYVCDICGKRYKNRPGLSYHYTHTHLAEEEGEENAERHALPFHRKNNHKQFYKELAWVPEAQRKHTAKKAPDGTVIPNGYCDFCLGGSKKTGCPEDLISCADCGRSGHPSCLQFTVNMTAAVRTYRWQCIECKSCSLCGTSENDGASWAGLTPQDQLLFCDDCDRGYHMYCLSPPMAEPPEGSWSCHLCLRHLKEKASAYITLT

SEQ ID NO: 97170 - protein, 456 aa, Homo sapiens
MEQKENVPPGPEVCITHQEGEKISANENSLAVRSTPAEDDSRDSQVKSEVQQPVHPKPLSPDSRASSLSESSPPKAMKFQAPARETCVECQKTVYPMERLLANQQVFHISCFRCSYCNNKLSLGTYASLHGRIYCKPHFNQLFKSKGNYDEGFGHRPHKDLWASKNENEEILERPAQLANARETPHSPGVEDAPIAKVGVLAASMEAKASSQQEKEDKPAETKKLRIAWPPPTELGSSGSALEEGIKMSKPKWPPEDEISKPEVPEDVDLDLKKLRRSSSLKERSRPFTVAASFQSTSVKSPKTVSPPIRKGWSMSEQSEESVGGRVAERKQVENAKASKKNGNVGKTTWQNKESKGETGKRSKEGHSLEMENENLVENGADSDEDDNSFLKQQSPQEPKSLNWSSFVDNTFAEEFTTQNQKSQDVELWEGEVVKELSVEEQIKRNRYYDEDEDEE

SEQ ID NO: 97171 - protein, 440 aa, Homo sapiens
MNGALDHSDQPDPDAIKMFVGQIPRSWSEKELKELFEPYGAVYQINVLRDRSQNPPQSKGCCFVTFYTRKAALEAQNALHNIKTLPGMHHPIQMKPADSEKSNAVEDRKLFIGMVSKKCNENDIRVMFSPFGQIEECRILRGPDGLSRGCAFVTFSTRAMAQNAIKAMHQSQTMEGCSSPIVVKFADTQKDKEQRRLQQQLAQQMQQLNTATWGNLTGLGGLTPQYLALLQQATSSSNLGAFSGIQQMAGMNALQLQNLATLAAAAAAAQTSATSTNANPLSTTSSALGALTSPVAASTPNSTAGAAMNSLTSLGTLQGLAGATVGLNNINALAGTINSMAALNGGLGATGLTNGTAGTMDALTQAYSGIQQYAAAALPTLYSQSLLQQQSAAGSQKEGFVSYDNPVSAQAAIQAMNGFQIGMKRLKVQLKRSKNDSKPY

SEQ ID NO: 97172 - protein, 25 aa, Homo sapiens
MAATLGSGERWTEAYIDAVRRNKYP

SEQ ID NO: 97173 - protein, 187 aa, Homo sapiens
  MOD_RES (1)..(1): Any amino acid
XQDFDLEPSQDCAGDSVTISFVGSDPSQFCGQQGSPLGRPPGQREFVSSGRSLRLTFRTQPSSENKTAHLHKGFLALYQTVAVNYSQPISEASRGSEAINAPGDNPAKVQNHCQEPYYQAAAAGALTCATPGTWKDRQDGEEVLQCMPGTTKLSSTAAAPSYISPAIHEGSSPPFLRSTLLNESIAF

SEQ ID NO: 97174 - protein, 386 aa, Homo sapiens
MGRNRYPPACWFPSCGKNGVTSLTQKKVLRAPCGAPSVTVTKSHKRGMKGDTVNVRRSVRVKTKVPWMPPGKSSARPVGCKWEVKMQKGERQMAKRFLEERKEELEEVAHELAETEHENTVLRHNIERMKEEKDFTILQKKHLQQEKECLMSKLVEAEMDGAAAAKQVMALKDTIGKLKTEKQMTCTDINTLTRQKELLLQKLSTFEETNRTLRDLLREQHCKEDSERLMEQQGALLKRLAEADSEKARLLLLLQDKDKEVEELLQEIQCEKAQAKTASELSKSMESMRGHLQAQLRSKEAENSRLCMQIKNLERSGNQHKAEVEAIMEQLKELKQKGDRDKESLKKAIRAQKERAEKSEEYAEQLHVQLADKDLYVAEALSTLES

SEQ ID NO: 97175 - protein, 169 aa, Homo sapiens
MTTYLEFIQQNEERDGVRFSWNVWPSSRLEATRMVVPVAALFTPLKERPDLPPIQYEPVLCSRTTCRAVLNPLCQVDYRAKLWACNFCYQRNQFPPSYAGISELNQPAELLPQFSSIEYVVLRGPQMPLIFLYVVDTCMEDEDLQALKESMQMSLSLLPPTALVGLITF

SEQ ID NO: 97176 - protein, 50 aa, Homo sapiens
MASSSVPPATVSAATAGPGPGFGFASKTKKKHFVQQKVKVFRAADPLVDQ

SEQ ID NO: 97177 - protein, 233 aa, Homo sapiens
  MOD_RES (1)..(1): Any amino acid
XNVQGLSAEEIRNGNLKAILGLFFSLSRYKQQQHHQQQYYQSLVELQQRVTHASPPSEASQAKTQQDMQSRLPGPSRVPAAGSSSKVQGASNLNRRSQSFNSIDKNKPPNYANGNEKDSSKGPQSSSGVNGNVQPPSTAGQPPASAIPSPSASKPWRSKSMNVKHSATSTMLTVKQSSTATSPTPSSDRLKPPVSEGVKTAPSGQKSMLEKFKLVNARTALRPPQPPSSGPSD

SEQ ID NO: 97178 - protein, 91 aa, Homo sapiens
MNKLIEYYQQLAQKEKVERDRKKLARRRNYMPLAFSDKYGLGTRLQRPRAGASISTLAGLSLKEGEDQKEIKIEPAQAVDEVEPLPEDYYT

SEQ ID NO: 97179 - protein, 1150 aa, Homo sapiens
MPSYQGYILESAPVGATISDSLNLTSPLRIVALDKDIEDVPPSGVPTKDPELHLFLNDYTSVFTVTQTGITRYLTLLQPVDREEQQTYTFSITAFDGVQESEPVIVNIQVMDANDNTPTFPEISYDVYVYTDMRPGDSVIQLTAVDADEGSNGEITYEILVGAQGDFIINKTTGLITIAPGVEMIVGRTYALTVQAADNAPPAERRNSICTVYIEVLPPNNQSPPRFPQLMYSLEISEAMRVGAVLLNLQATDREGDSITYAIENGDPQRVFNLSETTGILTLGKALDRESTDRYILIITASDGRPDGTSTATVNIVVTDVNDNAPVFDPYLPRNLSVVEEEANAFVGQVKATDPDAGINGQVHYSLGNFNNLFRITSNGSIYTAVKLNREVRDYYELVVVATDGAVHPRHSTLTLAIKVLDIDDNSPVFTNSTYTVLVEENLPAGTTILQIEAKDVDLGANVSYRIRSPEVKHFFALHPFTGELSLLRSLDYEAFPDQEASITFLVEAFDIYGTMPPGIATVTVIVKDMNDYPPVFSKRIYKGMVAPDAVKGTPITTVYAEDADPPGLPASRVRYRVDDVQFPYPASIFEVEEDSGRVITRVNLNEEPTTIFKLVVVAFDDGEPVMSSSATVKILVLHPGEIPRFTQEEYRPPPVSELATKGTMVGVISAAAINQSIVYSIVSGNEEDTFGINNITGVIYVNGPLDYETRTSYVLRVQADSLEVVLANLRVPSKSNTAKVYIEIQDENNHPPVFQKKFYIGGVSEDARMFTSVLRVKATDKDTGNYSVMAYRLIIPPIKEGKEGFVVETYTGLIKTAMLFHNMRRSYFKFQVIATDDYGKGLSGKADVLVSVVNQLDMQVIVSNVPPTLVEKKIEDLTEILDRYVQEQIPGAKVVVESIGARRHGDAFSLEDYTKCDLTVYAIDPQTNRAIDRNELFKFLDGKLLDINKDFQPYYGEGGRILEIRTPEAVTSIKKRGESLGYTEGALLALAFIIILCCIPAILVVLVSYRQFKVRQAECTKTARIQAALPAAKPAVPAPAPVAAPPPPPPPPPGAHLYEELGDSSMHKNYPWSLELILARNMDKIITVMSMGMKCLNMGVAVDCYHQLDRRNMVRWLVKLRKNMRRKRKSQRKLKNQRLKLESLVRRKK

SEQ ID NO: 97180 - protein, 166 aa, Homo sapiens
MPRRKKKVKEVSESRNLEKKDVETTSSVSVKRKRRLEDAFIVISDSDGEEPKEENGLQKTKTKQSNRAKCLAKRKIAQMTEEEQFALALKMSEQEAREVNSQEEEEEELLRKAIAESLNSCRPSDASATRSRPLATGPSSQSHQEKTTDSGLTEGMHMAAGTSITV

SEQ ID NO: 97181 - protein, 131 aa, Homo sapiens
MNKKKVFEEPSISLFALEHCEGRELHLEEAVNSVLNKDLHFYTQSVWVKSGLWIAYEGSNFLGRQILLRPNEIPNWTAFSRWKTIGSLRPMKQPAVYIRIKNRAQGEYLTVTGSLADTRATSVCISPYSGK

SEQ ID NO: 97182 - protein, 130 aa, Homo sapiens
MQCRLPRGLAGALLTLLCMGLLCLRYHLNLSPQRVQGTPELSQPNPGPPKLQLHDVFIAVKTTRAFHRLRLELLLDTWVSRTREQGPTLWSPTAPRNTATQLCPARWLLSSTPSWPVGLGGSAMWTMTTM

SEQ ID NO: 97183 - protein, 136 aa, Homo sapiens
MDFPCLWLGLLLPLVAALDFNYHRQEGMEAFLKTVAQNYSSVTHLHSIGKSVKGRNLWVLVVGRFPKEHRIGIPEFKYVANMHGDETVGRELLLHLIDYLVTSDGKDPEITNLINSTRIHIMPSMNPDGFEAVKKP

SEQ ID NO: 97184 - protein, 80 aa, Homo sapiens
MGVLKFKHIFFRSFVKSSGVSQIVFTFLLIPCCLTLNFRAPPVIPNVPFLWAWNAPSEFCLGKFDEPLDMSLFSFIGSPR

SEQ ID NO: 97185 - protein, 717 aa, Homo sapiens
MIDSVKLRRDSAADFFSHYEYLCALQNSVPLPAVRACLREGVLDFNADRLRGVDWAPLLSTLKINKDLPLVSIKSFFQPWLGDTGSDMNKFCRSRVPAIRYKDVTFQLCKALKGCLSISSVLKNLELNGLILRERDLTILAKGLNKSASLVHLSLANCPIGDGGLEIICQGIKSSITLKTVNFTGCNLTWQGADHMAKILKYQTMRRHEETWAESLRYRRPDLDCMAGLRRITLNCNTLIGDLGACAFADSLSEDLWLRALDLQQCGLTNEGAKALLEALETNTTLVVLDIRKNPLIDHSMMKAVIKKVLQNGRSAKSEYQWITSPSVKEPSKTAKQKRRTIILGSGHKGKATIRIVIWRHRVGLATKKPVSSGRKHSLGKEYYAPAPLPPGVSGFLPWRTAERAKRHRGFPLIKTRDICNQLQQPGFPVTVTVESPSSSEVEEVDDSSESVHEVPEKTSIEQEALQEKLEECLKQLKEERVIRLKVDKRVSELEHENAQLRNINFSLSEALHAQSLTNMILDDEGVLGSIENSFQKFHAFLDLLKDAGLGQLATMAGIDQSDFQLLGHPQMTSTVSNPPKEEKKALEDEKPEPKQNALGQMQNIQVSICMQSAYNEGTLMKFQKITGDARIPLPLDSFPVPVSTPEGLGTSSNNLGVPATEQRQESFEGFIARMCSPSPDATSGTGSQRKEEELSRNSRSSSEKKTKTGEYTKKHS

SEQ ID NO: 97186 - protein, 58 aa, Homo sapiens
MRDNTSPISVILVSRVADTLPATRATMLMSRTAIPGFQMLFWQQFWQPSLKCVAKNLN

SEQ ID NO: 97187 - protein, 198 aa, Homo sapiens
MKNQDVKFTKDTYVLAFAICYKLNSPESFKICTTLREEALLKGEILSRRASCFAVALALNQNEMAKAVSIFSQIMNPESIACINLNIIIHIQSNMLENLIKTLKNAAEGNLSKFVKRHVFSEEVLAKVREKVKDVPALVAKFDEIYGTLHITGQVTTDSLDAVLCHTPRDRKSHTLLLNKRMVSRRTFQPLSQSLLAE

SEQ ID NO: 97188 - protein, 185 aa, Homo sapiens
MSSYKVEAKGDTDRLTPEALKGLVNKPELLALTESLTPDHTVAFWMPESEMEVMELELGAGVRLKTRGDGPFLDSLAKLEAGTVTKCNFTGDGKTGASWTDNIMAQKCSKGAAAEIREQGDGAEDEEWVFVETLDKCFENVCELDLIFHMDKVHYILQEVVMGGMVLETNMNEIVAQIEAQNRLE

SEQ ID NO: 97189 - protein, 93 aa, Homo sapiens
MGNLLKVLTCTDLEQGPNFFLDFENAQPTESEKEIYNQVNVVLKDAEGILEDLQSYRGAGHEIREAIQHPADEKLQEKAWGAVVPLVGKLKKF

SEQ ID NO: 97190 - protein, 173 aa, Homo sapiens
MSSAAADHWAWLLVLSFVFGCNVLRILLPSFSSFMSRVLQKDAEQESQMRAEIQDMKQELSTVNMMDEFARYARLERKINKMTDKLKTHVKARTAQLAKIKWVISVAFYVLQAALMISLIWKYYSVPVAVVPSKWITPLDRLVAFPTRVAGDDGLIEFTTVTLESPKAWLVEA

SEQ ID NO: 97191 - protein, 59 aa, Homo sapiens
MGLTISSLFSRLFGKKQMRILMVGLDAAGKTTILYKLKLGEIVTTIPTIAVIFVFLCRF

SEQ ID NO: 97192 - protein, 195 aa, Homo sapiens
MEPGTNSFRVEFPDFSSTILQKLNQQRQQGQLCDVSIVVQGHIFRAHKAVLAASSPYFCDQVLLKNSRRIVLPDVMNPRVFENILLSSYTGRLVMPAPEIVSYLTAASFLQMWHVVDKCTEVLEGNPTVLCQKLNHGSDHQSPSSSSYNGLVESFELGSGGHTDFPKAQELRDGENEEESTKDELSSQLTEHEYL

SEQ ID NO: 97193 - protein, 114 aa, Homo sapiens
MAMRELVEAECGGANPLMKLAGHFTQDKALRQEGLRPGPWPPGAPASEAASKPLGVASEDELVAEFLQDQNAPLVSRAPQTFKMDDLLAEMQQIEQSNFRQAPQRAPGVADLAL

SEQ ID NO: 97194 - protein, 167 aa, Homo sapiens
  MOD_RES (1)..(1): Any amino acid
XGEIIEGCRLPVLRRNQDNEDEWPLAEILSVKDISGRKLFYVHYIDFNKRLDEWVTHERLDLKKIQFPKKEAKTPTKNGLPGSRPGSPEREPASAQASGKTLPIPVQITLRFNLPKEREAIPGGEPDQPLSSSSCLQPNHRSTKRKVEVVSPATPVPSETAPASVFP

SEQ ID NO: 97195 - protein, 27 aa, Homo sapiens
MAANLSRNGPALQEAYVRVVTEKSPTD

SEQ ID NO: 97196 - protein, 615 aa, Homo sapiens
RVTKILGDMPDPTQFGIHDDTMEAERAEVMEPGITTELVHFIKGEKGDTDIMSDLFGLHPKKEGSLKHGPEVGLGDLSEIIGKDEPPTLESTVQKKRKAQAAEMKAANEAEGKVESEKADMEDGEKEDKDKEEEQAEYLWTEVTKKKKRRCGQKVEKPEAFTANFFKGLEIYQTKLLVTEEPLEEETEDVANLWNSFNDEEEEEAMVFFVLQESTGYMAPTLRALAIIHTIISLVCVVGYYCLKVPLVVFKREKEIARKLEFDGLYITEQPSEDDIKGQWDRLVINTPSFPNNYWDKFVKRKVINKYGDLYGAERIAELLGLDKNALDFSPVEETKAEAASLVSWLSSIDMKYHIWKLGVVFTDNSFLYLAWYTTMSVLGHYNNFFFAAHLLDIAMGFKTLRTILSSVTHNGKQLVLTVGLLAVVVYLYTVVAFNFFRKFYNKSEDDDEPDMKCDDMMTCYLFHMYVGVRAGGGIGDEIEDPAGDPYEMYRIVFDITFFFFVIVILLAIIQGLIIDAFGELRDQQEQVREDMETKCFICGIGNDYFDTTPHGFETHTLQEHNLANYLFFLMYLINKDETEHTGQESYVWKMYQERCWDFFPAGDCFRKQYEDQLG

SEQ ID NO: 97197 - protein, 133 aa, Homo sapiens
MHSPGAGCPRPCADTPGPQPQPMDLRVGQRPPVEPPPEPTLLALQRPQRLHHHLFLAGLQQQRSVEPMRLSMDTPMPELQVGPQEQELRQLLHKDKSKRSAVASSVVKQKLAEVILKKQQAALERTVHPNSPG

SEQ ID NO: 97198 - protein, 46 aa, Homo sapiens
MEDSASASLSSAAATGTSTSTPAAPTARKQLDKEQCYTYWSRWNAN

SEQ ID NO: 97199 - protein, 628 aa, Homo sapiens
MSSQGSPSVALSTTTVSSVAVQAGDSKIVIAVIKCGKWVQLQLAESQPNLLEIGSSQDETKKLLHDHELLLAKLKALEDRVWELLQEADKTAEENKDQSQVYDAMAETLGEAWAALVSMLERRTELLRLTSEFFENALEFAIKIDQAEDFLQNTHEFESAESLKSLLQLHEHHTKELLERSLALLNKSQQLTDFIEKFKCEGPNVNPELTQGAHSSCLKVDRLLELLQDRRRQLDKYLKQQWQELSQVLQICQWDQQENQVTCWFQKTIRNLQEQSLGSSLSDNEDRIHKQEELIIKAKAFDVLGRVEAYLKLLKSEGLSLAVLAVRHEELHRKIKDCTTDALQKGQTLISQVDSCSSQVSGIHEMMGCIKRRVDHLTEQCSAHKEYALKKQQLTASVEGYLRKVEMSIQKISPVLSNAMDVGSTRSESEKILNKYLELDIQAKETSHELEAAAKTMMEKNEFVSDEMVSLSSKARWLAEELNLFGQSIDYRSQVLQTYVAFLKSSEEVEMQFQSLKEFYETEIPQKEQDDAKAKHCSDSAEKQWQLFLKKSFITQDLGLEFLNLINMAKENEILDVKNEVYLMKNTMENQKAEREELSLLRLAWQLKATESKPGKQQWAAFKEQLKK

SEQ ID NO: 97200 - protein, 69 aa, Homo sapiens
MADLMQETFLHHATDGVGVDEKLSLRRVAVVEDFFDIIYSMHVETGPNGEQIRKHAGQKRTYKAIQKNV

SEQ ID NO: 97201 - protein, 1189 aa, Homo sapiens
MSEPGGGGGEDGSAGLEVSAVQNVADVSVLQKHLRKLVPLLLEDGGEAPAALEAALEEKSALEQMRKFLSDPQVHTVLVERSTLKEDVGDEGEEEKEFISYNINIDIHYGVKSNSLAFIKRTPVIDADKPVSSQLRVLTLSEDSPYETLHSFISNAVAPFFKSYIRESGKADRDGDKMAPSVEKKIAELEMGLLHLQQNIEIPEISLPIHPMITNVAKQCYERGEKPKVTDFGDKVEDPTFLNQLQSGVNRWIREIQKVTKLDRDPASGTALQEISFWLNLERALYRIQEKRESPEVLLTLDILKHGKRFHATVSFDTDTGLKQALETVNDYNPLMKDFPLNDLLSATELDKIRQALVAIFTHLRKIRNTKYPIQRALRLVEAISRDLSSQLLKVLGTRKLMHVAYEEFEKVMVACFEVFQTWDDEYEKLQVLLRDIVKRKREENLKMVWRINPAHRKLQARLDQMRKFRRQHEQLRAVIVRVLRPQVTAVAQQNQGEVPEPQDMKVAEVLFDAADANAIEEVNLAYENVKEVDGLDVSKEGTEAWEAAMKRYDERIDRVETRITARLRDQLGTAKNANEMFRIFSRFNALFVRPHIRGAIREYQTQLIQRVKDDIESLHDKFKVQYPQSQACKMSHVRDLPPVSGSIIWAKQIDRQLTAYMKRVEDVLGKGWENHVEGQKLKQDGDSFRMKLNTQEIFDDWARKVQQRNLGVSGRIFTIESTRVRGRTGNVLKLKVNFLPEIITLSKEVRNLKWLGFRVPLAIVNKAHQANQLYPFAISLIESVRTYERTCEKVEERNTISLLVAGLKKEVQALIAEGIALVWESYKLDPYVQRLAETVFNFQEKVDDLLIIEEKIDLEVRSLETCMYDHKTFSEILNRVQKAVDDLNLHSYSNLPIWVNKLDMEIERILGVRLQAGLRAWTQVLLGQAEDKAEVDMDTDAPQVSHKPGGEPKIKNVVHELRITNQVIYLNPPIEECRYKLYQEMFAWKMVVLSLPRIQSQRYQVGVHYELTEEEKFYRNALTRMPDGPVALEESYSAVMGIVSEVEQYVKVWLQYQCLWDMQAENIYNRLGEDLNKWQALLVQIRKARGTFDNAETKKEFGPVVIDYGKVQSKVNLKYDSWHKEVLSKFGQMLGSNMTEFHSQISKSRQELEQHSVDTASTSDAVTFITYVQSLKRKIKQFEKQVER

SEQ ID NO: 97202 - protein, 726 aa, Homo sapiens
MPINKSEKPESCDNVKVVVRCRPLNEREKSMCYKQAVSVDEMRGTITVHKTDSSNEPPKTFTFDTVFGPESKQLDVYNLTARPIIDSVLEGYNGTIFAYGQTGTGKTFTMEGVRAIPELRGIIPNSFAHIFGHIAKAEGDTRFLVRVSYLEIYNEEVRDLLGKDQTQRLEVKERPDVGVYIKDLSAYVVNNADDMDRIMTLGHKNRSVGATNMNEHSSRSHAIFTITIECSEKGIDGNMHVRMGKLHLVDLAGSERQAKTGATGQRLKEATKINLSLSTLGNVISALVDGKSTHVPYRNSKLTRLLQDSLGGNSKTMMCANIGPADYNYDETISTLRYANRAKNIKNKARINEDPKDALLRQFQKEIEELKKKLEEGEEISGSDISGSEEDDDEEGEVGEDGEKRKKRRGSSSSSSSDSTCSVIEKPLDKFLPNQAGKKKVSPDKMIEMQAKIDEERKALETKLDMEEEERNKARAELEKREKDLLKAQQEHQSLLEKLSALEKKVIVGGVDLLAKAEEQEKLLEESNMELEERRKRAEQLRRELEEKEQERLDIEEKYTSLQEEAQGKTKKLKKVWTMLMAAKSEMADLQQEHQREIEGLLENIRQLSRELRLQMLIIDNFIPRDYQEMIENYVHWNEDIGEWQLKCVAYTGNNMRKQTPVPDKKEKDPFEVDLSHVYLAYTEESLRQSLMKLERPRTSKGKARPKTGRRKRSAKPETVIDSLLQ

SEQ ID NO: 97203 - protein, 194 aa, Homo sapiens
MISLASVQDKSELDMISTRVMDIKLREAAEGLGEDSTGKKKSKFKTFKKFFGKKKRKESPSSTGSSTWKQSQTRNEVIAIESGPVGYDSEDELEESRGTLGSRALSHDSIFIPESGQDATRPVRVFSQENVCDRIKALQLKIQCNVKMGPPPPPGGLPAKRGEDAGMSSEDDGLPRSPPEMSLLHDVGPGTTIK

SEQ ID NO: 97204 - protein, 502 aa, Homo sapiens
MGVIGIQLVVTMVMASVMQKIIPHYSLARWLLCNGSLRWYQHPTEEELRILAGKQQKGKTKKDRKYNGHIESKPLTIPKDIDLHLETKSVTEVDTLALHYFPEYQWLVDFTVAATVVYLVTEVYYNFMKPTQEMNISLVWCLLVLSFAIKVLFSLTTHYFKVEDGGERSVCVTFGFFFFVKAMAVLIVTENYLEFGLETGFTNFSDSAMQFLEKQGLESQSPVSKLTFKFFLAIFCSFIGAFLTFPGLRLAQMHLDALNLATEKITQTLLHINFLAPLFMVLLWVKPITKDYIMNPPLGKESIPLMTEATFDTLRLWLIILLCALRLAMMRSHLQAYLNLAQKCVDQMKKEAGRISTVELQKMVARVFYYLCVIALQYVAPLVMLLHTTLLLKTLGNHSWGIYPESISTLPVDNSLLSNSVYSELPSAEGKMKHNARQGPAVPPGMQAYGAAPFEDLQLDFTEMPKCGGNKYLLVLVCTFSGWVEAYPTRTEKACEITHVLL

SEQ ID NO: 97205 - protein, 422 aa, Homo sapiens
MASNKFKRMLNRELTHLSEMSRSGNQVSEFISNTFLDKQHEVEIPSPTQKEKEKKKRPMSQISGVKKLMHSSSLTNSSIPRFGVKTEQEDVLAKELEDVNKWGLHVFRIAELSGNRPLTVIMHTIFQERDLLKTFKIPVDTLITYLMTLEDHYHADVAYHNNIHAADVVQSTHVLLSTPALEAVFTDLEILAAIFASAIHDVDHPGVSNQFLINTNSELALMYNDSSVLENHHLAVGFKLLQEENCDIFQNLTKKQRQSLRKMVIDIVLATDMSKHMNLLADLKTMVETKKVTSSGVLLLDNYSDRIQVLQNMVHCADLSNPTKPLQLYRQWTDRIMEEFFRQGDRERERGMEISPMCDKHNASVEKSQVGFIDYIVHPLWETWADLVHPDAQDILDTLEDNREWYQSTIPQSPSPAPDDPE

SEQ ID NO: 97206 - protein, 137 aa, Homo sapiens
MTAAENVCYTLINVPMDSEPPSEISLKNDLEKGDVKSKTEALKKVIIMILNGEKLPGLLMTIIRFVLPLQDHTIKKLLLVFWEIVPKTTPDGRLLHEMILVCDAYRKDLQHPNEFIRGSTLRFLCKLKEAELLEPLM

SEQ ID NO: 97207 - protein, 699 aa, Homo sapiens
MDLKTLKLFNSQLRCGWLLYIWNKAFMAHLRVPQDEWTGYTPRGKDDEIPCRRMRSGSYIKAMGDEDSGDSDTSPKPSPKVAARRESYLKATQPSLTELTTLKISNEHSPKLQIRSHSYLRAVSEVSINRSLDSLDPAGLLTSPKFRSRNESYMRAMSTISQVSEMEVNGQFESVCESVFSELESQAVEALDLPMPGCFRMRSHSYVRAIEKGCSQDDECVSLRSSSPPRTTTTVRTIQSSTGVIKLSSAVEVSSCITTYKKTPPPVPPRTTTKPFISITAQSSTESAQDAYMDGQGQRGDIISQSGLSNSTESLDSMKALTAAIEAANAQIHGPASQHMGNNTATVTTTTTIATVTTEDRKKDHFKKNRCLSIGIQVDDAEEPDKTGENKAPSKFQSVGVQVEEEKCFRRFTRSNSVTTAVQADLDFHDNLENSLESIEDNSCPGPMARQFSRDASTSTVSIQGSGNHYHACAADDDFDTDFDPSILPPPDPWIDSITEDPLEAVQRSVCHRDGHWFLKLLQAERDRMEGWCQQMEREERENNLPEDILGKIRTAVGSAQLLMAQKFYQFRELCEENLNPNAHPRPTSQDLAGFWDMLQLSIENISMKFDELHQLKANNWKQMDPLDKKERRAPPPVPKKPAKGPAPLIRERSLESSQRQEARKRLMAAKRAASVRQNSATESAESIEIYIPEAQTRL

SEQ ID NO: 97208 - protein, 1389 aa, Homo sapiens
MKSCAVSLTTAAVAFGDEAKKMAEGKASRESEEESVSLTVEEREALGGMDSRLFGFVRLHEDGARTKTLLGKAVRCYESLILKAEGKVESDFFCQLGHFNLLLEDYSKALSAYQRYYSLQADYWKNAAFLYGLGLVYFYYNAFHWAIKAFQDVLYVDPSFCRAKEIHLRLGLMFKVNTDYKSSLKHFQLALIDCNPCTLSNAEIQFHIAHLYETQRKYHSAKEAYEQLLQTENLPAQVKATVLQQLGWMHHNMDLVGDKATKESYAIQYLQKSLEADPNSGQSWYFLGSVLYQQQNQPMDALQAYICAVQLDHGHAAAWMDLGTLYESCNQPQDAIKCYLNAARSKRCSNTSTLAARIKFLQAQLCNLPQSSLQNKTKLLPSIEEAWSLPIPAELTSRQGAMNTAQQQSLSLHMITSSQVEGLSSPAKKKRTSSPTKNGSDNWNGGQSLSHHPVQQVYSLCLTPQKLQHLEQLRANRDNLNPAQKHQLEQLESQFVLMQQMRHKEVAQVRTTGIHNGAITDSSLPTNSVSNRQPHGALTRVSSVSQPGVRPACVEKLLSSGAFSAGCIPCGTSKILGSTDTILLGSNCIAGSESNGNVPYLQQNTHTLPHNHTDLNSSTEEPWRKQLSNSAQGLHKSQSSCLSGPNEEQPLFSTGSAQYHQATSTGIKKANEHLTLPSNSVPQGDADSHLSCHTATSGGQQGIMFTKESKPSKNRSLVPETSRHTGDTSNGCADVKGLSNHVHQLIADAVSSPNHGDSPNLLIADNPQLSALLIGKANGNVGTGTCDKVNNIHPAVHTKTDHSVASSPSSAISTATPSPKSTEQRSINSVTSLNSPHSGLHTVNGEGLGKSQSSTKVDLPLASHRSTSQILPSMSVSICPSSTEVLKACRNPGKNGLSNSCILLDKCPPPRPPTSPYPPLPKDKLNPPTPSIYLENKRDAFFPPLHQFCTNPKNPVTVIRGLAGALKLDLGLFSTKTLVEANNEHMVEVRTQLLQPADENWDPTGTKKIWRCESNRSHTTIAKYAQYQASSFQESLREENEKRTQHKDHSDNESTSSENSGRRRKGPFKTIKFGTNIDLSDNKKWKLQLHELTKLPAFARVVSAGNLLTHVGHTILGMNTVQLYMKVPGSRTPGHQENNNFCSVNINIGPGDCEWFVVPEDYWGVLNDFCEKNNLNFLMSSWWPNLEDLYEANVPVYRFIQRPGDLVWINAGTVHWVQAVGWCNNIAWNVGPLTACQYKLAVERYEWNKLKSVKSPVPMVHLSWNMARNIKVSDPKLFEMIKYCLLKILKQYQTLREALVAAGKEVIWHGRTNDEPAHYCSICEVEVFNLLFVTNESNTQKTYIVHCHDCARKTSKSLENFVVLEQYKMEDLIQVYDQFTLALSLSSSS

SEQ ID NO: 97209 - protein, 36 aa, Homo sapiens
MVFSNNDEGLINKKLPKELLLRVEWWKISRSDAVDS

SEQ ID NO: 97210 - protein, 155 aa, Homo sapiens
MSWDCGFKYIFAFSPTLKAGVMCKLQERDEIGRIELVQKLAKENYQFLQTDKKEQEKSEHQDDEVTTVQVKEQDQSVLVLKKVQCCGPAPTAGSAESHWRYVVVSGTPEKILEHLLNDLHLEEVQDKETETLLDDFLLTYTVFMTTDDLCQALLR

SEQ ID NO: 97211 - protein, 420 aa, Homo sapiens
MDFQERDPPFLPESAQSSKPSSAQQASELWEVVEEPRVRLGTEGVMPERQEGHLLKKRKWPLKGWHKRYFVLEDGILHYATTRQDITKGKLHGSIDVRLSVMSINKKAQRIDLDTEDNIYHLKIKSQDLFQSWVAQLRAHRLAHRLDMPRGSLPSTAHRKVPGAQLPTAATASALPGLGPREKVSSWLRDSDGLDRCSHELSECQGKLQELHRLLQSLESLHRIPSAPVIPTHQASVTTERPKKGKRTSRMWCTQSFAKDDTIGRVGRLHGSVPNLSRYLESRDSSGTRGLPPTDYAHLQRSFWALAQKVHSSLSSVLAALTMERDQLRDMHQGSELSRMGVSEASTGQRRLHSLSTSSDTTADSFSSLNPEEQEALYMKGRELTPQLSQTSILSLADSHTEFFDACEVLLSASSSENEG

SEQ ID NO: 97212 - protein, 31 aa, Homo sapiens
ELTDLQRDPPAQCSAGPVGDDCCFHNQNLSP

SEQ ID NO: 97213 - protein, 117 aa, Homo sapiens
MAATEGVGEAAQGGEPGQPAQPPPQPHPPPPQQQHKEEMAAEAGEAVASPMDDGFVSLDSPSYVLYRHFRRVLLKSLQKDLHEEMNYITAIIEEQPKNYQVWNLNFGIMSCSMWTNF

SEQ ID NO: 97214 - protein, 43 aa, Homo sapiens
  MOD_RES (1)..(1): Any amino acid
XSRANLVGASWGSEDSLSVASDLYGSAFSLYRGRALSIHVVFG

SEQ ID NO: 97215 - protein, 143 aa, Homo sapiens
MAVTKELLQMDLYALLGIEEKAADKEVKKAYRQKALSCHPDKNPDNPRAAELFHQLSQALEVLTDAAARAAYDKVRKAKKQAAERTQKLDEKRKKVKLGRCHHSARWPVVSCGHFHSSPSPEASLPATHLKAFWLRLWAKRCS

SEQ ID NO: 97216 - protein, 20 aa, Homo sapiens
MKSLKAKFRKSDEFEICKEL

SEQ ID NO: 97217 - protein, 69 aa, Homo sapiens
MPANEDAPQPGEHGSACEVSVSFEDVTVDFSREEWQQLDSTQRRLYQDVMLENYSHLLSVGKDNHPVKL

SEQ ID NO: 97218 - protein, 185 aa, Homo sapiens
  MOD_RES (1)..(1): Any amino acid
XDLSKSRENLSAVMLYNPGLFPIKGPICLRLEFERQQREELEKLESKRKLIEEMEEKQKSDKAELERMQQEVETQRKETEIVQLQIRKQEESLKRRSFHIENKLKDLLAEKEKFEEERLREQQEIELQKKRQEEETFLRVQEELQRLKELNNNEKAEKFQIFQELDQLQKEKDEQYAKLELEKKR

SEQ ID NO: 97219 - protein, 119 aa, Homo sapiens
  MOD_RES (1)..(1): Any amino acid
XREMPEDLALESNPSDHPRASTIFLSKSQTDVREKRKSNHLNHVSPGQLTKKYSSCSTIFLDDSTVSQPNLRTTVKCVTLAIYYHIKNSEKKFQRNTLSMILSTNLFTDLFVLFLVLHS

SEQ ID NO: 97220 - protein, 24 aa, Homo sapiens
MHSDAAAVNISFRECGVEKFSRKE

SEQ ID NO: 97221 - protein, 108 aa, Homo sapiens
MPAKGRYFLNEGEEGPDQDALYEKYQLTSQHGPLLLTLLLVAATACVALIIIAFSQGRHGLAMLPRLVLNSWPQVILLPWPPKVLGLQDPSRHQAILGMAFLVLAVFA

SEQ ID NO: 97222 - protein, 123 aa, Homo sapiens
MMTPQVITPQQMQQILQQQVLSPQQLQVLLQQQQALMLQQQQLQEFYKKQQEQLQLQLLQQQHAGKQPKEQQQVATQQLAFQQQLLQMQQLQQQHLLSLQRQGLLTIQPGQPALPLQPLAQGM

SEQ ID NO: 97223 - protein, 11 aa, Homo sapiens
MAGILFEDIFD

SEQ ID NO: 97224 - protein, 159 aa, Homo sapiens
MIKFQMVTFKDVAVVFTEEELGLLDSVQRKLYRDVMLENFRNLLLVAHQPFKPDLISQLEREEKLLMVETETPRDGCSGRKNQQKMESIQEVTVSYFSPKELSSRQTWQQSAGGLIRCQDFLKVFQGKNSQLQEQGNSLGQVWAGIPVQISEDKNYIFT

SEQ ID NO: 97225 - protein, 397 aa, Homo sapiens
MNLLPNIESPVTRQEKMATVWDEAEQDGIGEEVLKMSTEEIIQRTRLLDSEIKLLDVDPNDQEEDGANIDLDSQRKGKCAVIKTSTRQTYFLPVIGLVDAEKLKPGDLVGVNKDSYLILETLPTEYDSRVKAMEVDERPTEQYSDIGGLDKQIQELVEAIVLPMNHKEKFENLGIQPPKGVLMYGPPGTGKTLLARACAAQTKATFLKLAGPQLVQMFIGDGAKLVRDAFALAKEKAPSIIFIDELDAIGTKRFDSEKAGDREVQRTMLELLNQLDGFQPNTQVKVIAATNRVDILDPALLRSGRLDRKIEFPMPNEEARARIMQIHSRKMNVSPDVNYEELARCTDDFNGAQCKAVCVEAGMIALRRGATELTHEDYMEGILEVQAKKKANLQYYA

SEQ ID NO: 97226 - protein, 338 aa, Homo sapiens
MPLAFCGSENHSAAYRVDQGVLNNGCFVDALNVVPHVFLLFITFPILFIGWGSQSSKVHIHHSTWLHFPGHNLRWILTFMLLFVLVCEIAEGILSDGVTESHHLHLYMPAGMAFMAAVTSVVYYHNIETSNFPKLLIALLVYWTLAFITKTIKFVKFLDHAIGFSQLRFCLTGLLVILYGMLLLVEVNVIRVRRYIFFKTPREVKPPEDLQDLGVRFLQPFVNLLSKGTYWWMNAFIKTAHKKPIDLRAIGKLPIAMRALTNYQRLCEAFDAQRKDIQGTQGARAIWQALSHAFGRRLVLSSTFRILADLLGFAGPLCIFGIVDHLGKENDVFQPKFS

SEQ ID NO: 97227 - protein, 25 aa, Homo sapiens
MGNFKSRKPKSIFKAESGRSHGESQ

SEQ ID NO: 97228 - protein, 96 aa, Homo sapiens
  MOD_RES (1)..(1): Any amino acid
XPPPSTRALLYFSRLWEDFKQNTPFLNWKAIIEGADASSLQKRAGRDDQNYNYNQHAYPTAYGGKYSVKTPAKGGVSPSSSASRVQPGLLQWVKFW

SEQ ID NO: 97229 - protein, 202 aa, Homo sapiens
MLKVARAEKDLLELSCNELRQELLKANGEIKHVSSLLAKVEKDYSYLKEICDHQAEQLSRTSLKLQEKASESDAEIKDMKETIFELEDQVEQHRAVKLHNNQLISELESSVIKLEEQKSDLERQLKTLTKQMKEETEEWRRFQADLQTAVVVANDIKCEAQQELRTVKRKLLEEEEKNARLQKELGDVQGHGRVVTSRAAPP

SEQ ID NO: 97230 - protein, 143 aa, Homo sapiens
DSELHDIIKDLEDCLMVGLHTCGDLAPNTLRIFTSNSEIKGVCSVGCCYHLLSEEFENQHKERTQEKWGFPMCHYLKEERWCCGRNARMSACLALERVAAGQGLPTESLFYRAVLQDIIKDCYGITKWYEDFILIRITMLYCK

SEQ ID NO: 97231 - protein, 103 aa, Homo sapiens
MASASTSKYNSHSLENESIKRTSRDGVNRDLTEAVPRLPGETLITDKEVIYICPFNGPIKGRVYITNYRLYLRSLETPLFAFLNEEKFNVDGWTVYNPVEEYR

SEQ ID NO: 97232 - protein, 169 aa, Homo sapiens
MLSSVVFWGLIALIGTSRGSYPFSHSMKPHLHPRLYHGCYGDIMTMKTSGATCDANSVMNCGIRGSEMFAEMDLRAIKPYQTLIKEVGQRHCVDPAVIAAIISRESHGGSVLQDGWDHRGLKFGLMQLDKQTYHPVGAWDSKEHLSQATGILTERIKAIQKKFPTWSVA

SEQ ID NO: 97233 - protein, 141 aa, Homo sapiens
  MOD_RES (1)..(1): Any amino acid
XVAQQEQELDIKKNERLWLLDDSKSWWRVRNSMNKTGFVPSNYVERKNSARKASIVKNLKDTLGIGKVKRKPSVPDSASPADDSFVDPGERLYDLNMPAYVKFNYMAEREDELSLIKGTKCDYIRPSLTGKFAGNPWYYGK

SEQ ID NO: 97234 - protein, 608 aa, Homo sapiens
MGNGESQLSSVPAQKLGWFIQEYLKPYEECQTLIDEMVNTICDVLQEPEQFPLVQGVAIGGSYGRKTVLRGNSDGLNDNPSPWIYRELKRSLDKTNASPGEFAVCFTELQQKFFDNRPGKLKDLILLIKHWHQQCQKKIKDLPSLSPYALELLTVYAWEQGCRKDNFDIAEGVRTVLELIKCQEKLCIYWMVNYNFEDETIRNILLHQLQSARPVILDPVDPTNNVSGDKICWQWLKKEAQTWLTSPNLDNELPAPSWNVLPAPLFTTPGHLLDKFIKEFLQPNKCFLEQIDSAVNIIRTFLKENCFRQSTAKIQIVRGGSTAKGTALKTGSDADLVVFHNSLKSYTSQKNERHKIVKEIHEQLKAFWREKEEELEVSFEPPKWKAPRVLSFSLKSKVLNESVSFDVLPAFNALGQLSSGSTPSPEVYAGLIDLYKSSDLPGGEFSTCFTVLQRNFIRSRPTKLKDLIRLVKHWYKECERKLKPKGSLPPKYALELLTIYAWEQGSGVPDFDTAEGFRTVLELVTQYQQLCIFWKVNYNFEDETVRKFLLSQLQKTRPVILDPAEPTGDVGGGDRWCWHLLAKEAKEWLSSPCFKDGTGNPIPPWKVP

SEQ ID NO: 97235 - protein, 202 aa, Homo sapiens
  MOD_RES (1)..(1): Any amino acid
XMAEVLKGLTCLLLLFAQKRGNVKHLVLFLHEAVLVQYVDTLKLAVPSLIYTLQNNLQYVAISNLPAATFQVSTLRRSSKAAQAPCGCATCNWASSAQHWAWWGSGGLRVPPWPPVVSFLGTHLLSGAWCSTRPSAGYWWLWLSSTLTISSRALPPPCPLCCPLLPPFASLASTWTHYLPLALDSSLVLSTSTAFPEVQPKP

SEQ ID NO: 97236 - protein, 79 aa, Homo sapiens
MSQWNQVQQLEIKFLEQVDQFYDDNFPMEIRHLLAQWIENQDWEAASNNETMATILLQNLLIQLDEQLGRVSKEKNLLL

SEQ ID NO: 97237 - protein, 22 aa, Homo sapiens
  MOD_RES (1)..(1): Any amino acid
XEEWLIKGSLFPMAAPVLEPFT

SEQ ID NO: 97238 - protein, 71 aa, Homo sapiens
  MOD_RES (1)..(1): Any amino acid
XLDYLQVSLSHITGENIVKGDKESIKNLLEIFDGLLEYLTERISETSHEKSLIYTYLAIFPRADQVLQNAS

SEQ ID NO: 97239 - protein, 318 aa, Homo sapiens
MAFWGWRAAAALRLWGRVVERVEAGGGVGPFQACGCRLVLGGRDDDVAELIRARACQRVVVMVGAGISTPSGIPDFRSPGSGLYSNLQQYDLPYPEAIFELPFFFHNPKPFFTLAKELYPGNYKPNVTHYFLRLLHDKGLLLRLYTQNIDGLERVSGIPASKLVEAHGTFASATCTVCQRPFPGEDIRADVMADRVPRCPVCTGVVKPDIVFFGEPLPQRFLLHVVDFPMADLLLILGTSLEVEPFASLTEAVRSSVPRLLINRDLVGPLAWHPRSRDVAQLGDVVHGVESLVELLGWTEEMRDLVQRETGKLDGPDK

SEQ ID NO: 97240 - protein, 116 aa, Homo sapiens
  MOD_RES (1)..(1): Any amino acid
XEFGVPSPAHLRAWTVERKRPGRLLRTDRQPLSPQDVLLRTQVRIPGERTYAPALDLVWNAAQGGTAGSLRQRVADFYRLPVEKIEIAKYFPEKFEWLPISSWNQQITKRKKKKKQ

SEQ ID NO: 97241 - protein, 73 aa, Homo sapiens
  MOD_RES (1)..(1): Any amino acid
XLGLQDRWLRRLQAEPGIEAPSGTEAGALLLCEPAGPVYTAGLRGGLTPEETARLRALGAEESAVEGTSHPTA

SEQ ID NO: 97242 - protein, 292 aa, Homo sapiens
MYQGEFGLNMKLGYGKFSWPTGESYHGQFYRDHCHGLGTYMWPDGSSFTGTFYLSHREGYGTMYMKTRLFQTHCHNDIVNLLLDCGADVNKCSDEGLTALSMCFLLHYPAQSFKPNVAERTIPEPQEPPKFPVVPILSSSFMDTNLESLYYEVNVPSQGSYELRPPPAPLLLPRVSGSHEGGHFQDTGQCGGSIDHRSSSLKGDSPLVKGSLGHVESGLEDVLGNTDRGSLCSAETKFESNVCVCDFSIELSQAMLERSAQSHSLLKMASPSPCTSSFDKGTMRRMALSMIE

SEQ ID NO: 97243 - protein, 647 aa, Homo sapiens
MEGDGSDPEPPDAGEDSKSENGENAPIYCICRKPDINCFMIGCDNCNEWFHGDCIRITEKMAKAIREWYCRECREKDPKLEIRYRHKKSRERDGNERDSSEPRDEGGGRKRPVPDPDLQRRAGSGTGVGAMLARGSASPHKSSPQPLVATPSQHHQQQQQQIKRSARMCGECEACRRTEDCGHCDFCRDMKKFGGPNKIRQKCRLRQCQLRARLSPVTPSESLPRPRRPLPTQQQPQPSQKLGRIREDEGAVASSTVKEPPEATATPEPLSDEDLPLDPDLYQDFCAGAFDDHGLPWMSDTEESPFLDPALRKRAVKVKHVKRREKKSEKKKEERYKRHRQKQKHKDKWKHPERADAKDPASLPQCLGPGCVRPAQPSSKYCSDDCGMKLAANRIYEILPQRIQQWQQSPCIAEEHGKKLLERIRREQQSARTRLQEMERRFHELEAIILRAKQQAVREDEESNEGDSDDTDLQIFCVSCGHPINPRVALRHMERCYAKYESQTSFGSMYPTRIEGATRLFCDVYNPQSKTYCKRLQVLCPEHSRDPKVPADEVCGCPLVRDVFELTGDFCRLPKRQCNRHYCWEKLRRAEVDLERVRVWYKLDELFEQERNVRTAMTNRAGLLALMLHQTIQHDPLTTDLRSSADR

SEQ ID NO: 97244 - protein, 271 aa, Homo sapiens
  MOD_RES (1)..(1): Any amino acid
XWSTMEGDCLSCMKYLMFVFNFFIFLGGACLLAIGIWVMVDPTGFREIVAANPLLLTGAYILLAMGGLLFLLGFLGCCGAVRENKCLLLFFFLFILIIFLAELSAAILAFIFRENLTREFFTKELTKHYQGNNDTDVFSATWNSVMITFGCCGVNGPEDFKFASVFRLLTLDSEEVPEACCRREPQSRDGVLLSREECLLGRSLFLNKQGCYTVILNTFETYVYLAGALAIGVLAIEEERAHSVSQATGILYQLPASPQAFQSPGTLGATA

SEQ ID NO: 97245 - protein, 13 aa, Homo sapiens
MVKLSIVLTPQFL

SEQ ID NO: 97246 - protein, 252 aa, Homo sapiens
MAELQEVQITEEKPLLPGQTPEAAKEAELAARILLDQGQTHSVETPYGSVTFTVYGTPKPKRPAILTYHDVGLNYKSCFQPLFQFEDMQEIIQNFVRVHVDAPGMEEGAPVFPLGYQYPSLDQLADMIPCVLQYLNFSTIIGVGVGAGAYILARYALNHPDTVEGLVLINIDPNAKGWMDWAAHKLTGLTSSIPEMILGHLFSQEELSGNSELIQKYRNIITHAPNLDNIELYWNSYNNRRDLNFERGGDIT

SEQ ID NO: 97247 - protein, 41 aa, Homo sapiens
MSRYTRPPNTSLFIRNVADATRSKAVHSSWQAPPSLNQPVS

SEQ ID NO: 97248 - protein, 101 aa, Homo sapiens
MEARLNAALREKTSLSANNATLEKQLIELTRTNELLKSKFSENGNQKNLRILSLELMKLRNKRETKMRGMMAKQEGMEMKLQVTQRSLEESQGKIAQLEGK

SEQ ID NO: 97249 - protein, 191 aa, Homo sapiens
MEVTGVSAPTVTVFISSSLNTFRSEKRYSRSLTIAEFKCKLELLVGSPASCMELELYGVDDKFYSKLDQEDALLGSYPVDDGCRIHVIDHSGARLGEYEDVSRVEKYTISQEAYDQRQDTVRSFLKRSKLGRYNEEERAQQEAEAAQRLAEEKAQASSIPVGSRCEVSQISSLATGLVSAMMSHWGKMMAV

SEQ ID NO: 97250 - protein, 214 aa, Homo sapiens
VHNTHQPQAQQNEPSECRGSQFGCCYDNVATAAGPLGEGCVGQPSHAYPVRCLLPSAHGSCADWAARWYFVASVGQCNRFWYGGCHGNANNFASEQECMSSCQGSLHGPRRPQPGASGRSTHTDGGGSSPAGEQEPSQHRTGAAVQRKPWPSGGLWRQDQQPGPGEAPHTQAFGEWPWGQELGSRAPGLGGDAGSPAPPFHSSSYRSHFPPLQD

SEQ ID NO: 97251 - protein, 49 aa, Homo sapiens
MAASALYACTKCTQRYPFEELSQGQQLCKESEATGLGTECSDLELLPSH

SEQ ID NO: 97252 - protein, 90 aa, Homo sapiens
MDGTEGSAGQPGPAERSHRSSVSSVGARAADVLVYLADDTVVPLAVENLPSLSAHELHRAVREVLQLPDIALDVFALWLVSPLLEVQLKP

SEQ ID NO: 97253 - protein, 29 aa, Homo sapiens
MVNEARGNSSLNPCLEGSASSGSESSKDS

SEQ ID NO: 97254 - protein, 126 aa, Homo sapiens
  MOD_RES (1)..(1): Any amino acid
XGGYLDVIRLLLASGAKVNQPRQDGTAPLWIASQMGHSEVVRVMLLRGADRDAARNDGTTALLKAANKGYNDVIKELLKFSPTLGILKNGTSALHAAVLSGNIKTVALLLEAGADPSLRNKVRWQN

SEQ ID NO: 97255 - protein, 912 aa, Homo sapiens
MSLPIGSAEVASERVELWRSGFRWWQRCLCFCRYRRVAMAAVDSDVESLPRGGFRCCLCHVTTANRPSLDAHLGGRKHRHLVELRAARKAQGLRSVFVSGFPRDVDSAQLSEYFLAFGPVASVVMDKDKGVFAIVEMGDVGAREAVLSQSQHSLGGHRLRVRPREQKEFQSPASKSPKGAAPDSHQLAKALAEAADVGAQMIKLVGLRELSEAERQLRSLVVALMQEVFTEFFPGCVVHPFGSSINSFDVHGCDLDLFLDLGDLEEPQPVPKAPESPSLDSALASPLDPQALACTPASPPDSQPPASPQDSEALDFETPSSSLAPQTPDSALASETLASPQSLPPASPLLEDREEGDLGKASELAETPKEEKAEGAAMLELVGSILRGCVPGVYRVQTVPSARRPVVKFCHRPSGLHGDVSLSNRLALHNSRFLSLCSELDGRVRPLVYTLRCWAQGRGLSGSGPLLSNYALTLLVIYFLQTRDPPVLPTVSQLTQKAGEGEQVEVDGWDCSFPRDASRLEPSINVEPLSSLLAQFFSCVSCWDLRGSLLSLREGQALPVAGGLPSNLWEGLRLGPLNLQDPFDLSHNVAANVTSRVAGRLQNCCRAAANYCRSLQYQRRSSRGRDWGLLPLLQPSSPSSLLSATPIPLPLAPFTQLTAALVQVFREALGCHIEQATKRTRSEGGGTGESSQGGTSKRLKVDGQKNCCEEGKEEQQGCAGDGGEDRVEEMVIEVGEMVQDWAMQSPGQPGDLPLTTGKHGAPGEEGQPSHAALAERGPKGHEAAQEWSQGEAGKGASLPSSASWRCALWHRVWQGRRRARRRLQQQTKEGAGGGAGTRAGWLATEAQVTQELKGLSGGEERPETEPLLSFVASVSPADRMLTVTPLQDPQGLFPDLHHFLQVFLPQAIRHLK

SEQ ID NO: 97256 - protein, 99 aa, Homo sapiens
MEIDGFQQLDLEKSVPSKKTTPKRIIHFVDGDIMEEYSTEEEEEEEKEEQSTNSTLDPSKLSWGPYLRFWAGRIASTSFSTCEFLGGRFAVFFGLTQPK

SEQ ID NO: 97257 - protein, 114 aa, Homo sapiens
MRSEALLLYFTLLHFAGAGFPEDSEPISISHGNYTKQYPVFVGHKPGRNTTQRHRLDIQMIMIMNGTLYIAARDHIYTVDIDTSHTEEIYCSKKLTWKSRQADVDTCRMKGKHK

SEQ ID NO: 97258 - protein, 113 aa, Homo sapiens
MIKDCGATWVVLGHSERRHVFGESDELIGQKVAHALAEGLGVIACIGEKLDEREAGITEKVVFEQTKVIADNVKDWSKVVLAYEPVWAIGTGKTATPQQAQEVHEKLRGWLKS

SEQ ID NO: 97259 - protein, 200 aa, Homo sapiens
LVISGDSLEVCLKYYEHEFVELACQCPAVVCCRCSPTQKARIVTLLQQHTGRRTCAIGDGGNDVSMIQAADCGIGIEGKEGKQASLAADFSITQFRHIGRLLMVHGRNSYKRSAALGQFVMHRGLIISTMQVCHHIHHVPSVLLSAGPGREARDGDALPGAVQGPHQGKILVLQNLPHLGFNKYLPRRHPHVWGPGALRV

SEQ ID NO: 97260 - protein, 214 aa, Homo sapiens
MSELSDEASEPELLNRSLSMWHGLGTQVSGEELDVPLDLHTAASIGQYEVVKECVQREPICGFTPLMEAAAAGHEIIVQYFLNHGVKVDARDHSGATARMLAKQYGHMKIVALMDTYSPSLPKSLYRSPEKYEDLSSSDESCPAPQRQRPCRKKGVSIHEGPRALARITGIGLGGRAPRPRYGSSPWLCHLQQQWREPPGRRGPLLPGCHLPHQ

SEQ ID NO: 97261 - protein, 110 aa, Homo sapiens
MAPPPAPLLAPRPGETRPGCRKPGTVSFADVAVYFSPEEWGCLRPAQRALYRDVMQETYGHLGALGFPGPKPALISWMEQESEAWSPAAQDPEKGERLGGARRGPHFQHP

SEQ ID NO: 97262 - protein, 183 aa, Homo sapiens
MSCKKQRSRKHSVNEKCNMKIEHYFSPVSKEQQNNCSTSLMRMESRGDPRATTNTQAQRFHSPKKNPEDQTMPQNRTIYVTLKVNHRRNQDMKLKLTHSENSSLYMALNTLQAVRKEIETHQGQEMLVRGTEGIKEYINLGMPLSCFPEGGQVVITFSQSKSKQKEDNHIFGRQDKASTECVK

SEQ ID NO: 97263 - protein, 416 aa, Homo sapiens
MSLLQSALDFLAGPGSLGGASGRDQSDFVGQTVELGELRLLLASPAPPLSVQSTPRGGPPAAADPFGPLLPSSGNNSQPCSNPDLFGEFLNSDSVTVPPSFPSAHSAPPPSCSADFLHLGDLPGEPSKMTASSSNPDLLGGWAAWTETAASAVAPTPATEGPLFSPGGQPAPCGSQASWTKSQNPDPFADLGDLSSGLQGSPAGFPPGGFIPKTATTPKGSSSWQTSRPPAQGASWPPQAKPPPKACTQPRPNYASNFSVIGAREERGVRAPSFAQKPKVSENDFEDLLSNQGFSSRSDKKGPKTIAEMRKQDLAKDTDPLKLKLLDWIEGKERNIRALLSTLHTVLWDGESRWTPVGMADLVAPEQVKKHYRRAVLAVHPDKAAGQPYEQHAKMIFMELNDAWSEFENQGSRPLF

SEQ ID NO: 97264 - protein, 140 aa, Homo sapiens
MPEIRVTPLVGAGQDVGRSCILVSIAGKNVMLDCGMHMGFNDDRRFPDFSYITQNGRLTDFLDCVIISHFHLDHCGALPYFSEMVGYDGPIYMTHPTQAICPILLEDYRKIAVDKKGEANFFTSQMIKDCMKKVVAVHLH

SEQ ID NO: 97265 - protein, 316 aa, Homo sapiens
MSDSWVPNSASGQDPGGRRRAWAELLAGRVKREKYNPERAQKLKESAVRLLRSHQDLNALLLEVEGPLCKKLSLSKVIDCDSSEAYANHSSSFIGSALQDQASRLGVPVGILSAGMVASSVGQICTAPAETSHPVLLTVEQRKKLSSLLEFAQYLLAHSMFSRLSFCQELWKIQSSLLLEAVWHLHVQGIVSLQELLESHPDMHAVGSWLFRNLCCLCEQMEASCQHADVARAMLSDFVQMFVLRGFQKNSDLRRTVEPEKMPQVTVDVLQRMLIFALDALAAGVQEESSTHKIVRCWYVPEGGLPECAAGRCLPN

SEQ ID NO: 97266 - protein, 98 aa, Homo sapiens
MAASAARGAAALRRSINQPVAFVRRIPWTAASSQLKEHFAQFGHVRRCILPFDKETGFHRGLGWVQFSSEEGLRNALQQENHIIDGVKCLKSQPTIRS

SEQ ID NO: 97267 - protein, 174 aa, Homo sapiens
MDCRVHMRPIGLTWVLQLTLAWILLEACGGSRPLQARSQQHHGLAADLGKGKLHLAGDPQASVPKPYLNIQDPSSQGSPLPGPCCPSEMDTTETSGPGNHPERCGVPSPECESFLEHLQRALRSRFRLRLLGVRQAQPLCEELCQAWFANCEDDITCGPTWLPLSEKRGCEPSC

SEQ ID NO: 97268 - protein, 64 aa, Homo sapiens
MDELFPLIFPAEPAQASGPYVEIIEQPKQRGMRFRYKCEGRSAGSIPGERSTDTTKTHPTIKFL

SEQ ID NO: 97269 - protein, 118 aa, Homo sapiens
GDACVYLHGEVCEICRLQVLHPFDPEQRKAHEKICMLTFEHEMEKAFAFQASQDKVCSICMEVILEKASASERRFGILSNCNHTYCLSCIRQWRCAKQFENPIINNLILISGLVQNAV

SEQ ID NO: 97270 - protein, 68 aa, Homo sapiens; identical to SEQ ID NO: 58481
  MOD_RES (1)..(1): Any amino acid

SEQ ID NO: 97271 - protein, 276 aa, Homo sapiens
FPFAPPGAAAEPHSLRYNLTVLSWDGSVQSGFLAEVHLDGQPFLRYDRQKCRAKPQGQWAEDVLGNKTWDRETRDLTGNGKDLRMTLAHIKDQKEVPPMVNVTRSEASEGNITVTCRASSFYPRNITLTWRQDGVSLSHDTQQWGDVLPDGNGTYQTWVATRICQGEEQRFTCYMEHSGNHSTHPVPSGKVLVLQSHWQTFHVSAVAAAAAAIFVIIIFYVRCCKKKTSAAEGPELVSLQVLDQHPVGTSDHRDATQLGFQPLMSALGSTGSTEGA

SEQ ID NO: 97272 - protein, 823 aa, Homo sapiens
MPPLLAPLLCLALLPALAARGPRCSQPGETCLNGGKCEAANGTEACVCGGAFVGPRCQDPNPCLSTPCKNAGTCHVVDRRGVADYACSCALGFSGPLCLTPLDNACLTNPCRNGGTCDLLTLTEYKCRCPPGWSGKSCQQADPCASNPCANGGQCLPFEASYICHCPPSFHGPTCRQDVNECGQKPGLCRHGGTCHNEVGSYRCVCRATHTGPNCERPYVPCSPSPCQNGGTCRPTGDVTHECACLPGFTGQNCEENIDDCPGNNCKNGGACVDGVNTYNCRCPPEWTGQYCTEDVDECQLMPNACQNGGTCHNTHGGYNCVCVNGWTGEDCSENIDDCASAACFHGATCHDRVASFYCECPHGRTGLLCHLNDACISNPCNEGSNCDTNPVNGKAICTCPSGYTGPACSQDVDECSLGANPCEHAGKCINTLGSFECQCLQGYTGPRCEIDVNECVSNPCQNDATCLDQIGEFQCICMPGYEGVHCEVNTDECASSPCLHNGRCLDKINEFQCECPTGFTGHLCQYDVDECASTPCKNGAKCLDGPNTYTCVCTEGYTGTHCEVDIDECDPDPCHYGSCKDGVATFTCLCRPGYTGHHCETNINECSSQPCRHGGTCQDRDNAYLCFCLKGTTGPNCEINLDDCASSPCDSGTCLDKIDGYECACEPGYTGSMCNINIDECAGNPCHNGGTCEDGINGFTCRCPEGYHDPTCLSEVNECNSNPCVHGACRDSLNGYKCDCDPGWSGTNCDINNNECESNPCVNGGTCKDMTSGYVCTCREGFSGPNCQTNINECASNPCLNQGTCIDDVAGYKCNCLLPYTD

SEQ ID NO: 97273 - protein, 308 aa, Homo sapiens
AVAVRPGGCGKKSPFGGLGTMKPEPAPTSAGASRAQARLPHSGGPAAGGGRQLKRDPERPESAKAFGREGSGAQGEAEVRHPPVGIAVAVARQKDSGGSGRLGPGLVDQERSLSLSNVKGHGRADEDCVDDRARHREERLLGARLDRDQEKLLRESKELADLARLHPTSCAPNGLNPNLMVTGGPALAGSGRWSADPAAHLATHPWLPRSGNASMWLAGHPYGLGPPSLHQGMAPAFPPGLGGSLPSAYQFVRDPQSGQLVVIPSDHLPHFAELMERATVPPLWPALYPPGRSPLHHAQQLQLFSQQH

SEQ ID NO: 97274 - protein, 489 aa, Homo sapiens
MSWESGAGPGLGSQGMDLVWSAWYGKCVKGKGSLPLSAHGIVVAWLSRAEWDQVTVYLFCDDHKLQRYALNRITVWRSRSGNELPLAVASTADLIRCKLLDVTGGLGTDELRLLYGMALVRFVNLISERKTKFAKVPLKCLAQEVNIPDWIVDLRHELTHKKMPHINDCRRGCYFVLDWLQKTYWCRQLENSLRETWELEEFREGIEEEDQEEDKNIVVDDITEQKPEPQDDGKSTESDVKADGDSKGSEEVDSHCKKALSHKELYERARELLVSYEEEQFTVLEKFRYLPKAIKAWNNPSPRVECVLAELKGVTCENREAVLDAFLDDGFLVPTFEQLAALQIEYEDGQTEVQRGEGTDPKSHKNVDLNDVLVPKPFSQFWQPLLRGLHSQNFTQALLERMLSELPALGISGIRPTYILRWTVELIVANTKTGRNARRFSAGQWEARRGWRLFNCSASLDWPRMVESCLGSPCWASPQLLRIAVLGGS

SEQ ID NO: 97275 - protein, 316 aa, Homo sapiens [sequence omitted]

SEQ ID NO: 97276 - protein, 133 aa, Homo sapiens
MKKCRFSLPSSALSRDDDASREDDNLGSWERWLGHYSHPCLDHLSQCHHLTPCSRWLSPNPIMLGIFFNVHSAVLIEDVPFTEKDFENGPQNIYNLYEQVSYNCFIAAGLYLLLGGFSFCQVRLNKRKEYMVR

SEQ ID NO: 97277 - protein, 333 aa, Homo sapiens
MIIETMPMTEKVEELLRVIGPFYEIVEDKKSGRSSDITSDLGNVLTSTPNAKTVNGKAESSDSGAESEEEEAQEEVKGAEQSDNDINDDHVEDVTGIQHLTSDSDSEVYCDSMEQFGQEESLDSFTSNNGPFQYYLGGHSSQPMENSGFREDIQVPPGNGNIGNMQVVAVEGKGEVKHGGEDGRNNSGAPHREKRGGETDEFSNVRRGRGHRMQHLSEGTKGRQVGSGGDGERWGSDRGSRGSLNEQIALVLMRLQEDMQNVLQRLQKLETLTALQAKSSTSTLQTAPQPTSQRPSWWPFEMSPGVLTFAIIWPFIAQWLVYLYYQRRRRKLN

SEQ ID NO: 97278 - protein, 31 aa, Homo sapiens
  MOD_RES (1)..(1): Any amino acid
XKGGRVIAPKKARVVQQQKLKKVSLCCSGWS

SEQ ID NO: 97279 - protein, 113 aa, Homo sapiens
MGSSWCLYGCCNAGVKTTRLEAHSEMGSTEILEKETPENLSNGTSSNVEAAKRLAKRLYQLDRFKRSDVAKHLGKNNEFSKLVAEEYLKFFDFTGMTLDQSLRKMNLHCQVFL

SEQ ID NO: 97280 - protein, 410 aa, Homo sapiens [sequence omitted]

SEQ ID NO: 97281 - protein, 53 aa, Homo sapiens
MTDPMMDFFDDANLFGETLEGLSDDAFVQPGPVSLVDELNLGAEFEPLHIDSL

SEQ ID NO: 97282 - protein, 270 aa, Homo sapiens
MPVKGGTKCIKYLLFGFNFIFWVGVSGTLFGSTTGLFNQSLAETGFTPYTQKSNDFLVKSLKIWLAGIAVLAIGLWLRFDSQTKSIFEQETNNNNSSFYTGVYILIGAGALMMLVGFLGCCGAVQESQCMLGLFFGFLLVIFAIEIAAAIWGYSHKDEVIKEVQEFYKDTYNKLKTKDEPQRETLKAIHYALNCCGLAGGVEQFISDICPKKDVLETFTVKSCPDAIKEVFDNKFHIIGAVGIGIAVVMIFGMIFSMILCCAIRRNREMV

SEQ ID NO: 97283 - protein, 115 aa, Homo sapiens
MYNGIGLPTPRGSGTNGYVQRNLSLVRGRRGERPDYKGEEELRRLEAALVKRPNPDILDHERKRRVELRCLELEEMMEEQGYEEQQIQEKVATFRLMLLEKDVNPGGKEETPGQR

SEQ ID NO: 97284 - protein, 127 aa, Homo sapiens
MRHNQMCCETPPTVTVYVKSGSNRSHQPKKPITLKRPICKDNWQAFEKNTHNNNKSKRPKGPCLVIQRQDMTAFFKLFDDDLIQDFLWMDCCCKIADKYLLAMTFVYFKRAKFTISEHTRINFFIAL

SEQ ID NO: 97285 - protein, 43 aa, Homo sapiens
MEPSSKVYLWKIGPVHTSVGQPSISQLYKVSNHSVALWGYHVV

SEQ ID NO: 97286 - protein, 480 aa, Homo sapiens
MSSHHTTFPFDPERRVRSTLKKVFGFDSFKTPLQESATMAVVKGNKDVFVCMPTGAGKSLCYQLPALLAKGITIVVSPLIALIQDQVDHLLTLKVRVSSLNSKLSAQERKELLADLEREKPQTKILYITPEMAASSSFQPTLNSLVSRHLLSYLVVDEAHCVSQWGHDFRPDYLRLGALRSRLGHAPCVALTATATPQVQEDVFAALHLKKPVAIFKTPCFRANLFYDVQFKELISDPYGNLKDFCLKALGQEADKGLSGCGIVYCRTREACEQLAIELSCRGVNAKAYHAGLKASERTLVQNDWMEEKVPVIVATISFGMGVDKANVRFVAHWNIAKSMAGYYQESGRAGRDGKPSWCRLYYSRNDRDQVSFLIRKEVAKLQEKRGNKASDKATIMAFDALVTFCEELGCRHAAIAKYFGDALPACAKGCDHCQNPTAVRRRLEALERSSSWSKTCIGPSQGNGFDPELYEGGRKGYGD

SEQ ID NO: 97287 - protein, 176 aa, Homo sapiens
MEGSKTSNNSTMQVSFVCQRCSQPLKLDTSFKILDRVTIQELTAPLLTTAQAKPGETQEEETNSGEEPFIETPRQDGVSRRFIPPARRCLEILEQMNEDDSEQLQMELKELALEEERLIQELEDVEKNRKIVAENLEKVQAEAERLDQEEAQHSGQFGTINNFRLGRLPSVPVEWN

SEQ ID NO: 97288 - protein, 389 aa, Homo sapiens
MAVRLCDVASLLRSGSWAAEPWTGQVIAAMETQLSNGPTCNNTANGPTTINNNCSSPVDSGNTEDSKTNLIVNYLPQNMTQEELKSLFGSIGEIESCKLVRDKITGQSLGYGFVNYIDPKDAEKAINTLNGLRLQTKTIKVSYARPSSASIRDANLYVSGLPKTMTQKELEQLFSQYGRIITSRILVDQVTGISRGVGFIRFDKRIEAEEAIKGLNGQKPPGATEPITVKFANNPSQKTNQAILSQLYQSPNRRYPGPLAQQAQRFRLDNLLNMAYGVKSRFSPMTIDGMTSLAGINIPGHPGTGWCIFVYNLAPDADESILWQMFGPFGAVTNVKVIRDFNTNKCKGFGFVTMTNYDEAAMAIASLNGYRLGDRVLQVSFKTNKTHKA

SEQ ID NO: 97289 - protein, 230 aa, Homo sapiens
MSLQVLNDKNVSNEKNTENCDFLFSPPEVTGRSSVLRVSQKENVPPKNLAKAMKVTFQTPLRDPQTHRILSPSMASKLEAPFTQDDTLGLENSHPVWTQKENQQLIKEVDAKTTHGILQKPVEADTDLLGDASPAFGSGSSSESGPGALADLDCSSSSQSPGSSENQMVSPGKVSGSPEQAVEENLSSYSLDRRVTPASETLEDPCRTESQHKAETPHGAEEECKAETPH

SEQ ID NO: 97290 - protein, 142 aa, Homo sapiens
MPREDRATWKSNYFLKIIQLLDDYPKCFIVGADNVGSKQMQQIRMSLRGKAVVLMGKNTMMRKAIRGHLENNPALEKLLPHIRGNVGFVFTKEDLTEIRDMLLANKVPAAARAGAIAPCEVTVPAQNTGLGPEKTSFFQALE

SEQ ID NO: 97291 - protein, 207 aa, Homo sapiens
MKSCAVSLTTAAVAFGDEAKKMAEGKASRESEEESVSLTVEEREALGGMDSRLFGFVRLHEDGARTKTLLGKAVRCYESLILKAEGKVESDFFCQLGHFNLLLEDYSKALSAYQRYYSLQADYWKNAAFLYGLGLVYFYYNAFHWAIKAFQDVLYVDPSFCRAKEIHLRLGLMFKVNTDYKSSLKHFQLALIDCNPCTLSNAESKYF

SEQ ID NO: 97292 - protein, 160 aa, Homo sapiens
MQFMLLFSRQGKLRLQKWYVPLSDKEKKKITRELVQTVLARKPKMCSFLEWRDLKIVYKRYASLYFCCAIEDQDNELITLEIIHRYVELLDKYFGSVCELDIIFNFEKAYFILDEFLLGGEVQETSKKNVLKAIEQADLLQEDAKEAETPRSVLEEIGLT

SEQ ID NO: 97293 - protein, 2433 aa, Homo sapiens
MPAILVASKMKSGLPKPVHSAAPILHVPPARAGPQPCYLKLGSKVEVSKTTYPSQIPLKSQVLQGLQEPAGEGLPLRKSGSVENGFDTQIYTDWANHYLAKSGHKRLIRDLQQDVTDGVLLAQIIQVVANEKIEDINGCPKNRSQMIENIDACLNFLAAKGINIQGLSAEEIRNGNLKAILGLFFSLSRYKQQQQQPQKQHLSSPLPPAVSQVAGAPSQCQAGTPQQQVPVTPQAPCQPHQPAPHQQSKAQAEMQSRLPGPTARVSAAGSEAKTRGGSTTANNRRSQSFNNYDKSKPVTSPPPPPSSHEKEPLASSASSHPGMSDNAPASLESGSSSTPTNCSTSSAIPQPGAATKPWRSKSLSVKHSATVSMLSVKPPGPEAPRPTPEAMKPAPNNQKSMLEKLKLFNSKGGSKAGEGPGSRDTSCERLETLPSFEESEELEAASRMLTTVGPASSSPKIALKGIAQRTFSRALTNKKSSLKGNEKEKEKQQREKDKEKSKDLAKRASVTERLDLKEEPKEDPSGAAVPEMPKKSSKIASFIPKGGKLNSAKKEPMAPSHSGIPKPGMKSMPGKSPSAPAPSKEGERSRSGKLSSGLPQQKPQLDGRHSSSSSSLASSEGKGPGGTTLNHSISSQTVSGSVGTTQTTGSNTVSVQLPQPQQQYNHPNTATVAPFLYRSQTDTEGNVTAESSSTGVSVEPSHFTKTGQPALEELTGEDPEARRLRTVKNIADLRQNLEETMSSLRGTQVTHSTLETTFDTNVTTEMSGRSILSLTGRPTPLSWRLGQSSPRLQAGDAPSMGNGYPPRANASRFINTESGRYVYSAPLRRQLASRGSSVCHVDVSDKAGDEMDLEGISMDAPGYMSDGDVLSKNIRTDDITSGYMTDGGLGLYTRRLNRLPDGMAVVRETLQRNTSLGLGDADSWDDSSSVSSGISDTIDNLSTDDINTSSSISSYANTPASSRKNLDVQTDAEKHSQVERNSLWSGDDVKKSDGGSDSGIKMEPGSKWRRNPSDVSDESDKSTSGKKNPVISQTGSWRRGMTAQVGITMPRTKPSAPAGALKTPGTGKTDDAKVSEKGRLSPKASQVKRSPSDAGRSSGDESKKPLPSSSRTPTANANSFGFKKQSGSAAGLAMITASGVTVTSRSATLGKIPKSSALVSRSAGRKSSMDGAQNQDDGYLALSSRTNLQYRSLPRPSKSNSRNGAGNRSSTSSIDSNISSKSAGLPVPKLREPSKTALGSSLPGLVNQTDKEKGISSDNESVASCNSVKVNPAAQPVSSPAQTSLQPGAKYPDVASPTLRRLFGGKPTKQVPIATAENMKNSVVISNPHATMTQQGNLDSPSGSGVLSSGSSSPLYSKNVDLNQSPLASSPSSAHSAPSNSLTWGTNASSSSAVSKDGLGFQSVSSLHTSCESIDISLSSGGVPSHNSSTGLIASSKDDSLTPFVRTNSVKTTLSESPLSSPAASPKFCRSTLPRKQDSDPHLDRNTLPKKGLRYTPTSQLRTQEDAKEWLRSHSAGGLQDTAANSPFSSGSSVTSPSGTRFNFSQLASPTTVTQMSLSNPTMLRTHSLSNADGQYDPYTDSRFRNSSMSLDEKSRTMSRSGSFRDGFEEVHGSSLSLVSSTSSVYSTPEEKCQSEIRKLRRELDASQEKVSALTTQLTANAHLVAAFEQSLGNMTIRLQSLTMTAEQKDSELNELRKTIELLKKQNAAAQAAINGVINTPELNCKGNGTAQSADLRIRRQHSSDSVSSINSATSHSSVGSNIESDSKKKKRKNWVNIQLRSSFKQAFGKKKSPKSASSHSDIEEMTDSSLPSSPKLPHNGSTGSTPLLRNSHSNSLISECMDSEAETVMQLRNELRDKEMKLTDIRLEALSSAHQLDQLREAMNRMQSEIEKLKAENDRLKSESQGSGCSRAPSQVSISASPRQSMGLSQHSLNLTESTSLDMLLDDTGECSARKEGGRHVKIVVSFQEEMKWKEDSRPHLFLIGCIGVSGKTKWDVLDGVVRRLFKEYIIHVDPVSQLGLNSDSVLGYSIGEIKRSNTSETPELLPCGYLVGENTTISVTVKGLAENSLDSLVFESLIPKPILQRYVSLLIEHRRIILSGPSGTGKTYLANRLSEYIVLREGRELTDGVIATFNVDHKSSKELRQYLSNLADQCNSENNAVDMPLVIILDNLHHVSSLGEIFNGLLNCKYHKCPYIIGTMNQATSSTPNLQLHHNFRWVLCANHTEPVKGFLGRFLRRKLMETEISGRVRNMELVKIIDWIPKVWHHLNRFLEAHSSSDVTIGPRLFLSCPIDVDGSRVWFTDLWNYSIIPYLLEAVREGLQLYGRRAPWEDPAKWVMDTYPWAASPQQHEWPPLLQLRPEDVGFDGYSMPREGSTSKQMPPSDAEGDPLMNMLMRLQEAANYSSPQSYDSDSNSNSHHDDILDSSLESTL

SEQ ID NO: 97294 - protein, 448 aa, Homo sapiens
MIDLDTSKNNRIGKTGERPSQENGIQKHRTSLPAPMFSRSDFSVWTILKKCVGLELSKITMPIAFNEPLSFLQRITEYMEHVYLIHRASCQPQPLERMQSVAAFAVSAVASQWERTGKPFNPLLGETYELIREDLGFRFISEQVSHHPPISAFHSEGLNHDFLFHGSIYPKLKFWGKSVEAEPRGTITLELLKHNEAYTWTNPTCCVHNVIIGKLWIEQYGTVEILNHRTGHKCVLHFKPCGLFGKELHKVEGHIQDKNKKKLFMIYGKWTECLWGIDPVSYESFKKQERRGDHLRKAKLDEDSGKADSDVADDVPVAQETVQVIPGSKLLWRINTRPPNSAQMYNFTSFTVSLNELETGMEKTLPPTDCRLRPDIRGMENGNMDLASQEKERLEEKQREARRERAKEEAEWQTRWFYPGNNPYTGTPDWLYAGDYFERNFSDCPDIY

SEQ ID NO: 97295 - protein, 372 aa, Homo sapiens
LDNLKKLRMLDLRHNKLREIPSVVYRLDSLTTLYLRFNRITTVEKDIKNLSKLSMLSIRENKIKQLPAEIGNLSSLSRLGLRYNRLSAIPRSLAKCSALEELNLENNNISTLPESLLSSLVKLNSLTLARNCFQLYPVGGPSQFSTIYSLNMEHNRINKIPFGIFSRAKVLSKLNMKDNQLTSLPLDFGTWTSMVELNLATNQLTKIPEDVSGLVSLEVLILSNNLLKKLPHGLGNLRKLRELDLEENKLESLPNEIAYLKDLQKLVLTNNQLTTLPRGIGHLTNLTHLGLGENLLTHLPEEIGTLENLEELYLNDNPNLHSLPFELALCSKLSIMSIENCPLSHLPPQIVAGGPSFIIQFLKMQGPYRAMV

SEQ ID NO: 97296 - protein, 1468 aa, Homo sapiens
MSSTLHSVFFTLKVSILLGSLLGLCLGLEFMGLPNQWARYLRWDASTRSDLSFQFKTNVSTGLLLYLDDGGVCDFLCLSLVDGRVQLRFSMDCAETAVLSNKQVNDSSWHFLMVSRDRLRTVLMLDGEGQSGELQPQRPYMDVVSDLFLGGVPTDIRPSALTLDGVQAMPGFKGLILDLKYGNSEPRLLGSRGVQMDAEGPCGERPCENGGICFLLDGHPTCDCSTTGYGGKLCSEDVSQDPGLSHLMMSEQGRSKAREENVATFRGSEYLCYDLSQNPIQSSSDEITLSFKTWQRNGLILHTGKSADYVNLALKDGAVSLVINLGSGAFEAIVEPVNGKFNDNAWHDVKVTRNLRQVTISVDGILTTTGYTQEDYTMLGSDDFFYVGGSPSTADLPGSPVSNNFMGCLKEVVYKNNDIRLELSRLARIADTKMKIYGEVVFKCENVATLDPINFETPEAYISLPKWNTKRMGSISFDFRTTEPNGLILFTHGKPQERKDARSQKNTKVDFFAVELLDGNLYLLLDMGSGTIKVKATQKKANDGEWYHVDIQRDGRSGTISVNSRRTPFTASGESEILDLEGDMYLGGLPENRAGLILPTELWTAMLNYGYVGCIRDLFIDGRSKNIRQLAEMQNAAGVKSSCSRMSAKQCDSYPCKNNAVCKDGWNRFICDCTGTGYWGRTCEREASILSYDGSMYMKIIMPMVMHTEAEDVSFRFMSQRAYGLLVATTSRDSADTLRLELDGGRVKLMVNLDCIRINCNSSKGPETLYAGQKLNDNEWHTVRVVRRGKSLKLTVDDDVAEGTMVGDHTRLEFHNIETGIMTEKRYISVVPSSFIGHLQSLMFNGLLYIDLCKNGDIDYCELKARFGLRNIIADPVTFKTKSSYLSLATLQAYTSMHLFFQFKTTSPDGFILFNSGDGNDFIAVELVKGYIHYVFDLGNGPNVIKGNSDRPLNDNQWHNVVITRDNSNTHSLKVDTKVVTQVINGAKNLDLKGDLYMAGLAQGMYSNLPKLVASRDGFQGCLASVDLNGRLPDLINDALHRSGQIERGCEGPSTTCQEDSCANQGVCMQQWEGFTCDCSMTSYSGNQCNDPGATYIFGKSGGLILYTWPANDRPSTRSDRLAVGFSTTVKDGILVRIDSAPGLGDFLQLHIEQGKIGVVFNIGTVDISIKEERTPVNDGKYHVVRFTRNGGNATLQVDNWPVNEHYPTGNTDNERFQMVKQKIPFKYNRPVEEWLQEKGRQLTIFNTQAQIAIGGKDKGRLFQGQLSGLYYDGLKVLNMAAENNPNIKINGSVRLVGEVPSILGTTQTTSMPPEMSTTVMETTTTMATTTTRKNRSTASIQPTSDDLVSSAECSSDDEDFVECEPSTANPTEPGIRRVPGASEVIRESSSTTGMVVGIVAAAALCILILLYAMYKYRNRDEGSYQVDETRNYISNSAQSNGTLMKEKQQSSKSGHKKQKNKDREYYV

SEQ ID NO: 97297 - protein, 159 aa, Homo sapiens
MAIRAQHSNAAQTQTGEANRGWTGQESLSDSDPEMWELLQREKDRQCRGLELIASENFCSRAALEALGSCLNNKYSEGYPGKRYYGGAEVVDEIELLCQRRALEAFDLDPAQWGVNVQPYSGSPANLAVYTALLQPHDRIMGLDLPDGGHLTHGYMSDV

SEQ ID NO: 97298 - protein, 24 aa, Homo sapiens
MITLKYVPGMDVLPSHCWISEMVV

SEQ ID NO: 97299 - protein, 100 aa, Homo sapiens
MSRRSQRLTRYSQGDDDGSSSSGGSSVAGSQSTLFKDSPLRTLKRKSSNMKRLSPAPQLGPSSDAHTSYYSESLVHESWFPPRSSLEELHGDANWGEDLR

SEQ ID NO: 97300 - protein, 212 aa, Homo sapiens
MANLLKTVVTGCSCPLLSNLGSCKGLRVKKDFLRTFYTHQELWCKAPVKPGIPYKQLTVGVPKEIFQNEKRVALSPAGVQNLVKQGFNVVVESGAGEASKFSDDHYRVAGAQIQGAKEVLASDLVVKVRAPMVNPTLGVHEADLLKTSGTLISFIYPAQNPELLNKLSQRKTTVLAMDQVPRVTIAQGYDALSSMANIAGSQLLEKFLQLRF

SEQ ID NO: 97301 - protein, 210 aa, Homo sapiens
MKQQQWCGMTAKMGTVLSGVFTIMAVDMYLIFEQKHLGNGSCTEITPKYRGASNIINNFIICWSFKIVLFLSFITILISCFLLYSVYAQIFRGLVIYIVWIFFYETANVVIQILTNNDFDIKEVRIMRWFGLVSRTVMHCFWMFFVINYAHITYKNRSQGNIISYKRRISTAEILHSRNKRLSISSGFSGSHLESQYFERQRCSGKTSIK

SEQ ID NO: 97302 - protein, 213 aa, Homo sapiens
  MOD_RES (1)..(1): Any amino acid
XEIDTYERRSGTRSRGIPNERPTRYRHDENILESEPIVYRRIIVPHNVSKEFCTDSGLVVPSISYELHKKLLSVAEKHGLTLERRLEMTGVCASQMALTLLGGPNRLNPKNVHQRPTVALLCGPHVKGAQGISCGRHLANHDVQVILFLPNFVKMLESITNELSLFSKTQGQQVSSLKGEHLGRAGLKASSLLSSLMVSSCHPVATGGKALRV

SEQ ID NO: 97303 - protein, 712 aa, Homo sapiens
MNNHVSSKPSTMKLKHTINPILLYFIHFLISLYTILTYIPFYFFSESRQEKSNRIKAKPVNSKPDSAYRSVNSLDGLASVLYPGCDTLDKVFTYAKNKFKNKRLLGTREVLNEEDEVQPNGKIFKKVILGQYNWLSYEDVFVRAFNFGNGLQMLGQKPKTNIAIFCETRAEWMIAAQACFMYNFQRGPAIVHALNETEVTNIITSKELLQTKLKDIVSLVPRLRHIITVDGKPPTWSEFPKGIIVHTMAAVEALGAKASMENQPHSKPLPSDIAVIMYTSGSTGLPKGVMISHSNIIAGITGMAERIPELGEEDVYIGYLPLAHVLELSAELVCLSHGCRIGYSSPQTLADQSSKIKKGSKGDTSMLKPTLMAAVPEIMDRIYKNVMNKVSEMSSFQRNLFILAYNYKMEQISKGRNTPLCDSFVFRKVRSLLGGNIRLLLCGGAPLSATTQRFMNICFCCPVGQGYGLTESAGAGTISEVWDYNTGRVGAPLVCCEIKLKNWEEGGYFNTDKPHPRGEILIGGQSVTMGYYKNEAKTKADFFEDENGQRWLCTGDIGEFEPDGCLKIIDRKKDLVKLQAGEYVSLGKVEAALKNLPLVDNICAYANSYHSYVIGFVVPNQKELTELARKKGLKGTWEELCNSCEMENEVLKVLSEAAISASLEKFEIPVKIRLSPEPWTPETGLVTDAFKLKRKELKTHYQADIERMYGRK

SEQ ID NO: 97304 - protein, 365 aa, Homo sapiens
MAWWKAWIEQEGVTVKSSSHFNPDPDAETLYKAMKGIGVGSQLLSHQAAAFAFPSSALTSVSPWGQQGHLCCNPAGTNEQAIIDVLTKRSNTQRQQIAKSFKAQFGKDLTETLKSELSGKFERLIVALMYPPYRYEAKELHDAMKGLGTKEGVIIEILASRTKNQLREIMKAYEEDYGSSLEEDIQADTSGYLERILVCLLQGSRDDVSSFVDPALALQDAQDLYAAGEKIRGTDEMKFITILCTRSATHLLRVFEEYEKIANKSIEDSIKSETHGSLEEAMLTVVKCTQNLHSYFAERLYYAMKGAGTRDGTLIRNIVSRSEIDLNLIKCHFKKMYGKTLSSMIMEDTSGDYKNALLSLVGSDP

SEQ ID NO: 97305 - protein, 268 aa, Homo sapiens
MGFLEEEGRWNLSFSGAGYLGAHHVGATECLRQRAPRLLQGARRIYGSSSGALNAVSIVCGKSVDFCCSHLLGMVGQLERLSLSILHPAYAPIEHVKQQLQDALPPDAHVLASQRLGISLTRWPDGRNFLVTDFATCDELIQVVADNCRQGYLDALRFLERRGLTKEPVLWTLVSKEPPAPADGNWDAGCDQRWKGGLSLNWKVPHVQVKDVPNFEQLSPELEAALKKACTRDPSRWARFWHSGPGQVLTYLLLPCTLPFEYIYFRSR

SEQ ID NO: 97306 - protein, 227 aa, Homo sapiens
MTSPLEKDPEPNGALSPGPGDTNSWGFGRDPAPSPRDSLAPEDLEMFVLDFEDGDLWESIRGQLGPMAGPPTCHRLEDNPGVRRHLVKKPSRTQGGRGSPSGLAPILRRKKKKKKLDRRPHEVFVELNELMLDRSQEPHWRETARWIKFEEDVEEETERWGKPHVASLSFRSLLELRRTIAHGAALLDLEQTTLPGIAHLVVETMIVSDQIRPEDRASVLRTLLLKH

SEQ ID NO: 97307 - protein, 864 aa, Homo sapiens
MDVSLCPAKCSFWRIFLLGSVWLDYVGSVLACPANCVCSKTEINCRRPDDGNLFPLLEGQDSGNSNGNASINITDISRNITSIHIENWRSLHTLNAVDMELYTGLQKLTIKNSGLRSIQPRAFAKNPHLRYINLSSNRLTTLSWQLFQTLSLRELQLEQNFFNCSCDIRWMQLWQEQGEAKLNSQNLYCINADGSQLPLFRMNISQCDLPEISVSHVNLTVREGDNAVITCNGSGSPLPDVDWIVTGLQSINTHQTNLNWTNVHAINLTLVNVTSEDNGFTLTCIAENVVGMSNASVALTVYYPPRVVSLEEPELRLEHCIEFVVRGNPPPTLHWLHNGQPLRESKIIHVEYYQEGEISEGCLLFNKPTHYNNGNYTLIAKNPLGTANQTINGHFLKEPFPESTDNFILFDEVSPTPPITVTHKPEEDTFGVSIAVGLAAFACVLLVVLFVMINKYGRRSKFGMKGPVAVISGEEDSASPLHHINHGITTPSSLDAGPDTVVIGMTRIPVIENPQYFRQGHNCHKPDTYVQHIKRRDIVLKRELGEGAFGKVFLAECYNLSPTKDKMLVAVKALKDPTLAARKDFQREAELLTNLQHEHIVKFYGVCGDGDPLIMVFEYMKHGDLNKFLRAHGPDAMILVDGQPRQAKGELGLSQMLHIASQIASGMVYLASQHFVHRDLATRNCLVGANLLVKIGDFGMSRDVYSTDYYREGPCQKGPFSVVWQRQRLAATAASTLFNPSGNDFCIWCEVGGHTMLPIRWMPPESIMYRKFTTESDVWSFGVILWEIFTYGKQPWFQLSNTEVIECITQGRVLERPRVCPKEVYDVMLGCWQREPQQRLNIKEIYKILHALGKATPIYLDILG

SEQ ID NO: 97308 - protein, 94 aa, Homo sapiens
MALRYPMAVGLNKGHKVTKNVSKPRHSRRRGRLTKHTKFVRDMIREVCGFAPYERRAMELLKVSKDKRALKFIKKRVGGRCRPRGGVGWESGPG

SEQ ID NO: 97309 - protein, 766 aa, Homo sapiens
MQQRAGSKTAGPPCQWSRMASEGTNIPSPVVRQIDKQFLICSICLERYKNPKVLPCLHTFCERCLQNYIPAHSLTLSCPVCRQTSILPEKGVAALQNNFFITNLMDVLQRTPGSNAEESSILETVTAVAAGKPLSCPNHDGNVMEFYCQSCETAMCRECTEGEHAEHPTVPLKDVVEQHKASLQVQLDAVNKRLPEIDSALQFISEIIHQLTNQKASIVDDIHSTFDELQKTLNVRKSVLLMELEVNYGLKHKVLQSQLDTLLQGQESIKSCSNFTAQALNHGTETEVLLVKKQMSEKLNELADQDFPLHPRENDQLDFIVETEGLKKSIHNLGTILTTNAVASETVATGEGLRQTIIGQPMSVTITTKDKDGELCKTGNAYLTAELSTPDGSVADGEILDNKNGTYEFLYTVQKEGDFTLSLRLYDQHIRGSPFKLKVIRSADVSPTTEGVKRRVKSPGSGHVKQKAVKRPASMYSTGKRKENPIEDDLIFRVGTKGRNKGEFTNLQGVAASTNGKILIADSNNQCVQIFSNDGQFKSRFGIRGRSPGQLQRPTGVAVHPSGDIIIADYDNKWVSIFSSDGKFKTKIGSGKLMGPKGVSVDRNGHIIVVDNKACCVFIFQPNGKIVTRFGSRGNGDRQFAGTLDGPHFAAVNSNNEIIITDFHNHSVKVFNQEGEFMLKFGSNGEGNGQFNAPTGVAVDSNGNIIVADWGNSRIQVFDGSGSFLSYINTSADPLYGPQGLALTSDGHVVVADSGNHCFKVYRYLQ

SEQ ID NO: 97310 - protein, 133 aa, Homo sapiens
MNRIRIHVLPTNRGRITPVPRVSFCAEHVRRNALALHAQMKKTNPGPVGETLLCQLSSYAKTELGSQTPESSRSEASRILDEDSWSDGEQEPITVDQTWRGDPDSEADSIDSDQEDPLKHAGVYTAEEVALIM

SEQ ID NO: 97311 - protein, 408 aa, Homo sapiens
MDVTSQARGVGLEMYPGTAQPAAPNTTSPELNLSHPLLGTALANGTGELSEHQQYVIGLFLSCLYTIFLFPIGFVGNILILVVNISFREKMTIPDLYFINLAVADLILVADSLIEVFNLHERYYDIAVLCTFMSLFLQVNMYSSVFFLTWMSFDRYIALARAMRCSLFRTKHHARLSCGLIWMASVSATLVPFTAVHLQHTDEACFCFADVREVQWLEVTLGFIVPFAIIGLCYSLIVRVLVRAHRHRGLRPRRQKALRMILAVVLVFFVCWLPENVFISVHLLQRTQPGAAPCKQSFRHAHPLTHGHVMSLNCGQMWLLAPRGLARVTLAWSPWGCLGNLTTGHLALLTQNCYNPKALAPQGPKASGDQPVTQLLPANPACRCTCLPLQETFLTPSTRKATRRGHCG

SEQ ID NO: 97312 - protein, 69 aa, Homo sapiens
MLHGLQRALAKTGAESISLLELCRNTNRKQAAAKFYSFLVLKKQQAIELTQEEPYSDIIATPGPRFHII

SEQ ID NO: 97313 - protein, 100 aa, Homo sapiens
MAGNKGRGRAAYTFNIEAVGFSKGEKLPDVVLKPPPLFPDTDYKPVPLKTGEGEEYMLALKQELRETMKRMPYFIETPEERQETGVLLFCSHWSHIPGFK

SEQ ID NO: 97314 - protein, 20 aa, Homo sapiens
MLGRYREYSNGQAGAIEHVR

SEQ ID NO: 97315 - protein, 113 aa, Homo sapiens
MPKGRQKVPHLDAPLGLPTCLWLELAGLFLLVPWVMGLAGTGGPDGQGTGGPSWAVHLESLEGDGEEETLEQQADALAQAAGLVNAGRIGELQGHYLFVQPAGHRPALEVEAI

SEQ ID NO: 97316 - protein, 126 aa, Homo sapiens
MAGTLDLDKGCTVEELLRGCIEAFDDSGKVRDPQLVRMFLMMHPWYIPSSQLAAKLLHIYQQSRKDNSNSLQVKTCHLVRYWISAFPAEFDLNPELAEQIKELKALLDQEGNRRHSSLIDIDSVRL

SEQ ID NO: 97317 - protein, 450 aa, Homo sapiens
MAPGRAVAGLLLLAAAGLGGVAEGPGLAFSEDVLSVFGANLSLSAAQLQHLLEQMGAASRVGVPEPGQLHFNQCLTAEEIFSLHGFSNATQITSSKFSVICPAVLQQLNFHPCEDRPKHKTRPSHSEVWGYGFLSVTIINLASLLGLILTPLIKKSYFPKILTFFVGLAIGTLFSNAIFQLIPEAFGFDPKVDSYVEKAVAVFGGFYLLFFFERMLKMLLKTYGQNGHTHFGNDNFGPQEKTHQPKALPAINGVTCYANPAVTEANGHIHFDNVSVVSLQDGKKEPSSCTCLKGPKLSEIGTIAWMITLCDALHNFIDGLAIGASCTLSLLQGLSTSIAILCEEFPHELGDFVILLNAGMSTRQALLFNFLSACSCYVGLAFGILVGNNFAPNIIFALAGGMFLYISLADMVRSLKFVFSFNLKFGNEYLDYKLTKGGLLLSAVWKAFLL

SEQ ID NO: 97318 - protein, 613 aa, Homo sapiens
  MOD_RES (1)..(1): Any amino acid
XIQSGPLKISSVSEVMKESKQPASQLQKQKGDTPASATAGDTLSVPAPAVQPEESLKTDHPEIGEGKPTPALSALAKSLEDALRQTASVTLQAIAAQNAAVQAVNAHSNILKAAMDNSEIAGEKKSAQWRTVEGALKERRKAVDEAADALLKAKEELEKMKSVIENAKKKEVAGAKPHITAAEGKLHNMIVDLDNVVKKVQAAQSEAKVVSQYHELVVQARDDFKRELDSITPEVLPGWKGMSVSDLADKLSTDDLNSLIAHAHRRIDQLNRELAEQKATEKQHITLALEKQKLEEKRAFDSAVAKALEHHRSEIQAEQDRKIEEVRDAMENEMRTQLRRQAAAHTDHLRDVLRVQEQELKSEFEQNLSEKLSEQELQFRRLSQEQVDNFTLDINTAYARLRGIEQAVQSHAVAEEEARKAHQLWLSVEALKYSMKTSSAETPTIPLGSAVEAIKANCSDNEFTQALTAAIPPESLTRGVYSEETLRARFYAVQKLARRVAMIDETRNSLYQYFLSYLQSLLLFPPQQLKPPPELCPEDINTFKLLSYASYCIEHGDLELAAKFVNQLKGESRRVAQDWLKEARMTLETKQIVEILTAYASAVGIGTTQVQPE

SEQ ID NO: 97319 - protein, 127 aa, Homo sapiens
MKLLLLHPAFQSCLLLTLLGLWRTTPEAHASSLGAPAISAASFLQDLIHRYGEGDSLTLQQLKALLNHLDVGVGRGNVTQHVQGHRNLSTCFSSGDLFTAHNFSEQSRIGSSELQEFCPTILQQLDS

SEQ ID NO: 97320 - protein, 507 aa, Homo sapiens
MAGGEEAKRPPPRAPGDPLSSPSPTALPQGGSHTETEDRLFKHLFRGYNRWARPVPNTSDVVIVRFGLSIAQLIDVDEKNQMMTTNVWLKQEWSDYKLRWNPTDFGNITSLRVPSEMIWIPDIVLYNNADGEFAVTHMTKAHLFSTGTVHWVPPAIYKSSCSIDVTFFPFDQQNCKMKFGSWTYDKAKIDLEQMEQTVDLKDYWESGEWAIVNATGTYNSKKYDCCAEIYPDVTYAFVIRRLPLFYTINLIIPCLLISCLTVLVFYLPSDCGEKITLCISVLLSLTVFLLLITEIIPSTSLVIPLIGEYLLFTMIFVTLSIVITVFVLNVHHRSPSTHTMPHWVRGALLGCVPRWLLMNRPPPPVELCHPLRLKLSPSYHWLESNVDAEEREVVVEEEDRWACAGHVAPSVGTLCSHGHLHSGASGPKAEALLQEGELLLSPHMQKALEGVHYIADHLRSEDADSSVKEDWKYVAMVIDRIFLWLFIIVCFLGTIGLFLPPFLAGMI

SEQ ID NO: 97321 - protein, 160 aa, Homo sapiens
MKVEVLPALTDNYMYLVIDDETKEAAIVDPVQPQKVVDAARKHGVKLTTVLTTHHHWDHAGGNEKLVKLESGLKVYGGDDRIGALTHKITHLSTLQVGSLNVKCLATPCHTSGHICYFVSKPGGSEPPAVFTGDTLFVAGCGKFYEGTADEMCKALLEVL

SEQ ID NO: 97322 - protein, 982 aa, Homo sapiens
MGLLQLLAFSFLALCRARVRAQEPEFSYGCAEGSCYPATGDLLIGRAQKLSVTSTCGLHKPEPYCIVSHLQEDKKCFICNSQDPYHETLNPDSHLIENVVTTFAPNRLKIWWQSENGVENVTIQLDLEAEFHFTHLIMTFKTFRPAAMLIERSSDFGKTWGVYRYFAYDCEASFPGISTGPMKKVDDIICDSRYSDIEPSTEGEVIFRALDPAFKIEDPYSPRIQNLLKITNLRIKFVKLHTLGDNLLDSRMEIREKYYYAVYDMVVRGNCFCYGHASECAPVDGFNEEVEGMVHGHCMCRHNTKGLNCELCMDFYHDLPWRPAEGRNSNACKKCNCNEHSISCHFDMAVYLATGNVSGGVCDDCQHNTMGRNCEQCKPFYYQHPERDIRDPNFCERCTCDPAGSQNEGICDSYTDFSTGLIAGQCRCKLNVEGEHCDVCKEGFYDLSSEDPFGCKSCACNPLGTIPGGNPCDSETGHCYCKRLVTGQHCDQCLPEHWGLSNDLDGCRPCDCDLGGALNNSCFAESGQCSCRPHMIGRQCNEVEPGYYFATLDHYLYEAEEANLGPGVSIVERQYIQDRIPSWTGAGFVRVPEGAYLEFFIDNIPYSMEYDILIRYEPQLPDHWEKAVITVQRPGRIPTSSRCGNTIPDDDNQVVSLSPGSRYVVLPRPVCFEKGTNYTVRLELPQYTSSDSDVESPYTLIDSLVLMPYCKSLDIFTVGGSGDGVVTNSAWETFQRYRCLENSRSVVKTPMTDVCRNIIFSISALLHQTGLACECDPQGSLSSVCDPNGGQCQCRPNVVGRTCNRCAPGTFGFGPSGCKRAWLVTMATPSLGQEITAALALAQMVPTVDASLPGAATKILLLYSLPVFVILDTLVPDVTTVPQDTLAIHQKLGGRVSLASVTTTLTRQTQKPVTRRLGGVSSACTTRKGNTVSSAGLDTMVMPSSRTVESVSVITWAPCKSTVTALTASATKPLVSACVFLM

SEQ ID NO: 97323 - protein, 705 aa, Homo sapiens
MTDNSNNQLVVRAKFNFQQTNEDELSFSKGDVIHVTRVEEGGWWEGTLNGRTGWFPSNYVREVKASEKPVSPKSGTLKSPPKGFDTTAINKSYYNVVLQNILETENEYSKELQTVLSTYLRPLQTSEKLSSANISYLMGNLEEICSFQQMLVQSLEECTKLPEAQQRVGGCFLNLMPQMKTLYLTYCANHPSAVNVLTEHSEELGEFMETKGASSPGILVLTTGLSKPFMRLDKYPTLLKELERHMEDYHTDRQDIQKSMAAFKNLSAQCQEVRKRKELELQILTEAIRNWEGDDIKTLGNVTYMSQVLIQCAGSEEKNERYLLLFPNVLLMLSASPRMSGFIYQGKLPTTGMTITKLEDSENHRNAFEISGSMIERILVSCNNQQDLQEWVEHLQKQTKVTSVGNPTIKPHSVPSHTLPSHPVTPSSKHADSKPAPLTPAYHTLPHPSHHGTPHTTINWGPLEPPKTPKPWSLSCLRPAPPLRPSAALCYKEDLSKSPKTMKKLLPKRKPERKPSDEEFASRKSTAALEEDAQILKVIEAYCTSAKTRQTLNSTWQGTDLMHNHVLADDDQPSLDSLGRRSSLSRLEPSDLSEDSDYDSIWTAHSYRMGSTSRSRKESAPQVLLPEEEKIIVEETKSNGQTVIEEKSLVDTVYALKDEVQELRQDNKKMKKSLEEEQRARKDLEKLVRKVLKNMNDPAWDETNL

SEQ ID NO: 97324 - protein, 125 aa, Homo sapiens
MDFWLWPLYFLPVSGALRILPEVKVEGELGGSVTIKCPLPEMHVRIYLCREMAGSGTCGTVVSTTNFIKAEYKGRVTLKQYPRKNLFLVENTSHHGKSSQCLRLQNGFICPICSRCLHMPVLPNS

SEQ ID NO: 97325 - protein, 81 aa, Homo sapiens
MMDQARSAFSNLFGGEPLSYTRFSLARQVDGDNSHVEMKLAVDEEENADNNTKANVTKPKRCSGSICYGTIAVIVFFLIGC

SEQ ID NO: 97326 - protein, 133 aa, Homo sapiens
MSREMQDVDLAEVKPLVEKGETITGLLQEFDVQEQDIETLHGSVHVTLCGTPKGNRPVILTYHDIGMNHKTCYNPLFNYEDMQEITQHFAVCHVDAPGQQDGAASFPAGYMYPSMDQLAEMLPGVLQQFGLKS

SEQ ID NO: 97327 - protein, 117 aa, Homo sapiens
MEALIPVINKLQDVFNTVGADIIQLPQIVVVGTQSSGKSSVLESLVGRDLLPRGTGIVTRRPLILQLVHVSQEDKRKTTGEENDPATWKNSRHLSKGVEAEEWGKFLHTKNKEPARY

SEQ ID NO: 97328 - protein, 58 aa, Homo sapiens
  MOD_RES (1)..(1): Any amino acid
XSGQSLKSLNASSGHLALILSSIFGLLLLVLFILFLTWCRVQKQKHLPLRGESPTRIV

SEQ ID NO: 97329 - protein, 140 aa, Homo sapiens
MNRTAMRASQKDFENSMNQVKLLKKDPGNEVKLKLYALYKQATEGPCNMPKPGVFDLINKAKWDAWNALGSLPKEAARQNYVDLVSSLSPSLESSSQVEPGTDRKSTGFETLVVTSEDGITKIMFNRPKKKNAINTEEGW

SEQ ID NO: 97330 - protein, 60 aa, Homo sapiens
MAHSEEAALLPGNHVPNGCAADPKASRELPPPPPPPPPPLPEAASSPPPAPPLPLESAGP

SEQ ID NO: 97331 - protein, 330 aa, Homo sapiens
MLESSSYLIRTARSLAINPKDPPTWSVLAGHSHTVSDSIKSLITSIRDKAPGQRECDYSIDGINRCIRDIEQASLAAVSQSLATRDDISVEALQEQLTSVVQEIGHLIDPIATAARGEAAQLGHKVTQLASYFEPLILAAVGVASKILDHQQQMTVLDQTKTLAESALQMLYAAKEGGGNPKAQHTHDAITEAAQLMKEAVDDIMVTLNEAASEVGLVGGMVDAIAEAMSKLDEGTPPEPKGTFVDYQTTVVKYSKAIAVTAQEMMTKSVTNPEELGGLASQMTSDYGHLAFQGQMAAATAEPEEVCHLKTPILRCTHTLVPTPGYFFIA

SEQ ID NO: 97332 - protein, 191 aa, Homo sapiens
MPLDGVRDSGMASRGPAAKDGENMVSASQKKGEIWSMANETQKVGAIHFPFPFTPYSIQEDFMAELYRVLEAGKIGIFESPTGTGKSLSLICGALSWLRDFEQKKREEEARLLETGTGPLHDEKDESLCLSSSCEGAAGTPRPAGEPAWVTQFVQKKEERDLVDRLKAEQARRKQREERLQQLQHRVQLKY

SEQ ID NO: 97333 - protein, 2146 aa, Homo sapiens
MNAYKYQKFLEGLNNLRDERDRVQKKTFTKWVNKHLMKVRKHINDLYEDLRDGHNLISLLEVLSGIKLPREKGRMRFHRLQNVQIALDFLKQRQVKLVNIRNDDITDGNPKLTLGLIWTIILHFQISDIYISGESGDMSAKEKLLLWTQKVTAGYTGIKCTNFSSCWSDGKMFNALIHRYRPDLVDMERVQIQSNRENLEQAFEVAERLGVTRLLDAEDVDVPSPDEKSVITYVSSIYDAFPKVPEGGEGISATEVDSRWQEYQSRVDSLIPWIKQHTILMSDKTFPQNPVELKALYNQYIHFKETEILAKEREKGRIEELYKLLEVWIEFGRIKLPQGYHPNDVEEEWGKLIIEMLEREKSLRPAVERLELLLQIANKIQNGALNCEEKLTLAKNTLQADAAHLESGQPVQCESDVIMYIQECEGLIRQLQVDLQILRDENYYQLEELAFRVMRLQDELVTLRLECTNLYRKGHFTSLELVPPSTLTTTHLKAEPLTKATHSSSTSWFRKPMTRAELVAISSSEDEGNLRFVYELLSWVEEMQMKLERAEWGNDLPSVELQLETQQHIHTSVEELGSSVKEARLYEGKMSQNFHTSYAETLGKLETQYCKLKETSSFRMRHLQSLHKFVSRATAELIWLNEKEEEELAYDWSDNNSNISAKRNYFSELTMELEEKQDVFRSLQDTAELLSLENHPAKQTVEAYSAAVQSQLQWMKQLCLCVEQHVKENTAYFQFFSDARELESFLRNLQDSIKRKYSCDHNTSLSRLEDLLQDSMDEKEQLIQSKSSVASLVGRSKTIVQLKPRSPDHVLKNTISVKAVCDYRQIEITICKNDECVLEDNSQRTKWKVISPTGNEAMVPSVCFLIPPPNKDAIEMASRVEQSYQKVMALWHQLHVNTKSLISWNYLRKDLDLVQTWNLEKLRSSAPGECHQIMKNLQAHYEDFLQDSRDSVLFSVADRLRLEEEVEACKARFQHLMKSMENEDKEETVAKMYISELKNIRLRLEEYEQRVVKRIQSLASSRTDRDAWQDNALRIAEQEHTQEDLQQLRSDLDAVSMKCDSFLHQSPSSSSVPTLRSELNLLVEKMDHVYGLSTVYLNKLKTVDVIVRSIQDAELLVKGYEIKLSQEEVVLADLSALEAHWSTLRHWLSDVKDKNSVFSVLDEEIAKAKVVAEQMSRLTPERNLDLERYQEKGSQLQERWHRVIAQLEIRQSELESIQEVLGDYRACHGTLIKWIEETTAQQEMMKPGQAEDSRVLSEQLSQQTALFAEIERNQTKLDQCQKFSQQYSTIVKDYELQLMTYKAFVESQQKSPGKRRRMLSSSDAITQEFMDLRTRYTALVTLTTQHVKYISDALRRLEEEEKVVEEEKQEHVEKVKELLGWVSTLARNTQGKATSSETKESTDIEKAILEQQVLSEELTTKKEQVSEAIKTSQIFLAKHGHKLSEKEKKQISEQLNALNKAYHDLCDGSANQLQQLQSQLAHQTEQKECRAVAGVIDLGTVEIFPIFKAMQKGLLDQDTGLVLLESQVIMSGLIAPETGENLSLEEGIARNLINPQMYQQLRELQDALALISRLTESRGPLSVVEAIEKRIISETVGLKILEAHLATGGFSLSPSENCINLEEAFHQGLISAWLHSVLESYLRTSKNLIDPNTAEKIGLLDLMQRCIVHQESGFKLLPVKQLAGGMVSLKSGRKVSIFRAVQEGLIDRQVTVRLLEAQLFAGGIVDPRTGHRLTVEEAVRHNLIDQDMACAILIRQLQTGGIIDTVTGQRLTIDEAVSNDLVAAKIALVILESLWSFMGLLWPESGEILPITDALEQGIVSTELAHKILSNRQHIKALFLPATTEILSWKKAIESGILDRDLANNLKSICIPDVMPHMQLADSAEQNINPGAAVLPCSKSHPKATASQSENLLFQLMTHSYINVQNGQRLLLLDKELMETLTSRDEYQTSPPKVVEIGHQRQKTPEGLQESANVKISGTFSSGWTVRLPEFQFSSQNKEYPDREDCTTEKGKKTTVETEDSSVENPEQDLFVEQKERNPNIDALKVINKVKLEVQRQLIGTQREDQTAVSVRENASRGHLLTIPPAEAEGVPLVVDKDVFSVETPKKEHQPLRNTSFTCQNEQAHTLETEYIHDETGGSHIKPQSK

SEQ ID NO: 97334 - protein, 403 aa, Homo sapiens
MANGGGGGGGSSGGGGGGGGSSLRMSSNIHANHLSLDASSSSSSSSSSSSSSSSSSSSSSVHEPKMDALIIPVTMEVPCDSRGQRMWWAFLASSMVTFFGGLFIILLWRTLKYLWTVCCHCGGKTKEAQKINNGSSQADGTLKPVDEKEEAVAAEVGWMTSVKDWAGVMISAQTLTGRVLVVLVFALSIGALVIYFIDSSNPIESCQNFYKDFTLQIDMAFNVFFLLYFGLRFIAANDKLWFWLEVNSVVDFFTVPPVFVSVYLNRSWLGLRFLRALRLIQFSEILQFLNILKTSNSIKLVNLLSIFISTWLTAAGFIHLVENSGDPWENFQNNQALTYWECVYLLMVTMSTVGYGDVYAKTTLGRLFMVFFILGGLAHCGLRTHHSGECFQLPEGLSAQGPG

SEQ ID NO: 97335 - protein, 104 aa, Homo sapiens
MDSARHHISHSTSAGPIPSQKEEEMTESQGTVTFKDVAIDFTQEEWKRLDPAQRKLYRNVMLENYNNLITVGYPFTKPDVIFKLEQEEEPWVMEEEVLRRHWQG

SEQ ID NO: 97336 - protein, 601 aa, Homo sapiens
MLKALPLKSSLTPSSQDDSNQEDDGQDSSPKWPDSGSSSEEECTTSYLTLCNEYGQEKIEPGSLNEEPFMKTEGNGVDTKAIKSFPAHLAADSDSPSTQLRAHELKFFPNDDPEAVSSPRTSDSLSRSKNSPMEFFRIDSKDSASELLGLDFGEKLYSLKSEPLKPFFTLPDGDSASRSFNTSESKVEFKAQDTISRGSDDSVPVISFKDAAFDDVSGTDEGRPDLLVNLPGELESTREAAAMGPTKFTQTNIGIIENKLLEAPDVLCLRLSTEQCQAHEEKGIEELSDPSGPKSYSITEKHYAQEDPRMLFVAAVDHSSSGDMSLLPSSDPKFQGLGVVESAVTANNTEESLFRICSPLSGANEYIASTDTLKTEEVLLFTDQTDDLAKEEPTSLFQRDSETKGESGLVLEGDKEIHQIFEDLDKKLALASRFYIPEGCIQRWAAEMVVALDALHREGIVCRDLNPNNILLNDRGHIQLTYFSRWSEVEDSCDSDAIERMYCAPEVGAITEETEACDWWSLGAVLFELLTGKTLVECHPAGINTHTTLNMPECVSEEARSLIQQLLQFNPLERLGAGVAGVEDIKSHPFFTPVDWAELMR

SEQ ID NO: 97337 - protein, 160 aa, Homo sapiens
MAAALFVLLGFALLGTHGASGAEDLGSKILLTCSLNDSATEVTGHRWLKGGVVLKEDALPGQKTEFKVDSDDQWGEYSCVFLPEPMGTANIQLHGPPRVKAVKSSEHINEGETAMLVCKSESVPPVTDWAWYKITDSEDKALMNGSESRFFVSSSQGRSE

SEQ ID NO: 97338 - protein, 99 aa, Homo sapiens
MVIIGGQENPNNSSASSEPRPEGHNNPQVMDTEHSNPPDSGSSVPTDPTWGPERRGEESSGHFLVAATGTAAGGGGGLILASPKLGATPLPPESTPAPP

SEQ ID NO: 97339 - protein, 454 aa, Homo sapiens
MPAHRDPDVQGHRLQHDSYAQPDGPREPARGSHPVARVRAAGGVRLPRPPPLLPVLAVRADVHRAGLYPHPRLPGHVRAGPAQVLPDYGAVQLQVARLPGLPETPQQERPQLPVHGGAQQRLGRAHPGLGPVPAAVPAAAAPQRAGAPAEGRGPRARRLRQPGQVPPRGEERVVRAALHARRGRVLEPRGQALRSGLAGHLGGAVLLLQRLHRAHLPHRPGPLPLPRAPHHLPLHVLLRLLRGLPHPPLRRRREHRLRPGQRPALCHPGGTGEHRLHAGLPGPLLLRHGQLAVVGGPHAHLVPGRRQEVGPRGHRSQQQLLPPGSLGHPGGEDHPDPGHAQGGGGRAHRGLLRGQHGRQRAHRLRAHSPGLLPGHRHVLHPLGLRGPVPHPEGDEDGRREHGQAGEAHGAYRALLCAVHRAGHLCDRLLLLRTPQHGLLEDPGGAAQVQNEQPD

SEQ ID NO: 97340 - protein, 163 aa, Homo sapiens
  MOD_RES (1)..(1): Any amino acid
XGEAFKSSSSCEVHERTHFGEKPYECKQCGKAFNSSSYLQLHERVHTGEKTYECKECGKAFLYSTHFRIHERTHTREKPYECKQCGRVFIYFSHLRRHERSHTGVKPCECKQCGKAFTCLNSLKVHKRIHTGERPFQCRQCGKAFSYSKSLHVHERTHSRQKP

SEQ ID NO: 97341 - protein, 125 aa, Homo sapiens
MSEKKQRKKVESESKQEKANRIISEAIAKAKERGERNIPRVMSPENFPTASVEGKEEKKGRRMKSKPKDKDSKKTKTCSKLKEKTKIGKLIITLGKKQKRKNESSDEISDAEQMPQHTLKDQDSQ

SEQ ID NO: 97342 - protein, 894 aa, Homo sapiens
MPYTTYLVEKGASHSFVAEAKPPTVTMPRIKALMTGSLPGFVDVIRNLNSPALLEDSVIRQAKAAGKRIVFYGDETWVKLFPKHFVEYDGTTSFFVSDYTEVDNNVTRHLDKVLKRGDWDILILHYLGLDHIGHISGPNSPLIGQKLSEMDSVLMKIHTSLQSKERETPLPNLLVLCGDHGMSETGSHGASSTEEVNTPLILISSAFERKPGDIRHPKHVQQTDVAATLAIALGLPIPKDSVGSLLFPVVEGRPMREQLRFLHLNTVQLSKLLQENVPSYEKDPGFEQFKMSERLHGNWIRLYLEEKHSEVLFNLGSKVLRQYLDALKTLSLSLSAQVAQYDIYSMMVGTVVVLEVLTLLLLSVPQALRRKAELEVPLSSPGFSLLFYLVILVLSAVHVIVCTSAESSCYFCGLSWLAAGGVMVLASALLCVIVSVLTNVLVGGNTPRKNPMHPSSRWSELDLLILLGTAGHVLSLGASSFVEEEHQTWYFLVNTLCLALSQETYRNYFLGDDGEPPCGLCVEQGHDGATAAWQDGPGCDVLERDKGHGSPSTSEVLRGREKWMVLASPWLILACCRLLRSLNQTGVQWAHRPDLGHWLTSSDHKAELSVLAALSLLVVFVLVQRGCSPVSKAALALGLLGVYCYRAAIGSVRFPWRPDSKDISKGIIEARFVYVFVLGILFTGTKDLLKSQVIAADFKLKTVGLWEIYSGLVLLAALLFRPHNLPVLAFSLLIQTLMTKFIWKPLRHDAAEITVMHYWFGQAFFYFQGNSNNIATVDISAGFVGLDTYVEIPAVLLTAFGTYAGPVLWASHLVHFLSSETRSGSALSHACFCYALICSIPVFTYIVLVTSLRYHLFIWSVFSPKLLYEGMHLLITAAVCVFFTAMDQTRLTQS

SEQ ID NO: 97343 - protein, 160 aa, Homo sapiens
MVPWVRTMGQKLKQRLRLDVGREICRQYPLFCFLLLCLSAASLLLNRYIHILMIFWSFVAGVVTFYCSLGPDSLLPNIFFTIKYKPKQLGLQELFPQGHSCAVCGKVKCKRHRPSLLLENYQPWLDLKISSKVDASLSEVLELVLENFVYPWYRWIFHLL

SEQ ID NO: 97344 - protein, 171 aa, Homo sapiens
MSILKIHAREIFDSRGNPTVEVDLFTSKGLFRAAVPSGASTGIYEALELRDNDKTRYMGKGVSKAVEHINKTIAPALVSKKLNVTEQEKIDKLMIEMDGTENKSKFGANAILGVSLAVCKAGAVEKGVPLYRHIADLAGNSEVILPVPAFNVINGGSHAGNKLAMQEFMIL

SEQ ID NO: 97345 - protein, 46 aa, Homo sapiens
MEKGLSSTIRVVGHVPGEFPVSVWVTAADCWMCQPVARGFVVLPIT

SEQ ID NO: 97346 - protein, 515 aa, Homo sapiens
MAEGVPASPSSGEGSRGPHSGVIQWLVDNFCICEECSVPRCLMYEIYVETCGQNTENQVNPATFGKCEDHSPMKTDPVGSPLSEFRRCPFLEQEQAKKYSCNMMAFLADEYCNYCRDILRNVEDLLTSFWKSLQQDTVMLMSLPDVCQLFKCYDVQLYKGIEDVLLHDFLEDVSIQYLKSVQLFSKKFKLWLLNALEGVPALLQISKLKEVTLFVKRLRRKTYLSNMAKTMRMVLKSKRRVSVLKSDLQAIINQGTLATSKKALASDRSGADELENNPEMKCLRNLISLLGTSTDLRVFLSCLSSHLQAFVFQTSRSKEEFTKLAASFQLRWNLLLTAVSKAMTLCHRDSFGSWHLFHLLLLEYMIHILQSCLEEEEEEEDMGTVKEMLPDDPTLGQPDQALFHSLNSSLSQACASPSMEPLGVMPTHMGQGRYPVGVSNMVLRILGFLVDTAMGNKLIQVLLEDETTESAVKLSLPMGQEALITLKDGQQFVIQISDVPQSSEDIYFRENNANV

SEQ ID NO: 97347 - protein, 39 aa, Homo sapiens
MQGDARRRRNENYFDDIPRSKLERQMAQTGDWGEPSITL

SEQ ID NO: 97348 - protein, 239 aa, Homo sapiens
QKAKVDLKPLLSSLSANKEKLKESSHSGVVLSVEEVEAGLKGLKVDQQVKNSTPFMAEHLEETLSAVTNNRQLKKDGDMTAFNKLVSTMKASGTLPSQPKVSRNLESHLMSPAEIPGQPVPKNILQVFQTRAASADYLRPRIPSPIGFTPGPQQLLGDPFQGMRKPMSPITAQMSQLELQQAALEGLALPHDLAVQAANFYQPGFGKPQVDRTRDGFRNRQQRVTKSPAPVHRGNSSSP

SEQ ID NO: 97349 - protein, 169 aa, Homo sapiens
MGVESDQEIVQMIGTEEHVMAAFGPSLEECQKAQIFTQMQALKYIGNKVRRQRMWGGGPKKTKIEEARELLASTILTHVPVKEFNFRAKCIYTAVMVRRVILAQGDNKVDDRDYYGNKRLELAGQLLSLLFEDLFKKFNSEMKKIADQVIPKQRAAQFDVVKHMRQDQI

SEQ ID NO: 97350 - protein, 252 aa, Homo sapiens
  MOD_RES (1)..(1): Any amino acid
XESLYQLLSQTSPENMHRNVAQYGLDPATRYPNLNLRAVTPNQVRDLYDVLAKEPVQRNNDKTDTGMPATGTQEELLRWCQEQTAGYPGVHVSDLSSSWADGLALCALVYRLQPGLLEPSELQGLGALEATAWALKVAENELGITPVVSAQAVVAGSDPLGLIAYLSHFHSAFKSMAHSPGPVSQASPGTSSAVLFLSKLQRTLQRSRAKENAEDAGGKKLRLEMEAETPSTEVPPDPEPGVPLTPPSQHQE

SEQ ID NO: 97351 - protein, 127 aa, Homo sapiens
SACVSSRLLYLLVFYTQNSGVFIYQGKLLDVCQNLESKLKELLKNFSEIVVVEGPILDCWTCLRMTNRCFKGEYCGDEDPRKAENREIALFLILLATAVILGSAVLLFHFCIFHRRKMKAIRRSLKE

SEQ ID NO: 97352 - protein, 69 aa, Homo sapiens
MNEYTVHLGSDTLGDRRAQRIKASKSFRHPGYSTQTHVNDLMLVKLNSQARLSSMVKKVRLPSRCEPPG

SEQ ID NO: 97353 - protein, 445 aa, Homo sapiens
MMYSPICLTQDEFHPFIEALLPHVRAIAYTWFNLQARKRKYFKKHEKRMSKDEERAVKDELLSEKPEIKQKWASRLLAKLRKDIRQEYREDFVLTVTGKKHPCCVLSNPDQKGKIRRIDCLRQADKVWRLDLVMVILFKGIPLESTDGERLMKSPHCTNPALCVQPHHITVSVKELDLFLAYYVQEQDSGQSGSPSHNDPAKNPPGYLEDSFVKSGVFNVSELVRVSRTPITQGTGVNFPIGEIPSQPYYHDMNSGVNLQRSLSSPPSSKRPKTISIDENMEPSPTGDFYPSPSSPAAGSRTWHERDQDMSSPTTMKKPEKPLFSSASPQDSSPRLSTFPQHHHPGIPGVAHSVISTRTPPPPSPLPFPTQAILPPAPSSYFSHPTIRYPPHLNPQDTLKNYVPSYDPSSPQTSQLRICDWTMNQNGRHLYPSTSEDTLGITWQS

SEQ ID NO: 97354 - protein, 754 aa, Homo sapiens
MLVLGLLVAGAADGCELVPRHLRGRRATGSAATAASSPAAAAGDSPALMTDPCMSLSPPCFTEEDRFSLEALQTIHKQMDDDKDGGIEVEESDEFIREDMKYKDATNKHSHLHREDKHITIEDLWKRWKTSEVHNWTLEDTLQWLIEFVELPQYEKNFRDNNVKGTTLPRIAVHEPSFMISQLKISDRSHRQKLQLKALDVVLFGPLTRPPHNWMKDFILTVSIVIGVGGCWFAYTQNKTSKEHVAKMMKDLESLQTAEQSLMDLQERLEKAQEENRNVAVEKQNLERKMMDEINYAKEEACRLRELREGAECELSRRQYAEQELEQVRMALKKAEKEFELRSSWSVPDALQKWLQLTHEVEVQYYNIKRQNAEMQLAIAKDEVAASYLIQAEKIKKKRSTVFGTLHVAHSSSLDEVDHKILEAKKALSELTTCLRERLFRWQQIEKICGFQIAHNSGLPSLTSSLYSDHSWVVMPRVSIPPYPIAGGVDDLDEDTPPIVSQFPGTMAKPPGSLARSSSLCRSRRSIVPSSPQPQRAQLAPHAPHPSHPRHPHHPQHTPHSLPSPDPDILSVSSCPALYRNEEEEEAIYFSAEKQWEVPDTASECDSLNSSIGRKQSPPLSLEIYQTLSPRKISRDEVSLEDSSRGDSPVTVDVSWGSPDCVGLTETKSMIFSPASKVYNGILEKSCSMNQLSSGIPVPKPRHTSCSSAGNDSKPVQEAPSVARISSIPHDLCHNGEKSKKPSKIKSLFKKKSK

SEQ ID NO: 97355 - protein, 1040 aa, Homo sapiens
  MOD_RES (1)..(1): Any amino acid
XIKHGVMVDATTRMGYTPLHVASHYGNIKLVKFLLQHQADVNAKTKLGYSPLHQAAQQGHTDIVTLLLKNGASPNEVSSDGTTPLAIAKRLGYISVTDVLKVVTDETSFVLVSDKHRMSFPETVDEILDVSEDEGTAHITIMGEELISFKAERRDSRDVDEEKELLDFVPKLDQVVESPAIPRIPCAMPETVVIRSEEQEQASKEYDEDSLIPSSPATETSDNISPVASPVHTGFLVSFMVDARGGSMRGSRHNGLRVVIPPRTCAAPTRITCRLVKPQKLSTPPPLAEEEGLASRIIALGPTGAQFLSPVIVEIPHFASHGRGDRELVVLRSENGSVWKEHRSRYGESYLDQILNGMDEELGSLEELEKKRVCRIITTDFPLYFVIMSRLCQDYDTIGPEGGSLKSKLVPLVQATFPENAVTKRVKLALQAQPVPDELVTKLLGNQATFSPIVTVEPRRRKFHRPIGLRIPLPPSWTDNPRDSGEGDTTSLRLLCSVIGGTDQAQWEDITGTTKLVYANECANFTTNVSARFWLSDCPRTAEAVNFATLLYKELTAVPYMAKFVIFAKMNDPREGRLRCYCMTDDKVDKTLEQHENFVEVARSRDIEVLEGMSLFAELSGNLVPVKKAAQQRSFHFQSFRENRLAMPVKVRDSSREPGGSLSFLRKAMKYEDTQHILCHLNITMPPCAKGSGAEDRRRTPTPLALRYSILSESTPGSLSGTEQAEMKMAVISEHLGLSWAELARELQFSVEDINRIRVENPNSLLEQSVALLNLWVIREGQNANMENLYTALQSIDRGEIVNMLEGSGRQSRNLKPDRRHTDRDYSLSPSQMNGHQRGQARITHSPTVSQVTERSQDRLQDWDADGSIVSYLQDAAQGSWQEEVTQGPHSFQGTSTMTEGLEPGGSQEYEKVLVSVSEHTWTEQPEAESSQADRDRRQQGQEEQVQEAKNTFTQVVQGNEFQNIPGEQVTEEQFTDEQGNIVTKKIIRKVVRQIDLSSADAAQEHEEVELRGSGLQPDLIEGRKGAQIVKRASLKRGKQ

SEQ ID NO: 97356 - protein, 256 aa, Homo sapiens
MQPRKEVTKASDGSLLGDLGHTPLSKKEGIKWQRPRLSRQALMRCCLVKWILSSTAPQGSDSSDSELELSTVRHQPEGLDQLQAQTKFTKKELQSLYRGFKNECPTGLVDEDTFKLIYAQFFPQGDATTYAHFLFNAFDADGNGAIHFEDFVVGLSILLRGTVHEKLKWAFNLYDINKDGYITKEEMLAIMKSIYDMMGRHTYPILREDAPAEHVERFFEKMDRNQDGVVTIEEFLEACQKDENIMSSMQLFENVI

SEQ ID NO: 97357 - protein, 229 aa, Homo sapiens
MRPAPIALWLRLVLALALVRPRAVGWAPVRAPIYVSSWAVQVSQGNREVERLARKFGFVNLGPIFPDGQYFHLRHRGVVQQSLTPHWGHRLHLKKNPKVQWFQQQTLQRRVKRSVVVPTDPWFSKQWYMNSEAQPDLSILQAWSQGLSGQGIVVSVLDDGIEKDHPDLWANYDPLASYDFNDYDPDPQPRYTPSKENRRTDAGRYHHRCHRGPVAEPAAAAHPHLQRQL

SEQ ID NO: 97358 - protein, 208 aa, Homo sapiens
MLETLRERLLSVQQDFTSGLKTLSDKSREAKVKSKPRYEDTWAALHRRAKDCASAGELVDSEVVMLSAHWEKKKTSLVELQEQLQQLPALIADLESMTANLTHLEASFEEVENNLLHLEDLCGQCELERCKHMQSQQLENYKKNKRKELETFKAELDAEHAQKVLEMEHTQQMKLKERQKFFEEAFQQDMEQYLSTGYLQIAERRGDP

SEQ ID NO: 97359 - protein, 111 aa, Homo sapiens
MTPQSLLQTTLFLLSLLFLVQGAHGRGHREDFRFCSQRNQTHRSSLHYKPTPDLRISIENSEEALTVHAPFPAAHPASRSFPDPRGLYHFCLYWNRHAGRLHLLYGKRDFL

SEQ ID NO: 97360 - protein, 176 aa, Homo sapiens
MHVNGKVALVTGAAQGIGRAFAEALLLKGAKVALVDWNLEAGVQCKAALDEQFEPQKTLFIQCDVADQQQLRDTFRKVVDHFGRLDILVNNAGVNNEKNWEKTLQINLVSVISGTYLGLDYMSKQNGGEGGIIINMSSLAGISSVCRHLKTWLAEVLPSSAGSSQGYFRTAGFLFL

SEQ ID NO: 97361 - protein, 100 aa, Homo sapiens
MSTIGSFEGFQAVSLKQEGDDQPSETDHLSMEEEDPMPRQISRQSSVTESTLYPNPYHQPYISRKYFATRPGAIETAMEDLKGHVAETSGETIQGFWLLT

SEQ ID NO: 97362 - protein, 262 aa, Homo sapiens
  MOD_RES (1)..(1): Any amino acid
XLNSEEAQRRGAGPGAFGALLFARGDQKSAASQKPRSRGILHSLFCCVCRDDGEALPAHSGAPLLVEENGAIPKTPVQYLLPEAKAQDSDKICVVIDLDETLVHSSFKPVNNADFIIPVEIDGVVHQVYVLKRPHVDEFLQRMGELFECVLFTASLAKYADPVADLLDKWGAFRARLFRESCVFHRGNYVKDLSRLGRDLRRVLILDNSPASYVFHPDNAVPVASWFDNMSDTELHDLLPFFEQLSRVDDVYSVLRQPRPGS

SEQ ID NO: 97363 - protein, 140 aa, Homo sapiens
MASSGTTDVTNRNSPATPPNTLNLRSSHNELLNAEIKHTETKNSTPPKCRKKYALTNIQAAMGLSDPAAQPLLGNGSANIKLVKNGENQLRKAAEQGQQDPNKNLSPTAVINITSEKLEGKEPHPQDSSSCEILPSQPRR

SEQ ID NO: 97364 - protein, 108 aa, Homo sapiens
MIGISVALGHLIGIHFTGCSMNPARSFGPAIIIGKFTVHWVFWVGPLMGALLASLIYNFVLFPDTKTLAQRLAILTGTVEVGTGAGAGAEPLKKESQPGSGAVEMESV

SEQ ID NO: 97365 - protein, 106 aa, Homo sapiens
GQAQAVPYVATKGAVTAMTKALALDESPYGVRVNCISPGNIWTPLWEELAALMPDPRATIREGMLAQVEVGFRSSHWAAWASPLRSGLRQCSWPPKPTSARALNCS

SEQ ID NO: 97366 - protein, 120 aa, Homo sapiens
MFPLTEENKHVAQLLLNTGTCPRCIFRFCGVDFHAPYKLPYKELLNELQKFLETEKDELILEVMNPPPKKIRLQELEDSIDNLSQNGEGRISVSHVGSTASKNSNLNVCNVCLGILQEFC

SEQ ID NO: 97367 - protein, 43 aa, Homo sapiens
MAAVGSLLGRLRQSTVKATGPALRRLHTSSWRADSSRASLTRV

SEQ ID NO: 97368 - protein, 232 aa, Homo sapiens
MAATSGTDEPVSGELVSVAHALSLPAESYGNDPDIEMAWAMRAMQHAEVYYKLISSVDPQFLKLTKVDDQIYSEFRKNFETLRIDVLDPEELKSESAKEPPGYNSLPLKLLGTGKAITKLFISVFRTKKERKESTMEEKKELTVEKKRTPRMEERKELIVEKKKRKESTEKTKLTKEEKKGKKLTKKSTKVVKKLCKVYREQHSRSYDSIETTSTTVLLAQTPLVKCKFLYN

SEQ ID NO: 97369 - protein, 52 aa, Homo sapiens
MDVIARQNFTEPTAIQAQGWPVALSGLDMVGVAQTGSGKTLSYLLPAIVHIN

SEQ ID NO: 97370 - protein, 104 aa, Homo sapiens
  MOD_RES (1)..(1): Any amino acid
XGKKALEAISRERGTFLYGTPTMFVDILNQPDFSSYDISTMCGGVIAGSPAPPELIRAIINKINMKDLVKSQEEIAAWEDGQQSTDVLLERPGRLLMEPQRTVP

SEQ ID NO: 97371 - protein, 2366 aa, Homo sapiens
  MOD_RES (1)..(1): Any amino acid
XYPNPISTHSGPQDIKWEIIHEVIPFLDKILSQNSTEIGSFLKMVICLTLEALWKNLKKDNWNVSNVLMTFTQHPNNLLKTIETVLEASSGIKSDYEGDLNKSLYFDTPLSQNITHHQLEKAIHNVLSRIALWRKGLLFNNSEWITSTRTLFQPLFEIFIKATTGKNVTSEKEERTKKEMIDFPYSFKPFFCLEKYLGGLFVLTKYWQQIPLTDQSVVEICEVFQQTVKPSEAMEMLQKVKMMVVRVLTIVAENPSWTKDILCATLSCKQNGIRHLILSAIQGVTLAQDHFQEIEKIWSSPNQLNCESLSKNLSSTLESFKSSLENATGQDCTSQPRLETVQQHLYMLAKSLEETWSSGNPIMTFLSNFTVTEDVKIKDLMKNITKLTEELRSSIQISNETIHSILEANISHSKVLFSALTVALSGKCDQEILHLLLTFPKGEKSWIAAEELCSLPGSKVYSLIVLLSRNLDVRAFIYKTLMPSEANGLLNSLLDIVSSLSALLAKAQHVFEYLPEFLHTFKITALLETLDFQQVSQNVQARSSAFGSFQFVMKMVCKDQASFLSDSNMFINLPRVKELLEDDKEKFNIPEDSTPFCLKLYQEILQLPNGALVWTFLKPILHGKILYTPNTPEINKVIQKANYTFYIVDKLKTLSETLLEMSSLFQRSGSGQMFNQLQEALRNKFVRNFVENQLHIDVDKLTEKLQTYGGLLDEMFNHAGAGRFRFLGSILVNLSSCVALNRFQALQSVDILETKAHELLQQNSFLASIIFSNSLFDKNFRSESVKLPPHVSYTIRTNVLYSVRTDVVKNPSWKFHPQNLPADGFKYNYVFAPLQDMIERAIILVQTGQEALEPAAQTQAAPYPCHTSDLFLNNVGFFFPLIMMLTWMVSVASMVRKLVYEQEIQIEEYMRMMGVHPVIHFLAWFLENMAVLTISSATLAIVLKTSGIFAHSNTFIVFLFLLDFGMSVVMLSYLLSAFFSQANTAALCTSLVYMISFLPYIVLLVLHNQLSFVNQTFLCLLSTTAFGQGVFFITFLEGQETGIQWNNMYQALEQGGMTFGWVCWMILFDSSLYFLCGWYLSNLIPGTFGLRKPWYFPFTASYWKSVGFLVEKRQYFLSSSLFFFNENFDNKGSSLQNREGELEGSAPGVTLVSVTKEYEGHKAVVQDLSLTFYRDQITALLGTNGAGKTTIISMLTGLHPPTSGTIIINGKNLQTDLSRVRMELGVCPQQDILLDNLTVREHLLLFASIKAPQWTKKELHQQVNQTLQDVDLTQHQHKQTRALSGGLKRKLSLGIAFMGMSRTVVLDEPTSGVDPCSRHSLWDILLKYREGRTIIFTTHHLDEAEALSDRVAVLQHGRLRCCGPPFCLKEAYGQGLRLTLTRQPSVLEAHDLKDMACVTSLIKIYIPQAFLKDSSGSELTYTIPKDTDKACLKGLFQALDENLHQLHLTGYGISDTTLEEVFLMLLQDSNKKSHIALGTESELQNHRPTGHLSGYCGSLARPATVQGVQLLRAQVAAILARRLRRTLRAGKSTLADLLLPVLFVALAMGLFMVRPLATEYPPLRLTPGHYQRAETYFFSSSGGDNLDLTRVLLRKFRDQDLPCADLNPRQKNSSCWRTDPFSHPEFQDSCGCLKCPNRSASAPYLTNHLGHTLLNLSGFNMEEYLLAPSEKPRLGGWSFGLKIPSEAGGANGNISKPPTLAKVWYNQKGFHSLPSYLNHLNNLILWQHLPPTVDWRQYGITLYSHPYGGALLNEDKILESIRQCGVALCIVLGFSILSASIGSSVVRDRVIGAKRLQHISGLGYRMYWFTNFLYDMLFYLVSVCLCVAVIVAFQLTAFTFRKNLAATALLLSLFGYATLPWMYLMSRIFSSSDVAFISYVSLNFIFGLCTMLITIMPRLLAIISKAKNLQNIYDVLKWVFTIFPQFCLGQGLVELCYNQIKYDLTHNFGIDSYVSPFEMNFLGWIFVQLASQGTVLLLLRVLLHWDLLRWPRGHSTLQGTVKSSKDTDVEKEEKRVFEGRTNGDILVLYNLSKHYRRFFQNIIAVQDISLGIPKGECFGLLGVNGAGKSTTFKMLNGEVSLTSGHAIIRTPMGDAVDLSSAGTAGVLIGYCPQQDALDELLTGWEHLYYYCSLRGIPRQCIPEVAGDLIRRLHLEAHADKPVATYSGGTKRKLSTALALVGKPDILLLDEPSSGMDPCSKRYLWQTIMKEVREGCAAVLTSHSMEECEALCTRLAIMVNGSFKCLGSPQHIKNRFGDGYTVKVWLCKEANQHCTVSDHLKLYFPGIQFKGQHLNLLEYHVPKRWGCLADLFKVIENNKTFLNIKHYSINQTTLEQVFINFASEQQQTLQSTLDPSTDSHHTHHLPI

SEQ ID NO: 97372 - protein, 51 aa, Homo sapiens
MEDTKESNVKTFCSKNILAILGFSSIIAVIALLAVGLTQNKALPENVKDGK

SEQ ID NO: 97373 - protein, 163 aa, Homo sapiens
MMRRTLENRNAQTKQLQTAVSNVEKHFGELCQIFAAYVRKTARLRDKADLLVNEINAYAATETPHLKLGLMNFADEFAKLQDYRQAEVERLEAKVVEPLKTYGTIVKMKRDDLKATLTARNREAKQLTQLERTRQRNPSDRHVINFEEFSVKRRNIRNLYSLC

SEQ ID NO: 97374 - protein, 764 aa, Homo sapiens
MATGANATPLGKLGPPGLPPLPGPKGGFEPGPPPAPGPGAGLLAPGPPPPPPVGSMGALTAAFPFAALPPPPPPPPPPPPQQPPPPPPPPSPGASYPPPQPPPPPPLYQRVSPPQPPPPQPPRKDQQPGPAGGGGDFPSKKRKRSRWNQDTMEQKTVIPGMPTVIPPGLTREQERAYIVQLQIEDLTRKLRTGDLGIPPNPEDRSPSPEPIYNSEGKRLNTREFRTRKKLEEERHNLITEMVALNPDFKPPADYKPPATRVSDKVMIPQDEYPEINFVGLLIGPRGNTLKNIEKECNAKIMIRGKGSVKEGKVGRKDGQMLPGEDEPLHALVTANTMENVKKAVEQIRNILKQGIETPEDQNDLRKMQLRELARLNGTLREDDNRILRPWQSSETRSITNTTVCTKCGGAGHIASDCKFQRPGDPQSAQDKARMDKEYLSLMAELGEAPVPASVGSTSGPATTPLASAPRPAAPANNPPPPSLMSTTQSRPPWMNSGPSESRPYHGMHGGGPGGPGGGPHSFPHPLPSLTGGHGGHPMQHNPNGPPPPWMQPPPPPMNQGPHPPGHHGPPPMDQYLGSTPVGSGVYRLHQGKGMMPPPPMGMMPPPPPPPSGQPPPPPSGPLPPWQQQQQQPPPPPPPSSSMASSTPLPWQQNTTTTTTSAGTGSIPPWQQQQAAAAASPGAPQMQGNPTMVPLPPGVQPPLPPGAPPPPPPPPPGSAGMMYAPPPPPPPPMDPSNFVTMMGMGVAGMPPFGMPPAPPPPPPQN

SEQ ID NO: 97375 - protein, 540 aa, Homo sapiens
MTAVPLTSRNPRFLEGSGDSSLEKEFLGAPVGPSVSTPNSQHSSPSRSLSANSIKVEMYSDEESSRLLGPDERLLEKDDSVIVEDSLSEPLGYCDGSGPEPHSPGGIRLPNGKLKCDVCGMVCIGPNVLMVHKRSHTGERPFHCNQCGASFTQKGNLLRHIKLHSGEKPFKCPFCNYACRRRDALTGHLRTHSVSSPTVGKPYKCNYCGRSYKQQSTLEEHKERCHNYLQSLSTEAQALAGQPGDEIRDLEMVPDSMLHSSSERPTFIDRLANSLTKRKRSTPQKFVGEKQMRFSLSDLPYDVNSGGYEKDVELVAHHSLEPGFGSSLAFVGAEHLRPLRLPPTNCISELTPVISSVYTQMQPLPGRLELPGSREAGEGPEDLADGGPLLYRPRGPLTDPGASPSNGCQDSTDTESNHEDRVAGVVSLPQGPPPQPPPTIVVGRHSPAYAKEDPKPQEGLLRGTPGPSKEVLRVVGESGEPVKAFKCEHCRILFLDHVMFTIHMGCHGFRDPFECNICGYHSQDRYEFSSHIVRGEHKVG

SEQ ID NO: 97376 - protein, 585 aa, Homo sapiens
MTPIVTVLICLGTIPKPTLWAEPDSVITQGSPVTLSCQGSLEAQEYRLYREKKSASWITRIRPELVKNGQFHIPSITWEHTGRYGCQYYSRARWSELSDPLVLVMTGAYPKPTLSAQPSPVVTSGGRVTLQCESQVAFGGFILCKEGEEEHPQCLNSQPHARGSSRAIFSVGPVSPNRRWSHRCYGYDLNSPYVWSSPSDLLELLVPGVSKKPSLSVQPGPVVAPGESLTLQCVSDVGYDRFVLYKEGERDLRQLPGRQPQAGLSQANFTLGPVSRSYGGQYRCYGAHNLSSECSAPSDPLDILITGQIRGTPFISVQPGPTVASGENVTLLCQSWRQFHTFLLTKAGAADAPLRLRSIHEYPKYQAEFPMSPVTSAHAGTYRCYGSLNSDPYLLSHPSEPLELVVSGPSMGSSPPPTGPISTPGPEDQPLTPTGSDPQSGLGRHLGVVIGILVAVVLLLLLLLLLFLILRHRRQGKHWTSTQRKADFQHPAGAVGPEPTDRGLQWRSSPAADAQEENLYAAVKDTQPEDGVEMDTRAAASEAPQDVTYAQLHSLTLRRKATEPPPSQEREPPAEPSIYATLAIH

SEQ ID NO: 97377 - protein, 196 aa, Homo sapiens
MQAAVAVSVPFLLLCVLGTCPPARCGQAGDASLMELEKRKENRFVERQSIVPLRLIYRSGGEDESRHDALDTRVRGDLGGPQIQMFLKSESQKTIYQIQLTHVDQASFQVDAFGTSFILDVVLNHDLLSSEYIERHIEHGGKTVEVKGGEHCYYQGHIRGNPDSFVALSTCHGLHGMFYDGNHTYLIEPEENDTTQ

SEQ ID NO: 97378 - protein, 155 aa, Homo sapiens
MTAKQCPGAGHYCPESRGGGCWQGLQILSDLATTLGMATLPSGPVFHREKPLRDGSHSLKVSQQRSRTPRPLYPAWPDSGPCGPQLVSSWADPRIPSLPKDSAEGPLCPFYLHLSTLPQLDVWVSPAPSSLAGAKYREVKQDPCRHVAQHTVGPQ

SEQ ID NO: 97379 - protein, 395 aa, Homo sapiens
ASTKGPSVFPLAPCSRSTSESTAALGCLVKDYFPEPVTVSWNSGALTSGVHTFPAVLQSSGLYSLSSVVTVPSSNFGTQTYTCNVDHKPSNTKVDKTVERKCCVECPPCPAPPVAGPSVFLFPPKPKDTLMISRTPEVTCVVVDVSHEDPEVQFNWYVDGVEVHNAKTKPREEQFNSTFRVVSVLTVVHQDWLNGKEYKCKVSNKGLPAPIEKTISKTKGQPREPQVYTLPPSREEMTKNQVSLTCLVKGFYPSDISVEWESNGQPENNYKTTPPMLDSDGSFFLYSKLTVDKSRWQQGNVFSCSVMHEALHNHYTQKSLSLSPELQLEESCAEAQDGELDGLWTTITIFITLFLLSVCYSATITFFKVKWIFSSVVDLKQTIVPDYRNMIRQGA

SEQ ID NO: 97380 - protein, 523 aa, Homo sapiens
MLLGCLLRRRRSEWKWAADRAAIVSRWNWLQAHVSDLEYRIRQQTDIYKQIRANKGLIVLGEVPPPEHTTDLFLPLSSEVKTDHGTDKLIESVSQPLENHGAPIIGHISESLSTKSCGALRPVNGVINTLQPVLADHIPGDSSDAEEQLHKKQRLNLVSSSSDGTCVAARTRPVLSCKKRRLVRPNSIVPLSKKVHRNSTIRPGCDVNPSCALCGSGSINTMPPEIHYEAPLLERLSQLDSCVHPVLAFPDDVPTSLHFQSMLKSQWQNKPFDKIKPPKKLSLKHRAPMPGSLPDSARKDRHKLVSSFLTTAKLSHHQTRPDRTHRQHLDDVGAVPMVERVTAPKAERLLNPPPPVHDPNHSKMRLRDHSSERSEVLKHHTDMSSSSYLAATHHPPHSPLVRQLSTSSDSPAPASSSSQVTASTSQQPVRRRRGESSFDINNIVIPMSVAATTRVEKLQYKEILTPSWREVDLQSLKGSPDEENEEIEDLSDAAFAALHAKCEEMERARWLWTTSVPPQRRGS

SEQ ID NO: 97381 - protein, 44 aa, Homo sapiens
MPYLLISTQIRMEVGPTMVGDEQSDPELMQHLGASKRRALGNNL

SEQ ID NO: 97382 - protein, 81 aa, Homo sapiens
  MOD_RES (1)..(1): Any amino acid
XSRSTASGGSGCFRRPRSFQTPCTVSGRGRRRQPSPWGPLRRSRLTVKTPPVTASGWMSLHPATTRSCSVMTSPTAACSSG

SEQ ID NO: 97383 - protein, 194 aa, Homo sapiens
MTQTSPFYNGRGFDNLTSVHLARHTPTGTLVTIKITNLENCNEERLKALQKAVILSHFFRHPNITTYWTVFTVGSWLWVISPFMAYGSASQLLRTYFPEGMSETLIRNILFGAVRGLNYLHQNGCIHRSIKASHILISGDGLVTLSGLSHLHSLVKHGQRHRAVYDFPQFSTSVQPWLSPELLRQDLHGYNVKS

SEQ ID NO: 97384 - protein, 212 aa, Homo sapiens
MSGYSSDRDRGRDRGFGAPRFGGSRAGPLSGKKFGNPGEKLVKKKWNLDELPKFEKNFYQEHPDLARRTAQEVETYRRSKEITVRGHNCPKPVLNFYEANFPANVMDVIARQNFTEPTAIQAQGWPVALSGLDMVGVAQTGSGKTLSYLLPAIVHINHQPFLERGDGPICLVLAPTRELAQQVQQVAAEYCRACRLKSTCIYGGAPKGPQIR

SEQ ID NO: 97385 - protein, 35 aa, Homo sapiens
MSSHGNSLFLRESGQRLGRVGWLQRLQESLQQRAL

SEQ ID NO: 97386 - protein, 116 aa, Homo sapiens
MPGKMVVILGASNILWIMFAASQAFKIETTPESRYLAQIGDSVSLTCSTTGCESPFFSWRTQIDSPLNGKVTNEGTTSTLTMNPVSFGNEHSYLCTATCESRKLEKGIQVEIYCWR

SEQ ID NO: 97387 - protein, 177 aa, Homo sapiens
MAWRGWAQRGWGCGQAWGASVGGRSCEELTAVLTPPQLLGRRFNFFIQQKCGFRKAPRKVEPRRSDPGTSGEAYKRSALIPPVEETVFYPSPYPIRSLIKPLFFTVGFTGCAFGSAAIWQYESLKSRVQSYFDGIKADWLDSIRPQKEGDFRKEINKWWNNLSDGQRTVTGSCGPSP

SEQ ID NO: 97388 - protein, 111 aa, Homo sapiens
MEDEVVRFAKKMDKMVQKKNAAGALDLLKELKNIPMTLELLQSTRIGMSVNAIRKQSTDEEVTSLAKSLIKSWKKLLDGPSTEKDLDEKKKEPAITSQNSPEAREERYFTV

SEQ ID NO: 97389 - protein, 272 aa, Homo sapiens
MGRLHCTEDPVPEAVGGDMQQLNQLGAQQFSALTEVLFHFLTEPKEVERFLAQLSEFATTNQISLGSLRSIVKSLLLVPNGALKKSLTAKQVQADFITLGLSEEKATYFSEKWKQNAPTLARWAIGQTLMINQLIDMEWKFGVTSGSSELEKVGSIFLQLKLVVKKGNQTENVYIDSSITFSRKLFQSPQARNLPPTPELKPQQPVPAPSPSELHLSGSLGNKCHFFVVFCVPQGQSSGWIHLGIPNTGVELAHFNFSQCLLRKGVKSWTHE

SEQ ID NO: 97390 - protein, 151 aa, Homo sapiens
MVETETPRDGCSGRKNQQKMESIQEVTVSYFSPKELSSRQTWQQSAGGLIRCQDFLKVFQGKNSQLQEQGNSLGQVWAGIPVQISEDKNYIFTHIGNGSNYIKSQGYPSWRAHHSWRKMYLKESHNYQCRCQQISMKNHFCKCDSVSWLSH

SEQ ID NO: 97391 - protein, 77 aa, Homo sapiens
MASTDYSTYSQAAAQQGAYTAQPTQGYAQTTQAYGQQSYGTYGQPTDVSYTQAQTTATYGQTAYATSYGQPPTGYTT

SEQ ID NO: 97392 - protein, 790 aa, Homo sapiens
MGLPEPGPLRLLALLLLLLLLLLLQLQHLAAAAADPLLGGQGPAKDCEKDQFQCRNERCIPSVWRCDEDDDCLDHSDEDDCPKKTCADSDFTCDNGHCIHERWKCDGEEECPDGSDESEATCTKQVCPAEKLSCGPTSHKCVPASWRCDGEKDCEGGADEAGCATSLGTCRGDEFQCGDGTCVLAIKHCNQEQDCPDGSDEAGCLQGLNECLHNNGGCSHICTDLKIGFECTCPAGFQLLDQKTCGAGKSPSLIFTNRHEVRRIDLVKRNYSRLIPMLKNVVALDVEVATNRIYWCDLSYRKIYSAYMDKASDPKEQEVLIDEQLHSPEGLAVDWVHKHIYWTDSGNKTISVATVDGGRRRTLFSRNLSEPRAIAVDPLRGFMYWSDWGDQAKIEKSGLNGVDRQTLVSDNIEWPNGITLDLLSQRLYWVDSKLHQLSSIDFSGGNRKTLISSTDFLSHPFGIAVFEDKVFWTDLENEAIFSANRLNGLEISILAENLNNPHDIVIFHELKQPRDACELSVQPNGGCEYLCLPAPQISSHSPKYTCACPDTMWLGPDMKRCYRAPQSTSTTTLASTMTRTVPATTRAPGTTVHRSTYQNHSTETPSLTAAVPSSVSVPRAPSISPSTLSPATSNHSQHYANEDSKMGSTVTAAVIGIIVPIVVIALLCMSGYLIWRNWKRKNTKSMNFDNPVYRKTTEEEDEDELHIGRTAQIGHVYPAAISSFDRPLWAEPCLGETREPEDPAPALKELFVLPGEPRSQLHQLPKNPLSELPVVKSKRVALSLEDDGLP

SEQ ID NO: 97393 - protein, 83 aa, Homo sapiens
MYLEDRTVRLQLWDTAGQERFRSLIPSYIRDSTVAVVVYDITNLNSFQQTSKWIDDVRTERGSDVIIMLVGNKTDLADKRQIT

SEQ ID NO: 97394 - protein, 90 aa, Homo sapiens
  MOD_RES (1)..(1): Any amino acid
XIRCGMKHGYAPSDLPVKAKRSTYNYSLPITVKKTSSQLVTMHDLKQGLGPSGTSGARKPASSKYKLKVGAPGGQEWRGGLPSWGRAPCG

SEQ ID NO: 97395 - protein, 141 aa, Homo sapiens
MKSYTPYFILLWSAVGIAKAAKIIIVPPIMFESHMYIFKTLASALHERGHHTVFLLSEGRDIAPSNHYSLQRYPGIFNSTTSDAFLQSKMRNIFSGRLTAIELFDILDHYTKNCDLMVGNHALIQGLKKEKFDLLLVDPND

SEQ ID NO: 97396 - protein, 137 aa, Homo sapiens
MSVPGPYQAATGPSSAPSAPPSYEETVAVNSYYPTPPAPMPGPTTGLVTGPDGKGMNPPSYYTQPAPIPNNNPITVQTVYVQHPITFLDRPIQMCCPSCNKMIVSQLSYNAGALTWLSCGSLCLLGCIAGCCFIPFC

SEQ ID NO: 97397 - protein, 1095 aa, Homo sapiens
MTEVQAMVEFSVELNKFYNVDLFQRGFYQIRASMKIPSRIPHRVEASLLHATGMTLAFPASVHDSLICSKTFQILYKNEEVVLNDVMIFKVKMLLDERKIEETLEEMNFLLSLDLHFTDGDYSADDLNALQLISSRTLKLHFSPHRGLHHHVNVMFDYFHLSVVSVTVHASLVALHQPLISFPRPVKTTWLNRNAPAQNKDSVIPTLESVVFGINYTKQLSPDGCSFIIADSFLHHAYRFHYTLCATLLLAFKGLHSYFITVTEEIPSCQKLELEEMDVEARLTELCEEVKKIENPDELAELINMNLAQLCSLLMALWGQFLEVITLHEELRILLAQEHHTLRVRRFSEAFFCFEHPREAAIAYQELHAQSHLQMCTAIKNTSFCSSLPPLPIECSELDGDLNSLPIIFEDRYLDSVTEGKLDISQDDSEITQMEHNLASRRSSDDCHDHQTTPSLGVRTIEIKPSNKDPFSGENITVKLGPWTELRQEEILVDNLLPNFESLESNDEETSSDVKSSCSSKPNLDTMCKGFQSPDKSNNSTGTAITLNSKLICLGTPCVISGSISSNTDVSEDRTMKKNSDVLNLTQMYSEIPTVESETHLGTSDPFSASTDIVKQGLVENYFGSQSSTDISDTCAVSYSNALSPQKETSEKEISNLQQEQDKEDEEEEQDQQMVQNGYYEETDYSALDGTINAHYTSRDELMEERLTKSEKINSDYLRDGINMPTVCTSGCLSFPSAPRESPCNVKYSSKSKFDAITKQPSSTSYNFTSSISWYESSPKPQIQAFLQAKEELKLLKLPGFMYSEVPLLASSVPYFSVEEEDGSEDGVHLIVCVHGLDGNSADLRLVKTYIELGLPGGRIDFLMSERNQNDTFADFDSMTDRLLDEIIQYIQIYSLTVSKISFIGHSLGNLIIRSVLTRPRFKYYLNKLHTFLSLSGPHLGTLYNSSALVNTGLWFMQKWKKSGSLLQLTCRDHSDPRQTFLYKLSNKAGLHYFKNVVLVGSLQDRYVPYHSARIEMCKTALKDKQSGQIYSEMIHNLLRPVLQSKDCNLVRYNVINALPNTADSLIGRAAHIAVLDSEIFLEKFFLVAALKYFQ

SEQ ID NO: 97398 - protein, 445 aa, Homo sapiens
MGIKVLQQSKSQKQKEEAYLLFAKAADMGNLKAMEKMADALLFGNFGVQNITAAIQLYESLAKEGSCKAQNALGFLSSYGIGMEYDQAKALIYYTFGSAGGNMMSQMILGYRYLSGINVLQNCEVALSYYKKVADYIADTFEKSEGVPVEKVRLTERPENLSSNSEILDWDIYQYYKFLAERGDVQIQKALHYFLKAAKAGSANAMAFIGKMYLEGNAAVPQNNATAFKYFSMAASKGNAIGLHGLGLLYFHGKGVPLNYAEALKYFQKAAEKGWPDAQFQLGFMYYSGSGIWKDYKLAFKYFYLASQSGQPLAIYYLAKMYATGTGVVRSCRTAVEKRLTFLKKRRCIQWRFSYGIELPFKDIHLARRLYDMAAQTSPDAHIPVLFAVMKLETTHLLRDILFFNQFTTRWNWLKLDNTIGPHWDLFVIGLIVPGLILLLRNHHG

SEQ ID NO: 97399 - protein, 515 aa, Homo sapiens
MQAMEGEVLLPALYEEEEEEEEEEEEVEEEEEQVQKGGSVGSLSVNKHRGLSLTETELEELRAQVLQLVAELEETRELAGQHEDDSLELQGLLEDERLASAQQAEVFTKQIQQLQGELRSLREEISLLEHEKESELKEIEQELHLAQAEIQSLRQAAEDSATEHESDIASLQEDLCRMQNELEDMERIRGDYEMEIASLRAEMEMKSSEPSGSLGLSDYSGLQEELQELRERYHFLNEEYRALQESNSSLTGQLADLESERTQRATERWLQSQTLSMTSAESQTSEMDFLEPDPEMQLLRQQLRDAEEQMHGMKNKCQELCCELEELQHHRQVSEEEQRRLQRELKCAQNEVLRFQTSHSVTQELLCRLQKLHLQHQNVTCEKEKLLERQQQLQEELQCHEAELQHLRDTVASFKESNEKDTETHAQLQEMKQLYQASKDELERQKHMYDQLEQDLLLCQLELKELKASHPIPEDKGKCANKSSPTPNPPIFSLPLVGLVVISALLWCWWAETSS

SEQ ID NO: 97400 - protein, 132 aa, Homo sapiens
  MOD_RES (1)..(1): Any amino acid
XSCLRFVQTNISRLLQETSEQLVALKPWITRQNFSRCLELQCQPGAPRPQSPGPAACGALTWPRPHPGESFLGYGAWTLCLQVGRVTRRPWKGGEQWRGRGSSRCRKTPLGPGAVAHACNPSTLGGRGGWIT

SEQ ID NO: 97401 - protein, 95 aa, Homo sapiens
MLSKFHMAVPFYIPTSNVWSDPVSQHPRQHLVLSVFFILAILNMVSSFRVSELQVLLGFAGRNKSGRKHDLLMRALHLLKSGCSPAVQIKIRELY

SEQ ID NO: 97402 - protein, 137 aa, Homo sapiens
  MOD_RES (1)..(1): Any amino acid
XEVIENHRKKKKEAQKDGKGEEEEEEEEQEEEEAFIAEMQMVAEILHHLVQRPEDYLENVENIVKLYKETILQTLEEVMAEHNPQYLIELNGNKPAEELFMVSAVLSRNTSQHGKFKSIDSIVLLLINRSIFIFEHH

SEQ ID NO: 97403 - protein, 99 aa, Homo sapiens
  MOD_RES (1)..(1): Any amino acid
XHQHTHQHTHQHTFTPFPHAIPPTAIMPTPAPPMVRTPGRNFDKYPTKVDPFYRHSLFHSYPPAVSGIPPMIPPTGPFGSLQGAFQPKKPGKWCAMHVH

SEQ ID NO: 97404 - protein, 95 aa, Homo sapiens
DCCIIRVSLDVDNGNMYKSILVTSQDKAPAVIRKAMDKHNLEEEEPEDYELLQILSDDRSKSEDQRAMAEGAGPHHSPAPGWKPLAPENSPAECG

SEQ ID NO: 97405 - protein, 84 aa, Homo sapiens
MLLRRQEARSFDLQKSEAMLRKHVEFRKQKDIDNIISWQPPEVIQQYLSGGMCGYDLDGCPVWYDIIGPLDAKGLLFSASKQDL

SEQ ID NO: 97406 - protein, 735 aa, Homo sapiens
MVNAGAMSGSGNLMDFLDEPFPDVGTYEDFHTIDWLREKSRDTDRHRKITSKSKESIWEFIKSLLDAWSGWVVMLLIGLLAGTLAGVIDLAVDWMTDLKEGVCLSAFWYSHEQCCWTSNETTFEDRDKCPLWQKWSELLVNQSEGASAYILNYLMYILWALLFAFLAVSLVRVFAPYACGSGIPEIKTILSGFIIRGYLGKWTLLIKTVTLVLVVSSGLSLGKEGPLVHVACCCGNFFSSLFSKYSKNEGKRREVLSAAAAAGVSVAFGAPIGGVLFSLEEVSYYFPLKTLWRSFFAALVAAFTLRSINPFGNSRLVLFYVEYHTPWYMAELFPFILLGVFGGLWGTLFIRCNIAWCRRRKTTRLGKYPVLEVIVVTAITAIIAYPNPYTRQSTSELISELFNDCGALESSQLCDYINDPNMTRPVDDIPDRPAGVGVYTAMWQLALALIFKIVVTIFTFGMKIPSGLFIPSMAVGAIAGRMVGIGVEQLAYHHHDWIIFRNWCRPGADCVTPGLYAMVGAAACLGGVTRMTVSLVVIMFELTGGLEYIVPLMAAAVTSKWVADAFGKEGIYEAHIHLNGYPFLDVKDEFTHRTLATDVMRPRRGEPPLSVLTQDSMTVEDVETLIKETDYNGFPVVVSRDSERLIGFAQRRELILAIKNARQRQEGIVSNSIMYFTEEPPELPANSPHPLKLRRILNLSPFTVTDHTPMETVVDIFRKLGLRQCLVTRSGSPIS

SEQ ID NO: 97407 - protein, 706 aa, Homo sapiens
  MOD_RES (1)..(1): Any amino acid
XLLLLGLARGAAGAPGPDGLDVCATCHEHATCQQREGKKICICNYGFVGNGRTQCVDKNECQFGATLVCGNHTSCHNTPGGFYCICLEGYRATNNNKTFIPNDGTFCTDIDECEVSGLCRHGGRCVNTHGSFECYCMDGYLPRNGPEPFHPTTDATSCTEIDCGTPPEVPDGYIIGNYTSSLGSQVRYACREGFFSVPEDTVSSCTGLGTWESPKLHCQEINCGNPPEMRHAILVGNHSSRLGGVARYVCQEGFESPGGKITSVCTEKGTWRESTLTCTEILTKINDVSLFNDTCVRWQINSRRINPKISYVISIKGQRLDPMESVREETVNLTTDSRTPEVCLALYPGTNYTVNISTAPPRRSMPAVIGFQTAEVDLLEDDGSFNISIFNETCLKLNRRSRKVGSEHMYQFTVLGQRWYLANFSHATSFNFTTREQVPVVCLDLYPTTDYTVNVTLLRSPKRHSVQITIATPPAVKQTISNISGFNETCLRWRSIKTADMEEMYLFHIWGQRWYQKEFAQEMTFNISSSSRDPEVCLDLRPGTNYNVSLRALSSELPVVISLTTQITEPPLPEVEFFTVHRGPLPRLRLRKAKEKNGPISSYQVLVLPLALQSTFSCDSEGASSFFSNASDADGYVAAELLAKDVPDDAMEIPIGDRLYYGEYYNAPLKRGSDYCIILRITSEWNKIRHSCCCRWRVLDWVPWLL

SEQ ID NO: 97408 - protein, 91 aa, Homo sapiens
MSVPQIHVEEVGAEEGAGAAAPPDDHLRSLKALTEKLRLETRRPSYLEWQARLEEHTWPFPRPAAEPQASLEEGERGGQEPLLPLREAGQH

SEQ ID NO: 97409 - protein, 83 aa, Homo sapiens
MKAETERSALDVKLKHARNQVDVEIKRRQRAEADCEKLERQIQLIREMLMCDTSGSIQLSEEQKSALAFLNRGQPSSSNAGNK

SEQ ID NO: 97410 - protein, 923 aa, Homo sapiens
MITSAAGIISLLDEDEPQLKEFALHKLNAVVNDFWAEISESVDKIEVLYEDEGFRSRQFAALVASKVFYHLGAFEESLNYALGAGDLFNVNDNSEYVETIIAKCIDHYTKQCVENADLPEGEKKPIDQRLEGIVNKMFQRCLDDHKYKQAIGIALETRRLDVFEKTILESNDVPGMLAYSLKLCMSLMQNKQFRNKVLRVLVKIYMNLEKPDFINVCQCLIFLDDPQAVSDILEKLVKEDNLLMAYQICFDLYESASQQFLSSVIQNLRTVGTPIASVPGSTNTGTVPGSEKDSDSMETEEKTSSAFVGKTPEASPEPKDQTLKMIKILSGEMAIELHLQFLIRNNNTDLMILKNTKDAVRNSVCHTATVIANSFMHCGTTSDQFLRDNLEWLARATNWAKFTATASLGVIHKGHEKEALQLMATYLPKDTSPGSAYQEGGGLYALGLIHANHGGDIIDYLLNQLKNASNDIVRHGGSLGLGLAAMGTARQDVYDLLKTNLYQDDAVTGEAAGLALGLVMLGSKNAQAIEDMVGYAQETQHEKILRGLAVGIALVMYGRMEEADALIESLCRDKDPILRRSGMYTVAMAYCGSGNNKAIRRLLHVAVSDVNDDVRRAAVESLGFILFRTPEQCPSVVSLLSESYNPHVRYGAAMALGICCAGTGNKEAINLLEPMTNDPVNYVRQGALIASALIMIQQTEITCPKVNQFRQLYSKVINDKHDDVMAKFGAILAQGILDAGGHNVTISLQSRTGHTHMPSVVGVLVFTQFWFWFPLSHFLSLAYTPTCVIGLNKDLKMPKVQYKSNCKPSTFAYPAPLEVPKEKEKEKVSTAVLSITAKAKKKEKEKEKKEEEKMEVDEAEKKEEKEKKKEPEPNFQLLDNPARVMPAQLKVLTMPETCRYQPFKPDLTCLSEEDCPGSYWECL

SEQ ID NO: 97411 - protein, 63 aa, Homo sapiens
MIEESGNKRKTMAEKRQLFIEMRAQNFDVIRLSTYRTACKLRFVQKRCNQKDNAKYVFRHNDG

SEQ ID NO: 97412 - protein, 188 aa, Homo sapiens
MCVRRSLVGLTFCTCYLASYLTNKYVLSVLKFTYPTLFQGWQTLIGGLLLHVSWKLGWVEINSSSRSHVLVWLPASVLFVGIIYAGSRALSRLAIPVFLTLHNVAEVIICGYQKCFQKEKTSPAKICSALLLLAAAGCLPFNDSQFNPDGYFWAIIHLLCVGAYKILQKSQKPSALSVVLLAFASHPT

SEQ ID NO: 97413 - protein, 651 aa, Homo sapiens
MQQRAGSKTAGPPCQWSRMASEGTNIPSPVVRQIDKQFLICSICLERYKNPKVLPCLHTFCERCLQNYIPAHSLTLSCPVCRQTSILPEKGVAALQNNFFITNLMDVLQRTPGSNAEESSILETVTAVAAGKPLSCPNHDGNVLQSQLDTLLQGQESIKSCSNFTAQALNHGTETEVLLVKKQMSEKLNELADQDFPLHPRENDQLDFIVETEGLKKSIHNLGTILTTNAVASETVATGEGLRQTIIGQPMSVTITTKDKDGELCKTGNAYLTAELSTPDGSVADGEILDNKNGTYEFLYTVQKEGDFTLSLRLYDQHIRGSPFKLKVIRSADVSPTTEGVKRRVKSPGSGHVKQKAVKRPASMYSTGKRKENPIEDDLIFRVGTKGRNKGEFTNLQGVAASTNGKILIADSNNQCVQIFSNDGQFKSRFGIRGRSPGQLQRPTGVAVHPSGDIIIADYDNKWVSIFSSDGKFKTKIGSGKLMGPKGVSVDRNGHIIVVDNKACCVFIFQPNGKIVTRFGSRGNGDRQFAGPHFAAVNSNNEIIITDFHNHSVKVFNQEGEFMLKFGSNGEGNGQFNAPTGVAVDSNGNIIVADWGNSRIQVFDGSGSFLSYINTSADPLYGPQGLALTSDGHVVVADSGNHCFKVYRYLQ

SEQ ID NO: 97414 - protein, 156 aa, Homo sapiens
MSSVQSQQEQLSQSDPSPSPNSCSSFELIDMDAGSLYEPVSPHWFYCKIIDSKETWIPFNSEDSQQLEEAYSSGKGCNGRVVPTDGGRYDVHLGERMRYAVYWDELASEVRRCTWFYKGDKDNKYVPYSESFSQVLEETYMLAVTLDEWKKKLESP

SEQ ID NO: 97415 - protein, 41 aa, Homo sapiens
MSRAMALFFVLCWIQVEMGFHHVGQAGHELLTSMDPPASAS

SEQ ID NO: 97416 - protein, 129 aa, Homo sapiens
MEPKASCPAAAPLMERKFHVLVGVTGSVAALKLPLLVSKLLDIPGTCVMRAWDRSKPLLFCPAMNTAMWEHPITAQQVDQLKAFGYVEIPCVAKKLVCGDEGLGAMAEVGTIVDKVKEVLFQHSGFQQS

SEQ ID NO: 97417 - protein, 70 aa, Homo sapiens
MCIRQLKFFTTACVCECPQNISFTLVARLEYNGTILAHCNLCLPGSSDSPASASRVAGITVNNNAIHFPA

SEQ ID NO: 97418 - protein, 1105 aa, Homo sapiens
AARAGNLDKVVEYLKGGIDINTCNQNGLNALHLAAKEGHVGLVQELLGRGSSVDSATKKGNTALHIASLAGQAEVVKVLVKEGANINAQSQNGFTPLYMAAQENHIDVVKYLLENGANQSTATEDGFTPLAVALQQGHNQAVAILLENDTKGKVRLPALHIAARKDDTKSAALLLQNDHNADVQSKSGFTPLHIAAHYGNVNVATLLLNRGAAVDFTARNGITPLHVASKRGNTNMVKLLLDRGGQIDAKTRDGLTPLHCAARSGHDQVVELLLERGAPLLARTKNGLSPLHMAAQGDHVECVKHLLQHKAPVDDVTLDYLTALHVAAHCGHYRVTKLLLDKRANPNARALSGLTPIHVAAFMGHLNIVLLLLQNGASPDVTNIRGETALHMAARAGQVEVVRCLLRNGALVDARAREEQTPLHIASRLGKTEIVQLLLQHMAHPDAATTNGYTPLHISAREGQVDVASVLLEAGAAHSLATKKGFTPLHVAAKYGSLDVAKLLLQRRAAADSAGKNGYTPLHIAAKKNQMQIASTLLNYGAETNIVTKQGVTPLHLASQEGHTDMVTLLLDKGANIHMSTKSGLTSLHLAAQEDKVNVADILTKHGADQDAHTKLGYTPLIVACHYGNVKMVNFLLKQGANVNAKTKNGYTPLHQAAQQGHTHIINVLLQHGAKPNATTANGNTALAIAKRLGYISVVDTLKVVTEEVTTTTTTITEKHKLNVPETMTEVLDVSDEEALKQFGDHFIDGEALSDSGDDTMTGDGGEYLRPEDLKELGDDSLPSSQFLDGMNYLRYSLEGGRSDSLRSFSSDRSHTLSHASYLRDSAVMDDSVVIPSHQVSTLAKEAERNSYRLSWGTENLDNVALSSSPIHSGRASPCLERDNSSFLVSFMVDARGGAMRGCRHNGLRIIIPPRKCTAPTRVTCRLVKRHRLATMPPMVEGEGLASRLIEVGPSGAQFLGPVIVEIPHFAALRGKERELVVLRSENGDSWKEHFCDYTEDELNEILNGMDEVLDSPEDLEKKRICRIITRDFPQYFAVVSRIKQDSNLIGPEGGVLSSTVVPQVQAVFPEGALTKRIRVGLQAQPMHSELVKKILGNKATFSPI

SEQ ID NO: 97419 - protein, 74 aa, Homo sapiens
ILLYIDFLYYLTPDGQRFRRACRLVHDFTDAVIQERRRTLPSQGVDDFLQAKAKSKTLDFIDVLLLSKVGLSGI

SEQ ID NO: 97420 - protein, 294 aa, Homo sapiens
ECEPIEAIAKFDYVGRTARELSFKKGASLLLYQRASDDWWEGRHNGIDGLIPHQYIVVQDTEDGVVERSSPKSEIEVISEPPEEKVTARAGASCPSGGHVADIYLANINNNLHLDNTKPVTTKQRKRPESGSIRKTFRSDSHGLSSSLTDSSSPGVGASCRPSSQPIMSQSLPKEGPDKCSISGHGSLNSISRHSSLKNRLDSPQIRKTATAGRSKSFNNHRPMDPEVIAQDIEATMNSALNELRELERQSSVKHTPDVVLDTLEPLKTSPVVAPTSEPSSPLHTQLLKDPEPA

SEQ ID NO: 97421 - protein, 1229 aa, Homo sapiens
DEVRSIIGSKGLDRSNSWVNTGGPKAAPWGSNPSPSAESTQAMDRSCNRMSSHTETSSFLQTLTGRLPTKKGKEDELEKLSLLLFHEELALQWVVCSGSVRESALQQAWFFFELMVKSMVHHLYFNDKLEAPRKSRFPERFMDDIAALVSTIASDIVSRFQKDTEMVERLNTSLAFFLNDLLSVMDRGFVFSLIKSCYKQVSSKLYSLPNPSVLVSLRLDFLRIICSHEHYVTLNLPCSLLTPPASPSPSVSSATSQSSGFSTNVQDQKIANMFELSVPFRQQHYLAGLVLTELAVILDPDAEGLFGLHKKVINMVHNLLSSHDSDPRYSDPQIKARVAMLYLPLIGIIMETVPQLYDFTETHNQRGRPICIATDDYESESGSMISQTVAMAIAGTSVPQLTRPGSFLLTSTSGRQHTTFSAESSRSLLICLLWVLKNADETVLQKWFTDLSVLQLNRLLDLLYLCVSCFEYKGKKVFERMNSLTFKKSKDMRAKLEEAILGSIGARQEMVRRSRGQLERSPSGSAFGSQENLRWRKDMTHWRQNTEKLDKSRAEIEHEALIDGNLATEANLIILDTLEIVVQTVSVTESKESILGGVLKVLLHSMACNQSAVYLQHCFATQRALVSKFPELLFEEETEQCADLCLRLLRHCSSSIGTIRSHASASLYLLMRQNFEIGNNFARVKMQVTMSLSSLVGTSQNFNEEFLRRSLKTILTYAEEDLELRETTFPDQVQDLVFNLHMILSDTVKMKEHQEDPEMLIDLMYRIAKGYQTSPDLRLTWLQNMAGKHSERSNHAEAAQCLVHSAALVAEYLSMLEDRKYLPVGCVTFQNISSNVLEESAVSDDVVSPDEEGICSGKYFTESGLVGLLEQAAASFSMAGMYEAVNEVYKVLIPIHEANRDAKKLSTIHGKLQEAFSKIVHQDGKRMFGTYFRVGFYGTKFGDLDEQEFVYKEPAITKLAEISHRLEGFYGERFGEDVVEVIKDSNPVDKCKLDPNKAYIQITYVEPYFDTYEMKDRITYFDKNYNLRRFMYCTPFTLDGRAHGELHEQFKRKTILTTSHAFPYIKTRVNVTHKEEIILTPIEVAIEDMQKKTQELAFATHQDPADPKMLQMVLQGSVGTTVNQGPLEVAQVFLSEIPSDPKLFRHHNKLRLCFKDFTKRCEDALRKNKSLIGPDQKEYQRELERNYHRLKEALQPLINRKIPQLYKAVLPVTCHRDSFSRMSLRKMDL

SEQ ID NO: 97422 - protein, 104 aa, Homo sapiens
MQRNKQVAMGRKKFNMDPKKGIQFLIENDLLKNTCEDIAQFLYKGEGLNKTAIGDYLGERDEFNIQVLHAFVELHEFTDLNLVQALRQFLWSFRLPGEAQKIDR

SEQ ID NO: 97423 - protein, 135 aa, Homo sapiens
MCCLERVTLSVQAYKTPSGSRMSAEASARPLRVGSRVEVIGKGHRGTVAYVGATLFATGKWVGVILDEAKGKNDGTVQGRKYFTCDEGHGIFVRQSQIQVFEDGADTTSPETPDSSASKVLKREGTDTTAKTSKL

SEQ ID NO: 97424 - protein, 523 aa, Homo sapiens
MAAMAVALRGLGGRFRWRTQAVAGGVRGAARGAAGQRDYDLLVVGGGSGGLACAKEAAQLGRKVAVVDYVEPSPQGTRWGLGGTCVNVGCIPKKLMHQAALLGGLIQDAPNYGWEVAQPVPHDWRKMAEAVQNHVKSLNWGHRVQLQDRKVKYFNIKASFVDEHTVCGVAKGGKEILLSADHIIIATGGRPRYPTHIEGALEYGITSDDIFWLKESPGKTLVVGASYVALECAGFLTGIGLDTTIMMRSIPLRGFDQQMSSMVIEHMASHGTRFLRGCAPSRVRRLPDGQLQVTWEDSTTGKEDTGTFDTVLWAIGRVPDTRSLNLEKAGVDTSPDTQKILVDSREATSVPHIYAIGDVVEGRPELTPIAIMAGRLLVQRLFGGSSDLMDYDNVPTTVFTPLEYGCVGLSEEEAVARHGQEHVEVYHAHYKPLEFTVAGRDASQCYVKMVCLREPPQLVLGLHFLGPNAGEVTQGFALGIKCGASYAQVMRTVGIHPTCSEEVVKLRISKRSGLDPTVTGCCG

SEQ ID NO: 97425 - protein, 99 aa, Homo sapiens
MIHPDPERRPSAMALVKHSVLLSASRKSAEQLRIELNAEKFKNSLLQKELKKAQMAKAAAEERALFTDRMATRSTTQNDPNFQCKFKGLWSKEKYLCMP

SEQ ID NO: 97426 - protein, 67 aa, Homo sapiens
LIGDGAGFKVAMGAFDKTRPVVAAGAVGLAQRALDEATKYALERKTFGKLLVEVLFPLHLPTSLKVS

SEQ ID NO: 97427 - protein, 1649 aa, Homo sapiens
MSTPDPPLGGTPRPGPSPGPGPSPGAMLGPSPGPSPGSAHSMMGPSPGPPSAGHPIPTQGPGGYPQDNMHQMHKPMESMHEKGMSDDPRYNQMKGMGMRSGGHAGMGPPPSPMDQHSQGYPSPLGGSEHASSPVPASGPSSGPQMSSGPGGAPLDGADPQALGQQNRGPTPFNQNQLHQLRAQIMAYKMLARGQPLPDHLQMAVQGKRPMPGMQQQMPTLPPPSVSATGPGPGPGPGPGPGPGPAPPNYSRPHGMGGPNMPPPGPSGVPPGMPGQPPGGPPKPWPEGPMANAAAPTSTPQKLIPPQPTGRPSPAPPAVPPAASPVMPPQTQSPGQPAQPAPMVPLHQKQSRITPIQKPRGLDPVEILQEREYRLQARIAHRIQELENLPGSLAGDLRTKATIELKALRLLNFQRQLRQEVVVCMRRDTALETALNAKAYKRSKRQSLREARITEKLEKQQKIEQERKRRQKHQEYLNSILQHAKDFKEYHRSVTGKIQKLTKAVATYHANTEREQKKENERIEKERMRRLMAEDEEGYRKLIDQKKDKRLAYLLQQTDEYVANLTELVRQHKAAQVAKEKKKKKKKKKAENAEGQTPAIGPDGEPLDETSQMSDLPVKVIHVESGKILTGTDAPKAGQLEAWLEMNPGYEVAPRSDSEESGSEEEEEEEEEEQPQAAQPPTLPVEEKKKIPDPDSDDVSEVDARHIIENAKQDVDDEYGVSQALARGLQSYYAVAHAVTERVDKQSALMVNGVLKQYQIKGLEWLVSLYNNNLNGILADEMGLGKTIQTIALITYLMEHKRINGPFLIIVPLSTLSNWAYEFDKWAPSVVKVSYKGSPAARRAFVPQLRSGKFNVLLTTYEYIIKDKHILAKIRWKYMIVDEGHRMKNHHCKLTQVLNTHYVAPRRLLLTGTPLQNKLPELWALLNFLLPTIFKSCSTFEQWFNAPFAMTGEKVDLNEEETILIIRRLHKVLRPFLLRRLKKEVEAQLPEKVEYVIKCDMSALQRVLYRHMQAKGVLLTDGSEKDKKGKGGTKTLMNTIMQLRKICNHPYMFQHIEESFSEHLGFTGGIVQGLDLYRASGKFELLDRILPKLRATNHKVLLFCQMTSLMTIMEDYFAYRGFKYLRLDGTTKAEDRGMLLKTFNEPGSEYFIFLLSTRAGGLGLNLQSADTVIIFDSDWNPHQDLQAQDRAHRIGQQNEVRVLRLCTVNSVEEKILAAAKYKLNVDQKVIQAGMFDQKSSSHERRAFLQAILEHEEQDEEEDEVPDDETVNQMIARHEEEFDLFMRMDLDRRREEARNPKRKPRLMEEDELPSWIIKDDAEVERLTCEEEEEKMFGRGSRHRKEVDYSDSLTEKQWLKKITGKDIHDTASSVARGLQFQRGLQFCTRASKTLKAIEEGTLEEIEEEVRQKKSSRKRKRDSDAGSSTPTTSTRSRDKDDESKKQKKRGRPPAEKLSPNPPNLTKKMKKIVDAVIKYKDSSSGRQLSEVFIQLPSRKELPEYYELIRKPVDFKKIKERIRNHKYRSLNDLEKDVMLLCQNAQTFNLEGSLIYEDSIVLQSVFTSVRQKIEKEDDSEGEESEEEEEGEEEGSESESRSVKVKIKLGRKEKAQDRLKGGRRRPSRGSRAKPVVSDDDSEEEQEEDRSGSGSEED

SEQ ID NO: 97428 - protein, 194 aa, Homo sapiens
  MOD_RES (1)..(1): Any amino acid
XIYPNASLLIQNIIQNDTGFYTLHVIKSDLVNEEATGQFRVYPELPKPSISSNNSKPVEDKDAVAFTCEPETQDATYLWWVNNQSLPVSPRLQLSNGNRTLTLFNVTRNDTASYKCETQNPVSARRSDSVILNVLSEPPKPFITSNNSNPVEDEDAVALTCEPEIQNTTYLWWVNNQSLPVSPRLQLSNDNRTL

SEQ ID NO: 97429 - protein, 1142 aa, Homo sapiens
MDALIIPVTMEVPCDSRGQRMWWAFLASSMVTFFGGLFIILLWRTLKYLWTVCCHCGGKTKEAQKINNGSSQADGTLKPVDEKEEAVAAEVGWMTSVKDWAGVMISAQTLTGRVLVVLVFALSIGALVIYFIDSSNPIESCQNFYKDFTLQIDMAFNVFFLLYFGLRFIAANDKLWFWLEVNSVVDFFTVPPVFVSVYLNRSWLGLRFLRALRLIQFSEILQFLNILKTSNSIKLVNLLSIFISTWLTAAGFIHLVENSGDPWENFQNNQALTYWECVYLLMVTMSTVGYGDVYAKTTLGRLFMVFFILGGLAMFASYVPEIIELIGNRKKYGGSYSAVSGRKHIVVCGHITLESVSNFLKDFLHKDRDDVNVEIVFLHNISPNLELEALFKRHFTQVEFYQGSVLNPHDLARVKIESADACLILANKYCADPDAEDASNIMRVISIKNYHPKIRIITQMLQYHNKAHLLNIPSWNWKEGDDAICLAELKLGFIAQSCLAQGLSTMLANLFSMRSFIKIEEDTWQKYYLEGVSNEMYTEYLSSAFVGLSFPTVCELCFVKLKLLMIAIEYKSANRESRILINPGNHLKIQEGTLGFFIASDAKEVKRAFFYCKACHDDITDPKRIKKCGCKRLKVAARSRYSKDPFEFKKETPNSRLVTEPVEDEQPSTLSPKKKQRNGGMRNSPNTSPKLMRHDPLLIPGNDQIDNMDSNVKKYDSTGMFHWCAPKEIEKVILTRSEAAMTVLSGHVVVCIFGDVSSALIGLRNLVMPLRASNFHYHELKHIVFVGSIEYLKREWETLHNFPKVSILPGTPLSRADLRAVNINLCDMCVILSANQNNIDDTSLQDKECILASLNIKSMQFDDSIGVLQANSQGFTPPGMDRSSPDNSPVHGMLRQPSITTGVNIPIITELVNDTNVQFLDQDDDDDPDTELYLTQPFACGTAFAVSVLDSLMSATYFNDNILTLIRTLVTGGATPELEALIAEENALRGGYSTPQTLANRDRCRVAQLALLDGPFADLGDGGCYGDLFCKALKTYNMLCFGIYRLRDAHLSTPSQCTKRYVITNPPYEFELVPTDLIFCLMQFDHNAGQSRASLSHSSHSSQSSSKKSSSVHSIPSTANRQNRPKSRESRDKQNRKEMVYR

SEQ ID NO: 97430 - protein, 276 aa, Homo sapiens
MGGDRLENKTSVSVASWSSLNARMDNRFATAFVIACVLSLISTIYMAASIGTDFWYEYRSPVQENSSDLNKSIWDEFISDEADEKTYNDALFRYNGTVGLWRRCITIPKNMHWYSPPERTESFDVVTKCVSFTLTEQFMEKFVDPGNHNSGIDLLRTYLWRCQFLLPFVSLGLMCFGALIGLCACICRSLYPTIATGILHLLAGLCTLGSVSCYVAGIELLHQKLELPDNVSGEFGWSFCLACVSAPLQFMASALFIWAAHTNRKEYTLMKAYRVA

SEQ ID NO: 97431 - protein, 370 aa, Homo sapiens
MNGEEEFFDAVTGFDSDNSSGEFSEANQKVTGMIDLDTSKNNRIGKTGERPSQENGIQKHRTSLPAPMFSRSDFSVWTILKKCVGLELSKITMPIAFNEPLSFLQRITEYMEHVYLIHRASCQPQPLERMQSVAAFAVSAVASQWERTGKPFNPLLGETYELIREDLGFRFISEQVSHHPPISAFHSEGLNHDFLFHGSIYPKLKFWGKSVEAEPRGTITLELLKHNEAYTWTNPTCCVHNVIIGKLWIEQYGTVEILNHRTGHKCVLHFKPCGLFGKELHKVEGHIQDKNKKKLFMIYGKWTECLWGIDPVSYESFKKQERRGDHLRKAKLGVESLKPPHRSHFLMGAKLRYLESSQSQNLPSGEAPCV

SEQ ID NO: 97432 - protein, 61 aa, Homo sapiens
MSISSDEVNFLVYRYLQESGFSHSAFTFGIESHISQSNINGALVPPAALISIIQKGLQYVE

SEQ ID NO: 97433 - protein, 173 aa, Homo sapiens
GSGRGARSGEWGLAAAGAWETMHHCKRYRSPEPDPYLSYRWKRRRSYSREHEGRLRYPSRREPPPRRSRSRSHDRLPYQRRYRERRDSDTYRCEERSPSFGEDYYGPSRSRHRRRSRERGPYRTRKHAHHCHKRRTRSCSSASSMRLWGTWVKAPLARWWSAWTMPEGSLRLP

SEQ ID NO: 97434 - protein, 237 aa, Homo sapiens
MERNDIINFKALEKELQAALTADEKYKRENAAKLRAVEQRVASYEEFRGIVLASHLKPLERKDKMGGKRTVPWNCHTIQGRTFQDVATEISPEKAPLQPETSADFYRDWRRHLPSGPERYQALLQLGGPRLGCLFQTDVGFGLLGELLVALADHVGPADRAAVLGILCSLASTGRFTLNLSLLSRAERESCKGLFQKLQAMGNPRSVKEGLSWEEQGLEEQSGGLQEEERLLQELLE

SEQ ID NO: 97435 - protein, 310 aa, Homo sapiens
  MOD_RES (1)..(1): Any amino acid
XGQVAEGGVLDASAKKTVVPKAQKETVKAEVKKEDEPPEQAEPEPTEAWKVEKTHIEVTVPTSNGDQTQDLDKSQEEIKKHHASISELKKNFMESVPEPRPSEWDKRLSTHSPFRTLNINGQIPTGEGSINGIRTEEVAVVTKGPSTNPDSEWEGPKHSVVPSKSQMTTSSESLQSFAFGSLSISSKETEEKEEGAAGYLDIKEMPRGPTGGCIGVEEQASALKFSVTPASCQLQPGVKKAESSEEHVTPGEPPGKQNGSFLDFHVGNQFPTLIRSFQPPLVKTQTVTISDNANAVKSEIPTKDVPIVHT

SEQ ID NO: 97436 - protein, 302 aa, Homo sapiens
MQDAENVAVPEAAEERAEPGQQQPAAEPPPAEGLLRPAGPGAPEAAGTEASSEEVGIAEAGPESEGEAPGEQARDERSDSRAQAVSEDAGGNEGRAAEAEPRALENGDADEPSFSDPEDFVDDVSEEELLGDVLKDRPQEADGIDSVIVVDNVPQVGPDRLEKLKNVIHKIFSKFGKITNDFYPEEDGKTKGYIFLEYASPAHAVDAVKNADGYKLDKQHTFRVNLFTDFDKYMTISDEWDIPEKQPFKDLGNLRYWLEEAECRDQYSVIFESGDRTSIFWNDVKDPVSIEERARWTETYVR

SEQ ID NO: 97437 - protein, 257 aa, Homo sapiens
MFANLKYVSLGILVFQTTSLVLTMRYSRTLKEEGPRYLSSTAVVVAELLKIMACILLVYKDSKCSLRALNRVLHDEILNKPMETLKLAIPSGIYTLQNNLLYVALSNLDAATYQVTYQLKILTTALFSVSMLSKKLGVYQWLSLVILMTGVAFVQWPSDSQLDSKELSAGSQFVGLMAVLTACFSSGFAGVYFEKILKETKQSVWIRNIQLGFFGSIFGLMGVYIYDGELVSKNGFFQGYNRLTWIVVVLQVKHLKS

SEQ ID NO: 97438 - protein, 185 aa, Homo sapiens
  MOD_RES (1)..(1): Any amino acid
XLREGEDLSKKNPIAKIHSDLAEERGLKITYKYTGKGITEPPFGIFVFNKDTGELNVTSILDREETPFFLLTGYALDARGNNVEKPLELRIKVLDINDNEPVFTQDVFVGSVEELSAAHTLVMKINATDADEPNTLNSKISYRIVSLEPAYPPVFYLNKDTGEIYTTSVTLDREGCAVQYGPCDY

SEQ ID NO: 97439 - protein, 448 aa, Homo sapiens
MDRMKKIKRQLSMTLRSAPEIVHEDLKMGSDGESDQASATSSDEVQSPVRVRMRNHPPRKISTEDINKRLSLPADIRLPEGYLEKLTLNSPIFDKPLSRRLRRVSLSEIGFGKLETYIKLDKLGEGTYATVYKGKSKLTDNLVALKEIRLEHEEGAPCTAIREVSLLKDLKHANIVTLHDIIHTEKSLTLVFEYLDKDLKQYLDDCGNIINMHNVKLFLFQLLRGLAYCHRQKVLHRDLKPQNLLINERGELKLADFGLARAKSIPTKTYSNEVVTLWYRPPDILLGSTDYSTQIDMWGVGCIFYEMATGRPLFPGSTVEEQLHFIFRILGTPTEETWPGILSNEEFKTYNYPKYRAEALLSHAPRLDSDGADLLTKLLQFEGRNRISAEDAMKHPFFLSLGERIHKLPDTTSIFALKEIQLQKEASLRSSSMPDSGRPAFRVVDTEF

SEQ ID NO: 97440 - protein, 204 aa, Homo sapiens
MDGPGYGDEEEPLHTILGKTVYTGIDHHWKEAVFATCGQQVDIWDEQRTNPICSMTWGFDSISSVKFNPIETFLLGSCASDRNIVLYDMRQATPLKKVILDMRTNTICWNPMEAFIFTAANEDYNLYTFDMRALDTPVMVHMDHVSAVLDVDYSPTGKEFVSASFDKSIRIFPVDKSRSREVYHTKRMQHVICVKWTSDSKYIM

SEQ ID NO: 97441 - protein, 152 aa, Homo sapiens
MKMVAPWTRFYSNSCCLCCHVRTGTILLGVWYLIINAVVLLILLSALADPDQYNFSSSELGGDFEFMDDAKILFNLSADMCIAIAISLLMILICAMATYGAYKQRAAWIIPFFCYQIFDFALNMLVAITVLIYPNSIQEYIRQLPPNFPYRD

SEQ ID NO: 97442 - protein, 103 aa, Homo sapiens
MQLTVKALQGRECSLQVPEDELVSTLKQLVSEKLNVPVRQQRLLFKGKALAAGCRSAPLPPPEAASRPGPPPRRWRRRNPSICLWQMGNDSRIIASGPTPSST

SEQ ID NO: 97443 - protein, 791 aa, Homo sapiens
MDASSDPYLPYDGGGDSIPLRELHKRGTHYTMTNGGSINSSTHLLDLLDEPIPGVGTYDDFHTIDWVREKCKDRERHRRINSKKKESAWEMTKSLYDAWSGWLVVTLTGLASGALAGLIDIAADWMTDLKEGICLSALWYNHEQCCWGSNETTFEERDKCPQWKTWAELIIGQAEGPGSYIMNYIMYIFWALSFAFLAVSLVKVFAPYACGSGIPEIKTILSGFIIRGYLGKWTLMIKTITLVLAVASGLSLGKEGPLVHVACCCGNIFSYLFPKYSTNEAKKREVLSAASAAGVSVAFGAPIGGVLFSLEEVSYYFPLKTLWRSFFAALVAAFVLRSINPFGNSRLVLFYVEYHTPWYLFELFPFILLGVFGGLWGAFFIRANIAWCRRRKSTKFGKYPVLEVIIVAAITAVIAFPNPYTRLNTSELIKELFTDCGPLESSSLCDYRNDMNASKIVDDIPDRPAGIGVYSAIWQLCLALIFKIIMTVFTFGIKVPSGLFIPSMAIGAIAGRIVGIAVEQLAYYHHDWFIFKEWCEVGADCITPGLYAMVGAAACLGGVTRMTVSLVVIVFELTGGLEYIVPLMAAVMTSKWVGDAFGREGIYEAHIRLNGYPFLDAKEEFTHTTLAADVMRPRRNDPPLAVLTQDNMTVDDIENMINETSYNGFPVIMSKESQRLVGFALRRDLTIAIESARKKQEGIVGSSRVCFAQHTPSLPAESPRPLKLRSILDMSPFTVTDHTPMEIVVDIFRKLGLRQCLVTHNGRLLGIITKKDILRHMAQTANQDPASIMFN

SEQ ID NO: 97444 - protein, 127 aa, Homo sapiens
  MOD_RES (1)..(1): Any amino acid
XKQELCCVSLVAVYPLLSILDVSSMGSAEGITRKHLWRLFSLDLLNSYLERDPTPCELTYKVPTRHSMSQIPPVLTPLRLDFNFGAAPFKAPPSVVFLALKNSGVVSLDWYGLKGATGGPGRQVPRG

SEQ ID NO: 97445 - protein, 124 aa, Homo sapiens
KVQKQEEDVNVRKRPRMDIETNDTFSDEAVPESSKISQENEIGKKRELKEDSLWSAKEISVTYPGAGKLPHIIGGSDLIAHHARKNTELEEWLRQEMEVQNQHAKEESLADDLFRYNPYLKRRR

SEQ ID NO: 97446 - protein, 187 aa, Homo sapiens
MGCCTGRCSLICLCALQLVSALERQIFDFLGFQWAPILGNFLHIIVVILGLFGTIQYRPRYIMVYTVWTALWVTWNVFIICFYLEVGGLSKDTDLMTFNISVHRSWWREHGPGCVRRVLPPSAHGMMDDYTYVSVTGCIVDFQYLEVIHSAVQILLSLVGFVYACYVISISMEEEDTCLFCQDDAPS

SEQ ID NO: 97447 - protein, 56 aa, Homo sapiens
MSLTKTERTIIVSMWAKISTQADTIGTETLERLFLSHPQTKTYFPHFDLHPGSAQL

SEQ ID NO: 97448 - protein, 90 aa, Homo sapiens
  MOD_RES (1)..(1): Any amino acid
XDACKQDFCKDHFPYAAHKCPFAFQKDVHVPVCPLCNTPIPVKKGQIPDVVVGDHIDRDCDSHPGKKKEKHRHPLDHSCRHGSRPTIKAG

SEQ ID NO: 97449 - protein, 53 aa, Homo sapiens
  MOD_RES (1)..(1): Any amino acid
XKSQMDLRKLLRKVDVERSPGGTPLTNKENMETGTGLTPVMTQALRRKFQVTL

SEQ ID NO: 97450 - protein, 172 aa, Homo sapiens
MKVKVIPVLEDNYMYLVIEELTREAVAVDVAVPKRLLEIVGREGVSLTAVLTTHHHWDHARGNPELARLRPGLAVLGADERIFSLTRRLAHGEELRFGAIHVRCLLTPGHTAGHMSYFLWEDDCPDPPALFSGDALSVAGCGSCLEGSAQQMYQSLAELGTLPPETVSGPGP

SEQ ID NO: 97451 - protein, 120 aa, Homo sapiens
MNEKSCSFHSKEELRDGQGERLSAGYSPSYDKDKSVLAFRGIPISELKNHGILQALTTEAYEWEPRVVSTEVVRAQEEWEAVDTIQPETGSQASSEQPGQLISFSEALQHFQTVDLSPFK

SEQ ID NO: 97452 - protein, 395 aa, Homo sapiens
MPRVKAAQAGRQSSAKRHLAEQFAVGEIITDMAKKEWKVGLPIGQGGFGCIYLADMNSSESVGSDAPCVVKVEPSDNGPLFTELKFYQRAAKPEQIQKWIRTRKLKYLGVPKYWGSGLHDKNGKSYRFMIMDRFGSDLQKIYEANAKRFSRKTVLQLSLRILDILEYIHEHEYVHGDIKASNLLLNYKNPDQVYLVDYGLAYRYCPEGVHKEYKEDPKRCHDGTIEFTSIDAHNGVAPSRRGDLEILGYCMIQWLTGHLPWEDNLKDPKYVRDSKIRYRENIASLMDKCFPEKNKPGEIAKYMETVKLLDYTEKPLYENLRDILLQGLKAIGSKDDGKLDLSVVENGGLKAKTITKKRKKEIEESKEPGVEDTEWSNTQTEEAIQTHLEPETLND

SEQ ID NO: 97453 - protein, 280 aa, Homo sapiens
MAPAKATNVVRLLLGSTALWLSQLGSGTVAASKSVTAHLAAKWPETPLLLEASEFMAEESNEKFWQFLETVQELAIYKQTESDYSYYNLILKKAGQFLDNLHINLLKFAFSIRAYSPAIQMFQQIAADEPPPDGCNAFVVIHKKHTCKINEIKKLLKKAASRTRPYLFKGDHKFPTNKENLPVVILYAEMGTRTFSAFHKVLSEKAQNEEILYVLRHYIQKPSSRKMYLSGYGVELAIKSTEYKALDDTQVKTVTNTTVEDETETNEVQGFLFGKLKLVY

SEQ ID NO: 97454 - protein, 182 aa, Homo sapiens; identical to SEQ ID NO: 49899

SEQ ID NO: 97455 - protein, 195 aa, Homo sapiens
MQNNESSLIEQAPIPQDGLTVAPHRAQREAVHIEKIMLKGVQRKRADKYWEYTFKVNWSDLSVTTVTKTHQELQEFLLKLPKELSSETFDKTILRALNQGSLKREERRHPDLEPILRQLFSSSSQAFLQSQKVHSFFQSISSDSLHSINNLQSSLKTSKILEHLKEDSSEASSQEEDVLQHAIIHKKHTGKSPIV

SEQ ID NO: 97456 - protein, 200 aa, Homo sapiens
MVSKSDQLLIVVSILEGRHFPKRPKHMLVVEAKFDGEQLATDPVDHTDQPEFATELAWEIDRKALHQHRLQRTPIKLQCFALDPVTSAKETIGYIVLDLRTAQETKQAPKWYQLLSNKYTKFKSEIQISIALETDTKPPVDSFKAKGAPPRDGKGTARCSKLILCLLCLSSGFSHFSKEPCFLSYLPSWLDLTPGTLWLC

SEQ ID NO: 97457 - protein, 375 aa, Homo sapiens
MAAVGSGGYARNDAGEKLPSVMAGVPARRGQSSPPPAPPICLRRRTRLSTASEETVQNRVSLEKVLGITAQNSSGLTCDPGTGHVAYLAGMWRMGPASESCGEDSIAPSLSRTVPGMYCVVVILDPKENKQQHIFNTARKSLSALAFSPDGKYIVTGENGHRPAVRIWDVEEKNQVAEMLGHKYGVACVAFSPNMKHIVSMGYQHDMVLNVWDWKKDIVVASNKVSCRVIALSFSEDSSYFVTVGNRHVRFWFLEVSTETKVTSTVPLVGRSGILGELHNNIFCGVACGRGRMAGSTFCVSYSGLLCQFNEKRVLEKWINLKVSLSSCLCVSQELIFCGCTDGIVRIFQAHSLHYLANLPKPHYLGVDVAQGLEP

SEQ ID NO: 97458 - protein, 144 aa, Homo sapiens
  MOD_RES (1)..(1): Any amino acid
XKGDKIKTQEFPQILTLIGRNPVGYPLAWQFLRKNWNKLVQKFELGSSSIAHMVMGTTNQFSTRTRLEEVKGFFSSLKENGSQLRCVQQTIETIEENIGWMDKNFDKIRVWLQSEKLERVALQRKPKCWVPCHRRIKYLILLIL

SEQ ID NO: 97459 - protein, 87 aa, Homo sapiens
MVISESMDILFRIRGGLDLAFQLATPNEIFLKKALKHVLSDLSTKLSSNALVFRICHSSVYIWPSSDINTIPGELTDASAYLSQKKI

SEQ ID NO: 97460 - protein, 33 aa, Homo sapiens
PVPAPSASAVPRAARRCSACGKTFRYRSNLLEH

SEQ ID NO: 97461 - protein, 135 aa, Homo sapiens
  MOD_RES (1)..(1): Any amino acid
XFKYIIIGDTGVGKSCLLLQFTDKRFQPVHDLTIGVEFGARMITIDGKQIKLQIWDTGKSKKKHTLPLVSVHWQKKGRGRARILSFHHKVVLQRCSRSFTSLRYYTERYIQPLDNLVRRCPPAFQFQHGHYAYWK

SEQ ID NO: 97462 - protein, 1875 aa, Homo sapiens
MEMEANDHFNFTGLPPAPAASGLKPSPSSGEGLYTNGSPMNFPQQGKSLNGDVNVNGLSTVSHTTTSGILNSAPHSSSTSHLHHPSVAYDCLWNYSQYPSANPGSNLKDPPLLSQFSGGQYPLNGILGGSRQPSSPSHNTNLRAGSQEFWANGTQSPMGLNFDSQELYDSFPDQNFEEVGSGIHPDEAAEKEMTSVVAENGTGLVGSLELEEEQPELKMCGYNGSVPSVESLHQEVSVLVPDPTVSCLDDPSHLPDQLEDTPILSEDSLEPFNSLAPEPVSGGLYGIDDTELMGAEDKLPLEDSPVISALDCPSLNNATAFSLLADDSQTSTSIFASPTSPPVLGESVLQDNSFDLNNGSDAEQEEMETQSSDFPPSLTQPAPDQSSTIQLHPATSPAVSPTTSPAVSLVVSPAASPEISPEVCPAASTVVSPAVFSVVSPASSAVLPAVSLEVPLTASVTSPKASPVTSPAAAFPTASPANKDVSSFLETTADVEEITGEGLTASGSGDVMRRRIATPEEVRLPLQHGWRREVRIKKGSHRWQGETWYYGPCGKRMKQFPEVIKYLSRNVVHSVRREHFSFSPRMPVGDFFEERDTPEGLQWVQLSAEEIPSRIQAITGKRGRPRNTEKAKTKEVPKVKRGRGRPPKVKITELLNKTDNRPLKKLEAQETLNEEDKAKIAKSKKKMRQKVQRGECQTTIQGQARNKRKQETKSLKQKEAKKKSKAEKEKGKTKQEKLKEKVKREKKEKVKMKEKEEVTKAKPACKADKTLATQRRLEERQRQQMILEEMKKPTEDMCLTDHQPLPDFSRVPGLTLPSGAFSDCLTIVEFLHSFGKVLGFDPAKDVPSLGVLQEGLLCQGDSLGEVQDLLVRLLKAALHDPGFPSYCQSLKILGEKVSEIPLTRDNVSEILRCFLMAYGVEPALCDRLRTQPFQAQPPQQKAAVLAFLVHELNGSTLIINEIDKTLESMSSYRKNKWIVEGRLRRLKTVLAKRTGRSEVEMEGPEECLGRRRSSRIMEETSGMEEEEEEESIAAVPGRRGRRDGEVDATASSIPELERQIEKLSKRQLFFRKKLLHSSQMLRAVSLGQDRYRRRYWVLPYLAGIFVEGTEGNLVPEEVIKKETDSLKVAAHASLNPALFSMKMELAGSNTTASSPARARGRPRKTKPGSMQPRHLKSPVRGQDSEQPQAQLQPEAQLHAPAQPQPQLQLQLQSHKGFLEQEGSPLSLGQSQHDLSQSAFLSWLSQTQSHSSLLSSSVLTPDSSPGKLDPAPSQPPEEPEPDEAESSPDPQALWFNISAQMPCNAAPTPPPAVSEDQPTPSPQQLASSKPMNRPSAANPCSPVQFSSTPLAGLAPKRRAGDPGEMPQSPTGLGQPKRRGRPPSKFFKQMEQRYLTQLTAQPVPPEMCSGWWWIRDPEMLDAMLKALHPRGIREKALHKHLNKHRDFLQEVCLRPSADPIFEPRQLPAFQEGIMSWSPKEKTYETDLAVLQWVEELEQRVIMSDLQIRGWTCPSPDSTREDLAYCEHLSDSQEDITWRGRGREGLAPQRKTTNPLDLAVMRLAALEQNVERRYLREPLWPTHEVVLEKALLSTPNGAPEGTTTEISYEITPRIRVWRQTLERCRSAAQVCLCLGQLERSIAWEKSVNKVTCLVCRKGDNDEFLLLCDGCDRGCHIYCHRPKMEAVPEGDWFCTVCLAQQVEGEFTQKPGFPKRGQKRKSGYSLNFSEGDGRRRRVLLRGRESPAAGPRYSEEGLSPSKRRRLSMRNHHSDLTFCEIILMEMESHDAAWPFLEPVNPRLVSGYRRIIKNPMDFSTMRERLLRGGYTSSEEFAADALLVFDNCQTFNEDDSEVGKAGHIMRRFFESRWEEFYQGKQANL

SEQ ID NO: 97463 - protein, 36 aa, Homo sapiens
MRKGVLKDPEIADLFYKDDPEELFIGLHEIGHGSFG

SEQ ID NO: 97464 - protein, 308 aa, Homo sapiens
MRFMRSHKCYDIVPTSSKLVVFDTTLQVKKAFFALVANGVRAAPLWESKKQSFVGMLTITDFINILHRYYKSPMVQIYELEEHKIETWRELYLQETFKPLVNISPDASLFDAVYSLIKNKIHRLPVIDPISGNALYILTHKRILKFLQLFMSDMPKPAFMKQNLDELGIGTYHNIAFIHPDTPIIKALNIFVERRISALPVVDESGKVVDIYSKFDVINLAAEKTYNNLDITVTQALQHRSQYFEGVVKCNKLEILETIVDRIVRAEVHRLVVVNEADSIVGIISLSDILQALILTPAGAKQKETETE

SEQ ID NO: 97465 - protein, 186 aa, Homo sapiens
  MOD_RES (1)..(1): Any amino acid
XSLFWENSHLLVNSFADNTRRFMPLSDVLYGRVADFLSWCRQKNDSGLDYQSCPTSEDCENNPVDSFWKRASIQYSKDSSGVIHVMLNGSEPTGAYPIKGFFADYEIPNLQKEKITRIEIWVMHEIGGPNVESCGEGSMKVLEKRLKDMGFQYSCINDYRPVKLLQCVDHSTHPDCALKSDGVSPC

SEQ ID NO: 97466 - protein, 220 aa, Homo sapiens
MKTILSNQTVDIPENGMRLDVFYLHLYCTFQALCGLTSVFSLLVDITLKGRTVIVKGPRGTLRRDFNHINVELSLLGKKKKRLRVDKWWGNRKELATVRTICSHVQNMIKGVTLGFRYKMRSVYAHFPINVVIQENGSLVEIRNFLGEKYIRRVRMRPGVACSVSQAQKDELILEGNDIELVSNSAALIQQATTVKNKDIRKFLDGIYVSEKGTVQQADE

SEQ ID NO: 97467 - protein, 106 aa, Homo sapiens; identical to SEQ ID NO: 43169

SEQ ID NO: 97468 - protein, 97 aa, Homo sapiens
  MOD_RES (1)..(1): Any amino acid
XTSGAGPKSWQVPPPAPEVQIRTPRVNCPEKVIICLDLSEEMSLPKLESFNGSKTNALNVSQKMIEMFVRTKHKIDKSHCLNHPCTSAPSCARKSLA

SEQ ID NO: 97469 - protein, 128 aa, Homo sapiens
MGNLEITSIEHNRDLSFLRSVREVTGYVLVALNQFRYLPLENLRIIRGTKLYEDRYALAIFLNYRKDGNFGLQELGLKNLTEILNGGVYVDQNKFLCYADTIHWQDIVRNPWPSNLTLVSTNGSSGCG

SEQ ID NO: 97470 - protein, 190 aa, Homo sapiens
MSDWFNFHGHMCIAFELLGKNTFEFLKENNFQPYPLPHVRHMAYQLCHALRFLHENQLTHTDLKPENILFVNSEFETLYNEHKSCEEKSVKNTSIRVADFGSATFDHEHHTTIVATRHYRPPEVILELGWAQPCDVWSIGCILFEYYRGFTLFQTHENREHLVMMEKILGPIPSHMIHRTRKQKYFYKGG

SEQ ID NO: 97471 - protein, 118 aa, Homo sapiens
MSRRRKHDDSPSPKKTPHKTVAAEECGSVVEPGRRRLRSARGSWPCGAREGPPGPVRQREQPPTAALCSKSNPEERYETPKRALKMDSLSSSFSSPNDPDGQNDIFWDQNSPLTKQLG

SEQ ID NO: 97472 - protein, 149 aa, Homo sapiens
MHTLKVPFVSPASALSLSSSTSTWPEGLDATARAPPALVVTANIGQAGGSSSRQFRQRALGTSDSPVLFIHCPGAAGTAQGLEYRGRRVTTELVWEEVDSSPQPQGSESLPAQPPAQPAPQPEPQQAREPSPEVSCCGLWPRRPQRSQN

SEQ ID NO: 97473 - protein, 546 aa, Homo sapiens
IPREELDERIAREEFRRPRESLLNICTEFYKHCGPRLKILQNLAGEPRVIALELLDVKSHMRLAEIAHSLLKLAPYDTQTMESRGLRRYIMEMLPITDWTAEAVRPALILILKRLDRMFNKIHKMPTLRRQVEWEPASNLIEGVCLTLQRQPIISFLPHLRSLINVCVNLVMGVVGPSSVADGLPLLHLSPYLSPPLPFSTAVVRLVALQIQALKEDFPLSHVISPFTNQERREGMLLNLLIPFVLTVGSGSKDSPWLEQPEVQLLLQTVINVLLPPRIISTSRSKNFMLESSPAHCSTPGDAGKDLRREGLAESTSQAAYLALKVILVCFERQLGSQWYWLSLQVKEMALRKVGGLALWDFLDFIVRTRIPIFVLLRPFIQCKLLAQPAENHEELSARQHIADQLERRFIPRPLCKSSLIAEFNSELKILKEAVHSGSAYQGKTSISTVGTSTSAYRLSLATMSRSNTGTGTVWEQDSEPSQQASQDTLSRTDEEDEENDSISMPSVVSEQEAYLLSAIGRRRFSSHVSSMSVPQAEVGMLPSQR

SEQ ID NO: 97474 - protein, 271 aa, Homo sapiens
  MOD_RES (1)..(1): Any amino acid
XCGAIGCEMLKNFALLGVGTSKEKGMITVTDPDLIEKSNLNRQFLFRPHHIQKPKSYTAADATLKINSQIKIDAHLNKVCPTTETIYNDEFYTKQDVIITALDNVEARRYVDSRCLANLRPLLDSGTMGTKGHTEVIVPHLTESYNSHRDPPEEEIPFCTLKSFPAAIEHTIQWARDKFESSFSHKPSLFNKFWQTYSSAEEVLQALQLLHCFPLDIRLKDGSLFWQSPKRPPSPIKFDLNEPLHLSFLQNAAKLYATVYCIPFAEEVRYS

SEQ ID NO: 97475 - protein, 84 aa, Homo sapiens
MPAICQGRQEVTVQAQCARPLHLSAAAMEYVLEVKNSPRHLLKQFTVCDVPLYDICDYNVSRDRCQELGCCFYEGVCYKKAVPI

SEQ ID NO: 97476 - protein, 120 aa, Homo sapiens
MNPPGSLEALDPNVDEHLSTQILAPSVHSDNSQERIQARRLRIAARLEARRREALGEYLDGKKESEEDQSKSYKQKEESRLKLAKLLLCGTELVTNIQVAIDIREIHRRVEEEEIKRQRS

SEQ ID NO: 97477 - protein, 396 aa, Homo sapiens
MMNSSNIQVKQRGPYTYRVRFLAKENVTQDAEDNTVSFLQPNGAIFEPSLSVGTEADNFTVLNLAVAAASHIYQNQFVQMILNSLINKSKSSMFQVRTLRELLWGYRDPFLSLVPYPVTTTVGLFYPYNNTADGVYKVFNGKDNISKVAIIDTYKGKRNLSYWESHCDMINGTDAASFPPFVEKSQVLQFFSSDICRSIYAVFESDVNLKGIPVYRFVLPSKAFASPVENPDNYCFCTEKIISKNCTSYGVLDISKCKEGRPVYISLPHFLYASPDVSEPIDGLNPNEEEHRTYLDIEPITGFTLQFAKRLQVNLLVKPSEKIQVLKNLKRNYIVPILWLNETGTIGDEKANMFRSQVTGKINLLGLIEMILLSVGVVMFVAFMISYCACRSKTIK

SEQ ID NO: 97478 - protein, 109 aa, Homo sapiens
MTRSCSAVGCSTRDTVLSRERGLSFHQFPTDTIQRSKWIRAVNRVDPRSKKIWIPGPGAILCSKHFQESDFESYGIRRKLKKGAVPSVSLYKVFKYEDTRDCRAYVTAN

SEQ ID NO: 97479 - protein, 780 aa, Homo sapiens
MATQADLMELDMAMEPDRKAAVSHWQQQSYLDSGIHSGATTTAPSLSGKGNPEEEDVDTSQVLYEWEQGFSQSFTQEQVADIDGQYAMTRAQRVRAAMFPETLDEGMQIPSTQFDAAHPTNVQRLAEPSQMLKHAVVNLINYQDDAELATRAIPELTKLLNDEDQVVVNKAAVMVHQLSKKEASRHAIMRSPQMVSAIVRTMQNTNDVETARCTAGTLHNLSHHREGLLAIFKSGGIPALVKMLGSPVDSVLFYAITTLHNLLLHQEGAKMAVRLAGGLQKMVALLNKTNVKFLAITTDCLQILAYGNQESKLIILASGGPQALVNIMRTYTYEKLLWTTSRVLKVLSVCSSNKPAIVEAGGMQALGLHLTDPSQRLVQNCLWTLRNLSDAATKQEGMEGLLGTLVQLLGSDDINVVTCAAGILSNLTCNNYKNKMMVCQVGGIEALVRTVLRAGDREDITEPAICALRHLTSRHQEAEMAQNAVRLHYGLPVVVKLLHPPSHWPLIKATVGLIRNLALCPANHAPLREQGAIPRLVQLLVRAHQDTQRRTSMGGTQQQFVGVRMEEIVEGCTGALHILARDVHNRIVIRGLNTIPLFVQLLYSPIENIQRVAAGVLCELAQDKEAAEAIEAEGATAPLTELLHSRNEGVATYAAAVLFRMSEDKPQDYKKRLSVELTSSLFRTEPMAWNETADLGLDIGAQGEPLGYRQDDPSYRSFHSGGYGQDALGMDPMMEHEMGGHHPGADYPVDGLPDLGHAQDLMDGLPPGDSNQLAWFDTDL

SEQ ID NO: 97480 - protein, 285 aa, Homo sapiens
MLPAGCSRREPTGTRALKPPPGPETNGEDPLPACTPSPQDLKELEFLTQALEKAVRVRRGITKAGERDKAPSLKSRSIVTSSGTTASAPPHSPGQAGGHASDTRPTKGLRQTTVPAKGHPERRLLSVGDGTRVGMGARTPRPGAGLRDQQMAPSAAPQAPEAFTLKEKGHLLRLPAAFRKAASQNSSLWAQLSSTQTSDSTDAAAAKTQFLQNMQTASGGPQPRLSAVEVEAEAGRLRKACSLLRLRMREELSAAPMDWMQEYRCLLTLEGLQAMVGQCLHRLQE

SEQ ID NO: 97481 - protein, 60 aa, Homo sapiens
METDLAEMPEKGALSSQDSPHFQEKSTEEGEVAALRLTARSQGFQFPNLRATTWRMEKNH

SEQ ID NO: 97482 - protein, 36 aa, Homo sapiens
MRLLPEWFLLLFGPWLLRKPRPGLSLPPARSWEHPA

SEQ ID NO: 97483 - protein, 317 aa, Homo sapiens
MSCKKQRSRKHSVNEKCNMKIEHYFSPVSKEQQNNCSTSLMRMESRGDPRATTNTQAQRFHSPKKNPEDQTMPQNRTIYVTLKVNHRRNQDMKLKLTHSENSSLYMALNTLQAVRKEIETHQGQEMLVRGTEGIKEYINLGMPLSCFPEGGQVVITFSQSKSKQKEDNHIFGRQDKASTECVKFYIHAIGIGKCKRRIVKCGKLHKKGRKLCVYAFKGETIKDALCKDGRFLSFLENDDWKLIENNDTILESTQPVDELEGRYFQVEVEKRMVPSAAASQNPESEKRNTCVLREQIVAQYPSLKRESEKIIENFKKK

SEQ ID NO: 97484 - protein, 258 aa, Homo sapiens
MDEFFSEIEETRLNIDKISEHVEEAKKLYSIILSAPIPEPKTKDDLEQLTTEIKKRANNVRNKLKSMEKHIEEDEVRSSADLRIRKSQHSVLSRKFVEVMTKYNEAQVDFRERSKGRIQRQLEITGKKTTDEELEEMLESGNPAIFTSGIIDSQISKQALSEIEGRHKDIVRLESSIKELHDMFMDIAMLVENQGEMLDNIELNVMHTVDHVEKARDETKKAVKYQSQARKKLIIIIVLVVVLLGILALIIGLSVGLN

SEQ ID NO: 97485 - protein, 133 aa, Homo sapiens
MMEEEELEFVEELEAVLQLTPEVQLAIEQVFPSQDPLDRADFNAVEYINTLFPTEQSLANIDEVVNKIRLKIRRLDDNIRTVVRGQTNVGQDGRQALEEAQKAIQQLFGKIKDIKDKAEKSEQMPWLVVPRSI

SEQ ID NO: 97486 - protein, 36 aa, Homo sapiens
MAAETRNVAGAEAPPPQKRYYRQRAHSNPMADHTLR

SEQ ID NO: 97487 - protein, 71 aa, Homo sapiens
MDSVAFEDVAVNFTQEEWALLDSSQKNLYREVMQETCRNLASVEIISYRDCVKVKKMVSMEKLSAKFQILI

SEQ ID NO: 97488 - protein, 119 aa, Homo sapiens
MPSDFISLLSADLDLESPKSLYSRDSLKLHPSQNFHRAGLLEESVYDLLPKELQLPPSRETSVASMSQTSGGEAGSPPPAVVAAGIPEMFILCILMCMILRFKKGFASEAGSVCIKNDL

SEQ ID NO: 97489 - protein, 358 aa, Homo sapiens
MRPVRLMKVFVTRRIPAEGRVALARAADCEVEQWDSDEPIPAKELERGVAGAHGLLCLLSDHVDKRILDAAGANLKVISTMSVGIDHLALDEIKKRGIRVGYTPDVLTDTTAELAVSLLLTTCRRLPEAIEEVKNGGWTSWKPLWLCGYGLTQSTVGIIGLGRIGQAIARRLKPFGVQRFLYTGRQPRPEEAAEFQAEFVSTPELAAQSDFIVVACSLTPATEGLCNKDFFQKMKETAVFINISRGDVVNQDDLYQALASGKIAAAGLDVTSPEPLPTNHPLLTLKNCGPGIQLTAWGLLQKAGLGLRRGQSGHEAAAATAASTKSKHWAAAMSYCQQEGKDAIICDVKRPCSSKQHS

SEQ ID NO: 97490 - protein, 158 aa, Homo sapiens
MATDDKTSPTLDSANDLPRSPTSPSHLTHFKPLTPDQDEPPFKSAYSSFVNLFRFNKERAEGGQGEQQPLSGSWTSPQLPSRTQSVRSPTPYKKQLNEELQRRSSALDTRRKAEPTFGGHDPRTAVQLRSLSTVLKRLKEIMEGKSQETSELAHIVEK

SEQ ID NO: 97491 - protein, 557 aa, Homo sapiens
MRGRGMPTDVMHQNIYDYIHVDDRQDFCRQLHWAMDPPQVVFGQPPPLETGDDAILGRLLRAQEWGTGTPTEYSAFLTRCFICRVRCLLDSTSGFLTMQFQGKLKFLFGQKKKAPSGAMLPPRLSLFCIAAPVLLPSAAEMKMRSALLRAKPRADTAATADAKVKATTSLCESELHGKPNYSAGRSSRESGVLVLREQTDAGRWAQVPARAPCLCLRGGPDLVLDPKGGSGDREEEQHRMLSRASGVTGRRETPGPTKPLPWTAGKHSEDGARPRLQPSKNDPPSLRPMPRGSCLPCPCVQGTFRNSPISHPPSPSPSAYSSRTSRPMRDVGEDQVHPPLCHFPQRSLQHQLPQPGAQRFATRGYPMEDMKLQGVPMPPGDLCGPTLLLDVSIKMEKDSGCEGAADGCVPSQVWLGASDRSHPATFPTRMHLKTEPDSRQQVYISHLGHGVRGAQPHGRATAGRSRELTPFHPAHCACLEPTDGLPQSEPPHQLCARGRGEQSCTCRAAEAAPVVKREPLDSPQWATHSQGMVPGMLPKSALATLVPPQASGCTFLP

SEQ ID NO: 97492 - protein, 146 aa, Homo sapiens
  MOD_RES (1)..(1): Any amino acid
XATRAVFGVQSTAAGLWALLGDPVLHADKARGQQNWCWFHITTATGFFCFENVAVHLSNLIFRTFDLFLVIHHLFAFLGFLGCLVNLQAGHYLAMTTLLLEMSTPFTCVSWMLLKELLPLTELREASGAAAWTSESPCLPLLQKMK

SEQ ID NO: 97493 - protein, 150 aa, Homo sapiens
MAHEAMEYDVQVQLNHAEQQPAPAGMASSQGGPALLQPVPADVVSSQGVPSILQPAPAEVISSQATPPLLQPAPQLSVDLTEVEVLGEDTVENINPRTSEQHRQGSDGNHTIPASSLHSMTNFISGLQRLHGMLEFLRPSSSNHSVGPMR

SEQ ID NO: 97494 - protein, 131 aa, Homo sapiens
MEKLAASTEPQGPRPVLGRESVQVPDDQDFRSFRSECEAEVGWNLTYSRAGVSVWVQAVEMDRTLHKIKPPAGTQDCGWQILKAGLQYPCLAQSQATGQAWGLGPWERISPRGPDGAGAREDSGLRASIAA

SEQ ID NO: 97495 - protein, 51 aa, Homo sapiens
MNQPCNSMEPRVMDDDMLKLAVGDQGPQEEAGQLAKQEGILFKDVLSLQLD

SEQ ID NO: 97496 - protein, 160 aa, Homo sapiens
MAAGSRTSLLLAFALLCLPWLQEADSIPTPSNMEETQQKSNLELLRISLLLIESWLEPVRFLRSMFANNLVYDTSDSDDYHLLKDLEEGIQTLMGRLEDGSRRTGQILKQTYSKFDTNSHNHDALLKNYGLLYCFRKDMDKVETFLRMVQCRSVEGSCGF

SEQ ID NO: 97497 - protein, 56 aa, Homo sapiens
MQAATMRLNQNTLLLGKKVVLVPYTSEHVPRYHEWMKSEELQRLTASEPLTLEQEY

SEQ ID NO: 97498 - protein, 57 aa, Homo sapiens
MSYMLPHLHNGWQVDQAILSEEDRVVVIRFGHDWDPTCMKMDEVLYSIAEKEQAHHD

SEQ ID NO: 97499 - protein, 292 aa, Homo sapiens
MAQRRGRGPGGPQSTPRNPRVSRGERSHCPTQTVKKLLEEQRRRQQQQPDAGGVQGQFLPPPEQPLTPSVNEAVTGHPPFPAHSETVGSGPSSLGFPDWDPNTHAAYTDSPYSCPASAAENFLPPDFYPPSDPGQPCPFPQGMEDPPDTQFYVGSSLPQAGPWRVSAPPSGPPQFPAVVPGPSLEVARAHMLALGPQQLLAQDEEGDTLLHLFAARGLRWAAYAAAEVLQVYRRLDIREHKGKTPLLVAAAANQPLIVEDLLNLGAEPNAADHQGRSVLHVAATYGLPGVLL

SEQ ID NO: 97500 - protein, 222 aa, Homo sapiens
  MOD_RES (1)..(1): Any amino acid
XRRRSSEKTDYRLAGLADPGTSEQTDLRLYGLVDHKTSVKTHHQVYGQATELAEHQAIDQAHSNADQPPVDNAHYTESDQTDHLADRQANHKDQLSYYETRGQSEDRIFPQLGNSKEDKEADYRVQPCKFEDSQVDLNSKPSVEMETQNATTIPPYNPVDARFTSNFQAKDQALFPRLPSISSKLNYTSSQEKTQAIVTKSITENLVYEKPEDPLNFMLCQV

SEQ ID NO: 97501 - protein, 566 aa, Homo sapiens
MQYSAMDEFHPFIEALLPHVRAIAYTWFNLQARKRKYFKKHEKRMSKDEERAVKDELLSEKPEIKQKWASRLLAKLRKDIRQEYREDFVLTVTGKKHPCCVLSNPDQKGKIRRIDCLRQADKVWRLDLVMVILFKGIPLESTDGERLMKSPHCTNPALCVQPHHITVSVKELDLFLAYYVQEQDSGQSGSPSHNDPAKNPPGYLEDSFVKSGVFNVSELVRVSRTPITQGTGVNFPIGEIPSQPYYHDMNSGVNLQRSLSSPPSSKRPKTISIDENMEPSPTGDFYPSPSSPAAGSRTWHERDQDMSSPTTMKKPEKPLFSSASPQDSSPRLSTFPQHHHPGIPGVAHSVISTRTPPPPSPLPFPTQAILPPAPSSYFSHPTIRYPPHLNPQDTLKNYVPSYDPSSPQTSQPNGSGQVVGKVPGHFTPVLAPSPHPSAVRPVTLSMTDTKPITTSTEGEAASPTATTYTASGTSQANRYVGLSPRDPSFLHQQQLRICDWTMNQNGRHLYPSTSEDTLGITWQSPGTWASLVPFQVSNRTPILPANVQNYGLNIIGEPFLQAETSN

SEQ ID NO: 97502 - protein, 517 aa, Homo sapiens
MIHVRRHETRRNSKSHVPEQKSRVDWRRTKRSSISQLLDSDEELDSEEFDSDEELDSDESFENDEELDSNKGPDCNKTPGSERELNLSKIQSEGNDSKCLINSGNGSTYEEETNKIKHRNIDLQDQEKHLSQEDNDLNKQTGQIIEDDQEKHLSQEDNDLNKQTGQIIEDDLEEEDIKRGKRKRLSSVMCDSDESDDSDILVRKVGVKRPRRVVEDEGSSVEMEQKTPEKTLAAQKREKLQKLKELSKQRSRQRRSSGRDFEDSEKESCPSSDEVDEEEEEDNYESDEDGDDYIIDDFVVQDEEGDEENKNQQGEKLTTSQLKLVKQNSLYSFSDHYTHFERVVKALLINALDESFLGTLYDGTRQKSYAKDMLTSLHYLDNRFVQPRLESLVSRSRWKEQYKERVENYSNVSIHLKNPENCSCQACGLHRYCKYSVHLSGELYNTRTMQIDNFMSHDKQECCTIAMTEEVEDEQVKETVERIFRRSKENGWIKEKYGQLEEYLNFADYFQEEKFEL

SEQ ID NO: 97503 - protein, 84 aa, Homo sapiens
  MOD_RES (1)..(1): Any amino acid
XLIKDACQVLLLRLPPEYEKELHIALEKVTGILKDAGVNNLTIQVEKEAYFQHMSGLSTGFHDVLAMTKQMESMKYCKDGTYIM

SEQ ID NO: 97504 - protein, 1040 aa, Homo sapiens
MISAQTLTGRVLVVLVFALSIGALVIYFIDSSNPIESCQNFYKDFTLQIDMAFNVFFLLYFGLRFIAANDKLWFWLEVNSVVDFFTVPPVFVSVYLNRSWLGLRFLRALRLIQFSEILQFLNILKTSNSIKLVNLLSIFISTWLTAAGFIHLVENSGDPWENFQNNQALTYWECVYLLMVTMSTVGYGDVYAKTTLGRLFMVFFILGGLAMFASYVPEIIELIGNRKKYGGSYSAVSGRKHIVVCGHITLESVSNFLKDFLHKDRDDVNVEIVFLHNISPNLELEALFKRHFTQVEFYQGSVLNPHDLARVKIESADACLILANKYCADPDAEDASNIMRVISIKNYHPKIRIITQMLQYHNKAHLLNIPSWNWKEGDDAICLAELKLGFIAQSCLAQGLSTMLANLFSMRSFIKIEEDTWQKYYLEGVSNEMYTEYLSSAFVGLSFPTVCELCFVKLKLLMIAIEYKSANRESRILINPGNHLKIQEGTLGFFIASDAKEVKRAFFYCKACHDDITDPKRIKKCGCKRLIYFEDEQPSTLSPKKKQRNGGMRNSPNTSPKLMRHDPLLIPGNDQIDNMDSNVKKYDSTGMFHWCAPKEIEKVILTRSEAAMTVLSGHVVVCIFGDVSSALIGLRNLVMPLRASNFHYHELKHIVFVGSIEYLKREWETLHNFPKVSILPGTPLSRADLRAVNINLCDMCVILSANQNNIDDTSLQDKECILASLNIKSMQFDDSIGVLQANSQGFTPPGMDRSSPDNSPVHGMLRQPSITTGVNIPIITELAKPGKLPLVSVNQEKNSGTHILMITELVNDTNVQFLDQDDDDDPDTELYLTQPFACGTAFAVSVLDSLMSATYFNDNILTLIRTLVTGGATPELEALIAEENALRGGYSTPQTLANRDRCRVAQLALLDGPFADLGDGGCYGDLFCKALKTYNMLCFGIYRLRDAHLSTPSQCTKRYVITNPPYEFELVPTDLIFCLMQFDHNAGQSRASLSHSSHSSQSSSKKSSSVHSIPSTANRQNRPKSRESRDKQKYVQEERL

SEQ ID NO: 97505 - protein, 180 aa, Homo sapiens
MRPERPRPRGSAPGPMETPPWDPARNDSLPPTLTPAVPPYVKLGLTVVYTVFYALLFVFIYVQLWLVLRYRHKRLSYQSVFLFLCLFWASLRTVLFSFYFKDFVAANSLSPFVFWLLYCFPVCLQFFTLTLMNLYFTQVAPLPGLPLHQPCFPVGEFNLCCAGKDGKLGEEGYRLCASGH

SEQ ID NO: 97506 - protein, 892 aa, Homo sapiens
MKGVTEDGWNCISCPSDLTAEGKCHCPIGHILVERDINGTLLSQATCELCDGNENSFMVVNALGDRCVRCEPTFVNTSRSCACSEPNILTGGLCFSSTGNFPLRRISAARYGEVGMSLTSEWFAKYLQSSAAACWVYANLTSCQALGNMCVMNMNSYDFATFDACGLFQFIFENTAGLSTVHSISFWRQNLPWLFYGDQLGLAPQVLSSTSLPTNFSFKGENQNTKLKFVAASYDIRGNFLKWQTLEGGVLQLCPDTETRLNAAYSFGTTYQQNCEIPISKILIDFPTPIFYDVYLEYTDENQHQYILAVPVLNLNLQHNKIFVNQDSNSGKWLLTRRIFLVDAVSGRENDLGTQPRVIRVATQISLSVHLVPNTINGNIYPPLITIAYSDIDIKDANSQSVKVSFSVTYEMDHGEAHVQTDIALGVLGGLAVLASLLKTAGWKRRIGSPMIDLQTVVKFLVYYAGDLANVFFIITVGTGLYWLIFFKAQKSVSVLLPMPIQEERFVTYVGCAFALKALQFLHKLISQITIDVFFIDWERPKGKVLKAVEGEGGVRSATVPVSIWRTYFVANEWNEIQTVRKINSLFQVLTVLFFLEVVGFKNLALMDSSSSLSRNPPSYIAPYSCILRYAVSAALWLAIGIIQVVFFAVFYERFIEDKIRQFVDLCSMSNISVFLLSHKCFGYYIHGRSVHGHADTNMEEMNMNLKREAENLCSQRGLVPNTDGQTFEIAISNQMRQHYDRIHETLIRKNGPARLLSSSASTFEQSIKAYHMMNKFLGSFIDHVHKEMDYFIKDKLLLERILGMEFMEPMEKSIFYNDEGYSFSSVLYYGNEATLLIFDLLFFCVVDLACQNFILASFLTYLQQEIFRYIRNTVGQKNLASKTLVDQRFLI

SEQ ID NO: 97507 - protein, 796 aa, Homo sapiens
MVKLANPLYTEWILEAIQKIKKQKQRPSEERICHAVSTSHGLDKKTVSEQLELSVQDGSVLKVTNKGLASYKDPDNPGRFSSVKPGTFPKSAKGSRGSCNDLRNVDWNKLLRRAIEGLEEPNGSSLKNIEKYLRSQSDLTSTTNNPAFQQRLRLGAKRAVNNGRLLKDGPQYRVNYGSLDGKGAPQYPSAFPSSLPPVSLLPHEKDQPRADPIPICSFCLGTKESNREKKPEELLSCADCGSSGHPSCLKFCPELTTNVKALRWQCIECKTCSACRVQGRNADNMLFCDSCDRGFHMECCDPPLSRMPKGMWICQVCRPKKKGRKLLHEKAAQIKRRYAKPIGRPKNKLKQRLLSVTSDEGSMNAFTGRGSPDTEIKINIKQESADVNVIGNKDVVTEEDLDVFKQAQELSWEKIECESGVEDCGRYPSVIEFGKYEIQTWYSSPYPQEYARLPKLYLCEFCLKYMKSKNILLRHSKKCGWFHPPANEIYRRKDLSVFEVDGNMSKIYCQNLCLLAKLFLDHKTLYYDVEPFLFYVLTKNDEKGCHLVGYFSKEKLCQQKYNVSCIMIMPQHQRQGFGRFLIDFSYLLSRREGQAGSPEKPLSDLGRLSYLAYWKSVILEYLYHHHERHISIKAISRATGMCPHDIATTLQHLHMIDKRDGRFVIIRREKLILSHMEKLKTCSRANELDPDSLRWTPILISNAAVSEEEREAEKEAERLMEQASCWEKEEQEILSTRANSRQSPAKVQSKNKYLHSPESRPVTGERGQLLELSKESSEEEEEEEDEEEEEEEEEEE

SEQ ID NO: 97508 - protein, 92 aa, Homo sapiens
  MOD_RES (1)..(1): Any amino acid
XVFTPNEFHAAGLTVQNLLSGWLGSEDAAFVPFHLRRTAATLLCHSLLPLVTGPTPNVDYYFLPTGTCWCNSSPSPWLIWTFKLSSIWPAGP

SEQ ID NO: 97509 - protein, 317 aa, Homo sapiens
MATSGAASAELVIGWCIFGLLLLAILAFCWIYVRKYQSRRESEVVSTITAIFSLAIALITSALLPVDIFLVSYMKNQNGTFKDWANANVSRQIEDTVLYGYYTLYSVILFCVFFWIPFVYFYYEEKDDDDTSKCTQIKTALKYTLGFVVICALLLLVGAFVPLNVPNNKNSTEWEKVKSLFEELGSSHGLAALSFSISSLTLIGMLAAITYTAYGMSALPLNLIKGTRSAAYERLENTEDIEEVEQHIQTIKSKSKDGRPLPARDKRALKQFEERLRTLKKRERHLEFIENSWWTKFCGALRPLKETEEKSPVKKSI

SEQ ID NO: 97510 - protein, 72 aa, Homo sapiens
MFLYNLTLQRATGISFAIHGNFSGTKQQEIVVSRGKILELLRPDPNTGKVHTLLTVEVFGVIRSLMAFRLTG

SEQ ID NO: 97511 - protein, 266 aa, Homo sapiens
  MOD_RES (1)..(1): Any amino acid
XAYDIFLNAKEQNIVFNAETYSNLIKLLMSEDYFTQAMEVKAFAETHIKGFTLNDAANSRLIITQVRRDYLKEAVTTLKTVLDQQQTPSRLAVTRVIQALAMKGDVENIEVVQKMLNGLEDSIGLSKMVFINNIALAQIKNNNIDAAIENIENMLTSENKVIEPQYFGLAYLFRKVIEEQLEPAVEKISIMAERLANQFAIYKPVTDFFLQLVDAGKVDDARALLQRCGAIAEQTPILLLFLLRNSRKQGKSQRKMSHLLKHCMNI

SEQ ID NO: 97512 - protein, 295 aa, Homo sapiens
MSFLVSKPERIRRWVSEKFIVEGLRDLELFGEQPPGDTRRKTNDASSESIASFSKQEVMSSFLPEGGCYELLTVIGKGFEDLMTVNLARYKPTGEYVTVRRINLEACSNEMVTFLQGELHVSKLFNHPNIVPYRATFIADNELWVVTSFMAYGSAKDLICTHFMDGMNELAIAYILQGVLKALDYIHHMGYVHRSVKASHILISVDGKVYLSGLRSNLSMISHGQRQRVVHDFPKYSVKVLPWLSPEVLQQNLQGYDAKSDIYSVGITACELANGHVPFKDMPATQGEDSTVKGI

SEQ ID NO: 97513 - protein, 518 aa, Homo sapiens
MRKVKKLRLDKENTGSWRSFSLNSEGAERMATTGTPTADRGDAAATDDPAARFQVQKHSWDGLRSIIHGSRKYSGLIVNKAPHDFQFVQKTDESGPHSHRLYYLGMPYGSRENSLLYSEIPKKVRKEALLLLSWKQMLDHFQATPHHGVYSREEELLRERKRLGVFGITSYDFHSESGLFLFQASNSLFHCRDGGKNGFMVSPMKPLEIKTQCSGPRMDPKICPADPAFFSFINNSDLWVANIETGEERRLTFCHQGLSNVLDDPKSAGVATFVIQEEFDRFTGYWWCPTASWEGSEGLKTLRILYEEVDESEVEVIHVPSPALEERKTDSYRYPRTGSKNPKIALKLAEFQTDSQGKIVSTQEKELVQPFSSLFPKVEYIARAGWTRDGKYAWAMFLDRPQQWLQLVLLPPALFIPSTENEEQRLASARAVPRNVQPYVVYEEVTNVWINVHDIFYPFPQSEGEDELCFLRANECKTGFCHLYKVTAVLKSQGYDWSEPFSPGEGEQSLTNAVDSSR

SEQ ID NO: 97514 - protein, 127 aa, Homo sapiens
  MOD_RES (1)..(1): Any amino acid
XPGLQGQANRRWNSEHHLHPQRRHQPPNTRKQKNGFPPNFIHSLDSSHMMLTALHCYRKGLTFVSVHDCYWTHAADVSVMNQVCREQFVRLHSEPILQDLSRFLVKRFCSEPQKILEASQLKETLQA

SEQ ID NO: 97515 - protein, 124 aa, Homo sapiens
MTTFKEAMTFKDVAVVFTEEELGLLDLAQRKLYRDVMLENFRNLLSVGHQAFHRDTFHFLREEKIWMMKTAIQREGNSGDKIQTEMETVSEAGTHQEWSFQQIWEKIASDLTRSQDLMINSSQF

SEQ ID NO: 97516 - protein, 363 aa, Homo sapiens
MEQGTSSSMTESSPRSMLGYDRDGRQVASDSHVVPSVPQDVPAFVRPARVEPTDRDGGEAGESSAEPPPSDMGTVGGQASHPQTLGARALGSPRKRPEQQDVSSPAKTVGRFSVVSTQDEWTLASPHSLRYSAPPDVYLDEAPSSPDVKLAVRRAQTASSIEVGVGEPVSSDSGDEGPRARPPVQKQASLPVSGSVAGDFVKKATSCRGLLGPSLGPETPSRVGMKVPTISVTSFHSQSSYISSDNDSELEDADIKKELQSLREKHLKEISELQSQQKQEIEALYRRLGKPLPPNVGFFHTAPPTGRRRKTSKSKLKAGKLLNPLVRQLKVVASSTGHLADSSRGPPAKDPKPVWGSLQTARA

SEQ ID NO: 97517 - protein, 478 aa, Homo sapiens
MADGVDHIDIYADVGEEFNQEAEYGGHDQIDLYDDVISPSANNGDAPEDRDYMDTLPPTVGDDVGKGAAPNVVYTYTGKRIALYIGNLTWWTTDEDLTEAVHSLGVNDILEIKFFENRANGQSKGFALVGVGSEASSKKLMDLLPKRELHGQNPVVTPCNKQFLSQFEMQSRKTTQSGQMSGEGKAGPPGAGPPNRGDRPPPPVLFPGQPFGQPPLGPLPPGPPPPVPGYGPPPGPPPPQQGPPPPPGPFPPRPPGPLGPPLTLAPPPHLPGPPPGAPPPAPHVNPAFFPPPTNSGMPTSDSRGPPPTDPYGRPPPYDRGDYGPPGREMDTARTPLSEAEFEEIMNRNRAISSSAISRAVSDASAGDYGSAIETLVTAISLIKQSKVSADDRCKVLISSLQDCLHGIESKSYGSGSRRERSRERDHSRSREKSRRHKSRSRDRHDDYYRERSRERERHRDRDRDRDRERDREREYRHR

SEQ ID NO: 97518 - protein, 49 aa, Homo sapiens
AYIHSNQNVIGSSKAENHMSRWAAHDVFELKQFSQLPANIAVCSSKKTI

SEQ ID NO: 97519 - protein, 869 aa, Homo sapiens
GNVKKSSGAGGGSGSGGSGSGGLIGLMKDAFQPHHHHHHHLSPHPPGTVDKKMVEKCWKLMDKVVRLCQNPKLALKNSPPYILDLLPDTYQHLRTILSRYEGKMETLGENEYFRVFMENLMKKTKQTISLFKEGKERMYEENSQPRRNLTKLSLIFSHMLAELKGIFPSGLFQGDTFRITKADAAEFWRKAFGEKTIVPWKSFRQALHEVHPISSGLEAMALKSTIDLTCNDYISVFEFDIFTRLFQPWSSLLRNWNSLAVTHPGYMAFLTYDEVKARLQKFIHKPGSYIFRLSCTRLGQWAIGYVTADGNILQTIPHNKPLFQALIDGFREGFYLFPDGRNQNPDLTGLCEPTPQDHIKVTQEQYELYCEMGSTFQLCKICAENDKDVKIEPCGHLMCTSCLTSWQESEGQGCPFCRCEIKGTEPIVVDPFDPRGSGSLLRQGAEGAPSPNYDDDDDERADDTLFMMKELAGAKVERPPSPFSMAPQASLPPVPPRLDLLPQRVCVPSSASALGTASKAASGSLHKDKPLPVPPTLRDLPPPPPPDRPYSVGAESRPQRRPLPCTPGDCPSRDKLPPVPSSRLGDSWLPRPIPKVPVSAPSSSDPWTGRELTNRHSLPFSLPSQMEPRPDVPRLGSTFSLDTSMSMNSSPLVGPECDHPKIKPSSSANAIYSLAARPLPVPKLPPGEQCEGEEDTEYMTPSSRPLRPLDTSQSSRACDCDQQIDSCTYEAMYNIQSQAPSITESSTFGEGNLAAAHANTGPEESENEDDGYDVPKPPVPAVLARRTLSDISNASSSFGWLSLDGDPTTNVTEGSQVPERPPKPFPRRINSERKAGSCQQDRVSLLLPRLECSGTISAHRNLHLPPGFK

SEQ ID NO: 97520 - protein, 902 aa, Homo sapiens
  MOD_RES (1)..(1): Any amino acid
XKPQQLISDCEGPSASENGDASEEDHPQVCAKCCAQFTDPTEFLAHQNACSTDPPVMVIIGGQENPNNSSASSEPRPEGHNNPQVMDTEHSNPPDSGSSVPTDPTWGPERRGEESSGHFLVAATGAETPKQAFFHLYHPLGSQHPFSAGGVGRSHKPTPAPSPALPGSTDQLIASPHLAFPSTTGLLAAQCLGAARGLEATASPGLLKPKNGSGELSYGEVMGPLEKPGGRHKCRFCAKVFGSDSALQIHLRSHTGERPYKCNVCGNRFTTRGNLKVHFHRHREKYPHVQMNPHPVPEHLDYVITSSGLPYGMSVPPEKAEEEAATPGGGVERKPLVASTTALSATESLTLLSTSAGTATAPGLPAFNKFVLMKAVEPKNKADENTPPGSEGSAISGVAESSTATRMQLSKLVTSLPSWALLTNHFKSTGSFPFPYVLEPLGASPSETSKLQQLVEKIDRQGAVAVTSAASGAPTTSAPAPSSSASSGPNQCVICLRVLSCPRALRLHYGQHGGERPFKCKVCGRAFSTRGNLRAHFVGHKASPAARAQNSCPICQKKFTNAVTLQQHVRMHLGGQIPNGGTALPEGGGAAQENGSEQSTVSGARSFPQQQSQQPSPEEELSEEEEEEDEEEEEDVTDEDSLAGRGSESGGEKAISVRGDSEEASGAEEEVGTVAAAATAGKEMDSNEKTTQQSSLPPPPPPDSLDQPQPMEQGSSGVLGGKEEGGKPERSSSPASALTPEGEATSVTLVEELSLQEAMRKEPGESSSRKACEVCGQAFPSQAALEEHQKTHPKEGPLFTCVFCRQGFLERATLKKHMLLAHHQNQYVAFLSNGLPMKPWNSSSTSTTTPSLAPPVLFGLGTVAGKVPPTMGSREAKEKTAPLLFQPPAPKAVPEKPIIDKK

SEQ ID NO: 97521 - protein, 123 aa, Homo sapiens
MTPGTQSPFFLLLLLTVLTATTAPKPATVVTGSGHASSTPGGEKETSATQRSSVPSSTEKNALSTGVSFFFLSFHISNLQFNSSLEDPSTDYYQELQRDISEMFLQIYKQGGFLGLSNIKFSE

SEQ ID NO: 97522 - protein, 40 aa, Homo sapiens
KSFVMLYAWYMMSAIPNPLNTVPGFLRKKLEIIKMANNGR

SEQ ID NO: 97523 - protein, 149 aa, Homo sapiens
MQRDHTMDYKESCPSVSIPSSDEHREKKKRFTVYKVLVSVGRSEWFVFRRYAEFDKLYNTLKKQFPAMALKIPAKRIFGDNFDPDFIKQRRAGLNEFIQNLVRYPELYNHPDVRAFLQMDSPKHQSDPSEDEDERSSQKVLLAKRKLDG

SEQ ID NO: 97524 - protein, 55 aa, Homo sapiens
MWNPNAGQPGPNPYPPNIGCPGGSNPAHPPPINPPFPPGPCPPPPGAPHGNPAFP

SEQ ID NO: 97525 - protein, 96 aa, Homo sapiens
MDSFGQPRPEDNQSVVRRMQKKYWKTKQVFIKATGKKEDEHLVASDAELDAKLEVFHSVQETCTELLKIIEKYQLRLNVISEEENELGLFLKFQAE

SEQ ID NO: 97526 - protein, 151 aa, Homo sapiens
MEHWKRKQMRLNYRWDLTGFEEEEEAVKDHPRAEYEARVLEKSLKKESRNKETDKVKLTWRDRFPAYLTNLVSIIFMIAVTFAIVLGVIIYRISMAAALAMNSSPSVRSNIRVTVTATAVIINLVVIILLDEVYGCIARWLTKIEVPKTEK

SEQ ID NO: 97527 - protein, 68 aa, Homo sapiens
MKYVFYLGVLAGTFFFADSSVQKEDPAPYLVYLKSHFNPCVGVLIKPSWVLAPAHCYLPMNAFYHLKI

SEQ ID NO: 97528 - protein, 160 aa, Homo sapiens
MYIFCTDCWLIAVLYFTWLVFDWNTPKKGGRRSQWVRNWAVWRYFRDYFPIQLVKTHNLLTTRNYIFGYHPHGIMGLGAFCNFSTEATEVSKKFPGIRPYLATLAGNFRMPVLREYLMSGGICPVSRDTIDYLLSKNGSGNAIIIVVGGAAESLSSMPGK

SEQ ID NO: 97529 - protein, 72 aa, Homo sapiens
MNCCIGLGEKARGSHRASYPSLSALFTEASILGFGSFAVKAQVGNQQLGGPEWIRFSLTPRPLNCSLSLTPR

SEQ ID NO: 97530 - protein, 121 aa, Homo sapiens
  MOD_RES (1)..(1): Any amino acid
XGHQNVFPNHISVGTNRKRCLEDSEDFGVKKARTEAQSLDSAVPLTNGDTEDDADKMHVDREFAVVTGGSGQFPVSCNNNPMVEDTKQQESGSVGPKEIEIYTVSAMQTPCRCRNQYAYYF

SEQ ID NO: 97531 - protein, 89 aa, Homo sapiens
MRTVASAGWHLTDAALTVSVPSMLSERPRLQGARRRLPAGVGPVLPLLPHALHPQVAARTAGAAALPHVPPGMEVQGVRPDLALAGGAS

SEQ ID NO: 97532 - protein, 102 aa, Homo sapiens
MGNIFGNLLKSLIGKKEMRILMVGLDAAGKTTILYKLKLGEIVTTIPTIGFNVETVEYKNISFTVWDVGGQDKIRPLWRHYFQNTQGLIFVVDSNDRERVNE

SEQ ID NO: 97533 - protein, 134 aa, Homo sapiens
  MOD_RES (1)..(1): Any amino acid
XSTSMVPVAVTAAVAPVLSINSDFSDLREIKKQLLLIAGLTRERGLLHSSKWSAELAFSLPALPLAELQPPPPITEMPRIWMPIPWPRPTLTLKSMIGQHISCMAAIARKPIFCICIPDICLEKKRRTMKQLIA

SEQ ID NO: 97534 - protein, 1780 aa, Homo sapiens
MEEDLEGENWQTFSIPWCFSRAAEDEGEHICHHRTKSSGWPPPSGTWGLSQVPPYGWEMTANRDGRDYFINHMTQAIPFDDPRLESCQIIPPAPRKVEMRRDPVLGFGFVAGSEKPVVVRSVTPGGPSEGKLIPGDQIVMINDEPVSAAPRERVIDLVRSCKESILLTVIQPYPSPKSAFISAAKKARLKSNPVKVRFSEEVIINGQVSETVKDNSLLFMPNVLKVYLENGQTKSFRFDCSTSIKDVILTLQEKLSIKGIEHFSLMLEQRTEGAGTKLLLLHEQETLTQVTQRPSSHKMRCLFRISFVPKDPIDLLRRDPVAFEYLYVQSCNDVVQERFGPELKYDIALRLAALQMYIATVTTKQTQKISLKYIEKEWGLETFLPSAVLQSMKEKNIKKALSHLVKANQNLVPPGKKLSALQAKVHYLKFLSDLRLYGGRVFKATLVQAEKRSEVTLLVGPRYGISHVINTKTNLVALLADFSHVNRIEMFSEEESLVRVELHVLDVKPITLLMESSDAMNLACLTAGYYRLLVDSRRSIFNMANKKNTATQETGPENKGKHNLLGPDWNCIPQMTTFIGEGEQEAQITYIDSKQKTVEITDSTMCPKEHRHLYIDNAYSSDGLNQQLSQPGEAPCEADYRSLAQRSLLTLSGPETLKKAQESPRGAKVSFIFGDFALDDGISPPTLGYETLLDEGPEMLEKQRNLYIGSANDMKGLDLTPEAEGIQFVENSVYANIGDVKSFQAAEGIEEPLLHDICYAENTDDAEDEDEVSCEEDLVVGEMNQPAILNLSGSSDDIIDLTSLPPPEGDDNEDDFLLRSLNMAIAAPPPGFRDSSDEEDSQSQAASFPEDKEKGSSLQNDEIPVSLIDAVPTSAEGKCEKGLDNAVVSTLGALEALSVSEEQQTSDNSGVAILRAYSPESSSDSGNETNSSEMTESSELATAQKQSENLSRMFLATHEGYHPLAEEQTEFPASKTPAGGLPPKSSHALAARPATDLPPKVVPSKQLLHSDHMEMEPETMETKSVTDYFSKLHMGSVAYSCTSKRKSKLADGEGKAPPNGNTTGKKQQGTKTAEMEEEASGKFGTVSSRDSQHLSTFNLERTAFRKDSQRWYVATEGGMAEKSGLEAATGKTFPRASGLGAREAEGKEEGAPDGETSDGSGLGQGDRFLTDVTCASSAKDLDNPEDADSSTCDHPSKLPEADESVARLCDYHLAKRMSSLQSEGHFSLQSSQGSSVDAGCGTGSSGSACATPVESPLCPSLGKHLIPDASGKGVNYIPSEERAPGLPNHGATFKELHPQTEGMCPRMTVPALHTAINTEPLFGTLRDGCHRLPKIKETTALTEPGKERRGGMPSAWSQHPEADPILLPSNIHSESKVPIPNQDPNDFSQANQAYGEAVSWRPPDLRGGSLRTPPSQKALRHSSSILSGSVDLETFRERTKGAVSLKCPGITEAQEASSERRAELPLGRKLTKSFSQSSMHLSSEGRFHKRSPVAHKDSKLYRTLPLRKLEGSNWRCRGPFSYCFLNRGQDEDGEEEEERGEATVQVSCLYRPQMTQAMPEPSSPCLAVAIQKQRGELSRGSVLKVWAEDLRDPDDLDFSNLAFDARIARINALKESTYAMPDGFLAAQNDANELLCLVRATKEKREESRPEAYDLTLSQYKQLLSIESRQLGSACRKMAMAEKSPEEMLLAMTSSFQVLCCLTEACMRLVKVVNSETQRQEIVGKIDEVVINYICLLKAAEAATGKNPGDPNVGLSARHSTTMAALVSTLTRSLKRLLNK

SEQ ID NO: 97535 - protein, 52 aa, Homo sapiens
  MOD_RES (1)..(1): Any amino acid
XVKVPRNFRLLEELEEGQKGVGDGTVSWGLEDDEDMTLTRWTGMIIGPPRLE

SEQ ID NO: 97536 - protein, 79 aa, Homo sapiens
  MOD_RES (1)..(1): Any amino acid
XTELLIRKLPFQRLVREIAQEFKTDLRFQSSAVMALQEAREAYLVGLFEDTNLCAIHAKRVTIMPKDIQLVSRIRGERA

SEQ ID NO: 97537 - protein, 1834 aa, Homo sapiens
MELMFAEWEDGERFSFEDSDRFEEDSLCSFISEAESLCQNWRGWRKQSAGPNSPTGGGGGGGSGGTRMRDGLVIPLVELSAKQVAFHIPFEVVEKVYPPVPEQLQLRIAFWSFPENEEDIRLYSCLANGSADEFQRGDQLFRMRAVKDPLQIGFHLSATVVPPQMVPPKGAYNVAVMFDRCRVTSCSCTCGAGAKWCTHVVALCLFRIHNASAVCLRAPVSESLSRLQRDQLQKFAQYLISELPQQILPTAQRLLDELLSSQSTAINTVCGAPDPTAGPSASDQSTWYLDESTLTDNIKKTLHKFCGPSPVVFSDVNSMYLSSTEPPAAAEWACLLRPLRGREPEGVWNLLSIVREMFKRRDSNAAPLLEILTDQCLTYEQITGWWYSVRTSASHSSASGHTGRSNGQSEVAAHACASMCDEMVTLWRLAVLDPALSPQRRRELCTQLRQWQLKVIENVKRGQHKKTLERLFPGFRPAVEACYFNWEEAYPLPGVTYSGTDRKLALCWARALPSRPGASRSGGLEESRDRPRPLPTEPAVRPKEPGTKRKGLGEGVPSSQRGPRRLSAEGGDKALHKMGPGGGKAKALGGAGSGSKGSAGGGSKRRLSSEDSSLEPDLAEMSLDDSSLALGAEASTFGGFPESPPPCPLHGGSRGPSTFLPEPPDTYEEDGGVYFSEGPEPPTASVGPPGLLPGDVCTQDDLPSTDESGNGLPKTKEAAPAVGEEDDDYQAYYLNAQDGAGGEEEKAEGGAGEEHDLFAGLKPLEQESRMEVLFACAEALHAHGYSSEASRLTVELAQDLLANPPDLKVEPPPAKGKKNKVSTSRQTWVATNTLSKAAFLLTVLSERPEHHNLAFRVGMFALELQRPPASTKALEVKLAYQESEVAALLKKIPLGPSEMSTMRCRAEELREGTLCDYRPVLPLMLASFIFDVLCAPVVSPTGSRPPSRNWNSETPGDEELGFEAAVAALGMKTTVSEAEHPLLCEGTRREKGDLALALMITYKDDQAKLKKILDKLLDRESQTHKPQTLSSFYSSSRPTTASQRSPSKHGGPSAPGALQPLTSGSAGPAQPGSVAGAGPGPTEGFTEKNVPESSPHSPCEGLPSEAALTPRPEGKVPSRLALGSRGGYNGRGWGSPGRPKKKHTGMASIDSSAPETTSDSSPTLSRRPLRGGWAPTSWGRGQDSDSISSSSSDSLGSSSSSGSRRASASGGARAKTVEVGRYKGRRPESHAPHVPNQPSEAAAHFYFELAKTVLIKAGGNSSTSIFTHPSSSGGHQGPHRNLHLCAFEIGLYALGLHNFVSPNWLSRTYSSHVSWITGQAMEIGSAALTILVECWDGHLTPPEVASLADRASRARDSNMVRAAAELALSCLPHAHALNPNEIQRALVQCKEQDNLMLEKACMAVEEAAKGGGVYPEVLFEVAHQWFWLYEQTAGGSSTAREGATSCSASGIRAGGEAGRGMPEGRGGPGTEPVTVAAAAVTAAATVVPVISVGSSLYPGPGLGHGHSPGLHPYTALQPHLPCSPQYLTHPAHPAHPMPHMPRPAVFPVPSSAYPQGVHPAFLGAQYPYSVTPPSLAATAVSFPVPSMAPITVHPYHTEPGLPLPTSVALSSVHPASTFPAIQGASLPALTTQPSPLVSGGFPPPEEETHSQPVNPHSLHHLHAAYRVGMLALEMLGRRAHNDHPNNFSRSPPYTDDVKWLLGLAAKLGVNYVHQFCVGAAKGVLSPFVLQEIVMETLQRLSPAHAHNHLRAPAFHQLVQRCQQAYMQYIHHRLIHLTPADYDDFVNAIRSARSAFCLTPMGMMQFNDILQNLKRSKQTKELWQRVSLEMATFSP

SEQ ID NO: 97538 - protein, 103 aa, Homo sapiens
MRENYETLVSVGTAELLPLSAFLSPSEPGRAVGGGSHADEGQEPAGCGDPQGGQPRHSLHLTALVQLVKEIPEFLFGEVKGAMDSPESESRGASLDGERASPE

SEQ ID NO: 97539 - protein, 466 aa, Homo sapiens
MYSPLCLTQDEFHPFIEALLPHVRAFAYTWFNLQARKRKYFKKHEKRMSKEEERAVKDELLSEKPEVKQKWASRLLAKLRKDIRPEYREDFVLTVTGKKPPCCVLSNPDQKGKMRRIDCLRQADKVWRLDLVMVILFKGIPLESTDGERLVKSPQCSNPGLCVQPHHIGVSVKELDLYLAYFVHAADSSQSESPSQPSDADIKDQPENGHLGFQDSFVTSGVFSVTELVRVSQTPIAAGTGPNFSLSDLESSSYYSMSPGAMRRSLPSTSSTSSTKRLKSVEDEMDSPGEEPFYTGQGRSPGSGSQSSGWHEVEPASPHATPSTLHFPTSPIIQQPGPYFSHPAIRYHPQETLKEFVQLVCPDAGQQAGQVGFLNPNGSSQGKVHNPFLPTPMLPPPPPPPMARPVPLPVPDTKPPTTSTEGGAASPTSPTYSTPSTSPANRFVSVGPRDPSFVNIPQQTQSWYLG

SEQ ID NO: 97540 - protein, 42 aa, Homo sapiens
MDNMSPRLRAFLSEPIGEKDVCWVDGISHELAINLVTKGINK

SEQ ID NO: 97541 - protein, 1182 aa, Homo sapiens
MPENPATDKLQVLQVLDRLKMKLQEKGDTSQNEKLSMFYETLKSPLFNQILTLQQSIKQLKGQLNHIPSDCSANFDFSRKGLLVFTDGSITNGNVHRPSNNSTVSGLFPWTPKLGNEDFNSVIQQMAQGRQIEYIDIERPSTGGLGFSVVALRSQNLGKVDIFVKDVQPGSVADRDQRLKENDQILAINHTPLDQNISHQQAIALLQQTTGSLRLIVAREPVHTKSSTSSSLNDTTLPETVCWGHVEEVELINDGSGLGFGIVGGKTSGVVVRTIVPGGLADRDGRLQTGDHILKIGGTNVQGMTSEQVAQVLRNCGNSVRMLVARDPAGDISVTPPAPAALPVALPTVASKGPGSDSSLFETYNVELVRKDGQSLGIRIVGYVGTSHTGEASGIYVKSIIPGSAAYHNGHIQVNDKIVAVDGVNIQGFANHDVVEVLRNAGQVVHLTLVRRKTSSSTSPLEPPSDRGTVVEPLKPPALFLTGAVETETNVDGEDEEIKERIDTLKNDNIQALEKLEKVPDSPENELKSRWENLLGPDYEVMVATLDTQIADDAELQKYSKLLPIHTLRLGVEVDSFDGHHYISSIVSGGPVDTLGLLQPEDELLEVNGMQLYGKSRREAVSFLKEVPPPFTLVCCRRLFDDEASVDEPRRTETSLPETEVDHNMDVNTEEDDDGELALWSPEVKIVELVKDCKGLGFSILDYQDPLDPTRSVIVIRSLVADGVAERSGGLLPGDRLVSVNEYCLDNTSLAEAVEILKAVPPGLVHLGICKPLVEDNEEESCYILHSSSNEDKTEFSGTIHDINSSLILEAPKGFRDEPYFKEELVDEPFLDLGKSFHSQQKEIEQSKEAWEMHEFLTPRLQEMDEEREILVDEEYELYQDPSPSMELYPLSHIQEATPVPSVNELHFGTQWLHDNEPSESQEARTGRTVYSQEAQPYGYCPENVMKENFVMESLPSVPSTEGNSQQGRFDDLENLNSLAKTSLDLGMIPNDVQGPSLLIDLPVVAQRREQEDLPLYQHQATRVISKASAYTGMLSSRYATDTCELPEREEGEGEETPNFSHWGPPRIVEIFREPNVSLGISIVGGQTVIKRLKNGEELKGIFIKQVLEDSPAGKTNALKTGDKILEASGVDKELCNQFVSPAEGRKIATWEVCSEPSSCHSTPAWVTEQDSVSKKKKNHEG

SEQ ID NO: 97542 - protein, 210 aa, Homo sapiens
REIFEQHLKSLKLTQSSTFYSQRLAELTPGFSGADIANICNEAALHAAREGHTSVHTLNFEYAVERVLAGTAKKSKILSKEEQKVVAFHESGHALVGWMLEHTEAVMKVSITPRTNAALGFAQMLPRDQHLFTKEQLFERMCMALGGRASEALSFNEVTSALLCACSAEDASVSTPPSRGTGRPEEGHPHRLLHGEAVWDGTWHRAHLLP

SEQ ID NO: 97543 - protein, 89 aa, Homo sapiens
MNLQPIFWIGLISSVCCVFAQTDENRCLKANAKSCGECIQAGPNCGWCTNSTFLQEGMPTSARCDDLEALKKKGCPPDDIENPRGSKDI

SEQ ID NO: 97544 - protein, 111 aa, Homo sapiens
MVWEVKTNQMPNAVQKLLLVMDKRASGMNDSLELLQCNENLPSSPGYNSCDEHMELDDLPELQAVQSDPTQSGMYQLSSDVSHQEYPRSSWNQNTSDIPETTYRENEVDWL

SEQ ID NO: 97545 - protein, 59 aa, Homo sapiens
MFTRAQVRRILQRVPGKQRFGIYRFLPFFFVLGGTMEWIMIKVRVGQETFYSTSSSLIQ

SEQ ID NO: 97546 - protein, 38 aa, Homo sapiens
  MOD_RES (1)..(1): Any amino acid
XGFACELLSENMLILEEKEIRTNCWCPCGRSRAPWRRT

SEQ ID NO: 97547 - protein, 51 aa, Homo sapiens
MEELHSLDPRRQELLEARFTGVGVSKECCKVSGSQTILMAILTLVWYEKEN

SEQ ID NO: 97548 - protein, 941 aa, Homo sapiens
MPAIMTMLADHAARQLLDFSQKLDINLLDNVVNCLYHGEGAQQRMAQEVLTHLKEHPDAWTRVDTILEFSQNMNTKYYGLQILENVIKTRWKILPRNQCEGIKKYVVGLIIKTSSDPTCVEKEKVYIGKLNMILVQILKQEWPKHWPTFISDIVGASRTSESLCQNNMVILKLLSEEVFDFSSGQITQVKSKHLKDSMCNEFSQIFQLCQFVMENSQNAPLVHATLETLLRFLNWIPLGYIFETKLISTLIYKFLNVPMFRNVSLKCLTEIAGVSVSQYEEQFVTLFTLTMMQLKQMLPLNTNIRLAYSNGKDDEQNFIQNLSLFLCTFLKEHDQLIEKRLNLRETLMEALHYMLLVSEVEETEIFKICLEYWNHLAAELYRESPFSTSASPLLSGSQHFDVPPRRQLYLPMLFKVRLLMVSRMAKPEEVLVVENDQGEVVREFMKDTDSINLYKNMRETLVYLTHLDYVDTERIMTEKLHNQVNGTEWSWKNLNTLCWAIGSISGAMHEEDEKRFLVTVIKDLLGLCEQKRGKDNKAIIASNIMYIVGQYPRFLRAHWKFLKTVVNKLFEFMHETHDGVQDMACDTFIKIAQKCRRHFVQVQVGEVMPFIDEILNNINTIICDLQPQQVHTFYEAVGYMIGAQTDQTVQEHLIEKYMLLPNQVWDSIIQQATKNVDILKDPETVKQLGSILKTNVRACKAVGHPFVIQLGRIYLDMLNVYKCLSENISAAIQANGEMVTKQPLIRSMRTVKRETLKLISGWVSRSNDPQMVAENFVPPLLDAVLIDYQRNVPAAREPEVLSTMAIIVNKLGGHITAEIPQIFDAVFECTLNMINKDFEEYPEHRTNFFLLLQAVNSHCFPAFLAIPPTQFKLVLDSIIWAFKHTMRNVADTGLQILFTLLQNVAQEEAAAQSFYQTYFCDILQHIFSVVTDTSHTAGICG

SEQ ID NO: 97549 - protein, 265 aa, Homo sapiens
MKVLLLKDAKEDDCGQDPYIRELGLYGLEATLIPVLSFEFLSLPSFSEKLSHPEDYGGLIFTSPRAVEAAELCLEQNNKTEVWERSLKEKWNAKSVYVVGNATASLVSKIGLDTEGETCGNAEKLAEYICSRIAMESITVYQTVAHPGIQGNLNSYYSQQGVPASITFFSPSGLTYSLKHIQELSGDNIDQIKTQGPQHPKKNCLQLEPLRKDCTDTAVMFAAIGPTTARALAAQGLPVSCTAESPTPQALATGIRKALQPHGCC

SEQ ID NO: 97550 - protein, 48 aa, Homo sapiens
MAAAAAATAAAAASIRERQTVALKRMLNFNVPHIKNSTGEPVWKAFTL

SEQ ID NO: 97551 - protein, 1740 aa, Homo sapiens
  MOD_RES (1)..(1): Any amino acid
XKIYPEEITPLLPAISGEKIAEDQTCFFLQILLKYMVIQAASLEWKNKENQDTGFKFLFTLFRKYYLPHLFPSFTKLTNIYKPVLDIPHLRPKPVYITTTRDNENIYSTKIPYMAARVVFIKWIVTFFLEKKYLTATQNTKNGVDVLPKIIQTVGGGAVQERAPELDGGGPTEQDKSHSNSSTLSDRRLSNSSLCSIEEEHRMVYEMVQRILLSTRGYVNFVNEVFHQAFLLPSCEIAVTRKVVQVYRKWILQDKPVFMEEPDRKDVAQEDAEKLGFSETDSKEASSESSGHKRSSSWGRTYSFTSAMSRGCVTEEENTNVKAGVQALLQVFLTNSANIFLLEPCAEVPVLLKEQVDACKAVLIIFRRMIMELTMNKKTWEQMLQILLRITEAVMQKPKDKQIKDLFAQSLAGLLFRTLMVAWIRANLCVYISRELWDDFLGVLSSLTEWEELINEWANIMDSLTAVLARTVYGVEMTNLPLDKLSEQKEKKQRGKGCVLDPQKGTTVGRSFSLSWRSHPDVTEPMRFRSATTSGAPGVEKARNIVRQKATEVEECQQSENAPAAGSGHLTVGQQQQVLRSSSTSDIPEPLCSDSSQGQKAENTQNSSSSEPQPIQENKGHVKREHEGITILVRRSSSPAELDLKDDLQQTQGKCRERQKSESTNSDTTLGCTNEAELSMGPWQTCEEDPELNTPTDVVADADARHWLQLSPTDASNLTDSSECLTDDCSIIAGGSLTGWHPDSAAVLWRRVLGILGDVNNIQSPKIHARVFCYLYELWYKLAKIRDNLAISLDNQSSPSPPVLIPPLRMFASWLFKAATLPNEYKEGKLQAYRLICAMMTRRQDVLPNSDFLVHFYLVMHLGLTSEDQDILNTIIRHCPPRFFSLGFPGFSMLVGDFITAAARVLSTDILTAPRSEAVTVLGSLVCFPNTYQEIPLLQSVPEVNEAITGTEDVKHYLINILLKNATEEPNEYARCIAVCSLGVWICEELAQCTSHPQVKEAINVIGVTLKFPNKIVAQVACDVLQLLVSYWEKLQMFETSLPRKMAEILVATVAFLLPSAEYSSVETDKKFIVSLLLCLLDWCMALPVSVLLHPVSTAVLEEQHSARAPLLDYIYRVLHCCVCGSSTYTQQSHYILTLADLSSTDYDPFLPLANVKSSEPVQYHSSAELGNLLTVEEEKKRRSLELIPLTARMVMAHLVNHLGHYPLSGGPAILHSLVSENHDNAHVEGSELSFEVFRSPNLQLFVFNDSTLISYLQTPTEGPVGGSPVGSLSDVRVIVRDISGKYSWDGKVLYGPLEGCLAPNGRNPSFLISSWHRDTFGPQKDSSQVEEGDDVLDKLLENIGHTSPECLLPSQLNLNEPSLTPCGMNYDQEKEIIEVILRQNAQEDEYIQSHNFDSAMKVTSQGQPSPVEPRGPFYFCRLLLDDLGMNSWDRRKNFHLLKKNSKLLRELKNLDSRQCRETHKIAVFYIAEGQEDKCSILSNERGSQAYEDFVAGLGWEVDLSTHCGFMGGLQRNGSTGQTAPYYATSTVEVIFHVSTRMPSDSDDSLTKKLRHLGNDEVHIVWSEHSRDYRRGIIPTAFGDVSIIIYPMKNHMFFIAITKKPEVPFFGPLFDGAIVSGKLLPSLVCATCINASRAVKCLIPLYQSFYEERALYLEAIIQNHREVMTFEDFAAQVFSPSPSYSLSGTGALASSLSADLEEPLSEEETEHPLLPLPRATKPRISRKFRCCTSALSRSSH

SEQ ID NO: 97552 - protein, 247 aa, Homo sapiens
NLLLEYEKQSEQLDVEKERANNFEHRIEDLTRQLRNSTLQCETINSDNEDLLARIETLQSNAKLLEVQILEVQRAKAMVDKELEAEKLQKEQKIKEHATTVNELEELQVQLQKQKKQLQKTMQELELVKKDAQQTTLMNMEIADYERLMKELNQKLTNKNNKIEDLEQEIKIQKQKQETLQEEITSLQSSVQQYEEKNTKIKQLLVKTKKELADSKQAETDHLILQASLKGELEASQQQVEVYKFVF

SEQ ID NO: 97553 - protein, 145 aa, Homo sapiens
  MOD_RES (1)..(1): Any amino acid
XFVYHESGKEIVDWFNALRAARLQYLKMAFPELPESELVPFLTRNYLKQGFMEKTGPKQKEPFKKRWFALDCHERRLLYYKNPLDAFEQGQVFLGNKEQGYEAYEDLPKGIRGNRWKAGLTIVTPERRFVLTCPTASTESGRSSR

SEQ ID NO: 97554 - protein, 190 aa, Homo sapiens
MVEPLREKIRDLEKSFTQKYPPVKFLSEKDRKRILITGGAGFVGSHLTDKLMMDGHEVTVVDNFFTGRKRNVEHWIGHENFELINHDVVEPLYIEVDQIYHLASPASPPNYMYNPIKTLKTNTIGTLNMLGLAKRVGARLLLASTSEVYGDPEVHPQSEDYWGHVNPIGPRACYDEGKRVAETMCYAYMK

SEQ ID NO: 97555 - protein, 196 aa, Homo sapiens
MADNSSDECEEENNKEKKKTSQLTPQRGFSENEDDDDDDDDSSETDSDSDDDDEEHGAPLEGAYDPADYEHLPVSAEIKELFQYISRYTPQLIDLDHKLKPFIPDFIPAVGDIDAFLKVPRPDGKPDNLGLLVLDEPSTKQSDPTVLSLWLTENSKQHNITQHMKVKSLEDAEKNPKAIDTWIESISELHRSKPPA

SEQ ID NO: 97556 - protein, 125 aa, Homo sapiens
SPKGVDIVMDPLGGSDTAKGYNLLKPMGKVVTYGMANLLTGPKRNLMALARTWWNQFSVTALQLLQANRAVCGFHLGYLDGEVELVSGVVARLLALYNQGHIKPHIDSVWPFEKVNVRTLQGGLG

SEQ ID NO: 97557 - protein, 287 aa, Homo sapiens
DPSPPLPWWDKSRLLFHGDWHMDIEQANLHQLATEFVFKGDLDINVRTASKYDDCCFLHLPDLCMTLDLQWLCHGNPHDHHSVTLRAPEFLPEVPLGQLHDSYRAFRSENLNLSIKMDLTRHSGTISQPRILLYSSTLRWMQNFWATWTSVTRPICRGKLFNNLKPSKKKLGQHYKQLSYTALFPQLQVHYWASFAQQRGIQIECSQGHVFTRGTQRLIPQAGTVMRRLISDWSVTQMVSDLSQVTVHLMASPTEENADHCLDPLVTKTHLLSLSSLTYQRHSNRTA

SEQ ID NO: 97558 - protein, 156 aa, Homo sapiens
MARIPVQLMTRAAQLYTLPHAMAMTRLLLLDHGADPNQRDGLGNTPLHLAACTNHVPVITTLLRGGARVDALDRAGRTPLHLAKSKLNILQEGHAQCLEAVRLEVKQIIHMLREYLERLGQHEQRERLDDLCTRLQMTSTKEQVDEVTDLLASFTS

SEQ ID NO: 97559 - protein, 84 aa, Homo sapiens
MWGYLSLMPVFLAVWAISGVWIVFAIAVTNRTVDLSKGFPYISICGSFPPQSCIFSQVLNMGAALGKEPAAYALGRGLPCLHLG

SEQ ID NO: 97560 - protein, 93 aa, Homo sapiens
MEDSFLQSFGRLSLQPQQQQQRQRPPRPPPRGTPPRRHSFRKHLYLLRGLPGSGKTTLASVLGTWESSVNKTKILPLWTLCARDNCSMTFPGP

SEQ ID NO: 97561 - protein, 67 aa, Homo sapiens
  MOD_RES (1)..(1): Any amino acid
XGYLAKDGSKFYCSRTQNEGHPKWFVLGVGQVIKGLDIAMTDMCPGEKRKVVIPPSFAYGKEGYGST

SEQ ID NO: 97562 - protein, 91 aa, Homo sapiens
MDDDDFGGFEAAETFDGGSGETQTTSPAIPWAAFPAVSGVHLSPSSPEIVLDRDHSSSIGCLSSDAIISSPENTHAANSIVSQTIPKAQIQ

SEQ ID NO: 97563 - protein, 115 aa, Homo sapiens
MERRRLWGSIQSRYISMSVWTSPRRLVELAGQSLLKDEALAIAALELLPRELFPPLFMAAFDGRHSQTLKAMVQAWPFTCLPLGVLMKGQHLHLETFKAVLDGLDVLLAQEVRPR

SEQ ID NO: 97564 - protein, 248 aa, Homo sapiens
MQIIRHSEQTLKTALISKNPVLVSQYEKLNAGEQRLMNEAFQPASDLFGPITLHSPSDWITSHPEAPQDFEQFFSDPYRKTPSPNKRSIYIQSIGSLGNTRIISEEYIKWLTGYCKAYFYGLRVKLLEPVPVSVTRCSFRVNENTHNLQIHAGDILKFLKKKKPEDAFCVVGITMIDLYPRDSWNFVFGQASLTDGVGIFSFARYGSDFYSMHYKGKVKKLKKTSSSDYSIFDNYYIPEITSVLLLRS

SEQ ID NO: 97565 - protein, 601 aa, Homo sapiens
MVVTRSARAKASIQAASAESSGQKSFAANGIQAHPESSTGSDARTTAESQTTGKQSLIPRTPKARKRKSRTTGSLPKGTEPSTDGETSEAESNYSVSEHHDTILRVTRRRQILIACSPVSSVRKKPKVTPTKESYTEEIVSEAESHVSGISRIVLPTEKTTGARRSKAKSLTDPSQESHTEAISDAETSSSDISFSGIATRRTRSMQRKLKAQTEKKDSKIVPGNEKQIVGTPVNSEDSDTRQTSHLQARSLSEINKPNFYNNDFDDDFSHRSSENILTVHEQANVESLKETKQNCKDLDEDANGITDEGKEINEKSSQLKNLSELQDTSLQQLVSQRHSTPQNKNAVSVHSNLNSEAVMKSLTQTFATVEVGRWNNNKKSPIKASDLTKFGDCGGSDDEEESTVISVSEDMNSEGNVDFECDTKLYTSAPNTSQGKDNSVLLVLSSDESQQSENSENEEDTLCFVENSGQRESLSGDTGSLSCDNALFVIDTTPGMSADKNFYLEEEDKASEVAIEEEKEEEEDEKSEEDSSDHDENEDEFSDEEDFLNSTKAKLFCRKPSLHLILKKTTVFHHIVNQSINFRKNAEKNDKKQQGMAGLV

SEQ ID NO: 97566 - protein, 37 aa, Homo sapiens
  MOD_RES (1)..(1): Any amino acid
XMLTSEGLRCVWKSFLLDAYKQLNCPPSGFSKDGHIL

SEQ ID NO: 97567 - protein, 17 aa, Homo sapiens
MLADKHAKEIEEESETT

SEQ ID NO: 97568 - protein, 730 aa, Homo sapiens
MVQKSRNGGVYPGPSGEKKLKVGFVGLDPGAPDSTRDGALLIAGSEAPKRGSILSKPRAGGAGAGKPPKRNAFYRKLQNFLYNVLERPRGWAFIYHAYVFLLVFSCLVLSVFSTIKEYEKSSEGALYILEIVTIVVFGVEYFVRIWAAGCCCRYRGWRGRLKFARKPFCVIDIMVLIASIAVLAAGSQGNVFATSALRSLRFLQILRMIRMDRRGGTWKLLGSVVYAHSKELVTAWYIGFLCLILASFLVYLAEKGENDHFDTYADALWWGLITLTTIGYGDKYPQTWNGRLLAATFTLIGVSFFALPAGILGSGFALKVQEQHRQKHFEKRRNPAAGLIQSAWRFYATNLSRTDLHSTWQYYERTVTVPMYRLIPPLNQLELLRNLKSKSGLAFRKDPPPEPSPSQKVSLKDRVFSSPRGVAAKGKGSPQAQTVRRSPSADQSLEDSPSKVPKSWSFGDRSRARQAFRIKGAASRQNSEEASLPGEDIVDDKSCPCEFVTEDLTPGLKVSIRAVCVMRFLVSKRKFKESLRPYDVMDVIEQYSAGHLDMLSRIKSLQSRVDQIVGRGPAITDKDRTKGPAEAELPEDPSMMGRLGKVEKQVLSMEKKLDFLVNIYMQRMGIPPTETEAYFGAKEPEPAPPYHSPEDSREHVDRHGCIVKIVRSSSSTGQKNFSAPPAAPPVQCPPSTSWQPQSHPRQGHGTSPVGDHGSLGRAPETRAGQEGSHGGVSH

SEQ ID NO: 97569 - protein, 558 aa, Homo sapiens
MLLFPQVAVKTEPMSSSETASTTADGSLNNFSGSAIGSSSFSPRPTHQFSPPQIYPSKPYPHILPTPSSQTMAAYGQTQFTTGMQQATAYATYPQPGQPYGISSYGALWAGIKTEGGLSQSQSPGQTGFLSYGTSFSTPQPGQAPYSYQMQGSSFTTSSGIYTGNNSLTNSSGFNSSQQDYPSYPSFGQGQYAQYYNSSPYPAHYMTSSNTSPTTPSTNATYQLQEPPSGITSQAVTDPTAEYSTIHSPSTPIKDSDSDRLRRGSDGKSRGRGRRNNNPSPPPDSDLERVFIWDLDETIIVFHSLLTGSYANRYGRDPPTSVSLGLRMEEMIFNLADTHLFFNDLEECDQVHIDDVSSDDNGQDLSTYNFGTDGFPAAATSANLCLATGVRGGVDWMRKLAFRYRRVKEIYNTYKNNVGGLLGPAKREAWLQLRAEIEALTDSWLTLALKALSLIHSRTNCVNILVTTTQLIPALAKVLLYGLGIVFPIENIYSATKIGKESCFERIIQRFGRKVVYVVIGDGVEEEQGAKKHAMPFWRISSHSDLMALHHALELEYL

SEQ ID NO: 97570 - protein, 121 aa, Homo sapiens
  MOD_RES (1)..(1): Any amino acid
XEGESPTASPHSSATDDLHHSDRYQTFLRVRANRQTRLNARIGKMKRRKQDEGQVCPLCNRPLAGSEQEMSRHVEHCLSKREGSCMAEDDAVDIEHENNNRFEEYEWCGQKRIRATTLLEG

SEQ ID NO: 97571 - protein, 151 aa, Homo sapiens
MVKLFIGNLPREATEQEIRSLFEQYGKVLECDIIKNYGFVHIEDKTAAEDAIRNLHHYKLHGVNINVEASKNKSKASTKLHVGNISPTCTNQELRAKFEEYGPVIECDIVKDYAFVHMERAEDAVEAIRGLDNTEFQGELLWAWVVAPSGV

SEQ ID NO: 97572 - protein, 169 aa, Homo sapiens
MSKIRGLPPEVREPGPGVELGVENGLLCQLIHSPEFNLFSNSVVFESNFIQTHVPEADFQVTKPGNWRDVCEGSATVILGVTSSVPSLPLPNVLLMANVTWPQGPFTTWSTPGDAPVINLSSLKTASCHPPSPASPSCCWRLSRPVAVSHSSQESPSSQQTGTMTLPLK

SEQ ID NO: 97573 - protein, 34 aa, Homo sapiens
  MOD_RES (1)..(1): Any amino acid
XLITVSNHQSCMDDPHLWGILKLRHIWNLKLMRW

SEQ ID NO: 97574 - protein, 105 aa, Homo sapiens
MRNYLKERGDQTVLILHAKVAQKSYGNEKRIKKSKPFSVLITVQEVRMTMEAVCFKKEEKETTSLGFFAHLLVYILWAVDGRKKKNKWNAMVVLNKSLNRVHLLG

SEQ ID NO: 97575 - protein, 81 aa, Homo sapiens
MSSPASTPSRRGSRRGRATPAQTPRSEDARSSPSQRRRGEDSTSTGELQPMPTSPGVDLQSPAAQDVLFSSPPQMHSSVHH

SEQ ID NO: 97576 - protein, 652 aa, Homo sapiens
  MOD_RES (1)..(1): Any amino acid
XCSYEGHVFQDGEDWRLSRCAKCLCRNGVAQCFTAQCQPLFCNQDETVVRVPGKCCPQCSARSCSAAGQVYEHGEQWSENACTTCICDRGEVRCHKQACLPLRCGKGQSRARRHGQCCEECVSPAGSCSYDGVVRYQDEMWKGSACEFCMCDHGQVTCQTGECAKVECARDEELIHLDGKCCPECISRNGYCVYEETGEFMSSNASEVKRIPEGEKWEDGPCKVCECRGAQVTCYEPSCPPCPVGTLALEVKGQCCPDCTSVHCHPDCLTCSQSPDHCDLCQDPTKLLQNGWCVHSCGLGFYQAGSLCLACQPQCSTCTSGLECSSCQPPLLMRHGQCVPTCGDGFYQDRHSCAVCHESCAGCWGPTEKHCLACRDPLHVLRDGGCESSCGKGFYNRQGTCSACDQSCDSCGPSSPRCLTCTEKTVLHDGKCMSECPGGYYADATGRCKVCHNSCASCSGPTPSHCTACSPPKALRQGHCLPRCGEGFYSDHGVCKACHSSCLACMGPAPSHCTGCKKPEEGLQVEQLSDVGIPSGECLAQCRAHFYLESTGICEACHQSCFRCAGKSPHNCTDCGPSHVLLDGQCLSQCPDGYFHQEGSCTECHPTCRQCHGPLESDCISCYPHISLTNGNCRTSCREEQFLNLVGYCAGE

SEQ ID NO: 97577 - protein, 320 aa, Homo sapiens
MGPLSAPPCTEHIKWKGLLLTALLLNFWNLPTTAQVMIEAQPPKVSEGKDVLLLVHNLPQNLTGYIWYKGQIRDLYHYITSYVVDGQIIIYGPAYSGRETVYSNASLLIQNVTREDAGSYTLHIIKRGDGTRGVTGYFTFTLYPKLPMPYITINNLNPRENKDVLTFTCEPKSENYAYIWWLNCQSLPVSPRVKRPIENRILILPSVTRNETGPYQCEIRDRYGGIRSDSVTLNVLYGPDLPRIFPSVTSYYSGENLDLSCFANSNPPAQYSWTINGKFQLSGQKLFIPQITPKHNGLYACSARNSATGEESSTSLTIRV

SEQ ID NO: 97578 - protein, 87 aa, Homo sapiens
MDSRMQLAKLCYDPDFEKLKPEYLQALPEMLKLYSQFLGKQPWFLGDKITFVDFIAYDVLERNQVFEPSCLDAFPNLKDFISRFEHS

SEQ ID NO: 97579 - protein, 97 aa, Homo sapiens
MSYFGEHFWGEKNHGFEVLYHSVKQGPISTKELADFIRERATIEETYSKAMAKLSKLASNGTPMGTFAPLWEVFRVSSDKLALCHLELTRKLQDLIK

SEQ ID NO: 97580 - protein, 102 aa, Homo sapiens
MTTASTSQVRQNYHQDSEAAINRQINLELYASYVYLSMVLVHLIHSQQGHLVTRDRRSPTERSSQAGPCMCLMTWRNLSLSLDLSFPACEMGRWVPACSLKD

SEQ ID NO: 97581 - protein, 593 aa, Homo sapiens
MLQCLVTGHPRPQVRWTKTAGSASDKFQETSVFNETLRIERIARTQGGRYYCKAENGVGVPAIKSIRVDVQSMKNATFQITPDVIKESENIQLGQDLKLSCHVDAVPQEKVTYQWFKNGKPARMSKRLLVTRNDPELPAVTSSLELIDLHFSDYGTYLCMASFPGAPVPDLSVEVNISSETVPPTISVPKGRAVVTVREGSPAELQCEVRGKPRPPVLWSRVDKEAALLPSGLPLEETPDGKLRLERVSRDMSGTYRCQTARYNGFNVRPREAQVQLNVQFPPEVEPSSQDVRQALGRPVLLRCSLLRGSPQRIASAVWRFKGQLLPPPPVVPAAAEAPDHAELRLDAVTRDSSGSYECSVSNDVGSAACLFQVSAKAYSPEFYFDTPNPTRSHKLSKNYSYVLQWTQREPDAVDPVLNYRLSIRQLNQHNAVVKAIPVRRVEKGQLLEYILTDLRVPHSYEVRLTPYTTFGAGDMASRIIHYTEHNTCHFEDEKICGYTQDLTDNFDWTRQNALTQNPKRSPNTGPPTDISGTPEGYYMFIETSRPRELGDRARLVSPLYNASAKFYCVSFFYHMYGKHIVHRKHLHCFPQP

SEQ ID NO: 97582 - protein, 106 aa, Homo sapiens
MASSAAGCVVIVGSGVIGRSWAMLFASGGFQVKLYDIEQQQIRNALENIRKEMKLLEQAGSLKGSLSVEEQLSLISGCPNIQEAVEGAMHIQRRAFTMLARMVSIS

SEQ ID NO: 97583 - protein, 141 aa, Homo sapiens
MPVAEAPQVAGGQGDGGDGEEAEPEGMFKACEDSKRKARGYLRLVPLFVLLALLVLASAGVLLWYFLGYKAEVMVSQVYSGSLRVLNRHFSQDLTRRESSAFRSETAKAQKMLKELITSTRLGTYYNSSSVYSFGEGPLTC

SEQ ID NO: 97584 - protein, 67 aa, Homo sapiens
MAEKFDCHYCRDPLQGKKYVQKDGHHCCLKCFDKFCANTCVECRKPIGADSKEVHYKNRFWHDTCFR

SEQ ID NO: 97585 - protein, 157 aa, Homo sapiens
EKLGAEDPWYCPNCKEHQQATKKLDLWSLPPVLVVHLKRFSYSRYMRDKLDTLVDFPINDLDMSEFLINPNAGPCRYNLIAVSNHYGGMGGGHYTAFAKNKDDGKWYYFDDSSVSTASEDQIVCWAHNPLKASESRREVCWCTCGKFFWRKEKMILL

SEQ ID NO: 97586 - protein, 68 aa, Homo sapiens
MLLVPKAQGLVEMLQTIYETESCFSADGMSGREPSLEILPRTSLHSIPVTVEVKPVLPRAMPSSMGGG

SEQ ID NO: 97587 - protein, 233 aa, Homo sapiens
MVSFRLSNKTASPSIKLLVDDPIVVNPGEAITLVCVTTGGEPAPSLTWVRSFGTLPEKTVLNGGTLTIPAITSDDAGTYSCIANNNVGNPAKKSTNIIVRALKKGRFWITPDPYHKDDNIQIGREVKISCQVEAVPSEELTFSWFKNGRPLRSSERMVITQTDPDVSPGTTNLDIIDLKFTDFGTYTCVASLKGGGISDISIDVNISSSTGKITIGHQRRRHNRTAMSSNWQT

SEQ ID NO: 97588 - protein, 70 aa, Homo sapiens
MPNSEPASLLELFNSIATQGELVRSLKAGNASKDEIDSAVKMLVSLKMSYKAAAGEDYKADCPPGNPAPT

SEQ ID NO: 97589 - protein, 116 aa, Homo sapiens
MTSFSTSAQCSTSDSACRISPGQINQVRPKLPLLKILHAAGAQGEMFTVKEVMHYLGQYIMVKQLYDQQEQHMVYCGGDLLGELLGRQSFSVKDPSPLYDMLRKNLVTLATATTGD

SEQ ID NO: 97590 - protein, 363 aa, Homo sapiens
MAEGGGCRERPDAETQKSELGPLMRTTLQRGAQWYLIDSRWFKQWKKYVGFDSWDMYNVGEHNLFPGPIDNSGLFSDPESQTLKEHLIDELDYVLVPTEAWNKLLNWYGCVEGQQPIVRKVVEHGLFVKHCKVEVYLLELKLCENSDPTNVLSCHFSKADTIATIEKEMRKLFNIPAERETRLWNKYMSNTYEQLSKLDNTVQDAGLYQGQVLVIEPQNEDGTWPRQTLQSKGPQEMLTQQGMALQNYDNKLVKCIEELCQKQEELCWQIQQEEDKKQRLQNEVRQLTEKLACVNEKLARVNENLARKIASCSKFYQTIAETEATYLKMLESSQTLLSVLKREAGNLTKATASDQKSSGGRDS

SEQ ID NO: 97591 - protein, 415 aa, Homo sapiens
MSQDTEVDMKEVELNELEPEKQPMNAASGAAMSLAGAEKNGLVKIKVAEDEAEAAAAAKFTGLSKEELLKVAGSPGWVRTRWALLLLFWLGWLGMLAGAVVIIVRAPRCRELPAQKWWHTGALYRIGDLQAFQGHGAGNLAGLKGRLDYLSSLKVKGLVLGPIHKNQKDDVAQTDLLQIDPNFGSKEDFDSLLQSAKKKSIRVILDLTPNYRGENSWFSTQVDTVATKVKDALEFWLQAGVDGFQVRDIENLKDASSFLAEWQNITKGFSEDRLLIAGTNSSDLQQILSLLESNKDLLLTSSYLSDSGSTGEHTKSLVTQYLNATGNRWCSWSLSQARLLTSFLPAQLLRLYQLMLFTLPGTPVFSYGDEIGLDAAALPGQPMEAPVMLWDESSFPDIPGAVSANMTVKVRVLDG

SEQ ID NO: 97592 - protein, 1200 aa, Homo sapiens
  MOD_RES (1)..(1): Any amino acid
XFRLVVKTALKLLLVFVEYSESNAPLLIQAVTAVDTKRGVKPWSNIMEILEEKDGVDTELLVYAMTLVNKTLSGLPDQDTFYDVVDCLEELGIAAVSQRHLNKKGTDLDLVEQLNIYEVALRHEDGDETTEPPPSGCRDRRRASVCSSGGGEHRGLDRRRSRRHSVQSIKSTLSAPTSPCSQSAPSFKPNQVRDLREKSSPSGLLTSSFRQHQESLAAERERRRQEREERLQRIEREERNKFSRDYLDKREEQRQAREERYKYLEQLAAEEHEKELRSRSVSRGRADLSLDLTSPAAPACLAPLSHSPSSSDSQEALTVSASSPGTPHHPQASAGDPEPESEAEPEAEAGAGQVADEAGQDIASAHEGAETEVEQALEQEPEERASLSEKERQNEGVNERDNCSASSVSSSSSTLEREEKEDKLSRDRTTGLWPAGVQDAGVNGQCGDILTNKRFMLDMLYAHNRKSPDDEEKGDGEAGRTQQEAEAVASLATRISTLQANSQTQDESVRRVDVGCLDNRGSVKAFAEKFNSGDLGRGSISPDAEPNDKVPETAPVQPKTESDYIWDQLMANPRELRIQDMDFTDLGEEDDIDVLDVDLGHREAPGPPPPPPPTFLGLPPPPPPPLLDSIPPPPVPGNLLVPPPPVFNAPQGLGWSQVPRGQPTFTKKKKTIRLFWNEVRPFDWPCKNNRRCREFLWSKLEPIKVDTSRLEHLFESKSKELSVSKKTAADGKRQEIIVLDSKRSNAINIGLTVLPPPRTIKIAILNFDEYALNKEGIEKILTMIPTDEEKQKIQEAQLANPEIPLGSAEQFLLTLSSISELSARLHLWAFKMDYETTEKEVAEPLLDLKEGIDQLENNKTLGFILSTLLAIGNFLNGTNAKAFELSYLEKVPEVKDTVHKQSLLHHVCTMVVENFPDSSDLYSEIGAITRSAKVDFDQLQDNLCQMERRCKASWDHLKAIAKHEMKPVLKQRMSEFLKDCAERIIILKIVHRRIINRFHSFLLFMGHPPYAIREVNINKFCRIISEFALEYRTTRERVLQQKQKRANHRERNKTRGKMITDSGKFSGSSPAPPSQPQGLSYAEDAAEHENMKAVLKTSSPSVEDATPALGVRTRSRASRGSTSSWTMGTDDSPNVTDDAADEIMDRIVKSATQVPSQRVVPRERKRSRANRKSLRRTLKSGLTPEEARALGLVGTSELQL

SEQ ID NO: 97593 - protein, 145 aa, Homo sapiens
MAGCCAALAAFLFEYDTPRIVLIRSRKVGLMNRAVQLLILAYVIGPAFLKAAENFTLLVKNNIWYPKFNFSKRNILPNITTTYLKSCIYDAKTDPFCPIFRLGKIVENAGHSFQDMAVEGGIMGIQVNWDCNLDRAASLCLPRYS

SEQ ID NO: 97594 - protein, 520 aa, Homo sapiens
MSDTLTADVIGRRVEVNGEHATVRFAGVVPPVAGPWLGVEWDNPERGKHDGSHEGTVYFKCRHPTGGSFIRPNKVNFGTDFLTAIKNRYVLEDGPEEDRKEQIVTIGNKPVETIGFDSIMKQQSQLSKLQEVSLRNCAVSCAGEKGGVAEACPNIRKVDLSKNLLSSWDEVIHIADQLRHLEVLNVSENKLKFPSGSVLTGTLSVLKVLVLNQTGITWAEVLRCVAGCPGLEELYLESNNIFISERPTDVLQTVKLLDLSSNQLIDENQLYLIAHLPRLEQLILSDTGISSLHFPDAGIGCKTSMFPSLKYLVVNDNQISQWSFFNELEKLPSLRALSCLRNPLTKEDKEAETARLLIIASIGQLKTLNKCEILPEERRRAELDYRKAFGNEWKQAGGHKDPEKNRLSEEFLTAHPRYQFLCLKYGAPEDWELKTQQPLMLKNQLLTLKIKYPHQLDQKVLEKQLPGSMTIQKVKGLLSRLLKVPVSDLLLSYESPKVSCPAKYKVKVKLSPRIMTLNCL

SEQ ID NO: 97595 - protein, 59 aa, Homo sapiens
  MOD_RES (1)..(1): Any amino acid
XRESAKPEISAMSAHDKAALSEEELERKSKSIIDEFLHINDFKCNHHLLSTYKNHLGYL

SEQ ID NO: 97596 - protein, 218 aa, Homo sapiens
  MOD_RES (1)..(1): Any amino acid
XHRVSEREATEVYMKNSFKDVDHLFQKKLAAQLDKKRDDFCKQNQEASSDRCSALLQVIFSPLEEEVKAGIYSKPGGYCLFIQKLQDLEKKYYEEPRKGIQAEEILQTYLKSKESVTDAILQTDQILTEKEKEIEVECVKAESAQASAKMVEEMQIKYQQMMEEKEKSYQEHVKQLTEKMERERAQLLEEQEKTLTSKLQVSKCITLWFVFLFSLCSS

SEQ ID NO: 97597 - protein, 414 aa, Homo sapiens
MAAKSQPNIPKAKSLDGVTNDRTASQGQWGRAWEVDWFSLASVIFLLLFAPFIVYYFIMACDQYSCALTGPVVDIVTGHARLSDIWAKTPPITRKAAQLYTLWVTFQVLLYTSLPDFCHKFLPGYVGGIQEGAVTPAGVVNKYQINGLQAWLLTHLLWFANAHLLSWFSPTIIFDNWIPLLWCANILGYAVSTFAMVKGYFFPTSARDCKFTGNFFYNYMMGIEFNPRIGKWFDFKLFFNGRPGIVAWTLINLSFAAKQRELHSHVTNAMVLVNVLQAIYVIDFFWNETWYLKTIDICHDHFGWYLGWGDCVWLPYLYTLQVRRVCTWCTTPCSCPPRTPWASCCWAWWATTSSGWPTTRRTCSAARMGAASSGAGSPRSSSAPTHPPMGRGTTASCWCRASGAWPATSTTSAT

SEQ ID NO: 97598 - protein, 124 aa, Homo sapiens
FIMLSCEWPGGEPPATLGWLDEQQQPLGGSSSSMAVHLLQAQEDLAGREFTCRGTHLLRTPDPHCHLQLGYPAPPNVTISRLTYGRHRREVQLQWAILGPGNLTGFLVQRKGAKAPTEGFQRRC

SEQ ID NO: 97599 - protein, 248 aa, Homo sapiens
MYQVTVPLSHLINAFHTPKNTSVSLSGVSVSQNQHRDVVPEHEAPSSEPSLNLRDLGLSELKIGQIDQLVENLLPGFCKGKNISSHWHTSHVSAQSFFENKYGNLDIFSTLRSSCLYRHHSRALQSICSDLQYWPVFIQSRGFKTLKSRTRRLQSTSERLAETQNIAPSFVKGFLLRDRGSDVESLDKLMKTKNIPEAHQDAFKTGFAEGFLKAQALTQKTNDSLRRTRLILFVLLLFGIYGLLKNPF

SEQ ID NO: 97600 - protein, 55 aa, Homo sapiens
MSRLLGGTLERVCKAVLLLCLLHFLVAVILYFDVYAQHLAFFSRFSARGPAHALH

SEQ ID NO: 97601 - protein, 66 aa, Homo sapiens
MSSSKKSKEKEKEKDKIKEKEKDSKDKEKDKKTVNGHTFSSIPVVGPISCSQCMKPFTNKDAYTCA

SEQ ID NO: 97602 - protein, 42 aa, Homo sapiens
MALETVPKDLRHLRACLLCSLVKVSVGDLVVGPMGDQDYRPV

SEQ ID NO: 97603 - protein, 246 aa, Homo sapiens
MEPVPLQDFVRALDPASLPRVLRVCSGVYFEGSIYEISGNECCLSTGDLIKVTQVRLQKVVCENPKTSQTMELAPNFQVRRTIVKIPSTLEVDVEDVTASSRHVHFIKPLLLSEVLAWEGPFPLSMEILEVPEGRPIFLSPWVGSLQKGQRLCVYGLASPPWRVLASSKGRKVPRHFLVSGGYQGKLRRRPREFPTAYDLLGAFQPGRPLRVVATKDCEGEREENPEFTSLAVGDRLEVLGPGQAH

SEQ ID NO: 97604 - protein, 205 aa, Homo sapiens
MEALLEGIQNRGHGGGFLTSCEAELQELMKQIDIMVAHKKSEWEGRTHALETCLKIREQELKSLRSQLDVTHKEVGMLHQQVEEHEKIKQEMTMEYKQELKKLHEELCILKRSYEKLQKKQMREFRGNTKNHREDRSEIERLTAKIEEFRQKSLDWEKQRLIYQQQVSSLEAQRKALAEQSEIIQSVFLGSACQSETEIRVCGTF

SEQ ID NO: 97605 - protein, 277 aa, Homo sapiens
MGTALLQRGGCFLLCLSLLLLGCWAELGSGLEFPGAEGQWTRFPKWNACCESEMSFQLKTRSARGLVLYFDDEGFCDFLELILTRGGRLQLSFSIFCAEPATLLADTPVNDGAWHSVRIRRQFRNTTLFIDQVEAKWVEVKSKRRDMTVFSGLFVGGLPPELRAAALKLTLASVREREPFKGWIRDVRVNSSQVLPVDSGEVKLDDEPPNSGGGSPCEAGEEGEGGVCLNGGVCSVVDDQAVCDCSRTGFRGKDCSQDNNVEGLAHLMMGDQGKSKD

SEQ ID NO: 97606 - protein, 19 aa, Homo sapiens
  MOD_RES (1)..(1): Any amino acid
XEYGNKLVFGAGTILRVKS

SEQ ID NO: 97607 - protein, 143 aa, Homo sapiens
MTALSSENCSFQYQLRQTNQPLDVNYLLFLIILGKILLNILTLGMRRKNTCQNFMEYFCISLAFVDLLLLVNISIILYFRDFVLLSIRFTKYHICLFTQIISFTYGFLHYPVFLTACIDYCLNFSKTTKLSFKCQKLFYFFTV

SEQ ID NO: 97608 - protein, 173 aa, Homo sapiens
MDCLLELSATDTKIEESSSQSFVASENQVGAAESKIMEKRPEEESEDSKMDSFLDMQLTEDLDSLIQNAFEKLNSSPDDQVYSFLPSQDVNSFNDSSEFINPDSSNMTPIFSTQNMNLNGENLENSGSTLSLNPLPSHSVLNESKCFIKDNTLALESNYPEDSLLSSSLNVAS

SEQ ID NO: 97609 - protein, 244 aa, Homo sapiens
MALPSISFGVICQPLEKGTSTHRRRGTGLGGKGSRIWLDTKRVRFTRDSWVVMEASQERDPSWRVQYQMEMMRSLRHVNIDHLHVGWYQSTYYGSFVTRALLDSQFSYQHAIEESVVLIYDPIKTAQGSLSLKAYRLTPKLMEVCKEKDFSPEALKKANITFEYMFEEVPIVIKNSHLINVLMWELEKKSAVADKHELLSLASSNHLGKNLQLLMDRVDEMSQDIVKYNTYMRNTSKQQQQKHQ

SEQ ID NO: 97610 - protein, 120 aa, Homo sapiens
MSESGHSQPGLYGIERRRRWKEPGSGGPQNLSGPGGRERDYIAPWERERRDASEETSTSVMQKTPIILSKPPAERSKQPPPPTAPAAPPAPAPLEKPIVLMKPREEGKGPVAVTGASTPE

SEQ ID NO: 97611 - protein, 72 aa, Homo sapiens
MADQDPAGISPLQQMVASGTGAVVTSLFMTPLDVVKVRLQSQRPSMASELMPSSRLWSLSYTKLPSSLQSTG

SEQ ID NO: 97612 - protein, 1047 aa, Homo sapiens
  MOD_RES (1)..(1): Any amino acid
XLNFQRQLRQEVVVCMRRDTALETALNAKAYKRSKRQSLREARITEKLEKQQKIEQERKRRQKHQEYLNSILQHAKDFKEYHRSVTGKIQKLTKAVATYHANTEREQKKENERIEKERMRRLMAEDEEGYRKLIDQKKDKRLAYLLQQTDEYVANLTELVRQHKAAQVAKEKKKKKKKKAENAEGQTPAIGPDGEPLDETSQMSDLPVKVIHVESGKILTGTDAPKAGQLEAWLEMNPGYEVAPRSDSEESGSEEEEEEEEEEQPQAAQPPTLPVEEKKKIPDPDSDDVSEVDARHIIENAKQDVDDEYGVSQALARGLQSYYAVAHAVTERVDKQSALMVNGVLKQYQIKGLEWLVSLYNNNLNGILADEMGLGKTIQTIALITYLMEHKRINGPFLIIVPLSTLSNWAYEFDKWAPSVVKVSYKGSPAARRAFVPQLRSGKFNVLLTTYEYIIKDKHILAKIRWKYMIVDEGHRMKNHHCKLTQVLNTHYVAPRRLLLTGTPLQNKLPELWALLNFLLPTIFKSCSTFEQWFNAPFAMTGEKVDLNEEETILIIRRLHKVLRPFLLRRLKKEVEAQLPEKVEYVIKCDMSALQRVLYRHMQAKGVLLTDGSEKDKKGKGGTKTLMNTIMQLRKICNHPYMFQHIEESFSEHLGFTGGIVQGLDLYRASGKFELLDRILPKLRATNHKVLLFCQMTSLMTIMEDYFAYRGFKYLRLDGTTKAEDRGMLLKTFNEPGSEYFIFLLSTRAGGLGLNLQSADTVIIFDSDWNPHQDLQAQDRAHRIGQQNEVRVLRLCTVNSVEEKILAAAKYKLNVDQKVIQAGMFDQKSSSHERRAFLQAILEHEEQDEEEDEVPDDETVNQMIARHEEEFDLFMRMDLDRRREEARNPKRKPRLMEEDELPSWIIKDDAEVERLTCEEEEEKMFGRGSRHRKEVDYSDSLTEKQWLKAIEEGTLEEIEEEVRQKKSSRKRKRDSDAGSSTPTTSTRSRDKDDESKKQKKRGRPPAEKLSPNPPNLTKKMKKIVDAVIKYKDRVTEQQAHPLCVLIF

SEQ ID NO: 97613 - protein, 48 aa, Homo sapiens
  MOD_RES (1)..(1): Any amino acid
XMISEKMVKLAAENTEMQKDYSSFLSRKSKIKIAKDDCVFGNIKEEDL

SEQ ID NO: 97614 - protein, 442 aa, Homo sapiens
MDPLNLSWYDDDLERQNWSRPFNGSDGKADRPHYNYYATLLTLLIAVIVFGNVLVCMAVSREKALQTTTNYLIVSLAVADLLVATLVMPWVVYLEVGEWKFSRIHCDIFVTLDVMMCTASILNLCAISIDRYTAVAMPMLYNTRYSSKRRVTVMISIVWVLSFTISCPLLFGLNNADQNECIIANPAFVVYSSIVSFYVPFIVTLLVYIKIYIVLRRRRKRVNTKRSSRAFRAHLRAPLKGNCTHPEDMKLCTVIMKSNGSFPVNRRRVEAARRAQELEMEMLSSTSPPERTRYSPIPPSHHQLTLPDPSHHGLHSTPDSPAKPEKNGHAKDHPKIAKIFEIQTMPNGKTRTSLKTMSRRKLSQQKEKKATQMLAIVLGVFIICWLPFFITHILNIHCDCNIPPVLYSAFTWLGYVNSAVNPIIYTTFNIEFRKAFLKILHC

SEQ ID NO: 97615 - protein, 8 aa, Homo sapiens
MPLSSPNA

SEQ ID NO: 97616 - protein, 206 aa, Homo sapiens
  MOD_RES (1)..(1): Any amino acid
XRATFMEVLTKILQQGTEFDTLAETVLADRFERLVELVTMMGDQGELPIAMALANVVPCSQWDELARVLVTLFDSRHLLYQLLWNMFSKEVELADSMQTLFRGNSLASKIMTFCFKVYGATYLQKLLDPLLRIVITSSDWQHVSFEVDPTRLEPSESLEENQRNLLQMTEKFFHAIISSSSEFPPQLRSVCHCLYQVPKNSHPSMV

SEQ ID NO: 97617 - protein, 157 aa, Homo sapiens
MEQTWTRDYFAEDDGEMVPRTSHTAAFLSDTKDRGPPVQSQIWRSGEKVPFVQTYSLRAFEKPPQVQTQALRDFEKTWRVCMVIKRLLKTKPPNSCVVLVGEARMLTPQPPPFFVFFFSPFGSAVMQKGQAELQSSSKLCGVLSKGQPACMFLFIER

SEQ ID NO: 97618 - protein, 60 aa, Homo sapiens
MDNVQPKIKHRPFCFSVKGHVKMLRLDIINSLVTTVFMLIVSVLALIPETTTLTVGGGLF

SEQ ID NO: 97619 - protein, 125 aa, Homo sapiens
MAERQEEQRGSPPLRAEGKADAEVKLILYHWTHSFSSQKVRLVIAEKALKCEEHDSKLLDHDNVKYLKKILDELEKVLDQVETELQRRNEETPASHMQHTGGRTAHLVPKTTVDLAELAALTVYQ

SEQ ID NO: 97620 - protein, 232 aa, Homo sapiens
MAARLLLLGILLLLLPLPVPAPCHTAARSECKRSHKFVPGAWLAGEGVDVTSLRRSGSFPVDTQRFLRPDGTCTLCENALQEGTLQRLPLALTNWRAQGSGCQRHVTRAKVSSTEAVARDAARSIRNDWKVGLDVTPKPTSNVHVSVAGSHSQAANFAAQKTHQDQYSFSTDTVECRFYSSSAIVSASGFYMWPNTILLPTWPREAKRLDTHQTDGKGRFRLFFREVAGFTR

SEQ ID NO: 97621 - protein, 188 aa, Homo sapiens
MASSCPGTPSPAGLPPPSVATPGPAAPPEPAFPDIYGGDAQLWEAHFRGIGRAYRALGKQDDFAIRVLTENFTLPFPFAWPPGSDPACGPLFYDPRDRADFDFLLRGPGASPPALLRPLHATAQAAMRKRRLERLALSCARARGPGPASSCCCPAPPPPSRSPRPALPATAPPGWPRPRRCPESEQNK

SEQ ID NO: 97622 - protein, 110 aa, Homo sapiens
MEAIAKYDFKATADDELSFKRGDILKVLNEECDQNWYKAELNGKDGFIPKNYIEMKPHPWFFGKIPRAKAEEMLSKQRHDGAFLIRESESAPGDFSLSVKFGNDVQHFKV

SEQ ID NO: 97623 - protein, 217 aa, Homo sapiens
MVRTDGHTLSEKRNYQVTNSMFGASRKKFVEGVDSDYHDENMYYSQSSMFPHRSEKDMLASPSTSGQLSQFGASLYGQQSALGLPMRGMSNNTPQLNRSLSQGTQLPSHVTPTTGVPTMSLHTPPSPSRGILPMNPRNMMNHSQVGQGIGIPSRTNSMSSSGLGSPNRSSPSIICMPKQQPSRQPFTVNRNQAFGMNNSLSSNIFNGTDGSENVTGL

SEQ ID NO: 97624 - protein, 47 aa, Homo sapiens
MATDSWALAVDEQEAAVKSVLSKPVPLPRKQMKRRKRTELPSPYSTS

SEQ ID NO: 97625 - protein, 169 aa, Homo sapiens
NYTNSFGGEWSAPDTMKRYSMYLTPKGGVRTSYQPSSPGRFTKETTQKNFNNLYGTKGNYTSRVWEYSSSIQNSDNDLPVVQGSSSFSLKGTGKTPYQFTTLGQATAEFSKPLGRSGLSKNNPGYPSLMRSQSPKAQPQTWKSGKQTMLSHYRPFYVNKGNGIGSNEAP

SEQ ID NO: 97626 - protein, 60 aa, Homo sapiens
MGLPEERVRSGSGSRGQEEAGAGGRARSWSPPPENSGETLPRNFTGRLHALAHSFGTTLM

SEQ ID NO: 97627 - protein, 48 aa, Homo sapiens
MMHQIYSCSDENIEVFTTVIPSKVSSPARRRAKSSQHLLTKNTLLDQG

SEQ ID NO: 97628 - protein, 33 aa, Homo sapiens
MDGEDIPDFSSLKEETAYWKELSLKYKQSFQEA

SEQ ID NO: 97629 - protein, 133 aa, Homo sapiens
MPASMFCLDDLGPHIELGPGGCISLSRKGHVQEWKMCKKGRRRHFTEKETLLSKVLEVLDPDRKLEDTWAYCQDTRKGMKEPTKLLKKHSTQVYLGPSKKTSVSNAGQWLYEEKPHKMDLLHENGPRPGLHEN

SEQ ID NO: 97630 - protein, 1090 aa, Homo sapiens [sequence omitted]

SEQ ID NO: 97631 - protein, 305 aa, Homo sapiens
  MOD_RES (1)..(1): Any amino acid
XLLMALVSWVMDYAIAACLQAQQWMSRGLNTSILLQYLAWVTYPVVLITFSAGFTQILAPQAVGSGIPEMKTILRGVVLKEYLTLKTFIAKVIGLTCALGSGMPLGKEGPFVHIASMCAALLSKFLSLFGGIYENESRNTEMLAAACAVGVGCCFAAPIGGVLFSIEVTSTFFAVRNYWRGFFAATFSAFIFRVLAVWNRDEETITALFKTRFRLDFPFDLQELPAFAVIGIASGFGGALFVYLNRKIVQVMRKQKTINRFLMRKLECNGAISAHRNLRLLGSSDSPASASQVAGITDACSSRLW

SEQ ID NO: 97632 - protein, 251 aa, Homo sapiens
MPAAHATSSAPTVTLVQLPNGQTVQVHGVIQAAQPSVIQSPQVQTVQISTIAESEDSQESVDSVTDSQKRREILSRRPSYRKILNDLSSDAPGVPRIEEEKSEEETSAPAITTVTVPTPIYQTSSGQYIAITQGGAIQLANNGTDGVQGLQTLTMTNAAATQPGTTILQYAQTTDGQQILVPSNQVVVQAASGDVQTYQIRTAPTSTIAPGVVMASSPALPTQPAEEAARKREVRLMKNREAARECRRKKK

SEQ ID NO: 97633 - protein, 373 aa, Homo sapiens
MAEASRPRLSIPCSSITDVRTTTALEMPDRENTFVVKVEGPSEYIMETVDAQHVKAWVSDIQECLSPGPCPATSPRPMTLPLAPGTSFLTRENTDSLELSCLNHSESLPSQDLLLGPSESNDRLSQGAYGGLSDRPSASISPSSASIAASHFDSMELLPPELPPRIPIEEGPPTGTVHPLSAPYPPLDTPETATGSFLFQGEPEGGEGDQPLSGYPWFHGMLSRLKAAQLVLTGGTGSHGVFLVRQSETRRGEYVLTFNFQGKAKHLRLSLNEEGQCRVQHLWFQSIFDMLEHFRVHPIPLESGGSSDVVLVSYVPSSQRQQGEQSRSAGEEVPVHPRSEAGSRLGAMRGCAREMDATPMPPAPSCPSERVTV

SEQ ID NO: 97634 - protein, 293 aa, Homo sapiens
MNHDFQALALESRGMGELLPTKKFWEPDDSTKDGQKGIFLGDDEWRETAWGASHHSMSQPIMVQRRSGQGFHGNSEVNAILSPRSESGGLGVSMVEYVLSSSPADKLDSRFRKGNFGTRDAETDGPEKGDQKGKASPFEEDQNRDLKQGDDDDSKINGRGLPNGMDADCKDFNRTPGSRQASPTEVVERLGPNTNPSEGLGPLPNPTANKPLVEEFSNPETQNLDAMEQVGLESLQFDYPGNQVPMDSSGATVGLFDYNSQQQLFQRTNALTVQQLTAAQQQQYALAAAQQPH

SEQ ID NO: 97635 - protein, 845 aa, Homo sapiens
  MOD_RES (1)..(1): Any amino acid
XAGKVELWQRLGAEGQRRREPCPDLPSRMTGEEGKEVITEIEKKLPRLYKVLKTHISSQNSELSSAALQALGFCLYNPKITSELSEANALELLSKLNDTIKNSDKNVRTRALWVISKQTFPSEVVGKMVSSIIDSLEILFNKGETHSAVVDFEALNVIVRLIEQAPIQMGEEAVRWAKLVIPLVVHSAQKVHLRGATALEMGMPLLLQKQQEIASITEQLMTTKLISELQKLFMSKNETYVLKLWPLFVKLLGRTLHRSGSFINSLLQLEELGFRSGAPMIKKIAFIAWKSLIDNFALNPDILCSAKRLKLLMQPLSSIHVRTETLALTKLEVWWYLLMRLGPHLPANFEQVCVPLIQSTISIDSNASPQGNSCHVATSPGLNPMTPVHKGASSPYGAPGTPRMNLSSNLGGMATIPSIQLLGLEMLLHFLLGPEALSFAKQNKLVLSLEPLEHPLISSPSFFSKHANTLITAVHDSFVAVGKDAPDVVVSAIWKELISLVKSVTESGNKKEKPGSEVLTLLLKSLESIVKSEVFPVSKTLVLMEITIKGLPQKVLGSPAYQVANMDILNGTPALFLIQLIFNNFLECGVSDERFFLSLESLVGCVLSGPTSPLAFSDSVLNVINQNAKQLENKEHLWKMWSVIVTPLTELINQTNEVNQGDALEHNFSAIYGALTLPVNHIFSEQRFPVATMKTLLRTWSELYRAFARCAALVATAEENLCCEELSSKIMSSLEDEGFSNLLFVDRIIYIITVMVDCIDFSPYNIKYQPKVKSPQRPSDWSKKKNEPLGKLTSLFKLIVKVIYSFHTLSFKEAHSDTLFTIGNSITGIISSVLGHISLPSMIRK

SEQ ID NO: 97636 - protein, 44 aa, Homo sapiens
MEYFMVPTQKVPSLQHFRKTEKEVIGGLCRCARWRPTCTRKSSR

SEQ ID NO: 97637 - protein, 295 aa, Homo sapiens
MSRESDVEAQQSHGSSACSQPHGSVTQSQGSSSQSQGISSSSTSTMPNSSQSSHSSSGTLSSLETVSTQELYSIPEDQEPEDQEPEEPTPAPWARLWALQDGFANLETESGHVTQSDLELLLSSDPPASASQSAGIRECVNDNYWFGRDKSCEYCFDEPLLKRTDKYRTYSKKHFRIFREVGPKNSYIAYIEDHSGNGTFVNTELVGKGKRRPLNNNSEIALSLSRNKVFVFFDLTVDDQSVYPKALRDEYIMSKTLGSGACGEVKLAFERKTCKKVAIKIISKRKFAIGSAREA

SEQ ID NO: 97638 - protein, 139 aa, Homo sapiens
MAPKLITVLCLGFCLNQKICPHAGAQDKFSLSAWPSPVVPLGGRVTLSCHSHLRFVIWTIFQTTGTRSHELHTGLSNNITISPVTPEHAGTYRCVGIYKHASKWSAESNSLKIIVTAFSLHPGGPHDEAGREVDPLLQL

SEQ ID NO: 97639 - protein, 663 aa, Homo sapiens
TFLANISSSFEPGRMGEGPVGEPPPLQPPALRLHDFLVTLRGSPDWEPMLGLLGDMLALLGQEQTPRDFLVHQAGVLGGLVEVLLGALVPGGPPTPTRPPCTRDGPSDCVLAADWLPSLLLLLEGTRWQALVQVQPSVDPTNATGLDGREAAPHFLQGLLGLLTPTGELGSKEALWGGLLRTVGAPLYAAFQEGLLRVTHSLQDEVFSILGQPEPDTNGQCQGGNLQQLLLWGVRHNLSWDVQALGFLSGSPPPPPALLHCLSTGVPLPRASQPSAHISPRQRRAITVEALCENHLGPAPPYSISNFSIHLLCQHTKPATPQPHPSTTAICQTAVWYAVSWAPGAQGWLQACHDQFPDEFLDAICSNLSFSALSGSNRRLVKRLCAGLLPPPTSCPEGLPPVPLTPDIFWGCFLENETLWAERLCGEASLQAVPPSNQAWVQHVCQGPTPDVTASPPCHIGPCGERCPDGGSFLVMVCANDTMYEVLVPFWPWLAGQCRISRGGNDTCFLEGLLGPLLPSLPPLGPSPLCLTPGPFLLGMLSQLPRCQSSVPALAHPTRLHYLLRLLTFLLGPGAGGAEAQGMLGRALLLSSLPDNCSFWDAFRPEGRRSVLRTIGEYLEQDEEQPTPSGFEPTVNPSSGISKMELLACFSVSALPEGKLLEQ

SEQ ID NO: 97640 - protein, 476 aa, Homo sapiens
  MOD_RES (1)..(1): Any amino acid
XPHKRNLYYFSYPLFVGFALLRLVAFHLGLLFVWLCQRFSRALMAAKRSSGAAPAPASASAPAPVPGGEAERVRVFHKQAFEYISIALRIDEDEKAGQKEQAVEWYKKGIEELEKGIAVIVTGQGEQCERARRLQAKMMTNLVMAKDRLQLLESGAVPKRKDPLTHTSNSLPRSKTVMKTGSAGLSGHHRAPSYSGLSMVSGVKQGSGPAPTTHKGTPKTNRTNKPSTPTTATRKKKDLKNFRNVDSNLANLIMNEIVDNGTAVKFDDIAGQDLAKQALQEIVILPSLRPELFTGLRAPARGLLLFGPPGNGKTMLAKAVAAESNATFFNISAASLTSKYVGEGEKLVRALFAVARELQPSIIFIDEVDSLLCERREGEHDASRRLKTEFLIEFDGVQSAGDDRVLVMGATNRPQELDEAVLRRFIKRVYVSLPNEETRLLLLKNLLCKQGSPLTQKELAQLARTKTRTGEEYVCQ

SEQ ID NO: 97641 - protein, 97 aa, Homo sapiens
MKGSNRNKDHSAEGEGVGKRPKRKCLQWHPLLAKKLLDFSEEEEEEDEEEDIDKVQLLGADGLEQDVGETEDDESPEQRARRPMNAFLLFCKRHRSL

SEQ ID NO: 97642 - protein, 128 aa, Homo sapiens
MIQHHIEACAQVPGMQEILLIGFYQPDEPLTQFLEAAQQEFNLPVRYLQEFAPLGTGGGLYHFRDQILAGSPEAFFVLNADVCSDFPLSAMLEAHRRQRHPFLLLGTTANRTQSLNYGCIVENPQTHE

SEQ ID NO: 97643 - protein, 172 aa, Homo sapiens
  MOD_RES (1)..(1): Any amino acid
XSAVTPSPCLSLSQLQQETRASRCCLLLVSEDNLQLSCKVIGDKVLGEEVSFPLTGCLGQVVEDKKSIQLKDLTSEDVQQLQSMLGCELQAMLCVPVISRATDQVVALACAFNKLEGDLFTDEDEHVIQHCFHYTSTVLTSTLAFQKEQKLKCECQALLQVAKNLFTHLDDV

SEQ ID NO: 97644 - protein, 63 aa, Homo sapiens
VVRGHYKGQQIGKVVQVYRKKYVIYIERVQREKANGTTVHVGIHPSKLGSVFFLFFCRWLSLG

SEQ ID NO: 97645 - protein, 94 aa, Homo sapiens
MENLTKHSIECSSFRGDWECKNQFERKQGSQEGHFSEMIFTPEDMPTFSIQHQRIHTDEKLLECKECGKDFSFVSVLVRHQRIHTGEKPYECKE

SEQ ID NO: 97646 - protein, 661 aa, Homo sapiens
MSHVAVENALGLDQQFAGLDLNSSDNQSGGSTASRRYIPPHLRNREATKGFYDKDSSGWSSSKDKDAYSSFGSRSDSRGKSSFFSDRGSGSRGRFDDRGRSDYDGIGSRGDRSGFGKFERGGNSRWCDKSDEDDWSKPLPPSERLEQELFSGGNTGINFEKYDDIPVEATGNNCPPHIESFSDVEMGEIIMGNIELTRYTRPTPVQKHAIPIIKEKRDLMACAQTGSGKTAAFLLPILSQIYSDGPGEALRAMKENGRYGRRKQYPISLVLAPTRELAVQIYEEARKFSYRSRVRPCVVYGGADIGQQIRDLERGCHLLVATPGRLVDMMERGKIGLDFCKYLVLDEADRMLDMGFEPQIRRIVEQDTMPPKGVRHTMMFSATFPKEIQMLARDFLDEYIFLAVGRVGSTSENITQKVVWVEESDKRSFLLDLLNATGKDSLTLVFVETKKGADSLEDFLYHEGYACTSIHGDRSQRDREEALHQFRSGKSPILVATAVAARGLDISNVKHVINFDLPSDIEEYVHRIGRTGRVGNLGLATSFFNERNINITKDLLDLLVEAKQEVPSWLENMAYEHHYKGSSRGRSKSSRFSGGFGARDYRQSSGASSSSFSSSRASSSRSGGGGHGSSRGFGGGGYGGFYNSDGYGGNYNSQGVDWWGN

SEQ ID NO: 97647 - protein, 197 aa, Homo sapiens
MLSLSTLNLIGPRAVDVLSELSYAPMTPDHFPSLFCKEMSVGYANGIRVMSMTHTGEPGFMLYIPIEYALHVYNEVMSVGQKYGIRNAGYYALRSLRIEKFFAFWGQDINNLTTPLECGRESRVKLEKGMDFIGRDALLQQKQNGVYKRLTMFILDDHDSDLDLWPWWGEPIYRNGQYVGKTTSSAYSYSLERHVCL

SEQ ID NO: 97648 - protein, 572 aa, Homo sapiens
MEEQVFKGDPDTPHSISFSGSGFLSFYQAGAVDALRDLAPRMLETAHRFAGTSAGAVIAALAICGIEMDEYLRVLNVGVAEVKKSFLGPLSPSCKMVQMMRQFLYRVLPEDSYKVTTGKLHVSLTRLTDGENVVVSEFTSKEELIEALYCSCFVPVYCGLIPPTYRGVRYIDGGFTGMQPCAFWTDAITISTFSGQQDICPRDCPAIFHDFRMFNCSFQFSLENIARMTHALFPPDLVILHDYYYRGYEDAVLYLRRLNAVYLNSSSKRVIFPRVEVYCQIELALGNECPERSQPSLRARQASLEGATQPHKEWVPKGDGRGSHGPPVSQPVQTLEFTCESPVSAPVSPLEQPPAQPLASSTPLSLSGMPPVSFPAVHKPPSSTPGSSLPTPPPGLSPLSPQQQVQPSGSPARSLHSQAPTSPRPSLGPSTVGAPQTLPRSSLSAFPAQPPVEELGQEQPQAVALLVSSKPKSAVPLVHVKETVSKPYVTESPAEDSNWVNKVFKKNKQKTSGTRKGFPRHSGSKKPSSKVQSAPCPLNFPLLSTSETVWVTYRPHPSRIQECCPEVWNSLG

SEQ ID NO: 97649 - protein, 37 aa, Homo sapiens
MPGRTWELCLLLLLGLGLGSQEALPPPCERTSPADLH

SEQ ID NO: 97650 - protein, 148 aa, Homo sapiens
MGAFLDKPKMEKHNAQGQGNGLRYGLSSMQGWRVEMEDAHTAVIGLPSGLESWSFFAVYDGHAGSQVAKYCCEHLLDHITNNQDFKGSAGAPSVENVKNGIRTGFLEIDEHMRVMSEKKHGADRSGSTAVGVLISPQHTYFINCGDSR

SEQ ID NO: 97651 - protein, 153 aa, Homo sapiens
MKLTIDHTPERKDEKERIKKCGGFVAWNSLGQPHVNGRLAMTRSIGDLDLKTSGVIAEPETKRIKLHHADDSFLVLTTDGINFMVNSQEICDFVNQCHDPNEAAHAVTEQAIQYGTEDNSTAVVVPFGAWGKYKNSEINFSFSRSFASSGRWA

SEQ ID NO: 97652 - protein, 124 aa, Homo sapiens
NRSKTVYEGFISAQGRDFHLRIVLPEDLQLKNARLLCSWQLRTILSGYHRIVQQRMQHSPDLMSFMMELKMLLEVALKNRQELYALPPPPQFYSSLIEEIGTLGWDKDKVLLYCPGESHTPGLK

SEQ ID NO: 97653 - protein, 113 aa, Homo sapiens
MGRTVVVLGGGISGLAASYHLSRAPCPPKVVLVESSERLGGWIRSVRGPNGAIFELGPRGIRPAGALGARTLLLVSLRDSSLEADHVISAIPASGIWTFGAIFRRSRSPGNRV

SEQ ID NO: 97654 - protein, 370 aa, Homo sapiens
MREKANLAVTLCNDKEEIMAQATFLDYPNWNVAKQDDWVSVFRELDSDIPCTPLNTLFMHLFVAVDEYSVGCCKEILRTVYKAVPELHFIFLIVPSYMSLGSTLITVFDQVGNIPCLTYEEDFAVHICHRHSHYPQLHVRKARVEDHDDLMPIFMRYDTILKETYGEYFLAELIEAQDEENHAVVCEVEGTAVGFMSVCSRVNMQLLHECFDLGPFHGLCFPHPDDVLESPQDLSVRRSQDAELRSSSQGSQKIVEELQEPVSPDTMENIQGNIAREAASEEALTAVQSGNVSEPEDIEKLSDISTGYAQYHHVSSRSLASLVLPEEPVHFRPIYRGASAAFCIQLFCIDEKYEARSLDFMNFVFSLFSV

SEQ ID NO: 97655 - protein, 282 aa, Homo sapiens
MADIIARLREDGIQKRVIQEGRGELPDFQDGTKATFHYRTLHSDDEGTVLDDSRARGKPMELIIGKKFKLPVWETIVCTMREGEIAQFLCDIKHVVLYPLVAKSLRNIAVGKDPLEGQRHCCGVAQMREHSSLGHADLDALQQNPQPLIFHMEMLKVESPGTYQQDPWAMTDEEKAKAVPLIHQEGNRLYREGHVKEAAAKYYDAIACLKNLQMKEQPGSPEWIQLDQQITPLLLNYCQCKLVVEEYYEVLDHCSSILNKYDGLLQAGQGPRGRVECPGGPG

SEQ ID NO: 97656 - protein, 117 aa, Homo sapiens
  MOD_RES (1)..(1): Any amino acid
XKGEEERNSVIWGSQLCVCRPRSFPSPPNVQALACRPLWQVRVTQWKQAKSYQPWKHHCSLLPVTVAKLYHGGGEARGRSGWGSEPQPGPEQADAGCARHDGQLPPQRPGGAARGRR

SEQ ID NO: 97657 - protein, 1709 aa, Homo sapiens
MKKIFSKKGESPLGSFARRQRSSAGGGGEPGEGAYSQPGYHVRDRDLGKIHKAASAGNVAKVQQILLLRKNGLNDRDKMNRTALHLACANGHPEVVTLLVDRKCQLNVCDNENRTALMKAVQCQEEKCATILLEHGADPNLADVHGNTALHYAVYNEDISVATKLLLYDANIEAKNKDDLTPLLLAVSGKKQQMVEFLIKKKANVNAVDKLESSHQLISEYKEERIPKHSSQNSNSVDESSEDSLSRLSGKPGVDDSWPTSDDEDLNFDTKNVPKPSLAKLMTASQQSRKNLEATYGTVRTGNRTLFEDRDSDSQDEVVVESLPTTSIKVQCFSHPTYQSPDLLPKPSHKSLANPGLMKEEPTKPGIAKKENGIDIIESAPLEQTNNDNLTYVDEVHKNNRSDMMSALGLGQEEDIESPWDSESISENFPQKYVDPLAGAADGKEKNIGNEQAEDVFYIPSCMSGSRNFKMAKLEDTRNVGMPVAHMESPERYLHLKPTIEMKDSVPNKAGGMKDVQTSKAAEHDLEVASEEEQEREGSENNQPQVEEERKKHRNNEMEVSANIHDGATDDAEDDDDDDGLIQKRKSGETDHQQFPRKENKEYASGPALQMKEVKSTEKEKRTSKESVNSPVFGKASLLTGGLLQVDDDSSLSEIDEDEGRPTKKTSNEKNKVKNQIQSMDDVDDLTQSSETASEDCELPHSSYKNFMLLIEQLGMECKDSVSLLKIQDAALSCERLLELKKNHCELLTVKIKKMEDKVNVLQRELSETKEIKSQLEHQKVEWERELCSLRFSLNQEEEKRRNADTLYEKIREQLRRKEEQYRKEVEVKQQLELSLQTLEMELRTVKSNLNQVVQERNDAQRQLSREQNARMLQDGILTNHLSKQKEIEMAQKKMNSENSHSHEEEKDLSHKNSMLQEEIAMLRLEIDTIKNQNQEKEKKCFEDLKIVKEKNEDLQKTIKQNEETLTQTISQYNGRLSVLTAENAMLNSKLENEKQSKERLEAEVESYHSRLAAAIHDRDQSETSKRELELAFQRARDECSRLQDKMNFDVSNLKDNNEILSQQLFKTESKLNSLEIEFHHTRDALREKTLGLERVQKDLSQTQCQMKEMEQKYQNEQVKVNKYIGKQESVEERLSQLQSENMLLRQQLDDAHNKADNKEKTVINIQDQFHAIVQKLQAESEKQSLLLEERNKELISECNHLKERQYQYENEKAEREVVVRQLQQELADTLKKQSMSEASLEVTSRYRINLEDETQDLKKKLGQIRNQLQEAQDRHTEAVRCAEKMQDHKQKLEKDNAKLKVTVKKQMDKIEELQKNLLNANLSEDEKEQLKKLMELKQSLECNLDQEMKKNVELEREITGFKNLLKMTRKKLNEYENGEFSFHGDLKTSQFEMDIQINKLKHKIDDLTAELETAGSKCLHLDTKNQILQEELLSMKTVQKKCEKLQKNKKKLEQEVINLRSHIERNMVELGQVKQYKQEIEERARQEIAEKLKEVNLFLQAQAASQENLEQFRENNFASMKSQMELRIKDLESELSKIKTSQEDFNKTELEKYKQLYLEELKVRKSLSSKLTKTNERLAEVNTKLLVEKQQSRSLFTTLTTRPVMEPPCVGNLNNSLDLNRKLIPRENLVISTSNPRASNNSMENYLSKMQQELEKNITRELKEAAAELESGSIASPLGSTDESNLNQDLVWKASREYVQVLKKNYMI

SEQ ID NO: 97658 - protein, 129 aa, Homo sapiens
  MOD_RES (1)..(1): Any amino acid
XLVILIFYKWTAYDAHTSENAPSLLIHFINMFLFSYPESGYSMLYSGQKGIQCFLVVVALLCVPWMLLFKPLVLRRQYLRRKHLGTLNFGGIRVGNGPTEEDAEIIQHDQLSTHSEDADEALAPAQWKH

SEQ ID NO: 97659 - protein, 596 aa, Homo sapiens
  MOD_RES (1)..(1): Any amino acid
XAHLSKKEKKKLKKQMEYERQVASLKAANAAENDFSVSQAEMSSRQAMLENASDIKLEKFSISAHGKELFVNADLYIVAGRRYGLVGPNGKGKTTLLKHIANRALSIPPNIDVLLCEQEVVADETPAVQAVLRADTKRLKLLEEERRLQGQLEQGDDTAAERLEKVYEELRATGAAAAEAKARRILAGLGFDPEMQNRPTQKFSGGWRMRVSLARALFMEPTLLMLDEPTNHLDLNAVIWLNNYLQGWRKTLLIVSHDQGFLDDVCTDIIHLDAQRLHYYRGNYMTFKKMYQQKQKELLKQYEKQEKKLKELKAGGKSTKQAEKQTKEALTRKQQKCRRKNQDEESQEAPELLKRPKEYTVRFTFPDPPPLSPPVLGLHGVTFGYQGQKPLFKNLDFGIDMDSRICIVGPNGVGKSTLLLLLTGKLTPTHGEMRKNHRLKIGFFNQQYAEQLRMEETPTEYLQRGFNLPYQDARKCLGRFGLESHAHTIQICKLSGGQKARVVFAELACREPDVLILDEPTNNLDIESIDALGEAINEYKGAVIVVSHDARLITETNCQLWVVEEQSVSQIDGDFEDYKREVLEALGEVMVSRPRE

SEQ ID NO: 97660 - protein, 128 aa, Homo sapiens
  MOD_RES (1)..(1): Any amino acid
XRTNLGILRALVCQESTKFKNVWTTHSRSPIAYERGRIYFDNYRRCVSSVASEPRKLYEMPKCSKSEKIEDALLWECPVMESSVARLECSGTISAHRNLHLPGSSDSPASASQVAGIIGRYTSQFIRL

SEQ ID NO: 97661 - protein, 262 aa, Homo sapiens
MLEQEEERENARKGGSAAHFQTIIRSCERSIRRIARGKSAPMIQSPPTRPFLQQVFFGNVDSSGIKHNIFNPPIIARYIRLHPTHYSIRSTLRMELMGCDLNSCSMPLGMESKAISDAQITASSYFTNMFATWSPSKARLHLQGRSNAWRPQVNNPKEWLQVDFQKTMKVTGVTTQGVKSLLTSMYVKEFLISSSQDGHQWTLFFQNGKVKVFQGNQDSFTPVVNSLDPPLLTRYLRIHPQSWVHQIALRMEVLGCEAQDLY

SEQ ID NO: 97662 - protein, 193 aa, Homo sapiens
RVSFLRAFWRCFRTVGKNGDLLTMKEYHCLLQLLCPDFPLELTQKAARIVLMDDAMDCLMSFSDFLFAFQIQFYYSEFLDSVAAIYEDLLSGKNPNTVIVPTSSSGQHRQRPALGGAGTLEGVEASLFYQCLENLCDRHKYSCPPPALVKEALSNVQRLTFYGFLMALSKHRGINQALAATRKEKPISNWVTA

SEQ ID NO: 97663 - protein, 44 aa, Homo sapiens
MAGQGLPLHVATLLTGLLECLGFAGVLFGWPSLVFVFKNEDYFK

SEQ ID NO: 97664 - protein, 395 aa, Homo sapiens [sequence omitted]

SEQ ID NO: 97665 - protein, 797 aa, Homo sapiens
ASRKRRKPVQKTVKPIPAEGIKSNPSKRHRDRLNTELDRLASLLPFPQDVINKLDKLSVLRLSVSYLRAKSFFDVALKSSPTERNGGQDNCRAANFREGLNLQEGEFLLQALNGFVLVVTTDALVFYASSTIQDYLGFQQSDVIHQSVYELIHTEDRAEFQRQLHWALNPSQCTESGQGIEEATGLPQTVVCYNPDQIPPENSPLMERCFICRLRCLLDNSSGFLAMNFQGKLKYLHGQKKKGKDGSILPPQLALFAIATPLQPPSILEIRTKNFIFRTKHKLDFTPIGCDAKGRIVLGYTEAELCTRGSGYQFIHAADMLYCAESHIRMIKTGESGMIVFRLLTKNNRWTWVQSNARLLYKNGRPDYIIVTQRPLTDEEGTEHLRKRNTKLPFMFTTGEAVLYEATNPFPAIMDPLPLRTKNGTSGKDSATTSTLSKDSLNPSSLLAAMMQQDESIYLYPASSTSSTAPFENNFFNESMNECRNWQDNTAPMGNDTILKHEQIDQPQDVNSFAGGHPGLFQDSKNSDLYSIMKNLGIDFEDIRHMQNEKFFRNDFSGEVDFRDIDLTDEILTYVQDSLSKSPFIPSDYQQQQSLALNSSCMVQEHLHLEQQQQHHQKQVVVEPQQQLCQKMKHMQVNGMFENWNSNQFVPFNCPQQDPQQYNVFTDLHGISQEFPYKSEMDSMPYTQNFISCNQPVLPQHSKCTELDYPMGSFEPSPYPTTSSLEDFVTCLQLPENQKHGLNPQSAIITPQTCYAGAVSMYQCQPEPQHTHVGQMQYNPVLPGQQAFLNKEMNNMK

SEQ ID NO: 97666 - protein, 273 aa, Homo sapiens
MGKDYYQTLGLARGASDEEIKRAYRRQALRYHPDKNKEPGAEEKFKEIAEAYDVLSDPRKREIFDRYGEEGLKGSGPSGGSGGGANGTSFSYTFHGDPHAMFAEFFGGRNPFDTFFGQRNGEEGMDIDDPFSGFPMGMGGFTNVNFGRSRSAQEPARKKQDPPVTHDLRVSLEEIYSGCTKKMKISHKRLNPDGKSIRNEDKILTIEVKKGWKEGTKITFPKEGDQTSNNIPADIVFVLKDKPHNIFKRDGSDVIYPARISLREVRCQVGRCL

SEQ ID NO: 97667 - protein, 53 aa, Homo sapiens
MNGPEDLPKSYDYDLIIIGGGSGGLAAAKEAAQYGKKVMVLDFVTPTPLGTRW

SEQ ID NO: 97668 - protein, 168 aa, Homo sapiens
MATAEPSGRALRLSTPGPRPSGARDRAPGAAGPPSGQIGNRALRLGERTPAAVEKRGPYMVTRAPSIQAKLQKHRDLAKAVLRRKGMLGASPNRPDSSGKRSVKFNKGYTALSQSPDENLVSLDSDSDGELGSRYSSGYSSAEVNQDVSRQLLQDGYHLDEIPDDEDL

SEQ ID NO: 97669 - protein, 105 aa, Homo sapiens
MELEQREGTMAAVGFEEFSAPPGSELALPPLFGGHILESELETEVEFVSGGLGGSGLRERDEEEEAARGRRRRQRELNRRKYQALGRRCREIEQVPHESAGLLRG

SEQ ID NO: 97670 - protein, 82 aa, Homo sapiens
METSASATASEKQEAKSGILEAAGFPDPGKKASPLVVAAAAAAAVAAQGVPQHLLPPFHAPLPIDMRHQEGRYHYEPHSVHG

SEQ ID NO: 97671 - protein, 423 aa, Homo sapiens
MADDIDIEAMLEAPYKKDENKLSSANGHEERSKKRKKSKSRSRSHERKRSKSKERKRSRDRERKKSKSRERKRSRSKERRRSRSRSRDRRFRGRYRSPYSGPKFNSAIRGKIGLPHSIKLSRRRSRSKSPFRKDKSPVREPIDNLTPEERDARTVFCMQLAARIRPRDLEEFFSTVGKVRDVRMISDRNSRRSKGIAYVEFVDVSSVPLAIGLTGQRVLGVPIIVQASQAEKNRAAAMANNLQKGSAGPMRLYVGSLHFNITEDMLRGIFEPFGRIESIQLMMDSETGRSKGYGFITFSDSECAKKALEQLNGFELAGRPMKVGHVTERTDASSASSFLDSDELERTGIDLGTTGRLQLMARLAEGTGLQIPPAAQQALQMSGSLAFGAVADLQTRLSQQTEALFVIMFWNEIWSDNMITLQL

SEQ ID NO: 97672 - protein, 373 aa, Homo sapiens
MAEAVFHAPKRKRRVYETYESPLPIPFGQDHGPLKEFKIFRAEMINNNVIVRNAEDIEQLYGKGYFGKGILSRSRPSFTISDPKLVAKWKDMKTNMPIITSKRYQHSVEWAAELMRRQGQDESTVRRILKDYTKPLEHPPVKRNEEAQVHDKLNSGMVSNMEGTAGGERPSVVNGDSGKSGGVGDPREPLGCLQEGSGCHPTTESFEKSVREDASPLPHVCCCKQDALILQRGLHHEDGSQHIGLLHPGDRGPDHEYVLVEEAECAMSEREAAPNEELVQRNRLICRRNPYRIFEYLQLSLEEAFFLVYALGCLSIYYEKEPLTIVKLWKAFTVVQPTFRTTYMAYHYFRSKGWVPKVGLKYGTDLLILSLSS

SEQ ID NO: 97673 - protein, 166 aa, Homo sapiens
MPFLELDTNLPANRVPAGLEKRLCAAAASILGKPADRVNVTVRPGLAMALSGSTEPCAQLSISSIGVVGTAEDNRSHSAHFFEFLTKELALGQDRFQVKFTGDSQSSERPLAWMSRHLLSGSCIAGGPQTNLEMNHLQLATSSSVNTGEKTSLPHKKRLQPKPGVL

SEQ ID NO: 97674 - protein, 146 aa, Homo sapiens
MGPLTFRDVAIEFSLKEWQCLDTAQRNLYRNVMLENYRNLVFLGITVSKPDLITCLEQGKEAWSMKRHEIMVAKPTGEVSRCRPGWSTECNGAISAHCSLRLLGSSNSPASASQVAEITGMRHHARLIFVFLVEVGFHHVGHAGLE

SEQ ID NO: 97675 - protein, 384 aa, Homo sapiens
MLSAAHDILSHKRTSGNQSHVDPGPTPIPHNSSSRFDCNSVSTAAVLLADILPTLVIKLLAPLGLHLLPYSPRVLVSGICAAGSFVLVAFSHSVGTSLCGVVFASISSGLGEVTFLSLTAFYPRAVISWWSSGTGGAGLLGALSYLGLTQAGLSPQQTLLSMLGIPALLLASYFLLLTSPEAQDPGGEEEAESAARQPLIRTEAPESKPGSSSSLSLRERWTVFKGLLWYIVPLVVVYFAEYFINQGLFELLFFWNTSLSHAQQYRWYQMLYQAGVFASRSSLRCCRIRFTWALALLQCLNLVFLLADVWFGFLPSIYLVFLIILYEGLLGGAAYVNTFHNIALETSDEHREFAMAATCISDTLGISLSGLLALPLHDFLCQLS

SEQ ID NO: 97676 - protein, 109 aa, Homo sapiens
MSANTFGNAGFSVLLPGARLEGRCGPTNARVRCHLGLKIPPGCELVVGGEPQCWAEGHCLLVDDSFLHTVAHNGSPEDGPRVVFIVDLWHPNVAGAERQALDFVFAPDP

SEQ ID NO: 97677 - protein, 66 aa, Homo sapiens
  MOD_RES (1)..(1): Any amino acid
XPLPLKYRVQPACKRLTLATVPTPSEGTNTSGASESEARSPGQDRATASKSTRRQKPVSSDPTPTP

SEQ ID NO: 97678 - protein, 269 aa, Homo sapiens
MAAPVVAPPGVVVSRANKRSGAGPGGSGGGGARGAEEEPPPPLQAVLVADSFDRRFFPISKDQPRVLLPLANVALIDYTLEFLTATGVQETFVFCCWKAAQIKEHLLKSKWCRPTSLNVVRIITSELYRSLGDVLRDVDAKALVRSDFLLVYGDVISNINITRALEEHRLRRKLEKNVSVMTMIFKESSPSHPTRCHEDNVVVAVDSTTNRVLHFQKTQGLRRFAFPLSLFQGSSDGVEVRYDLLDCHISICSPQRRGFAMLSGLVTNS

SEQ ID NO: 97679 - protein, 52 aa, Homo sapiens
MSIAIPLGVTTSDTSYSDMAAGSEKEVEAPYLSRRSGTTPGCESPAKETQGA

SEQ ID NO: 97680 - protein, 33 aa, Homo sapiens
MASALWTVLPSRMSLRSLKWSLLLLSLLSFFVM

SEQ ID NO: 97681 - protein, 39 aa, Homo sapiens
MAVAGPAPGAGARAICDLPGWLDPQSVLWGPGKQRLGRV

SEQ ID NO: 97682 - protein, 450 aa, Homo sapiens
MVPHAILARGRDVCRRNGLLILSVLSVIVGCLLGFFLRTRRLSPQEISYFQFPGELLMRMLKMMILPLVVSSLMSGLASLDAKTSSRLGVLTVAYYLWTTFMAVIVGIFMVSIIHPGSAAQKETTEQSGKPIMSSADALLDLIRNMFPANLVEATFKQYRTKTTPVVKSPKVAPEEAPPRRILIYGVQEENGSHVQNFALDLTPPPEVVYKSEPGTSDGMNVLGIVFFSATMGIMLGRMGDSGAPLVSFCQCLNESVMKIVAVAVWYFPFGIVFLIAGKILEMDDPRAVGKKLGFYSVTVVCGLVLHGLFILPLLYFFITKKNPIVFIRGILQALLIALATSSSACWRTTTSTGASLASCCPWVPPSTWTALRSTRLWPPSSSPRSTTTSWTLARSSPSVSQPLQPALGQLASPRPASSPWSSCSPPWDCPPMTSPSSLPLTGLWTVSAP

SEQ ID NO: 97683 - protein, 158 aa, Homo sapiens
SAVRTVRTQGLFSYREDYRTQVDTSTLPPPDPWLEPAIDTVETGRMSPCRRDGSWFLKLLHAETKRMEGWCKEMEREAEENDLSEEKLLPAHALQENALALCQREVDGGDDGRRMLGRCCLPRDPQSPQHGCMGLVQVSTAVFRSFTRRLHFSWLGYI

SEQ ID NO: 97684 - protein, 135 aa, Homo sapiens
MVDITEDFLVQAKTYLGEEGKRVRNYFCCGLQDFTPEPDSYDVIWIQWVIGHLTDQHLAEFLRRCKGSLRPNGIIVIKDNMAQEGVILDDVDSSVCRDLDVVRRIICSAGLSLLAEERQENLPDEIYHVYSFALR

SEQ ID NO: 97685 - protein, 227 aa, Homo sapiens
MFNIRNIGKTLVTRTQGTKIASDGLKGRVFEVSLADLQNDEVAFRKFKLITEDVQGKNCLTNFHGMDLTRDKMCSMVKKWQTMIEAHVDVKTTDGYLLRLFCVGFTKKRNNQIRKTSYAQHQQVRQIRKKMMEIMTREVQTNDLKEVVNKLIPDSIGKDIEKACQSIYPLHDVFVRKVKMLKKPKFELGKLMELHGEGSSSGKATGDETGAKVERADGYEPPVQESV

SEQ ID NO: 97686 - protein, 604 aa, Homo sapiens
MPWESDIWDINNQICTVKDIKAEPQPLSPASSSYSVSSPRSVDSYSSTQHVPEELDLSSSSQMSPLSLYGENSNSLSSAEPLKEDKPVTGPRNKTENGLTPKKKIQVNSKPSIQPKPLLLPAAPKTQTNSSVPAKTIIIQTVPTLMPLAKQQPIISLQPAPTKGQTVLLSQPTVVQLQAPGVLPSAQPVLAVAGGVTQLPNHVVNVVPAPSANSPVNGKLSVTKPVLQSTMRNVGSDIAVLRRQQRMIKNRESACQSRKKKKEYMLGLEARLKAALSENEQLKKENGTLKRQLDEVVSENQRLKVPSPKRRVVCVMIVLAFIILNYGPMSMLEQDSRRMNPSVSPANQRRHLLGFSAKEAQDTSDGIIQKNSYRYDHSVSNDKALMVLTEEPLLYIPPPPCQPLINTTESLRLNHELRGWVHRHEVERTKSRRMTNNQQKTRILQGALEQGSNSQLMAVQYTETTSSISRNSGSELQVYYASPRSYQDFFEAIRRRGDTFYVVSFRRDHLLLPATTHNKTTRPKMSIVLPAININENVINGQDYEVMMQIDCQVMDTRILHIKSSSVPPYLRDQQRNQTNTFFGSPPAATEATHVVSTIPESLQ

SEQ ID NO: 97687 - protein, 71 aa, Homo sapiens
MLGIFFNVHSAVLIEDVPFTEKDFENGPQNIYNLYEQVSYNCFIAAGLYLLLGGFSFCQVRLNKRKEYMVR

SEQ ID NO: 97688 - protein, 423 aa, Homo sapiens
MNALLLSAWFGHLRILQILVNSGAKIHCESKDGLTLLHCAAQKGHVPVLAFIMEDLEDVALDHVDKLGRTAFHRAAEHGQLDALDFLVGSGCDHNVKDKEGNTALHLAAGRGHMAVLQRLVDIGLDLEEQNAEGLTALHSAAGGSHPDCVQLLLRAGSTVNALTQKNLSCLHYAALSGSEDVSRVLIHAGGCANVVDHQGASPLHLAVRHNFPALVRLLINSDSDVNAVDNRQQTPLHLAAEHAWQDIADMLLIAGVDLNLRDKQGKTALAVAVRSNHVSLVDMIIKADRFYRWEKDHPSDPSGKSLSFKQDHRQETQQLRSVLWRLASRYLQPREWKKLAYSWEFTEAHVDAIEQQWTGTRSYQEHGHRMLLIWLHGVATAGENPSKALFEGLVAIGRRDLAENIRKKANAAPSAPRRCTAM

SEQ ID NO: 97689 - protein, 98 aa, Homo sapiens
MKATIILLLLAQVSWAGPFQQRGLFDFMLEDEASGIGPEVPDDRDFEPSLGPVCPFRCQCHLRVVQCSDLEKKYCNNLSSYNLYTTNCLILCRLFTHH

SEQ ID NO: 97690 - protein, 438 aa, Homo sapiens
MYNLLAYIKHLDGNNEAALECLRQAEELIQQEHADQAEIRSLVTWGNYAWVYYHLGRLSDAQIYVDKVKQTCKKFSNPYSIEYSELDCEEGWTQLKCGRNERAKVCFEKALEEKPNNPEFSSGLAIAMYHLDNHPEKQFSTDVLKQAIELSPDNQYVKVLLGLKLQKMNKEAEGEQFVEEALEKSPCQTDVLRSAAKFYRRKGDLDKAIELFQRVLESTPNNGYLYHQIGCCYKAKVRQMQNTGESEASGNKEMIEALKQYAMDYSNKALEKGLNPLNAYSDLAEFLETECYQTPFNKEVPDAEKQQSHQRYCNLQKYNGKSEDTAVQHGLEGLSISKKSTDKEEIKDQPQNVSENLLPQNAPNYWYLQGLIHKQNGDLLQAAKCYEKELGRLLRDAPSGIGSIFLSASELEDGSEEMGQGAVSSSPRELLSNSEQLN

SEQ ID NO: 97691 - protein, 919 aa, Homo sapiens
MAPSRFRTQLELVSNVLIFSCTNIVGVCTHYPAEVSQRQAFQETRECIQARLHSQRENQQQERLLLSVLPRHVAMEMKADINAKQEDMMFHKIYIQKHDNVSILFADIEGFTSLASQCTAQELVMTLNELFARFDKLAAENHCLRIKILGDCYYCVSGLPEARADHAHCCVEMGMDMIEAISLVREVTGVNVNMRVGIHSGRVHCGVLGLRKWQFDVWSNDVTLANHMEAGGKAGRIHITKATLNYLNGDYEVEPGCGGERNAYLKEHSIETFLILRCTQKRKEEKAMIAKMNRQRTNSIGHNPPHWGAERPFYNHLGGNQVSKEMKRMGFEDPKDKNAQESANPEDEVDEFLGRAIDARSIDRLRSEHVRKFLLTFREPDLEKKYSKQVDDRFGAYVACASLVFLFICFVQITIVPHSIFMLSFYLTCSLLLTLVVFVSVIYSCVKLFPSPLQTLSRKIVRSKMNSTLVGVFTITLVFLAAFVNMFTCNSRDLLGCLAQEHNISASQVNACHVAESAVNYSLGDEQGFCGSPWPNCNFPEYFTYSVLLSLLACSVFLQISCIGKLVLMLAIELIYVLIVEVPGVTLFDNADLLVTANAIDFFNNGTSQWSLCENLRHRRMEAGTYFPSGVKEQSPEHATKVALKVVTPIIISVFVLALYLHAQQVESTARLDFLWKLQATEEKEEMEELQAYNRRLLHNILPKDVAAHFLARERRNDELYYQSCECVAVMFASIANFSEFYVELEANNEGVECLRLLNEIIADFDEIISEDRFRQLEKIKTIGSTYMAASGLNDSTYDKVGKTHIKALADFAMKLMDQMKYINEHSFNNFQMKIGLNIGPVVAGVIGARKPQYDIWGNTVNVASRMDSTGVPDRIQVTTDMYQVLAANTYQLECRGVVKVKGKGEMMTYFLNGGPPLS

SEQ ID NO: 97692 - protein, 100 aa, Homo sapiens
MSAEASGPAAAAAPSLEAPKPSGLEPGPAAYGLKPLTPNSKYVKLNVGGSLHYTTLRTLTGQDTMLKAMFSGRVEVLTDAGAITNTYGTPNCQALWLGAD

SEQ ID NO: 97693 - protein, 65 aa, Homo sapiens
MADEIAKAQVARPGGDTIFGKIIRKEIPAKIIFEDDRVGTGHHLSRLLSALLSMTFPLKHQHIFW

SEQ ID NO: 97694 - protein, 57 aa, Homo sapiens
MDLEEAEEFKERCTQCAAVSWGLTDEGKYYCTSCHNVTEYLTDYKVFGSIISFPPHH

SEQ ID NO: 97695 - protein, 100 aa, Homo sapiens
MGTSALWALWLLLALCWAPRESGATGTGAVLGRRQRAKTCAAASGAPSNPGECGSGRGEKGEKPNVNPPNSSAQMVAVLRCCGNVMGMKTVLTAVMKRTV

SEQ ID NO: 97696 - protein, 358 aa, Homo sapiens
MKTAENIRGTGSDGPRKRGLCVLCGLPAAGKSTFARALAHRLQQEQGWAIGVVAYDDVMPDAFLAGARARPAPSQWKLLRQELLKYLEYFLMAVINGCQMSVPPNRTEAMWEDFITCLKDQDLIFSAAFEAQSCYLLTKTAVSRPLFLVLDDNFYYQSMRYEVYQLARKYSLGFCQLFLDCPLETCLQRNGQRPQALPPETIHLMGRKLEKPNPEKNAWEHNSLTIPSPACASEASLEVTDLLLTALENPVKYAEDNMEQKDTDRIICSTNILHKTDQTLRRIVSQTMKEAKDEQVLPHNLKLLAEELNKLKAEFLEDLKQGNKKYLCFQQTIDIPDVISFFHYEKDNIVQKYFSKQH

SEQ ID NO: 97697 - protein, 464 aa, Homo sapiens
MPLGPVTPALPLQCPTANLHKPGGSQQCHPPTPDTGPQNGHPEGVPHTPQRRFQHTSAVILQLQPASPVPQQCVPDDWKEVAPGEKSVPETRSGPSPHQQAIVTAMPGGLPVPTSPNIQPSPAHETGQGIVHALTDLSSPGMTSGNGNSASSIAGTAPQNGENKPPQAIVKPQILTHVIEGFVIQEGAEPFPVGRSSLLVGNLKKKYAQGFLPEKLPQQDHTTTTDSEMEEPYLQESKEEGAPLKLKCELCGRVDFAYKFKRSKRFCSMACAKRYNVGCTKRVGLFHSDRSKLQKAGAATHNRRRASKASLPPLTKDTKKQPTGTVPLSVTAALQLTHSQEDSSRCSDNSSYEEPLSPISASSSTSRRRQGQRDLELPDMHMRDLVGMGHHFLPSEPTKWNVEDVYEFIRSLPGCQEIAEEFRAQEIDGQALLLLKEDHLMSAMNIKLGPALKIYARISMLKDS

SEQ ID NO: 97698 - protein, 1149 aa, Homo sapiens
MAERKGTAKVDFLKKIEKEIQQKWDTERVFEVNASNLEKQTSKGKYFVTFPYPYMNGRLHLGHTFSLSKCEACADKLKREIELYGCPPDFPDEEEEEEETSVKTEDIIIKDKAKGKKSKAAAKAGSSKYQWGIMKSLGLSDEEIVKFSEAEHWLDYFPPLAIQDLKRMGLKVDWRRSFITTDVNPYYDSFVRWQFLTLRERNKIKFGKRYTIYSPKDGQPCMDHDRQTGEGVGPQEYTLLKLKVLEPYPSKLSGLKGKNIFLVAATLRPETMFGQTNCWVRPDMKYIGFETVNGDIFICTQKAARNMSYQGFTKDNGVVPVVKELMGEEILGASLSAPLTSYKVIYVLPMLTIKEDKGTGVVTSVPSDSPDDIAALRDLKKKQALRAKYGIRDDMVLPFEPVPVIEIPGFGNLSAVTICDELKIQSQNDREKLAEAKEKIYLKGFYEGIMLVDGFKGQKVQDVKKTIQKKMIDAGDALIYMEPEKQVMSRSSDECVVALCDQWYLDYGEENWKKQTSQCLKNLETFCEETRRNFEATLGWLQEHACSRTYGLGTHLPWDEQWLIESLSDSTIYMAFYTVAHLLQGGNLHGQAESPLGIRPQQMTKEVWDYVFFKEAPFPKTQIAKEKLDQLKQEFEFWYPVDLRVSGKDLVPNHLSYYLYNHVAMWPEQSDKWPTAVRANGHLLLNSEKMSKSTGNFLTLTQAIDKFSADGMRLALADAGDTVEDANFVEAMADAGILRLYTWVEWVKEMVANWDSLRSGPASTFNDRVFASELNAGIIKTDQNYEKMMFKEALKTGFFEFQAAKDKYRELAVEGMHRELVFRFIEVQTLLLAPFCPHLCEHIWTLLGKPDSIMNASWPVAGPVNEVLIHSSQYLMEVTHDLRLRLKNYMMPAKGKKTDKQPLQKPSHCTIYVAKNYPPWQHTTLSVLRKHFEANNGKLPDNKVIASELGSMPELKKYMKKVMPFVAMIKENLEKMGPRILDLQLEFDEKAVLMENIVYLTNSLELEHIEVKFASEAEDKIREDCCPGKPLNVFRIEPGVSVSLVNPQPSNGHFSTKIEIRQGDNCDSIIRRLMKMNRGIKDLSKVKLMRFDDPLLGPRRVPVLGKEYTEKTPISEHAVFNVDLMSKKIHLTENGIRVDIGDTIIYLVH

SEQ ID NO: 97699 - protein, 136 aa, Homo sapiens
MIGFSETAKCQAMKKIFDDAYKSQLSCVVVDDIERLLDYVPIGPRFSNLVLQALLVLLKKAPPQGRKLLIIGTTSRKDVLQEMEMLNAFSTTIHVPNIATGEQLLEALELLGNFKDKERTTIAQQVKGKKVWIGIK

SEQ ID NO: 97700 - protein, 147 aa, Homo sapiens
MLRTESCRPRSPAGQVAAASPLLLLLLLLAWCAGACRGAPILPQGLQPEQQLQLWNEIDDTCSSFLSIDSQPQASNALEELCFMIMGMLPKPQSSVVHPLLQLVPHLHERRMKRFRVDEEFQSPFASQSRGYFLFRPRNGRRSAGFI

SEQ ID NO: 97701 - protein, 266 aa, Homo sapiens
MLNVHNLNYSSSRTLLFQRFSVIFMDVLFVYAVRECCKCIDGKKVGKELTEKPKFILSVLLLWNFGLLIVDHIHFQYNGFLFGLMLLSIARLFQKRHMEGAFLFAVLLHFKHIYLYVAPAYGVYLLRSYCFTANKPDGSIRWKSFSFVRVISLGLVVFLVSALSLGPFLALNQLPQVFSRLFPFKRGLCHAYWAPNFWALYNALDKVLSVIGLKLKFLDPNNIPKASMTSGLVQQFQHTVLPSVTPLATLICTLIAILGPEAFSDV

SEQ ID NO: 97702 - protein, 67 aa, Homo sapiens
MCDRKAVIKNADMSEEMQQDSVECATQALEKYNIEKDIAAHIKKVRMGAGADTQPGAGGSFPPILLS

SEQ ID NO: 97703 - protein, 325 aa, Homo sapiens
MSMSPTVIILACLGFFLDQSVWAHVGGQDKPFCSAWPSAVVPQGGHVTLRCHYRRGFNIFTLYKKDGVPVPELYNRIFWNSFLISPVTPAHAGTYRCRGFHPHSPTEWSAPSNPLVIMVTGLYEKPSLTARPGPTVRTGENVTLSCSSQSSFDIYHLSREGEAHELRLPAVPSINGTFQADFPLGPATHGETYRCFGSFHGSPYEWSDASDPLPVSVTDAAVMNQEPAGHRTVNREDSDEQDPQEVTYAQLDHCIFTQRKITGPSQRSKRPSTDTSVCIELPNAEPRALSPAHEHHSQALMGSSRETTALSQTQLASSNVPAAGI

SEQ ID NO: 97704 - protein, 79 aa, Homo sapiens
MLGGSLGSRLLRGVGGSHGRFGARGVREGGAAMAAGESMAQRMVWVDLEMTGLDIEKDQIIEMACLITDSDLNILAEGT

SEQ ID NO: 97705 - protein, 302 aa, Homo sapiens
MFPWGLSCLSVLGAAGTALLCAGLLLSLAQHLWTLRWMLSRDRASTLPLPKGSMGWPFFGETLHWLVQGSRFHSSRRERYGTVFKTHLLGRPVIRVSGAENVRTILLGEHRLVRSQWPQSAHILLGSHTLLGAVGEPHRRRRKVLARVFSRAALERYVPRLQGALRHEVRSWCAAGGPVSVYDASKALTFRMAARILLGLRLDEAQCATLARTFEQLVENLFSLPLDVPFSGLRKVRPPRLQTFLRGSAARAGLPDPDGTPSAHPARPSPLLGTAAGPGGGRRCGGGVAVGSGPGLCAGSLV

SEQ ID NO: 97706 - protein, 290 aa, Homo sapiens
MPVQPPSKDTEEMEAEGDSAAEMNGEEEESEEERSGSQTESEEESSEMDDEDYERRRSECVSEMLDLEKQFSELKEKLFRERLSQLRLRLEEVGAERAPEYTEPLGGLQRSLKIRIQVAGIYKGFCLDVIRNKYECELQGAKQHLESEKLLLYDTLQGELQERIQRLEEDRQSLDLSSEWWDDKLHARGSSRSWDSLPPSKRKKAPLVSGPYIVYMLQEIDILEDWTAIKKARAAVSPQKRKSDDRRTHRPLRVCPARLLWCCWALPLHLALAWTPPLPSSRPAQLWPWS

SEQ ID NO: 97707 - protein, 358 aa, Homo sapiens
MPGCELPVGTCPDMCPAAERAQREREHRLHRLEVVPGCRQDPPRADPQRAVKEYSRPAAGKPRPPPSQLRPPSVLLATVRYLAGEVAESADIARAEVASFVADRLRAVLLDLALQGAGDAEAAVVLEAALATLLTVVARLGPDAARGPADPVLLQAQVQEGFGSLRRCYARGAGPHPRQPAFQGLFLLYNLGSVEALHEVLQLPAALRACPPLRKALAVDAAFREGNAARLFRLLQTLPYLPSCAVQCHVGHARREALARFARAFSTPKGQTLPLGFMVNLLALDGLREARDLCQAHGLPLDGEERVVFLRGRYVEEGLPPASTCKVLVESKLRGRTLEEVVMAEEEDEGTDRPGSPA

SEQ ID NO: 97708 - protein, 38 aa, Homo sapiens
MNKRDYMNTSVQEPPLDYSFRSIHVIQANLKGNRGLSQ

SEQ ID NO: 97709 - protein, 407 aa, Homo sapiens
MSAGGPCPAAAGGGPGGASCSVGAPGGVSMFRWLEVLEKEFDKAFVDVDLLLGEIDPDQADITYEGRQKMTSLSSCFAQLCHKAQSVSQINHKLEAQLVDLKSELTETQAEKVVLEKEVHDQLLQLHSIQLQLHAKTGQSADSGTIKAKLSGPSVEELERELEANKKEKMKEAQLEAEVKLLRKENEALRRHIAVLQAEVYGARLAAKYLDKELAGRVQQIQLLGRDMKGPAHDKLWNQLEAEIHLHRHKTVIRACRGRNDLKRPMQAPPGHDQDSLKKSQGVGPIRKVLLLKEDHEGLGISITRGEIEFEVVYVAPEVDSDDENVEYEDESGHRYRLYLDELEGGGNPGASCKDTSGEIKVLQGFNKKAVTDTHENGDLGTASETPLDDGASKLDDLHTLYHKKSY

SEQ ID NO: 97710 - protein, 46 aa, Homo sapiens
MNLSLVLAAFCLGIASAVPKFDQNLDTKWYQWKATHRRLYGAVGNI

SEQ ID NO: 97711 - protein, 54 aa, Homo sapiens
QAQADLLTVYLMVDVSGTGTLSQSYQYEVCLTGGSGTNEFKFLKPIIPNFVAQG

SEQ ID NO: 97712 - protein, 401 aa, Homo sapiens
MLSLREQQLQVWFKNRRAKLARERRLQQQPQRVPGQRGRGARAAPLVPAASASAPQRGPSGILPAAEPTICSLHQAWGGPGCRAQKGIPAALSPGPGPIPAPIPGPAQIPGPLPGSIPGPIPGPAQIPSPIPAPIPGPISGPVQIPGPFRGPIPGPISGPFSGPNPGPIPGPNPGPIPGPISGPIPGPISVPIPGPIPGPISGPISGPNPGPIPGPIPGPISGPNPGPIPGPISGPNPGLIPGPIPGPISGPGPIIGPIPSPAQIPGPGRLQGPGPILSPGRMRSPGSLPGLAPILGPGSGPGSGSVPAPIPGPGSLPAPAPLWPQSPDASDFLPDTQLFPHFTELLLPLDPLEGSSVSTMTSQYQEGDDSMGKKHSGSQPQEEGGSVNENHSGPRLLLDL

SEQ ID NO: 97713 - protein, 108 aa, Homo sapiens
MVDFPGYNLSGAVASFLFILLTMKQSDFRVIGPAHPILAGVGEDALLTCQLLPKRTTMHVEVRWYRSEPSTPVFVHRDGVEVTEMQMEEYRGWVEWIENGIAKGNVAL

SEQ ID NO: 97714 - protein, 439 aa, Homo sapiens
MKMLWKLTDNIKYEDCEDRHDGTSNGTARLPQLGTVGQSPYTSAPPLSHTPNADFQPPYFPPPYQPIYPQSQDPYSHVNDPYSLNPLHAQPQPQHPGWPGQRQSQESGLLHTHRGLPHQLSGLDPRRDYRRHEDLLHGPHALSSGLGDLSIHSLPHAIEEVPHVEDPGINIPDQTVIKKGPVSLSKSNSNAVSAIPINKDNLFGGVVNPNEVFCSVPGRLSLLSSTSKYKVTVAEVQRRLSPPECLNASLLGGVLRRAKSKNGGRSLREKLDKIGLNLPAGRRKAANVTLLTSLVEGEAVHLARDFGYVCETEFPAKAVAEFLNRQHSDPNEQVTRKNMLLATKQICKEFTDLLAQDRSPLGNSRPNPILEPGIQSCLTHFNLISHGFGSPAVCAAVTALQNYLTEALKAMDKMYLSNNPNSHTDNNAKSSDKEEKHRK

SEQ ID NO: 97715 - protein, 68 aa, Homo sapiens
MVDFPGYNLSGAVASFLFILLTMKQSEDFRVIGPAHPILAGVGEDALLTCQLLPKRTTMHVEVRETPD

SEQ ID NO: 97716 - protein, 329 aa, Homo sapiens
MATATPVPPRMGSRAGGPTTPLSPTRLSRLQEKEELRELNDRLAVYIDKVRSLETENSALQLQVTEREEVRGRELTGLKALYETELADARRALDDTARERAKLQIELGKCKAEHDQLLLNYAKKESDLNGAQIKLREYEAALNSKDAALATALGDKKSLEGDLEDLKDQIAQLEASLAAAKKQLADETLLKVDLENRCQSLTEDLEFRKSMYEEEINETRRKHETRLVEVDSGRQIEYEYKLAQALHEMREQHDAQVRLYKEELEQTYHAKLENARLSSEMNTSTVNSAREELMESRMRIESLSSQLSNLQKECLLLSHISFIMLPIRP

SEQ ID NO: 97717 - protein, 420 aa, Homo sapiens
MAAAVRQDLAQLMNSSGSHKDLAGKYRQILEKAIQLSGAEQLEALKAFVEAMVNENVSLVISRQLLTDFCTHLPNLPDSTAKEIYHFTLEKIQPRVISFEEQVASIRQHLASIYEKEEDWRNAAQVLVGIPLETGQKQYNVDYKLETYLKIARLYLEDDDPVQAEAYINRASLLQNESTNEQLQIHYKVCYARVLDYRRKFIEAAQRYNELSYKTIVHESERLEALKHALHCTILASAGQQRSRMLATLFKDERCQQLAAYGILEKMYLDRIIRGNQLQEFAAMLMPHQKATTADGSSILDRAVIEHNLLSASKLYNNITFEELGALLEIPAAKAEKIASQMITEGRMNGFIDQIDGIVHFETSGNHQSIFCLWIYLVWIVHINGIIQYVTCDLLADSTQHSIFRVHPCHGSTRSPANVG

SEQ ID NO: 97718 - protein, 175 aa, Homo sapiens
MLGLTSALDGAFCVDSITALKALERASSPSEHGPRKSYSLGSIYTRLYGQSPPDSHTAEGDVLALLSICQWRPQALLRWVDAHARPFGTIRPMYGVTASARTKPRPSAVTTTAHLATTRNTSPSLGESRGTKDLPPVKDPGALSREGLLAPLGLLAILTLAVATLYGLSLATPGE

SEQ ID NO: 97719 - protein, 525 aa, Homo sapiens
MVLFCLLFLYPAGHCPNPGISLGAVRTGFRFGHGDKVRYRCSSNLVLTGSSERECQGNGVWSGTEPICRQPYSYDFPEDVAPALGTSFSHMLGATNPTQKTKDHENGTGTNTYAALNSVYLMMNNQMRLLGMETMAWQEIRHAIILLTDGKSNMGGSPKTAVDHIREILNINQKRNDYLDIYAIGVGKLDVDWRELNELGSKKDGERHAFILQDTKALHQVFEHMLDVSKLTDTICGVGNMSANASDQERTPWHVTIKPKSQETCRGALISDQWVLTAAHCFRDGNDHSLWRVNVGDPKSQWGKEFLIEKAVISPGFDVFAKKNQGILEFYGDDIALLKLAQKVKMSTHARPICLPCTMEANLALRRPQGSTCRDHENELLNKQSVPAHFVALNGSKLNINLKMGVEWTSCAEVVSQEKTMFPNLTDVREVVTDQFLCSGTQEDESPCKGESGGAVFLERRFRFFQVGLVSWGLYNPCLGSADKNSRKRAPRSKVPPPRDFHINLFRMQPWLRQHLGDVLNFLPL

SEQ ID NO: 97720 - protein, 90 aa, Homo sapiens
MDSTKEKCDSYKDDLLLRMGLNDNKAGMEGLDKEKINKIIMEATKGSRFYGNELKKEKQVNQRIENMMQQKAQITSQQLRKAQLQINIKF

SEQ ID NO: 97721 - protein, 48 aa, Homo sapiens
MALKRINKELSDLARDPPAQCSAGPVGDDMFHWQATIMGPISNYMLDN

SEQ ID NO: 97722 - protein, 161 aa, Homo sapiens
MNRFRVSKFRHTEARPPRREDKQLRIFDPRTKPRASQSTQAHENSRDSRLAWMGTWEHLVSTGFNQMREREVKLWDTRFFSSALASLTLDTSLGCLVPLLDPDSGLLVLAGKGERQLYCYEVVPQQPALSPVTQCVLESVLRGAALVPRQALAVMSCEVLR

SEQ ID NO: 97723 - protein, 554 aa, Homo sapiens
MKLYLRTGEGLPEADGKAKEQLSVCILIGNTGIIFIMPTVVVMDVSLSMTRPVSIEGSEEYQRKHLAAHGLTMLFEHMATNYKLEFTALVVFSSLWELMVPFTRDYNTLQEALSNMDDYDKTCLESALVGVCNIVQQEWGGAIPCQVVLVTDGCLGIGRGSLRHSLATQNQRSESNRFPLPFPFPSKLYIMCMANLEELQSTDSLECLERLIDLNNGEGQIFTIDGPLCLKNVQSMFGKLIDLAYTPFHAVLKCGHLTADVQVFPRPEPFVVDEEIDPIPKVINTDLEIVGFIDIADISSPPVLSRHLVLPIALNKEGDEVGTGITDDNEDENSANQIAGKIPNFCVLLHGSLKVEGMVAIVQLGPEWHGMLYSQADSKKKSNLMMSLFEPGPEPLPWLGKMAQLGPISDAKENPYGEDDNKSPFPLQPKNKRSYAQNVTVWIKPSGLQTDVQKILRNARKLPEKTQTFYKELNRLRKAALAFGFLDLLKGVADMLERECTLLPETAHPDAAFQLTHAAQQLKLASTGTSEYAAYDQNITPLHTDFSGSSTERI

SEQ ID NO: 97724 - protein, 376 aa, Homo sapiens
MSDEVFSTTLAYTKSPKVTKRTTFQDELIRAITARSARQRSSEYSDDFDSDEIVSLGDFSDTSADENSVNKKMNDFHISDDEEKNPSKLLFLKTNKSNGNITKDEPVCAIKNEEEMAPDGCEDIVVKSFSESQNKDEEFEKDKIKMKPKPRILSIKSTSSAENNSLDTDDHFKPSPRPRSMLKKKSHMEEKDGLEDKETALSEELELHSAPSSLPTPNGIQLEAEKKAFSENLDPEDSCLTSLASSSLKQILGDSFSPGSEGNASGKDPNEEITENHNSLKSDENKENSFSADHVTTAVEKSKESQVTADDLEEEKAKAELIMDDDRTVDPLLSKSQSILISTSATASSKKTIEDRNIKNKKSTNNRASSASARSG

SEQ ID NO: 97725 - protein, 704 aa, Homo sapiens
MKTITATGVLFVRLGPTHSPNHNFQDDYHEDGFCQPYRGIACARFIGNRTIYVDSLQMQGEIENRITAAFTMIGTSTHLSDQCSQFAIPSFCHFVFPLCDARSRTPKPRELCRDECEVLESDLCRQEYTIARSNPLILMRLQLPKCEALPMPESPDAANCMRIGIPAERLGRYHQCYNGSGMDYRGTASTTKSGHQCQPWALQHPHSHHLSSTDFPELGGGHAYCRNPGGQMEGPWCFTQNKNVRMELCDVPSCSPRDSSKMGILYILVPSIAIPLVIACLFFLVCMCRNKQKASASTPQRRQLMASPSQDMEMPLINQHKQAKLKEISLSAVRFMEELGEDRFGKVYKGHLFGPAPGEQTQAVAIKTLKDKAEGPLREEFRHEAMLRARLQHPNVVCLLGVVTKDQPLSMIFSYCSHGDLHEFLVMRSPHSDVGSTDDDRTVKSALEPPDFVHLVAQIAAGMEYLSSHHVVHKDLATRNVLVYDKLNVKISDLGLFREVYAADYYKLLGNSLLPIRWMAPEAIMYGKFSIDSDIWSYGVVLWEVFSYGLQPYCGYSNQDVVEMIRNRQVLPCPDDCPAWVYALMIECWNEFPSRRPRFKDIHSRLRAWGNLSNYNSSAQTSGASNTTQTSSLSTSPVSNVVRMRGSGRQCWMTETPNALLWHNVSGVGSCRWVRGLADFKDEATDFRVMPRDPSLHCHVTSTA

SEQ ID NO: 97726 - protein, 178 aa, Homo sapiens
MLRAGAPTGDLPRAGEVHTGTTIMAVEFDGGVVMGSDSRVSAGIELEEPPLVLAAANVVRNISYKYREDLSAHLMVAGWDQREGGQVYGTLGGMLTRQPFAIGGSGSTFIYGYVDAAYKPGMSPEECRRFTTDATSTKRRVCGYFLRTQKRENQNQRVHEYMCTGERSLSSSPLLSCS

SEQ ID NO: 97727 - protein, 169 aa, Homo sapiens
MNQVTDWVDPSFDDFLECSGVSTITATSLGVNNSSHRRKNGPSTLESSRFPARKRGNLSSLEQIYGLENSKEYLSENEPWVDKYKPETQHELAVHKKKIEEVETWLKAQVLERQPKQGGSILLITGPPGCGKTTTLKILSKEHGIQVQEWINPVLPDFQKDDFKGMFNT

SEQ ID NO: 97728 - protein, 93 aa, Homo sapiens
MSGCGLFLRTTAAARACRGLVVSTANRRLLRTSPPVRAFAKELFLGKIKKVTRALGEPLLSGSRFSPSAARLVLNFVRFPKPAREIHPAAEAC

SEQ ID NO: 97729 - protein, 46 aa, Homo sapiens
MDSVMPSQEPPVDDKNEDADLPSEETDGIAYISSSRKHDSIKDDSE

SEQ ID NO: 97730 - protein, 270 aa, Homo sapiens
MMVVLLGATTLVLVAVAPWVLSAAAGGKNLKSPQKVEVDIIDDNFILRWNRSDESVGNVTFSFDYQKTGMDNWIKLSGCQNITSTKCNFSSLKLNVYEEIKLRIRAEKENTSSWYEVDSFTPFRKAQIGPPEVHLEAEDKAIVIHISPGTKDSVMWALDGLSFTYSLVIWKNSSGVEERIENIYSRHKIYKLSPETTYCLKVKAALLTSWKIGVYSPVHCIKTTVENELPPPENIEVSVQNQNYVLKWDYTYANMTFQVQWLHLYFRRPR

SEQ ID NO: 97731 - protein, 134 aa, Homo sapiens
MAGLRARGGPGPGLLALSALGFCLMLQVSAKRPPKTPPCPPSCSCTRDTAFCVDSKAVPRNLPSEVISLTALADPTVLTRVSPQDPGECRLLRDPGWSVLPPPAAAVLVTQLQQVYTDWRQRLHRTVAPAVSLH

SEQ ID NO: 97732 - protein, 1154 aa, Homo sapiens
MEAGSGPPGGPGSESPNRAVEYLLELNNIIESQQQLLETQRRRIEELEGQLDQLTQENRDLREESQLHRGELHRDPHGARDSPGRESQYQNLRETQFHHRELRESQFHQAARDVGYPNREGAYQNREAVYRDKERDASYPLQDTTGYTARERDVAQCHLHHENPALGRERGGREAGPAHPGREKEAGYSAAVGVGPRPPRERGQLSRGASRSSSPGAGGGHSTSTSTSPATTLQRKSDGENSRTVSVEGDAPGSDLSTAVDSPGSQPPYRLSQLPPSSSHMGGPPAGVGLPWAQRARLQPASVALRKQEEEEIKRSKALSDSYELSTDLQDKKVEMLERKYGGSFLSRRAARTIQTAFRQYRMNKNFERLRSSASESRMSRRIILSNMRMQFSFEEYEKAQNPAYFEGKPASLDEGAMAGARSHRLERGLPYGGSCGGGIDGGGSSVTTSGEFSNDITELEDSFSKQVKSLAESIDEALNCHPSGPMSEEPGSAQLEKRESKEQQEDSSATSFSDLPLYLDDTVPQQSPERLPSTEPPPQGRPEFWAPAPLPPVPPPVPSGTREDGSREEGTRRGPGCLECRDFRLRAAHLPLLTIEPPSDSSVDLSDRSDRGSVHRQLVYEADGCSPHGTLKHKGPPGRAPIPHRHYPAPEGPAPAPPGPLPPAPNSGTGPSGVAGGRRLGKCEAAGENSDGGDNESLESSSNSNETINCSSGSSSRDSLREPPATGLCKQTYQRETRHSWDSPAFNNDVVQRRHYRIGLNLFNKKPEKGIQYLIERGFLSDTPVGVAHFILERKGLSRQMIGEFLGNRQKQFNRDVLDCVVDEMDFSSMDLDDALRKFQSHIRVQGEAQKVERLIEAFSQRYCVCNPALVRQFRNPDTIFILAFAIILLNTDMYSPSVKAERKMKLDDFIKNLRGVDNGEDIPRDLLVGIYQRIQGRELRTNDDHVSQVQAVERMIVGKKPVLSLPHRRLVCCCQLYEVPDPNRPQRLGLHQREVFLFNDLLVVTKIFQKKKILVTYSFRQSFPLVEMHMQLFQNSYYQFGIKLLSAVPGGERKVLIIFNAPSLQDRLRFTSDLRESIAEVQEMEKYRVESELEKQKGMMRPNASQPGGAKDSVNGTMARSSLEDTYGAGDGLKRGALSSSLRDLSDAGVCY

SEQ ID NO: 97733 - protein, 130 aa, Homo sapiens
MEPQVSNGPTSNTSNGPSSNNRNCPSPMQTGATTDDSKTNLIVNYLPQNMTQEEFRSLFGSIGEIESCKLVRDKITGQSLGYGFVNYIDPKDAEKAINTLNGLRLQTKTIKPIKLQGSVSWALLSSRQQV

SEQ ID NO: 97734 - protein, 57 aa, Homo sapiens
MRSPRMRVCAKSVLLSHWLFLAYVLMVCCKLMSASSQHLRGHAGHHQIKQGTCEVVA

SEQ ID NO: 97735 - protein, 193 aa, Homo sapiens
SPSLRSQRESIPQAGEKEVEPEGSKRTDAQGHSLGDGLGPSTYQRRSRWPFSKARSFCKTHASLFKKILLGLLCLAYAAYLLAACILNFQRALALFVITCLVIFVLVHSFLKKLLGKKLTRCLKPFENSRLRLWTKWVFAGVSLVGLILWLALDTAQRPEQLIPFAGICMFILILFACSKHHSAVSWRTVFSG

SEQ ID NO: 97736 - protein, 81 aa, Homo sapiens
MIPRKRYGSKNTDQGVYLGLSKTQVLSPATAGSSSSDIAPLPPPVTLVPPPPDTMSCRDRTQEFLSACKSLQTRQAHWERP

SEQ ID NO: 97737 - protein, 645 aa, Homo sapiens
MLLKKHAGKGGGREPRSEDPTPAEQHCARTMPPCAVLAALLSVVAVVSCLYLGVKTNDLQARIAALESAKGAPSIHLLPDTLDHLKTMVQEKVERLLAQKSYEHMAKIRIAREAPSECNCPAGPPGKRGKRGRRGESGPPGQPGPQGPPGPKGDKGEQGDQGPRGLPGFPTVAALHSNQILTVKGDQGQAGPPGPPGPPGPRGPPGDTGKDGPRGMPGVPGEPGKPGEQGLMGPLGPPGQKGSIGAPGIPGMNGQKGEPGLPGAVGQNGIPGPKGEPGEQGEKGDAGENGPKGDTGEKGDPGSSAAGIKGEPGESGRPGQKGEPGLPGLPGLPGIKGEPGFIGPQGEPGLPGLPGTKGERGEAGPPGRGERGEPGAPGPKGDRGEKGDSGAQGPRGPPGQKGDQGATEIIDYNGNLHEALQGPPGPPGPQGLQGPKGEQGSPGIPGMDGEQGLKGSKGDMGDPGMTGEKGGIGLPGLPGANGMKGEKGDSGMPGPQGPSIIGPPGPPGPHGPPGPMGPHGLPGPKGEPGLNGVKGLKGEPGQKGDRGPLGLPGASGLDGKPGSRGTDGPMGPHGPAGPKGERGEKGAMGEPGPRGPYGLPGFPGPRGEKGDLGEKGEKVTSPSQHVPCLILLLLSALLFSLCDSI

SEQ ID NO: 97738 - protein, 66 aa, Homo sapiens
SETSTSDNTETYQENTSSSGHPTFKCPLCQESNFTRQRLLDHCNSNHLFQIVPVILARLPEISLVI

SEQ ID NO: 97739 - protein, 638 aa, Homo sapiens
MVSEKSHLGNPQEPVQEEPKTRLLSMTVRRGPRSLPPIPSTSRTGFAEFSMRGRMREKLQAARSKAESALLQEIPTPRPRRLRSPSKKELETEFGTEPGKEVERTQQEVDSQSYSRVKFHDSARKIKPKPQVPPGFPSAEEAYNFFTFNFDPEPEGSEEKPKARHRAGTNQEEEEGEEEEPPAQGGGKEMDEEELLNGDDAEDFLLGLDHVADDFVAVRPADYESIHDRLQMEREMLFIPSRQTVPTYKKLPENVQPRFLEDEGLYTGVRPEVARTNQNIMENRLLMQDPERRWFGDDGRILALPNPIKPFPSRPPVLTQEQSIKAELETLYKKAVKYVHSSQHVIRSGDPPGNFQLDIDISGLIFTHHPCFSREHVLAAKLAQLYDQYLARHQRNKAKFLTDKLQALRNAVQTGLDPEKPHQSLDTIQKTINEYKSEIRQTRKFRDAEQEKDRTLLKTIIKVWKEMKSLREFQRFTNTPLKLVLRKEKADQKADEEAYEAEIQAEISELLEEHTEEYAQKMEEYRTSLQQWKAWRKVQRAKKKKRKQAAEEHPGDEIAEPYPEEDLVKPSPPEPTDRAVIEQEVRERAAQSRRRPWEPTLVPELSLAGSVTPNDQCPSHGSQSIAPESAASASLRTC

SEQ ID NO: 97740 - protein, 174 aa, Homo sapiens
MNSNVSVYQPPRQVILTLQPTLVAVGKSFTIECRVPTVEPLDSLTLFLFRGNETLHYETFGKAAPAPQEATATFNSTADREDGHRNFSCLAVLDLMSRGGNIFHKHSAPKMLEIYEPVSDSQMVIIVTVVSVLLSLFVTSVLLCFIFGQHLRQQRMGTYGVRAAWRRLPQAFRP

SEQ ID NO: 97741 - protein, 150 aa, Homo sapiens
  MOD_RES (1)..(1): Any amino acid
XIATYLLHLLVQPEEEIIAEDYDDDPVDYEATRLEGLPPSWYKVFDPSCGLPYYWNADTDLVSWLSPHDPNSVVTKSAKKLRSSNAAVSRKDEELDPMDPSSYSDAPRGTWSTGLPKRNEAKTGADTTAAGPLFQQRPYPSPGAVLRANA

SEQ ID NO: 97742 - protein, 149 aa, Homo sapiens
MAVVIRLLGLPFIAGPVDIRHFFTGLTIPDGGVHIIGGEIGEAFIIFATDEDARRAISRSGGFIKDSSVELFLSSKAEMQKTIEMKRTDRVGRGRPGSGTSGVDSLSNFIESVKEEASNSGYGSSINQDAGFHTNGTGHGNLRPRKTRP

SEQ ID NO: 97743 - protein, 284 aa, Homo sapiens
MRSSCVLLTALVALAAYYVYIPLPGSVSDPWKLMLLDATFRGAQQVSNLIHYLGLSHHLLALNFIIVSFGKKSAWSSAQVKVTDTDFDGVEVRVFEGPPKPEEPLKRSVVYIHGGGWALASASASWSPSDEIRYYDELCTAMAEELNAVIVSIEYRLVPKVYFPEQIHDVVRATKYFLKPEVLQKYMVDPGRICISGDSAGGNLAAALGQQFTQDASLKNKLKLQALIYPVLQALDFNTPSYQQNVNTPILPRYVMVKYWVDYFKGNYDFVQAMIVNNHTSLDV

SEQ ID NO: 97744 - protein, 170 aa, Homo sapiens
MTLIEGVGDEVTVLFSVLACLLVLALAWVSTHTAEGGDPLPQPSGTPTPSQPSAAMAATDSMRGEAPGAETPSLRHRGQAAQPEPSTGFTATPPAPDSPQEPLVLRLKFLNDSEQVARAWPHDTIGSLKRTQFPGREQQVRLIYQGQLLGDDTQTLGSLHLPPNCVLHCH

SEQ ID NO: 97745 - protein, 137 aa, Homo sapiens
MTMTANKNSSITHGAGGTKAPRGTLSRKSFEFEDASSLQSLYPSSPTENGTENQPKFGSKSTLEENAYEDIVGDLPKENPYEDVDLKSRRAGRKSQQLSENSLDSLHRMWSPQDRKYNSPPTQPVPAQWELVRKEEP

SEQ ID NO: 97746 - protein, 531 aa, Homo sapiens
MCVPPHRKDGSIPCPRALCSQSVDIQAWQLSAAQRGDVGQPREFWHLRSQVPVPTCHLLTVQPWCLLPHPTPAGGRERRHSASSLLAALCLRKAVLRPHPAVLPGVGGCVVLSSGRMKAPLRGGLALGTGPAPTKLQLLHDWQSEPGPSGWQQGPSPPLFPAGTSLVQHLMTVLIRKHSQLFTAPVPEGPTSPRGGLQCAVGWGSEEVTRDSQGEPGGPGLPAHRTSSLDGAAVAVLSRTAPTGPGSRCSPGKKVQTLPSWKSSFRQPRSLSGSPKGGGSSLEVPIISSGGNWLMNGLSSLRGHRRASSGDRLKDSGSVQRLSTYDNVPAPGLVPGIPSVASMAWSGASSSESSVGGSLSSCTACRASDSSARSSLHTDWALEPSPLPSSSEDPKSLDLDHSMDEAGAGASNSEPSEPDSPTREHARRSEALQGLVTELRAELCRQRTEYERSVKRIEEGSADLRKRMSRLEEELDQEKKKYIMLEIKLRNSERAREDAERRNQLLQREMEEFFSTLGSLTVGAKGARAPK

SEQ ID NO: 97747 - protein, 59 aa, Homo sapiens
MHYLDFCEKNDTQPVNAASFGKIIRQQFPQLTTRRLGTRGQSKYHYYGIAVKESSQYYD

SEQ ID NO: 97748 - protein, 337 aa, Homo sapiens [sequence omitted]

SEQ ID NO: 97749 - protein, 127 aa, Homo sapiens
MNVHRGSDSDRLLRQEASCLVDDTLAVAQEKEANSLASSGPHNLTYPLGPRNEGCLDQEESTTSLGPMRRESMRLLKASVQLYFAQCWIITKPVSSIVLMASLSQILEILVIISALILTSTLSDVKI

SEQ ID NO: 97750 - protein, 125 aa, Homo sapiens
MSLGKRKPSNFYLANFLGKECILSGIMSVNGKKVLHMDRNPYYGGESASITPLEDLYKRFKIPGSPPESMGRGRDWNVDLIPKFLMANGQLVKMLLYTEVTRYLDFKVTEGSFVYKGGKIYKVPS

SEQ ID NO: 97751 - protein, 134 aa, Homo sapiens
MEQMSTYKRATLDEEDLVDSLSEGDAYPNGLQVNFHSPRSGQRCWAARTQVEKRLVVLVVLLAAGLVACLAALGIQYQTRSPSVCLSEACVSVTSSILSSMDPTVDPCHDFFSYACGGWIKANPVPDGHSRWGT

SEQ ID NO: 97752 - protein, 1581 aa, Homo sapiens
  MOD_RES (1)..(1): Any amino acid
XVLAEKFGDLDPSSAEFFLQEERLTQMRNEYERQCRVLQDQVDELQSELEEYRAQGRVLRLPLKNSPSEEVEANSGGIEPEHGLGSEECNPLNMSIEAELVIEQMKEQHHRDICCLRLELEDKVRHYEKQLDETVVSCKKAQENMKQRHENETHTLEKQISDLKNEIAELQGQAAVLKEAHHEATCRHEEEKKQLQVKLEEEKTHLQEKLRLQHEMELKARLTQAQASFEREREGLQSSAWTEEKVRGLTQELEQFHQEQLTSLVEKHTLEKEELRKELLEKHQRELQEGREKMETECNRRTSQIEAQFQSDCQKVTERCESALQSLEGRYRQELKDLQEQQREEKSQWEFEKDELTQECAEAQELLKETLKREKTTSLVLTQEREMLEKTYKEHLNSMVVERQQLLQDLEDLRNVSETQQSLLSDQILELKSSHKRELREREEVLCQAGASEQLASQRLERLEMEHDQERQEMMSKLLAMENIHKATCETADRERAEMSTEISRLQSKIKEMQQATSPLSMLQSGCQVIGEEEVEGDGALSLLQQGEQLLEENGDVLLSLQRAHEQAVKENVKMATEISRLQQRLQKLEPGLVMSSCLDEPATEFFGNTAEQTEQFLQQNRTKQVEGVTRRHVLSDLEDDEVRDLGSTGTSSVQRQEVKIEESEASVEGFSELENSEETRTESWELKNQISQLQEQLMMLCADCDRASEKKQDLLFDVSVLKKKLKMLERIPEASPKYKLLYEDVSRENDCLQEELRMMETRYDEALENNKELTAEVFRLQDELKKMEEVTETFLSLEKSYDEVKIENEGLNVLVLRLQGKIEKLQESVVQRCDCCLWEASLENLEIEPDGNILQLNQTLEECVPRVRSVHHVIEECKQENQYLEGNTQLLEKVKAHEIAWLHGTIQTHQERPRVQNQVILEENTTLLGFQDKHFQHQATIAELELEKTKLQELTRKLKERVTILVKQKDVLSHGEKEEELKAMMHDLQITCSEMQQKVELLRYESEKLQQENSILRNEITTLNEEDSISNLKLGTLNGSQEEMWQKTETVKQENAAVQKMVENLKKQISELKIKNQQLDLENTELSQKNSQNQEKLQELNQRLTEMLCQKEKEPGNSALEEREQEKFNLKEELERCKVQSSTLVSSLEAELSEVKIQTHIVQQENHLLKDELEKMKQLHRCPDLSDFQQKISSVLSYNEKLLKEKEALSEELNSCVDKLAKSSLLEHRIATMKQEQKSWEHQSASLKSQLVASQEKVQNLEDTVQNVNLQMSRMKSDLRVTQQEKEALKQEVMSLHKQLQNAGGKSWAPEIATHPSGLHNQQKRLSWDKLDHLMNEEQQLLWQENERLQTMVQNTKAELTHSREKVRQLESNLLPKHQKHLNPSGTMNPTEQEKLSLKRECDQFQKEQSPANRKVSQMNSLEQELETIHLENEGLKKKQVKLDEQLMEMQHLRSTATPSPSPHAWDLQLLQQQACPMVPREQFLQLQRQLLQAERINQHLQEELENRTSETNTPQGNQEQLVTVMEERMIEVEQKLKLVKRLLQEKVNQLKEQVSLPGHLCSPTSHSSFNSSFTSLYCH

SEQ ID NO: 97753 - protein, 61 aa, Homo sapiens
MGMGRGAGRSALGFWPTLAFLLCSFPAAIKRSPGSFCAALEMRRLWNLMSWKERRVQKPLM

SEQ ID NO: 97754 - protein, 122 aa, Homo sapiens
  MOD_RES (1)..(1): Any amino acid
XTNATNNMNLSRSSSDNNTNTLGRNVMSTATSPLMGAQSFPNLTTPGTTSTVTMSTSSVTSSSNVATATTVLSVGQSLSNTLTTSLTSTSSESDTGQEAEYSLYVFMKNSLSASSFMQDNVI

SEQ ID NO: 97755 - protein, 614 aa, Homo sapiens
MEIIRSNFKSNLHKVYQAIEEADFFAIDGEFSGISDGPSVSALTNGFDTPEERYQKLKKSSSIDFLASQGFDFNKVFRNGIPYLNQEEERQLREQYDEKRSQANGAGALSYVSPNTSKCPVTIPEDQKKFIDQVVEKIEDLLQSEENKNLDLEPCTGFQRKLIYQTLSWKYPKGIHVETLETEKKERYIVISKVDEEERKRREQQKHAKEQEELNDAVGFSRVIHAIANSGKLVIGHNMLLDVMHTVHQFYCPLPALSLNFPRCSFCLLHEVFIACYLAQEDLSEFKEMTTCVFPRLLDTKLMASTQPFKDIINNTSLAELEKRLKETPFNPPKVESAEGFPSYDTASEQLHEAGYDAYITGLCFISMANYLGSFLSPPKIHVSARSKLIEPFFNKLFLMRVMDIPYLNLEGPDLQPKRDHVLHVTFPKEWKTSDLYQLFSAFGNIQISWIDDTSAFVSLSQPEQVKIAVNTSKYAESYRIQTYAEYMGRKQEEKQIKRKWTEDSWKEADSKRLNPQCIPYTLQNHYYRNNSFTAPSTVGKRNLSPSQEEAGLEDGVSGEISDTELEQTDSCAEPLSEGRKKAKKLKRMKKELSPAGSISKNSPATLFEVPDTW

SEQ ID NO: 97756 - protein, 223 aa, Homo sapiens
MVDPFSKKDWYDVKAPAMFNIRNIGKTLVTRTQGTKIASDGLKGRVFEVSLADLQNDEVAFRKFKLITEDVQGKNCLTNFHGMDLTRDKMCSMVKKWQTMIEAHVDVKTTDGYLLRLFCVGFTKKRNNQIRKTSYAQHQQVRQIRKKMMEIMTREVQTNDLKEVVNKLIPDSIGKDIEKACQSIYPLHDVFVRKVKMLKKPKFELGKLMELHGEGSSSGKATG

SEQ ID NO: 97757 - protein, 1167 aa, Homo sapiens
MQYDEDDDEITPDLWQEACWIVISSYFDEKGLVRQQLDSFDEFIQMSVQRIVEDAPPIDLQAEAQHASGEVEEPPRYLLKFEQIYLSKPTHWERDGAPSPMMPNEARLRNLTYSAPLYVDITKTVIKEGEEQLQTQHQKTFIGKIPIMLRSTYCLLNGLTDRDLCELNECPLDPGGYFIINGSEKVLIAQEKMATNTVYVFAKKDSKYAYTGECRSCLENSSRPTSTIWVSMLARGGQGAKKSAIGQRIVATLPYIKQEVPIIIVFRALGFVSDRDILEHIIYDFEDPEMMEMVKPSLDEAFVIQEQNVALNFIGSRGAKPGVTKEKRIKYAKEVLQKEMLPHVGVSDFCETKKAYFLGYMVHRLLLAALGRRELDDRDHYGNKRLDLAGPLLAFLFRGMFKNLLKEVRIYAQKFIDRGKDFNLELAIKTRIISDGLKYSLATGNWGDQKKAHQARAGVSQVLNRLTFASTLSHLRRLNSPIGRDGKLAKPRQLHNTLWGMVCPAETPEGHAVGLVKNLALMAYISVGSQPSPILEFLEEWSMENLEEISPAAIADATKIFVNGCWVGIHKDPEQLMNTLRKLRRQMDIIVSEVSMIRDIREREIRIYTDAGRICRPLLIVEKQKLLLKKRHIDQLKEREYNNYSWQDLVASGVVEYIDTLEEETVMLAMTPDDLQEKEVAYCSTYTHCEIHPSMILGVCASIIPFPDHNQSPRNTYQSAMGKQAMGVYITNFHVRMDTLAHVLYYPQKPLVTTRSMEYLRFRELPAGINSIVAIASYTGYNQEDSVIMNRSAVDRGFFRSVFYRSYKEQESKKGFDQEEVFEKPTRETCQGMRHAIYDKLDDDGLIAPGVRVSGDDVIIGKTVTLPENEDELESTNRRYTKRDCSTFLRTSETGIVDQVMVTLNQEGYKFCKIRVRSVRIPQIGDKFASRHGQKGTCGIQYRQEDMPFTCEGITPDIIINPHAIPSRMTIGHLIECLQGKVSANKGEIGDATPFNDAVNVQKISNLLSDYGYHLRGNEVLYNGFTGRKITSQIFIGPTYYQRLKHMVDDKIHSRARGPIQILNRQPMEGRSRDGGLRFGEMERDCQIAHGAAQFLRERLFEASDPYQVHVCNLCGIMAIANTRTHTYECRGCRNKTQISLVRMPYACKLLFQELMSMSIAPRMMSV

SEQ ID NO: 97758 - protein, 1175 aa, Homo sapiens
MSSMWSEYTIGGVKIYFPYKAYPSQLAMMNSILRGLNSKQHCLLESPTGSGKSLALLCSALAWQQSLSGKPADEGVSEKAEVQLSCCCACHSKDFTNNDMNQGTSRHFNYPSTPPSERNGTSSTCQDSPEKTTLAAKLSAKKQASIYRDENDDFQVEKKRIRPLETTQQIRKRHCFGTEVHNLDAKVDSGKTVKLNSPLEKINSFSPQKPPGHCSRCCCSTKQGNSQESSNTIKKDHTGKSKIPKIYFGTRTHKQIAQITRELRRTAYSGVPMTILSSRDHTCVHPEVVGNFNRNEKCMELLDGKNMDLNLKEQVVILDEAHNIEDCARESASYSVTEVQLRFARDELDSMVNNNIRKKDHEPLRAVCCSLINWLEANAEYLVERDYESACKIWSGNEMLLTLHKMGITTATFPILQGHFSAVLQKEEKISPIYGKEEAREVPVISASTQIMLKGLFMVLDYLFRQNSRFADDYKIAIQQTYSWTNQIDISDKNGLLVLPKNKKRSRQKTAVHVLNFWCLNPAVAFSDINGKVQTIVLTSGTLSPMKSFSSELGVTFTIQLEANHIIKNSQVWVGTIGSGPKGRNLCATFQNTETFEFQDEVGALLLSVCQTVSQGILCFLPSYKLLEKLKERWLSTGLWHNLELVKTVIVEPQGGEKTNFDELLQVYYDAIKYKGEKDGALLVAVCRGKVSEGLDFSDDNARAVITIGIPFPNVKDLQVELKRQYNDHHSKLRGLLPGRQWYEIQAYRALNQALGRCIRHRNDWGALILVDDRFRNNPSRYISGLSKWVRQQIQHHSTFESALESLAEFSKKHQKVLNVSIKDRTNIQDNESTLEVTSLKYSTSPYLLEAASHLSPENFVEDEAKICVQELQCPKIITKNSPLPSSIISRKEKNDPVFLEEAGKAEKIVISRSTSPTFNKQTKRVSWSSFNSLGQYFTGKIPKATPELGSSENSASSPPRFKTEKMESKTVLPFTDKCESSNLTVNTSFGSCPQSETIISSLKIDATLTRKNHSEHPLCSEEALDPDIELSLVSEEDKQSTSNRDFETEAEDESIYFTPELYDPEDTDEEKNDLAETDRGNRLANNSDCILAKDLFEIRTIKEVDSAREVKAEDCIDTKLNGILHIEESKIDDIDGNVKTTWINELELGKTHEIEIKNFKPSPSKNKGMFPGFK

SEQ ID NO: 97759 - protein, 288 aa, Homo sapiens
MGSKALPAPIPLHPSLQLTNYSFLQAVNTFPATVDHLQGLYGLSAVQTMHMNHWTLGYPNVHEITRSTITEMAAAQGLVDARFPFPALPFTTHLFHPKQGAIAHVLPALHKDRPRFDFANLAVAATQEDPPKMGDLSKLSPGLGSPISGLSKLTPDRKPSRGRLPSKTKKEFICKFCGRHFTKSYNLLIHERTHTDERPYTCDICHKAFRRQDHLRDHRYIHSKEKPFKCQECGKGFCQSRTLAVHKTLHMQVSLFSCLKTVAGSCYHYCFAKGVQWQTLSLKRLYLD

SEQ ID NO: 97760 - protein, 74 aa, Homo sapiens
MDPVGLQLGNKNLWSCLVRLLTKDPEWLNAKMKFFLPNTDLDSRNETLDPEQRVILQLNKLHVQGSDTWQSFIH

SEQ ID NO: 97761 - protein, 372 aa, Homo sapiens
MATKPTEPVTILSLRKLSLGTAEPQVKEPKTFTVEDAVETIGFGRFHIALFLIMGSTGVFWLAGSLLIIGLASVIIPTIGWRWLIRVASIPGIILIVAFKFIPESARFNVSTGNTRAALATLERVAKMNRSVMPEGKLVEPVLEKRGRFADLLDAKYLRTTLQIWVIWLGISFAYYGVILASAELLERDLVCGSKSDSAVVVTGGDSGESQSPCYCHMFAPSDYRTMIISTIGEIALNPLNILGINFLGRRLSLSITMGCTALFFLLLNICTSSAGLIGFLFMLRALVAANFNTVYIYTAEVYPTTMRALGMGTSGSLCRIGAMVAPFISQVLMSASILGALCLFSSVCVVCAISAFTLPIETKGRALQQIK

SEQ ID NO: 97762 - protein, 100 aa, Homo sapiens
MGNLLKVLTCTDLEQGPNFFLDFENAQPTESEKEIYNQVNVVLKDAEGILEDLQSYRGAGHEIREAIQHPADEKLQEKAWGAVVPLVGKLKKFYEFSQRL

SEQ ID NO: 97763 - protein, 107 aa, Homo sapiens
  MOD_RES (1)..(1): Any amino acid
XEAFEAIPRALAENSGVKANEVISKLYAVHQEGNKNVGLDIEAEVPAVKDMLEAGILDTYLGKYWAIKLATNAAVTVLRVDQIIMAKPAGGPKPPSGKKDWDDDQND

SEQ ID NO: 97764 - protein, 512 aa, Homo sapiens
MAQVAGGQVQSPEADGLLTLERPGSGTPAQAGDDAAEATPGHPCPVLELPPAWPMGCGVDDVPAFCFVCFHREEEEELLEEVPLRREKMSVGCPEPEPPRSLTCCGPGTAPGPGAGVPLLTEDMQALTLRTLAASDVTKHYELVRELGKGTYGKVDLVVYKGTGTKMALKFVNKSKTKLKNFLREVSITNSLSSSPFIIKVFDVVFETEDCYVFAQEYAPAGDLFDIIPPQVGLPEDTVKRCVQQLGLALDFMHGRQLVHRDIKPENVLLFDRECRRVKLADFGMTRRVGCRVKRVSGTIPYTAPEVCQAGRADGLAVDTGVDVWAFGVLIFCVLTGNFPWEAASGADAFFEEFVRWQRGRLPGLPSQWRRFTEPALRMFQRLLALEPERRGPAKEVFRFLKHELTSELRRRPSHRARKPPGDRPPAAGPLRLEAPGPLKRTVLTESGSGSRPAPPAVGSVPLPVPVPVPVPVPVPVPEPGLAPQGPPGRTDGRADKSKGQVVLATAIEICV

SEQ ID NO: 97765 - protein, 135 aa, Homo sapiens
  MOD_RES (1)..(1): Any amino acid
XGLSAGSLSESAVGPVEACCLVILAAESKVAAEELCCLLGQVFQVVYTESTIDFLDRAIFDGASTPTHHLSLHSASHVTSSTVTSSFDCQLPLHFRTLAITLSPPKFSRVISLFQDDSSTKVDIKETYEVEASTL

SEQ ID NO: 97766 - protein, 115 aa, Homo sapiens
MSFCSFFGGEVFQNHFEPGVYVCAKCGYELFSSRSKYAHSSPWPAFTETIHADSVAKRPEHNRSEALKVSCGKCGNGLGHEFLNDGPKPGQSRFIFSSSLKFVPKGKETSASQGH

SEQ ID NO: 97767 - protein, 161 aa, Homo sapiens
  MOD_RES (1)..(1): Any amino acid
XSCTGTPLSSTISSPEGPASSSLAQSVMSMASSQISTDTVSSMSGSYIAPGTEEEGEALSSPQPASRAPSEEGEGLPAESPDSNFAGLPAGEQDAEGNDVIEEEDGSPTQEGQRTCAFLGMECDNNNDFDIASVKALDNKLCSEVCLPAAAPESCPINIEE

SEQ ID NO: 97768 - protein, 100 aa, Homo sapiens
MEREMVLCLAQTIHTQEGALPRPSISAEPGTVISPGSHVTFMCRGPVGVQTFRLEREDRAKYKDSYNVFRLGPSESEARFHIDSVSEGNAGLYRCLYYKP

SEQ ID NO: 97769 - protein, 90 aa, Homo sapiens
MRYSLSPDNHLEDGIMNMANFLRGFEEKGIKNDRPEDQLSKEKKKILFSFCEVCNIQLNSAAQAQVHSNGKSHRKRVKQLSDGQPPPPAQ

SEQ ID NO: 97770 - protein, 20 aa, Homo sapiens
GDTNLRAGLIPSKGFQERRF

SEQ ID NO: 97771 - protein, 446 aa, Homo sapiens
MLHPETSPGRGHLLAVLLALLGTTWAEVWPPQLQEQAPMAGALNRKESFLLLSLHNRLRSWVQPPAADMRRLDWSDSLAQLAQARAALCGIPTPSLASGLWRTLQVGWNMQLLPAGLASFVEVVSLWFAEGQRYSHAAGECARNATCTHYTQLVWATSSQLGCGRHLCSAGQTAIEAFVCAYSPGGNWEVNGKTIIPYKKGAWCSLCTASVSGCFKAWDHAGGLCEVPRNPCRMSCQNHGRLNISTCHCHCPPGYTGRYCQVRCSLQCVHGRFREEECSCVCDIGYGGAQCATKVHFPFHTCDLRIDGDCFMVSSEADTYYRARMKCQRKGGVLAQIKSQKVQDILAFYLGRLETTNEVIDSDFETRNFWIGLTYKTAKDSFRWATGEHQAFTSFAFGQPDNHGFGNCVELQASAAFNWNDQRCKTRNRYICQFAQEHISRWGPGS

SEQ ID NO: 97772 - protein, 232 aa, Homo sapiens
MGGTTSTRRVTFEADENENITVVKGIRLSENVIDRMKESSPSGSKSQRYSGAYGASVSDEELKRRVAEELALEQAKKESEDQKRLKQAKELDRERAAANEQLTRAILRERICSEEERAKAKHLDIEDKARQLEEKDRVLKKQDAFYKEQLARLEERSSEFYRVTTEQYQKAAEEVEAKFKRYESHPVCADLQAKILQCYRENTHQTLKCSALATQYMHCVNHAKQSMLEKGG

SEQ ID NO: 97773 - protein, 153 aa, Homo sapiens
ARPAGSWSLEEAEGTMSGRRFHLSTTDRVIKAVPFPPTQRLTFKEVFENGKPKVDVLKNHLVKEGRLEEEVALKIINDGAAILRQEKTMIEVDAPITVCGDIHGQFFDLMKLFEVGGSPSNTRYLFLGDYVDRGYFSIEVKIKLDMLGLLYCL

SEQ ID NO: 97774 - protein, 141 aa, Homo sapiens
YFDFIITIGHSRLNKENDTLKALLKANVEKPVKLEVFNMKTMRVREVEVVPSNMWGGQGLLGASVRFCSFRRASEQVWHVLESLATCLQQKQQCSGCSCSQGCGTIFTCCPCRPAPLHRLCGWFGPDSPGVRGLLYAHRVS

SEQ ID NO: 97775 - protein, 151 aa, Homo sapiens
MWSGLLPPGLNESDAESNSEDEATLENSGLNLQEDKEDESIRKTEIIDFSTDEPKTETESNVNAYEECPSGIPIDMWNKFQELHKKHSEQKSTTSRFRGKRRKRSRKDKLKNEKELHSEPSSNETQWKELTQYFGVNDRFDPPVKRKKVEK

SEQ ID NO: 97776 - protein, 94 aa, Homo sapiens
MEKAPPQPQHEGLKSKEHLPQQPAEGKTASRRVPRLRAVVESQAFKNILVDEMDMMHARAATLIQANWRGYWLRQKLISQMMAAKAIQEAWRRF

SEQ ID NO: 97777 - protein, 33 aa, Homo sapiens
MVPFGPFAFMPGKLVHTNEVTVLLGDNWFAKCS

SEQ ID NO: 97778 - protein, 123 aa, Homo sapiens
SVFGDLKSDEMELLYSAYGDETGVQCALSLQEFVKDAGSYSKKVVDDLLDQITGGDHSRTLFQLKQRRNVPMKPPDEAKVGDTLGDSSSSVLEFMSMKSYPDVSVDISMLSSLGPAIYHVMLY

SEQ ID NO: 97779 - protein, 152 aa, Homo sapiens
MSSEDREAQEDELLALASIYDGDEFRKAESVQGGETRIYLDLPQNFKIFVSEKLMDLRNEYLQADEANKRLLDQRYGKRVIQKALEEMESKEWLEKNSKSCPCCGTPIEKLDGCNKMTCTGCMQYFCWICMGSLSRANPYKHFNDPGSPCFN

SEQ ID NO: 97780 - protein, 262 aa, Homo sapiens
MADMQNLVERLERAVGRLEAVSHTSDMHRGYADSPSKGAAPYVQAFDSLLAGPVAEYLKISKEIGGDVQKHAEMVHTGLKLERALLVTASQCQQPAENKLSDLLAPISEQIKEVITFREKNRGSKLFNHLSAVSESIQALGWVAMAPKPGPYVKEMNDAAMFYTNRVLKEYKDVDKKHVDWVKAYLSIWTELQAYIKEFHTTGLAWSKTGPVAKELSGLPSGPSAGSCPPPPPPCPPPPPVSTISCSYESASRSSLFAQINQ

SEQ ID NO: 97781 - protein, 146 aa, Homo sapiens
  MOD_RES (1)..(1): Any amino acid
XGSSVRARETMVSVTMATSEWIQFFKEAGIPPGPAVNYAVMFVDNRIQKSMLLDLNKEIMNELGVTVVGDIIAILKHAKVVHRQDMCKAATESVPCSPSPLAGEIRRGTSDGVSLCCPGWSTVARPWLSATSASRVQAVLLPQPPE

SEQ ID NO: 97782 - protein, 404 aa, Homo sapiens
MHETVDGYRRYFTQIVGFFVVEDHILHVTQGLVTRAYTDELWNMALSKIIAVLRAHSSYCTDPDLVLELKNLTVIFADTLQGYGFPVNRLFDLLFEIRDQYNETLLKKWAGVFRDIFEEDNYSPIPVVNEEEYKIVISKFPFQDPDLEKQSFPKKFPMSQSVPHIYIQVKEFIYASLKFSESLHRSSTEIDDMLRKSTNLLLTRTLSSCLLNLIRKPHIGLTELVQIIINTTHLEQACKYLEDFITNITNISQETVHTTRLYGLSTFKDARHAAEGEIYTKLNQKIDEFVQLADYDWTMSEPDGRASGYLMDLINFLRSIFQVFTHLPGKVAQTACMSACQHLSTSLMQMLLDSELKQISMGAVQQFNLDVIQCEYEVLLCCPDWSQTPGLKSSSCLGIPKCWN

SEQ ID NO: 97783 - protein, 1894 aa, Homo sapiens
MTTMLQKSDSNASFLRAARAGNLDKVVEYLKGGIDINTCNQNGLNALHLAAKEGHVGLVQELLGRGSSVDSATKKGNTALHIASLAGQAEVVKVLVKEGANINAQSQNGFTPLYMAAQENHIDVVKYLLENGANQSTATEDGFTPLAVALQQGHNQAVAILLENDTKGKVRLPALHIAARKDDTKSAALLLQNDHNADVQSKMMVNRTTESGFTPLHIAAHYGNVNVATLLLNRGAAVDFTARNGITPLHVASKRGNTNMVKLLLDRGGQIDAKTRDGLTPLHCAARSGHDQVVELLLERGAPLLARTKNGLSPLHMAAQGDHVECVKHLLQHKAPVDDVTLDYLTALHVAAHCGHYRVTKLLLDKRANPNARALNGFTPLHIACKKNRIKVMELLVKYGASIQAITESGLTPIHVAAFMGHLNIVLLLLQNGASPDVTNIRGETALHMAARAGQVEVVRCLLRNGALVDARAREEQTPLHIASRLGKTEIVQLLLQHMAHPDAATTNGYTPLHISAREGQVDVASVLLEAGAAHSLATKKGFTPLHVAAKYGSLDVAKLLLQRRAAADSAGKNGLTPLHVAAHYDNQKVALLLLEKGASPHATAKNGYTPLHIAAKKNQMQIASTLLNYGAETNIVTKQGVTPLHLASQEGHTDMVTLLLDKGANIHMSTKSGLTSLHLAAQEDKVNVADILTKHGADQDAHTKLGYTPLIVACHYGNVKMVNFLLKQGANVNAKTKNGYTPLHQAAQQGHTHIINVLLQHGAKPNATTANGNTALAIAKRLGYISVVDTLKVVTEEVTTTTTTITEKHKLNVPETMTEVLDVSDEEGDDTMTGDGGEYLRPEDLKELGDDSLPSSQFLDGMNYLRYSLEGGRSDSLRSFSSDRSHTLSHASYLRDSAVMDDSVVIPSHQVSTLAKEAERNSYRLSWGTENLDNVALSSSPIHSGRASPCLERDNSSFLVSFMVDARGGAMRGCRHNGLRIIIPPRKCTAPTRVTCRLVKRHRLATMPPMVEGEGLASRLIEVGPSGAQFLGKLHLPTAPPPLNEGESLVSRILQLGPPGTKFLGPVIVEIPHFAALRGKERELVVLRSENGDSWKEHFCDYTEDELNEILNGMDEVLDSPEDLEKKRICRIITRDFPQYFAVVSRIKQDSNLIGPEGGVLSSTVVPQVQAVFPEGALTKRIRVGLQAQPMHSELVKKILGNKATFSPIVTLEPRRRKFHKPITMTIPVPKASSDVMLNGFGGDAPTLRLLCSITGGTTPAQWEDITGTTPLTFVNECVSFTTNVSARFWLIDCRQIQESVTFASQVYREIICVPYMAKFVVFAKSHDPIEARLRCFCMTDDKVDKTLEQQENFAEVARSRDVEVLEGKPIYVDCFGNLVPLTKSGQHHIFSFFAFKENRLPLFVKVRDTTQEPCGRLSFMKEPKSTRGLVHQAICNLNITLPIYTKESESDQEQEEEIDMTSEKNPQDEQERIEERLAYIADHLGFSWTELARELDFTEEQIHQIRIENPNSLQDQSHALLKYWLERDGKHATDTNLVECLTKINRMDIVHLMETNTEPLQERISHSYAEIEQTITLDHSEGFSVLQEELCTAQHKQKEEQAVSKESETCDHPPIVSEEDISVGYSTFQDGVPKTEGDSSATALFPQTHKEQVQQDFSGKMQDLPEESSLEYQQEYFVTTPGTETSETQKAMIVPSSPSKTPEEVSTPAEEEKLYLQTPTSSERGGSPIIQEPEEPSEHREESSPRKTSLVIVESADNQPETCERLDEDAAFEKELTEELGELEASSDEEAMVTTRVVRRRVIIQGDDMPEIPPETVTEEEYIDEHGHTVVKKVTRKIIRRYVSSEGTEKEEIMVQGMPQEPVNIEEGDGYSKVIKRVVLKSDTEQSEDNNE

SEQ ID NO: 97784 - protein, 65 aa, Homo sapiens
MWRVCARRAQNVAPWAGLEARWTALQEVPGTPRVTSRSGPAPARRNSVTTGFHCLLFPPQCRQAP

SEQ ID NO: 97785 - protein, 101 aa, Homo sapiens
MEAMAASTSLPDPGDFDRNVPRICGVCGDRATGFHFNAMTCEGCKGFFRRSMKRKALFTCPFNGDCRITKDNRRHCQACRLKRCVDIGMMKEFILTDEEVQ

SEQ ID NO: 97786 - protein, 191 aa, Homo sapiens
MCNTQRMKFSNCNGKRKVQYESSEPADFKVDEDGMVYAVRSFPLSSEHAKFLIYAQDKETQEKWQVAVKLSLKPTLTEESVKESAEVEEIVFPRQFSKHSGHLQRQKRDWVIPPINLPENSRGPFPQELVRIRSDRDKNLSLRYSVTGPGADQPPTGIFIINPISGQLSVTKPLDREQIARFHLRAHAVDI

SEQ ID NO: 97787 - protein, 194 aa, Homo sapiens
  MOD_RES (1)..(1): Any amino acid
XGALGTPAAAAANELNNNLPGGAPAAPAVPGPGGVNCAVGSAMLTRAAPGPRRSEDEPPAASASAAPPPQRDEEEPDGVPEKGKSSGPSARKGKGQIEKRKLREKRRSTGVVNIPAAECLDEYEDDEAGQKERKREDAITQQNTIQNEAVNLLDPGSSYLLQEPPRTVSGRYKRKRDKPYTEQGAVTRSGSVGG

SEQ ID NO: 97788 - protein, 121 aa, Homo sapiens
MHTLLAATKDSLAMDPPVVNRPKKSKTKKAPIKTITKAAPAAPPVPAANEIATNKPKITWQALNLPVITQISQALPTTEVTNTQASSVTAQPKKANKMKRVTAKAAQGSQSPTGHEGGTIQ

SEQ ID NO: 97789 - protein, 135 aa, Homo sapiens
MLDSCKLKSACNLPFICNKTLYGKIGKDRLNAVNKIINTAGTSNAEVPLADPGMYQLDITLRRGQSLAARDRGGTSDPYVKFKIGGKEVFRSKIIHKNLNPVWEEKACILVDHLREPLYIKVFDYDFGLQDDFMG

SEQ ID NO: 97790 - protein, 457 aa, Homo sapiens
MAFASIYKLDNLVAILDINRLGQSDPAPLQHQMDIYQKRCEAFGWHAIIVDGHSVEELCKAFGQAKHQPTAIIAKTFKGRGITGVEDKESWHGKPLPKNMAEQIIQEIYSQIQSKKKILATPPQEDAPSVDIANIRMPSLPSYKVGDKIATRKAYGQALAKLGHASDRIIALDGDTKNSTFSEIFKKEHPDRFIECYIAEQNMVSIAVGCATRNRTVPFCSTFAAFFTRAFDQIRMAAISESNINLCGSHCGVSIGEDGPSQMALEDLAMFRSVPTSTVFYPSDGVATEKAVELAANTKGICFIRTSRPENAIIYNNNEDFQVGQAKVVLKSKDDQVTVIGAGVTLHEALAAAELLKKEKINIRVLDPFTIKPLDRKLILDSARATKGRILTVEDHYYEGGIGEAVSSAVVGEPGITVTHLAVNRVPRSGKPAELLKMFGIDRDAIAQAVRGLITKA

SEQ ID NO: 97791 - protein, 164 aa, Homo sapiens
MKRSLNENSARSTAGCLPVPLFNQKKRNRQPLTSNPLKDDSGISTPSDNYDFPPLPTDWAWEAVNPELAPVMKTVDTGQIPHSVSRPLRSQDSVFNSIQSNTGRSQGGWSYRDGNKNTSLKTWNKNDFKPQCKRTNLVANDGKNSCPVSSGAQQQKQLRIPEPP

SEQ ID NO: 97792 - protein, 122 aa, Homo sapiens
MQVSSLQREPFTIAQGKGQKLCEIERIHFFLSKKKTDELRNLHKLLYNRPGTVSSLKKNVGQFSGFPFEKGSVQYKKKEEMLKKFRNAMLKSICEVLDLERSGVNSELVKRILNFLMHPKPS

SEQ ID NO: 97793 - protein, 136 aa, Homo sapiens
DAAGSIATATPDGGVVLISGTGSNCRLINPDGSESGCGGWGHMMGDEGSAYWIAHQAVKIVFDSIDNLEAAPHDIGYVKQAMFHYFQVPDRLGILTHLYRDFDKCRCSAGRPPFPLYLQEGWGDAGQTHRSSVARD

SEQ ID NO: 97794 - protein, 758 aa, Homo sapiens
MSESSGSALQPGRPSRQPAVHPENLSLDSSCFSSPPVNFLQELPSYRSIARRRTTVHSRDKQSGTLLKPTDSYSSQLEDRIAENLSSHSLRNYALNISEKRRLRDIQETQMKYLSEWDQWKRYSSKSWKRFLEKAREMTTHLELWREDIRSIEGKFGTGIQSYFSFLRFLVLLNLVIFLIIFMLVLLPVLLTKYKITNSSFVLIPFKDMDKQCTVYPVSSSGLIYFYSYIIDLLSGTGFLEETSLFYGHYTIDGVKFQNFTYDLPLAYLLSTIASLALSLLWIVKRSVEGFKINLIRSEEHFQSYCNKIFAGWDFCITNRSMADLKHSSLRYELRADLEEERMRQKIAERTSEETIRIYSLRLFLNCIVLAVLGACFYAIYVATVFSQEHMKKEIDKMVFGENLFILYLPSIVITLANFITPMIFAKIIRYEDYSPGFEIRLTILRCVFMRLATICVLVFTLGSKITSCDDDTCDLCGYNQKLYPCWETQVGQEMYKLMIFDFIIILAVTLFVDFPRKLLVTYCSSCKLIQCWGQQEFAIPDNVLGIVYGQTICWIGAFFSPLLPAIATLKFIIIFYVKEWSLLYTCRPSPRPFRASNSNFFFLLVLLIGLCLAIIPLTISISRIPSSKACGPFTNFNTTWEVIPKTVSTFPSSLQSFIHGVTSEAFAVPFFMIICLIMFYFIALAGAHKRVVIQLREQLSLVRKHSSRGSWLGTFTQDTARKVLFSWEGVKLLQPSLTTTSPKLCLEAQPRPASLIH

SEQ ID NO: 97795 - protein, 189 aa, Homo sapiens
MANVPWAEVCEKFQAALALSRVELHKNPEKEPYKSKYSARALLEEVKALLGPAPEDEDERPEAEDGPGAGDHALGLPAEVVEPEGPVAQRAVRLAVIEFHLGVNHIDTEELSAGEEHLVKCLRLLRRYRLSHDCISLCIQAQRWGLTVSPRFELSGTIIAHCSFHLLGSSSPPASAFIVAGTTGACHHS

SEQ ID NO: 97796 - protein, 124 aa, Homo sapiens
MYPESTTGSPARLSLRQTGSPGMIYRNLGKSGLRVSCLGLGTWVTFGGQITDEMAEQLMTLAYDNGINLFDTAEVYAAGKYVSFHTGKSGSECLGRAGATGIPAARVPKSAHKCTLHPAFIFKL

SEQ ID NO: 97797 - protein, 162 aa, Homo sapiens
MCGICCSVVLTGIGADEQLAGYSRHRVRFQSHGLEGLNKEIMMELGRISSRNLGRDDRVIGDHGKEARFPFLDENVVSFLNSLPIWEKANLTLPRGIGEKLLLRLAAVELGLTASALLPKRAMQFGSRIAKMEKINEKASDKCGRLQIMSLENLSIEKETKL

SEQ ID NO: 97798 - protein, 47 aa, Homo sapiens
MAHAMENSWTISKEYHIDEEVGFALPNPQENLPDFYNDWMFIAKHLP

SEQ ID NO: 97799 - protein, 115 aa, Homo sapiens
LCEFINKLQPGSVKKINESTQNWHQLENIGNFIKAITKYGVKPHDIFEPGLGMEHCDTLNVSLQMGSNKGASQRGMTVYGLPRQVYDPKYCLTPEYPELGEPAHNHHAHNYYNSA

SEQ ID NO: 97800 - protein, 371 aa, Homo sapiens
MMDLRNTPAKSLDKFIEDYLLPDTCFRMQINHAIDIICGFLKERCFRGSSYPVCVSKVVKDQLNRRGEFIQEIRRQLEACQRERAFSVKFEVQAPRWGNPRALSFVLSSLQLGEGVEFDVLPAFDALGQLTGGYKPNPQIYVKLIEECTDLQKEGEFSTCFTELQRDFLKQRPTKLKSLIRLVKHWYQNCKKKLGKLPPQYALELLTVYAWERGSMKTHFNTAQGFRTVLELVINYQQLCIYWTKYYDFKNPIIEKYLRRQLTKPRPVILDPADPTGNLGGGDPKGWRQLAQEAEAWLNYPCFKNWDGSPVSSWILLAESNSADDETDDPRRYQKYGYIGTHEYPHFSHRPSTLQAASTPQAEEDWTCTIL

SEQ ID NO: 97801 - protein, 794 aa, Homo sapiens
MSKSFQQSSLSRDSQGHGRDLSAAGIGLLAAATQSLSMPASLGRMNQGTARLASLMNLGMSSSLNQQGAHSALSSASTSSHNLQSIFNIGSRGPLPLSSQHRGDADQASNILASFGLSARDLDELSRYPEDKITPENLPQILLQLKRRRTEEGPTLSYGRDGRSATREPPYRVPRDDWEEKRHFRRDSFDDRGPSLNPVLDYDHGSRSQESGYYDRMDYEDDRLRDGERCRDDSFFGETSHNYHKFDSEYERMGRGPGPLQERSLFEKKRGAPPSSNIEDFHGLLPKGYPHLCSICDLPVHSNKEWSQHINGASHSRRCQLLLEIYPEWNPDNDTGHTMGDPFMLQQSTNPAPGILGPPPPSFHLGGPAVGPRGNLGAGNGNLQGPRHMQKGRVETSRVVHIMDFQRGKNLRYQLLQLVEPFGVISNHLILNKINEAFIEMATTEDAQAAVDYYTTTPALVFGKPVRVHLSQKYKRIKKPEGKPDQKFDQKQELGRVIHLSNLPHSGYSDSAVLKLAEPYGKIKNYILMRMKSQAFIEMETREDAMAMVDHCLKKALWFQGRCVKVDLSEKYKKLVLRIPNRGIDLLKKDKSRKRSYSPDGKESPSDKKSKTDGSQKTESSTEGKEQEEKSGEDGEKDTKDDQTEQEPNMLLESEDELLVDEEEAAALLESGSSVGDETDLANLGDVASDGKKEPSDKAVKKDGSASAAAKKKLKKVDKIEELDQENEAALENGIKNEENTEPGAESSENADDPNKDTSENADGQSDENKDDYTIPDEYRIGPYQPNVPVEISE

SEQ ID NO: 97802 - protein, 250 aa, Homo sapiens
PPPSLSTPALPPWVAPPSTPVPPQVHDLCDNFCHRYITCLKGKMPIDLVIEDRDGGCREDFEDYPASCPSLPDQNNMWIRDHEDSGSVHLGTPGPSSGGLASQSGDNSSDQGDGLDTSVASPSSGGEDEDLDQERRRNKKRGIFPKVATNIMRAWLFQHLSHPYPSEEQKKQLAQDTGLTILQVNNWFINARRRIVQPMIDQSNRTGQGAAFSPEGQPIGGYTETQPHVAVRPPGSVGMSLNLEGEWHYL

SEQ ID NO: 97803 - protein, 569 aa, Homo sapiens
MEHVTEGSWESLPVPLHPQVLGALRELGFPYMTPVQSATIPLFMRNKDVAAEAVTGSGKTLAFVIPILEILLRREEKLKKSQVGAIIITPTRELAIQIDEVLSHFTKHFPEFSQILWIGGRNPGEDVERFKQQGGNIIVATPGRLEDMFRRKAEGLDLASCVRSLDVLVLDEADRLLDMGFEASINTILEFLPKQRRTGLFSATQTQEVENLVRAGLRNPVRVSVKEKGVAASSAQKTPSRLENYYMVCKADEKFNQLVHFLRNHKQEKHLVFFSTCACVEYYGKALEVLVKGVKIMCIHGKMKYKRNKIFMEFRKLQSAFVHRCGRTARIGHGGSALVFLLPMEESYINFLAINQKCPLQEMKPQRNTADLLPKLKSMALADRAVFEKGMKAFVSYVQAYAKHECNLIFRLKDLDFASLARGFALLRMPKMPELRGKQFPDFVPVDVNTDTIPFKDKIREKQRQKLLEQQRREKTENEGRRKFIKNKAWSKQKAKKEKKKKMNEKRKREEGSDIEDEDMEELLNDTRLLKKLKKGKITEEEFEKGLLTTGKRTIKTVDLGISDLEDDC

SEQ ID NO: 97804 - protein, 105 aa, Homo sapiens
MSESKAKKIEIKDVDGQTLSKLIDYIYTAEIEVTEENVQVLLPAASLLQLMDVRQNCCDFLQSQLHPTNCLGIRAFADVHTCTDLLQQANAYAALSRGDARRRIS

SEQ ID NO: 97805 - protein, 61 aa, Homo sapiens
MASELCKTISVARLEKHKNLFLNYRNLHHFPLELLKDEGLQYLERLYMKRNSLTSLIPALK

SEQ ID NO: 97806 - protein, 93 aa, Homo sapiens
MISVKRNTWRALSLVIGDCRKKGNFEYCQDRTEKHSTMPDSPVDVKTQSRLTPPTMPPPPTTQGAPRTSSFTPTTLTNGTSHSPTALNGAPSP

SEQ ID NO: 97807 - protein, 224 aa, Homo sapiens
MAQADIALIGLAVMGQNLILNMNDHGFVVGDEGAGHFVKMVHNGIEYGDMQLICEAYHLMKDVLGMAQDEMAQAFEDWNKTELDSFLIEITANILKFQDTDGKHLLPKIRDSAGQKGTGKWTAISALEYGVPVTLIGEAVFARCLSSLKDERIQASKKLKGPQKFQFDGDKKSFLEDIRKALYASKIISYAQGFMLLRQAATEFGWTLNYGGIALMWRGGCIIR

SEQ ID NO: 97808 - protein, 119 aa, Homo sapiens
MSGWADERGGEGDGRIYVGNLPTDVREKDLEDLFYKYGRIREIELKNRHGLVPFAFVRFEDPRDAEDAIYGRNGYDYGQCRLRVEFPRTYGGRGGWPRGGRNGPPTRRSDFRVLVSENY

SEQ ID NO: 97809 - protein, 259 aa, Homo sapiens
MPRARSGRRSRGAGGREETFLRVRANRQTRLNARIGKMKRRKQDEGQREGSCMAEDDAVDIEHENNNRFEEYEWCGQKRIRATTLLEGGFRGSGFIMCSGKENPDSDADLDVDGDDTLEYGKPQYTEADVIPCTGEEPGEAKEREALRGAVLNGGPPSTRITPEFSKWASDEMPSTSNGESSKQEAMQKTCKNSDIEKITEDSAVTTFEALKARVRELERQLSRGDRYKCLICMDSYSMPLTSIQCWHVHCEECWLRTL

SEQ ID NO: 97810 - protein, 191 aa, Homo sapiens
MPLWDFQGSTMLTSQYVRLTPDERSKEGSIWNHQPCFLKDWEMHVHFKVHGTGKKNLHGDGIALWYTRDRLVPGPVFGSKDNFHGLAIFLDTYPNDETTERVFPYISVMVNNGSLSYDHSKDGRWTELAGCTADFRNRDHDTFLAVRYSRGRLTVMTDLEDKNEWKNCIDITGVRLPTGYYFGASAGTGDL

SEQ ID NO: 97811 - protein, 318 aa, Homo sapiens
MKQKTKPGTGPLSSLEFGVSFLAPSPHMELLASCPRSRLSPWGGWAPPPSHSRDLRPLPQDDGVCLSMEGGAAAATPTALPYYVAFSQLLGLTLVAMTGAWLGLYRGGIAWESDLQFNAHPLCMVIGLIFLQGNALLVYRVFRNEAKRTTKVLHGLLHIFALVIALVGLVAVFDYHRKKGYADLYSLHSWCGILVFVLYFVQWLVGFSFFLFPGASFSLRSRYRPQHIFFGATIFLLSVGTALLGLKEALLFNLGGKYSAFEPEGVLANVLGLLLACFGGAVLYILTRADWKRPSQAEEQALSMDFKTLTEGDSPGSQ

SEQ ID NO: 97812 - protein, 52 aa, Homo sapiens
MESERSKRMGNACIPLKRIAYFLCLLSALLLTEGKKPAKPKCPAILCEIWFY

SEQ ID NO: 97813 - protein, 57 aa, Homo sapiens
MRKGVLKDPEIADLFYKDDPEELFIGLHEIGHGSFGAVYFATNAHTSEVVAIKKMSY

SEQ ID NO: 97814 - protein, 176 aa, Homo sapiens
MGRKLDPTKEKRGPGRKARKQKGAETELVRFLPAVSDENSKRLSSRARKRAAKRRLGSVEAPKTNKSPEAKPLPGKLPKGISAGAVQTAGKKGPQSLFNAPRGKKRPAPGSDEEEEEEDSEEDGMVNHGDLWGSEDDADTVDDYGADSNSEDEEEGEALLPIERAARKQKAREAAA

SEQ ID NO: 97815 - protein, 209 aa, Homo sapiens
MPVPDQPSSASEKTSSLSPGLNTSNGDGSETETTSAILASVKEQELQFERLTRELEAERQIVASQLERCKLGSETGSMSSMSSAEEQFQWQSQDGQKDIEDELTTGLELVDSCIRSLQESGILDPQDYSTGETGSRASYSSQHGHLGPELRALQSPEHHIDPIYEDRVYQKPPMRSLSQSQGDPLPPAHTGTYRTSTAPSSPGVDSVPL

SEQ ID NO: 97816 - protein, 179 aa, Homo sapiens
MSRSPLNPSQLRSVGSQDALAPLPPPAPQNPSTHSWDPLCGSLPWGLSCLLALQHVLVMASLLCVSHLLLLCSLSPGGLSYSPSQLLASSFFSCASLMLHLCRGPSCHGLGHWNTSLQEVSGAVVVSGLLQGMMGLLGSPGHVFPHCGPLVLAPSLVVAGLSAHREVAQFCFTHWGLAL

SEQ ID NO: 97817 - protein, 75 aa, Homo sapiens
MTLHATRGAALLSWVNSLHVADPVEAVLQLQDCSIFIKIIDRIHGTEEGQQILKQPVSERLDFVCSFLQKNRKHP

SEQ ID NO: 97818 - protein, 200 aa, Homo sapiens
MVLGNSHLFMNRSNKLAVIASHIQESRFLYPGKNGRLGDFFGDPGNPPEFNPSGSKDGKYELLTSANEVIVEEIKDLMTKSDIKGQHTETLLAGSLAKALCYIHRMNKEVKDNQEMKSRILVIKAAEDSALQYMNFMNVIFAAQKQNILIDACVLDSDSGLLQQAQGIAHENLIPLETLVGVSSRSRSEISVNPPTPSSC

SEQ ID NO: 97819 - protein, 79 aa, Homo sapiens
LSSVCMGQEDNMTSVTNHFSQSKLDSPEELEPDREEDSSSCIDIQEVLSSSESDSCNSSSSDIIRDLLEEEEAWEASHK

SEQ ID NO: 97820 - protein, 7 aa, Homo sapiens
MSFDPNL

SEQ ID NO: 97821 - protein, 1118 aa, Homo sapiens
MWDPRAFERRWRAEFPGAEAPVPRLESVRDAERELERRRLNLERLQQVLAEEQLKASLPQAALARGGGGDSGEPGRPDPEAESPRGDPGRPDPEAESPRGDLPAGPGAAGEAGGGRSWADAVHRQLLQPQLRFRAREDDAPLGDPQAAPGTDEGGDGGDHDFEMVDFNEKFILSHWLVAPCRFGTRERARSPRRWMHLIPGGRRPQRGTRDLEQREAEAKGRPGSPLAAEETPGREHLPPWRRRRFLRVPERDSPGHSSPERDSDGSRHSSDREDDFSADFSYGTDEYDGEGNEEQKGPPEGSETMPYIDESPTMSPQLSARSQGGGDGVSPTPPEGLAPGVEAGKGLEMRKLVLSGFLASEEIYINQLEALLLPMKPLKATATTSQPVLTIQQIETIFYKIQDIYEIHKEFYDNLCPKVQQWDSQVTMGHLFQKLASQLGVYKAFVDNYKVALETAEKCSQSNNQFQKISEELKVKGPKDSKDSHTSVTMEALLYKPIDRVTRSTLVLHDLLKHTPVDHPDYPLLQDALRISQNFLSSINEDIDPRRTAVTTPKGETRQLVKDGFLVEVSESSRKLRHVFLFTDVLLCAKLKKTSAGKHQQYDCKWYIPLADLVFPSPEESEASPQVHPFPDHELEDMKMKISALKSEIQKEKANKGQSRAIERLKKKMFENEFLLLLNSPTIPFRIHNRNGKSYLFLLSSDYERSEWREAIQKLQKKDLQAFVLSSVELQVLTGSCFKLRTVHNIPVTSNKDDDESPGLYGFLHVIVHSAKGFKQSANLYCTLEVDSFGYFVSKAKTRVFRDTAEPKWDEEFEIELEGSQSLRILCYEKCYDKTKVNKDNNEIVDKIMGKGQIQLDPQTVETKNWHTDVIEMNGIKVEFSMKFTSRDMSLKRTPSKKQTGVFGVKISVVTKRERSKVPYIVRQCVEEVEKRGIEEVGIYRISGVATDIQALKAVFDANNKDILLMLSDMDINAIAGTLKLYFRELPEPLLTDRLYPAFMEGIALSDPAAKENCMMHLLRSLPDPNLITFLFLLEHLKRVAEKEPINKMSLHNLATVFGPTLLRPSEVESKAHLTSAADIWSHDVMAQVQVLLYYLQHPPISFAELKRNTLYFSTDV

SEQ ID NO: 97822 - protein, 108 aa, Homo sapiens
MITSQGSVSFRDVTVGFTQEEWQHLDPAQRTLYRDVMLENYSHLVSVGYCIPKPEVILKLEKGEEPWILEEKFPSQSHLGSTRLTSGPGPAWICAETSSVVETPTERH

SEQ ID NO: 97823 - protein, 104 aa, Homo sapiens
  MOD_RES (1)..(1): Any amino acid
XGGNFFSKHVPWSYLVFLTIYGVELFLKVAGLGPVEYLSSGWNLFDFSVTVFAFLGLLALALNMEPFYFIVVLRPLQLLRLFKLKERYRNVLDTMFELLPRMAR

SEQ ID NO: 97824 - protein, 242 aa, Homo sapiens
MSGPRPVVLSGPSGAGKSTLLKRLLQEHSGIFGFSVSHTTRNPRPGEENGKDYYFVTREVMQRDIAAGDFIEHAEFSGNLYGTSKVAVQAVQAMNRICVLDVDLQGVRNIKATDLRPIYISVQPPSLHVLRLRQRNTETEESLVKRLAAAQADMESSKEPGLFDVVIINDSLDQAYAELKEALSEVGPSLCLPGQGPRGGLGARPLLSMRPLRKSRKLKGPAPEACCLFSAPRAHTGPGQQH

SEQ ID NO: 97825 - protein, 468 aa, Homo sapiens
MGEPAGVAGTMESPFSPGLFHRLDEDWGQTVLLSQPTVVQLQAPGVLPSAQPVLAVAGGVTQLPNHVVNVVPAPSANSPVNGKLSVTKPVLQSTMRNVGSDIAVLRRQQRMIKNRESACQSRKKKKEYMLGLEARLKAALSENEQLKKENGTLKRQLDEVVSENQRLKVPSPKRRVVCVMIVLAFIILNYGPMSMLEQDSRRMNPSVSPANQRRHLLGFSAKEAQDTSDGIIQKNSYRYDHSVSNDKALMVLTEEPLLYIPPPPCQPLINTTESLRLNHELRGWVHRHEVERTKSRRMTNNQQKTRILQGALEQGSNSQLMAVQYTETTSSISRNSGSELQVYYASPRSYQDFFEAIRRRGDTFYVVSFRRDHLLLPATTHNKTTRPKMSIVLPAININENVINGQDYEVMMQIDCQVMDTRILHIKSSSVPPYLRDQQRNQTNTFFGSPPAATEATHVVSTIPESLQ

SEQ ID NO: 97826 - protein, 29 aa, Homo sapiens
MMRWKKADQWLLQKCIGGVRGMWRFYSYL

SEQ ID NO: 97827 - protein, 8 aa, Homo sapiens
MMSLSVRP

SEQ ID NO: 97828 - protein, 78 aa, Homo sapiens
  MOD_RES (1)..(1): Any amino acid
XPVGSWYNVTILVKMDFKELQQVDPRLLNHMRLLHSLMSMSVSMRSSMPALEGNCAQTWRARTGASVTRKLQPRLHGS

SEQ ID NO: 97829 - protein, 76 aa, Homo sapiens
SFIEDVTDEILKLGLFSNRFLERLFERHIKQNKHLEEEKMRHLLHVLKVDLGCTSEENSIPDAATTGPKTTPLEDE

SEQ ID NO: 97830 - protein, 137 aa, Homo sapiens
MREMEFPSSLTSTERAFIHRLSQSLGLVSKSKGKGANRYLTVKKKDGSETAHAMMTCNLTHNTKHAVRSLIQRFPVTNKERTELLPKTERGNVFAVEAENREMSKTSGRLNNGIPQIPVKRGESEFDSFRQSLPVFE

SEQ ID NO: 97831 - protein, 77 aa, Homo sapiens
MNPASDGGTSESIFDLDYASWGIRSTLMVAGFVFYLGVFVVCHQLSSSLNATYRSLVAREKVFWDLAATRAVFGVQS

SEQ ID NO: 97832 - protein, 487 aa, Homo sapiens
EDFLGFMNEFLELEWGSMQQFLYEISNLDTLTNSSSFEGYIDLGRELSTLHALLWEVLPQLSKEALLKLGPLPRLLNDISTALRNPNIQRQPSRQSERPRPQPVVLRGPSAEMQGYMMRDLNSSMDMARLPSPTKEKPPPPPPGGGKDLFYVSRPPLARSSPAYCTSSSDITEPEQKMLSVNKSVSMLDLQGDGPGGRLNSSSVSNLAAVGDLLHSSQASLTAALGLRPAPAGRLSQGSGSSITAAGMRLSQMGVTTDGVPAQQLRIPLSFQNPLFHMAADGPGPPGGHGGGGGHGPPSSHHHHHHHHHHRGGEPPGDTFAPFHGYSKSEDLSSGVPKPPAASILHSHSYSDEFGPSGTDFTRRQLSLQDNLQHMLSPPQITIGPQRPAPSGPGGGSGGGSGGGGGGQPPPLQRGKSQQLTVSAAQKPRPSSGNLLQSPEPSYGPARPRQQSLSKEGSIGGSGGSGGGGGGGLKPSITKQHSQTPST

SEQ ID NO: 97833 - protein, 74 aa, Homo sapiens
MAENGKNCDQRRVAMNKEHHNGNFTDPSSVNEKKRREREERQNIVLWRQPLITLQYFSLEILVILKEWTSKVHI

SEQ ID NO: 97834 - protein, 159 aa, Homo sapiens
  MOD_RES (1)..(1): Any amino acid
XDGQRVQGGVPAGSDEYEDECPHLIALSSLNREFRPFSCVSVSQGYCHLNNKLGKLNQKLKRKRGVTEAQDFEDEENVGAMNQYRTRTLSITSSGSAVSCSTIPPELVKQKVKRQLTKQQKSAVRRRLQKGEANIFTKQRRENMQNIKSSLEAASFWGE

SEQ ID NO: 97835 - protein, 89 aa, Homo sapiens
MKPDRDTLDEYFEYDAEEFLVSLALLITEGRTPECSVKGRTESFHCPPAQSCYPVTTKHECSDKLAQCRQARRTRSEVTLLWKNNLPIM

SEQ ID NO: 97836 - protein, 38 aa, Homo sapiens
MTFFEVSPLCNFNVIESFTELSRIVLMRHGMEKIWRPN

SEQ ID NO: 97837 - protein, 143 aa, Homo sapiens
MALDGPEQVWRVHPEGKFVVDVDKNIDINDVTPNCRVALRNDSYTLHKILPNKVDPLVSLMMVEKVPDSTYEMIGGLDKQIKEIKEVIELPVKHPELFEALGIAQPKGVLLYGPPGTGKTLLARAVAHHTDCTFIRVSGSELV

SEQ ID NO: 97838 - protein, 813 aa, Homo sapiens [sequence omitted]

SEQ ID NO: 97839 - protein, 169 aa, Homo sapiens
MLYQTINSLKTKNPKLKILLSIGGYLFGSKGFHPMVDSSTSRLEFINSIILFLRNHNFDGLDVSWIYPDQKENTHFTVLIHELAEAFQKDFTKSTKERLLLTAGVSAGRQMIDNSYQVEKLAKDLDFINLLSFDFHGSWEKPLITGHNSPLSKGWQDRGPSSYYNVEYA

SEQ ID NO: 97840 - protein, 148 aa, Homo sapiens
MARMNRPAPVEVTYKNMRFLITHNPTNATLNKFIEELKKYGVTTIVRVCEATYDTTLVEKEGIHVLDWPFDDGAPPSNQIVDDWLSLVKIKFREEPGCCIAVHCVAGLGRKRRGAFNSKQLLYLEKYRPKMRLRFKDSNGHRNNCCIQ

SEQ ID NO: 97841 - protein, 41 aa, Homo sapiens
MRMSVGLSLLLPLSGRTFLLLLSVVMAQSHWPSEPSEAVRD

SEQ ID NO: 97842 - protein, 46 aa, Homo sapiens
MAEKTQKSVKIAPGAVVCVESEIRGDVTIVTQIISLLTLKIQNQNL

SEQ ID NO: 97843 - protein, 129 aa, Homo sapiens
MALPQGLLTFRDVAIEFSQEEWKCLDPAQRTLYRDVMLENYRNLVSLDFRSVTQAKVQWCHLGSLQPPLPRFKQFSCLSLPSSWDYRYLFQMHDEDILLNRARQYRSVPHRDIAKTSKSSHWRFLLPEN

SEQ ID NO: 97844 - protein, 77 aa, Homo sapiens
MATLGHTFPFYAGPKPTFPMDTTLASIIMIFLTALATFIVILPGIRGKTRLFWLLRVVTSLFIGAAILGTPVQQLNE

SEQ ID NO: 97845 - protein, 236 aa, Homo sapiens
MKTLMRHGLAVCLALTTMCTSLLLVYSSLGGQKERPPQQQQQQQQQQQQASATGSSQPAAESSTQQRPGVPAGPRPLDGYLGVADHKPLKMHCRDCALVTSSGHLLHSRQGSQIDQTECVIRMNDAPTRGYGRDVGNRTSLRVIAHSSIQRILRNRHDLLNVSQGTVFIFWGPSSYMRRDGKGQVYNNLHLLSQVLPRLKAFMITRHKMLQFDELFKQETGKDRYPTLGSALAGLQ

SEQ ID NO: 97846 - protein, 332 aa, Homo sapiens
MVTKAFVLLAIFAEASAKSCAPNKADVILVFCYPKTIITKIPECPYGWEVHQLALGGLCYNGVHEGGYYQFVIPDLSPKNKSYCGTQSEYKPPIYHFYSHIVSNDTTVIVKNQPVNYSFSCTYHSTYLVNQAAFDQRVATVHVKNGSMGTFESQLSLNFYTNAKFSIKKEAPFVLEASEIGSDLFAGVEAKGLSIRFKVVLNSCWATPSADFMYPLQWQLINKGCPTDETVLVHENGRDHRATFQFNAFRFQNIPKLSKVWLHCETFICDSEKLSCPVTCDKRKRLLRDQTGGVLVVELSLRSRGFSSLYSFSAHLSGAEGARSRGLPLTSP

SEQ ID NO: 97847 - protein, 118 aa, Homo sapiens
MGPLSPARTLRLWGPRSLGVALGVFMTIGFALQLLGGPFQRRYFRSCLLTASFFPLSETQRLWLALPSPTINPPHQPSASHHLWLPSWPILEASTGLGPVGTTTLATYYGLTLACPFP

SEQ ID NO: 97848 - protein, 1479 aa, Homo sapiens
MKAYLKSAEGFFVLNKSTTIGRHENSDLVLQSPDIDNHHALIEYNEAECSFVLQDFNSRNGTFVNECHIQNVAVKLIPGDILRFGSAGLTYELVIENPPPVSFPWMRGPAPWPGPQPPRATQQPNQAPPPSHIPFHQGVQPAPMQRSWSQAFPRPTVVLPASHRRPVSANKEMFSFVVDDARKPPVIKQVWTNAMKLSEKSVAEGIPGAVPPAEIYVEEDLAQQDKDEIILLLGKEVSRLSDYEIESKYKDVIIANLQNEVAELSQKVSETTTSRQNEKEISQKCQVLDEDIDAKQKEIQSLKSQISALQKGYSKVLCQTLSERNSEITSLKNEGENLKRDNAITSGMVSSLQKDILAKDEQVQQLKEEVSHLKSQNKDKDHQLEALGSRCSVLKEELKQEDAHRELREAQEKELKLCKTQIQDMEKEMKKLRAELRKSCTEQSVISRTLREKSKVEEKLQEDSRRKLLQLQEMGNRESVIKINLERAVGQLEHFRSQVIKATYGRAKPFRDKPVTDQQLIEKITQVTEDNINFQQKKWTLQKETQLSNSKQEETTENIEKLRTSLDSCQACMKISCCSHDLKKEVDLLQHLQVSPPVSGLQKVVLDVLRHALSWLEEVEQLLRDLGILPSSPNKGFSLYLIYLLEHYKKLMSQAQELQIKFNSSQETQQSLLQEKLREHLAEKEKLNEERLEQEEKLKAKIRQLTEEKAALEEYITQERNRAKETLEEERKRMQELESLLAQQKKALAKSITQEKNRVKEALEEEQTRVQELEERLARQKEVLESSIAHEKRKAKEALESEKRKVQDLENHLTQQKEISESNIAYEKRKAKEAMEKEKKKVQDLENRLTKQKEELELKEQKEDVLNNKLSDALAMVEETQKTKATESLKAESLALKLNETLAELETTKTKMIMVEERLILQQKMVKALQDEQESQRHGFEEEIMEYKEQIKQHAQTIVSLEEKLQKVTQHHKKIEGEIATLKDNDPAPKEERPQDPLVAPMTESSAKDMAYEHLIDDLLAAQKEILSQQEVIMKLRKDLTEAHSRMSDLRGELNEKQKMELEQNVVLVQQQSKELSVLKEKMAQMSSLVEKKDRELKALEEALRASQEKHRLQLNTEKEQKPRKKTQTCDTSVQIEPVHTEAFSSSQEQQSFSDLGVRCKGSRHEEVIQRQKKALSELRARIKELEKARSPDHKDHQNESFLDLKNLRMENNVQKILLDAKPDLPTLSRIEILAPQNGLCNARFGSAMEKSGKMDVAEALELSEKLYLDMSKTLGSLMNIKNMSGHVSMKYLSRQEREKVNQLRQRDLDLVFDKITQLKNQLGRKEELLRGYEKDVEQLRRSKVSIEMYQSQVAKLEDDIYKEAEEKALLKEALERMEHQLCQEKRINRAIRQQKESVEEHELRNAKESTPCNCAFKEKDRQRRVFVEMVKNRMQNSNSQVGTRKASLKMDQEREMLRKETSSKSSQSLLHSKPSGKY

SEQ ID NO: 97849 - protein, 532 aa, Homo sapiens
RKAWGWGFSPGVWTGQGAVVHPQRQPAQLSHTVSSPVGAWQRHRHAMAWLSAFPRGRGFMWPKQALVWMDLASQMKGALMEIIQLASLDSDPWVLMVADILKSFPDTGSLNLELEEQNPNVQDILGELREKVGECEASAMLPLECQYLNKNALTTLAGPLTPPVKHFQLKRKPKSATLRAELLQKSTETAQQLKRSAGVPFHAKGRGLLRKMDTTTPLKGIPKQAPFRSPTAPSVFSPTGNRTPIPPSRTLLRKERGVKLLDISELDMVGAGREAKRRRKTLDAEVVEKPAKEETVVENATPDYAAGLVSTQKLGSLNNEPALPSTSYLPSTPSVVPASSYIPSSETPPAPSSREASRPPEEPSAPSPTLPAQFKQRAPMYNSGLSPATPTPAAPTSPLTPTTPPAVAPTTQTPPVAMVAPQTQAPAQQQPKKNLSLTREQMFAAQEMFKTANKVTRPEKALILGFMAGSRENPCQEQGDVIQIKLSEHTEDLPKADGQGSTTMLVDTVFEMNYATGQWTRFKKYKPMTNVS

SEQ ID NO: 97850 - protein, 146 aa, Homo sapiens
MQSTANYLWHTDDLLGQGATASVYKARNKKSGELVAVKVFNTTSYLRPREVQVREFEVLRKLNHQNIVKLFAVEETGGSRQKVLVMEYCSSGSLLSVLESPENAFGLPEDEFLVVLRCVVAGMNHLRENGIVHRDIKPGNIMRLVG

SEQ ID NO: 97851 - protein, 32 aa, Homo sapiens
  MOD_RES (1)..(1): Any amino acid
XLLVPILLPEKCYDQLFVQWDLLHALGVKPYS

SEQ ID NO: 97852 - protein, 304 aa, Homo sapiens
DFVAILPFYLEVGLSGLSSKAAKDVLGFLRVVRFVRILRIFKLTRHFVGLRVLGHTLRASTNEFLLLIIFLALGVLIFATMIYYAERIGAQPNDPSASEHTHFKNIPIGFWWAVVTMTTLGYGDMYPQTWSGMLVGALCALAGVLTIAMPVPVIVNNFGMYYSLAMAKQKLPKKKKKHIPRPPQLGSPNYCKSVVNSPHHSTQSDTCPLAQEEILEINRADSKLNGEVAKAALANEDCPHIDQALTPDEGLPFTRSGTRERYGPCFLLSTGEYACPPGGGMRKDLCKESPVIAKYMPTEAVRVT

SEQ ID NO: 97853 - protein, 2198 aa, Homo sapiens
IPIEEFSAEYVRPQVHCIASYGRFVNQSATCVSLAHETPPTALILDVLSGRPFPHLPQQSSPSVDVLPGVTLKAPQNQVTLRGRVPHLGRYVFVIHFYQAAHPTFPAQVSVDGGWPRAGSFHASFCPHVLGCRDQVIAEGQIEFDISEPEVAATVKVPEGKSLVLVRVLVVPAENYDYQILHKKSMDKSLEFITNCGKNSFYLDPQTASRFCKNSARSLVAFYHKGALPCECHPTGATGPHCSPEGGQCPCQPNVIGRQCTRCATGHYGFPRCKPCSCGRRLCEEMTGQCRCPPRTVRPQCEVCETHSFSFHPMAGCEGCNCSRRGTIEAAMPECDRDSGQCRCKPRITGRQCDRCASGFYRFPECVPCNCNRDGTEPGVCDPGTGACLCKENVEGTECNVCREGSFHLDPANLKGCTSCFCFGVNNQCHSSHKRRTKFVDMLGWHLETADRVDIPVSFNPGSNSMVADLQELPATIHSASWVAPTSYLGDKVSSYGGYLTYQAKSFGLPGDMVLLEKKPDVQLTGQHMSIIYEETNTPRPDRLHHGRVHVVEGNFRHASSRAPVSREELMTVLSRLADVRIQGLYFTETQRLTLSEVGLEEASDTGSGRIALAVEICACPPAYAGDSCQGCSPGYYRDHKGLYTGRCVPCNCNGHSNQCQDGSGICVNCQHNTAGEHCERCQEGYYGNAVHGSCRACPCPHTNSFATGCVVNGGDVRCSCKAGYTGTQCERCAPGYFGNPQKFGGSCQPCSCNSNGQLGSCHPLTGDCINQEPKDSSPAEECDDCDSCVMTLLNDLATMGEQLRLVKSQLQGLSASAGLLEQMRHMETQAKDLRNQLLNYRSAISNHGSKIEGLERELTDLNQEFETLQEKAQVNSRKAQTLNNNVNRATQSAKELDVKIKNVIRNVHILLKQISGTDGEGNNVPSGDFSREWAEAQRMMRELRNRNFGKHLREAEADKRESQLLLNRIRTWQKTHQGENNGLANSIRDSLNEYEAKLSDLRARLQEAAAQAKQANGLNQENERALGAIQRQVKEINSLQSDFTKYLTTADSSLLQTNIALQLMEKSQKEYEKLAASLNEARQELSDKVRELSRSAGKTSLVEEAEKHARSLQELAKQLEEIKRNASGDELVRCAVDAATAYENILNAIKAAEDAANRAASASESALQTVIKEDLPRKAKTLSSNSDKLLNEAKMTQKKLKQVNKLTNKLPDLWRKIESINQQLLPLGNISDNMDRIRELIQQARDAASKVAVPMRFNGKSGVEVRLPNDLEDLKGYTSLSLFLQRPNSRENGGTENMFVMYLGNKDASRDYIGMAVVDGQLTCVYNLGDREAELQVDQILTKSETKEAVMDRVKFQRIYQFARLNYTKGATSSKPETPGVYDMDGRNSNTLLNLDPENVVFYVGGYPPDFKLPSRLSFPPYKGCIELDDLNENVLSLYNFKKTFNLNTTEVEPCRRRKEESDKNYFEGTGYARVPTQPHAPIPTFGQTIQTTVDRGLLFFAENGDRFISLNIEDGKLMVRYKLNSELPKERGVGDAINNGRDHSIQIKIGKLQKRMWINVDVQNTIIDGEVFDFSTYYLGGIPIAIRERFNISTPAFRGCMKNLKKTSGVVRLNDTVGVTKKCSEDWKLVRSASFSRGGQLSFTDLGLPPTDHLQASFGFQTFQPSGILLDHQTWTRNLQVTLEDGYIELSTSDSGGPIFKSPQTYMDGLLHYVSVISDNSGLRLLIDDQLLRNSKRLKHISSSRQSLRLGGSNFEGCISNVFVQRLSLSPEVLDLTSNSLKRDVSLGGCSLNKPPFLMLLKGSTRFNKTKTFRINQLLQDTPVASPRSVKVWQDACSPLPKTQANHGALQFGDIPTSHLLFKLPQELLKPRSQFAVDMQTTSSRGLVFHTGTKNSFMALYLSKGRLVFALGTDGKKLRIKSKEKCNDGKWHTVVFGHDGEKGRLVVDGLRAREGSLPGNSTISIRAPVYLGSPPSGKPKSLPTNSFVGCLKNFQLDSKPLYTPSSSFGVSSCLGGPLEKGIYFSEEGGHVVLAHSVLLGPEFKLVFSIRPRSLTGILIHIGSQPGKHLCVYLEAGKVTASMDSGAGGTSTSVTPKQSLCDGQWHSVAVTIKQHILHLELDTDSSYTAGQIPFPPASTQEPLHLGGAPANLTTLRIPVWKSFFGCLRNIHVNHIPVPVTEALEVQGPVSLNGCPDQ

SEQ ID NO: 97854 - protein, 472 aa, Homo sapiens
MSRGGSYPHLLWDVRKRSLGLEDPSRLRSRYLGRREFIQRLKLEATLNVHDGCVNTICWNDTGEYILSGSDDTKLVISNPYSRKVLTTIRSGHRANIFSAKFLPCTNDKQIVSCSGDGVIFYTNVEQDAETNRQCQFTCHYGTTYEIMTVPNDPYTFLSCGEDGTVRWFDTRIKTSCTKEDCKDDILINCRRAATSVAICPPIPYYLAVGCSDSSVRIYDRRMLGTRATGNYAGRGTTGMVARFIPSHLNNKSCRVTSLCYSEDGQEILVSYSSDYIYLFDPKDDTARELKTPSAEERREELRQPPVKRLRLRGDWSDTGPRARPESERERDGEQSPNVSLMQRMSDMLSRWFEEASEVAQSNRGRGRSRPRGGTSQSDISTLPTVPSSPDLEVSETAMEVDTPAEQFLQPSTSSTMSAQAHSTSSPTESPHSTPLLSSPDSEQRQSVEASGHHTHHQSGPLKSWVAGSCSE

SEQ ID NO: 97855 - protein, 113 aa, Homo sapiens
MSATAATAPPAAPAGEGGPPAPPPNLTSNRRLQQTQAQVDEVVDIMRVNVDKVLERDQKLSELDDRADALQAGASQFETSAAKLKRKYWWKNLKMMIILGVICAIILIIIIGE

SEQ ID NO: 97856 - protein, 179 aa, Homo sapiens
MATTVSTQRGPAKLAKNYGMTRMDPYCRLRLGYAVYETPTAHNGAKNPRWNKVIHCTVPPGVDSFYLEIFDERAFSMDDRIAWTHITIPESLRQGKVEDKWYSLSGRQGDDKEGMINLVMSYALLPAAMVMPPQPVVLMPTVYQQGVGYVPITDIVNFGTAPHFIEKFPRRCRNICQSL

SEQ ID NO: 97857 - protein, 140 aa, Homo sapiens
MSPAPDAAPAPASISLFDLSADAPVFQGLSLVSHAPGEALARAPRTSCSGSGERESPERKLLQGPMDISEKLFCSTCDQTFQNHQEQREHYKLDWHRFNLKQRLKDKPLLSALDFEKQSSTGDLSSISGSEDSDSASEED

SEQ ID NO: 97858 - protein, 319 aa, Homo sapiens
MRKPAAGFLPSLLKVLLLPLAPAAAQDSTQASTPGSPLSPTEYERFFALLTPTWKAETTCRLRATHGCRNPTLVQLDQYENHGLVPDGAVCSNLPYASWFESFCQFTHYRCSNHVYYAKRVLCSQPVSILSPNTLKEIEASAEVSPTTMTSPISPHFTVTERQTFQPWPERLSNNVEELLQSSLSLGGQEQAPEHKQEQGVEHRQEPTQEHKQEEGQKQEEQEEEQEEEGKQEEGQGTKEGREAVSQLQTDSEPKFHSESLSSNPSSFAPRVREVESTPMIMENIQELIRSAQEIDEMNEIYDENSYWRNQNPGRYRKF

SEQ ID NO: 97859 - protein, 130 aa, Homo sapiens
MSYGRPPPDVEGMTSLKVDNLTYRTSPDTLRRVFEKYGRVGDVYIPRDRYTKESRGFAFVRFHDKRDAEDAMDAMDGAVLDGRELRVQMARYGRPPDSHHSRRGPPPRSRSRSRSRSRSRSRSRYSRSKS

SEQ ID NO: 97860 - protein, 74 aa, Homo sapiens
MAEEFVTLKDVGMDFTLGDWEQLGLEQGDTFWDTALDNCQDLFLLDPPRPNLTSHPDGSEDLEPLAGGSPEATS

SEQ ID NO: 97861 - protein, 161 aa, Homo sapiens
MKKFKRRLSLTLRGSQTIDESLSELAEQMTIEENSSKDNEPIVKNGRPPTSHSMHSFLHQYTGSFKKPPLRRPHSVIGGSLGSFMAMPRNGSRLDIVHENLKMGSDGESDQASGTSSDEVQSPTGVCLRNRIHRRISMEDLNKRLSLPADIRIPDGYLEKL

SEQ ID NO: 97862 - protein, 437 aa, Homo sapiens
MCHHAQGSRQSLCSVGYSCAPAPEGLRKRQRLRGTRQKSNIKRQCFTMPSEYTYVKLRSDCSRPSLQWYTRAQSKMRRPSLLLKDILKCTLLVFGVWILYILKLNYTTEECDMKKMHYVDPDHVKRAQKYAQQVLQKECRPKFAKTSMALLFEHRYSVDLLPFVQKAPKDSEAESKYDPPFGFRKFSSKVQTLLELLPEHDLPEHLKAKTCRRCVVIGSGGILHGLELGHTLNQFDVVIRLNSAPVEGYSEHVGNKTTIRMTYPEGAPLSDLEYYSNDLFVAVLFKSVDFNWLQAMVKKETLPFWVRLFFWKQVAEKIPLQPKHFRILNPVIIKETAFDILQYSEPQSRFWGRDKNVPTIGVIAVVLATHLCDEVSLAGFGYDLNQPRTPLHYFDSQCMAAMNFQTMHNVTTETKFLLKLVKEGVVKDLSGGIDREF

SEQ ID NO: 97863 - protein, 383 aa, Homo sapiens
  MOD_RES (1)..(1): Any amino acid
XGWKKLKEVFSMAGVVVRADILEDKDGKSRGIGTVTFEQSIEAVQAISMFNGQLLFDRPMHVKMDERALPKGDFFPPERPQQLPHGLGGIGMGLGPGGQPIDANHLNKGIGMGNIGPAGMGMEGIGFGINKMGGMEGPFGGGMENMGRFGSGMNMGRINGGGGGSVPGIERMGPGIDRLGGAGMERMGAGLGHGMDRVGSEIERMGLVMDRMGSVERMGSGIERMGPLGLDHMASSIERMGQTMERIGSGVERMGAGMGFGLERMAAPIDRVGQTIERMGSGVERMGPAIERMGLSMERMVPAGMGAGLERMGPVMDRMATGLERMGANNLERMGLERMGANSLERMGLERMGANSLERMGPAMGPALGAGIERMGLAMGGGG

SEQ ID NO: 97864 - protein, 239 aa, Homo sapiens
MEPYEAQKMMAEIRGSKETATQPLPLYDTPYEPEEDGATAEGEGAPWPRESRLPEDDERPPEEYDQPWEWKKERISKAFAAQFEGPEKSCLSPGREEKGRLPPRLSAGNPKSAKPLSMEPSSPLGEWTDPALPLENQVWYHGAISRTDAENLLRLCKEASYLVRNSETSKNDFSLSLKSSQGFMHMKLSRTKEHKYVLGQNSPPFSSVPEIVHHYASRKLPIKGAEHMSLLYPVAIRTL

SEQ ID NO: 97865 - protein, 145 aa, Homo sapiens
CHNVTPVYESRAGVTEETEFAEADQDFSDENRTYQASSPDEVALVQWTESVGLTLVSRDLTSMQLKTPSGQVLSFCILQLFPFTSESKRMGVIVRDESTAEITFYMKGADVAMSPIVQYNDWLEEERSLFQFLNRRREETQLLDA

SEQ ID NO: 97866 - protein, 65 aa, Homo sapiens
  MOD_RES (1)..(1): Any amino acid
XDSIKYKYFLELGRIDSSTKPCPQCKHFTTFKKKGHIPTPSRSESKYKQNGRMKWFQRLFGVISI

SEQ ID NO: 97867 - protein, 629 aa, Homo sapiens [sequence omitted]

SEQ ID NO: 97868 - protein, 366 aa, Homo sapiens
MPGRSCVALVLLAAAVSCAVAQHAPPWTEDCRKSTYPPSGPTYRGAVPWYTINLDLPPYKRWHELMLDKAPVPGLLGNFPGPFEEEMKGIAAVTDIPLGEIISFNIFYELFTICTSIVAEDKKGHLIHGRNMDFGVFLGWNINNDTWVITEQLKPLTVNLDFQRNNKTVFKASSFAGYVGMLTGFKPGLFSLTLNERFSINGGYLGILEWILGKKDVMWIGFLTRTVLENSTSYEEAKNLLTKTKILAPAYFILGGNQSGEGCVITRDRKESLDVYELDAKQGRWYVVQTNYDRWKHPFFLDDRRTPAKMCLNRTSQENISFETMYDVLSTKPVLNKLTVYTTLIDVTKGQFETYLRDCPDPCIGW

SEQ ID NO: 97869 - protein, 115 aa, Homo sapiens
VKWTPSKMIARLGKEINNPESVYYWAQKNHIPVFSPALTDGSLGDMIFFHSYKNPGLVLDIVEGARPDEAVSWGKIRVDAQPVKVYADASLVFPLLVAETFAQKMDAFMHEKNED

SEQ ID NO: 97870 - protein, 109 aa, Homo sapiens
MRKVVLITGASSGIGLALCKRLLAEDDELHLCLACRNMSKAEAVCAALLASHPTAEVTIVQVDVSNLQSVFRASKELKQRMIKKWLYVICVEDHVSEIRLYISKCWDHA

SEQ ID NO: 97871 - protein, 168 aa, Homo sapiens
MMRRTLENRNAQTKQLQTAVSNVEKHFGELCQIFAAYVRKTARLRDKADLLVNEINAYAATETPHLKLGLMNFADEFAKLQDYRQAEVLMNNDKKVERLEAKVVEPLKTYGTIVKMKRDDLKATLTARNREAKQLTQLERTRQRNPSDRHVISQAETELQRAAMDASR

SEQ ID NO: 97872 - protein, 29 aa, Homo sapiens
QIKTALKYTLGFVVICALLLLVGTDISIL

SEQ ID NO: 97873 - protein, 105 aa, Homo sapiens
MAQGLVTFADVAIDFSQEEWACLNSAQRDLYWDVMLENYSNLVSLDLESAYENKSLPTEKNIHEIRASKRNSDRRSKSLGRNWICEGTLERPQRSRGRYVNQMII

SEQ ID NO: 97874 - protein, 38 aa, Homo sapiens
MAQRAVWLISHEPGTPLCGTVRFSSVIWKESCQMLPSA

SEQ ID NO: 97875 - protein, 622 aa, Homo sapiens
MEYASGGEVFDYLVAHGRMKEKEARSKFRQIVSAVQYCHQKRIVHRDLKAENLLLDADMNIKIADFGFSNEFTVGGKLDTFCGSPPYAAPELFQGKKYDGPEVDVWSLGVILYTLVSGSLPFDGQNLKELRERVLRGKYRIPFYMSTDCENLLKRFLVLNPIKRGTLEQIMKDRWINAGHEEDELKPFVEPELDISDQKRIDIMVGMGYSQEEIQESLSKMKYDEITATYLLLGRKSSELDASDSSSSSNLSLAKVRPSSDLNNSTGQSPHHKVQRSVSSSQKQRRYSDHAGPAIPSVVAYPKRSQTSTADSDLKEDGISSRKSSGSAVGGKGIAPASPMLGNASNPNKADIPERKKSSTVPSSNTASGGMTRRNTYVCSERTTADRHSVIQNGKENSTIPDQRTPVASTHSISSAATPDRIRFPRGTASRSTFHGQPRERRTATYNGPPASPSLSHEATPLSQTRSRGSTNLFSKLTSKLTRRNMSFRFIKRLPTEYERNGRYEGSSRNVSAEQKDENKEAKPRSLRFTWSMKTTSSMDPGDMMREIRKVLDANNCDYEQRERFLLFCVHGDGHAENLVQWEMEVCKLPRLSLNGVRFKRISGTSIAFKNIASKIANELKL

SEQ ID NO: 97876 - protein, 146 aa, Homo sapiens
  MOD_RES (1)..(1): Any amino acid
XGVCGDGDPLIMVFEYMKHGDLNKFLRAHGPDAMILVDGQPRQAKGELGLSQMLHIASQIASGMVYLASQHFVHRDLATRNCLVGANLLVKIGDFGMSRDVYSTDYYRYTSAKALEECSDLSDRENTVKDSLYELIPPDRLCRHED

SEQ ID NO: 97877 - protein, 325 aa, Homo sapiens
MAQGLRLQGSRRKGRHPLFPLLALIFEKCELATCTPREPGVAGGDVCSSESFNEDIAVFAKQIRAEKPLFSSNPELDNLMIQAIQVLRFHLLELEKVHELCDNFCHRYISCLKGKMPIDLVIDDREGGSKSDSEDITRSANLTDQPSWNRDHDDTASTRSGGTPGPSSGGHTSHSGDNSSEQGDGLDNSVASPSTGDDDDPDKDKKRHKKRGIFPKVATNIMRAWLFQHLTHPYPSEEQKKQLAQDTGLTILQVNNWFINARRRIVQPMIDQSNRAVSQGTPYNPDGQPMGGFVMDGQQHMGIRAPGPMSGMGMNMGMEGQWHYM

SEQ ID NO: 97878 - protein, 142 aa, Homo sapiens
MLTLASKLKRDDGLKGSRTAATASDSTRRVSVRDKLLVKEVAELEANLPCTCKVHFPDPNKLHCFQLTVTPGFFCFVLCFLIDEGYYQGGKFQFETEVPDAYNMVPPKVKCLTKIWHPNITETGEICLSLLREHSIDGTGWA

SEQ ID NO: 97879 - protein, 295 aa, Homo sapiens
  MOD_RES (1)..(1): Any amino acid
XMQYNLRLRSQMVMKMREYLCNLHGFVDIETPTLFKRTPGIDIEMSFVDQTGIQSLIEGLLQYSWPNDKDPVVVPFPTMTFAEVLATYGTDKPDTRFGMKIIDISDVFRNTEIGFLQDALSKPHGTVKAICIPEGAKYLKRKDIESIRNFAADHFNQEILPVFLNANRNWNSPVANFIMESQRLELIRLMETQEEDVVLLTAGEHNKACSLLGKLRLECADLLETRGVVLRDPTLFSFLWVVDFPLFLPKEENPRELESAHHPFTAPHPSDIHLLYTEPKKARSQHYDLVLNGNE

SEQ ID NO: 97880 - protein, 85 aa, Homo sapiens
MNTGRDSQSPDSAWRSYNDGNQETLNGDATYSSLAAKGFRSVRPNLQDKRSPTQLGNQNLPASVLEVNASQTHRQTTPEASPPCP

SEQ ID NO: 97881 - protein, 31 aa, Homo sapiens
MASMLLAQRLACSFQHSYRLLVPGSRHISQA

SEQ ID NO: 97882 - protein, 87 aa, Homo sapiens
MAGSREVVAMDCEMVGLGPHRESGLARCSLVNVHGAVLYDKFIRPEGEITDYRTRVSGVTPQHMVGATPFAVARLEVPFPSSPTAAE

SEQ ID NO: 97883 - protein, 870 aa, Homo sapiens
MVAEESGPGAQNSPYQLRRKTLLPKRTACPTKNSMEGASTSTTENFGHRAKRARVSGKSQDLSAAPAEQYLQEKLPDEVVLKIFSYLLEQDLCRAACVCKRFSELANDPILWKRLYMEVFEYTRPMMHPEPGKFYQINPEEYEHPNPWKESFQQLYKGAHVKPGFAEHFYSNPARYKGRENMLYYDTIEDALGGVQEAHFDGLIFVHSGIYTDEWIYIESPITMIGAAPGKVADKVIIENTRDSTFVFMEGSEDAYVGYMTIRFNPDDKSAQHHNAHHCLEITVNCSPIIDHCIIRSTCTVGSAVCVSGQGACPTIKHCNISDCENVGLYITDHAQGIYEDNEISNNALAGIWVKNHGNPIIRRNHIHHGRDVGVFTFDHGMGYFESCNIHRNRIAGFEVKAYANPTVVRCEIHHGQTGGIYVHEKGRGQFIENKIYANNFAGVWITSNSDPTIRGNSIFNGNQGGVYIFGDGRGLIEGNDIYGNALAGIQIRTNSCPIVRHNKIHDGQHGGIYVHEKGQGVIEENEVYSNTLAGVWVTTGSTPVLRRNRIHSGKQVGVYFYDNGHGVLEDNDIYNHMYSGVQIRTGSNPKIRRNKIWGGQNGGILVYNSGLGCIEDNEIFDNAMAGVWIKTDSNPTLRRNKIHDGRDGGICIFNGGRGLLEENDIFRNAQAGVLISTNSHPILRKNRIFDGFAAGIEITNHATATLEGNQIFNNRFGGLFLASGVNVTMKDNKIMNNQDAIEKAVSRGQCLYKISSYTSYPMHDFYRCHTCNTTDRNAICVNCIKKCHQGHDVEFIRHDRYVAHLLDILPNYFPPHFSNIWVSFCFRFFCDCGAGTLSNPCTLAGEPTHDTDTLYDSAPPIESNTLQHN

SEQ ID NO: 97884 - protein, 50 aa, Homo sapiens
MSRRPAYCSLQFLGSSDPPASASPVDGTTGGEYSEDDVNELVKEDEVDGE

SEQ ID NO: 97885 - protein, 44 aa, Homo sapiens
MAVSSWDLDLLSFIRRHPWQAEPAGATSPAARGIWSPQCLLAQN

SEQ ID NO: 97886 - protein, 181 aa, Homo sapiens
MVSKSRWKLLAMLALVLVVMVWYSISREDRYIELFYFPIPEKKEPCLQGEAESKASKLFGNYSRDQPIFLRLEDYFWVKTPSAYELPYGTKGSEDLLLRVLAITSSSIPKNIQSLRCRRCVVVGNGHRLRNSSLGDAINKYDVVIRCERVSGNSLPSSGMSILNRFGFSTPSSWRLQLTNC

SEQ ID NO: 97887 - protein, 71 aa, Homo sapiens
MDDYDKTCLESALVGVCNIVQQEWGGAIPCQVVLVTDGCLGIGRGSLRHSLATQNQRSESNRFPLPFPFPS

SEQ ID NO: 97888 - protein, 75 aa, Homo sapiens
MRMCTPIRGLLMALAVMFGTAMAFAPIPRITWEHREVHLVQFHEPDIYNYSALLLSEDKDTLYIGAREAVFAVNA

SEQ ID NO: 97889 - protein, 191 aa, Homo sapiens [sequence omitted]

SEQ ID NO: 97890 - protein, 659 aa, Homo sapiens
MLMWPQPHLPTHPHLPTHPHLPTHPPMMSKETRQSKLAEAKEQLTDHHPQTNPSVGTAASDTKKKKINNGTNPETTTSGGCHSPEDEQKASHQHQEALRRELEAQVHTIRILTCQKTELQMALYYSQHAVKQLEGEARDLISRLHDSWKFAGELEQALSAVATQKKKADRYIEELTKERDALSLELYRNTITDEELKEKNAKLQEKLQLVESEKSEIQLNVKELKRKLERAKLLLPQQQLQAEADHLGKELQSVSAKLQAQVEENELWNRLNQQQEEKMWRQEEKIQEWEEKIQEQEEKIREQEEKIREQEEKMRRQEEMMWEKEEKMRRQEEMMWEKEEKMRRQEEMMWEKEEKMRRLEEMMWEKEEKIRELEEKMHEQEKIREQEEKRQEEEKIREQEKRQEQEAKMWRQEEKIREQEEKIREQEKKMWRQEEKIHEQEKIREEEKRQEQEEMWRQEEKIREQEEIWRQKEKMHEQEKIRKQEEKVWRQEEKMHDQEEKIREQEEKMWRQEEKIREQEEKIREQEEKIREQEEMMQEQEEKMGEQEEKMQEQEKMRRQEEKIREQEEKIREQKEKIREQEEKIWEQEEKIREQEEMMQEQEEKMWEQEEKMCEQEEKMQEQEEKMRRQEEKMWEQEVRLRQQEEKMQEHQEHLEAAI

SEQ ID NO: 97891 - protein, 325 aa, Homo sapiens
MEREKEQFRKLFIGGLSFETTEESLRNYYEQWGKLTDCVVMRDPASKRSRGFGFVTFSSMAEVDAAMAARPHSIDGRVVEPKRAVAREESGKPGAHVTVKKLFVGGIKEDTEEHHLRDYFEEYGKIDTIEIITDRQSGKKRGFGFVTFDDHDPVDKIVLQKYHTINGHNAEVRKALSRQEMQEVQSSRSGRGGNFGFGDSRGGGGNFGPGPGSNFRGGSDGYGSGRGFGDGYNGYGGGPGGGNFGGSPGYGGGRGGYGGGGPGYGNQGGGYGGGYDNYGGGNYGSGNYNDFGNYNQQPSNYGPMKSGNFGGSRNMGGPYGGGFTV

SEQ ID NO: 97892 - protein, 795 aa, Homo sapiens
MRTTKVYKLVIHKKGFGGSDDELVVNPKVFPHIKLGDIVEIAHPNDEYSPLLLQVKSLKEDLQKETISVDQTVTQVFRLRPYQDVYVNVVDPKDVTLDLVELTFKDQYIGRGDMWRLKKSLVSTCAYITQKVEFAGIRAQAGELWVKNEKVMCGYISEDTRVVFRSTSAMVYIFIQMSCEMWDFDIYGDLYFEKAVNGFLADLFTKWKEKNCSHEVTVVLFSRTFYDAKSVDEFPEINRASIRQDHKGRFYEDFYKVVVQNERREEWTSLLVTIKKLFIQYPVLVRLEQAEGFPQGDNSTSAQGNYLEAINLSFNVFDKHYINRNFDRTGQMSVVITPGVGVFEVDRLLMILTKQRMIDNGIGVDLVCMGEQPLHAVPLFKLHNRSAPRDSRLGDDYNIPHWINHSFYTSKSQLFCNSFTPRIKLAGKKPASEKAKNGRDTSLGSPKESENALPIQVDYDAYDAQVFRLPGPSRAQCLTTCRSVRERESHSRKSASSCDVSSSPSLPSRTLPTEEVRSQASDDSSLGKSANILMIPHPHLHQYEVSSSLGYTSTRDVLENMMEPPQRDSSAPGRFHVGSAESMLHVRPGGYTPQRALINPFAPSRMPMKLTSNRRRWMHTFPVGPSGEAIQIHHQTRQNMAELQGSGQRDPTHSSAELLELAYHEAAGRHSNSRQPGDGMSFLNFSGTEELSVGLLSNSGAVPGFCCTVGVDWKSLTTPACLPLTTDYFPDRQGLQNDYTEGCYDLLPEADIDRSVSEKKALGLVGEGFGYIPHMHQNTGFVLASATHILKLERY

SEQ ID NO: 97893 - protein, 952 aa, Homo sapiens
MPAIMTMLADHAARQLLDFSQKLDINLLDNVVNCLYHGEGAQQRMAQEVLTHLKEHPDAWTRVDTILEFSQNMNTKYYGLQILENVIKTRWKILPRNQCEGIKKYVVGLIIKTSSDPTCVEKEKVYIGKLNMILVQILKQEWPKHWPTFISDIVGASRTSESLCQNNMVILKLLSEEVFDFSSGQITQVKSKHLKDSMCNEFSQIFQLCQFVMENSQNAPLVHATLETLLRFLNWIPLGYIFETKLISTLIYKFLNVPMFRNVSLKCLTEIAGVSVSQYEEQFVTLFTLTMMQLKQVRLLMVSRMAKPEEVLVVENDQGEVVREFMKDTDSINLYKNMRETLVYLTHLDYVDTERIMTEKLHNQVNGTEWSWKNLNTLCWAIGSISGAMHEEDEKRFLVTVIKDLLGLCEQKRGKDNKAIIASNIMYIVGQYPRFLRAHWKFLKTVVNKLFEFMHETHDGVQDMACDTFIKIAQKCRRHFVQVQVGEVMPFIDEILNNINTIICDLQPQQVHTFYEAVGYMIGAQTDQTVQEHLIEKYMLLPNQVWDSIIQQATKNVDILKDPETVKQLGSILKTNVRACKAVGHPFVIQLGRIYLDMLNVYKCLSENISAAIQANGEMVTKQPLIRSMRTVKRETLKLISGWVSRSNDPQMVAENFVPPLLDAVLIDYQRNVPAAREPEVLSTMAIIVNKLGGHITAEIPQIFDAVFECTLNMINKDFEEYPEHRTNFFLLLQAVNSHCFPAFLAIPPTQFKLVLDSIIWAFKHTMRNVADTGLQILFTLLQNVAQEEAAAQSFYQTYFCDILQHIFSVVTDTSHTAGLTMHASILAYMFNLVEEGKISTSLNPGNPVNNQIFLQEYVANLLKSAFPHLQDAQVKLFVTGLFSLNQDIPAFKEHLRDFLVQIKEFAGEDTSDLFLEEREIALRQADEEKHKRQMSVPGIFNPHEIPEEMCD

SEQ ID NO: 97894 - protein, 150 aa, Homo sapiens
MKCVFVTVGTTSFDDLIACVSAPDSLQKIESLGYNRLILQIGRGTVVPEPFSTESFTLDVYRCRKLFGDSGKRKATRSGYKRKVDEQSSAGTGKAATQRGSSLLLYLQGPDLSWASQVHCFCSWEVPRFCSADFNCLFRPRLWAAFRIPA

SEQ ID NO: 97895 - protein, 560 aa, Homo sapiens
MVSANNMPKQVEVRMHDSHLGSEEPKHRHLGLRLCDKLGKNLLLTLTVFGVILGAVCGGLLRLASPIHPDVVMLIAFPGDILMRMLKMLILPLIISSLITGLSGLDAKASGRLGTRAMVYYMSTTIIAAVLGVILVLAIHPGNPKLKKQLGPGKKNDEVSSLDAFLDLIRNLFPENLVQACFQQIQTVTKKVLVAPPPDEEANATSAVVSLLNETVTEVPEETKMVIKKGLEFKDGMNVLGLIGFFIAFGIAMGKMGDQAKLMVDFFNILNEIVMKLVIMIMWYSPLGIACLICGKIIAIKDLEVVARQLGMYMVTVIIGLIIHGGIFLPLIYFVVTRKNPFSFFAGIFQAWITALGTASSAGTLPVTFRCLEENLGIDKRVTRFVLPVGATINMDGTALYEAVAAIFIAQMNGVVLDGGQIVTVSLTATLASVGAASIPSAGLVTMLLILTAVGLPTEDISLLVAVDWLLDRMRTSVNVVGDSFGAGIVYHLSKSELDTIDSQHRVHEDIEMTKTQSIYDDMKNHRESNSNQCVYAAHNSVIVDECKVHFPFMDIETCI

SEQ ID NO: 97896 - protein, 184 aa, Homo sapiens
MAASCLVLLALCLLLPLLLLGGWKRWRRGRAARHVVAVVLGDVGRSPRMQYHALSLAMHGFSVTLLGFCNSKPHDELLQNNRIQIVGLTELQSLAVGPRVFQYGVKVVLQAMYLLWKLMWREPGAYIFLQVCLALLSAGSWAAFVEASSSLTGTTMATPSWVWCMAPTIPSFCWPSGTRSSLGA

SEQ ID NO: 97897 - protein, 121 aa, Homo sapiens
MKTVLMVAEKPSLAQSIAKILSRGSLSSHKGLNGACSVHEYTGTFAGQPVRFKMTSVCGHVMTLDFLGKYNKWDKVDPAELFSQAPTEKKEANPKLNMVKFLQVEGRGCDYIVLWLDCDKE

SEQ ID NO: 97898 - protein, 70 aa, Homo sapiens
MDIAYTYDRSKTSARIYPTYHTAFDTFDYVDKFLDPGFSSHQAVARTAGSVILRLSDSFFLPLKVSDYSE

SEQ ID NO: 97899 - protein, 51 aa, Homo sapiens
MNLTEVGAASQGAPPDPSSECRSPEEGPCRSGPCVPKRGAFLCGVPVSAVL

SEQ ID NO: 97900 - protein, 210 aa, Homo sapiens
MGPIIVPPGGHSVPSTPPVVTIAPTKTVNGVWRSESRQDAGSRSSSGGRERLIVEPPLPQEKAGGPAIPSHLLSTPYPFGLSPSSVVQDSRFPPLNLQRPVHHVVPPSTVTEDYLRSFRPYHTTDDLRMSSLPPLGLDPATAAAYYHPSYLAPHPFPHPAFRMDDSYCLSALRSPFYPIPTPGSLPPLHPSAMHLHLSGVRYPPELSHSS

SEQ ID NO: 97901 - protein, 415 aa, Homo sapiens
  MOD_RES (1)..(1): Any amino acid
XFYRTLEGFRLLVEKEWLSFGHRFSHRGAHTLAGQSSGFTPVFLQFLDCVHQVHLQFPMEFEFSQFYLKFLGYHHVSRRFRTFLLDSDYERIELGLLYEEKGERRGQVPCRSVWEYVDRLSKRTPVFHNYMYAPEDAEVWDFYTEETLAEGPPYDWELAQGPPEPPEEERSDGGAPQSRRRVVWPCYDSCPRAQPDAISRLLEELQRLETELGQPAERWKDTWDRVKAAQRLEGRPDGRGTPSSLLVSTAPHHRRSLGVYLQEGPVGSTLSLSLDSDQSSGSTTSGSRQAARRSTSTLYSQFQTAESENRSYEGTLYKKGAFMKPWKARWFVLDKTKHQLRYYDHRVDTECKGVIDLAEVEAVAPGTPTMGAPKTVDEKAFFDVKTTRRVYNFCAQDVPSAQQWVDRIQSCLSDA

SEQ ID NO: 97902 - protein, 220 aa, Homo sapiens
MLRHSPSLWELVEEHVPLRERREVKRILGEAAVDLSLELRAEKQLPRSDIWVLKAWGEQHAESDSDFIASSGHRDLSIIKDQLNVSNIDQVARHLRGLLEEECHTLEREILILQRCLEEEYLRPCHPSEAALEPTLAELKEQKKAMEQELQASVGPSCVSPNHSGPWGPPHRASDPRFPSAGLHLSSAACLHLLWSPTFDLEASRLPTAGDGSFSAAPGK

SEQ ID NO: 97903 - protein, 134 aa, Homo sapiens
MDWKEVLRRRLATPNTCPNKKKSEQELKDEEMDLFTKYYSEWKGGRKNTNEFYKTIPRFYYRLPAEDEVLLQKLREESRAVFLQRKSRELLDNEELQNLWFLLDKHQTPPMIGEEAMINYENFLKAIFHSKSLC

SEQ ID NO: 97904 - protein, 339 aa, Homo sapiens
MEKTCIDALPLTMNSSEKQETVCIFGTGDFGRSLGLKMLQCGYSVVFGSRNPQKTTLLPSGAEVLSYSEAAKKSGIIIIAIHREHYDFLTELTEVLNGKILVDISNNLKINQYPESNAEYLAHLVPGAHVVKAFNTISAWALQSGALDASRQVFVCGNDSKAKQRVMDIVRNLGLTPMDQGSLMAAKEIEKYPLQLFPMWRFPFYLSAVLCVFLFFYCVIRDVIYPYVYEKKDNTFRMAISIPNRIFPITALTLLALVYLPGVIAAILQLYRGTKYRRFPDWLDHWMLCRKQLGLVALGFAFLHVLYTLVIPIRYYVRWRLGNLTVTQVNLFLYIFFCS

SEQ ID NO: 97905 - protein, 142 aa, Homo sapiens
MFPSPALTPTPFSVKDILNLEQQQRSLAAAGELSARLEATLAPSSCMLAAFKPEAYAGPEAAAPGLPELRAELGRAPSPAKCASAFPAAPAFYPRAYSDPDPAKDPRAEKKAQLAGAARAERFPRGKVRKCCATAGTREWTR

SEQ ID NO: 97906 - protein, 22 aa, Homo sapiens
  MOD_RES (1)..(1): Any amino acid
XVRMSASQLEALCPQRITFWKM

SEQ ID NO: 97907 - protein, 45 aa, Homo sapiens
MAAMPLKAQYQDFPSSPYLSPLPHTLARSQRIGSGAAGTCCFRRW

SEQ ID NO: 97908 - protein, 95 aa, Homo sapiens
  MOD_RES (1)..(1): Any amino acid
XMGSDHTQSSASKISQDVDKEDEFGYSWKNIRERYGTLTGELHMIELEKGHSGLGLSLAGNKDRSRMSVFIVGIDPNGAAGKDGRLQIADELLEK

SEQ ID NO: 97909 - protein, 295 aa, Homo sapiens
EQEEEEEEEEEEEEGEDSGTSAASSPTIMRKSSGSPDSQHCASDGSTETLAMVVVEPGDTLSSPEFDSGPFSSQSDETSLSTTASSATPTSELLPLGPVDGRSCSMDSAYGTLSPTSLQDFVAPGPMAELVPRAPESPRVPSPPPSPRLRRRTPVQLLSCPPHLLKSKSEASLLQLLAGAGTHGTPSAPSRSLSELCLAVPAPGIRTQGSPQEAGPSWDCRGAPSPGSGPGLVGCLAGEPAGSHRKRCGDLPSGASPRVQPEPPPGVSAQHRKLTLAQLYRIRTTLLLNSTLTAS

SEQ ID NO: 97910 - protein, 125 aa, Homo sapiens
MSSRRDTDSDTQDANDSSCKSSERSLPDCTPHPNSISIDAGPRQAPKIAQIKRNLSYGDNSDPALEASSLPPPDPWLETSSSSPAEPAQPGACRRDGYWFLKLLQAETERLEGWCCQMDKETKEN

SEQ ID NO: 97911 - protein, 778 aa, Homo sapiens
MIATWMLFSLFTKPPQLSEDDIWLKSEGDNYSATLLEPAASSLSPDHKNMEIEVSVAECKSVPGITSTPHPMDHPSAFYSPPHNGLLTDHHESLDNDVAREIRYLDEVLEANCCDSAVDGTYNGTSSPEPGAVVLVGGLSPPVHEATQPEPTERTASRQAPPHIELSNSSPDPMAEAERTNGHSPSQPRDALGDSLQVPVSPSSTTSSRCSSRDGEFTLTTLKKEAKFELRAFHEDKKPSKLFEDDEHEKEQYCIRKVRPSEEMLELEKERRELIRSQAVKKNPGIAAKWWNPPQEKTIEEQLDEEHLESHKKYKERKERRAQQEQLLLQKQLQQQQQQPPSQLCTAPASSHERASMIDKAKEDIVTEQIDFSAARKQFQLMENSRQAVAKGQSTPRLFSIKPFYRPLGSVNSDKPLTNPRPPSVGGPPEDSGASAAKGQKSPGALETPSAAGSQGNTASQGKEGPYSEPSKRGPLSKLWAEDGEFTSARAVLTVVKDDDHGILDQFSRSVNVSLTQEELDSGLDELSVRSQDTTVLETLSNDFSMDNISDSGASNETTNALQENSLADFSLPQTPQTDNPSEGRGEGVSKSFSDHGFYSPSSTLGDSPLVDDPLEYQAGLLVQNAIQQAIAEQVDKAVSKTSRDGAEQQGPEATVEEAEAAAFGSEKPQSMFEPPQVSSPVQEKRDVLPKILPAEDRALRERGPPQPLPAVQPSGPINMEETRPEGSYFSKYSEAAELRSTASLLATQESDVMVGPFKLRSRKQRTLSMIEEEIRAA

SEQ ID NO: 97912 - protein, 39 aa, Homo sapiens
  MOD_RES (1)..(1): Any amino acid
XKHDDYVYDIYYLETATPGWIENILSVQPYSQEWELMCR

SEQ ID NO: 97913 - protein, 532 aa, Homo sapiens
  MOD_RES (1)..(1): Any amino acid
XAAGQQPNGPGESWLPTGPGIGPAGLCWACGVSGCCSHGWWSGGPRSGAGGWHEMPYATGTPVGRQFLHEKCQTWVQVHLQGLQKVVFRSWQQAAAHQRCTVTRPEQLLLQSYFQAWCEVVRDTGVLRAQHQAFQDGLRRRALGAVFATWREAQEVAAGAQEQRVAQASLARWRSCGQQGQEDGQQKKARAPQAFPAWPVAPGMHHEAQQQAGESAGAQAAQCWTWCWALWVHESCRGQVSRAHASWKPRAWVLEASVQSAVRGGVQRAILTQLRPAELRRFLRTVQLRVRLGLPGAGKTRSCWTQATELVPPAPSLQCSLGGRRKPRGTAWAQRCREHSLCPAFQLWPQWPGQSSWVPGLPLWTRDQGPRAHSSPEPRACKAQSKAHKRRLRRKYLQRRCLEALLHGLRGSQQARCLAVAWQHWVDAQGAEQLVRTLLREWHLRWAWQTWWQRILRLRVAQQLQQQEDGPLRSGTNAWQPGAQGEELPVAQDPGASQAPRAPRVDRKPPEHRGVGGLGQSMGPSCSCDLFS

SEQ ID NO: 97914 - protein, 134 aa, Homo sapiens
MSRSFYVDSLIIKDTSRPAPSLPEPHPGPDFFIPLGMPPPLVMSVSGPGCPSRKSGAFCVCPLCVTSHLHSSRGSVGAGSGGAGAGVTGAGGSGVAGAAGALPLLKGQFSSAPGDAQFCPREALTPARYPMARG

SEQ ID NO: 97915 - protein, 296 aa, Homo sapiens
  MOD_RES (1)..(1): Any amino acid
XAAVLGTSEERTASTSTLGEKDPGPAAPSLAKQEAEWTAGEACPASSSTQGARAQQAPNTEMCQGGDPGSGLRPRAEKEDTAELGVHLVNSLVDHGRNSDLSDIQEEEEEEEEEEEEELGSRTCSFQKQVAGNSIRENGAKATETGEARGQDGSGRRGPQKRGVRVLRPSTAELVPARSPSETLAYQHLPVRIFVALFDYDPVSMSPNPDAGEEELPFREGQILKVFGDKDADGFYQGEGGGRTGYIPCNMVAEVAVDSPAGRQQLLQRGYLSPDILLEGSAHTTGPPPKPRRSKK

SEQ ID NO: 97916 - protein, 609 aa, Homo sapiens
MFRCGGLAAGALKQKLVPLVRTVCVRSPRQRNRLPGNLFQRWHVPLELQMTRQMASSGASGGKIDNSVLVLIVGLSTVGAGAYAYKTMKEDEKRYNERISGLGLTPEQKQKKAALSEGEEVPQDKAPSHVPFLLIGGGTAAFAAARSIRARDPGARVLIVSEDPELPYMRPPLSKELWFSDDPNVTKTLRFKQWNGKERSIYFQPPSFYVSAQDLPHIENGGVAVLTGKKVVQLDVRDNMVKLNDGSQITYEKCLIATGGTPRSLSAIDRAGAEVKSRTTLFRKIGDFRSLEKISREVKSITIIGGGFLGSELACALGRKALGTEVIQLFPEKGNMGKILPEYLSNWTMEKVRREGVKVMPNAIVQSVGVSSGKLLIKLKDGRKVETDHIVAAVGLEPNVELAKTGGLEIDSDFGGFRVNAELQARSNIWVAGDAACFYDIKLGRRRVEHHDHAVVSGRLAGENMTGAAKPYWHQSMFWSDLGPDVGYEAIGLVDSSLPTVGVFAKATAQDNPKSATEQSGTGIRSESETESEASEITIPPSTPAVPQAPVQGEDYGKGVIFYLRDKVVVGIVLWNIFNRMPIARKIIKDGEQHEDLNEVAKLFNIHED

SEQ ID NO: 97917 - protein, 23 aa, Homo sapiens
TCLTISHLYSHEFTFDSSVNCQS

SEQ ID NO: 97918 - protein, 252 aa, Homo sapiens
MVIPNQPPLTATKKSTLKPQPAPQAGPIPVAPIGTLKPQPQPVPASYTTASTSSRPTFNVQVKSAQPSPHYMAAPSSGQIYGSGPQGYNTQPVPVSGQCPPPSTRGGMDYAYIPPPGLQPEPGYGYAPNQGRYYEGYYAAGPGYGGRNDSDPTYGQQGHPNTWKREPGYTPPGAGNQNPPGMYPVTGPKKTYITDPVSAPCAPPLQPKGGHSGQLGPSSVAPSFRPEDELEHLTKKMLYDMENPPADEYFEC

SEQ ID NO: 97919 - protein, 335 aa, Homo sapiens
SSFCSMERDEEDSIIVSEGIIEEYLAFDHIDIEEGFHGKKSEAATEKQKLGYPPIAPFYCMKEDVLAYVFDSVWCKVVSCMEQLTRSHWEGFASDDESNVAVTRPDSESSCVLSELHPLVLPRVPQSKVLYITSNPMSLCQASRHQPNVNDLLVHGMPLQPRNLSLMDKLLDLDDKLLMRPGSSTILSTRNWPNRAVEFSTSSLSYTVQSTRRRNPPPRTLHPISTSHSCAETPRSVEEILRGARVPVAPDSLSSPSPTPLSRNNLLPPIGTAEVEHVSTVGPQRQMLDTQYRRSCAVEYPHQARPGRGSAGPQLHGSTKSQSGGRPVSRTRQGP

SEQ ID NO: 97920 - protein, 750 aa, Homo sapiens
METKENRWVPVTVLPGCVGCRTVAALASWTVRDVKERIFAETGFPVSEQRLWRGGRELSDWIKIGDLTSKNCHLFVNLQSKGLKGGGRFGQTTPPLVDFLKDILRRYPEGGQILKELIQNAEDAGATEVKFLYDETQYGTETLWSKDMAPYQGPALYVYNNAVFTPEDWHGIQEIARSRKKDDPLKVGRFGIGFNSVYHITDVPCIFSGDQIGMLDPHQTLFGPHESGQCWNLKDDSKEISELSDQFAPFVGIFGSTKETFINGNFPGTFFRFPLRLQPSQLSSNLYNKQKVLELFESFRADADTVLLFLKSVQDVSLYVREADGTEKLVFRVTSSESKALKHERPNSIKILGTAISNYCKKTPSNNITCVTYHVNIVLEEESTKDAQKTSWLVCNSVGGRGISSKLDSLADELKFVPIIGIAMPLSSRDDEAKGATSDFSGKAFCFLPLPPGEESSTGLPVHISGFFGLTDNRRSIKWRELDQWRDPAALWNEFLVMNVVPKAYATLILDSIKRLEMEKSSDFPLSVDVIYKLWPEASKVKVHWQPVLEPLFSELLQNAVIYSISCDWVRLEQVYFSELDENLEYTKTVLNYLQSSGKQIAKVPGNVDAAVQLTAASGTTPVRKVTPAWVRQVLRKCAHLGCAEEKLHLLEFVLSDQAYSELLGLELLPLQNGNFVPFSSSVSDQDVIYITSAEYPRSLFPSLEGRFILDNLKPHLVAALKEAAQTRGFLFDEDSNGKLKMVAVLITSC

SEQ ID NO: 97921 - protein, 106 aa, Homo sapiens
MATGLGEPVYGLSEDEAVLLMDAEKRIRLLQFVTGTSRVPMNGFAELYGSNGPQLFTIEQWGSPEKLPRAHTCFNRLDLPPYETFEDLREKLLMAVENAQGFEGVD

SEQ ID NO: 97922 - protein, 155 aa, Homo sapiens
  MOD_RES (1)..(1): Any amino acid
XAATTIAYGVIELYVKLDGQFEFCLLRGKQGGFENKKRIDSVYLDPLVFREFAFIDMPDAAHGISSQDGPLSVLKQATLLLERNFHPFAELPEPQQTALSDIFQAVLFDDELLMVLEPVKDILGRSSSLTLSCTNGESHTSCQPSSHPDSVSSLS

SEQ ID NO: 97923 - protein, 171 aa, Homo sapiens
RATAILAYLPQELLGTSCYEYFHQDDIGHLAECHRQVLQTREKITTNCYKFKIKDGSFITLRSRWFSFMNPWTKEVEYIVSTNTVVLSRVDTGHLGQVEWCTVLSRPDSRFLIAGMFTEPTSWKAGTQPSHSSQHPPTAWTACCPLEKVAQRGPTPLFQGFQGEPGLGQEK

SEQ ID NO: 97924 - protein, 155 aa, Homo sapiens
GLSHVDYALIAEETGKCFFAPDVFNCQAPDTGNMEVLHLYGSEEQKKQWLEPLLQGNITSCFCMTEPDVASSDATNIECSIQRDEDSYVINGKKWWSSGAGNPKCKIAIVLGRTQNTSLSRSQPASDYVGVRLLHSSHSSHHCLHDYMKTSKRQL

SEQ ID NO: 97925 - protein, 518 aa, Homo sapiens
QPLKKRRGSFKMAELDQLPDESSSAKALVSLKEGSLSNTWNEKYSSLQKTPVWKGRNTSSAVEMKFTATMSTPDKKASQKIGFRLRNLLKLPKAHKWCIYEWFYSNIDKPLFEGDNDFCVCLKESFPNLKTRKLTRVEWGKIRRLMGKPRRCSSAFFEEERSALKQKRQKIRLLQQRKVADVSQFKDLPDEIPLPLVIGTKVTARLRGVHDGLFTGQIDAVDTLNATYRVTFDRTGLGTHTIPDYEVLSNEPHETMPIAAFGQKQRPSRFFMTPPRLHYTPPLQSPIIDNDPLLGQSPWRSKISGSDTETLGGFPVEFLIQVTRLSKILMIKKEHIKKLREMNTEAEKLKSYSMPISIEFQRRYATIVLELEQLNKDLNKVLHKVQQYCYELAPDQGLQPADQPTDMRRRCEEEAQEIVRHANSSTGQPCVENENLTDLISRLTAILLQIKCLAEGGDLNSFEFKSLTDSLNDIKSTIDASNISCFQNNVEIHVAHIQSGLSQMGNLHAFAANNTNRD

SEQ ID NO: 97926 - protein, 553 aa, Homo sapiens
NKNKKEKESPKAGKSGKSSKEGQDTVESEGTSPEEPSSPKVPPPLLPELLVLIFGGLQGRDVPPADQEKLFIQKLRQCCVLFDFVSDPLSDLKWKEVKRAALSEMVEYITHNRNVITEPIYPEVVHMFAVNMFRTLPPSSNPTGAEFDPEEDEPTLEAAWPHLQLVYEFFLRFLESPDFQPNIAKKYIDQKFVLQLLELFDSEDPRERDFLKTTLHRIYGKFLGLRAYIRKQINNIFYRFIYETEHHNGIAELLEILGSIINGFALPLKEEHKIFLLKVLLPLHKVKSLSVYHPQLAYCVVQFLEKDSTLTEPVVMALLKYWPKTHSPKEVMFLNELEEILDVIEPSEFVKIMEPLFRQLAKCVSSPHFQVAERALYYWNNEYIMSLISDNAAKILPIMFPSLYRNSKTHWNKTIHGLIYNALKLFMEMNQKLFDDCTQQFKAEKLKEKLKMKEREEAWVKIENLAKANPQYTVYSQASTMSIPVAMETDGPLFEDVQMLRKTVKDEAHQAQKDPKKDRPLARRKSELPQDPHTKKALEAHCRADELASQDGR

SEQ ID NO: 97927 - protein, 132 aa, Homo sapiens
IINPDKKKSKKSSETLTFKRPEGMHREVYALLYSDKKDAPPLLPSDTGQGYRTVKAKLGSKKVRPWKWMPFTNPARKDGAMFFHWRRAAEEGKDYPFARFNKEYQLYLHDDAWTKAETDHLFDLSRRFDLRF

SEQ ID NO: 97928 - protein, 80 aa, Homo sapiens
PKTKEKNTKKVDHRAPGAEEDDSELQRAWGALIKEKEQSRQKKSRCYQHPFPKKSQFPGAYWTSFEGEEEGSGQLTLPGP

SEQ ID NO: 97929 - protein, 175 aa, Homo sapiens
  MOD_RES (1)..(1): Any amino acid
XFSMEVGQYIFVNCPSISLLEWHPFTLTSAPEEDFFSIHIRAAGDWTENLIRAFEQQYSPIPRIEVDGPFGTASEDVFQYEVAVLVGAGIGVTPFASILKSIWYKFQCADHNLKTKKIYFYWICRETGAFSWFNNLLTSLEQEMEELGKSLRKCCHRYSSLDPRKVQFYFNKENF

SEQ ID NO: 97930 - protein, 88 aa, Homo sapiens
MFQASMRSPNMEPFKQQKVEDFYDIGEELGRFLAGILLFQTLHLLLTLLLLPACFSLLSCPSSSQRTAHLALWPVCHREEVPGEEHGA

SEQ ID NO: 97931 - protein, 187 aa, Homo sapiens
MSCINLPTVLPGSPSKTRGQIQVILGPMFSGKSTELMRRVRRFQIAQYKCLVIKYAKDTRYSSSFCTHDRTRSRIIARNTMEALPACLLRDVAQEALGVAVIGIDEGQFFPDIVEFCEAMANAGKTVIVAALDGTFQRKPFGAILNLVPLAESVVKLTAVCMECFREAAYTKRLGTEKEVEVIGGAD

SEQ ID NO: 97932 - protein, 63 aa, Homo sapiens
MSFLGGFFGPICEIDIVLNDGETRKMAEMKTEDGKVEKHYLFYDGESVSGKNFSMTRVILMNL

SEQ ID NO: 97933 - protein, 484 aa, Homo sapiens
MKRYGKILMHHIPEQTTQLLKGLCTDYRPSLEGRSDREAPGCRANSEEFIPIFANNPRELKAFLEHMSEVQPDSPQGIYDTLLELRLQNWAHEKDPQVKEKLHAEAISLLKSGRFCDVFDKALVLCQMHDFQDGVLYLYEQGKLFQQIMHYHMQHEQYRQVISVCERHGEQDPSLWEQALSYFARKEEDCKEYVAAVLKHIENKNLMPPLLVVQTLAHNSTATLSVIRDYLVQKLQKQSQQIAQDELRVRRYREETTRIRQEIQELKASPKIFQKTKCSICNSALELPSVHFLCGHSFHQHCFESYSESDADCPTCLPENRKVMDMIRAQEQKRDLHDQFQHQLKCSNDSFSVIADYFGRGVFNKLTLLTDPPTARLTSAWRLGCNATYSCTPGGALKQPGGRCGQQWRTKRTDTMGPGRALHRRLADMPRAPLSSNVTALRTKADFLSLPSYLVSLPSLLFTSSVDHSRSVGEGTSATSECGQ

SEQ ID NO: 97934 - protein, 153 aa, Homo sapiens
  MOD_RES (1)..(1): Any amino acid
XNLTSVDLVRASEAHCHYVVVKLFSEKLLKIQDKAIQAVLRSLCLLYSLYGISQNAGDFLQGSIMTEPQITQVNQRVKELLTLIRSDAVALVDAFDFQDVTLGSVLGRYDGNVYENLFEWAKNSPLNKAEGFGWRNKTLQMHDLGDPCESIIL

SEQ ID NO: 97935 - protein, 122 aa, Homo sapiens
MEIPVPVQPSWLRRASAPLPGLSAPGRLFDQRFGEGLLEAELAALCPTTLAPYYLRAPSVALPVAQVPTDPGHFSVLLDVKHFSPEEIAVKVVGEHVEVHARHEERPDEHGFVAREFHRRYR

SEQ ID NO: 97936 - protein, 142 aa, Homo sapiens
  MOD_RES (1)..(1): Any amino acid
XISPGVVKVDYGDVSVRKTLRENLKCKPFSWYLENIYPDSQIPRRYYSLGEVFSYTADKEIRTDDLCLDVSRLNGPVIMLKCHHMRGNQLWEYDAERLTLRHVNSNQCLDEPSEEDKMVPTMQDCSGSRSQQWLLRNMTLGT

SEQ ID NO: 97937 - protein, 489 aa, Homo sapiens
MVANRGEIAIRVFRACTELGIRTVAIYSEQDTGQMHRQKADEAYLIGRGLAPVQAYLHIPDIIKVAKENNVDAVHPGYGFLSERADFAQACQDAGVRFIGPSPEVVRKMGDKVEARAIAIAAGVPVVPGTDAPITSLHEAHEFSNTYGFPIIFKAAYGGGGRGMRVVHSYEELEENYTRAYSEALAAFGNGALFVEKFIEKPRHIEVQILGDQYGNILHLYERDCSIQRRHQKVVEIAPAAHLDPQLRTRLTSDSVKLAKQVGYENAGTVEFLVDRHGKHYFIEVNSRLQVEHTVTEEITDVDLVHAQIHVAEGRSLPDLGLRQENIRINGCAIQCRVTTEDPARSFQPDTGRIEVFRSGEGMGIRLDNASAFQGAVISPHYDSLLVKVIAHGKDHPTAATKMSRALAEFRVRGVKVRRHQAQPLAAALGRPCGQEARRPQAAVTAPTGPGSPTLVRVPPAARVLSSRLGGPSQTTPETSTEVSPTILL

SEQ ID NO: 97938 - protein, 469 aa, Homo sapiens
MELSESVQKGFQMLADPRSFDSNAFTLLLRAAFQSLLDAQADEAVLDHPDLKHIDPVVLKHCHAAAATYILEAGKHRADKSTLSTYLEDCKFDRERIELFCTEYQNNKNSLEILLGRTLIPHPIQRLVLVAAWNNYRIFYQAEMHRTTRIKITELNPHLMCVLCGGYFIDATTIIECLHSFCKTCIVRYLETSKYCPICDVQVHKTRPLLNIRSDKTLQDIVYKLVPGLFKNEMKRRRDFYAAHPSADAANGSNEDRGEVADEDKRIITDDEIISLSIEFFDQNRLDRKVNKDKEKSKEEVNDKRYLRCPAAMTVMHLRKFLRSKMDIPNTFQIDVMYEEEPLKDYYTLMDIAYIYTWRRNGPLPLKYRVRPTCKRMKISHQRDGLTNAGELESDSGSDKANSPAGGIPSTSSCLPSPSTPVQSPHPQFPHISSTMNGTSNSPSGNHQSSFANRPRKSSVNGSSATSSG

SEQ ID NO: 97939 - protein, 74 aa, Homo sapiens
MSIAGVAAQEIRVPLKTGFLHNGRAMGNMRKTYWSSRSEFKKACFQICSDEWPLLCRKWSISKVQLAPSSYSPK

SEQ ID NO: 97940 - protein, 133 aa, Homo sapiens
MEGRGPYRIYDPGGSVPSGEASAAFERLVKENSRLKEKMQGIKMLGELLEESQMEATRLRQKAEELVKDNELLPPPSPSLGSFDPLAELTGKDSNVTASPTAPACPSDKPAPVQKPPSSGTSSEFEVVTPEEQ

SEQ ID NO: 97941 - protein, 191 aa, Homo sapiens
MNCCIGLGEKARGSHRASYPSLSALFTEASILGFGSFAVKAQWTEDCRKSTYPPSGPTYRGAVPWYTINLDLPPYKRWHELMLDKAPVLKVIVNSLKNMINTFVPSGKIMQVVDEKLPGLLGNFPGPFEEEMKGIAAVTDIPLGKVHLEALKKKVIKFFYKFPLRCDIHTAQVLYVLDIQHRCTGLRYTAQ

SEQ ID NO: 97942 - protein, 199 aa, Homo sapiens
MMEKPAGRKKKTPTPREEADVQKSALREEKVSGDRKPPERPTVPRKPRTEPCLSPEDEEHVFDAFDASFKDDFEGVPVFIPFQRKKPYECSECGRIFKHKTDHIRHQRVHTGEKPFKCAQCGKAFRHSSDVTKHQRTHTGEKPFKCGECGKAFNCGSNLLKHQKTHTGEKPYECTHCGKAFAYSSCLIRHQKRHPRKKP

SEQ ID NO: 97943 - protein, 294 aa, Homo sapiens
MNLNPPTSALQIEGKGSHIMARNVSCFLVRHTPHPRRVCHIKGLNNIPICTVNDDENAFGTLWGVGQSNYLEKNRIPFANCSYPSSTAVQESPVRGMSPAPNGAKVPPRPHSEPSRKIKECFKTSSENPLVIKKEEIKAKRPPSPPKACSTPGSCSSGMTSTKNDVKANTICIPNYLDQEIKILAKLCSILHTDSLAEVLQWLLHATSKEKEWVSALIHSELAEINLLTHHRRNTSMEPAAETGKPPTVKSPPTVKLPPNFTAKSKVLTRDTEGDQPTRVSSQGSEENKEVPKG

SEQ ID NO: 97944 - protein, 662 aa, Homo sapiens
MSHVAVENALGLDQQFAGLDLNSSDNQSGGSTASKGRYIPPHLRNREATKGFYDKDSSGWSSSKDKDAYSSFGSRSDSRGKSSFFSDRGSGSRGRFDDRGRSDYDGIGSRGDRSGFGKFERGGNSRWCDKSDEDDWSKPLPPSERLEQELFSGGNTGINFEKYDDIPVEATGNNCPPHIESFSDVEMGEIIMGNIELTRYTRPTPVQKHAIPIIKEKRDLMACAQTGSGKTAAFLLPILSQIYSDGPGEALRAMKENGRYGRRKQYPISLVLAPTRELAVQIYEEARKFSYRSRVRPCVVYGGADIGQQIRDLERGCHLLVATPGRLVDMMERGKIGLDFCKYLVLDEADRMLDMGFEPQIRRIVEQDTMPPKGVRHTMMFSATFPKEIQMLARDFLDEYIFLAVGRVGSTSENITQKVVWVEESDKRSFLLDLLNATGKDSLTLVFVETKKGADSLEDFLYHEGYACTSIHGDRSQRDREEALHQFRSGKSPILVATAVAARGLDISNVKHVINFDLPSDIEEYVHRIGRTGRVGNLGLATSFFNERNINITKDLLDLLVEAKQEVPSWLENMAYEHHYKGSSRGRSKSRFSGGFGARDYRQSSGASSSSFSSSRASSSRSGGGGHGSSRGFGGGSGYGGFYNSDGYGGNYNSQGVDWWGN

SEQ ID NO: 97945 - protein, 246 aa, Homo sapiens
  MOD_RES (1)..(1): Any amino acid
XRSCLRSVPRAGRLRPVNSHVPACAFSPVGECEASAMLPLECQYLNKNALTTLAGPLTPPVKHFQLKRKPKSATLRAELLQKSTETAQQLKRSAGVPFHAKGRGLLRKMDTTTPLKGIPKQAPFRSPTAPSVFSPTGNRTPIPPSRTLLRKERGVKLLDISELDMVGAGREAKRRRKTLDAEVVEKPAKEETVVENATPDYAAGLVSTQKLGSLNNEPALPSTSYLPSTPSVVPASSYIPSSETPP

SEQ ID NO: 97946 - protein, 221 aa, Homo sapiens
MAEHGAHFTAASVADDQPSIFEVVAQDSLMTAVRPALQHVVKVLAESNPTHYGFLWRWFDEIFTLLDLLLQQHYLSRTSASFSENFYGLKRIVMGDTHKSQRLASAGLPKQQLWKSIMFLVLLPYLKVKLEKLVSSLREEDEYSIHPPSSRWKRFYRAFLAAYPFVNMAWEGWFLVQQLRYILGKAQHHSPLLRLAGVQLGRLTVQDIQALEHKPAKASMM

SEQ ID NO: 97947 - protein, 85 aa, Homo sapiens
  MOD_RES (1)..(1): Any amino acid
XPKRPQPSREIGNIIRMYQSRPGPVPVPVQPSSFPEENRPQGRGSGQAGYQRCPLVPADAVPQPRKGPPASCGSSTQGPATAWAL

SEQ ID NO: 97948 - protein, 2495 aa, Homo sapiens
MARFGDEMPARYGGGGSGAAAGVVVGSGGGRGAGGSRQGGQPGAQRMYKQSMAQRARTMALYNPIPVRQNCLTVNRSLFLFSEDNVVRKYAKKITEWPPFEYMILATIIANCIVLALEQHLPDDDKTPMSERLDDTEPYFIGIFCFEAGIKIIALGFAFHKGSYLRNGWNVMDFVVVLTGILATVGTEFDLRTLRAVRVLRPLKLVSGIPSLQVVLKSIMKAMIPLLQIGLLLFFAILIFAIIGLEFYMGKFHTTCFEEGTDDIQGESPAPCGTEEPARTCPNGTKCQPYWEGPNNGITQFDNILFAVLTVFQCITMEGWTDLLYNSNDASGNTWNWLYFIPLIIIGSFFMLNLVLGVLSGEFAKERERVENRRAFLKLRRQQQIERELNGYMEWISKAEEVILAEDETDGEQRHPFDGALRRTTIKKSKTDLLNPEEAEDQLADIASVGSPFARASIKSAKLENSTFFHKKERRMRFYIRRMVKTQAFYWTVLSLVALNTLCVAIVHYNQPEWLSDFLYYAEFIFLGLFMSEMFIKMYGLGTRPYFHSSFNCFDCGVIIGSIFEVIWAVIKPGTSFGISVLRALRLLRIFKVTKYWASLRNLVVSLLNSMKSIISLLFLLFLFIVVFALLGMQLFGGQFNFDEGTPPTNFDTFPAAIMTVFQILTGEDWNEVMYDGIKSQGGVQGGMVFSIYFIVLTLFGNYTLLNVFLAIAVDNLANAQELTKDEQEEEEAANQKLALQKAKEVAEVSPLSAANMSIAVKEQQKNQKPAKSVWEQRTSEMRKQNLLASREALYNEMDPDERWKAAYTRHLRPDMKTHLDRPLVVDPQENRNNNTNKSRAAEPTVDQRLGQQRAEDFLRKQARYHDRARDPSGSAGLDARRPWAGSQEAELSREGPYGRESDHHAREGSLEQPGFWEGEAERGKAGDPHRRHVHRQGGSRESRSGSPRTGADGEHRRHRAHRRPGEEGPEDKAERRARHREGSRPARGGEGEGEGPDGGERRRRHRHGAPATYEGDARREDKERRHRRRKENQGSGVPVSGPNLSTTRPIQQDLGRQDPPLAEDIDNMKNNKLATAESAAPHGSLGHAGLPQSPAKMGNSTDPGPMLAIPAMATNPQNAASRRTPNNPGNPSNPGPPKTPENSLIVTNPSGTQTNSAKTARKPDHTTVDIPPACPPPLNHTVVQVNKNANPDPLPKKEEEKKEEEEDDRGEDGPKPMPPYSSMFILSTTNPLRRLCHYILNLRYFEMCILMVIAMSSIALAAEDPVQPNAPRNNVLRYFDYVFTGVFTFEMVIKMIDLGLVLHQGAYFRDLWNILDFIVVSGALVAFAFTGNSKGKDINTIKSLRVLRVLRPLKTIKRLPKLKAVFDCVVNSLKNVFNILIVYMLFMFIFAVVAVQLFKGKFFHCTDESKEFEKDCRGKYLLYEKNEVKARDREWKKYEFHYDNVLWALLTLFTVSTGEGWPQVLKHSVDATFENQGPSPGYRMEMSIFYVVYFVVFPFFFVNIFVALIIITFQEQGDKMMEEYSLEKNERACIDFAISAKPLTRHMPQNKQSFQYRMWQFVVSPPFEYTIMAMIALNTIVLMMKFYGASVAYENALRVFNIVFTSLFSLECVLKVMAFGILNYFRDAWNIFDFVTVLGSITDILVTEFGNNFINLSFLRLFRAARLIKLLRQGYTIRILLWTFVQSFKALPYVCLLIAMLFFIYAIIGMQVFGNIGIDVEDEDSDEDEFQITEHNNFRTFFQALMLLFRSATGEAWHNIMLSCLSGKPCDKNSGILTRECGNEFAYFYFVSFIFLCSFLMLNLFVAVIMDNFEYLTRDSSILGPHHLDEYVRVWAEYDPAAWGRMPYLDMYQMLRHMSPPLGLGKKCPARVAYKRLLRMDLPVADDNTVHFNSTLMALIRTALDIKIAKGGADKQQMDAELRKEMMAIWPNLSQKTLDLLVTPHKSTDLTVGKIYAAMMIMEYYRQSKAKKLQAMREEQDRTPLMFQRMEPPSPTQEGGPGQNALPSTQLDPGGALMAHESGLKESPSWVTQRAQEMFQKTGTWSPEQGPPTDMPNSQPNSQSVEMREMGRDGYSDSEHYLPMEGQGRAASMPRLPAENQTISDTSPMKRSASVLGPKARRLDDYSLERVPPEENQRHHQRRRDRSHRASERSLGRYTDVDTGLGTDLSMTTQSGDLPSKERDQERGRPKDRKHRQHHHHHHHHHHPPPPDKDRYAQERPDHGRARARDQRWSRSPSEGREHMAHRQGSSSVSGSPAPSTSGTSTPRRGRRQLPQTPSTPRPHVSYSPVIRKAGGSGPPQQQQQQQQQQQQQAVARPGRAATSGPRRYPGPTAEPLAGDRPPTGGHSSGRSPRMERRVPGPARSESPRACRHGGARWPASGPHVSEGPPGPRHHGYYRGSDYDEADGPGSGGGEEAMAGAYDAPPPVRHASSGATGRSPRTPRASGPACASPSRHGRRLPNGYYPAHGLARPRGPGSRKGLHEPYSESDDDWC

SEQ ID NO: 97949 - protein, 129 aa, Homo sapiens
METESGNQEKVMEEESTEKKKEVEKKKRSRVKQVLADIAKQVDFWFGDANLHKDRFLREQIEKSRDGYVDISLLVSFNKMKKLTTDGKLIARALRSSAVVELDLEGTRIRRKKPLGERPKDEDERTVYV

SEQ ID NO: 97950 - protein, 105 aa, Homo sapiens
  MOD_RES (1)..(1): Any amino acid
XRDLLLTGWVLPTGTRTARCGSGMPRVSACGCSTNSALCACSSPTRTPTRTSVPRARTSGPHSARWAPLTPTVMTPGWASRRSSSASTAATWLWQARQGRCWYWN

SEQ ID NO: 97951 - protein, 316 aa, Homo sapiens
SKDGKSPLHMTAVHGRFTRSQTLIQNGGEIDCVDKDGNTPLHVAARYGHELLINTLITSGADTAKCGIHSMFPLHLAALNAHSDCCRKLLSSGFEIDTPDKFGRTCLHAAAAGGTPLHYAAANCHFHCIETLVTTGANVNETDDWGRTALHYAAASDMDRNKTILGNAHDNSEELERARELKEKEATLCLEFLLQNDANPSIRDKEGYNSIHYAAAYGHRQCLELLLERTNSGFEESDSGATKSPLHLAAYNGHHQALEVLLQSLVDLDIRDEKGRTALDLAAFKGHTECVEALINQGASIFVKDNVTKRTPLHAS

SEQ ID NO: 97952 - protein, 310 aa, Homo sapiens
MSPTVIILACLGFFLDQSVWAHVGGQDKPFCSAWPSAVVPQGGHVTLRCHYRRGFNIFTLYKKDGVPVPELYNRIFWNSFLISPVTPAHAGTYRCRGFHPHSPTEWSAPSNPLVIMVTGLYEKPSLTARPGPTVRTGENVTLSCSSQSSFDIYHLSREGEAHELRLPAVPSINGTFQADFPLGPATHGETYRCFGSFHGSPYEWSDASDPLPVSVTGNPSSSWPSPTEPSFKTGIARHLHAVIRYSVAIILFTILPFFLLHRWCSKKKSKPHEAEARELRALCGSRMGARRCCCNEPRACGTQNSEQGGL

SEQ ID NO: 97953 - protein, 135 aa, Homo sapiens
MPAANMMENRPLPALQVPEPQGAPEGSPVWSSSSTPTLRRRRFKMRRMKNVQEQSLEAGLARDLPAVLAPGKEFLQLPSIEITPSSDEDTPWSNCSTPSASPRRKRFLLRKWLRVRERKECSESSSSLRIFTAQS

SEQ ID NO: 97954 - protein, 107 aa, Homo sapiens
MKFNPFVTSDRSKNRKRHFNAPSHIRRKIMSSPLSKELRQKYNVRSMPIRKDDEVQVVRGHYKGQQIGKVVQVYRKKYVIYIERVQREKANGTTVHVGIHPSKVVIT

SEQ ID NO: 97955 - protein, 838 aa, Homo sapiens
  MOD_RES (1)..(1): Any amino acid
XPATSPSLRAQLEQALRLEPGELETQEPRGLVRQSVELRRQLQEEQASYRRKLQAYQEGQQRQAQLVQRLQGKILQYKKRCSELEQQLLERSGELEQQRLRDTEHSQDLESALIRLEEEQQRSASLAQVNAMLREQLDQAGSANQALSEDIRKVTNDWTRCRKELEHREAAWRREEESFNAYFSNEHSRLLLLWRQVVGFRRLVSEVKMFTERDLLQLGGELARTSRAVQEAGLGLSTGLRLAESRAEAALEKQALLQAQLEEQLRDKVLREKDLAQQQMQSDLDKADLSARVTELGLAVKRLEKQNLEKDQVNKDLTEKLEALESLRLQEQAALETEDGEGLQQTLRDLAQAVLSDSESGVQLSGSERTADASNGSLRGLSGQRTPSPPRRSSPGRGRSPRRGPSPACSDSSTLALIHSALHKRQLQVQDMRGRYEASQDLLGTLRKQLSDSESERRALEEQLQRLRDKTDGAMQAHEDAQREVQRLRSANELLSREKSNLAHSLQVAQQQAEELRQEREKLQAAQEELRRQRDRLEEEQEDAVQDGARVRRELERSHRQLEQLEGKRSVLAKELVEVREALSRATLQRDMLQAEKAEVAEALTKAEAGRVELELSMTKLRAEEASLQDSLSKLSALNESLAQDKLDLNRLVAQLEEEKSALQGRQRQAEQEATVAREEQERLEELRLEQEVARQGLEGSLRVAEQAQEALEQQLPTLRHERSQLQEQLAQEAAWRELEAERAQLQSQLQREQEELLARLEAEKEELSEEIAALQQERDEGLLLAESEKQQALSLKESEKTALSEKLMGTRHSLATISLEMERQKRDAQSRQEQDRV

SEQ ID NO: 97956 - protein, 172 aa, Homo sapiens
MKKLQETNYDVMLIDPVIPCGDLMAELLAVPFVLTLRISVGGNMERSCGKLPAPLSYVPVPMTGLTDRMTFLERVKNSMLSVLFHFWIQDYDYHFWEEFYSKALGRPTTLCETVGKAEIWLIRTYWDFEFPQPYQPNFEFVGGLHCKPAKALPKESYTRKPSSLKPWHLYLK

SEQ ID NO: 97957 - protein, 136 aa, Homo sapiens
  MOD_RES (1)..(1): Any amino acid
XSLARPSFSLVEDTTLEPEEPPTKYQISQPEVYVAAPGESLEVRCLLKDAAVISWTKDGVHLGPNNRTVLIGEYLQIKGATPRDSGLYACTASRTVDSETWYFMVNVTDAISSGDDEDDTDGAEDFVSENSNNKSK

SEQ ID NO: 97958 - protein, 100 aa, Homo sapiens
MTSAAPAKKPYRKAPPEHRELRLEIPGSRLEQEEPLTDAERMKLLQEENEELRRRLASATRRTEALERELEIGQDCLELELGQSREELDKFKDKFRRLQN

SEQ ID NO: 97959 - protein, 146 aa, Homo sapiens
MSTTTCQVVAFLLSILGLAGCIAATGMDMWSTQDLYDNPVTSVFQYEGLWRSCVRQSSGFTECRPYFTILGLPAMLQAVRALMIVGIVLGAIGLLVSIFALKCIRIGSMEDSAKANMTLTSGIMFIVSGTHLVRLCSWAGSLEASH

SEQ ID NO: 97960 - protein, 229 aa, Homo sapiens
MTAEFLSLLCLGLCLGYEDEKKNEKPPKPSLHAWPSSVVEAESNVTLKCQAHSQNVTFVLRKVNDSGYKQEQSSAENEAEFPFTDLKPKDAGRYFCAYKTTASHEWSESSEHLQLVVTGSLPEPLLSVNVDPGMTPGLRTLRCLTPYNGTECIVIALLKMGIPEPLQVRQVRKNQTDFMLWNVTSNDSGNYSCVYYLSNSSHLASFPSNKLEIWVTDKHDELEAPSMKT

SEQ ID NO: 97961 - protein, 133 aa, Homo sapiens
MPYVDRQNRICGFLDIEENENSGKFLRRYFILDTREDSFVWYMDNPQNLPSGSSRVGAIKLTYISKVSDATKLRPKAEFCFVMNAGMRKYFLQANDQQDLVEWVNVLNKAIKITVPKQSDSQPNSDNLSRHGE

SEQ ID NO: 97962 - protein, 42 aa, Homo sapiens
MAANCTSSWSLGESCNRPGLELPRSMASSETQLGNHDVDPEI

SEQ ID NO: 97963 - protein, 61 aa, Homo sapiens
MAGPGWTLLLLLLLLLLLGSMAGYGPQKKLNLSHKPRAPSTDLPEPRQSGFVPETSQETQV

SEQ ID NO: 97964 - protein, 126 aa, Homo sapiens
AEEQPVEPDGPLPGSDNNQEKKVRLSPAKMSTKNSTDLVEYVDKSHAFLPIIPNTQRGQLEDRLNNQARTIAFLLEQAFRIKEDISACLQGTHGFRKEESLARKLLESHIQTITSIVKKLSQNIEM

SEQ ID NO: 97965 - protein, 62 aa, Homo sapiens
MAARDATSGSLSEESSALDLPSACDIRDYVLQGPSQEANSEAFSSLEFHSFPYSSDVDPADL

SEQ ID NO: 97966 - protein, 668 aa, Homo sapiens
MAVYRAALGASLAAARLLPLGRCSPSPAPRSTLSGAAMEPAPRWLAGLRFDNRALRALPVEAPPPGPEGAPSAPRPVPGACFTRVQPTPLRQPRLVALSEPALALLGLGAPPAREAEAEAALFFSGNALLPGAEPAAHCYCGHQFGQFAGQLGDGAAMYLGEVCTATGERWELQLKGAGPTPFSRQADGRKVLRSSIREFLCSEAMFHLGVPTTRAGACVTSESTVVRDVFYDGNPKYEQCTVVLRVASTFIRFGSFEIFKSADEHTGRAGPSVGRNDIRVQLLDYVISSFYPEIQAAHASDSVQRNAAFFREVTRRTARMVAEWQCVGFCHGVLNTDNMSILGLTIDYGPFGFLDRYDPDHVCNASDNTGRYAYSKQPEVCRWNLRKLAEALQPELPLELGEAILAEEFDAEFQRHYLQKMRRKLGLVQVELEEDGALVSKLLETMHLTGADFTNTFYLLSSFPVELESPGLAEFLARLMEQCASLEELRLAFRPQMDPRQLSMMLMLAQSNPQLFALMGTRAGIARELERVEQQSRLEQLSAAELQSRNQGHWADWLQAYRARLDKDLEGAGDAAAWQAEHVRVMHANNPKYVLRNYIAQNAIEAAERGDFSEVRRVLKLLETPYHCEAGAATDAEATEADGADGRQRSYSSKPPLWAAELCVTSS

SEQ ID NO: 97967 - protein, 195 aa, Homo sapiens
  MOD_RES (1)..(1): Any amino acid
XAGPAFLRGVSSEGAVDTDCPAVLLLLNPQHGEPSLQRVPVAKMVCGPSGSQLVLLKLERSVTLNQRVALICLPPEWYVVPPGTKCEIAGWGETKGTGNDTVLNVALLNVISNQECNIKHRGRVRESEMCTEGLLAPVGACEGDYGGPLACFTHNCWVLEGIIIPNRVCARSRWPAVFTRVSVFVDWIHKVMRLG

SEQ ID NO: 97968 - protein, 1612 aa, Homo sapiens
MRKRWACWSGSDAPGGCGGGCGRRRRRSRRKRAASEERRMAFSKGFRIYHKLDPPPFSLIVETRHKEECLMFESGAVAVLSSAEKEAIKGTYSKVLDAYGLLGVLRLNLGDTMLHYLVLVTGCMSVGKIQESEVFRVTSTEFISLRIDSSDEDRISEVRKVLNSGNFYFAWSASGISLDLSLNAHRSMQEQTTDNRFFWNQSLHLHLKHYGVNCDDWLLRLMCGGVEIRTIYAAHKQAKACLISRLSCERAGTRFNVRGTNDDGHVANFVETEQVVYLDDSVSSFIQIRGSVPLFWEQPGLQVGSHRVRMSRGFEANAPAFDRHFRTLKNLYGKQIIVNLLGSKEGEHMLSKAFQSHLKASEHAADIQMVNFDYHQMVKGGKAEKLHSVLKPQVQKFLDYGFFYFNGSEVQRCQSGTVRTNCLDCLDRTNSVQAFLGLEMLAKQLEALGLAEKPQLVTRFQEVFRSMWSVNGDSISKIYAGTGALEGKAKLKDGARSVTRTIQNNFFDSSKQEAIDVLLLGNTLNSDLADKARALLTTGSLRVSEQTLQSASSKVLKSMCENFYKYSKPKKIRVCVGTWNVNGGKQFRSIAFKNQTLTDWLLDAPKLAGIQEFQDKRSKPTDIFAIGFEEMVELNAGNIVSASTTNQKLWAVELQKTISRDNKYVLLASEQLVGVCLFVFIRPQHAPFIRDVAVDTVKTGMGGATGNKGAVAIRMLFHTTSLCFVCSHFAAGQSQVKERNEDFIEIARKLSFPMGRMLFSHDYVFWCGDFNYRIDLPNEEVKELIRQQNWDSLIAGDQLINQKNAGQVFRGFLEGKVTFAPTYKYDLFSDDYDTSEKCRTPAWTDRVLWRRRKWPFDRSAEDLDLLNASFQDESKILYTWTPGTLLHYGRAELKTSDHRPVVALIDIDIFEVEAEERQNIYKEVIAVQGPPDGTVLVSIKSSLPENNFFDDALIDELLQQFASFGEVILIRFVEDKMWVTFLEGSSALNVLSLNGKELLNRTITIALKSPDWIKNLEEEMSLEKISIALPSSTSSTLLGEDAEVAADFDMEGDVDDYSAEVEELLPQHLQPSSSSGLGTSPSSSPRTSPCQSPTISEGPVPSLPIRPSRAPSRTPGPPSAQSSPIDAQPATPLPQKDPAQPLEPKRPPPPRPVAPPTRPAPPQRPPPPSGARSPAPTRKEFGGIGAPPSPGVARREMEAPKSPGTTRKDNIGRSQPSPQAGLAGPGPAGYSTARPTIPPRAGVISAPQSHARASAGRLTPESQSKTSETSKGSTFLPEPLKPQAAFPPQSSLPPPAQRLQEPLVPVAAPMPQSGPQPNLETPPQPPPRSRSSHSLPSEASSQPQVKTNGISDGKRESPLKIDPFEDLSFNLLAVSKAQLSVQTSPVPTPDPKRLIQLPSATQSNVLSSVSCMPTMPPIPARSQSQENMRSSPNPFITGLTRTNPFSDRTAAPGNPFRAKSEESEATSWFSKEEPVTISPFPSLQPLGHNKSRASSSLDGFKDSFDLQGQSTLKISNPKGWVTFEEEEDFGVKGKSKSACSDLLGNQPSSFSGSNLTLNDDWNKGTNVSFCVLPSRRPPPPPVPLLPPGTSPPVDPFTTLASKASPTLDFTER

SEQ ID NO: 97969 - protein, 1194 aa, Homo sapiens
MTKKEEPPPSRVPRAVRVASLLSEGEELSGDDQGDEEEDDHAYEGVPNGGWHTSSLSLSLPSTIAAPHPMDGPPGGSTPVTPVIKAGWLDKNPPQGSYIYQKRWVRLDTDHLRYFDSNKDAYSKRFISVACISHVAAIGDQKFEVITNNRTFAFRAESDVERKEWMQALQQAMAEQRARARLSSAYLLGVPGSEQPDRAGSLELRGFKNKLYVAVVGDKVQLYKNLEEYHLGIGITFIDMSVGNVKEVDRRSFDLTTPYRIFSFSADSELEKEQWLEAMQGAIAEALSTSEVAERIWAAAPNRFCADCGAPQPDWASINLCVVICKRCAGEHRGLGAGVSKVRSLKMDRKVWTETLIELFLQLGNGAGNRFWAANVPPSEALQPSSSPSTRRCHLEAKYREGKYRRYHPLFGNQEELDKALCAAVTTTDLAETQALLGCGAGINCFSGDPEAPTPLALAEQAGQTLQMEFLRNNRTTEVPRLDSMKPLEKHYSVVLPTVSHSGFLYKTASAGKLLQDRRAREEFSRRWCVLGDGVLSYFENERAVTPNGEIRASEIVCLAVPPPDTHGFEHTFEVYTEGERLYLFGLESAEQAHEWVKCIAKAFVPPLAEDLLARDFERLGRLPYKAGLSLQRAQEGWFSLSGSELRAVFPEGPCEEPLQLRKLQELSIQGDSENQVLVLVERRRTLYIQGERRLDFMGWLGAIQKAAASMGDTLSEQQLGDSDIPVIVYRCVDYITQCGLTSEGIYRKCGQTSKTQRLLESLRQDARSVHLKEGEQHVDDVSSALKRFLRDLPDGLFTRAQRLTWLEASEIEDEEEKVSRYRELLVRLPPVNRATVKALISHLYCVQCFSDTNQMNVHNLAIVFGPTLFQTDGQDYKAGRVVEDLINHYVVVFSVDEEELRKQREEITAIVKMRVAGTASGTQHAGDFICTVYLEEKKAETEQHIKVPASMTAEELTLEILDRRNVGIREKDYWTCFEVNEREEAERPLHFAEKVLPILHGLGTDSHLVVKKHQAMEAMLLYLASRVGDTKHGMMKFREDRSLLGLGLPSGGFHDRYFILNSSCLRLYKEVRSHRPEKEWPIKSLKVYLGVKKKLRPPTCWGFTVVHETEKHEKQQWYLCCDTQMELREWFATFLFVQHDGLVWPSEPSRVSRAVPEVRLGSVSLIPLRGSENEMRRSVAAFTADPLSLLRNV

SEQ ID NO: 97970 - protein, 194 aa, Homo sapiens
MTQQPLRGVTSLRFNQDQSCFCCAMETGVRIYNVEPLMEKGHLDHEQVGSMGLVEMLHRSNLLALVGGGSSPKFSEISGLPLTLNLGPDNPPTCPAVLIWDDAREGKDSKEKLVLEFTFTKPVLSVRMRHDKIVIVLKNRIYVYSFPDNPRKLFEFDTRDNPKGLCDLCPSLEKQLLVFPGHKCGSLQLVDLAS

SEQ ID NO: 97971 - protein, 559 aa, Homo sapiens
MAAALRVAAVGARLSVLASGLRAAVRSLCSQATSVNERIENKRRTALLGGGQRRIDAQHKRGKLTARERISLLLDPGSFVESDMFVEHRCADFGMAADKNKFPGDSVVTGRGRINGRLVYVFSQDFTVFGGSLSGAHAQKICKIMDQAITVGAPVIGLNDSGGARIQEGVESLAGYADIFLRNVTASGVIPQISLIMGPCAGGAVYSPALTDFTFMVKDTSYLFITGPDVVKSVTNEDVTQEELGGAKTHTTMSGVAHRAFENDVDALCNLRDFFNYLPLSSQDPAPVRECHDPSDRLVPELDTIVPLESTKAYNMVDIIHSVVDEREFFEIMPNYAKNIIVGFARMNGRTVGIVGNQPKVASDSISFTPWNYARRQYRPYFAGCLDINSSVKGARFVRFCDAFNIPLITFVDVPGFLPGTAQEYGGIIRHGAKLLYAFAEATVPKVTVITRKAYGGAYDVMSSKHLCGDTNYAWPTAEIAVMGAKGAVEIIFKGHENVEAAQAEYIEKFANPFPAAVRGFVDDIIQPSSTRARICCDLDVLASKKVQRPWRKHANIPL

SEQ ID NO: 97972 - protein, 113 aa, Homo sapiens
MIRYILQRRRMIHLRNWIVLKERKSITEKGNFKALVVRFLTKRFIWEYDPTLESTYRHQATIDDEVVSMEILDTAGQEDTIQREGHMRWGEGFVLVYDITDRGSFEEVLPLKN

SEQ ID NO: 97973 - protein, 113 aa, Homo sapiens
MNTDSGGCARKRAAMSVTLTSVKRVQSSPNLLAAGRDSQSPDSAWRSYNDGNQETLNGDATYSSLAAKGFRSVRPNLQDKRSPTQSQITVNGNSGGAVSPMSYYQRPFSPSAY

SEQ ID NO: 97974 - protein, 198 aa, Homo sapiens
MASRGARQRLKGSGASSGDTAPAADKLRELLGSREAGGAEHRTELSGNKAGQVWAPEGSTAFKCLLSARLCAALLSNISDCDETFNYWEPTHYLIYGEGFQTWEYSPAYAIRSYAYLLLHAWPAAFHARILQTNKILVFYFLRCLLAFVSCICELYFYKAVCKKFGLHVSRMMLAFLVLSTGMFCSSSVYPLPLICWS

SEQ ID NO: 97975 - protein, 81 aa, Homo sapiens
MGRHKPHLALKQVEQCLKRLKNMNLEGSIQDLFELFSSNENQPLTTKVCVVPSQPVVELVLMKVLGACKLLLRLLDCCCKT

SEQ ID NO: 97976 - protein, 194 aa, Homo sapiens
MKSRIPVVLLACGSFNPITNMHLRMFEVARDHLHQTEYEEKDHEVALVFPGPQSISIKDISFHLQKRIQNNVSSKNDDPDKSSFKRKRTEEQAFCDLNDSKCKGTTLKKIIFIDSTWNQTNKIFTDERLQGMYQVIQGIISPVNDTYGKKDLAASHHRVAMARLALQTSDWIRVDPWESEQAQWMETVKVLSCA

SEQ ID NO: 97977 - protein, 27 aa, Homo sapiens
  MOD_RES (1)..(1): Any amino acid
XENIQLPHTLLSRLAVAGEWFLHTLDS

SEQ ID NO: 97978 - protein, 560 aa, Homo sapiens
MESQPAQECLMQMFLPIEPACFVEWLGTSPSQLGVVMVDEAHERTLHTDILFGLIKDVARFRPELKVLVASATMDTARFSTFFDGAPVFRIPGRRFPVDIFYTKAPEADYLEACVVSVLQIHVTQPPGDILVFLTGQEEIEAACEMLQDRCRRLGSKIRELLVLPIYANLPSDMQARIFQPTPPGARKVVVATNIAETSLTIEGIIYVLDPGFCKQKSYNPRTGMESLTVTPCSKASANQRAGRAGRVAAGKCFRLYTAWAYQHELEETTVPEIQRTSLGNVVLLLKSLGIHDLMHFDFLDPPPYETLLLALEQLYALGALNHLGELTTSGRKMAELPVDPMLSKMILASEKYSCSEEILTVAAMLSVNNSIFYRPKDKVVHADNARVNFFLPGGDHLVLLNVYTQWAESGYSSQWCYENFVQFRSMRRARDVREQLEGLLERVEVGLSSCQGDYIRVRKAITAGYFYHTARLTRSGYRTVKQQQTVFIHPNSSLFEQQPRWLLYHELVLTTKEFMRQVLEIESSWLLEVAPHYYKAKELEDPHAKKMPKKIGKTREELG

SEQ ID NO: 97979 - protein, 981 aa, Homo sapiens
MFRQFYLWTCLASGIILGSLFEICLGQYDDDCKLARGGPPATIVAIDEESRNGTILVDNMLIKGTAGGPDPTIELSLKDNVDYWVLMDPVKQMLFLNSTGRVLDRDPPMNIHSIVVQVQCINKKVGTIIYHEVRIVVRDRNDNSPTFKHESYYATVNELTPVGTTIFTGFSGDNGATDIDDGPNGQIEYVIQYNPDDPTSNDTFEIPLMLTGNIVLRKRLNYEDKTRYFVIIQANDRAQNLNERRTTTTTLTVDVLDGDDLGPMFLPCVLVPNTRDCRPLTYQAAIPELRTPEELNPIIVTPPIQAIDQDRNIQPPSDRPGILYSILVGTPEDYPRFFHMHPRTAELSLLEPVNRDFHQKFDLVIKAEQDNGHPLPAFAGLHIEILDENNQSPYFTMPSYQGYILESAPVGATISDSLNLTSPLRIVALDKDIEDTKDPELHLFLNDYTSVFTVTQTGITRYLTLLQPVDREEQQTYTFSITAFDGVQESEPVIVNIQVMDANDNTPTFPEISYDVYVYTDMRPGDSVIQLTAVDADEGSNGEITYEILVGAQGDFIINKTTGLITIAPGVEMIVGRTYALTVQAADNAPPAERRNSICTVYIEVLPPNNQSPPRFPQLMYSLEISEAMRVGAVLLNLQATDREGDSITYAIENGDPQRVFNLSETTGILTLGKALDRESTDRYILIITASDGRPDGEEPKKIKKPKVEIREPSEEEEVVVTIEKPPAAEPTYTTWKRARIFPMIFKKVRGLADKRGIVDLEGEEWQRRLEEEDKDYLKLTLDQEEATESTVESEEESSSDYTEYSEEESEFSESETTEEESESETPSEEEESSTPESEESESTESEGEKARKNIVLARRRPMVEEVKEVKGRKEEPQEEQKEPKMEEEEHSEEEESGPAPVEESTDPEAQDIPEEGSAESASVEGGVESEEESESGSSSSSSESQSGGPWGYQVPAYDRSKNANQKKSPGANSEGYNTAL

SEQ ID NO: 97980 - protein, 112 aa, Homo sapiens
  MOD_RES (1)..(1): Any amino acid
XSIVNILGQEQFMAVYLSAGVISNFVSYVGKVATGRYGPSLGAALKAIIAMDTAGMILGWKFFDHAAHLGGALFGIWYVTYGHELIWKNREPLVKIWHEIRTNGPKKGGGSK

SEQ ID NO: 97981 - protein, 522 aa, Homo sapiens
MASRCWRWWGWSAWPRTRLPPAGSTPTFGGSDEVRDPANAKALRNKRRRMQVRVKLGKFQLLLDIQEKTPQICVVGSGPAGFYTAQHLLKHPQAHVDIYEKQPVPFGLVRFGVAPDHPEVKNVINTFTQTAHSGRCAFWGNVEVGRDVTVPELQEAYHAVVLSYGAEDHRALEIPGEELPGVCSARAFVGWYNGLPENQELEPDLSCDTAVILGQGNVALDVARILLTPPEHLERTDITKAALGVLRQSRVKTVWLVGRRGPLQVAFTIKELREMIQLPGARPILDPVDFLGLQDKIKEVPRPRKRLTELLLRTATEKPGPAEAARQASASRAWGLRFFRSPQQVLPSPDGRRAAGVRLAVTRLEGVDEATRAVPTGDMEDLPCGLVLSSIGYKSRPVDPSVPFDSKLGVIPNVEGRVMDVPGLYCSGWVKRGPTGVIATTMTDSFLTGQMLLQDLKAGLLPSGPRPGYAAIQALLSSRGVRPVSFSDWEKLDAEEVARGQGTGKPREKLVDPQEMLRLLGH

SEQ ID NO: 97982 - protein, 71 aa, Homo sapiens
MSLPSRQTAIIVNPPPPEYINTKKNGRLTNQLQYLQKVVLKDLWKHSFSWPFQRPVDAVKLQLPDYYTIIK

SEQ ID NO: 97983 - protein, 179 aa, Homo sapiens
SRPPDSYSGLGRAGATAAASEIKREEKEDEENTSAADHSEEEKKELKAPRARTSPDEDEDDLLPPEQKAEREKERRVANNARERLRVRDINEAFKELGRMCQLHLNSEKPQTKLLILHQAVSVILNLEQQVRERNLNPKAACLKRREEEKVSGVVGDPQMVLSAPHPGLSEAHNPAGHM

SEQ ID NO: 97984 - protein, 181 aa, Homo sapiens
NEARLRIVKTLEDIDLGPTEKCVRVNSVSSGLAEEDLETLLQSRVLPSSLMLPKVESPEEIQWFADKFSFHLKGRKLEQPMNLIPFVETAMGLLNFKAVCEETLKVGPQVGLFLDAVVFGGEDFRASIGVKDISLSLFLCVCVYMCVYIFSLPLKDGHLHNNVYLPTMTMVFHDNGMDTTS

SEQ ID NO: 97985 - protein, 24 aa, Homo sapiens
MSVSRTMEDSCELDLVYVTERIIA

SEQ ID NO: 97986 - protein, 301 aa, Homo sapiens
MGVWLNKDDYIRDLKRIILCFLIVYMAILVGTDQDFYSLLGVSKTASSREIRQAFKKLALKLHPDKNPNNPNAHGDFLKINRAYEVLKDEDLRKKYDKYGEKGLEDNQGGQYESWNYYRYDFGIYDDDPEIITLERREFDAAVNSGELWFVNFYSPGCSHCHDLAPTWRDFAKEVDGLLRIGAVNCGDDRMLCRMKGVNSYPSLFIFRSGMAPVKYHGDRSKESLVSFAMQHVRSTVTELWTGNFVNSIQTAFAAGIGWLITFCSKGGDCLTSQTRLRLSGMLVNIFHQLWKPVSWMVLLM

SEQ ID NO: 97987 - protein, 39 aa, Homo sapiens
MWPLAFGSGMGLGMAYSNCQHDFQAPYLLHGKYVKEQEQ

SEQ ID NO: 97988 - protein, 1390 aa, Homo sapiens
MKDSNRCCCGQFTNQHIPPLPSATPSKNEEESKQVETQPEKWSVAKHTQSYPTDSYGVLEFQGGGYSNKAMYIRVSYDTKPDSLLHLMVKDWQLELPKLLISVHGGLQNFEMQPKLKQVFGKGLIKAAMTTGAWIFTGGVSTGVISHVGDALKDHSSKSRGRVCAIGIAPWGIVENKEDLVGKDVTRVYQTMSNPLSKLSVLNNSHTHFILADNGTLGKYGAEVKLRRLLEKHISLQKINTRLGQGVPLVGLVVEGGPNVVSIVLEYLQEEPPIPVVICDGSGRASDILSFAHKYCEEGGIINESLREQLLVTIQKTFNYNKAQSHQLFAIIMECMKKKELVTVFRMGSEGQQDIEMAILTALLKGTNVSAPDQLSLALAWNRVDIARSQIFVFGPHWPPLGSLAPPTDSKATEKEKKPPMATTKGGRGKGKGKKKGKVKEEVEEETDPRKIELLNWVNALEQAMLDALVLDRVDFVKLLIENGVNMQHFLTIPRLEELYNTRLGPPNTLHLLVRDVKKSNLPPDYHISLIDIGLVLEYLMGGAYRCNYTRKNFRTLYNNLFGPKRPKALKLLGMEDDEPPAKGKKKKKKKKEEEIDIDVDDPAVSRFQYPFHELMVWAVLMKRQKMAVFLWQRGEESMAKALVACKLYKAMAHESSESDLVDDISQDLDNNSKDFGQLALELLDQSYKHDEQIAMKLLTYELKNWSNSTCLKLAVAAKHRDFIAHTCSQMLLTDMWMGRLRMRKNPGLKVIMGILLPPTILFLEFRTYDDFSYQTSKENEDGKEKEEENTDANADAGSRKGDEENEHKKQRSIPIGTKICEFYNAPIVKFWFYTISYLGYLLLFNYVILVRMDGWPSLQEWIVISYIVSLALEKIREILMSEPGKLSQKIKVWLQEYWNITDLVAISTFMIGAILRLQNQPYMGYGRVIYCVDIIFWYIRVLDIFGVNKYLGPYVMMIGKMMIDMLYFVVIMLVVLMSFGVARQAILHPEEKPSWKLARNIFYMPYWMIYGEVFADQIDLYAMEINPPCGENLYDEEGKRLPPCIPGAWLTPALMACYLLVANILLVNLLIAVFNNTFFEVKSISNQVWKFQRYQLIMTFHDRPVLPPPMIILSHIYIIIMRLSGRCRKKREGDQEERDRGLKLFLSDEELKRLHEFEEQCVQEHFREKEDEQQSSSDERIRVTSERVENMSMRLEEINERETFMKTSLQTVDLRLAQLEELSNRMVNALENLAGIDRSDLIQARSRASSECEATYLLRQSSINSADGYSLYRYHFNGEELLFEDTSLSTSPGTGVRKKTCSFRIKEEKDVKTHLVPECQNSLHLSLGTSTSATPDGSHLAVDDLKNAEESKLGPDIGISKEDDERQTDSKKEETISPSLNKTDVIHGQ

SEQ ID NO: 97989 - protein, 38 aa, Homo sapiens
  MOD_RES (1)..(1): Any amino acid
XPGPEPRIGALGVKVFRSRIACLPGSSFLFGSGPFPSG

SEQ ID NO: 97990 - protein, 160 aa, Homo sapiens
MFEELKSRLDTLAQEVALLKEQQALQTVCLKGTKVHMKCFLAFTQTKTFHEASEDCISRGGTLGTPQTGSENDALYEYLRQSVGNEAEIWLGLNDMAAEGTWVDMTGARIAYKNWETEITAQPDGGKTENCAVLSGAANGKWFDKRCRDQLPYICQFGIV

SEQ ID NO: 97991 - protein, 242 aa, Homo sapiens
  MOD_RES (1)..(1): Any amino acid
XIPSQSTRHSTVATECLSKNTEENLLSLKNSLNDCSNQVILAKASQEHHLSEETKCSASLFSSQCSELEDLTANTNTQDPFLIGSSKQMRHQSESQGVGLSDKELVSDDEERGTGLEENNQEEQSMDSNLGEAASGCESETSVSEDCSGLSSQSDILTTQQRDTMQHNLIKLQQEMAELEAVLEQHGSQPSNSYPSIISDSSALEDLRNPEQSTSEKVLTSQKSSEYPISQNPEGLSADKFE

SEQ ID NO: 97992 - protein, 40 aa, Homo sapiens
MAEVEETLKRIQSHKGVIGTMVVNAEDKEYLLIVIQNPCE

SEQ ID NO: 97993 - protein, 45 aa, Homo sapiens
MMRNKDKSQEEDSSLHSNASRYELSTFFLFVFFFGGETSAYNCLP

SEQ ID NO: 97994 - protein, 485 aa, Homo sapiens
MGSGARFPSGTLRVRWLLLLGLVGPVLGAARPGFQQTSHLSSYEIITPWRLTRERREAPRPYSKQVSYVIQAEGKEHIIHLERNKDLLPEDFVVYTYNKEGTLITDHPNIQNHCHYRGYVEGVHNSSIALSDCFGLRGLLHLENASYGIEPLQNSSHFEHIIYRMDDVYKEPLKCGVSNKDIEKETAKDEEEEPPSMTQLLRRRRAVLPQTRYVELFIVVDKERYDMMGRNQTAVREEMILLANYLDSMYIMLNIRIVLVGLEIWTNGNLINIVGGAGDVLGNFVQWREKFLITRRRHDSAQLVLKKGFGGTAGMAFVGTVCSRSHAGGINVFGQITVETFASIVAHELGHNLGMNHDDGRDCSCGAKSCIMNSGASNVNWTLAAKEVPVSLNHLLSVHMVTVVKTVGSFQEVLYAEEKPVSVMFQSTAMVLLSSVSQMFLFRMDILARITKPIATTACASIMMLNVKSSLAQKPRLPPKIVSLK

SEQ ID NO: 97995 - protein, 72 aa, Homo sapiens
LLHTLEGHAMPIRSLTFSPDSQLLVTASDDGYIKIYDVCRFLLLSSPTPHASASSLLGAGKLTKHGKLQQCS

SEQ ID NO: 97996 - protein, 51 aa, Homo sapiens
GKYQHKNLLILYDAIGTLADSVGHHLNQPGRGRDLDRQTDRPGPALALLPV

SEQ ID NO: 97997 - protein, 205 aa, Homo sapiens
MIVRLPQPCGTVSEKISSEVFSRNCAGGGSLRRKRKAGILEMVIFQLFHIHRSVSHGQQGLPVRSVDFNRGTDNITVRQGDTAILRCVVEDKNSKVAWLNRSGIIFAGHDKWSLDPRVELEKRHSLEYSLRIQKVDVYDEGSYTCSVQTQHEPKTSQVYLIVQVPPKISNISSDVTVNEGSNVTLVCMANGRPEPVITWRHLTPT

SEQ ID NO: 97998 - protein, 957 aa, Homo sapiens
MSLKPQQQQQQQQQQQQQQQQQQQQQQQPPPAAANVRKPGGSGLLASPAAAPSPSSSSVSSSSATAPSSVVAATSGGGRPGLGRGRNSNKGLPQSTISFDGIYANMRMVHILTSVVGSKCEVQVKNGGIYEGVFKTYSPKCDLVLDAAHEKSTESSSGPKREEIMESILFKCSDFVVVQFKDMDSSYAKRDAFTDSAISAKVNGEHKEKDLEPWDAGELTANEELEALENDVSNGWDPNDMFRYNEENYGVVSTYDSSLSSYTVPLERDNSEEFLKREARANQLAEEIESSAQYKARVALENDDRSEEEKYTAVQRNSSEREGHSINTRENKYIPPGQRNREVISWGSGRQNSPRMGQPGSGSMPSRSTSHTSDFNPNSGSDQRVVNGGVPWPSPCPSPSSRPPSRYQSGPNSLPPRAATPTRPPSRPPSRPSRPPSHPSAHGSPAPVSTMPKRMSSEGPPRMSPKAQRHPRNHRVSAGRGSISSGLEFVSHNPPSEAATPPVARTSPSGGTWSSVVSGVPRLSPKTHRPRSPRQNSIGNTPSGPVLASPQAGIIPTEAVAMPIPAASPTPASPASNRAVTPSSEAKDSRLQDQRQNSPAGNKENIKPNETSPSFSKAENKGISPVVSEHRKQIDDLKKFKNDFRLQPSSTSESMDQLLNKNREGEKSRDLIKDKIEPSAKDSFIENSSSNCTSGSSKPNSPSISPSILSNTEHKRGPEVTSQGVQTSSPACKQEKDDKEEKKDAAEQVRKSTLNPNAKEFNPRSFSQPKPSTTPTSPRPQAQPSPSMVGHQQPTPVYTQPVCFAPNMMYPVPVSPGVQPLYPIPMTPMPVNQAKTYRAVPNMPQQRQDQHHQSAMMHPASAAGPPIAATPPAYSTQYVAYSPQQFPNQPLVQHVPHYQSQHPHVYSPVIQGNARMMAPPTHAQPGLVSSSATQYGAHEQTHAMYGRKHFVCLFQCV

SEQ ID NO: 97999 - protein, 89 aa, Homo sapiens
RHCHERNLAVNPQGGNTGMVGGSVPVFDEIILSTARMNRVLSFHSVSGCPGFAEVLQTFSTCKGMLGEILSAFEFMDAVCMQLVGRHLH
